United States Patent Application Publication US 2026/0103690 A1 - sequence listing, part 24

SEQ ID NO: 105870 - protein, 380 aa, unidentified
MQLPTNIENVCCVALELSKSSWVVAFSPPTDGGRSSLHQIDAKDINRLTSFFERARSKAERQASRPLEIVVCYEVGYDGFWLARLLIARGIRTIVFDPASFLMPRKGRRAKTDRLDAEGMTRTLRVWLSGDREVAHDVKIPSVEEEDAKRIERERKHLVEQRTSIVARIKGLLALHGIHLSGKRIGKGLQECLDDIETGDGRKLAPFLHRDIERMLRHYEFICNQIKEVEADRKSALADESGKFPHREKVHRLLKLGAVGETTATVLVAEVYHRTFETRRHVASFVGLAPSPYASGETSRNRGISKAGTKLARQTLVELAWFWLRYQPNSKLSLWWHERFGGMGMRGRKVGIVALARKLVIALWRFVEEGVIPEGATLKV

SEQ ID NO: 105871 - protein, 402 aa, unidentified
MISVGIDVSKEKSTVCILKPYGEVVCKPFELQHNKKSLESLDELLRRLDGEVKIVMEATGIYILPILTFLDEKGYFVSVINPCVMKKYARNNNFRNVKTDKMDSITIANYGIEKWFKLKRYEASESTYAELKLLGRRYRHYMEMHIQALLELTHVLDYVMPGIKNLFNSWTESNNRDKLSDFVERFWHYDLITSMSCEEFVKAYNEWASEKKYHQSESKAIQVYELASNGIPTLSSNLPSTKMLVLEAIKTLRAVDDSLYIILSRMKELAKSLPEYSTVRAMGGVGDVLAPKLIAEIGDVRRLHSAKALIAWAGIDPPPYESGQFVGSNRKISKKGSATLRKTGYEVMRVLKSHQAPKDCTVYNYILKKEAEGKSKKQAKIAGLNKFLRIYYARVMEVYQAA

SEQ ID NO: 105872 - protein, 422 aa, unidentified
MVLKGVPMALKIVYQICCGIDVHKTFVVACIASTNKQGVTTYKRHRFSTFTQGLKELLQWLLDNHCKDVCMESTGKYWIPIYNVLEKDCNIVLAHPKYVKAIRGKKTDKKDAKWIADLFKHDLVAGSFMPPADIRQLRDLMRYRFKLTCFMSSEKNRLQNCLTVSNIQLASVVSDTFGKSSQRILDKILENPDDTSFVIEPLIHGSMKKKLPELELAIDGFITPEQAGKLKVIKKHFEDLESRKAELEKLILALASPYQQELDLILTAPSFKNKFTAIGIISEIGVNMEAFPSAKHLCSWAGLTPTNNESAGKKKSVRVSKAGCYIKPLLVQCANSVVKSEKHPEIRNRYLRLRKRRGHKKAIIAIARMLLTALYNMLKNKEPYNAELYRKSDVLPVNREITIEQAILMAQFQGYKIKSAAE

SEQ ID NO: 105873 - protein, 488 aa, unidentified
MSPKPSNQSEARPATASGQRPQATKPRPSVDDPGLRIAHPHAAGIDVHSREHWVCVPAHSAPPRPQGHPENLPANVRAFPTCTPDLEQLADWLFACGVTTIAMEATGVYWIALFELLERRGFAVILVDPRQTRQVSGRPQSDVLSCQWIQRLHSYGLLSASFRPDDETCVLRSYLRQRQSLIADAGRAAQHMQKALEQMNVKLTETISDITGVTGMLILKAIVRGTRDPRELAKYRNEHCKCTPEQLARALQGNWRDEHLFALRQALKTYEHLRRQLAECDRCIQDYLKARADKSGGAKLPHKVTRRSTKATEPKFDARALLFRWSGQDLTVIEGIDQSTALNVLAEIGIDTSKWPTENHFVSWLGLCPQHRGSAGKIKNRRLRGGANRAARAFRMAGQGCHHAKNALGAFYRRVQARAGGGKAVIATARKIACRVYRLLKYGAKYVRQEMEAYEAQFRIKTTKGLARKAASLGYKLVPVAAGEAQPT

SEQ ID NO: 105874 - protein, 453 aa, unidentified
MSEPSNESKGTSLEIVHPNAAGIDIGNAAHYVAVPPDRDPQAVRRFECFTEDLKKMADWLIQCGIDTVAMQSTGVYWLPAYEILTERGLRVFLVNAAHTKNLPGRKSDVQECQWLMKLHTYGLLSNSFRPTEEICVLRTYWRQRDAQVKAASMTIQRMQKVLTEMNVQIANVISDISGVTGMAILDAILQGERDRYKLAELAHPRIQASKEEIAKSLEGNWRSELVFVLRQERDIYREYQKKIGECDEAIQAHLKTMEDKAEPGSKPGTPKAGKRAGGNAPRFDLRGELYRISGIDLTRIDGINIMVAQTILAEVGLDMSKWPTEAHFASWLGLCPNHQITGGKVYHRGSRHVENRAATAFRMAATSLWRSKTYLGAKFKRLRAQLGAPKAITAMAHNLARLVYRMLRYGKEYVDKGMEFYQQRYQQQQIKWIEKKARDLGLVITLAPAGTVN

SEQ ID NO: 105875 - protein, 316 aa, unidentified
MSNVLTVGIDVAKDSFDVASEPAGLNLSLPNSPAGRQKLLDSLQNRCIALIVLEATGGYERNLVADLLQGGFNVVIANPRQVRDFARGIGRLAKTDRIDAMVLARFGHLVQPKPRPSANKQAANLAELVTRRKQLSGLLTQESNRLPMARFAGVRKSLKKVIRTLEQQIIDLDKLIRDNIASDDGFRHKDQILQSFKGIGPGTSAMLLSHLPELGRLNRQEVAALAGLAPWDIKSGKWAGRSRIWGGRKEVRSMLYMAAISAIRSNQVIREFYQRLMSHGKEFKVAITACMRKMLVILNTLIRTDTPWLPNFGKNH

SEQ ID NO: 105876 - protein, 446 aa, unidentified
MTVTLSTPSTTATLSYSSPEQPLPLHLYVAFLGIDWADRKHDIALRAAGSDDVELTVIEHTPEALDQWAAALQRRFNGPIAIAVELNRGPLINALMKYSCFTIFPVPPARLASYRSAFSSSGAKDDPADAELILDYLQKHTDQLRPFAPEDDETRKLRLFCENRRNLIELQIKLSNRLTSALKLYFPQVLAWLLCIRAPIACAFLKKWLTLEAFQRAKPATIRNFFHAHNSRSQERIDRIINERRIAVPLTTDAVVIEAASLDVMAMINQLKPLAEAIAELEAQINALFDKHPDAAIFKSFPGAGEALAPRLLVAMGTDRGRYSSPAEVQSFSGIAPVTIRSGRTTDRVRRRYACPTFMKQSFHEFAMHTLQRSDWARAYYDQLRARGAKHQAAVRALAYKWIRIIFACWRDRVPYDEAHYMQALRNAGSPLVSLCPSPCEEAVTN

SEQ ID NO: 105877 - protein, 395 aa, unidentified
MLAEKEVAAPAPSIATDPIFVSIEMSRSKWVVGTHIPTSTKVGIHTVEWGDAAALLGLVERLRSRAADIVGIADVPVLCCYEAGYEGFWLYRRLAAAGLHVLVIDPSSLLVNRRAKRAKTDRIDAKAMIRALMAYNRGEDQVLSAVNVPSVEQEDHRRLVRERQSLVYDCTAHSNRIRGLLLTQGIIGFDPRASGAEQQLDALVTGDGRPLGPRLKDELRREIGRLRVVIDQLKDVSAERNAIALGKQTDIPQRDQGPIDTDAAMIAALARIKGVGPNDASVLVREAFWRKFDNRRELAAWSGLAPMPWASGSISRDQGIAKTGPAIFRSHMLQIAWRWLHHQPQSRLSQWFNERTNGAAGRIRRVMIVALARKLLVALWRYATTGLVPTGAIIA

SEQ ID NO: 105878 - protein, 387 aa, unidentified
MPQPNDLSRSLVALDQDSTIIAVVELSQSSWLVAGVLPGIERQPRKKLEPSAERLLGLLHRWRDEAVRAGRTITRIALAFEAGRDGFWLARWLEARGVEAHVIHPSSVAVSREHRRAKTDRLDTELLKRAFLGWLRGERGHCSMARVPTIAEEDAKRPNRERECLVGERTRIVNRMKGALARLGIRNFKPTLRKAADRLATLHTPEGMPLPPNVLAELQRAMARLGFVVSQIREIEQARQKRLEQQPETGPHAMVRQLARVVGVGIETADMLVHEVLSRPMRDRKAVARYAGLTGSPDESGTKRREQGLARAGNARVRRGMIQLAWRFLLFQKDSALALWYRARTADSRVGTRKTMIVALARKLMIALWRFVTTGETLEGVVLRPAG

SEQ ID NO: 105879 - protein, 429 aa, unidentified
MAWRAENYVCGPRCEAGEYEIEAFGTTTSELHRILKWLKERKVESVAIESTSVYWIPLTDLLEANDIEVVLVDAREVRMVPGRKSDVQDCQWLQKLHSCGLLRGAFRPPEAVARSILREKENLTAMRTQAIQQMQKSLDQMNIRVHHAVSDIDGKTGTAIVKAIVEGERNPVKLARFRDARCKKSEKEIADHLTGTWREEHLFNLGQAFKTLQFLNDRLAEYDLKASEIFEKLAAESDNPPPSPPDRKLTPKERRNPEGKAMLCQIMGFDLTSIDGIEYDTAKIIASEVGTKFDCFPTERHFASYIGLAPSLNKSAGKNIRQKKRCKNTSRAGAALRMAASTLNKSQTELGAHLRSVARRSDKKTAIKATARRMAHLIYRGVRYGKQYIDKGVQAYELRLRKRTLNTVKMLIKSHNINSLEIESALTAI

SEQ ID NO: 105880 - protein, 376 aa, unidentified
MTRIVYIGMDVHKDTYSLCSFDSQENYMFSETTVKAETPAVLSYIKGIEKRFAADDVLPVCGYEAGPTGFSLCRDLQKKNISCVVMAPSSLPKSPDGKKRKTDKIDARNLALHLAHNTYKAVNVLSPEMETIKELTRTRGAALKSQKRAKQNLLSFLLRKGMVYPYGGRAKYWTQKFYEWLKTLAFTNAIERYSFEEYLAEVNHQMSRVTRLDKKIAEIAEDPLITEGVKKLCCFSGISTLTAVSFISEIGDFNRFEKASYFASYLGLCPGIHSSGLSSKQLGITKAGNKNLRRLLIEAAQSMSHSQKCGKKSSGLLARQKDMNPLVIAYADKATERIKRRRSSMIFRGVNTNKATTAVAREMACFIWGMMTNNIA

SEQ ID NO: 105881 - protein, 464 aa, unidentified
MARNRKSSKQKKSVHSIKTIQPDAAGIDLGSREHWVAGPPLEDNTPNVQRFGTTTPELLRLADWLKEQGVKTVAMESTGVYWIPLFEILDSRGFEVILANARHVSHVPGRKTDMLDCQWLQLLHACGLLKGSFRPSDEICRLRALLRERNSMIDQRSDWVRRMQKSLDQMNIRVHHAVSDITGVTGMAIIRAIIDGERDPRTLAKLRDRRCRKSEKQIAEELTGNWRPEHLFNLRQALKMYDQICELVTEYDTEILAYITTLQTCIDQDQSALPPIAKSKTREIAKKGQAPMRQALYQLTGFDLTTIDGIGVDTAAEVISELGFDYSAFPTEAHYVSYLRLAPNLSISAGKKVPSKLKGTTTSRVAKALRLAALSLRNSKTALGAYYRRISRRKGASVAVFATARKLAQIIYRLVCYGQAYVDIGAEAYEAQFNDRRLKYYTKALNDMGYKVKALEAAEPLAAD

SEQ ID NO: 105882 - protein, 309 aa, unidentified
MFVGIDVSKARLDVAVRPTGETFDVSNTPQGIAHLVDRLQALRPELVVLEPTGGFEQPAVLALAERRLPVVVVNARQIRDFARATGRLAKTDKIDAAVLAQFAEAVRPQLRALPDPEQRSLDALVARRVQLVEMVTAERNRLQHTRNAAVRANIHAHLAFLERQLDQMERELLRAIETSSALKMRFDLMVTVPGVGKVTAATLLGDLPELGNLGNREIAALVGVAPMNRDSGQIRGRRSTWGGRSSVRRVLYMAVVSAIRCNPVIRSMYERLRSAGKPAKVAIVACMRKLLVMLNAMLRSGTPWMRQAA

SEQ ID NO: 105883 - protein, 451 aa, unidentified
MRRSRITLTAEMLSGLYALLHLENLIAKNSFEKGRFFMHHPKMRFTYVGIDSHKETHTAVFLDCFFEKLGELSFENLPDKFAGFLQRAQKFQTDGTTFMFGMEDASAYGRTLARFLCAGGESVKHVNGLLVARERKNQNIVQKSDSVDAECAARVLISKFGDLPDVVPQDKYFILRSLVARRSLLVRHRAATKNYLHSVLMQSYPNYRGFFANLDCKTSLAFFMRYPSPGTLKGVTVEELAAFLEIPSNKSLGLPKAKFILESLQETAVPFQEIRDSVAQSAIRQLMFNIEEIEQLEEGIASFLKHFDCTLTTMAGIDIVTAAQMRSCIGDIKRFSTPAKLARYAGIAPVTYASGKKDLQFANQRGNRELNSLFFWLAVQLATPCGSSRKILNSFFHEYFNRKMSEGKTKRQALKCVQRRLVNIIWNMLTHGEEYVNPPTFDLPEAENEAE

SEQ ID NO: 105884 - protein, 341 aa, unidentified
MGEVSTIGVDLAKSVFQVHGADAWGTVLFRRKLRRHQVLTFLAGQPSCTVAMEACGSAHHWAREISKLGHAIRLIPPAYVKPFVKRQKNDAADAEAICEAAQRPTMRFVAPKSEQTQAAALVFRARDLLVKQRTQIINALRGHLAEFGLVVAKGPAHVSQLVRAVADSEEPIPELARPVLQMLSETLHRLDEQIAGLDREVAQRAKENETARRLMTIPGVGPVTAVALAALAPPAETFKRGRDFAAWVGLTPLQHSTGGKQKLGATSKMGERTLRRLLIIGASAVVSWVARNGAPAGSWMARMVARKPPMLVRVALANKMARIVWALMARGGIYQAPAAIA

SEQ ID NO: 105885 - protein, 413 aa, unidentified
MEVLYPRCAGLDVHKATVVAAVRLVAGGKVAREVRTFATTTAGLLALAAWLGENGCTHVAMEATGVYWKPVWHVLAEGGFDLVLANAAQVKNVPGRKTDVNDATWLAELLAHGLVRASFVPDAPTQELRSLLRTRKQLVRERASHVLRLQKTLEDANVKLDAVLADLLGRSGRAMLEALVAGETDPEKLAAFAHPRLAATPERLREALRGRVTAHHRFLLRLHLDQVDALEAAIGRIDREVEERLAPFSTAVDLLASIPGVGALAARVIVAEIGLDMGRFPTAGHLVSWAGLCPRNDESAGKRLSARLRKGAPWLKTILVQCAWAASRKKASYLQAQYHRLRARRGARKAVCAVAASILTAAYHMLKDGTAYRDLGPGHLDRRSRETQARRLVRRLADLGYAVELAPLEPAPA

SEQ ID NO: 105886 - protein, 366 aa, unidentified
MRKNSIVVKNGNKIFKQPALTIGLDLGDRSSCYCILDELGKVILERSVPTTANGIRQAFGKIPRSRIALETGTHSPWVSRQLTQLGHEGIVAHARNVRLIGESSRKDDRLDAWTLARLARIDPGLLGPVRHRSAKAQIQLTVVRARAALVSTRTALVNAARGLVKSYGERLKKCGTEQMDRNSSEGLSQELREALDPLLREIESLNERIAEYDHRIEQIAKQVHPEVARLKQVKGVGTLIALTYVLTLDDPHRFRHSRDVGCYLGLRPGRRNSGKSEPQLHISKEGDRYLRTLMVQGAHYILGPFGQDSDLRRLGLKLAERGGKNAKKRAVVAVARKLSVLLHKLWVSGEVYEPLRNNRKVIRAVA

SEQ ID NO: 105887 - protein, 378 aa, unidentified
MTMIDAVERPDTTEAEVILGVDTHLDFHVAVAVDHLGRRLDESSVQATAKGYEGLLCWAEGFGPLRCAGVEGTSSYGAGLARHLKSRGIEVLEVERPEHRRPSSRRNLQKSDSSDAEAAARAVLAGETSGVPKSGDGTVEMIRTLRAARRSAVKARTQAANQLQALRVTAPEQLLKRLRNLSTKELVWVAARFRLGDDPRDVPSATKFALRSVARRYEALSSEIAELEAHLDRLVAQAAPELLSLAGIGTENAATLLIVAGDNPRRLRNETSFANLCGVAPIEASSGKVVRHRLNRGGNREANRALYMICLSRIRRDQRTKEYVARRTQEGKSKREIIRCLKRYIAREVYRVLISCGTRSSPTAPKDVTHTVSSSSAA

SEQ ID NO: 105888 - protein, 416 aa, unidentified
MGLKIVYPICCGIDVHKTFVVACIASTNNKGVTTYKRHRFSTFTKGLRELSQWLCENNCKDVCMESTGKYWIPVFNILEHSCNVTLTHPKYVKAIRGKKTDKKDAKWIADLFKHDLVNGSFMPPLAIRQLRDLMRYRSKLTNFITSEKNRLQNSLTMSNIQIASVATDTFGKSAMGIIDKLLEDPSNTDLDMDSLVYGKLRNKIPELKLAIDGFITPEQAGKLIVIKQHYEDLKDRKSDLEKLILSLAGSYIEEINLILTVPSFKNIFSAITVISEIGANMDVFPTAKHLCSWAGLTPTSNESAGKRKSVRVSRAGVYIKPLLVQCATAASKSKKHPEIRNRYLKIRRRRGHKRAIIAIARMLLTAIYHILKKKEPYNAELYRKSDVIPVNRNITIEQAILFAKSQGFRITDPVPS

SEQ ID NO: 105889 - protein, 375 aa, unidentified
MEEFIKYVGLDVHGKTIAASVADNRISEVRFIGQIANTPEAITKLVGQLSNDSAMLSFCYEAGPCGYGIHRQLTLLKHRCQVIAPSLIPKKAGDRVKTDRRDSLMLARLHRAGELTPVWVPDTEHEALRDLTRARGDMKTMERRARQQLLAFLLRHGRRFDGKSHWTQAHSRWLETVKFEHPTQQIVMQEYIDTVVSCSQRVAVMDKQIERTAHASAVWPIIEALMALRGVQLLTATITVAEIGDLRRFASAPQLMAYLGLVPSEHSSGERQRRGGITKTGNSHVRRVLVEAAWTYRFPARKTRTLQKRAEQCDEKVQVIAWDAQKRLCHRYRHLTDGGKLKVQACTAVARELAGFIWAIGQAVSAPAANLKTRQ

SEQ ID NO: 105890 - protein, 449 aa, unidentified
MSRPQVIDDQEHERVHERVAAIDVAKDTGMVCTRTPHPSRPGARRATVWTVKARMNAIRALGRQLHKDGIEVVTLESTSDYWRIWFFVLEACGLAVQLVHAAQAKNLPGRPKTDKLDAMWLARLTELGLLRASFVPPRAIRDLRDYTRARTRLVQERTRCWQRLEKLLEGALVKVSSVASKLTTLSAQDMIKAMIAGERDPQVLAALARGRMKAKHDDLVQALDGMFDDHHGELAGLLLDQIAFLGERIAQLTSRAAELTAAMPAAWGVDPDGTTGPAAGTGPGAPVLNAVARLAEIPGVSENLARSIIAEVGLDMTRFPTAGHLVSWAGLCPSARQSGPRTRAGKKGQGDTWLRGSLGQAATGTSGTATFLGERYARIARRRGKAKAQVAVARSILVIIWHLLADPAARYTDLGYGYYQARTDTDRKIRNHIRQIQALGFTVALTKAG

SEQ ID NO: 105891 - protein, 313 aa, unidentified
MYYIGIDVSKKDLSVFNGKKDLKFINQEGLRPFKKYLKGKYKNFSDLVIIFEPTGIYSFNLKEFCAENSIKAYIVNPKRSHSFARSLGIRSKTDKIDARILYQFHRLIDSKDIKVPKIDQQTKVLSSYLTSYEFSVKQRVALSNHLESLRDKRLITLMKKDLKRAQKLENKIFHDIKEYIRQNQNLREDYQRLLTISGVGEKTAIALLTLFKTYEGTNRAQITALVGLDSTKRESGSSVRGRAKISKNGKAIYRKVSYLPAICATVHNQKIRVFYQRLLAHHKPKKLAIIASMRKILLIAHAMYRDKTEYIAA

SEQ ID NO: 105892 - protein, 333 aa, unidentified
MQNFYFIGIDVSKKKLDICVMSNSKVLKEEQVSNHPQAIATVIAGIKEELSMSNDSLIICAEHTGQYTYPLICACKSVGSKLWLENASQIKYCSGVTRGKNDKVDARRIAVYAMRFFDKAKPYQRPTEELMRLKQLEAERSLYLTDLAKYKAQLSDQEGFMEDKIFKRKAKRLKEMIKSLEKTLKEIAQEMADVIDSSEELSRQMRLLKSVEGVGPVVAMNMIIATEAFTRFDNPRQFNCYVGVAPFAYTSGSSQHSRNRVSQRAVKYIKCLLHMAAVAIAHKKTGDLKTYFERKVAEGKNKMTVLNAVRAKLVARMFAVIRNNRVYQPILSV

SEQ ID NO: 105893 - protein, 350 aa, unidentified
MVVVGADVHKRTHTFVAVDEVGRKLGEKVVDATTAGHRRALRWARDQFGVELVWAIEDCRHLSARLERDLLTTGQKVVRVAPKLMALTRKSARTRGKSDPIDALAVARAFLREPDLPVASHDETSRELKLLVDRREDLVAQRTSTINRLLWRVHELDPSHAPKAASLDLAKHRDVLRAWLDTVPGLVAELARDELADVTRLTEMINGLAKRIGERVRAIAPALLAMPGCGELTAAKLVGETAGVTRFKSEAAFARHSGVAPIPVWSGNTAGRVRMTRSGNRQLNAALHRIAVTQIRIDGLGQAYYRKRLTDGDSSTEALRCLKRRLARVVFHHLHTDDQTRNQPCQPAAA

SEQ ID NO: 105894 - protein, 343 aa, unidentified
MHSISTIGLDIAKSVFQVHGVDGAGQVVLRRQLRRRQVLAFFQKLPPCLVGIEACASSHHWSRELQALGHTVRLMPPAYVKPYVKRQKNDTTDAEAICEAVARPNMRYVPTKTVEQQSCLMLHRARHLFIRQQTAVINSIRAYLAEFGIVAPVGRRGVEQLLDVVANTTDHRLPDVARACLAALGSQLRALKAQILEFDRRIIAWHRSSATSKRLDAIPGVGPALATALVASIADPKAFRSGRDFSAWVGLVPKQNSSGGKDKLGSISKQGDRYLRSLFTAGALAVIRYAKIHGTGHRPWLTALLARRPTKVVAIALANKLARMAWAMMARNERYKEPAALRA

SEQ ID NO: 105895 - protein, 424 aa, unidentified
MSFKILKFNCCGLDVHKTWIYACIGITDSNNRTEYKQARFSSFTKGLNELCDWLAKYNCKDVCMESTGKYWIPVFNILEQHNLWVTLSHPKYTKPMKGNKTDRKDAKWICDLYMCGMVKPSFIPPADIRELRDLVRYRFKLTCMITGEKNRAQNCLTVSNLKLDDVFSDVFGKSSRSITEQILKHPGETFDVTPFVDGRCKTPIEEIQAAVDGAISKEQAVKLRQCLYHIDELNKHISEVEQEILRLSDKYEIALNLIRTVPGFNKNPLTAIQVLSEIGGDMSVFPTAKHLVSWAGCCPRNDQSNQKIKSTRISRAGSYFKPVLVQVANALIKSKKHLEFTNRYKRIKARRGHKKAIIAICRMILTAIWHILSDLKPYTPEGFLESRPVKEEKVLSISQALNLLKQRGYIIKLSLIHISEPTRH

SEQ ID NO: 105896 - protein, 340 aa, unidentified
MDNIGLDLHKRESQLCILTSDGEVVERRIQTSRERFTAVLGERAPARILVEAATESEWVAQHLEALGHEVIVADPNFAPMYATRSRRVKTDRRDARTLAEACQLAAYRRVHRRSPARRHVQVELTVRDALIRTRTRYVAVVKARVRREGLRVPGGDLEHTVAKLMALPLSVAVAAELAPLVALLEPLNAQIVAADARLAALAAADAVVQRLMTAPTIGPVTAVAYVATLDDVGRFATARRVAAYLGLAPTERSSGEQQRRGPISKTGNPRVRCLLVEAGWRILRSTQPAAAPLRAWAERIAARRGRAIAAVALARRLAGILYAMWRDDADYRAAAISAVV

SEQ ID NO: 105897 - protein, 363 aa, unidentified
MTETITADVHGQDVYVGIDTHKRNWSVCVLGEGWEERPFSQDPRPGQLVDHLRRKFPGGRYHLAYEAGFAGHWIAREFALHGVDCIVVNAADIPTNDKDRRRKTDARDCRKIARAHRAHTLEPIYLPTQQSEEDRKFMRTRLEMVRKQTRTKNQIKSLIAISGTELPPAAELPTWSRSFIVWLEGLFADRPSLKMSLDVYLEELRSQRTWLVKQLQQIRELSRTDRFAPNVKLLMSVPGIGLIGAMTLLCELIDIGRFRDLDHLASYIGLVPDTRSSGDSEHTVGMTSRANKHLLVIIIEASWVAIRKDPSLTEKFEKDAQRMKRSQAIVRTARRLLSRIHHVLREKEPYRIAVSTTSLIDQS

SEQ ID NO: 105898 - protein, 473 aa, unidentified
MSKVKAKKAKKKKVEDIISMQVVNPYSAGIDVGDKEMVVAVPEGLSDTRVRIFGTMTCNLEEIAAYLKACEIDSVGMESTGVYWKPLFRLLIHEGFEVNLVNAAHVKNVSGRKDDENDAMWIQKLHSCGLLKSSYLPDEEQEALRTLVRHRKTLVQDSSRFVNRMQKSLELMNVKFHTVISDIVGETGKAVVEAIIGGQRNAANFLPLISKRIKADLSTIEKSLQGNWLEEHLFTLKQNYEMYKIFWEKIAVCDQQIEKQLQQYEAKCNEGVIEEPKTVKEEPAVAPAGKKGKVVKKHGDKNRPRFDVHGYLERIYHVDVMAVYGINSTSALDIFAETGTDLSKWKNEKHFVSWLNLCPNNKISGGKLISSKLFHKKPNPASLAFRAAANGVQKSDNWLGDYFRRKKAKGGNKYAIIATANKIATIFYKMVRYKEEFKPVDLEQYQQKYKQVKIAFLKRKLAQLEQETEKAAA

SEQ ID NO: 105899 - protein, 330 aa, unidentified
MKKWYFTLGVDVSRNTLDICCSELKEHIKIKNGTEGFKQFLKWCRRLKIDLKKSFLVMEYTGGYEYKLIQFCEANNIVYTRIPGLEIKNSLGIVSGKNDKVDSFRIAQYGEEKHKSLKPSKPLNPVIMRLKELLRFRKRLVREKAGYQSSIKERSHMYGESKNEIIIKTMEQKVKINTKYIAAIETEMMKIVAGDEKINTNFKLITSIKGIGKVNGLMTIAYTENFTSFSNPRSYAVYAGVVPFDYSSGTSIKGRKRVSPIANKELKQELNQAARSALVWDKELRIYGENKMKTKCYKIVLNNVKFKLILRMFAVVKKGEMYVDNYKNIA

SEQ ID NO: 105900 - protein, 426 aa, unidentified
MTYRIAGIDVHKRMLAVVIADVAVEGEYQFERRKVGTSPSELCRLADWLVAQHVEEVVMESTAQYWRPVWATLEQRWRLQRLQESDGARSGQLHLAQAQSNRGAAGRKKDFPDAERLVKRLVAQELKLSFVPDVEQRLWRTIMRRKHQLTRNRVQFQNRLECLLEEAHIKLSSLVSDLLGKSARYMLQAVAEGETNPETIAALADHRLRATAPQLRDALGACRDLHPVYRQLLKMALEELKLMEEQIDKLEQEMANLLSAQQDVVQRLAEVPGLGVDSAQQIIAEVGPEAAAFPSAKHLASWVGVCPGEEESAGINYSHRSPKGNRQMKGLLNQASNAAVKTKGSIFEFIYRRLVVRLGHAQAIGAIAHRLCRLIWMILHQAIRYEERGPAVSPSTTERRAAKMIRELRRLGYRIEPVECKAEGSV

SEQ ID NO: 105901 - protein, 399 aa, unidentified
MSLKGSFDGFVGIDVSKDKFDACGITGDEVKLFQFSTTMDRKGFEKLKGHLAAVSISSVLIGMESTASYHVNLFSYLVSEGYRVILINPLLISNYVKMQLRKTKTDRKDAVVIAQFLLANGDTLVQRATPALISDLRDLSRQRESLVDEMTSLKIEIKQLLNITFPELEHMAGIFTKSILKLLQQYPSAFALRDADLGQLSQMLIADSYGHKREAFAAELIKAAHSSIGSKSPAKDMILKQKIALLFHLEDALHETTRMLIEMSRKLMDEDINLMTSLKGIGEKAAANFLIEMGGAISQFERSGKIIAMAGLDPAVYQSGKHDGRGRITKRGNRHLRKIIWLMTTKVIQYTDVFSVYYLKRRKEGLPYKMAVLATAHKLIRVIYAMLTQRTTFCPQVNS

SEQ ID NO: 105902 - protein, 334 aa, unidentified
MKPDVVHIGVDVSKEKLDVFVPAQKEGMRPATKELDNSVAGYRELRDLARKARATVCVEPTGGYELELIAFLHKYGVPVAYADALRVRQFARAEGCLSKNDTIDAALISRFADKIGVRTLESQDVKAVELKRKAKFRQTMMDSCAAMANRLETEVDPEMKALLKEQIGHMDKVIAKAERLCLETVEQDERMNALRERFTQVGGVGDLTAISILAGLPEIGTLNDAKLNRLVGIAPEQRQSGTKEWQRRIWGGRKDVRNALYMAAVASIMWNSVLGAYYRRKRAEGHPHKWAMVPTMRKLLSLLNRIARDPDFVPAPEPESTKLNAKAGRRRKAA

SEQ ID NO: 105903 - protein, 379 aa, unidentified
MNHVTSSAFPENTLHGALELSKKSWVLAIQFPDRQQPSLYRIDGGDTEGLVSKLTSARDRWAKITGATPSITLCYEAGYDAFWLARFLKAHCIECLVVDAASLQVNRRGRRPKTDRLDVNMLLRAMIAWARGEQHVWSVVRIPSVDEEDLRRSHRERNRLVHERTAHINRIKGLLFAQGIRGHNIKSHGKSLKLDELMTGDGRPLPPRLAHEISRELERLALVQDQLIQIEREFVDTPTSCKDTEKKRILLQHLKGIGPIVSAVMAREVYYRRFDNRRQVAGFLGLATSPYDSGTVERSQGISRAGSGPLRAMLIQAAWLWIKYQPKSALTRWFLERTKGQGPRIRKIMIVAVARKLAIALWRYVEQGLVPDGAILSNK

SEQ ID NO: 105904 - protein, 375 aa, unidentified
MATIARLGIDTSKSLFQLHGVDEREEVVLRKQVRRGQFLGFVAKLAPTKIGVEACGASHYWARQLQALGHEVVLLPPQHVKPYVGRNKNDKIDAAAICEAMSRPRVRERFVAVKSAEQSAAQMLLGTRDGLLHRRTQLSNTIRGHAAEFGLVTPKGLAHIKPLLERIAADDTVPALAKELFAALGEEFAELAPRIARLDKKLKAFQRSDELCRRLVEVPAVGPVIASSMVVKIGNPAAFRSGRRCAAWLGLTPRDHSTAGKMRHGGITRAGDEGLRAALVSGATAYIQQVKRGRTRPSPWLAQLLKRKPEKLAAVALANKTARIAWKLMVSGERYDRARAEAREGLGATQHRGSTPSPSLQPHTAGQGASTMTVA

SEQ ID NO: 105905 - protein, 314 aa, unidentified
MSHLFVGVDVSKDRLDVAAHPDPSSWSVPNDEAGIEDLVRRLGDLRPVCIVLEATGGLEMPALTALAVAGLPAVAMNPRQTRSFAKAAGLLAKTDRIDSLVLARFAEAMKPEIRPILDGPAQELRSLTVRRRQLTEMLTAEKNRRSMAPKRMVKEIDKHIAWLEKSLSRIQDDLHKTIRNSPVWREKDDLLQSTQGIGPITSAMLIAELPELGRLDRWEIAKLVGVAPMNCDSGRYRGQRHIQGGRAPLRCALYMATLTAIRFNPVIAAFYQRLIAAGKEFKVAMTACMRKLLVRLNAMLRDRAPWQEKTPQTA

SEQ ID NO: 105906 - protein, 350 aa, unidentified
MPCKTVAIAHTIGIDTGKNTLHMIGLDKKGTIVVREKVSRTRIAARLVNVPQCLIGIEAGMASHHVARELLALGHEVKQVPPAYAKPFRQGHKNDFRDAHAIAEAVQRPSTRCVPVKTADQLDLQTLHRVRSRLIGNRTAVINQLRGFLLEHGIPVRQGLRFLRQQLPQILAMRTDVLSPRMIRIIEELIGDWEHLDERIERVTDEIETLARADENCRRLMTVPGIGPIIASAMVAAIGNGAAFAKGRDFAAWLGLVPKQMSTGDRTILGRITKRGNRYLRMLFIQGARAILFRPAGWAKHSFGPWLAAAARRLHRNVLATAFANKLARIALTVLVEGRSYAARVEPRAA

SEQ ID NO: 105907 - protein, 343 aa, unidentified
MQAITTIGFDIAKSVFQVHGVDADGQVVLRRQLKRRYVLAFFEKLPACLIGIEACASSHHWSRQLRALGHTVRLMPPAYVKPYVKRQKNDATDAEAICEAVSRANMRFVPTKTPEQQSGLVLHRTRHLFIRQQTSVINAIRAHCAEFGIVAPVGRRGVKELLNVIANTKDEQVPAIARACVAALGAQLHQIKQQILEFDRMITAWYRCCETSRRLNEIPGVGPALATALVASVADPRAFRSGRDFSAWIGLVPKQSSSGGKPKLGSISKQGDRYLRGLFTAGALAVIRYAKLHGTRHRPWLTALLARRPTKVAAIALANKIARMAWAMMARGEHYREPIALAA

SEQ ID NO: 105908 - protein, 429 aa, unidentified
MSIYETVNCVGIDVSKGKSTIAIMRPLGEIVQSPHEVKHTLSDLKALETTLRQLEGETRIVMEYTGKYYQPIARFLNNAGFFVCAVHAKLIHDFANNSIRQIKTDKADAVKIANYGLTNWNLLRRYSNEDETRLLLKTYNRQYNMFMKQYVASRNNFISLLDQTFPGINDLFSGHRRPDGHEKWVDVAARFWHAECVSGQSLNAFTKVYKDWCSRNGYRGRDDKAEAIYRLAKESIPSLPKNDFTKAIIQQAARELTNTCLTLAELQQQMNFIASTLPEYPVVLDMGGVGTTLGPQIMAEIGDVRRFPRREKLVAFAGIDVPPYQSGQFEAKDRHITKRGSSDLRKNLYQVIGCLMQHSMEKDPVYRFVAHKKAEGKHFYSYMVAGCNKFLRIYYARVKAYLNYLEQQESNSLIDGSVGSEAVLQPLDC

SEQ ID NO: 105909 - protein, 354 aa, unidentified
MGVIIGVDPHKASCTAAVLDERGELVDQQRFASTRTGSRALGRWAKRWPERRWAVEGASGLGRRLTQQLVGDGEPVVDVPAKLAARVRLLSAGHGRKSDAHDAVSVAMAALGTTRLGQVRLEDHTAVLRLLSDRRDDLVRQRTRTLNRLHVLLCDLLPGGAKRSLDADTAAALLRRLRPATAPARTRRQLAVDLVADLRALDRRITAVEERLRHAVTQSATTLIELFGVGPILAAKLLGEVGDIRRFATKHRFAAHNGTAPIEASSGEVVRHRLSRAGNRKLNHALHLIAIDPPPHRRAGLLPTQAGRGQVPQGSPTVPQTAVVRRRLPPAPSRPAPARSGPGLTTEEPFFGLL

SEQ ID NO: 105910 - protein, 411 aa, unidentified
MLVAWNLQDFVLFIGLDVGKSEHHATALATTGDKVYDKSLPNDEAKLRQLLAELTSRHGSALLVVDQPATIGALPVTVAQAMERVEVAYLPGLTMRRMADLHAGSAKTDARDAFIIAETARTMPSALRQIAASDEQIAELAVLTGFDDDLLAQTTAARNRLRGLLTQIHPGLERVIGPRLHHYGVLDLLNRWPTPQRIKEAGRGHVRNRIKKHNPRLAEPMTEEIFTALAAQTVVVPGTEAAATIVPIIAGQLKDLYTQRQQVLTQVDALVEAHPLHQVLTSMPGIGVRTAARLLTEVVGKDFKTAGHLASYAGIAPTTRRSGTSIRGEYANRGGNKRLKSSLFNSAFAALHHRPSRVYYDKKRAEGKTHKQAVIALARRRLDTLYAMLRDGTFYQDPETIRGGTGHALAA

SEQ ID NO: 105911 - protein, 344 aa, unidentified
MKKNLKQVIGIDVAKDELVVCQGCLYEDLSIELYAHKVFPNTLNGFESLVKWVEKSGVPGRFVMEATGVYFESLAYFLSDHGYLVSVVLPNKISNYCRTLQVKTTTDKTASEAITQFGLERNLDNWEAPKGIYRKMRQLTRERSQVVETRTIAKNQLHAEKSEAYPNPSSLVRIKKHIAFLDNQEKEITEELKQLLQADPEMKKLLIILCSLPGIGLLTAATVLAETNGFNLIRNKRQLASYAGLDVKEKQSGSSVKGKPKISKKGNKYLRRSMHLPALAAIRHDERFKGIFIRLVSKHGIKMKAAVAVQRKLLEMMFILFKNQTTYDKDYFKKSIINEEQVLI

SEQ ID NO: 105912 - protein, 450 aa, unidentified
MPKLFVGLDVSQKSVAACFLLEDGSEPIKRFSFPHTPTGVESLVPRINATADSLGTTHLFIGMETTGLLWWHLSEALRTCEQLQHLVPAIYTINAKLVANFKKAYIEAEKTDPGDAFVIADRLRFGRLPRLAEPDERYLAIQKLTRHRFHLMNSLGREKNRFLSHLFLKFSNFCQQQPLSDPFGAAAGALLTEFLSVDEIAQTPIQDLADFLIEKGRNRFTDPEAVAEAIKQAARNSYILSKALTNPVNVVLAMTLENIRFFEHQVDAIDKAIARELAALPSAQVLLSVPGLGPVFTAGIIAEVQDANRFDTDAQLARFASIVWKKSQSGEFSADETPMMHSGNQYLRYYLIEAANSLRMHNEEYAAYYQIKYRESTTHHHKRACVLTARKLVRLIHTLLRKGQLYQTPDQRKETRAVNPLPIGMTPGELARQVVRRRQAKGRMKVHLDH

SEQ ID NO: 105913 - protein, 327 aa, unidentified
MGMKTKRLCCGIDVSNTTLDVCYQNNLGELFHLQVGNNNAGFAKIIEHTGVHYHFVMEATGVYYIRLAFYLHRLGCMLSVVNALSVKRYIQMHLERNKTDKKDAAWICRFAIEQQPPCWQMPDSAYFESKQLYNTIREYTEQVKRFHNQLHSLGLLPVTSKDTIKSIEKVIVYLKKEIKLLEQKLQLLLEQWQPEQLKNVSSIKGIGKRAAAMLIVFTQGFKHTQNHRQLISFAGLAPTQYSSGSSIQGKPRIYKRGGKNLRDVLYMCSMNAMKTNTACKALYERLRANGKTGKQALVAVMNKLLKQVFAVVKNNSLYQPNYCSEKP

SEQ ID NO: 105914 - protein, 362 aa, unidentified
MLQSTTIIAFDQHAATTVAAVLRPADRTAAVHPLTSDVPTIQRLVTRVGQDGPVRCCYEAGPCGFELQRALTAQGIPCDVIAPALIPRRPGDRIKTDRRDAGHLAMRYRAGALTAIHIPSEQEEAGRDLLRCREDIRADLLRARHRLSKFLLRHGRRFTATKRAWSRAHDRWLRAQTWPLPALDQTYRAYVRTVDEAVARLQTVEANLRALLDLDPLRTRVVRRRCFRGIDDLTALTIAAELGDPRRFATAPSIMAYVGLVPSEHSSGAKRARGGITKTGNAHLRRVLVEAAWHYRHHPFIGAALRTRQHGAPAAVMARAWSAQQRLYRRYHRLAGRGKPKQLVVTAVARELTGFVWSALTL

SEQ ID NO: 105915 - protein, 430 aa, unidentified
MKSNTQNAKIEAITEKTLVLGIDVGSETHYARAFDYRGIEYSKKPFKFSNTEAGFVTFKEWILDLKEKHEKDKVVPGMEPTGHYWFNLGKFLQDNEMKPVLVNPHHVKKSKELDDNNPTKNDRKDPKVIAGLVREGRYMIPYLPDGVYADLRTASNIRFQLQAELTRIQNRISRWFNIYFPEYKTVYGRPDAKSGMLILKQAPLPEDILTLGIDGVNQIWRDAKMRAVGKARAKTLIEAAEHSVGSKEGAISARMEIRMLLEDYESRNIRLQEVMTLIAELVNQIPMAEKLLEIKGVGIKTVSGFLAEVGDISRFNNPKELQKLAGLALVENSSGNHKGRTTISRRGRKRLRYLLFEVAMSLVAKNPEFRELHTYYTTRRLNPLKKMQSLMAVAAKLIRVFYVMLTKGVDYDPKKMVGDIKRPAVYLQAA

SEQ ID NO: 105916 - protein, 404 aa, unidentified
MVYLGIDWAEAHHDLCLLSETGTVLGRGRVSDGVEGVARLHEMVAEHASDPGEVAVGIELDRGLLVGTLLASGYEVYAINPLSVDRYRDRHRVSGAKSDAGDAKVLADIVRTDRHNHRQVAGDSEAAEAIKVLARTHKDLIWSRQRQANRLRNLLREYYPAALACFGSDLTSRDALSVLERAPSPGQGRRLTVAQISAVLRRGGRERNLARRAQEISKALRSPQLEAPPTLAAAYAASVRALVAVLREIAAQVEQLQRELERSFRSHPDAEIYLSLPGLGDVLGARALGEFGDDRTRYADPRSRKAYAGTAPITKASGTKRVVAARFARNAHLVDACHLWAFAALSRSPGARRYYDVLRARGKTHNQALRQLGNRLVGILHVCVERRQLYSEEVAWPELEEAAA

SEQ ID NO: 105917 - protein, 409 aa, unidentified
MERLIERVCGLDVHKQTVAACVRVPASKGAREQHVRTFGTTVAELLALRDWLEAHEVTHVAMESTGVYWKPIYYVLEERFTCLLVNAAHVKQVPGRKTDVQDCVWIAQLLEHGLLRGSFVPPAPIRELRDLTRYRKVLIQDRTREANRLHKLLEDAGIKLASVATDILGVSGRAMLEALVRGTTDPEVLAELARGKLRAKLPALRQALRGRFRPHHAFLVSQLLAHLDYVDETITTLSERIEEVIGPFADELARLDTIHGVARRTAEVLIAELGVDMSQFPSDRHLASWAGLCPGNNESAGKHKSGKTRRGNRWLRAALTEAALAAIRTSNSAFTARYRRIMRHRGHKKAVLAVAHAMLVTAYHLLARQTTYQELGADYFDRRHGERVTRRAVQLLERQGYRVTLERAA

SEQ ID NO: 105918 - protein, 374 aa, unidentified
MKDHSEAFVAFDTSKLRNAVAIAEAGRSGEVRFLGEIDNTPGATSKLVRKLAAKYERVAYCYEAGPTGYGLYRQITSLGHECMVAAPSLIPRKPGDRVKTNRRDALGMVTQFRAGELTAVWVPDARHEAVRDLTRARGAAVEDLRRKRQQVSSFLLRLGVQYPGKKTWTKAHMSWLAGQKLEHAEQRIAFEEMLLAVRQAQERIARLEEAIRAAVPDWSLAEEVDALMAMRGIDMISATAFLAEIGDLSRFGSPRELMAFLGLVPSEHSTGDTVKRGGITKTGNRRARRILVECSWSYRHPPRVGKKKQDKVAAAPQAAREIAWKAQHRLYARGRALTRRGKLATVVVTAIARELAGFIWAINREIVTARAVAR

SEQ ID NO: 105919 - protein, 351 aa, unidentified
MKKSITIGMDMGDKNHSICVLDAEGEVVERTTVTNTAKAIRKYFGKVETCRVALEAGTHSRWVSRILEELGHDVLVGNPRKLRMIWNSDQKDDDRDAEMLARIARFDPHLLHPIHHRGQEAQSDLAIIKARDMLVKARTMLISHARGIVKSTGQRISKCSAEAFHKRLLEEMPAELVPALEPVMKSIEDLTARIHHYDNRIEKLCTEKYPETEGPRAISGVGPITTLAYVLTIEDSSRFEKSRAVGAYVGLVPKRDKSGQIDKQLGITKAGDEYLRRLLVGSAQYILGAFGPDCDLRRFGLKLAARGGKNAKRRAVIAVARRLAVLMHHLWKSGEAYDPFYRQKLKQKKVA

SEQ ID NO: 105920 - protein, 347 aa, unidentified
MRIIGCDYHPSWQQISWVDTLTGETEERKLDHASGEAEKFYRQLPGPAVIGMESTGNCQWFVEMATTAGHEVWIGDAAKIRASEVRQQKNDRRDAALILKLLLEGRFPRIWTPSGEEKDLRQLLIHRHKLVRIRVQVKNELQHLAMNQGVTRAGKLWSKAGEKVLSELPLKPWASRRRQDLFKIREMLNGQIDLLDQAVMQAAQKNEKARLLMTQPGVGPITSMAFVLTMGDVSRFPRGKQVASYLGLIPREYSSGGHQRFGPISKQGNGFLRMLLVEAAQVAVRCDPQMRQEYLHRCHRNKAKGIAKVAAARKLAIRLYWMLRTNQAYPEVVRVESSPRVPVVGAS

SEQ ID NO: 105921 - protein, 489 aa, unidentified
MSTAPKQRQGEKGSDAQRSASKRKARGSHRQQGEGNRRRSKLTITHPDAAGIDVGARVHYVAVPEGRAEVWVRSFGAYTAQLEELVQWLKDCAIKTVVMESTGVYWIPLFQKLEEAGFEVLLVDARQAKHVPGRKSDVQDCQWLQQLHSYGLLRAAFRPDDSICRLRTLQRHRKNLVECAAMWIQHMQKALNEMNLHLHHVLSDISGRSGLAILDAVLAGERDPKKLASLADRRVEKSQAQIEAALRGDYRPELLFVLGQSLHNYRQMQQLIAQCDLNIEQQLAKIADCPNPSQDSELTRQSQDSAACKPRKRKPKDGLELSLAAHLKRILGVDLTTIPGLNLLAVLNLLSEIGTNMTKWRNEKAFVSWLGLSPNNKISGQRMLSSRTPKVVNRAATTLRLAVLILGKTNSPLGSFYRRKRAQLGAPKAITATARKLGCLIYRLIKNGQAYKEPDLLTYELKYKDQILNTLRKRANSFGFDLVELTKAA

SEQ ID NO: 105922 - protein, 403 aa, unidentified
MEVLYPRCCGLDVHKKTVVACVITKKLRETRTFSTMTADLLKLNDWLMANEVTHVAMESTGVYWKPIYNLLEDNLTLLLINAQHIKALPGRKTDVQDAEWIADLLRHGLVKSSFVPDREQRELRELTRYRRSLIQGRATVVNRIQKVLEGANIKLSSVATDITGASGRAMLTAMVNGVTDPKELAEMSKGRMRKKKDSLEEALNGLMGKHQKMMLQSQLRHLDFLDKEIAQLDDEIGKRMKPFEEIIERLDDIPGIDRRGSEEYISEVGKGTERFASGDHLASWIGLCPGNHESAGKRKSGKTRHGNRWLYSTLVQAARGAARSKGNYLSAQYHRLTTRRGDKRAIVAVAHSISIIIYKMVMNGTKYQDLGNLFFDNHDREHVVNRAIKRIEALGYKVELQPV

SEQ ID NO: 105923 - protein, 400 aa, unidentified
MDRNRTVAGLDVHKDSVYLCIMGHDEKIIYQKTYGVLTPELRQMRDDMLGLGVTECAMESTSVYWVPVWNELCGSMALKLVNPYFIKQLPGRKSDVKDAQWIAECVLKHLIKGSFVPEPIVQDMRKLNRRIMDLNEDMTYNCNKLDAALQRCGFRLSNYVATTRSKSYLSVLEAVISGQTCPDELIKLIHGRTLNKHGRETVKAALTASFSKTDLFVLRQLKETIDLVSRQIEECQKELTALCKEHFPKQYERIQTIPGVKERAATAIIAETGIDMKMFATAACLVGWCGLKPRNDVSNGRFKSRKVTHGNRYLRQILIEIAWAASRTRNCFFSHFSYVQTTVKKKSRMKIQVAIARKILVAVWHMLSREEDFIDIYLRRLEELKKAEEQIRQLESCMAD

SEQ ID NO: 105924 - protein, 340 aa, unidentified
MKTTQVAVDLAKSVFQVAVSNTPGRIDEERRLSRARFQRFFTEREPVEVLMEACGTAHYWGRELEALGHTVSLLPPADVRRYRDGNRTDRADAKALLEAARNEAIDAVPVKTIEQQTITALHRLRSGYLQTRTARINAVRGLLREFGITIPVGARHLVPRVRADIADGVVPTDLEPVLEEAVSEIEELKRKAQGIERRLRGLVRHMPEAQVLMSVPGIGVLTATALVAYVGDVRRFRSGRHFAAYLGLTPREHSSGLSRRMGRITKHGNRYLRMLLIHGARSVLRAAKLTDKPDGLRTWALGIAARSGYNTAAVALANKIARIAWRRWRDGRAFEVRPTA

SEQ ID NO: 105925 - protein, 269 aa, unidentified
MKENNIIGMDLGDKKHVVCVLNAAGAVVEQTSVAATPEAVAKFFQRFRGAVVAMETGTHSRWVSRLATAAGLEALVGNARKLRAIWANEKKSDVRDAEMLARIARLDRQLLYPVHHRDEATQAQLVLIQARDGLVGARSALINQVHSLVKGFGARLRKCSAECFHNEKLPDAVAAALAPVMETIAQLTAQLRHYDRAVTAQAATQPAVQRLTQVPGVGDLTALAFVLTLDEVGRFDKSRSVGAFLGLVPRRDQSGQTDKQLRLTKTGDP

SEQ ID NO: 105926 - protein, 341 aa, unidentified
MQITTIGLDIAKNMFQIHGIDAAEEVIVRKQLRRGQVMAFFEALAPCLVGMEACATSHHWARELAKLGHEVRLMPAKDVKAYVKRNKNDAADAEAICEAVRRPTMRFVRIKSAEQQGQLMLHRARDLLMRQRTQLINALRAHLAEFGITAAQGREGIRELLAIVAQEEGSRLPADAHASLTVLATQLQAVQTMIGSLEKRIVAQHRSNEASKRLETIPGIGVLGATTITAVVPDPKAFRSGRDFAAWIGIVPRQDSTGGKQKLGPISKQGDQYLRRILIVGAHAVLRRARQQPEKYPWLTQLLARRPFKVVAVALANKMARIAWALLAKGGTYRPPQLVAA

SEQ ID NO: 105927 - protein, 429 aa, unidentified
MRTESTPGARGPVFCGVDTHADSHWLCVLDWRGRKVLSRQFPADAAGYEALAGAIAAAGEPACVAMEGTSSYGAGLTRHLASLGMPVREALSPARMQRRRPGQGKCDEADAERAARAAMSGSKLGTPKSQDGWVDGVRCMLAARSGAVKARTSAINTARSLLTTAPEGLRSRFRGMGGPRLMEELPSVRAEGALGAALGALADLWEAARDAALDMERAIEASLEENCPALLAMYGCGPVSAAKLAVAAGDNPGRLRSEASFAAICGACPIPASSGKTVRHRLNRGGDRQANSALHEIARQRVMRDPETAEYAERARGRGKSDREVMRCLKRYVAREAYRALMHPHEIRRPEDASELVAARRAAKVSQVRAASILGTSEKYISMLERGQRELKPIRRAYEAWVEAGLPLDWDRRAFEAERKMDSKKHLAK

SEQ ID NO: 105928 - protein, 324 aa, unidentified
MTKVIIGVDPHKLSATIEVVDGHEKLLGSGRFSTDQAGYTAMRTYAKTWPERVWAVEGSNGAGRPLAQRLLEAGEEVVDVPAKLAARVRLFDTGHNRKTDARDAHSIAIVAVRTTTLRVLRPDGELEALRMLCDRREELTRLRVQTVNRLQRLLAELVPGKAKKDLTALQAKAILASVRPRDVAGKTRRRIAAEELADLVAVEAKMKKATAELKALVKARGSRLMDLRGVGPVVAARTLADVGDVARFADRNRFASWTGTAPLDASSGEQNRHRLSRAGNRRMNHMVHIAAISQIRLDTEGRAYYRRKLAAGKTKLEALRCLIG

SEQ ID NO: 105929 - protein, 403 aa, unidentified
MNNVVGIDVSKGKSMVSVLRPFGEVVAKPFSVGHTGSELKELADYLKSLDGETRVVMEHTGRYYEPVARFLHDEGVFVSAVNPKLIKDYGNNTLRKVKTDKADSRKIARYGIDNWAELRQHTPMDTIRMQLKTLNRQQSLYSKTKTMMKNNLIALLDQTYPGVNALFDSPVREDGSQKWVDFATTFWHVDCVRNMSLTAFAERYRKWCKRHGYNFSQSKAVEVHAGAQDLIAMLPRDALTKTMVRQAIDALNAISASLERLKAEMQALAAQLPEYPVVMTMHGVGDSLGPQLMAELGDVTRFTHRNAITAFAGVDPGADQSGTHEAKSTRVSKSGPPELRRALFLVMDCILKTQPQDDPVYRFMDKKRAEGKPYLVYMTAGANKFLRIYYGRVKEYLASLEGN

SEQ ID NO: 105930 - protein, 418 aa, unidentified
MSWTGERVRLFAGDDWAQDHHDVELMDAAGRVLARRRLPEGVAGMARLHEMIGQQLGEDADGAEVLVGIETDRGPWVAALVAAGYTVFGVNPLQASRYRERHGVSGAKSDGADAHMLTDMVRTDSHQLRAVAGDSAGAEALKVLARTHKTMIWERTRQVQRLWHQLREYYPAALEAFDDLDAPDTLELLGRAPDPARARKLTRAQVSAALKRARRRNIPEKATAILAALRGEQLGQPPAVTAAYAATVRSLIAVITVLNEQVKALQGQVEEHFGQHPDAEIYRSQPGMGAVLGARVLAEFGDDPHRYADGKARRNYAATSPITRASGKKKVVAARFVHNDRLVDALNAQALTSLNASPGARALYDDLRARGIEHNDALRRIANRLVGILHGCLKTRTLYNEATAWSHRQNLPQSSVAA

SEQ ID NO: 105931 - protein, 344 aa, unidentified
MSIAILGIDIGKNSCSVVGVDAQGAVKLRRTMRRSTLVDFVGKLPACIVAMEACCGAHHLGRLVAGFGHEVRLMSPEYVRPYVKAQKNDDRDAEAIAEAASRPTMRFVDLKSQAQLDIQTLHRVRSRLVAERTTLINQLRAILLERGVIFAAGRCKFALELEGLNFDEHSPVSIRIQTLIKEMCSAWSELDARIEALNQEFVDLARQTPAMRRLTQIPGIGVLNATALVAAIGNASGFRRARDLGAWLGLVPRQHSTGGRSRLLGITKRGNVYLRTLLVHGARAAVRALSQSDTPLGRWIQGMLARGVHRNVVIVAFANKLARIAWAVLRREQPFAGDYGMVQA

SEQ ID NO: 105932 - protein, 350 aa, unidentified
MLYMGIDLHKRFMFATVIDEAGKEVERARVENKKSSILTYIKQIKNIDEEISAVVEATSNSSKLYDELESELKSISLANPLKTKAIASARIKSDKIDSRILALLLRSDLIPKAHMPAKATREIRELTRYHVSLTRVMTSLKNRVHAILAKYEIDSPILSSVSDIFGKIGTKELRSLTLSPNHSRSLNGYLDLIEFIKNLLAGVKKEITRIAECDEICTHLKSIPGIGDFLAVLIKHEIDDIARFPSHHKLASYAGLIPSTYQSADKTRHGRITKQGNSNLRWALVEATQVAIANSLYFRSHYEQIKKRVGSRSAIVATSRRLLEIIYLVWTQKRNYYEIDRNRSLAVALT

SEQ ID NO: 105933 - protein, 270 aa, unidentified
MQVTTIGLDLAKNIFQVHGVTDDGDMSFNKPLRRVQMLPFFAKLDPCLVGMEACSSAHYWARELSALGHEEKLMPPAYVKPYVKRGKSDAADAEAICEAVTRPTMRFVEMKSAEQQAILCQHRAREMMVGQRTQLSNTIRGLIGEFGITIRKGLESIRNFAQSIEDDNGYDLPDVALSVITSLCQQLLFLHARILRLDKAIATTAKMDHRIRLLQTIPGIGPVNASAIVATVGSAHQFKSGRDFAAWIGLTPLNKSSGGKERLGVIGPNV

SEQ ID NO: 105934 - protein, 356 aa, unidentified
MSIVSRTYAFVVGVDTHAKNHVYAIINAATGEHLDTRDFPTTVAGINRAITWAGKRTGGDVETLWVIEGTASYGAVLAGTVSTAGYRVIEAPRMSAKARHGVGKSDPLDARRIATAALPLPADQLRTPRLNEGVRAALRVLLTARDSMTGERTSAVNGLTALLRITALGMDARKALTGEKIIAVSKWRERDEALAEATARAEAIRLAKRIIDLDDQLKANVTRITELVSVSEAAALLKETGFGPVTAAVCLTTWSHHGRVRSEAAYASLAGVNPIPASSGNTVRHRLNRGGDRQLNKALHIVAMVRMTHDEETRQYTDKRTQEGRTTKEIRRCVKRYLSRKVYRILNAGIPATSPT

SEQ ID NO: 105935 - protein, 310 aa, unidentified
MHPCVGVDVSKHHLDWTFGEDGPVEQLPNTPAGIRQLLVRARRHEPPLIAIESTGGYERPLVIALQKAELPVVLVNPWRVRRFGEGLGRLAKTDPIDARLLALYAERANPPRRPLPGPRARRMADLVVRRRQLLEIVVAEKSRLENAASWLRKDIMSLVSIVQRRIAKLDVKVDAAIAQDPEQHETSEILQSTPSVGPGVARTLIVDLPELGALSRRQITSLAGLAPYARDSGRKKGMRKIRGGRPGPRTALYLAAMNAARFNPVLKEFYQRLRAAGKPAKVAFVAVARKLLTLLNAMVRDRTTWKEAIS

SEQ ID NO: 105936 - protein, 356 aa, unidentified
MTKVRTNFSKQTLYIGLDVHKRSWNAALFLNDQYLRNIHQPPSPQALYSFLQTNYPGADYVCAYEGGKFGYWIQRQLSSKGVECMVVNPADIPATHKDEVSKTDARDARGIAMALQCGQLRGIYIPPLQQESDRSLVRHRKKIWRDLVRCKNRIKGFLDYTGVELPDKFSNSNWSKNFIQWLAEIKFAYPSSRATLNYMIKEMELLRKELLSISNEIRKLMRSKEYKKIYYLLRSITGIGPLTAALLIAEIGDMKRFASFYELNSFIGLLPSEHSSGERESKGRLTIRRHRQLRSDLIECAWTAKRTDPALSLFYSNQLRKGKEPKLIIVKIARKLLSRIRYVWLTEKPYEKGVVA

SEQ ID NO: 105937 - protein, 400 aa, unidentified
MISVGIDVSKGKSTVCLLKPYGEIVCKPFEVQHTEKDLENLANLLQKLDGEIKIVMEATGIYHLPILTFLLEKGFFVSVINPLMMKRFSKDNSLRGAKNDRLDSVMIASYGIEKWYKLKKYEVNDRIYTELRLLGRQYYRFMQTHVKHVQELTHLLDYTAPGLKAMFNSWNEHSNRDKLSDFVERFWHFDLITSLSREEFVEQYLLWAKEKKYHQSRSKAEKVYDLASNGIPTLSSHTPSTQMMIQGAINVLRIVNNSLYYILSRMKELAKSLPEYATVRSMGGVGDSLAPRLIAEIGNVKRLRNGHALVALAGIDPPPYESGQFVGTHRRISKRGSPILRKIGFEVMRVLKSHKEPEDNAVYNYILKKEAEGKNKKLSKIAGLNKFLRIYYVRVMEVYQ

SEQ ID NO: 105938 - protein, 316 aa, unidentified
MSQFNVFVGVDVSKDHLDVHVLPEGQSWRVANDETGCAELGKRLMGLSGTALVVMEATNVFWRLAATALAGAGVRAAVVNPRQVRDFARALGQLAKTDAIDAQVLALFAQRIEPPVRALPSEQCQVAAELLARRAQLMGMRVAEKNRLATARAAKVRKDIAATIAFLEKRIGALDEEIDQWLKSTPIDQSRANLLKSFSGIGEHTARSPLITLPELGSLSSKEIGALAGLAPFARDSGNKRGERQIRGGRTTVRAALYRPAITGIRCNAVIRALYQRLIGAGKHHYVAITACMRKMLVILNAMLKSNQPWKNPQKV

SEQ ID NO: 105939 - protein, 314 aa, unidentified
MNQNTTTDHHLVAIDISKDSLQVHTGSGENFSIAYDKAGLGRLLKHLRRLPDPFVVCEATGSYERPLLAMLHEAHVAVKLINPARLRAFALSEAVRAKTDRIDARMILRFAQEKHLQPAPPPDPVRQQLADLLDRRSHLTGQLAREKNRLQKCQKTIAASIRRMIRFVEKELCALDARIKLIVARDRLLSSQAQIFQSVKGVGEITAWTLLAYLSEMAHLQRNQLVALAGIAPFNRDSGKSCAKRSIHAGRSKVRKCLYMAAHTAAQHNPVIKPYVAGLIARGKPYKCAIVAAMRKLLIHLHSLLKHQQIVIAL

SEQ ID NO: 105940 - protein, 311 aa, unidentified
MTDDTIGIDISKATLDIHRLSDGKMTSFSNCTAGFKQLARFCAETVVIRVVYEATGSYHKGLERALGTMLPLVKVNPLQARRFAQARGVRAKTDAVDAKMLATMGLAFALEPDTSTTKLQHDLKELRAFRSGLIKDRTRIIARLKTQTLAITRRQGKVRLTQVEKQIAEIEAEIASLIQSDDTLAQSMKILLSIPGVGAVCASTILIEMPEIGTMDRKQVASLTGVAPMARESGQWRGKSFIQGGRKVVRDALYMPALVAMRFNPDLKAKYQAMIKAGKPPKVAITTLMRKLIELANILIKENRNWVKKGA

SEQ ID NO: 105941 - protein, 282 aa, unidentified
MGRVIIGVDPHKLSATIEVLDDRENVLGGGRFGTDRDGYRQMLATARRWPDRVWAVEGCNGIGRHLAQRLVADGEQVVDVPAKLSARARVFSTGHGRKTDATDAHAVAVVAVRTPGLNQVLVDDELVALRLLADRRDELAGARTRTVSRLHRLLLELIPGGAPRFLSALQAKALLATVRPRDVAGRTRRRLATELLADIVRLDRQLKDSDQQLRAAVEATGSGLPDLYGIGPVGAARILGDVGDVARFATKAHFASWTGTAPSTPPPANSNDTGSPEPGTGA

SEQ ID NO: 105942 - protein, 357 aa, unidentified
MLIIGCDYHPGFQQIAFVDTETGEYEERRLQHRQEAKQFYRDLAAQGMKVRVGMEASGHARWFERLLAELNFELCIGDAAEIQTKRVRKRKTDREDARLLLRLLLEDRFPRIWVPSWENRDVRQLLWHRHRMVQARTRIMNQLQAVAVNEGLLLKKRLWRERGRQQLESLSLARWASRRRQDLLQLLDRLNPTIAELSQAIEQEVEKCPEAQRLMTHPGVGPLTALAFVLIIGRAERFQCGKQIASYLGLVPLEKSSGNRRRLGHITKQGNSILRFLLVEAAQVTVRSIPEWRSKYFHLMMRRGRKIAKVAMARRLAVRLYWMWRKQWDYEQLKKFGSNAGQLGNRHGVQLEHRVID

SEQ ID NO: 105943 - protein, 418 aa, unidentified
MGKRKNRVCGADVHKDIIVATIQDSDDTEFQEKFGTTTIELGRFRDWLIAHNFEQVAFEATGVYWFPVYDALSPSIDTIVANPWMIKGIPRNKSDTLDSKWIAGNCLDGKIKRSRVLPKDGRDLRTLTRARSAYTKTRTQLRNRIHKYLALCGITLSSYISDIFGKSGRHILDGLIESKDIDTIMDGIPSGKVKNKREPIKASLGNGLDDVSRMLIKDTLELLDHLDEKVSDTSLEILGRLQERARDLAIVMSVPGIGFVSASIILAEIGDYHDFQKSEQLVKWCGLAPGLNESAGKKSPCGITKQGSKHLRTILVEIAQVVAKMSKNNLSSFFHRLRARKNYNVAITALARKLISIIFHLLINQELYQEDNCATVKTKPIKKDLLCLSKDEQFKDGVAAIVDAFYYFKKKSSLEGGG

SEQ ID NO: 105944 - protein, 408 aa, unidentified
MINNELSKHTAMPKTLYVGLDVHKDSITVAIASQGREDATLIGKFPNNLTTLQRHFAKWRQGSTRNGKPLDEEHTGPFDLKFVYEAGPCGFTLHRRLTQLGYDCTVVAPSLIPQSPGDKVNKTDKSDSKKLARGHRSGDLTPVYIPHEADEAIRDLCRLRSDTTSDLKGNKQRLKAFMLRNGYAYEGKTSWNESHMNYLRELTMPCSSQKAILEEYLTAITDGIERVARIEAHMERELENWHLKPVVEALMAFKGFKIVAAMITVSELGDFTRFTHPRQLMSYLGLVSSEHSSGPKQSLGGITKCGNGHLRWILVECAQHYAKEPKVSRQLSTRQRGQSRGVKNLSWKTQNRLHHRFENLRKRRMHRNKIIVAIARELSSFLWELGQLMLKEGTWPHHLTPTTNDSAN

SEQ ID NO: 105945 - protein, 367 aa, unidentified
MKKVSTVRAKQSKNFSGQKLTIGLDLGDRSSWYSVLDERGEIVLEQRLGTTPKAMQEGFGSMPRSRIALEAGMHSPWVSRVLSGLGYEVIVAHARSVRLIGESRKKDDRLDAQTLARLARMDPQLLCPVKHRSAKAQADLTVIRARAGLVRARTALVNTARGLAKSYGERLRGCNVRNMNPEKAEGLSPELQRALEPLLAGIESLSERIRECNERIEQLAQESYPQVAVLKQIKGVGTLIALTFLLTLEDPHRFHKSRDVGCYLGLQPGRRNSGQSEPQMHISKEGDPYLRTLLVQGAHHILGPFGVDSDLRRWGLKLAERGGKSGKKRAIIATARKLAVLLHRLWVSGEVYEPLRNNNQRAMPAAA

SEQ ID NO: 105946 - protein, 329 aa, unidentified
MYNVGIDVGSKELVMVIRHKGKNQKARSFKNTHEGHAQIIKTLTSKKEEVRVCLEATGIYHFDLAVALSRSNTVEVMVVNPKASRHYAEALMARSKTDQVDANILAQFAETMPFVSWQVPDDKTLELRAFSRRLAALTKLKTQMKNQLHALESSISVPEIILEETQTSIEFLELQIHRLKEHALTLIGSEERLQRSLEITTSIKGIAETSAIQLLGELLILPKDMNNRQWVAFAGLDPRHYQSGTSVSKKPRISKAGNSYLRQALYMPALCAAYREPHVKAYYQHLIEDQGLKKMQAVCAVMRKLLHAIHAMLKNESHFDSTRFFNMAA

SEQ ID NO: 105947 - protein, 431 aa, unidentified
MTRISVGVDVSKNRSTVCIMDQDGKFIMRPFLVWHSTEELDFLADTLKRLNGEVRVIMESTSIYQYPIALQLKERGIFISIVNAYEMKQFANTDFRGGKTDKKDSRTIASYGISYWYKLVEWQIPKDTYFNLDLLNRTYMNAKKHRQIILQELQHYIDCAMPGMDKELHSLNLSTKKDFMLDFVEKFWHRDEIVNMTEAEFTEVFTAWAKKKGYRPVEGKAAKIYAIAKSCIPYYPANPTVKTILQCIVDKLSGVNRTLVTIVTQMIEEAKKLPEYQIVREMPGVGDPLAARFFGSVGDIRRFKNSKALVAYAGIDSPPDESGDFSSTHRHITKKGSKVFRDTGYEIMMALRAQKRTWEKVRKNPEVYDYMLKKKAEGKPRKVAKIAALNKFLRIVYARIKELYDNMALAERAKAKTKTKSKTKAKTKATA

SEQ ID NO: 105948 - protein, 335 aa, unidentified
MSSSPAYIVGVDVSKDALDLHILATAAAPAGAPPPRPAPPRPTAARLPNSQKGCTALLRRLRELPGPALVVAEASGAYERLLLEALERAAVPHALVNPGRVRDFARGSGQLAKTDRLDAAMIARFAEVTRPRLRTTPSPARRRLRELLAYDAQLAAELASGGQRLRGFLDPDLRARAEARLEGLRRERAEMAAEIAAQVAADAELAAQAALMRTLPGVGAWVAAMALAHLPELGALSDKEVASLCGLAPFARDSGALRGRRMIRGGRAPLRRALYLAALTACRRDGPLKAFYDRLRQRGKPAKLALTACMRKIATILNAIVRDQSPYQNNAASQP

SEQ ID NO: 105949 - protein, 416 aa, unidentified
MNAVGIDVSSRKSTVAVLRPLGEVVCLPFDVTHDIAGLASLVEKLKALDGETRVVMEHTGRYYEAVAKALHEAGLFVCAVNPLLIKEYGANSLRRVKTDKADAVKIARYALDNWADLRDFTPMDAIRYDLKTLNRQFQLASKQRTASANNLIALLEQSFPGIRKCFDSPVRSDGTQKWVDFAHSFWHVDCVRKQPFAAFCERYRKWCKRHAYLFKLSNAEEVYALAKSAVVLTPKSKVVKVLVQEAANQLSSISRSVEVYRAEMDRLAAMLPEYPVVMAMYGVGKSYGPQLMAEIGDVRRFERKQALVAFAGIDPMPNQSGDKNVRSNKSSKRGSPYLRKTLFNVIRTYLQCAPQDEPVFQFLNRKRAEGKPFYVYMLAAANKFLRRYYAKLRDYFASLDTLQPVAPIPTILKAAL

SEQ ID NO: 105950 - protein, 399 aa, unidentified
MHVGWDWASEAHDVTVMDEAGVVIGHWALSHDEEGITATLRRLAALGAPAGLAVAIEATHSLVIDRLLAGGFPVVPIHPNAFHAARPRWGASKAKSDPGDSYKLADYLRTEGHRLRRLEPLSTETAELQALVRMRDDHVAMRVAATNQLRALLGRHWPGATAIFQRLDSDIALAFLSDYPTPASAARLGAARLAMFCRRHSYCGRRTPEELLGRLRAAPEPTEVLGPETLAELVRAQVRVLRCLLGTIADLERAIGAALLEHPKAPLLAPMPRIGEVNLAQIVAEVGPVLERAVDVAHACAEVGAAPVTKASGKGRAVNFRWAVNKRARNALMIFADNSRHASPWAAELYAEARARGKRHPHAVRILMRAWVRVIWACWHTNRAYDPALHGGERRLLAA

SEQ ID NO: 105951 - protein, 420 aa, unidentified
MKPLSDDEFTAFIGIDWADRKHDICLQGAHGERREFARIEHKVDAIDQWAISMRQRFGGPIAVALELTKGPLVYALQKYDFFVLFPINPATLAKYREAFKPSRAKDDPTDAEHALELLMHHRDRLAALKPQSVPMRTLLHLVEQRRRVVDDKTRFTNRLGYALKQYFPQALEWFDHTDTIVFCDFLTRWPTLLQVKRARATSVRAFFWSHNVRHVNVIDERIQAIKSARALTQDVAVITAYRLQALVLVDQLRVTLQAIDRFDAQIAEIAPSLPDYALFKSLPGAGPHLTPRLLVAFGEQRERFATAAEIQKYSGVAPVTERSGNKCWIHWRWQCPTFLRQTFVEWAAQTINKSFWAGAFYRQQRDKGSSHQAVVRALAFKWLRILYRCWQTRTPYDESIYLNALKQRGSPLLSKLVTQT

SEQ ID NO: 105952 - protein, 400 aa, unidentified
MEKKKRYIRFCGIDVAKHKHVLCVIDSDGNKIVRSRSFTNDKEGYQRLLQSLKNVGQSRTILVGMEATAHYWYSLHDFLVRAGYQVAVLNPIQTAQQAKKGIRKRKTDKLDAFHIAVLLKNGEYKAALVPGELGMTCRQLTRLRYRLVEQTSSLKQLIWSRLHPVWPEYEDLFKDPFCATGRKLLHTAPTPRDVLSMGRKELSELIRKASRGKYAQAQAKKVWQAAANSAGMHRSLEGARIGIRTLLKQIEAVRPIREKLEEDICQLAIRLPTYIFSLPGINPVSAVSLFGETDPIKNFGTPAQLVAFAGLDLGVFQTGQYEAPHRHISKRGSPFLRHTLWNIAFQAVYQEGEIRDYWLRKMADGLKHKAAVTAASIKLCQITWRILTDKRDYLPEGRPN

SEQ ID NO: 105953 - protein, 364 aa, unidentified
MKRKVYVGMDVHKETISIAYLTSNSKELVKELQIKHNEVQIKKFVTKLKSEWNEIHCCYEAGVTGYPLYRYLNSLGVNCTLIAPGKIPRQSSDKIKTDKRDAIKLARLLRSGDLESIHIPSEEEEAVRDYLRSRDSLRLDLGRNRQRLMKFLLRKGNVYSATKYWTVSHYKWLNNLHFENEILQETFNDYYSRVKVQEENLKAMDQKIRGVAESEPFRERVGILRCFRGVDYLTAMFLLCEVCDFKRFKTAGSFMSFLGLVPGEYSSGSKRKQTGITKTGSPRLRRILTEAAWQHRFPGTGSKIVTARRVGQPALVVALAEKASLRLHKKFRNMQQRGKTPQVMITAVSRELSGFLWAAMNLVA

SEQ ID NO: 105954 - protein, 329 aa, unidentified
MHTTVHHTPKTICLGLDIAKAKLDACLLHSGKRHRAQFDNTPAGLRALLAWLRPLHDGPLPVIMESTGSYSLLAATVLYEAGHAVSVLNPRWIKDHARSDGRRNKTDTLDAEIIAHYGLTHDPDLWQPASPAQAALRALLRRLAALGELAQMEARRAEASDAVVGKSIARLQKHIARETAAIEAAIAEHLAANATLHADCERLCAIPGIGLKTARWLVAELPRHLPNSRTAAAWCGLTPRLSQSGSSVRGASSIGREGNRFLRKILYMPALVARRANPRLKAFADSLEARGKSKMSALLAVEHKLLRHAFALLKHQSAYDPNHHPLKHS

SEQ ID NO: 105955 - protein, 392 aa, unidentified
MANIFDTCKSCTPFDQNSTLIAVIELSQGSWLVGGIVPGLERSPAKKLNAKEKREVELLKLLLRWRDEAIKTGRDINRIVVAFESGRDGFWLARWLMARGIEAYVIHAASTAVSREHRRAKTDRLDIELLKRGFLDWLRGEAGHCKMVAIPTPEEEDGKRPCRERERLIGECTRIVNSMKADLTRLGVSNFNPKLRKAAEKLDAVCTPEGRPIPPKTAAKLRREMVRLHQLKEQIKEIESERLEQIKRAPGEKMHAMILLLTQVIGMGIETADMLVREGLSRRLRDRRAAARLVGLTGSPDESGSRRREKGLARAGSARLRTLMIQLAWRMLIFQKDSALVQWFRARTADGAPKTRKTMIVALARKLFIALWRMVTTGEIPEGFVLRPAMAA

SEQ ID NO: 105956 - protein, 369 aa, unidentified
MNHQSVSFDLFFKRIEKQAAKFDLPVSVGMEGYGGWARPLDEMVINRGWKLLNVNNLKLARYKEIFPSPAKTDAIDARKILELMRLSPLLPQAKEILNEVIPAPQVNHHMKLLTRRRRQLVDERVTIINRMHSDLQAIAPGLLEITGSVDNLWFLNLLIARDSFKQMARMHQSGIMKIKGVGRKYAELICDWKKTAGFSSDVLLVGDMVIEDAKRVLALSGKIKRIEVKLKDLIGQSHLASTIASITGFGHICSAEPAGEIGTMKRFLSEAALARYIGMAPLDNSSGVYKGAKGGKQINRRAKAAMMTAVARHYLHTPQSKVYYEKKRAEGKKHNQAVRSLGRHMTRVIWSLVKHNKLYECREKLSEIA

SEQ ID NO: 105957 - protein, 316 aa, unidentified
MMIVGIDISKASFDAAWEADGQVHHQCYDYTDEGMARLLAQTPAAAHYVMEATGIYHARLALVLHASGRCVSVVNPLVIKRYAQMRLSRVKSDKADAELIQRYGEQHELSLWKPASAEVLELQQAHRWLDDLIRERARLANRQEAHAHHAQPSPFVARQMLAQQRQLDKQIKGCEQHLEVLVKKSFPELYARLLTIPAMGPKTALELIVITDGFSRFEDVKALCAYVGVSPTTFRSGTSVHGKGGIAKLGQGRMRQLLYLCSWTAKACNPACKALYARLKALGKPAKVINIAIAHKLLRQAFAVATTHSSFSAEYA

SEQ ID NO: 105958 - protein, 394 aa, unidentified
MKLIGIDIGKNKHFFCVMDQQTGEIISQPVSFSNDKEGFDFLVQKIKSYQKDSILIGMEDTGHYHFALLKYLLDLQYTVALINPKTTDFNRKMQGGITKNDKLDTINICDVLDTPERKKQYRITKVNSFDLYEQKQLTRHHHNLKEEENVYKNRLQKCIDIVFPEFNKLFNSKYGIVYMNILKMFGSAENIANTDIRTIRKCFEIEGRGNRISLTPERLKECARSSIGISSSAEVIQIKHLTAQIELIEEQLTEIDKKIEEFSIQNNSPILSIPGISHFSGTSILAELGDISNYSKPSQIIKFAGVAPLHYESSQFNAQHTAITKKGSKYLRKTLYQIILPVIRHNPVFNKYYQLKISQGKGHRCAQGHCVRKLLRIIYHLLKTNQQFDPQLLR

SEQ ID NO: 105959 - protein, 367 aa, unidentified
MKKISTAAAQKKEKVEGQKLTIGLDLGDRWSWYCVLDEAGEVLLEQKLATTPKAMKEVFGGMPRSRIALETGMHSPWVSRLLSELGHEAIVAHARNVRLIGESRRKDDRFDARTLARLARIDPELLGPVKHRSRKAQADLTVIRARAGLVRARTSLINTARGLTKSYGERLRGCSPRTMNRELAEGLSPELRSALQPLLDEIESLSERIREYNERVKQIAQESYPEVARLEQVKGVGTLIALTYVLTLEDPRRFRKSRDVGCYVGLQPGHRNSGQSEPQMHISKEGDPYLRTMMVQSAHHILGPFGEDSDLRRWGLKLAERGGKNAKKRAVVAVARKLSILLHRLWVSGEDYEPLRHSRPALLPAAA

SEQ ID NO: 105960 - protein, 385 aa, unidentified
MVAQLLAIPAEGPVWDQAVMGWTPPRRPWCARVVAFLTTEQEASVSEASTIGLDLAKRVFQAHGADASGKVVFRKRLRREQVLAFFAGRAACVVAMEACSSAHYWAREIGELGHTVRLIPPAYVKPFVKRQKNDATDAEAICEAAQRPTMRFVSVKSEVAQANAVVFRTRDLLVRQRTQAINALRGHLGEHGVVVAKGPCHVAKLIAHVEDPATGLPEAARTVLRVLTASLQFLSERIDLLDREIARRAREDKEVRRLTTIPGVGPVIATALAALAPPADAFRRGRDFAAWVGLTPSQHSSGGKQKLGATSKMGERTLRRLLIIGASSVVQKAIKHGTPSGSWLGRMLARKPRMLVIVALANKMARTVWALRATGEIYRAPVVAA

SEQ ID NO: 105961 - protein, 326 aa, unidentified
MSMNPSASSQEEAPLKYICGIDVGSQSCAGCVYRLDKSLVVKPLAFANAKEGWNVLLDKLTQLDALPKQILIGMEATARYSENLYHALEQRGYRLCLLHPGQTHQFHERQGLRAKTDRLDAITIARVLLSGEARAGYIPDEQVATYRELVRLHSQLSEQVARYQNQIHPTAKKLLSLASTSVSSQRAEAGRSLSLRILCGQLEQTQKYLEELQAELEQLIANDPAAKSLQQIPEFGTQTVAVLRAELGDVDRFARTDQAIAYAGLDVQIKESGLWKGKAKLSKRGSGPARGRCSIWRLCVAFICRGLPLGLTIRDWWHAVSRKAPP

SEQ ID NO: 105962 - protein, 376 aa, unidentified
MKRGNGMDPALALGWDVELSRAEREASMQIVRIGLDLAKYVFHLHGVDERGKVVLRKTLRRPSLAPFFANLPPCIVGMEASNGAHYWAKTLSELGHDVRLISPQFVTPYVKSNRNDRNDAEAICEAVGRPNMRFVAVKSSEQLAIQAVHRIRSRLVGNRVRLVNQIRGLLGEHGVVIAQAIGNLRRALPRVVDDESNGLTSIVRALIGELREELSDLDGRIAIYDRKIMELYRTSEACQRLGEVEGIGPITATALVAAAGDGRCFRNGRQFAAWIGLVPRQRSSGGRSRLLGISKRGDRYLRTLLIHGARAVMGRIRGKQDPRSLWLLKVRERHHANVVAVALANKNARIAWSLLARGLNYDQRQTVSSASAPRAV

SEQ ID NO: 105963 - protein, 352 aa, unidentified
MIIIGVDFHPEFQQIASVDTDTGEFQEKRLGHREDAEAFYRALAGQKVRVGMEASGHARWFERLVAELQFELWIGDAAEIRTKRVRKQKTDRQDAQLILRLLLEDRFPQIWVPSWENRDLRQLLWHRHRMVQARTRIMNQLQAVVLNEGLRCKKRLWREHGRQQLESFRLAPWASRRRRDLLELLDRLNPTIAELSQAIEQEVEKCPEAERLSTHPGVGALTALAFVLIIGQTERFHCGKQVASYLGLVPLEESSGNRRRLGHITKQGSSMLRFLLVEAAQVTVRSVPEWRSKYLHLMMRRGRKTAKVAMARKLAVRLYGMWRKGWDYEQVKKFGSHAGQPGNRDGVPSNTE

SEQ ID NO: 105964 - protein, 438 aa, unidentified
MSNKVIFNLDELFISVGIDVGADFSWMSIALPNQQFVGKPYKILHNSIDSLTTAVSKIKEAEELYSLESRIFLESTGIYHYPLFCYLRDKGFNCSVINPIITKNSTNINIRKVHNDRFDSKKAALVGLKPDLKVSLIPSDLALNCRNLCREYYDLMDNRSAYVNKLQGELRMAFPQYLGIFSKVTINTSLTLLETYTSPSAFLKADKQEIIDIIKSTARFGLTYAQNKYNAIIQAATDANQFGYIIDSNIKRIRLYISFIRKYDEEINSILESLHELVDANEDSDFVKQIHLIETFKGAGFLSAVSIMGEIGDFSAFSKPKQLFAYFGLDPAVKQSGKFEGTKVQMSKRGSAIARRVIHTLTLQSISISRNREAKNPVLREYYLKKCDSKPKLVAMGAVSHKVCNMIFAILRDNKPFKIIAPQEHIKQYNSAKCDIAA

SEQ ID NO: 105965 - protein, 351 aa, unidentified
MIIIGVDYHPSDQYIALVDTETGEYGERQLNHSDREAEKFYRELAQRGASVRVGMEATGYSRWFERLLAELGIEVWIGDAAEIKTKRVRKQKTDREDARLLLRLLRENNFPRIWVPSPENRDLRQLLWHRHRMVQMRTRIMNQLQALAMNEGQRRKKKLWSDQGRAQLAKLPLATWASRRRKDLLELLDRMNPTIEELTGAIEQEASKWPEVLRLMTHPGVGPITALAFVLIIGAPERFSRGKQIGSYVGLIPCEDSSAGHQRLGHITKQGSSLLRFLLGEAAQAAVRWDADWRRRYMHLAIRRQKNIAKVAMARRLAVRLYWMWRNGWEYSQWVKFGSHAGQLGTRHGVN

SEQ ID NO: 105966 - protein, 414 aa, unidentified
MESVYRSMAGIDVHKKMLAVVIRRTSGEQTEYEKRKFSTTRGEIQHLEAWLRVRGVSEVVMESTAQYWRPVWYGLEPYFRLHLTHPLKTRAPRGRKSDFRDAQRLADRWSSGDLEESFIPGSEQRAWRWLTRTRVQLNKKLGVIHNHVEGLLEQGGIKLSAVVSDLFGVSGWAMLEHIARGVTDIQVLAGEARGVLRKKDAQLKEALAGRLDPVYRLLLKQHLDQVRLLRKQIEEINRALAEAMKEHIAALHRLTKIPGVDLYAAQELVAEIGPKAAAFASAEQFASWVGVCPGSQESAGVNYSHRSAKGNRYLRRLLCQIAWAAIHTKDTFFAGLFARLKPRVEGKGAAWAVAHRIAKIVWLVLNRQVDYAERGPAPPNERTLVRKFKRMLKEFGQLGLDVRALLDQHVTTQA

SEQ ID NO: 105967 - protein, 339 aa, unidentified
MRETCCSQVRFGLAITCPILGIDVDSKYLVVHLLLLDGTNRTRQFKNGPAGFKELVEWLAQLKASDALICMEATGRYGEKLAKYCHSLGFKVVVANPNFISRHKESLNKHNKTDPTDALAIADYARCFEGRLRAWEPLSPVREKLRDVLGQIAKLKKARTMFSNRNHCGLNDVLVRDSNDESIAFVSAQIDKLSEYRDSLFEELPALKVARAALMQTVGIGKEIATALVVRVQMQNFASGRELGAFLGCASAEWSSGKQKRRGRQPKAGDSDLRSLLRLGAASALRTSFYRDFVDRLTKRGLSKGQVIGAVARKMLLIAHAVLRSGKPFDRNYKSPLAT

SEQ ID NO: 105968 - protein, 409 aa, unidentified
MNTQTRFVGLDVHRQFVMMAAVDAQQQVLFEAVKVPLDTFKAWARMHLQATDQVALESTSNAWAVYDAVLPMVAEATVADAHKISLISKSPRKTNQHDALILAKLLAANLLPAVWVPPQEVRELRSLIAHRRHLVRDRTATKNRLHSVLHRHNLHLPQGDPFSEANRAWWQALALSSAEQLRVRHELLHIQHLSQLIDEVEVEIAQLSAQEPWCEQLAFLIQLPGVSWLSGMTILSAIGDVARFPGSRQLVGYSGLGASVHASGNTYRTGRITKQGRRELRTVLVECAWAAVRYSPFWKVRFERLRAQVGKQKAIVAIARKLLVVIWHVLSKREVDRQADPQAIARSLMKWASRYRMATSSGLSRPDFVWRELDRLGLGQHINQFYYSGHLYVRQPDAPPVVREAAART

SEQ ID NO: 105969 - protein, 428 aa, unidentified
MREKRVVGLTGKQRQEKKWNAKALEIVHPNAAGVDVGGKEHWVAISPERDEEPVRRFGCFTADLEQMAVWLKARGIESVVMQSTGVYWIPLYEILEQSGLRVWLVNARHTKNVPGRKSDIQECQWLLKLHTFGLLNNSFQPTDQVRVSRTLWRHRNGLVTQAGSAIQRMQKALVEMNVQLHTVISDLSGMSGMAILKAIVGGERNPKILAGLADGRVRASKEEIAKSLHGNWRSELLLILGQELKLYEHYRGQIAECDRELQKHLKTLSSKAGIEEHPLGPRPKGKASGRNAPQFDLRSELYRISGVDWSQVNGIDVQVAQTVISEVGVDMSAFPSERHFASWLGLSPTNEQSGGKILNRRTRKVVNRATVAFPPQCGIHTVAKSKLPGRAISATTNATGSAESDHGDGAKTSLSILPATALRPTVCR

SEQ ID NO: 105970 - protein, 321 aa, unidentified
MAAVVIGMDPHKRSATIEVMAGDESVLGGGRFGTDATGYRAMLFYARQFAERTWAIEGCQGIGRHLAERLIREGEAVVDVPPKLSARARVFATGQGRKTDATDAHSVALVGTRMAGLRPVVNDEQLTVLRILADRRRSLGEDHTRMTSQLHQLLLQLIPGGAKKDLSAAQAKALLAKVRPRDAAGKTRRRVAAELIADLERIYARTKAADKELKQLLADTGTTLTQLHGIGPSGAARLLVEVGDITRFPSKAHFASWNGTAPIDASSGEQIRHRLSRKGNRQINRVLHTMPSCSCVTRPKDGPISTAGKPTAKPRWKRCGR

SEQ ID NO: 105971 - protein, 326 aa, unidentified
MTDSIQGILGIDISKLKFDVALMVAGKIKKTHVFENAPDGFKALSEWLKKQGHSSVSACMEATGCYGDALATYLYDQGFTVSVVNPAQIKSFSGAQLKRAKTDKADARLIAQFCQQMKPDHWAPLPLHVRELQALVQRLSALMQMERQEHNRMDTAPAVIRPSIATVLTTIKAEIKTVEAMIHDHIDRHPGLKDQSKLLESIPGIGQATIYRVLAFIGDVQRFDHAKALAAFVGLNPTVHQSGSSVRGKPHLSKKGNSVIRRALYMPAIVARRYNPVIKEFAERLKKAGKSNMVIIGAVMRKLLHIIYGVLKSGRPFDPFFSASQA

SEQ ID NO: 105972 - protein, 341 aa, unidentified
MDIAVLGIDLGKNSCSVVGLDGSGKVILRRRMQRKTIVVLTSKLSPCIVAMEACCGAHHLGRVLSAQGHTVRLMSPEYVRPYVKAQKNDDRDAEAIAEAATRPTMRFVALKSEEQLDMQTLHRARDRAVGERTSLMNQLRAVLLERGVIVPQGRAKLRLRITELLRQPPEQISSRIRLLIEDMLMRWQALDERIAVFDGEFAAEAKRDEAARRLTSIPGIGALNATALVAAVGNAQTFARGRDLAAWLGLVPRQATTGGKPRLLGITKRGSKYLRKMLIQGARAALPTLSRSNTRLGQWLRGLLARAHSNTVVVALAAKMARTVWALLRYGTTFEPRAIAI

SEQ ID NO: 105973 - protein, 327 aa, unidentified
MGKSIIDTSSVTRVGLDLAKRVFRIHAVDATGFVVIARSVNRRTLLKFFDMLPRCVVAMEACSSAHHWGRQLLELGFAVKLIPPAHVKPYVRRSKNDAADAAAICEAAGRPGQRFVPVRSVENQAALMRHRARELMVGQRTAALNALRGHLSEIGVVAAQGVQNAYALKEIAAEGFDENGEIMVPDCVRLALAPLVRQIDALDEAIEAIDRELEASARTDETAKRLMTIPGVGPVTAMALLATIQDFAAFSSGREFAAFLGLTPREHSTGGKPRLGRITKMGDRYSRASCWFRARAPRLATAKDITTPCAAGRAECSSARPSSTSSS

SEQ ID NO: 105974 - protein, 361 aa, unidentified
MKTVLFFQEKYGVLTPELEQMLAKMLEYHVEEVCMESTSIYWMPVWRVLENYVSLKLVNPYFIKQLPGKKSDVKDAEWIATCLLKDLIKGSYVPDDLIQQLRQYDRRISDLNAECVRKLGKLDAALQRCNIRISNYVSTTDSKSYKEVVRLISEGTRDPAELTKVIHGRTVNRVGKDVILASLTGVISNTDIDVIRQLREEVALAEKHKDECQSKMDAICQQYFPEQLKNLQTIPGIKGRSATAIIAEVGTDMSSFEDAAHLVSWCGLKPRNEESAGKIKARSITHGNKYLRKTLIECAWAASKTQGCYFNKFSYHQVVVRRKNKMKVQVAIARKVLTAVWYVMHDSVAYRDFTPDIAPTE

SEQ ID NO: 105975 - protein, 323 aa, unidentified
MRKHITVCAGIDTGKYKLDVAIDGSPEQLQIDNTADGHAELSVWLRRHKVNRIGIEASGGYEQEVVRHLRRDGFVVVVFQPAQVRAYAMFLLQKAKNDKIDAALIATCTAAIKKIHASPDDRLAPFAARMTLIEQLTDQVACCKCYREGSREPQIRQFWKAEIARLNKLLRAELKDLAATVRQHRDLAERLDLIESVDGVGLKTAMAILVRMPEIGRLTREQAAALAGLAPYDDDSSTHFGIRHIGGGRQRLRGALYNAALAAAFHWNPQLIALYQRLIRAGKPHKVAMIACARKLLIFVNTVVERGTPWTSTVPQSLIRKAA

SEQ ID NO: 105976 - protein, 337 aa, unidentified
MQYFAGLDVSMEETHVCVVTRNGTVVYEAKVRSTAASIAAALARAPACRRVLFETGRMAPMLYHGLSRLGLPVVCVESRQAYQALKSLATHKTDRNDARGLAHLARTGFFKPVHVKSVPAHAIRSLIIARKKLVGQRVTLENQIRGLAVVFGVRLPRALSPAFIRQALQASDGIPGLSAAMRGLVAARAAVLAAVVAIDGDIRKMARASGACRRLMGIPGVGQLTALAFTAAVDDPGRFRRSRDIGAYLGLVPRRYQSGEVDYTGGISKCGDRRVRTLLYEAANVMLTRYKAQLKLKDWALAIAKRSTMRKARVALARRLAIIMHAMLQHGTEFKSA

SEQ ID NO: 105977 - protein, 344 aa, unidentified
MTYYTGIDVSLRSVSICVVNDKGEIRLEAKVAAEIDAIVDCLHRFDRDVRSVGFEAGTLTQYLTYGLQAAGFEVICLEARQVSVTLAAMRNKTDRNDARGIAQILRTGWYSRVHVKSLHSHQVRALLASRKVILKKCVDLENELRGLLKVFGIRLPSRVGHGAFDAELRQTVSGDDMLACALVPLLDARTVLYKTYLKLDNAVKAVVRVDPICRRLMSTPGVGPVTALTFKAAVDDPGRFKSSRTVAAHFGLTPRRFQSGELDNPGHISRAGDADVRSALYVAAHSLLTRNAQWSTLKAWGVRLAKTRGHRRAVIAVARKLAVILHRMWIDGSQFRWGPAPAQA

SEQ ID NO: 105978 - protein, 292 aa, unidentified
MEHELHYIGIDTAKEKLDVDVLRPDGRHRTKKFANTTKGHDELVSWLKGHKIDHAHICIEATGTYMEPVAECLYDAGYIVSVINPALGKAFAQSEGLRNKTDTVDARMLAEFCRQKRPATWEAPHPLERALRALVVRHQALTDMHTQELNRTETAREVQRPSIDAHLLWLEAELKRLEKQIKDLTDDDPDMKHRRKLLESIPGIGEKTSAVLLAYIGLKDRFAHARQFAAFAGLTPRRYESGSSVIGASRLSKAGHVSLRRALYMPAMVATSKTEWGRAFRDRLAANGKKGR

SEQ ID NO: 105979 - protein, 333 aa, unidentified
MKDLSAKQHFVGCDVSKDTLDFALFERGKDYRGFEHIQVPNNTEGFQAMRKWLRGLKVKLSEAVVAMEHTGSYSTALAEWCHKKGYAFVFLHPLDVKNAGARGRNKTDKIDAQFIADYVYTMREKLEASTPESPVIKKLRVLRNERRLAVNARTAFANQSKCLDDAHAAKRASKIISELNKQIAAVEAQMLDVISSDESIKSNYELLLTIKGVGMINALAAIIATGNFTRFQTARQYAKFCCVAPLSCRSGTSVMNGDHVSKAGHNDIKATLTEAARSAIQHDAQLKQYYERKRAQGKSHACVMIAVKFKIICRMFAVIQRQTPYVNTDRYKS

SEQ ID NO: 105980 - protein, 361 aa, unidentified
MDNVTRWVGLDGHLRQSAAAVIDTGTGEVTEHRIEGGAAQVAAWLEGLPRPWRGVYEAGPTGYTLARRAAAAGLELEVCAPGHVRRRPGDRVKTDARDARRLARLHAAGGLTLVAVPRVEDEQVRDLVRAREDVRADLMRARHRLGTFLMRRELLYPGPGKAWTAAHRDWLSALRLGDRASELTLADYLHAHDLLLARRAGLDAALAEIAEQCRFAPLIGRLRCLRGIQTLTALGLCAEVGDFGRFAHPDRLASYLGLVPSEASSGERRRQGAITKAGSTHARRLLVEAAWHYRRPPRASAALERRQRGQEAWAGAGAWRAQRRLHRRWQRLGAERGKQGGIVAVAVARELSHFCWELAQR

SEQ ID NO: 105981 - protein, 375 aa, unidentified
MGERNTTDVGLDTSKSSIQVAMLLPGSEKAVEWEIANEPRAVRRMAKRLKREAVGELRVCYEAGPCGYALQRQLRELDVSAIVVAPSLIPVKPGERVKTNRRDAVKLAVMLRAGALTAVHAPTPEEESVRDLCRCRDDIREDMMRARHRLLKMLLRRGLIYPGKAWTDAHRRWLRSIIFERAADRAVFDDYVRAIEHLEERRCTIDVTIETMSHREPYREPVAWLRCFRGIDTVTAMSIVAELHDFRRFQSARELMSYLGLTPSENSTGDRHRRGPITKAGNKHARRLLIEASWHYRHKPGVGQKLRKRREGQPGWVLALADRAQARLHRRYWRLVTHGKAHNKAVTAVARELSGFLWAALRQPRAGKGSGASAG

SEQ ID NO: 105982 - protein, 315 aa, unidentified
MVDVPCFVGIDVAKAQLDIALRPSGERWAVPNDADGVATLVERLQTLHPTLIVLEATGGLERPATAALATAGLPVVVVNPRQARDFARATGQLAKTDALDARALAHFADVIRPTPRPLPDAQTQELRALLGRRQQLIVMRTAEQNRLAGVHERLRQDIEAHITWLNARLATLDDDLETVLRASPLWRENDDLLQSAKGIGPVCARTLLLELPELGTLTRQQIAALVGVAPLNCDSGTLRGRRTIWGGRAHVRTVLYMSTLVATRYNPRLKAFYERLLAAGKVKKVALTACMHKFLTILNAMLKHRTPWQSQEVQG

SEQ ID NO: 105983 - protein, 355 aa, unidentified
MGSKKYIGMDVHQATISVAVMNETGKVVMDSVIETKAGTILEFIQGLHGTLWVTFEEGTSAAWLYDLLKPYVAKVVVCDPRKNALLKAGNKNDRIDARKLADLLRTGLLSPVYHGESGVRLLKELARSYLAITKDLTRVQNRIKGLYRSWAIPCAGQKVYSPRHRTAWLKQLPEVGVQRRAARLYQQLDDLRPLRREARQELLLESRKHPASTLLRQIPWLGPIRVALLIAFVQTPHRFRTKRQLWAYSGLALRSRVSGEYRSADGQLQRVKRPPALRGLNENHNHELKALFKSTATRAGAAAGPFGEFYAALLATGMRPTMARLTVARKIAAIVLSIWKKGERFDPEQLKRQAA

SEQ ID NO: 105984 - protein, 316 aa, unidentified
MNDINTNEINIGIDTSTTQLDIFIRPHGHFESFENNTQGIKKAINYIKPFKPTRVLIEATGRLEIDFVCAAAKAKLPVVVCKAINVRQFARASGRAAKTDKLDAQDIAHFGEALKPVLTQLKPEKMRLVSDLLTVRSQLLTMSTMQKNRLQRMPKTVHTPIKNILKSLQKEIATIEKKLDQEIAKIPEWQDKIDQLTSVKGVGKVVAYTLISELPELGQLNRKQIAALVGIAPMNRDSGSFEGKRYIRGGRHKVRTVLFMSMMTAIQHHPKMKAMYKRIVDTGKPKKVAIIACMRKQLIILNTMVKNGTHWDENMA

SEQ ID NO: 105985 - protein, 363 aa, unidentified
MRIIGCDLHARQQAVAMLDTETGELVSMTLTHEGNNVREFYSQLSRPVRVGIEATGSMQWFVNLMEELGIECLVGHPAQIRACEPRKQKHDRRDAELILKLLAEDRFPAIWLPSKELQDLRSLLRHRHQWVRMRTRIQNALQSIALANGLRRGTSLWSHDGQNTIASLPLARHTAYRRSELQALYAKFEAEIEKLNQRVEEQASERPGARLLMTHPGVGPVTALATEVFLGDPARFADSKALASYVGMIPREYSSGGRRQRLGGLTKQGNPLLRFLWGEAGAHAVRRDPELKRFYRRKLIQKGFGKASVAAARKLGIRLWIMLRDKIDYNEFCRRGQKQQKSSDACAGMPETPYGANSHRPVD

SEQ ID NO: 105986 - protein, 324 aa, unidentified
MDSGPIFVGIDVSKESLDVYVRPLDLHFSLDYTPQAVAGLVSRLEELAAKLIVIEATGGLETLVVSELAAKELPVAIVNPRQTRDFARATGQLAKTDRIDARGLAHFGEAIDPPVRPLASQQAQEFEGLLVRRRQLVEMLVAEKNRLSAVAHLRKVAKDIEAHILWLEKRITESDKQMQKAIEDSPVWRVKEDLLRSVKGIGPVTARTLIASLPELGNLSGKQISALVGVAPFADDSGKRRGRRRIRGGRADVRSVLYMATLAAVRSNSVIRAFYKRLIKAGKKPKVAITACMRKLIVILNAMIKHQTPWREPEISAQKSQAHA

SEQ ID NO: 105987 - protein, 455 aa, unidentified
MSNGSRRRLSRGDRRRNEKLARLREIITRETAVVAFDLASDKQVCALTDPDSRVLARRTARVKAWQLAQTLDWGLAAAAEAGFTSVVVACEPTGHRWRVLDQLAAERGVMLVCVQPLLVARAREAEDFTRNKNDDTDATIIARLVTELRCYLPERADPAWARLRHLGARRARLVVEVGAARQQVRDLLECAWPAVLDAASKPLDSANWLTAVATGLDRVAATGELSELGQRGWEQFAAAVRAELAPTRWYSVIVRAVFDAATDPAAAAVGVVDQRAGALERVRFALADLAHLRTQIAEVETRMTRVLDTLGLTELVTGIPGVSAVGAATILAEAGDPTRFSSARALVKHAGLCPRANESGNYAGTTSISGRGRPELRLAAWRAVFTALQHNPVLAARHAHLTGRAENPLTDTQARIAVAASLLRQLHAVVVTRTAWDPAVAAGLDRNHQRAAAAA

SEQ ID NO: 105988 - protein, 417 aa, unidentified
MKKDSNCLKTSEAHARRRKLGAAVERKPQEVMAELVAKLAQQLDEEIVPTAEGKKGERNRVRPNLDRLTVGVDLGDQWSNYCILGLSGETLAEGKFRTRKQEVAEFFQNLATSRVVFEVGTHSAWVGEVIAGFGHEVLVANPRLMDGSKRRRRKNDRIDAEKLARLGRMDPKSLHPIQHRSTEVREDLLVLRAREALVESRTKLISAVRGLVKSMGARVSNCSSPSFSQKAAAEIPDEVRETLQPLLRLIATLSDEIKTFDRRIDKLGAEKYMHTQLLRQVVGVGPVTALGYVLTLETPLRFARSRDVGPYLGLVPRQEDSGDIQPQLGISKAGDRMVRKLLVGSAHYILGPFGPDTDLRRFGMRLCERGGKNAKKRAAVAVARKLAVLLHRLWMSGEVYEPLGHGTLTKIAHDVAA

SEQ ID NO: 105989 - protein, 312 aa, unidentified
MTELTIGIDISKDHLDAHRLPDGAAKQFANSKAGLTRLIRWIGVEDVARIVFEPTGRYHRALERRLGAAGYPLAKVNPRQAKRFAQVLGVRAKTDRADAEMLARMGAALALEPRPVKPEILHDLNDLQVARRALIKDRTAAKNRTGALRLALLKRQNAARLKRIEADLTQIDNAIAAMIMAEPELKARHAILISIAGISGVTAAAMITLMPELGTLEHKQAASLAGLAPVTRQSGNWRGKAFIQGGRAALREALYMPALVACRFNPDLRAKYTQLIQAGKPPKVAITAIMRKLLILANALIRDNRLWEENYA

SEQ ID NO: 105990 - protein, 342 aa, unidentified
MKVLKQVLGIDVAQKELVVTLGRLNDDLSIELCAYSVFKNTDKGFLKLSQWIDKLTDKTTKVRYVMEATGVYHEKFAHYLDEKKEDLSIVLPNKISNYIRTLEIKTITDKTCSEAIARFGLERKLDNWKKPKAIYRTLKQLTRERRQITDERTIVKNQLHAEEAEAMPHISSIERSNRRIHFLNTLEKEIKNEIESSIKENKELSKDISNICTIPGISILTTATVIGETNGFELIRSKKQLTSYAGLDVKEKLSGTSVKGKPSISKRGNRYLRSCLHLPALSSIKWDDNFRDQYSRIVAKHGIKMKGCVAVQRKLLELIYILHKNKAVYDKDFESKKNSVPA

SEQ ID NO: 105991 - protein, 360 aa, unidentified
MKRWHFIAFDTHSSFCEGAVVNSLGDVVDRNRCATVLPALLGVIEEVPRPRALVIEEGPLAGWLWRGLRGAVDRMVVSQPRRNRLISAEGDKDDPIDAEKLALLLRGGYVKEVHQVESLERAVLKQQVALYHFRVRQRVRESLRLSSLFKQHGVMIREKDYVASEDRPALLARLPKNATLHEAVQLLCQVYDELVEQEERWRKRLIHLAKKEEVVRRFEALPGFSWIRAATFYAYLDTPWRFRNKSALWKYLGIGLERERSGKGPERLHVPLLTHRLLKNTILGAALSAVVQGHNPFADLYRRWIEHGLSSRLARRNVARLQSATLWGMWKNGSAYRPEWVGVAAAAQRGDSGVSARDDC

SEQ ID NO: 105992 - protein, 357 aa, unidentified
MSTKTAVGWDIHRKFSQLSVVTQSEQGEIRVVKRMRLEHADRAAMREELAKLPPSTPVAMEGAFGWPWIADLLDELGLDPHLGHPPAIRVLAKNEAKADRMDADRMGRFWLRGIFPECYLSTPEVRRLRERMRYRTALVQLRTGIKSRIQAILHRQGVLREHSDLFGKGGRAFLSTLELPVDCRAALDGWLAQIDLLDAQLAEVEAWMKQRLEEDDVTRLLQTIPGIGLILAHVIRAEIGQLIERFPSRRHLASYSGLAPLANDSADRHGHRHIAAACNHMLRWSFIEAAQCVLNSKNCPANLRRLHNRLTHGGRVNKSQAKVAVARELCELVYVIWKKGEPYREITSPVQSQRPKR

SEQ ID NO: 105993 - protein, 355 aa, unidentified
MNDAKYIGLDVHQATISVAVLDSAGKLVMEAILETKAETILQFIHGLRGSLHVTFEEGTCAAWLHDLLKPHVTQVLVCDPRKNALIKAGNKSDRIDARKLADLLYLNKLNPVYHGETGIRTLKELARSYLALTRDTTRVMNRLKALYRSWAIPCAGQRVYAPRYRSEWLAKISEAGVRCRAEIYYQQLDGLRSLREQVRRDLLAEGRKHRAMKLLGQIPSIGPIRAILLIALMQTPHRFRTKRQLWAYCGLALQTSTSGEYRIVKGQLKRSKRVLAIRGLNANHNHDLKNIFKGAATLAAAVPGPFQEFHAGLVARGMKPTMARLTLARKIAAITLIVWKKGVRFDAEHLKQQAA

SEQ ID NO: 105994 - protein, 347 aa, unidentified
MKFYNIQHQYYCGIDLHARSLYVCILDRNGNALLHKECSAKPESLKQIIEPWLDDLVIGVECMHCWYWVADFCQAHDIAFILGHALYMRAIHGGKVKNDRIDSLKIAQLMRGGNFPLAYVYPRQMRATRDLLRRRTHLVRHGANLKAHVANTTSQYNLPPNRVNLKNVSARQQLRHAFPEQSVQQMINLDMAVLECYHHELSKIEWYLEQQAKQHQPVYLSLLRTIPGIGRILALTILYEIGDIARFETVQQFASYSRLVKCKAESAGKSYGTQGNKIGNAHLKWAFSETAVLYLRGNEKFQLYLQRLQKRMSKAKALSALAYKLGRAAFFMLKNKTVFDEQRFLAV

SEQ ID NO: 105995 - protein, 376 aa, unidentified
MIKTDVQYPTVHLAIELSRSVWLVAARLPGVEKPSLHRIGGGDTAALLALAETLRARAAAKLGAPVRVACCFEAGRDGFWLHRLLTAEGLAAHVLEPTSILVSRRARRAKTDRLDALGMLRVLAAYLGGDRQVCGMVRVPTPEEEDAKRPHREREDLVRERVRLENRIAALLATQGVRERPSLRSWERDLAALRTGDGRRLPPHLRAELDRLRRRLVLTLELIREVEAERDAALAAEPRDAVGRKIAALCRIRGVGPNFAAVLTREVFYRAFANRRQLAGYVGLTPVPHQSGEADRDRRISRAGNPRARTTLIQLAWLWLRYQPDSAPARWFRDRVGALRGRTRRIAIVAMARKLLVVLWRYAETGLVPEGVEVAA

SEQ ID NO: 105996 - protein, 323 aa, unidentified
MFYLGIDVAKAKIDCCLILENSANKKKTKTFSNTPKGFEQLQTWLKQHAATSTQTIILMEATSIYHELLVKYLFDAGYQVCVTNPARARYFAQSMSKLNKTDKVDSEVLARFAMTADLHFWQPLPKHIQLLNALLDRRAILCEDLQREKNRLETESTFTMEPVLQSIHKSIEQLNKHIQGIDQQIDDHINQNPDLKNDKELLSSIPAIADRTSLLMLSFLRSHTFERASQAAAFVGLVPIQKQSGSSIHGRSRLSKAGSSKIRAGLYMAAIVATRHNPHIRAMNERLLANGKTKMIAIGAAMRKLIHLCYGVLKHQQPYQADY

SEQ ID NO: 105997 - protein, 332 aa, unidentified
MYLGLDVSKNTLDCCLNKDGFFYACKISNNQKGFEKLKVWLDGYGCDETLHCCCEATGNYYEAAAEYLAAHYKVSVENPRKIKAYAVSELKRSKNDKQDAKTIAEFCEEKSRKLKTWKPKNQTEKELQSITRYIARLKQQKASEIVKRQTASDNIKDLIDETIDYLGSKIKEAEGRLKTYISQNPELKQKADNLTTIPGIGIQTAAIIMAALSGNNDFKTAKQFTAYLGLDPAEYKSGTSVKGKDRISKVGDCITRAALFSPALVAYRIGTFPRLVANMRQNGKHIMQILTAIMRKLAVVAYTLHKTDTTFEKQRHTRIQLSEKMRYRCLTA

SEQ ID NO: 105998 - protein, 429 aa, unidentified
MARSVGMDVHRDFCEIAIAEEGAVRAAGRIQSRPEALELFAQSLVATDEVAIEATANALAIARIIEANVRRVVLANPKAVRETSRRAKTDKIDARVLAQLLAVGFLERVWTPDEAARTRRRLTSRRCALVRQRTREKNQIHAALQRNLVERPSMSDMFGVKGRAWLAERTFELPLDERLTVEACLRQIDFVEGELEQLDKILAADALSDQDALRLMTLPGVSAVTAIALLGAIGDVSRFKTPRHLVGYLGLDPRVRQSGSEPAKHGKIGKHGPGEVRGLLVEAAWHAARTAGPLRAFHQRLAARRGANIATVAVARKLVIIVWHLLSRGEQYAFLRPSLYRQKIRRLGLMTGATRQQGKRLPEPAFLRAGDPRRDQEVEFVAQHEAAYRRLVADWQASRPAKKVGAGATPGRASQRPSRGKAARQATSP

SEQ ID NO: 105999 - protein, 343 aa, unidentified
MQAITTIGLDIAKSVFQVHGVDATGQVVIRRQLKRRYVLAFLEKLPPCLVGIEACASSHHWSRELQALGHTVRLMPPAYVKPYVKRQKNDMADAEAICEAVTRANMRFVPTKTPEQQSGLMLHRTRHLFIRQQTSVINAIRAHLAEFGVTAAVGRKGIEELLRVIADPSDKRVPDVVRACLAALGSQLLSLKKQILDFDRMIMTWHRSNQTSKRLNCILGVGPLLATALVASVADPKTFRSGRNFSAWIGLVPKQHSSGGRDRLGSISKQGDRYLRSLFVAGALAVIRYAKIHGTKYRPWVATLLARRPTKVAAIALANKLARMAWAMMARGERYNYPASLRV

SEQ ID NO: 106000 - protein, 355 aa, unidentified
MSQEKYIGMDVHQATVSAAVRDRNGNLLMECILETKAETLLEFVQGLHGTLSLAFEEGTLAAWLHDLLKPHVNRVVVCDSRKAALLRDGNKSDRIDARNLSELLRTNQLKPVYHGEHGLRTLKELGRSYLTVSKEMTRTMNRIKSLYRSWAIPCPGTTVYAPRYRRQWLAKITEPGARMRAEHLYEQLDHLQPIRVRARREFLQESNKHDAVKRLRQIPSIGQIRAALLVALLQTPHRFRSKRQIWAYSGFAIETHDSGEYRYVRGKLQRNRERITVRGLNRNHNPDLKNIFKGAAISASSRPGPLQDFYETRVAMGMRPTMARLTLARKIAAITLTLWKKGANFDPQQLSRQAA

SEQ ID NO: 106001 - protein, 492 aa, unidentified
MVKSKRKSYKKRQHIQKVKGRRFTDEIRNLDLEKVLVVPIDGGKNSHKALVANYFGDILHDPFEFTNSVAGVKMFHTILKSISSSIKAQKLIIGLESTGHYYENLYRSLTSLGYDVAMVNPTSVYSQRSGQLNWCKTDEIDLCAIGQVLIDNQATETRLPEGLYYNLKQLTRLRRDEVRKRARLKTQIRVLCDHIFPGLQKPHIFSDFWGKSSILLLENYPTPSSIICLGAKRLARFFKKHNTKLGLYTAERLVNLAKNSLTTKATNLEAHLLNLRFKIADLKIADEKIRKLNLEIARYLVHTPGILLLSIKKINVSSAAEYLAEVGPLKQAGSAKKIIARAGLNPSRFQTSEYERANNSITRHGSNPLRNISLIISQNLIGLNPHSSRPCNPYFREFFDRLVGEGKDKRLAKVACSNKFIRVSWAMMVGRKLFSPPTWKKNKVNDDPLTKLKDFLFLNETKEFFEELAKIAKEQLPSDYHSSVTGRKGLMK

SEQ ID NO: 106002 - protein, 523 aa, unidentified
MATRSHSKKRRSARSHLIHKPQGVVHPRVQAVGPEHFGIVSVDCAKARSKWMLADFYGKVLVPPTPVEHTRKGLEEMVLSVHKAIAQFDLRDVIVAIERTGRYHLPVKRAFVKALLETRLVHPLTSKQFRQPANPGNKTDDTDLSAIHRAAVNGFGLIEQPADPVTVRLQLLARHRRDWVEKKSALHCQIHEHLQMIMPGYARCFDDIYKCHIPLLIARRFGSADTILRAGLPGLTEQVRQAGIGPHRPTLEKILAWARTAPPAAVEASIHHRIMIELDDDRVSKLRAVKAVEGELAEQLVQTPYVLLLAVPGIGVVSAGEFAGEMGPIQYYTKGRSITGRAGLFPSRYQSDEVDRPDGRLVRCANHRLRQAIMMIADNLIECNDHFRVLATQWQQEGKDPRAIRVRVAGRFCRIAYQMVAGRATYRHPSCQQRDYVLRKLIRFYNVHSIDIIRIMRELDAAVAQLPGAEHREEGAALAAELDQLQKKRGSGPRSLAEILPAVLAKLGVQLVTSTKSGEADLT

SEQ ID NO: 106003 - protein, 338 aa, unidentified
MKNKKCEFYIGMDVHKRFTAYAVRNKEGDLVLEGSCATNCKDIFEVLEPYLFSCMAGLESNTEVYPIYDGFKDKSLDVRVANTIQLRTLVGKNDPLDAKRLSDMLRLGTFPCSYIPEEKIRSLRNVVKVRHNMREACTKIQVQIRALIRMHGLSMPPGDSFTKRWCASLEGHIALQKGGLELRYLYDMYTFEHAKLEQVTNEMIHLVRSSFPKEFEALGNRQGIGDVLASYFISQICPINRFKSEKSLRRYAGVIPCKEESAGKTYSTCLPKTTSRGILRWAFVEAAHCMSLCDDKIKAYYRKKKKEKKISGTAMMAVARCACDIVYKILTSIQVHHV

SEQ ID NO: 106004 - protein, 348 aa, unidentified
MGVDLGDQWSHYCILGLQGETLSEGQLQTREAEVAEFFQALPPARVVMEVGTHSAWMQEVIAGKGHEVVVANPRLMEGSKRRKRKNDRIDAKKLARLGRVDPESLYPIRHRSREVRQDLVVLRAREALVAVRTELINATRGLVKSMGTRLPKCSSESFRHKVKDAIPEKVREALLPLVQLADALSDCIQSYDQKIEELGNGKYGHTKLLRQVKGVGPITALAYVLTIENPEQFAKSRDVGPYVGLVPKQEDSGESQPQLGISKTGDTMLRKLLVGSAQYILGPFGPDTDLRRHGLRLCERGGKNAKKRAAVAVARKLAVLLHRLWVSGEVYEPLGYVASRTIVQPVAA

SEQ ID NO: 106005 - protein, 372 aa, unidentified
MRNGTSVSHVGLDHHRKFGRVTARDAQNRVVWRGRLEYRDRAALRRELAQWPRGIPVILEGTFGWGWMSDELLAAKLEPHLANGGKLAGWRKARGLAKNNRLDADLLAEVWLERERWWEVWLAPPEVRRQREWMRYRMGLVRTQTAVKNKIHAILHGHGVWHEYTDLFGVQGRRFLNLLVAGQEGDLPESTRWVLQGELQLLDALRRQIAGATRQLRKELTGSQAGQWLRTLPGVSWILSHTILAEVGRFDRFPSAGHLASYSLLAPRACDSGDEDGATPLGRHVGKIGRRTLKWAWMEAAHSAVRSSPRMRALYDRRTDGGQRDKNRGVILVAHELCRIGYLLETKQVAYLENPPAGPTGRQRSVSRSVMG

SEQ ID NO: 106006 - protein, 407 aa, unidentified
MHNKNYISVGIDVGSAFSFMTILAPDETVILKPFKITHNNKDSLERAVSEIKKAEELYSLESRTFLESTGIYHFPLFCYLVDCGFNASIINPIITHSTKNGNIRKVKNDKIDSKGIAKLGLSKDIPVSQFPAKLVLELRSLTRKYYDLTDERSAHINKLKGDLHTVFPQYLDVFCDVTGKTSTMILRQYGTPDKILRGHKKTMIEKISKASRKGLAKASERYEKLCAAANAAKTFGCQIDSIYFNIFLTLDLVEKLDSALDSILNRIRQLITFNKNEKFIQQIKLLNTIPGVGFLTAVTIMCEIGDFSAFRNPKQLFAYFGLDPEVNESGKFVGTQLHMSKRGSRIARRAIFAVALASIRTKRNGEGINPYLRKYYELKSGQKPKMVAIGAVMHKAVSYTHLTLPTT

SEQ ID NO: 106007 - protein, 404 aa, unidentified
MWFAGVDWADTKHDILVIDEAGRQIGIRQVTHTAQGLDELKTFLTSITGPERKADMACIVETNHGLLITALLEAGFSVYPVNPKTVDRKRNASGAKTDRIDAYLLAKHGRSELADLRRLEPDSPIIAELKALTRDQDGLIQMQTRLVNQLTACLKAYFPVALNLFGKLQQRSTLLFLQAYPTLEAVRSASVEQFIAQLVQTGYPNPKKAAPKIFELVHQPQLQADDVTVRTRSRLTLALIRQLLPVVEEISAYDEEIERLFLSHEDNEVFHSLPRAGRRLAPRLLAEIGDDASRYVKAGSLQALAGTSPVLYESGKYSKPHRRYACIKPLRNALHQFAWQSTHQEAWAREYYDRKRAEGKSHSVAVRALANVWASILFAMLQQKQCYQPTTFEQARKLHARKAA

SEQ ID NO: 106008 - protein, 430 aa, unidentified
MNSDTVTNNPLPDPSLQPEAIEPVAWIGLDWGDQQHAFALQDRDGTSESGTIPHSAESLHQWLGRLAQHYGGRPVALAVEASRGAVVHALLQYPWLIIYPINPLTSARYRSAFTPSGAKDDLPDAQVLLDLVRHHAQKLRPLELQDALTVQLAGLVEARRGMVDHRTGVLNQLTSLLKTYYPQALQLLDDLNTELAVAFLDRWPDLLSLKKSKPASIKRFYYQYNVRSTELIDQRLALIAQAVALTTDEARVSVAVLQLRQLLDQVRVFHKHIPLLNAQIKAVFARHPNAALFRDLPGAGPQLAPRLCAAFGTLTSLYPDPASLQQYVGVAPVRQKSGNQLWIHWRWGAPTFLRQTFVEWAGQTVRYSAWARVYYERMLKLGKKHAVILRALAFKWIRVLWKCWQTQTPYDEARYLKQLLHRKSPNAVSE

SEQ ID NO: 106009 - protein, 340 aa, unidentified
MEKRYIGIDLHRNRFTCCIRLENERTYVTEWELEDLGKFVKKLRPSDEIAVEITGNTRWFFDAVAAQVARVVVVNTNQFKVIRQSVKKTDPHDARALALYLSKDMLPEVRMKDKEHGQLASLTQTRDTLVKLRTALKNKINNILSARGLNLAKEALSSEKKLQEVVELPFDEIVRIELRVLVEQIRSLNKSIAELEKTIGEEGSKLEGHKGLSSIKGIGKITGAILLSVIGDVNDFAAEGHLASYFGIVPRVSNSNETERSGRIHKRGTKLGRTALVQSALIAANYSPYLKRFYEQVKARRGAGKAIIALARKFLGIIYRTLKNKWVFEDFPNFVLAEAS

SEQ ID NO: 106010 - protein, 408 aa, unidentified
MDVFHERCAGLDVHKEVIYICVLIGQGRSFQKFKFKFGTFHHQLIEMRQKLVELGVTHVLMESTGVYWMPIYDVLEGFVEIVVGNAQHIMNVPGRKTDESDAEWLAKLLRYGMVKPSFVPERRFRELRQLTRYRRAVVQTQASEQNRVEKHLQIAGVKLSSVASHVFGVSGTNMLNCIAQGTTDPTHLAELALGRLRKKIPQLREAFTGSISKHTQELIATQMEQMKRLECTIAEVELKIDDKVKPYAEILARLDQIPGIDLRCATDILAEIGIDMSPWATHRQIAAMAGLCPGNYISAGKRLKNRSRQGNPYLKSILVQAAASAINTNESYFQSKFRRLKQRRGHKRALVAIAHAMLVTIYYMIKKGEPYRELGANFVTDYENGRKKNDLVKQLQKLGYSVSLTEVA

SEQ ID NO: 106011 - protein, 329 aa, unidentified
MPKTASALTAVIGIDIGKNSLHVVAHDSRGAIILRQKWWRGQIEARLANMPPCLIGMEACVGAHHLARKLATFGHDTRLMPARYVRPYARGQKNDFNDAEAIAEAVQRPTMKFVATKTADQLDLQALHRVGERLVSQRTGIINQIRAFMLERGIAVRQGIRFLRAELPIILASRTDVLSARMLRGIEDLASDWRRLDEPIETLSREIETIARQDAGCDRLMSVPGIGPIISSAVVAAIGSGDVFAKGRDFAAWLGLVAKQISTGDRTILGKISKRGNRYLRVLFVQAAWVGLVKPMSWERHGLKPWIEAAKKRLDHTSGSEADVRTALD

SEQ ID NO: 106012 - protein, 520 aa, unidentified
MATTRTRRRSSPHRSPSSVGKPRGVLHPRVQQVGPEHFGIVCFDPAKVRSKFLLADFYGRVLIPPTWVAHNRPELEAAVAQIRQAFATHDVRDGLVAIERTGRYHRVVQRTFAAAGFETRIVHPFVTKQYRQPVDPGNKTDDADLAALHRATVTGCALLEATRDEAWTTLQLLIRHRRDWVRKGAVLNCQIRDHLEAALPGYAACFDKLWESAVPWHLLQHFPSAQRLREAGVTAICQSLRAASIRFQQRTVQTVVAWAEQAASADIAADQHLRIVWALHEDRQHKSQHIQALERAIAGRLVQTPYSLLLSFPGINVVSAADFAGEMGPVEHYANAKAITGRAGLRPSRYQSDQVDKANGPLVRICNHALRAAILGIADNLIVCNHHFQALVTQWASQGKDPRHSRIKIGMRFCRIAFQMVAGRQVFRHPSIQGRHYILDKLTAFHREHDTGMVEVLRDLQAATSQLPQREHAAEARPLHEEWQRIHDGHRRGPQLLGDILPIVLARLGVHVVQSNESGE

SEQ ID NO: 106013 - protein, 392 aa, unidentified
MSQQGCHFEASRSLTALEQDSTIIAVIEMSQSKWLVAGLVPGIERHPLKKLDAQEEGLLKLLHRWRNEAGQAGCEIRRIVVAYEAGRDGFWLARWLRARDVEAYVIHPTSIAVSREHRRAKTDRLDTELLMRAFVGWLRGEKRHCSMVAIPTIEQEDARRPSRERQNLVTERTRIVNQIKAVFARFGIRTFRTTLRKAEEKLKGLRTAEGTLLPENTRAELCRHLVRLRVVREQIRAVEQDRLRKLAAPTGAERSSHAMVRLIARVLGVGIETADILVNEVLSRRWRDRKAIARYAGLTGSPDESGKRRRERGLARAGSARVRSIMIQFAWRFVRFQKNSALAQWFAARTADRRASTRKTMIVALARKLLIALWALVTRGEVPEGVILRPAS

SEQ ID NO: 106014 - protein, 311 aa, unidentified
MFVGMDVHRNRTQVCVLDRKGNEVRNRNVANDRQSLRKELAGLRRGTPVAFEAAYGTGWIAELLGDLGFEAHLAHPADCRAIAVAKLKNDRVDARTLANLLRTGYLAKAWLAPKEVREPRLLLRERARLVRIRTSAKNRIRAQIADEGVPAPGHGLWTKEGAAFLDSLDLSPMHRWVVTDCQVLIEVLESRISLLEAEIRRQAKPDKRVDALMAIPGIGLLSAMTQVSEIGDITRFATARKLCAWAGIIPSMRKSDRTLHHGHITRAGPAAVRHVLAEAAQTAIRKEPYHSDFLATKRRRGSGIALIRVAR

SEQ ID NO: 106015 - protein, 345 aa, unidentified
MKITTVGIDLAKNVFQVHGIDERGKAVLRKQVRRAQLAVFFGNLPPCVIGMEACASAHHWARTLQRFGHTARLMAPQFVKPYVKTNKNDVADAEAICEAVSRPNMRFVPIKSIEQQAILSVHRVRQGFVKARTAQANQIRGLLAEFGLVIPKGIYNVAKRVPEILEDASNELPVPFRHLIDRLTKHLKELDRQVKEFEQEIIAWHRSSELSRKLEKIPGIGPLAASALVASIADAHSFKNGRQVSAWLGLVPRQSSSGGKPTLLGMSKRGDAYLRTLLIHGARSAILAAKNKVDNTQGWLTNLLQRRHPNIAAVALANKNVRTVWAMLAHGREFKADYVPTRMAA

SEQ ID NO: 106016 - protein, 347 aa, unidentified
MNYCGIDVAMKSSYIYITDAQGRKKASGEVATTYMALRRRLRPFVRGGLKIAIEAGNQTAWIHESLVDLGAEVVVVNPAKVKLIAESRRKTDKIDAKILCELLRLDGLPHPVHMPGRSARELRGLLVARRQLLAARTKLCNVVRGLLRQEGIYLPSRYLLTFSGWSALLENEGYTCEHIRPVLEAYFSTFESLTRSIQALDRELASRERADKRAARLQTMPCVGRIASLTFLAAVDDVRRFGSSRKLVSYSGLCPTVRSSGERTEYGSISRAGRAELRAVWVQIAHLVVRDTHRNTARLRAWYAKVARKRGTKTAIVALARKLLTIAYRLLMDGTEYRSWLVSRRAA

SEQ ID NO: 106017 - protein, 362 aa, unidentified
MLYLGCDVHKNYTTMSFITEDGKVADTSSFYNDIEELKNLLKKFPKEEFSAVLEAGLNWGVIYDMLDSLPEVKNVSLAHPPKVKAIASAKIKTDKIDSKILGQLLRTDLIPEVWIPCKETRILKDIVRSRAFIVKIKTMIKNRIHDILRKSHINPPEVKDMFGKYGRMWLEDIELSDRRADKLLRYHLKLKDTFENMEIELKKWINKEMKTNEDLRLVKTIPGIREVFGPIIVLEIDDINRFPDPAHLHSYSGLVPSTHVSGNTSYHGRLIRGNRWLRWAFIEGAHTSVRVSPYFRKYYDGVKRKAGSQAASVASGRKLATIVYKVLKERRPYIEEYRIKQNIGRSPSVRPSGGITSRSFQE

SEQ ID NO: 106018 - protein, 430 aa, unidentified
MKSNTQNAKIEAITEKTLVLGIDVGSETHYARAFDYRGIEYSKKPFKFSNTEAGFVTFKEWILDLKEKHEKDKVVPGMEPTGHYWFNLGKFLQDNEMKPVLVNPHHVKKSKELDDNNPTKNDRKDPKVIAGLVREGRYMIPYLPDGVYADLRTASNIRFQLQAELTRIQNRISRWFNIYFPEYKTVYGKPDAKSGMLILKQAPLPEDILTLGIDGVNQIWRDAKMRAVGKARAKTLIEAAEHSVGSKEGAVSARMEIRMLLEDYESRNIRLQEVMTLIEELVNQIPMAEKLLGIKGVGIKTVSGFLAEVGDISRFNNPKELQKLAGLALVENSSGKHKGKTTISRRGRKRLRYLLFEVAMSLVAKNPEFRELHTYYTTRRLNPLKKMQSLMAVAAKLIRVFYAMLTKGVDYDPKKMVGDIKRPAVYLPAA

SEQ ID NO: 106019 - protein, 318 aa, unidentified
MPQETRVVGVDVAKLKVDACIRSAGLRLSAPSGPEGEKALIAWLKANGVGRAVMEASGGYERDWARALRAAGFGVRIVDPKRVRHFAKAAGKLAKNDPIDAETIARFAESFNDVEPQPHDAAQLELDQLVQARTALKQEEDRIHNQGEHKPPAVVAKALAAIAKTMRAELRKLDAAIAAKIKANPVLARRREIIVSVKGFAAQTAAGLIAWCPELGRISNVAAAALVGVAPDDDDSGPRQGARHIKGGRTKLRNLLYMAVMGAATQHNPVLKAYYLRLRAKGKEAKVAIVACMRKLIVILNTMLARDQTWNPPAQAVS

SEQ ID NO: 106020 - protein, 425 aa, unidentified
MTTTEDAKPVGTRVAIDIAKRFHAVLIENPDGRQKRFRMASNADDHDRLVSLLKGSPEPVVIALEPTGDCHRTLAHRLLCEGFQVCLVSSIAGARMREAMFNSWDKNDPKDAGVILALLKQGMTQRYVDPLLTGNHGLQELSKTYYQISMARTRLQHSLMTHYLPLYFPEIERYFHSSHAEWFARFLLRFPTAASIRRLSFDHFKIEAWDLVGRKVNKSTWVAELYDAASHSIGLTVEDGSIEVETFRLQLQRYQDLVRQRDVLADRAHQILAGRSDYESLRSIPGVGPVLALTILAEGGDLRRFAHHRQFLKYCGLDLAKSQSGQTRGQEKLSKRGNARLRFAFWFAATIAIRMRENSFRDKYERYIKPDPGNADRKRKALTAVAAKMARVAYGLVKNQSTYRCYHETALPSGSIPISRAVGAS

SEQ ID NO: 106021 - protein, 383 aa, unidentified
MQATQGKDFTRSELVLAVSLELSKGSWKIGLHDGAREKPAVHTVSSEVSGQRLSEVVKVMETTKRKWDLPEGVRVVVVYEAGQDGFWIHHALSALGYEVVIVDPASIPVERRARRAKTDRLDAIKLVLSLRAWLRGEQDGMHVIRVPSVAAEAQRQLVRDRGELQKEIGQHRDRIRKLLRTQGCWDGVEGDFAGRLEDGKVRGHDGQPLPAELRERLSRECERLALAEKQLAKLEAGLLAKLPAPEQKRVMRLTKLKGVGQIGALRLVMELFWRDFNNRREVGSCVGLAPQPYDSGASRVDQGISKQGNRRVRALLIEMAWFWLRYQPQSALAQWFAQRTKGSGPGKRGKRIAIVAVARRLAIALWRYLTDGVIPEGAMLKTA

SEQ ID NO: 106022 - protein, 348 aa, unidentified
MVADSLDVVIGVDTHRDAHALALAAAPSGALLGEAVVEASADGYRDALALARARAPGRRAWAIEGTGCYGAGLACFLLARGERVLEVDRPRRERRPGRGKSDALDALRAARSLLGREPLASPRRAGRREALRALLATRESAVGARRCALNQLRALLVTCPEPLRAELRPLTRARLLRRLRGTRPRRHADSQLRGTLLAMQLLAVRIEALTLEERTLKREILALAGELAPRLLAEPGVGPITAAHILLAWSHKGRLRSEAAFARLAGAPPIPASSGKVVRHRLDRGGDRKLNHALHAIILTRRRTDPETIAYIQRRVSEGKSDREAVHCLKRYLARSLFRQLEAMPQAA

SEQ ID NO: 106023 - protein, 346 aa, unidentified
MNYIGWDLHQQFSQIVKGSKDGTKTDTVKLYHFPGMFDHPKIKELIKPPIDVAVEACNGWYWVVDELEKRGAIVHLAHPLKTKLIAEAKVKTDKIDAKALYDLLRTGFLPESYIPSGDIRQMREIHRHRAALVKIRTSIKNRIHSVLAKNGIFFHISDLFGKKGRTQLDNVLSRLPSIYSEEINRYLTLMDTLNKEIEIIEKKIRSLVKDNPLATLLETIPAIGYFSAHLILSEIGDIHRFAHPKKLVSYVGLNPGVDKSGKHHYNLPITKQGNTWLRWLLIQIAPIAARKDRRLGVLYDRISKRKGANTAKVAVAREILVAVFWVLKKQESYCPKSVTPGITLIS

SEQ ID NO: 106024 - protein, 313 aa, unidentified
MMPQDKVFVGIDISSADLEISEDGQTKTWSEPNQAKGWARLIKRWRGRPVVVGVEPSGGYEQGLVRALVKAGIEVRWADPARVRHLAKALGAPAKTDPIDAVMVRLFVSHTGGRPVVLDADREALAAQLSARQTALETAQRLRQQAKALPDGPARQALDRIAALAEAELKALTKGLLAAIKAKAALTGDWALMQTAPGVGPLVALDLIATMPELGHVSGRAIAKLAGLAPFIRKSGKWTGQAKCSGGRPRPRRALYLAAMASLRAKKGMGPVFQALVARGKLRKVALVACMRKLLVTLNAMIANQTPWNPATA

SEQ ID NO: 106025 - protein, 355 aa, unidentified
MDSKKYIGMDVHKESISIAVMNGAGKIVMECVIETKASMILQFMNGLRGDLHVTFEEGTSAAWLYDLLKPHVTKLLVCDPRKNASMREGNQSDKIDARRLAELLRLNHLNPVYHGEHGLRSLKELVRSYLTITKDLGRVMSRVKAIYRSWAIPCTGKQVYAPRHRAEWLGKIGEPGVRRRAEFYYQQLDALRAVRQQVRRELLAESKKHKAWKLLCQIPSIGPIRAAVLLGILQTPHRFRTKRQLWTYSGFGIETQSSADHRRVDGQLQRAKKQSSIRGLNRNCNHDLKNLFKGAAIVASSKPGPFQEFYNALLTKGIRPEMARLTLARKIATIVLIVWKRGACFDAQHLKPQTA

SEQ ID NO: 106026 - protein, 325 aa, unidentified
MKRLDLHGLVVARFTPHISTCSSSRDEAHTGRPAAMDTIGIDLHTRESQLCRDHDDGTVAERRIATTRERFTAVLGARPRARMLLEASTESEWVARHLESLGHEVIVADPHLAPMDATRSRRTKADRRDARTLREACRLRADRPADRLSDARRHIRAELAVREALVRTRTRYIALAKALVRRDGPRVPARESHLIAQRIVALELSESLPAELLPAHHRAAFLGVVPGEYSSGEKRRIGRITKGGNARARYLLVEAGWRILRSKDSDTEALRAWALTIAARRGTRIAVVALARRLAGMLYAMWHAMWRDQRPYDATRRRLPRSRAA

SEQ ID NO: 106027 - protein, 414 aa, unidentified
MDVLHERCAGLDISKKDAKVCVRTPSARRRGTFTTETTTWGATTNAVLELRDHLLAAQVTPVVMEATSDYWKPFHHLLAEDLNVILVNARQAKNLPGRKTDVSDAAWLAQLGAHGLLKASFVPPQPVRELRDLTRARTVATRERSRVVQRLEKLLEDTGIKLSAVAADIMGVSGRAMLEALIAGERDPQVLAELAKRKLRNKIPALTEALTGRFREHHAFLTRLHLDQYDQLTAVIEQLTGRIEEAMAPFRDALDLLDTVPGINQAIAEVIVAETGGDMSRFPTAKHLASWAGVRPGHHQSAGRTKNSKVRPGNPYLKGALGLAAMGAARTKDSYLAARYKRLTARRGVMKALVAVEHSIITAIWHMLTDTRPYHELGGAYFTQRDPERTARRAITQLNQLGYSVTLNPIEAAA

SEQ ID NO: 106028 - protein, 421 aa, unidentified
MENTAARKRKQVPEGYLIIGIDPHKKRHAAVAVTQDFTIRDKFKFDNTREGLETMLCRTRAEMVKTNCRGIMFAIETGGHYWRNIAYFLDNQGIPFRFINQYTLKRRREGKDINHKKNDYRDSEVAAQLLCTGEFTESTIPQGVYAELRAAYSAYRRLVKERTRITNLIKGLLDGLFPEFTHVFKDPCGLTALAVLSTCSIPCIIGAMTEEEFVAAIEVKHKSRLIQRKLRELHHVARASIGITAGAQSVSSEISFLVEKYDLIKRHICTIEKTLVSSVDETEEGKYLLSIRGLNYISVAGLLAELGCFKSYRSAKQMIKMAGSNPTESESAGKRGSHTPMSKQGRPVLRYCAWTSVIPMLRFNSDFRAWAKQRRERPAHANPLSGREIVGAALNRLFRLAFAMVKNQTYYLSPQPLQVTV

SEQ ID NO: 106029 - protein, 372 aa, unidentified
MDTHKKQHTLTIDFPGQDKIAEMTIANTQREITRMVKRIKKATKGPIHFCYEAGVCGFTLQRQIEALDCRCMVIAPSLIPRKPGERIKTDRRDAQKLLSLFKAGLLTEVFPPNASQEAARELTRLRESAMINLKRTRQQLLKFLTRHGYIYVQGEHWTLKHQRWLTSLQFDQPWLRDVFDSYFTELQHGNQRLSSLDKQVEQLAQSEAYREPVGLLRCLHGIDTLTAISIITEIFDFGRFACAGQLMSYLGLTPSESSSGERQRKGSICKTGNKRARRLLNEAAWHYRHARVVSRALQTRRAGQPQWAIDIADRAGVRLRKRYHHLTDNGKMPCKANIAVARELLGFIWGMLMEYENRKTIKQTPINDRRAS

SEQ ID NO: 106030 - protein, 388 aa, unidentified
MTQAPGARPTPAVLDYERTLILAIELSNTSWVLAAQIPGLPGVKAKRSIEPTPEALMAAIASYRARAETAGRNVDRVVTVYEAGWSGFWLVRWLAKYGIETHVIQPSSVPVDRRARRAKSDGIDAELLLRTLLAWLRGEPRVCSMVPMPTEADEDARRRVRERAELVTERFGLVNRIGAILATLGAGEYNPLRRNRRQRLDELRTALGDSLPTHAHAKIARMLDRLELLLIQITELEQSRDAVLEDKAPDRAASMIQQLAKLRGVGVQTATVLVREGFVREFANGKALGSYAGLTATPYSSGGIEREQGIGKAGNARLRTVMVELAWLWQRYQPDSAQVSWFRERIRGTGRRMRKVMVVALARKLLIALWRFATLGVVPEGAVMKPAS

SEQ ID NO: 106031 - protein, 446 aa, unidentified
MSRKKRTHLRGKRGQAFADKIRGVPLDCILCVSIDIHKYFHVVMIHNALGEIVTPTFEIDIFQTGFEQLCRTVDEAIQQTETQVILTGMEPTSHYFENLARHLRDRPQPVTLINSYAVKENRNQHMMHHEKDDEIDTAAIGDLLRRGEGTPFSPAKGAYLEMQHLDRVRLSKVKIRSMLKNQVIGHLDRVFPGLVIIGEAAKARYEPLFATDFWSCQTMQHLIRVSPDPRKLVAMSVPDLIDAFHDHGYAMGTKTARKIIAYAHKVLLPEPELIAIRCELLAHDLALLDEVQRHITKLEERLCALLAQTPYQFWVRLKGLSPVQVASLAASIGDPTHYEYAGQVFRRSGLVSGRNDSGTRKRKGKGKHVTKTGDVYLRRSLMGAVSTVILHQPVLYRYYTELKLSKPAGVARVATARRAIGILWAIQRDQRSDSLCFKKGHQHVDE

SEQ ID NO: 106032 - protein, 346 aa, unidentified
MREITRIGMDTSKHIFQLHGVDTAEQPALRKRLGRRQMVEFFTKLPPTRIGIEACGAAHYWARMLGEFGHEVQLIAPQHVKPYVARNKNDARDAEGLCEAMSRPSMRFVPVKSDEQQAALMLTGVREQMVARRTQLSNMIRGYAAEVGITAAKGLDKIEPLLAQIAQDESMPALARDLFALQGREYAQLQTELKAIEARLRAWHRANADSRRLAQIPGIGPVGAAELIMKTPDPPVFASGRHFAAWIGLTPKDHSTAGKTRLGKITRAGDERLRSVLVAGATAVIKQAMLGRGHPSPWLVALLKRKPPKLAAVALANKNARIAWKLMATGESYDGTRMHATSATAA

SEQ ID NO: 106033 - protein, 425 aa, unidentified
MFKIVYPVCCGIDVHRDFVVATIASTDSRRVTSYQTRKFQTMRYDLENLLKWLIEKECEHVCMESTGKYWIPVFNVLEPFCQVMLANPRYVRNIPGKKTDHNDSVWLADLHKHGLVHGSFIPPKPVRELRDLVRYRFKLTNVRSSEKNRFQNSLTVSNIMLANVVSDIFGKSAQAIVAELLKTRDGSEVDFEPLLKRKLKEKSELIAQSLQGTVSHEQAQKLKICLGHHNAIDACLAQLDIAIAEAAKPFTEGIALISTVPGIQSASATAIIAEIGTDMSVFLSSKHLCSWAGLTPQNNESAGKKKSVRISRAGVYLKPLLIQCALASLKKGDNPAFRARYERIKRRRGHKRALIAVGRMMLTAIYHILLKNEPFDSSRLQIEANPAKRPIVETQTFNLEQAIALLTASGYQVSGLEAPVPCTTT

SEQ ID NO: 106034 - protein, 350 aa, unidentified
MEEVSVIGIDLAKNVFELCALGASGEIAWRKRLKRRGFVRFMEEKAPRCLVAFEACGGAHHWGRFLLARGFRVKMMAPRVVKSYRQGPHKNDGRDAQAAAEAGSRAGVRSVTIKSEASQAVQILVRLRTLQIKQMVQTSNQLRGILNEFGIVLPKGHKRLRETIARLEVADPAYGRLPGPVRQAVEKLCCQLGQQVGWVKQATDDLAAATEVDDSCWQLSTVPGLGPINVASLSVALEAPDAFANARAFATFLRLVPRQHQSAEKQKLLGVGRQSTNETRRHLVLAGQSLITMVKRRQHPPTDKFLLWVLRLSQRKKRNVAAVAVAAKLARIAWALMARGQTYNPQFIKA

SEQ ID NO: 106035 - protein, 408 aa, unidentified
MEVLYPRCAGLDVHQQTVVACVRLADGAKVETHVRTFGSTTAELLALSDWLAEHRCTHVAMESTGVYWKPVWHVLEGQVTLILANAMQIRNVPGRKSDTNDAAWIADLLAHGLIRTSFVPPSPIQELRDLTRTRKQLVREVSQHTLRLQKVLEDANLKLTSVLSDVLGLSGRAMLTAIIAGETDPERLADLSQGRLKASRPAVIAALRGSVTPHHRFLLRLHLTHIQTLEAVIRDVESHLGDALWPFRAAIDRLLTIPAVGETVARVIVAEIGVDMTRFPTVGHLISWAGLCPRLHESAGKRHSTRTRAGNAWLKTTLVQVAWVDARTRKTYLSAQFIRIKSRRGPKKAILAVAASILTAAYYILKNEVPYQDLGADHFDRRDKAQLAKRLVRRLEELGLAVEIRPAA

SEQ ID NO: 106036 - protein, 425 aa, unidentified
MPYTIAGIDVHKKMLAVVVADVEGEGDFQFEHHKVGTSPAELCALAGWLVERQVDEVVMESTAQYWRPVWEALELHWRPQRRTRDGASPLAGTLHLAQAQSNRGAVGRKKDFPDAERLVKRLVAQELTLSFVPDAEQRLWRTVMRRKYQITRSRVQLHNRLESLLEEAHIKVSSVVSDLLGTSARRMLQALADGERDPTALSALADSRLRATPDQLRNAFGACADLHPVYRRLVKLTLDELRVIEDHLVQLDQQMAELLGHHHDAVHRLAEIPGFGVDSAQQIIAEVGASAATFPSPKHLASWMGACPGTEESAGKNYSHRCPKGNRQMRRVLNQAANAAVKAKGTIFAIVYRRLVPRLGHAQAIGAITHRLCRLIWKILHQSVRYEERGPAVSVEAKKVRTCKMIRELRTLGYRIEPISPAPVA

SEQ ID NO: 106037 - protein, 436 aa, unidentified
MRGCRCSMIMSFTKPIEHFNLQRKKVITMNTLYVGIDVSSKSNVVYLMLPNGDKHSNFSVANSHEGSTLLVKKIYSALTSHSLDTVLIGLEATSVYGDNLVYFLREDATLAPFNRKIHVLNPKQVKKFHDTYNDLPKNDYVDSFVIADCLRFGRINKEVYMGEYRYKALQNLTRARFFAVQNLVKEKQRFMNVLFKKYSTMTQEKVFSDAFSTTALAVYDEFESAEALANMDLHELTDFIIEKGKNRFPDPDAVAKAIQKAARSSYRLPKTVNDSVNQVLSISITSMKALESQIKEFDKAIIALMELLPNVLISIPGIGPVYSAGIMAEIGDINRFDNQASLAKYAGLAWKQHQSGGFEAEVTRLIPSGNRFLKYYLCEAAFSLVRCDKEYSDFYHLKYKEVNRCQHKRALALTARKFVRLVFRLLKDNRLYCPAK

SEQ ID NO: 106038 - protein, 427 aa, unidentified
MLKHHTEPNPAEEFAAFLAIDWADEEHAFHLQVEGQSKVETGTLEQKPEVLGPWVAKLRERFGGRPIAVGLEQSRGALIHGLMAYDFLVLYPIHPTTVAKYREAFKSSGAKSDPLDAGQILEILTKHQDRLHRFNPDTVETRLLGRLVEDRRKAVELRTTHVQALGANLKEYYPQALELTHGNLSSRLACDLLLKWPTFADFQQAKPSTLKRFYYGHNVRSPEVLERVLALAQKSQALTTDSAMVESGTRLSQMYAGLIPALNRVIEDYDQRIQQVFDAHPEAPIFTGLPGAGPVMAPRLLAFFGTDRSRYAAALNVQSFTGVAPVTKSSGKSRVVYCRVACPKFDRQTFHEFSRLSVTHCQWARNYVQYYTDKGKKYHTIIRALAYKWIRILHKCWKERTPYNEDLYMETLKKRGSIFATLHLQTK

SEQ ID NO: 106039 - protein, 348 aa, unidentified
MKKVYVGMDLGSKECAAVTRNSKGKIIDSEVFKTSEHNLIVFFESLGGEVHVMFEEGELASWVRGTIKPHVASVTVCDPKRNAWVAKGEQKCDKVDARKLAELLRLGSYAEVWHTDDDRIASFKMVVKHYDETSKRLARAKNQIKSLLRRQGVLTKNQAVYGPAGRIKALEAVEDREVRKVLEENYLLLDYLAAAKDRAERDLKAASKRFDVIRRLMEIPGVGPITAARFVAYVGDPNRFNRKTIIKYSRLSVVDRSSDGSPLGRKRLSREGNPVLKDVSRTAFERALAYRKPNGIKTYYARSLARTRSETSARLNTQRKILILMLAMWRDGTRYSDDLVTKRAFTGA

SEQ ID NO: 106040 - protein, 333 aa, unidentified
MCVLGADGRARERFRMRTTRVGFERKFAGLARGRVALETGTHSPWASRLLEELGFEAVVANARQVRLIGGRDKKTDRLDAELLARLARTDKELLAPVRHRSQQAQADREILRAREVLVRARTSLINHARGAVKATGGRLPTCTSRAFAKRAGPALPAEMQPALKPVLDMIAELTERILAYDRQVEEVSAERYPITAHLRTVHGVGPKTALAYVLAVEDPTRFARSRQLGAYFGLCPRQDQSGSIDRQCRITKAGDGLVRRLLLQCAHYMLGHRGKDSDLRRWAEAKMEHGGRAAKKRALVAVARRIAVRLHRIWLTGEVYDPLRLARQRGEVA

SEQ ID NO: 106041 - protein, 391 aa, unidentified
MYSDGSKHSSFSVPNNRNGANIIVDRVTSVLLLQDIPQVVIGMEATSVYGDNLMRFLRESGSLGRFERNLHMLNPKQVKKFRDAYSDLPKNDHVDSYVIADHLRFGRINKEVYMDDYKYQALKMYTRARHQLVQELTREKQRLLNTVFISFSGLTQEKIFSDKFGATSMALIEEFSSLDELAYMSTDELVDFIRKKGKNHFDDPEEIAEAVQRAAKNSYRPPQVIADAAKQMLAISMNTIRLLQKQIKEYDKAIEKMLEAFPQTLTSIKGIGNIYAAGIIAEIGDINRFPSQAGLAKYAGLVWTQHQSSDFEAEDKRMIQGGNHHLKYYLCEAANALRRCDPEFKRFYALKYKEANKHNHKRALALTARKLVRLVYTLLKTNRLYIPPEEY

SEQ ID NO: 106042 - protein, 338 aa, unidentified
MDHYAGIDVSLEYSSVCVVDATGKIVREAKVLSEPAALIAWFGSLGLNLVRIGLEAGPLSQWLYAGLRGAALAVELLETRHVRNALKTMPVKTDRKDARGIAELMRLGWHRPVHCKSMAAQETRAMLTTRNLVRSKLHDVEMSLRGTLRGFGLKVGKTTPRRFEARILELVAGHPSLEVIAKALLAARTVLLREFKAFEKQVRTMARSDTRARLLMSVPGVGPIVALTFASAIDDPARFKSSKSVGAHFGLTPKKYQSGETDITGRISKIGDKGVRTVSYQAAHVMLTRPVKGCSALKSWAMKLAKRAGMKKAKVALARKLAVIMHRMLADGTTFANA

SEQ ID NO: 106043 - protein, 414 aa, unidentified
MVEVINKACGLDIHKLFFIATILSRSGEKQQQYFYRTPDEILAFKNWVISEKCDVVACESTSDFWVPIYDALIKHLPVIVGNARDMKAFTHKKTDKIDSEFIAQLALNNMVQPSRVFPKNHRTFRSCIRLRHNLVQKRTDIKNEAHAILAPEMFNLKNVLTDIFGKSGRTILAGICSGKSVDQIIASLSPNVRKKSDQIREILDREISQGAAFRLQICLDIIKHLDNEIKILEKEIFNYAYRNHKQEMEILMSVPGIGELGAATLIAEIGDFKDFSSGDKLASWLGLVPNVYQSADKYHNGRITKRGSKEARWILTQIAQAAARTKNSRLKEFFNRKKKSIGHSKAIIALARKIATIIWHLITNEEMYEDETGYKKREIQKRKIVETEIFSVDERIKIMSEIYVIARNDEREST

SEQ ID NO: 106044 - protein, 419 aa, unidentified
MSFKILKFNCCGLDVHKTWIYACVGITDSNNRTEYKQARFSSFTKGLNELCDWLAKYNCKDVCMESTGKYWIPVFNILEQHEIWVTLSHPKYTKPMKGNKTDRKDAKWICDLYMCGMVKPSFIPPADIRELRDLVRYRFKLTCMITGEKNRAQNCLTVSNLKLDDVFSDVFGKSSRSITEQILQHPGEKFDVSPFVDGRCKTPIEEIQAAVDGVISKEQAVKLRQCLDHIDELQKHISEVEQEILRLSDKYEAALNLIRTVPGFDKNPMTAIQVLSEIGGDMSVFPTAKHLVSWAGCCPRNDKSDRKIKSTRISRAGSYFKPVLVQVANALIKSKKHPEFTTRYKRIKARRGHKKAIIAICRMILTAIWHILSDLKPYTPEGFLESRPVNKEKVLTTSQALNLLKQRGYLIKDDPSPVS

SEQ ID NO: 106045 - protein, 313 aa, unidentified
MSYIHFIGIDVSKEWFDVALHGAKPAKPERFPNSGEGFAGFARRLKAELPDALVVMEATGGYETALLGFLLARRVAVHRADPRAASYFIRSLGKRAKTDQLDALALAAYAHERQQSLRLARIPDPAQAKLGQMLMRRADLVAMRMAEQTRLLHPNYAGMKASLGAILKPLNAQLLKLERQITALIEQSPVLSAKLAVMTSVKGVGPQTAFTLLACMPELGTITRRQTASLAGVAPHPKDSGKTSGYRRTIGGRSSVKRVLFMAAMAARRFNAALREFYERLIQNGKKPIVAITAIMRKLIVILNAKLRDHAYA

SEQ ID NO: 106046 - protein, 427 aa, unidentified
MSDTPKHDDMEVRHAAAAGLDVHKMQVTATVRTHAGREAPVVETREFSALASGLFLLVQWLLSLRVSGAVMEATGVYWEKVYDILSDAGLDVMVVNAQHVKQIKGRKTDIADSVWLSRICQFGLASPSLVLPKFFRDLRGLSRYRRALIEQRARSQLRIQKVLDRGGVRIGGILSRVTHSVNGRRIIEGIIAGGAREDILGGLSWHVRKKLGHLGDALSFELDMQSRWILCDLLAQFDSDTARIEAANRRMEAALAPYMEQVQLLETLPGVSRESAMAILVELGPDMSVFASARHCAAWAGICPGNNESAGKRRSGRIRRGNPILRAILVECAHAAARTRCCQFQAYHQAVTSRRGYKRAIVAVAHKMLRTIYAMLRDGTPYADPGIDYERISVGRKASRWLKKLKQYGYFDPLEREEQTDMPTRTA

SEQ ID NO: 106047 - protein, 424 aa, unidentified
MKKHSKSSQRSEPTLKRTKARGPVQRDAKEVLTEVLGKLTAKLDAPAKLDAPAVSTSAKENRRGDTIGPNRDRLTVGVDLGDRWSQYCILGLEGETLTEGQLRTTQEDVRGFFQALSVARVVIEVGTHSPWVRDVIREWGHEVLVANPRLMEGSKRRKRKSDRIDAHKLARLGRVDPQSLYPIRHRSREVRQDLVVLRARDALVSVRTELINTTRGLVKSMGTRLPRCSSPSFADKVKDAIPVEVKEALLPLVQLVETVNECITRYDQKIEELGREKYGHTTLLRQVKGVGPITSLAYVLTLEDAQRFSNSREVGPYLGLVPKQEDSGDSQPQLGISKTGDRMLRRLLVGSSQYMLGAFGPDSDLRRYGLRLCERGGKNAKKRAVVAVARKLAVLLHHLWVTGDVYEPLHHRGAETRIAQARAA

SEQ ID NO: 106048 - protein, 419 aa, unidentified
MASIKSKKVKRINKKTMIATFDIGKNVHYGYFRAPDGRDCKPFSFNNSQKSFNRLWTEICQFKHDHRLEQVVIGFESTGPYAEPLFHFLRKKPVKLVQVNPVHTKRVKELTGNSPNKTDKKDPRVIADVISLGHALTLVVPSGASAHLRRLTQARERALRDRTATINQLQHLIFVVFPEFLRIMKNISTKTARYLIKHHPAAQDIDSLGVEDLTAIMRKISRGKLGRERAEELIAAAKNSVGIGEGRESIFLEMAHLNAKIENENRFIDRLENQLDEYLQQIPYSSSILSVKGIGVVTAAGLIGEVADFTKFDTISEIMKLAGLDLYEISSGKHRGQRRISKRGRPLMRKLLFFAAINAVKSNGIMHETYQRMLERGMLKMKALVAISRKLLGLIFAIVRDNTKYIEDYGEKHHYKLAA

SEQ ID NO: 106049 - protein, 345 aa, unidentified
MHKEAIAIAVLNGAGKPVMESIIETKAATLVQFLQGLRGELHVTLEEGAWAAWLYDVLQPHVHELVVCNPRRNALLKEGSKSDKVDARKLAELFRAGMLRPVYHGENGLRTLRELARSYQTISKDLRRVMNRLKALYRSWGIPCAGTRVYAPREREQWLNKIAHAGVRRRAELFYQHLDGLQVLRRQARGEFLVESRKHKAVKVLRQIPCIGPIRAALLLALMQTPHRFRSKRQLWTYSGLGVKTHDSAQHCYVDGRLQRSKRPQQIRGLNQNHNHEMKEIFKSTATNASRCGGPFGDFYAGLLAKGMKPEMARLTLARKIAAITLTLWKKGGRFDAEHLKAQAA

SEQ ID NO: 106050 - protein, 348 aa, unidentified
MLIIGCDYHPGFQQIALVDTETGEADERRLTHREEAEQFYRTLKTRKVRIGMEASGHARWFERLLIELQFELWIGDAAEIRTKRVRKQKTDRQDAQLLLKLLMEDRFPRIWVPDAENRDLRQLLWHRHRLVQMRTRVMNQLHVVALNEGVRRKKALWRPAGRSELESLVLAPWALRRHRDLLDIFDQLTPKIHDLTRALEEEVEKRPIARRLMTHPGVGVLTALAFELVIGTPERFGCGKQIASYVGLVPTEESSGDRRRLGHISKQGNALLRFLLVEAAQVTVRSQPHWRSKFFHLAMRRGRKIAKVAMARKLAVHLYWMWRQGLDYGQFEKLGSHAGEPGNRHGVQ

SEQ ID NO: 106051 - protein, 360 aa, unidentified
MERNRTFVGLDVHARSVTGHALDGLTGEVWQRKLSPDPVETLGWVSTLPGPVKVAYEAGPTGFGLARFLRGHGMECVVAAPSKLQRPSGDRVKTDARDAEHLARLVKLDEIVEVVVPSLEQEAARDLVRAREDVRSDLMRARHRLSKLLLRQGIVWSGGHAWTGHHDTWLRSQRFDLPGRQLAFDSAYETMTLTLDRRNRLDQAIAEMAEHSEYTDLVHRLGCLRGVSTLTGFGLAVEIGDWRRFSGSTIGAFLGLVPTEHSSGQSRSQGSITKTGNSHARRLLIEAAWHHRKTYRNPGRVMRTRWDLAPAPARVRGHQGNQRLHQRWQTFTARRKKPVIANVAVARELAGWAWSLAVLE

SEQ ID NO: 106052 - protein, 391 aa, unidentified
MAPVMIGIDPHKGSHTAVAIGADEEPLRQVRVRASAAQAQKLVAWAADWPERTWAVEGARGLGYLLAQQLVAAGERVLDIQPKLGARVRLLATGASGKNDPNDARSVAIAALRSTTAAEVAAAGHAAVLKVWSKRHRDLGRARNQLACRLHAVLCDLAPGGFSKEITAGQASGLLQRIRPSGAAAQARYDLASEFVEDLRRLDAQLRDTRRKLTAAVKESGTSLTEIFGVGPVIAATVIGATGQVSRFASRDRFAAYNGTAPIEVSSGNRRACRLSRRRNRRVNHAMHMAAVTQIRNKHSQGRAYFDRKLAEGKTRKEALRCLKRRISDAIYARLQDDARRTRQARTLTAREGNRGTTLTPARPAHTPITGSSDKPLPGLTPPYDPGQYPA

SEQ ID NO: 106053 - protein, 434 aa, unidentified
MMHHRRPSQKGDSAVERDYRIYVGIDWATQAHQACVLDSARQILAERSFAHAGNAIAAFAQWLNELAGGHPEQVAIAIEVPRGAVVETLVERGFHVFAINPKQLDRFRDRFTLAGAKDDSRDAETLASSLRTDGRAFRKLAFDEPALVELREYSRLTDELTQEKNRLANRIRQQLWRYYPQIAQLDADLPEWVLDVWEAAPDPAKAARLSKRTASSILKKRRIRRIGADEVLGILRTQPLSVAPGVTDAAKAHIRLLAERLRLVNKQIKEAHGQLDRLGAVLAAPAPDSEGEAEPGQPPRQRDAAILDSLPGIARIGRATLLAEATEALRLRDYHALRILCGQAPVTRRSGKSRIVVRRYACNPRLANALYHWARVASQIDEKCKAKYAELRKRGHSHARALRSVGDRLLAVACAMLEKGTLFDPAFGSAKTAC

SEQ ID NO: 106054 - protein, 451 aa, unidentified
MRATSTSRADWDQLPVIHAHAAGSDIGSAEIWVAAPPPDDPQPVRQFDTYTPDLHALADWLAQCQITTVAMESTGVYWIPLFEVLEARGFQVAVVNARHLQHVTGRKSDWQDCQWIQRLHTFGLLNDSFHPAAAIRVLRTYLRQRAMLLEQRAAHIQHMQKALQQMNVQLTQVLSDITGKSGLAILRAIVAGERNPQVLAQLREERCEKSASEIAQALTGNYRTEHLFSLQQALTLYDCYTEQVRVCDGEIEKQFQILKPERDAPLPPLARNDKRDSHSKNAPAYDARGLLYELVGVDLVAISGLNALTVQTMLSEVGTDMRKFPSEKHFCSWLSLAPHNDISGGKVLRSRVPKTNQRAGQAFRRTAQSLSRKQDGFGEYYRRQRARLGPQQTIVATAHKLARVFYHMLKEHTAFKPLTQEEYARQVRVREIANLKKKAARLGFTLAEASA

SEQ ID NO: 106055 - protein, 344 aa, unidentified
MTYYAGIDVSLRSVNICIADDDGELVAETKLPSDVQEIVAYLDELEHSVDIVGLEAGTLAQYLTYGLQSAGFEVVCMEARQVKAALSAMRNKTDKHDARGIAQLLRSGWYSQVHVKSMESHHIRMLLSSRKAVLDKCIDLENEIRGLFKIFGIKLPAKLGHGSFDKAVRAIIEADEKLSHALLPLLDARLVLYQTFRVLDNRTRHLAWDDDVCVLLMTAPGVGYVTALTFKAGVDDPSRFKQSRTVAAHFGLTPRRSQSGEIDIEGRISKSGDAQVRSALYVAANSILTRSSRWSSLKAWGMKLKKNRGHKKAVVAVARKLAVILHRLWIGETQFQWGTEGVRS

SEQ ID NO: 106056 - protein, 354 aa, unidentified
MSNKSNATIATMGIDIGKNSFHVVGLDQRGAIVLRQKWSRGQVEARLANMPPCLIGMEACVGAHHLSRKLQSLGHEARLMPARYVRAYLKGQKNDFRDGEAIAEAVQRPTMKFVATKTAEQLDLQALHRVRARLVGQRTGIVNQIRAFLLDRGVAVRKGPRFLRTELARILATRCDVLSPRMVHVIEELAGDWHRLDERIKSVSSEIEALADQDPACERLMTVPGIGPIISSATVAAIGNGAAFSKGRDFGAWLGLVPRQISTGDRTILGKISKQGNRYLRVLFVQAARVVLVRPNSWERYGLKSWIEAAKKRLHHNVLAIALANKLARIAWAVLNKERKFECVRTSAMAPRSA

SEQ ID NO: 106057 - protein, 405 aa, unidentified
MNMLQKNESNVNKFVAIDLHRKNFFATIFNTETEKSSSFKIPFNRESIKNFASTLDKKTNVVIESTQGASLLYDFFSKFANKVIVANPSKLRVIFSSYKKSDKNDTENLLELLIADKVPEVYIMPKENREIWKLIKIRNSLTKTKTVLKNIIHSIIGSEGYNSPYSDLFGKKGKNFLISLPLSVNESWMIQELLPEIERIEEKIKKIDERITAFALDKKEIQLLMTIPGINIYGATAIFIKIGDISRFPTAEKLAAYFGVVPSTQSSDKKTRHGRITKAGCDIVRTILVNAGFYCVKGSKVIKNFYNGIAIRRGNNIARVAVARKLAKIIWAMLTRGKTFNEVNEESFKRKIKRFMHAYISGVIPSGNLLLQEILISNGYSAKDYKKEMEKEIFETFLSKSKEKT

SEQ ID NO: 106058 - protein, 376 aa, unidentified
MMSDTPGPAAAGPGVGGWGRTTLSHEGLRESKVHPSVGLRPEQMKGSKSRMQGKEVPERKTKTDCNVGIDVCKSWLDVHVLPTGESLRVANTREGIRKLKRWLRRFEVALVAVEATGKWHRALHRSLHAAGLRVAVVDPFRVRMFARAQGILAKTDRLDARVLAAFAAVMDPAAQPPAPWEVEVLQELVRGRTSAVAERTSLRNQRAAAQTSFLRHRLGQRIRRLMKDVAGLEAEIKRLIAAAPGLVRRYRILLSIPGIGPVNAAMLVACLPELGAASAGQIALLVGLAPIPDDSGDRRGYRRIKGGRQMVRNGLYLAALTAARCNAPLRVFYKRKIDEKKPVKLALVAVARKLVVLANSLIADDRTWTPLPPNHA

SEQ ID NO: 106059 - protein, 409 aa, unidentified
MAENGEEMGEAVVGYDSVDVFVGVDVGKGEHHAVALDKTGKRLFDKALPNDEKKLRELIGGLKEHGTVLFMVDQPNTVGALPVAVAYDEGVVVGYLPGLAMRRIADLHAGEAKTDARDAAIIAEAARTMPHALRSLNLVDEQVNELSALCGFDDDLATQITATSNRIRGFLTQIHPALERVLGPHLDHRAVVDLLQRYPSPAALRAAGETRLANRLVKLAPRLGPRLATEIVRALAEQTVVVPGTSAAGVVLPKLGEQLATLRRQRDEIALEVERLLEAHPLYQVLTSMPGVGVRTCARLITELSGKDFASAGHLAAYAGLAPVTRRSGSSIRGEHSSRRGNKTLKRALYLSAFAALGDPTSRAYYERKKAQGKRHTQALIALARRRCDVLYAMMRDGTLYQEPVANAA

SEQ ID NO: 106060 - protein, 361 aa, unidentified
MKKPVHHLIAEVPRRQPRVEMTIGIDLGDVWSHYCTLNEEGEAVDRGRFRTTPKGLEKWFTDVPPARVAMEAGTHSIWISEQLHELGHQVIVANVRELRSISHSDRKSDNADAEKLARFARLDPKILRPIAHRTVEQQEALTLIRARDLLVRLRTAAVNAVRGLAKPCGYRLPASSTRCFAKRSLAVMPPTLAQALGPVIEQIAEMTVKIKQYELQIKKVTETDYPEAQALLKVYGVGQITALTYVLTLGSKQRFQRNRDVGCYLGLRPRRSQSGDRDPQLGITKAGNVYLRSLLIECANHIPRPQGKDSSLRRWGLHLAARGGKQAKNRAVVAVARKLAVLLHRIWITQEPYMPFYAEAA

SEQ ID NO: 106061 - protein, 450 aa, unidentified
MLEDTGVIAPVKDPVSPPSMTRGLRRHQAKLLRRRRQVPADALVVGIDLARERQAVSFVAGQDVLGRRRLSCEPHELDRVLGEAQVLAAKHGSSGVVVAFEPAGHYWCLAAEAFERSGVPYVLVQPLSVRRAREESRYTPEKTDPRDADLIGQLATQGRFTDTRLPSSYDEDAATQLAREYFKVRSLSAAERTRLHNFWHRMLPEFFSVLRDPSCKTALAIGCALRPLSEIAALTSRSWRARVRKAAQGEQVLLSRAASVLSLLKAAHRDPVRRSGEGMPVRIRHAAERRRMLEAQKAGLRSELMHRYSQRDEAAFLDSIPGSNAFYNALTLALIGDFQRYDDPRAVVKLAGSEVNHYASGDWSGTSRISHRGRSALRAAAYQQARQLVARNEDFRARFHTLIHRTTKPKLATQEAYVAVMNSYLRIAHSLVTRRELYIPLAERMHTLET

SEQ ID NO: 106062 - protein, 405 aa, unidentified
MICVGIDWADKAHSVCVLDAEGNKLAAFDVAHSQQGFEKAHSTIAKYAPSIDQVGVAIETKDSLLVDFLSEVGYTLYFLNPRQTDRFRDRHRMSHSKTDSFDAYVLADALRTDQRLFNSLSPLDEQSLSLRVLSRARKNLVQRKVAIQNELTSALKRYFPVALELFNDLDSQGAIDFLLQYPTYQQARTVSSTRIAAILTKGGFRKDAAAKRAETVKQKLGEPQPIPSANVATVFPVAVKSLLRQLKDALREIRDIEAQIKVAHRDHPNKDLIDSLPGVAEILGPVIAGELGAEVTRYANLRTLRAYAGTSPVTVSSGKYCAVHFRRACNQHLRRALHLAAQTAIRESVWARKLYDRLRAAGKSYGRALRAVADQLIEMLYVMLIRRTPYDEDYHLRMQALHGKT

SEQ ID NO: 106063 - protein, 419 aa, unidentified
MSEEIRWFCGLDWGSEKHHVCLLDAAGQLLGERDVEHGGAGLSELCDWLLAKTGGRPAEIAVAIETTSGPVVETFLEWGFAVFSLNPKQLDRFRDRFSVAAAKDDSRDAKVLGDSLRTDRQAFRRLSVEDPVIIELREWSRMGDDLTAELNRLGNRMREQLWRYDPQALKVAGDNLTAPWFLALWHQASTPAKAKKLRRSVVERILAEHRIRRVDAETVLATLRQKPLAVAPGASEAASGHIRLLLPRIRLVSEQLKAVHHRLDKLCAQLEAPEESGPGQQCEHRDATILRSLPGIGRIVLATMLAEASEPLRRRDYHALRALSGQAPITKRSGKSCIVLRRYACNKRLAEALFHWARVATQHDPTSRRRYAELRRRGKSHGRALRTIGDRLLLVACTLLERGTLYDANHNAAPATAAA

SEQ ID NO: 106064 - protein, 347 aa, unidentified
MNFYTTAHKHYCGIDLHARTMYVCVLSQQGVVLLHRNLPCDAQRFLLAVQPFREDLVVAVECIYTWYWLADLCAREGITFVLGHALYMRAIHGAKAKNDRIDSHKAAALLRGGLMPRAYVYPAEMRATRDLMRRRLHFVRQRGSLLAHIQMTHHQYNLDSPGKRISYRCNRDGLGEGFEDVSVRGSIAADLALIDHYEIVIGELELAVLHQARLHDPNAFRLLTTLPGIGKVLGLTILYEIHDIRRFPSVQDFASYSRLVKCEKSSAGKSLGTSGAKIGNAYLKWAFSEAAVLFVAKSTQGKTLLTRLERKYAKPKALSILAHKLGRAVYFMLARNQAFDIERFAKS

SEQ ID NO: 106065 - protein, 378 aa, unidentified
MTQMPHHGESTGSDAALYMALELSASRWHLAFAVGLATPSRRRTIAAGDVAALQQEITAARQRFGVPASAPARSCYEAGRDGFWVHRVLARAGIMSVVVDSASIEVSRRPRRAKTDRLDAEALLRRLIRYWLGERDQWKVVHVPSVEVEDARHAERSLAMLTAERTRYRNRLHGLLATHGVRLRLTRAFEARVATLPTADGRPLPPGVCARLLVVWRVLQTIEHELTEARAAQLAHARAAATPAAVRTERLRQLKGIRVRSAAVLAKEVFARDVRNRREVGALSGLVPVPYQSGEAARDQGISRAGLKAARRILVEMAWSWVRWQPDSALTRWYRARFATGGTRLRRIGIVALARKLLIALWRYSEQGLVPAGAVLRA

SEQ ID NO: 106066 - protein, 363 aa, unidentified
MLQHTTVTHVGLDVSKASISVTLLRPDGQLDEERIPNTPEDVRRLVRRWPEPSRVRVCYEAGPTGYELYRQLTSLGVATTVIAPSLTPRRPGDRVKTDRRDARKLAGLFRAGELTSVRVPTPEEEAVRDLLRARQDEREDVLRARHRLSKFLLRHGRVYTEGVAWTGRHTAWLSKQRFTEPAAQRTLGHYRAELDMRLAALKLLDDELMAIAHREPFASTVARLCALRGIAELSALTIAVEVGDFRRFESAHAFMAFTGLVPSERSSGERRAQGPITKAGNAHLRRVLVEAAWHARRRPNVGPALAKRLAGQPPEVLAVATRAQRRLHDRYWRLVERRKPSNVAVVAVARELSGFCWALGRAA

SEQ ID NO: 106067 - protein, 358 aa, unidentified
MSNIKRNKLDFTGQPIYVGLDVHKKSWSVSISTQYGQYKTFSQPPEVDKLVDYLQHHFPGALYSSAYEAGYCGFWIHDRLKEKGIGCLVVNPADVPTKNKERRAKRDRVDCRKLSRSLRNGDLEGIYVPPREKVEDRSLIRTRLSMGRKQTRCKNQIKSMLLFYGVVIPEEKEMGHWSRRFIRWIEDIRMERASGDMALKIHLEELGHLRQIIAKLNRAILALSRTEEYRPWVLLLRTVPGISTLTALILLTEIGEITRFPSIDELTSYVGLIPDTNASGEREHIGGITQRSHSQLRWMLIEASWKAVQKDPALMMAFDQYCKRMRKTKAIVKIARKLLNRIRYVLKNRSEYVPAVLE

SEQ ID NO: 106068 - protein, 347 aa, unidentified
MKRIAVDLAKSVYQVAESVRSGQVVQRKRLNREAFRRYIQEQVEPVEWVMEACGTAHYWGRLAQSLGHQVKLIHARYVRPYRRRNKTDRNDCDAMLEAVRCKDIYPVPVKSHEQQLLQQLHGLRETWKKSRTQRINLLRGILREAGIEAPASTAAFMRTAHELVDRAELAPLSRLLHIVLAEINLYEQCMAECEQQLKRWHAEDEIVRKLDEVSGIGLLTASALTTAVGKPERFANGRQLSAWLGMTPREFSSGDRRKLGHISRQGNVYVRTLLIHGSRTALLAAQRCQARTPEKLTQLQRWAVETAARIGHNKAAVALANKLVRICWAVWCHERRFNGNWQSTKPA

SEQ ID NO: 106069 - protein, 283 aa, unidentified
MFLGIDIAEASMDCAILAGPGGKPLGRRSFPNSAEGVDRSVRWAARVSGAEVAETHVVVEATAAYHELAAHRLAAAGMRVSIVNPARVRSFARALGILGKTDRIDAQLLARYGRLVRPKLWSPPAKALLDLRSLIARLDDLEADFRREENRLEQARTRGCPELVQRSLLASITALEAQAGDLRRGIAAHVAADAALQADLERLMTIPAVGPKTATRMLLMLRSRSFDTARQAAAFLGLVPVERTSGTSVRGRPTLSRAGNPRLRAALYMAAVVGIRKNPDLRA

SEQ ID NO: 106070 - protein, 345 aa, unidentified
MNGMYYIGLDVHKKTISYCVKDASGQVHREGKIGATRRELDDWIKTLPQPWSVAMEATIFTGWIYDHLLPHAAQVKVAHPLMLRAIAAAKKKNDRIDAGKIADCLRCDFLPECHLAPTAIRDRRRTLRYRHLLVRQMVQMKNRISGLLMETGVEYNKRRLHKVGYFRELLSTNEEVNESIRPLLKLSRETIVRLQKTEYALLSSLQRDPLLAERIKRLRTVPGVGPITALTWALEMGDVSRFRSIRQAISYCGLCGDEKSSADKVIRTPLSKQRNKHIQRVLVEAAKLAPRECHELAVVRERELQRGNPNRATLAVARKIVCYLLAVERGQRDFVPAEQFTRTAT

SEQ ID NO: 106071 - protein, 337 aa, unidentified
MYYVGHDGHKDNSVFCITTSSGNVKETFEVPATPAGMDVLLEKMKGKRFKVLAEASTYTIDLHDYLVSKGVESYLAHPHDLKLITESCRKTDRNDSKTLASYLRLWDKHELDISISFVVDGDNRSLRELCRLRESISEMKGSTMQQIKSHMRINAQYVEFDDLKTIKARKYIRENFCGDLCLMTMLDMYVILEDKGETLDSEIERQFGQRKEVQLLATIPGVGITTAAQLMSMIVDVHRFPTADKMRSYFGMAPTVRDSGGSLKHGHITRRGDPMMRKILSRVVAQLIKNAPKDNLAVYRESHRSAMRPGMLMVACMNRLLDIIYAVLVRGTPYIHM

SEQ ID NO: 106072 - protein, 337 aa, unidentified
MNSIGIDAHSARFFLCAVNDRGNLIKSLDREMSPENLIEAVGSVPSPRQVTVEESHLAQFVKSVLEVHADRLIVCDPRHNRWIAEADFCDDRTAARKLALLLHRDELKEVVHPDNVQAELRSTFMHYHDLNAAIVRCKNKVKGVFRGVGIRAPGRRVYGSARREWLDKLRSWRHLLVEVRQHYEVLDVLLKQKVATCRLMVRLAAREPAFALLRTIPGVGPVLAAGYVALIGSAHRFSHKNKLWSYAGFGNVLHTSDARTYKSGCSSNGNRVLKWDVLQHFRHVVRIKKSNYLNRKYKQMLASGHSETASRRATCRLLLSVVRRMWIDSREYREEGL

SEQ ID NO: 106073 - protein, 327 aa, unidentified
MVTPALGIDVSKDRLDIELAAAGKPRAKCFGNSPEGWRQLMAWLKEQKIKRVHACLEATGRYSLGVALALCEAGHIVSIVNPAQIRDFARSKLGRSKTDGVDAGHIREYAEIFKPLPWIPPSPAMRRLGELQTIRAGIVSSLTEWKNRCESGLADDTVLALAKATIAHFAAQLAAVDKAIARTVADDSELSAKRDLLLSISGVGEVLAGLVLAELPGTNILRSSGQAVAYAGLNPRLHRSGSSIDRPTRISKIGNATLRAALYMPALSAMRHNPVVAALAARLRAQGRLKGKQIAVAAMRKLLVLCFGVLKSGKPFDPAVAMPTRGI

SEQ ID NO: 106074 - protein, 464 aa, unidentified
MIDIDQVGVFLGLDVGKSTHHGHGLTSAGKKVFDKPLLSGEPRLRAAFGKLRAEFSTVLVVVDQPASIGALSLTVARDAGCQVAHLPGLAMRRISDLYPGEAKTDARDAAVPADVARTMPRTLRSVELADEVTAELTMLVGFDQDLADEANRTSNRIRGLLTQFHPSLERVLGPRLDHPAVTWLLECYGSPDAPRKAGRRELVEVVRPGARAWSSGSSMTSFTALDEQTVVVPGTTTLDVIVPPLAKSLATVHEQRRALEDQIESLLEARPLAEVLTSMPGVGVRTAAVLLVTVGDGSSFPSTAHLASYAGLAPTTKPSGTSIHCEHAPGAGIGSSNARCSSPRSQLPTTPPPAPATTAAEPEAKPTPRPSSASPATASASCSPCSATEPSTNPEPHGSLDEGHRGTPRQVPGSFITRTRAASTRLSRSPLTCSRPASTPRSAPSATPRTTRSWNPGSAPAEPS

SEQ ID NO: 106075 - protein, 390 aa, unidentified
MLFIGIDVASKKHDVTIISEYGEVLSDAFTIENSAYGFKQLHTEISSHMEQNDCIHIGLEETGIYSSNIRDFLYSLDFKVYMINPILTYHSRMAHSLRNTKTDKVDCLAICRYIMHNHMHLKPYISTLYTTSELKSLSRLRIDKLKLISKSKMEFTRLLQIIFPEFSKYFDQHSQWALELFTLYPTPAKIARMHLDTLVNIIRIHGDRHASATLIKSLAKTTIGNTSISNEILIDSIIEDIKHFKKQIDRIDEHLDLLMDGFEFLTSIPGVGNVIGATILGEIGDINRFQTAAQLLAFAGLDPSVHESGDFKSKKCRISKRGSKYLRTAIFTATRVACVGRTRDNQFRRKYDRKMAEGKHHNSAICNVSKNMINTVFALLKTKETFCFPS

SEQ ID NO: 106076 - protein, 313 aa, unidentified
MKTQTMDKSISFEQVVKQGCGIDIHKKVLVATIRGTKITEETRSFDSFTENIEELRDWLRENKVTHVAMESTGVYWKPVFNILEEDFEVILVNARHIKNVPGRKTDKADSKWITKLLLSGLLRGSFIPPKHTRELRDLTRYRRKLTGYIASEKNRLQKILEDANIKLSSVVSSMSGATATKIINAMIQGEENIDQLMKFRHGKLACSKEDLAKSLKGCLTEHHKFMLTTIKSCIVEKQATIEMLDRRIDVHLKGNQQNLSSELLQTIPGVGKDAASGILAEIGNNMGQFPSERHLASWAGMSPGNNESAGKKK

SEQ ID NO: 106077 - protein, 422 aa, unidentified
MLGIGIDWAEEFHDVAFGTPEKGVVEQFRISHGPDGVGALIDRALRLEPDPAEVRVVLETRHGLLVEALIDAGFTVLPVNPDLVARRRGPARKKDDAEDARICCLLALDRHAGLKALVPHGEFGGELRAIARDDERAARDQRRLLNRLRADLQTTYPAALTLAGADLGAPTVLRLLQRWPTQPELAQASRDDLISFARAGRHGWPDRFADQVAAALATPSLPTRDYLVRAKAAGIRLAAVQLLALHEARRGWEQRMAELLLGGRRTGRDHTVTDPDPGNAFPGGAIYLSMAGLGDRLAARVAGEIGEHIEQFTSPNGLQCYAGQAPVTRRSGKSDLVVARRLAHNRYLGDAVHQWAFCSLRQSGWAREFYDQKIAAGKSHHNALRALGNRWLEILWHCLTKGVLYDEAVHVANRNRALGRAA

SEQ ID NO: 106078 - protein, 346 aa, unidentified
MKILALDLGKYKTVGCAYESESGAHQFKRGLTTAAGLAGMVQAVKPDRVVIEICSIAGWVCDLMWGLGIEVQVANTSDDAWRWRKVKQKDDRRDALKAARLSAVNQLREVYIPAPEVRQWRALITYRQQLIRRRTKIKNHIRDLLLREGQLLGRGSSCWSQLGIAALAAQARPFSECGPAELWRGELQLELEQLKEIQRQVATVTAQLDKLGAGDARVQLLRTVPGLGARLAEAIVALLDQPQRFRKASQVSGYIGMVPKAMDSGETERRGHITRQGSRLVRSLLVEVAWAGLRHNAWVRQTYQRLSGGKKARKKIAIVAVGRKLLVKCWAMLRDNRAWDWQPQIS

SEQ ID NO: 106079 - protein, 438 aa, unidentified
MLKEINAHAGAVDVGSENFHAAVYGGAIKVFGTFTRDLQNVLEFFGGQGVQTVAMEATGVYWMPLYEVLERGGIKVCMVNGAHVKNLPGRKTDMSDCQWLAELHAHGLLESGFVPEPTILRLRDYQRLRQDHIGMGSQHILHMQKALERMNIKVHDVLSDLTGFSGMQIIKAILKGEQDPEKLAQLCDNQVLNKKRDRLIESLRGHWKEEHLFALGQALEGWQFYQQQIAACDGQLGRILTEMAAVKPEVPGEKLRPLRERKKLHKNSPQITHLYETLVRLCGGNDATQVPTITEYTVLQLISETGTDMSRWPTRKHFTAWLGLAPASRQSGKHRGSQKRFRGRAGRMFCLAAGSLACSKHLALGGFYRRIRATCGGEVANIASARKIAELYYNTLRYGNGYVEKGLKAYEEKYRQDSIRRLKAVARKFGLKITDQNS

SEQ ID NO: 106080 - protein, 343 aa, unidentified
MQAVTTIGLDIAKSVFQVHGVDAAGQVLIRRQLKRRAVLAFFQKLPICLVGIEACASSHYWSRELQALGHSVRLMPPAYVKPYVKRQKNDMADAEAICEAVARANMRFVPTKTPEQQSCLMLHRTRHLFIRQQTAVINSIRAHLAEFGIVAPVGRKGVTELLHIVADASDKRVPEVARACLAALGNQLLSLKEQIVEFDRMIMVWHRSNETSKRLHYIPGVGPMLATALVASVADPRTFRSGRNFSAWIGLVPKQHSSGGKDRLGSISKQGDRYLRSLFVAGALAVIRYAKVHGTKHRPWLTALLARRPTKVAAIALANKLARMAWAMMAKGERYRQPVALAA

SEQ ID NO: 106081 - protein, 343 aa, unidentified
MQVVTTVGLDIAKSVFQVHGVDAAGQVVIRRQLKRRYVLAFFEKLPACLVGIEACASSHHWSRELKTLGHTVRLMPPAYVKPYVKRQKNDTADAEAICEAVTRANMRFVATKTPVQQSCLTLHRTRHLFIRQQTAVINVIRAHLAEFGIVAPVGRKGIETLLDVVANPTDKRVPVIARACLAALGAQLRRLKEQILEFDRMIMAWHRSNEASKRLDAIPGVGPVLATALVASIADPKAFRSGRNFSAWIGLVPKQHSSGGKDRLGNISKQGDRYLRSLFMAGALAVIRYAGTHGTRHRPWLTALLARRPTKIAAIALANKMARMVWAMMTRGERYKDPIALAA

SEQ ID NO: 106082 - protein, 366 aa, unidentified
MQKISTMRRCGNKISKKSQLTIGLDLGDRWSCYCVLNGSGEIVLEQKAATTPAGMQQTFEKMARSRIAMETGTHSPWVSRLLTALGHEVIVAHAQKVRLIVKSRRKDDRLDARTLARLARIDPELLSPVQHRSAQAQLHLAEIRARAALVSTRTALVNAARGLVKSYGQRLPKCHTQQVRREMAGALSTELREALQPLLREVESLNERIQEYDQRIARMAKEQYPETALLKQVKGVGDLIAATYVLTIEDPRRFRKSRDAGCFVGLQPGRRNSGESEPQLHISKEGDEYLRTLLVQGAHYILGPFGEDSDLRRWGQKLAARGGKNAKKRAVVAVARKLAVLLHRLWVSGEVYEPLRNGHQAMSTAA

SEQ ID NO: 106083 - protein, 368 aa, unidentified
MNTVKFIGMDVHKKTITVAIIDEGRQKQPRIYGTIVNQREALDKFCRKMVSTAARLHFVYEAGPCGYGIYRHLTEKGFDCMVAAPSMIPKKSGDRIKNDRRDATMLARLHRAGELTAGYGPDGQDEAMRDLTRAREDAVMATRKSKQRLNAFLLRNGLTFAGRTKWSKAFFNWLCDIAMPYAAQQVALQEYIDTVHENLNRVNRLTDQIRQLVAGWRLAPMVSALQAARGVSLIVAVTVLAELGDLSRFDKPSQLMAHLGLVPSEHSSGESIKRGAITKTGNGHVRKVLVEAAWAYRMQARVSRLLLKRQQGVPERVCQIAWKAQLRLCARFRRLTARGKTKQKVVTAIARELSAFLWAMAKQLQPVV

SEQ ID NO: 106084 - protein, 365 aa, unidentified
MNKETLSSNGNSQMGVVNQEKRILELGLDTHYRQVTTAMQEDGGRIKAAGKMAYRDFRNWVRKKLDEGWEIHSCYEAGATGYWLHRELEQLGVKNLVVVPKAMGQGGKKQKTDKRDAGELCDCLDRYLRGQDKALSVVAVPTEEQEEKRALIRYHRQIMADRGRCEARGKGLLCAQGIEVRGRWWQGDTWLELTSDPRLKDWVKEQLVGWRNKILSTDEEQNALRKRIAALAPAILPKGVGAYSAAVLHYEMRGFERFTNRRQVGSMTGLCPGIHQSDGRGKEGSINRCGIGIVRWTLVEMVWRLMIWQPQYPPVRRLAAGFVKSKRARKRLVVQAARRLAVDLWRLSTGQTTPEKLGLIMHSTK

SEQ ID NO: 106085 - protein, 403 aa, unidentified
MFEIEDVAVFLGLDVGKTAHHGHGLTPAGKKVFDKPLPNSEPKLRAVFDKLTAKFGTVLVIVDQPASIGALPLTVARDAGCRVAYLPGLAMRRIADLYPGEAKTDAKDAAVIADAARTMPHTLRSLELPDEITAELTVLTGFDQDLAAEATRTSNRIRGLLTQFHPSLERVLGPRLDHQAVTWLLERYGSPAALRKAGRRRLVELIRPKAPRMATRLIDEVFDALDEQTVVVPGTGTLDIVIPSLAGQLTAVHTQRRAMEAQINSLLEAHPLSKVLTSMPGVGVRTAAVLLVTVGDGTSFPSAADLASYAGLAPTTKSSGTSIHGEHAPRGGNRQLKRAMFLSAFACMNADPASRTYYDKQRARGKTHTQALLRLARQRISVLFAVLRDGTFYESRVPETATA

SEQ ID NO: 106086 - protein, 342 aa, unidentified
MTAIGIDTHKATLAACAVDELGRPVGEASFANDPAGHLAFTAWARSIAPEALIGVEGSSSYGAPLARSAQSAGLAVREVPPHLSRVERVRTRRPGKSDPGDALAIARVTAREKNLPPIRLPDRTTELRLLLEAREDLVAESNRARNRLHAHLLTLAPGYGGTITNLVAARHRATVGRLLRGVGGVQAELARGLLLRLARLEREVKALTSRIGALVAGHPLLGLPGAGPITVARLIAEVGDVRRFRSADALAALAGVAPIPASSGQVQRMRLNRGGNRQLNRAFYFIAVIQSRFHPPAKAYMTRRMEVDGKSWREAIRALKRMLVRPVFRLLVEGATAQVEAA

SEQ ID NO: 106087 - protein, 443 aa, unidentified
MSRKKRTHLRGKRGQAFANKIRGIPLDQILCVSMDVHKYFHVVIIHNALGEIVTPSFEIDIFQTGFDLLCRTVDETIVRTGAQVVLTGMEPSSHYFENLARHLHQRPQPVTLVNSFAVKKNRDQQMMQYEKDDEIDTAAIGDLLQRGEGSPFNPPTGIYLQLQHLGRVRFSKVKMRTALQNQIIGHLDRIFPGLIIIGEEAKERYEPLFATDFWKCQTLQHLIRVCPNPHDLIAMSPHNLIEAFHAQNYRMGPVRAAKIIAYAKKVLLPDPELAAIRCHLLPHDIALLEDVERHIAQLERDLYTLLAETPYLVWTKLKGLSDAQVASLAGAIGDPANYKYAAQVFRRSGLVPGRNDSGTRQRKGKGKRVVKVGDVYLRRALMNGLATLILHQPVLRDYCNKLKVSKHAGVARVATARRAMGILWAVLRDRRSDLLILKKGAKM

SEQ ID NO: 106088 - protein, 362 aa, unidentified
MIIIGCDLHGRQQTLAMLDTTTGEVVEVTLKHEGDNVREFYSSLPRPVRVGIEATGSMQWFLNLMEELGIECQVGHPAQIRASAPRKQKNDRRDAELILKMLVEGRFPAIWLPSKELQDLRSLLRHRHQWVRMRTRIQNALQSIALANGLRRGTALWSHDGQSRIASLPLAPHTAYRRSELQAMYEKFEAEIEKLNQRVEEQACQRPGARLLMTHPGVGPITALATEVFLGDPARFADSKALASYVGMIPREYSSGGRQRLGGLSKQGNPLLRFLWGEAGAHAARKDPELQRFYRRKLVQKGLGKASVAVARKLGIRLWIMLRDQIEYNEFCRRGQKQQKSSDACAGMPETRYGANSHRPID

SEQ ID NO: 106089 - protein, 360 aa, unidentified
MLYLGIDQHRKQLTVSIRNEAGDVTLRRQVSTEWGRVRAFFDELRQNAETEGGFAAIVEVCGFNDWLLKMLTEYGCRETVLIQVEKRSKRKTDRRDAHQLSGTLWVNRHRLLAGQRVEGVRRIQPPTDREAEDRQLTALRKRLGQLRTRTINKIKHVLRKHNLEQEQPAKGLDTKRTRKWLATLSLGTMDRMEMDLLLAQWKLWDEQIAKLELEIEKRQAKNATAAVVATIPGCAAYGSLALASRIGSIERFPRPASLANYWGLTPGCRNSGEATDRLGSITKQGSAMARFILGQMVLHVLRRDARMKAWYSRIKRRRGSKISRVAVMRRLATVIWHMVKYNEPYVIGGPPRRKLKGQAA

SEQ ID NO: 106090 - protein, 373 aa, unidentified
MPKHSTAFGMDVHLRSTTVCALDADTGEAVTRRFPGNPWGEIAGWMDGFPGPSLAAYESGYLGFAPQRELAGLGVECVVAAVSKIPRSAADSASKNDRNDAARMAKAILAHDISPVWIPSPEVEGIRDLAGAYDGATARLATAKQRLLAFLARRGFVYGGTTPAGNPRKYWTYDFLRWLDKVRPEDDGGVRTLAALRNEVEAAAEARADLLSEYRAAVDASPIAAEVAALQSIKGCAFALAAAFSAEVGDFTRFRSGRQVTAYFGLAPSQRSSGDSVRLGGISGAGNALVRKLAVEGSWCYAAARHQPKLMPRDTGVPLEIRMHGRKGSERLLRRREEMLARGMPAAKANAATAAELVRWLWALGMMCREGAE

SEQ ID NO: 106091 - protein, 339 aa, unidentified
MMDFSNHLLNRKSKVMKNIIIGIDISSKTLDICIKNETVSYFSIENKVPVIKRFLKCYSREKVIIAMENTGRYNWNLFEVLEKFDFKVYVISALHIKKSIGLVRGKNDKIDALRICNFIEKNHQESREWKPCSCSIKKIKILLTERASRIKIKKQLIVQQHDYKLMKSIGLDKQLKDLNIKLLRDIDVQIKIIENDIENIIQNQESLNQQQKLIKSVPGVGQVLSWTLLSKTEGFTTITDPRKMACYSGVVPFDFQSGTSLKRRPGVSMLADKNLKTILHLAAMSAIRSDNDLRTYYIRKVDEGKNKMSVLNAVRNKIIHRVFAVIKNQIPYQKDLVLS

SEQ ID NO: 106092 - protein, 347 aa, unidentified
MLVHPSWQQVSWLNQETGESGDGKLVHEAGAVEKFYRQFPAGTQIGMEATGNCQWFLELMAKLGHDVWIGDAAKIRASDARQQKHDKRDARLLLQLLMEQRFPRIWVPSREQKDLRQLLIHRYKLVRIRAQVKNGLQHLAMNQGLQKKKRLWSAAGQQALRALPLQPWAGRRREDLLKMRSELDAKIDALDLAVVEAAEKDARARLLMTQPGVGPITSMAFVLTIGDVSRFPRGQQVASYLGLIPREYSSGGRQRLGSISKQGNSFLRMLLVEAAQGAARCDPGFRNEYLHRCHSKPKGVAKVAAARKLAIRLYWMLRTNTAYPEVVRIESSSRVPLVGATCLRQAS

SEQ ID NO: 106093 - protein, 425 aa, unidentified
MHSKWNIKINQVTENTLVVGMDIAKRIHYACFVDERGRVIEKAFAVHQSKEGFENLYEKILQTMKEAKKTEVIIGIEPTGHYWMNLAYFLDQYGIPLVMVNPMHVRRSKELDDNLPTKHDKKDALVIARLLKDGRFSYPRILKDIEAELRIGSTLRSKLTEDLASIKNRIIRWLDRYFPEFTQVFPNFGKMALATLEMTPLPKDIKEKTAEELVFLYRQVKGMRAPQLPKAKLLIEAAKNSIGLTEGTQMAQHEIATLLRQYRLLETEIETINNQLAEMAQTTMEYEILASVPGLGDATIVDLLSEVGSFSLYENPRQLIKLAGLTLRESSSGQHKGQKHISKRGRKKLRNTLFKVIVPLIRHNEAFKQLHKYYTTRQQNPLRGKQSMVILCGKLLKVLHGICKKKVFFNEQHMMNDLYCLAEAA

SEQ ID NO: 106094 - protein, 451 aa, unidentified
MSKQRNKVVSLPVIESNAAGIDVGATEIFVAVPADRDPEPIRCFPAFTVDLERLADWLQQCRIRTVAMESTGVYWIPLFQILEKRKIDVRLVNAHHVKNVPGRKTDVSDCQWIQHLHSVGLLRGSFRPDDEICAIRSLWRHRDNLIQLATLHLQHMQKALDQMNLQIHHVISDLDGTTGLAIMDAILAGERDPLKLAQLRHPRIRASEETIMKSLVGDYREEHLFTLRQSLKAYRYYQELIQEVDAQVKQMMQRLPSKVAEGEEPPQGSKRRARKTPWRNEPPQLREDLYRTFGVDLTEIPGVNSLTAQMLLTEIGPNLDRFPTAAAFCSWLRLCPDPKISGGQVLSSRTRPTKNRAALALRVATQALHRSDCFLGDYFRRMKARMGTPKAMTATAHKLARIIFHMITTQQPYDATVFQKQEERRKHQKSARLHAQARELGFQLIPINVVP

SEQ ID NO: 106095 - protein, 372 aa, unidentified
MNTIAYIGMDVHTTNYTLCAISENSNNFYGRVTVPPEFKELERYFKNLHEKKGITHFICGYEAGCLGYSLYYALTEHQWKGFSVECLVIAPTSLPMPKGGRIKTDTRDALLLAQSMFNGTCSYVYIPDQSDEAVKEFIRMRDDTQQQLVQTKLRINAMCLRQGYDYKEPSRWTQKHLEWLKKLQFKEELFRETLDEYLFTLNQQTESVARYDRRIEELAQAKRYNERVRMLCCLKGIGVHTALSLLVEVGDFNRFPAAKNFSHYLGLVPGENSSSTSTHRLGITKSGNNHLRWLLVEAANCYSRGNGLKTKAMKAKQEGCPKEIIAYADRAALRLRKKYVRIQLRSKACIAKVAIARELACFVWGMMTGHTA

SEQ ID NO: 106096 - protein, 349 aa, unidentified
MRIIGCDYHPGFQQIAFVDTDTGELQERRLQHPEEAETFYRELAAQGMKVRVGMEASGHARWFERLLAELQFELWIGDAAEIRTKRVRKQKTDRQDAQLILRLMLKDDFPKIWVPDWENRDLRQLLWHRHRMVQARTRIMNQLQAVALNEGLRCKKRLWREAGREQLEAFPLAPWASRRRRDLLEWLDRLSPTIAELTQTIEQEAEKCPAARRLRTHPGVGSLTALAFVLIIGRAERFQCGKQIASYLGLVPSEESSGDRRRLGHISKQGNTLLRFLLVEAAQVTVRSLPEWRSKYFHLAMRRGRKIAKVAMARKLAIQLYWMLRKEQDYEQTKGFGPHAGQPEHRRGV

SEQ ID NO: 106097 - protein, 351 aa, unidentified
MLLIGVDYHPSFQTIAFFVEETGECGEQELNHSEGQAEKFYRDLKQQGICVRVGMEATGYSRWFERLLAELGFELWIGDPAEIKAKRVKKQKFDREDARLLLRLLRENNFPQIWVPDPENRDLRQLLWHRHRLVQMRTRIMNQLHALAMNEGYRWKKKLFSEQGRGQLEKLALGPWASRRRQELLELLDRMNPTIEELTAAVEREARKRPEAMRLMTHPGVGPLTALAYVLIIGAPTRFQRGKQIGTYVGMIPCEESSARKQRLGHITKQGSSLLRFLLVEAAQAAARINPDWRRRYMHLAMRRHKSIAKIAMGRRLAVRLYWMWRNGCEYSPLLEFGSYAGQLGTRNGVK

SEQ ID NO: 106098 - protein, 471 aa, unidentified
MLIVAAGVVADIGLQPRVRRRVWREDPGGPRTVATSTNPSIRFAWSSPAASNPYLGGEAVKRIRERVAGLDVHRDTVVACCQVKQPDRSIEVTKQSFATTANGLGQLAAWLSDTGVETVAMEATGVYWKPVYYCLEGLFDELWLCNAQHVKNVPGRKTDLSDAEWLADVAAHGMVRPSFVPPPEIRELRDVTRYRKTQVEARAKEIQRLEKTLQDAGIKLSSVASKVWSQSSRAMIEAMIDGERNPSVLAQMAKSRLRAKIPQLEEAFSGRFDSHHALVCRQVIEHIDFLDRSIATLTADVTERLCPFEAAVTILCSIPGVSRTTAEVMIAEMGVDMTRFPTSGHLCAWAGVAPASHESAGKRHPVGTRKGSTWLQRALVEAARGASRTKGTYLSAQYSRLARRRGSNKATIAVAHSILDVSWHLLTNGALYDDPGARFFELRHDPAVEAKRLQRRIEDLGFEVSIAPTAA

SEQ ID NO: 106099 - protein, 313 aa, unidentified
MSATLYLGLDVAKDTVELASEPAGLHGQFATTAAGLAALVAQCQAQPVTLLVLEATGGYEAPVVAALAAAVLPVVVVNPRQVRDFAKALGQLAKTDRIDAQVLARFGARVQPIPRPLPTEATQALEALVVRRRQLLEMLHAERHRLTLARGRPVRDNLRRHIRWLERSLADTEAEVATTIAASPLWRVQEDLLRSVPGVGPQLACTLLGQLPELGHLDRHQIAALVGVAPFACDSGQWRGSRHCWGGRAGVRRVLYMAALVGTRYNPVLRAFYQRLRHAGKPAKVAITACARKLLVILNAVLRDHRPWSPAYA

SEQ ID NO: 106100 - protein, 433 aa, unidentified
MGNCAGIDWASEKHDVLIEDPAGEELLAATFAHSEDGISGLCAALSCFEVDLVAVERPDGLLVDRLLEAGVRVLALHPNQVKAARDRFRASGGKSDRFDRFVLCELARTDAHRFRILEPDSDQTKALRALTRAREDLVKARVAMSNQLHAELERFWPAPIGLFSDLTSPISLAFLARYPSAPDAHRLGEKRLAGFLRANHYNNRTTAARLLERLREAPTGRAEEIETLARRQVVSALVRTLQTMIAQIAELDAEIARALEAHPDGEIFRSFFHSRESVICAATLLAEIGDSRARYPHRDAIAADAGQAPVAVESGKRKHATFRWACNKRLRKALAVLAHSTKMWNPWAADRYANARRRGHNHQRALRTLGRAMSRIIWQCWQTHTPYDPQRHTGLQQHITITTPNPSGPRPDLLATQHTAATDLIATPNHAPA

SEQ ID NO: 106101 - protein, 463 aa, unidentified
MRFGPTTHSQMSSFEDSTIRSVAGSKPACGGISRKGDLMMKTESEEQIDFAAFVGVDWADQQHAVCLQASGSTKVEMCVLKQTAQSIGEWANQLRTRFEGRKVAVCLEQSKGALIYTLMSYDFLVLYPVNPQTLAKYRKAFRTSGAKDDPDDAGLLMELVKLHRERLRAWVPDDVQTRTLQMLVESRRKIVRERTRLTNRLKSLLKAYYPQALEWAGELKGLRACDFLKKWPTLEAVKRAKVSELQRFYRHHGCRNEEVIGERIKQIRGSDPLTGDQAVIKSSAMVVLTIVSQLPCVIRAVEQFDQEIARVFQQHPDHELFNSFPGAGSALAPRLLAAMGSDRARYESAEEVQQFSGIAPVTERSGKSKWVHRRFACPKFVRQTFHEFAKQSIIWSSWAHAYYDQQRERGKHHHAAVRALAYKWIRIIFRCWKDRTVYNEQAYVEALRRRGSRLILSPVSCDS

SEQ ID NO: 106102 - protein, 343 aa, unidentified
MQTITTIGFDIAKSVFQVHGVDAAGEVVIRRQLKRRYVLAFFQKLSPCLVGIEACASSHYWSRELQALGHSVRLMPPAYVKPYVKRQKNDMADAEAICEAVTRANMRFVPTKTREQQSCLMLHRTRHLFIRQQTAVINSIRAHLAEFGIVAPVGRKGITELLHVVADPSDKRVPEVARACLAALGTQLLSLKQQILEFDRLIMAWHRSNQTSKRLHYIPGVGPMLATALVASVADPRTFRSGRNFSAWVGLVPKQHSSGGKDRLGSISKQGDRYLRSLFVAGALAVIRYAKIHGTKHRPWLTALLGRRPTKVAAIALADKIARVAWAMMAKGERYKQPVALAA

SEQ ID NO: 106103 - protein, 392 aa, unidentified
MVCVGIDVAKDKHDCFILSSEGEVLADVFTVANNREGFETLLQRIHSCARPTDNIKVGLEATGHYSYNILGFLLDKGLATYVINPLHTNLYRKSLSLRQTKTDRIDARTIASMLMSDVDLKSYTDTAYHNEELKSLSRYRFDKVQERAKLKQSVSRLVNILFPELETLVPTLHMASVYTILSEFPGAKQIANSHLTHFKTVLSDASKGRYDRDKAVEIREAARRSIGSAMSAKSLELQHTIRLIRELDWEIKEIEAAIKTIIDEMAPPILTIPGISYRMGAMILAEIGDFSRFDSPDKLLAYAGLSPSTYESGKLKATGAYAHMEKRGSRYLRYALFNAAKYVCFWEPSFAAYLAKKRAEGKHYNVAISHAAKKLVRLIFALQTSGKAFQPA

SEQ ID NO: 106104 - protein, 320 aa, unidentified
METGCIERSQLKRARMLEWLANRTAALVVMEACGGAHDWGRALIGLGHDVRLISPRKVRPFVQRNKTDAADAQAIWTACQQPGMRFVPVKTEAQQIVLSLHRLRAQLMKTRIMQTNELRGLLYEFGIVLPEGHAALLKALPDAMCDAKTRLPVTLMDSLDEQLRRVQRLQADIGLIERRLSQQMRELPACKAVAEIPGIGLLTATAVVASMGTPTAFKDSREFAAWIGLVPRQTGTGGRVRQLGISKRGDAYLRTLLMHGARAVVIRSKDGPTWPWLTALLQRRPYSVAVAAVANKLARTIWAVLARGQAWRPEAWQTAH

SEQ ID NO: 106105 - protein, 443 aa, unidentified
MSDLAVLDPCAAFVDVGSEKMHVSIAGGSPAVFGTVTSQLHALRDYLAEHQVRSVAMEATGVYWLPLYGVLEAAGMEVVMVDGRQTRNLPGRKTDMKDCQWGATLHAHGLLRAGFVPPAHIRRLQDYLRLRGDHIAAAAGHVQHMQKALERMNIKLHDVISSLTGASGLAVIRAILAGERDPQVLLGLCDIRIRNVKAERVVESLRGDWAEEHLFALAQAVQSWDHYQGLIAACDRQIAVVLRQMPDAKAPPSATSTKTGKPRTRPGANAPDIADLREILAQICGAKDLTTLPAHSEYSVLQLIGEVGTDLTKWRTEKHFTSWLGLAPGSAQSGKRKASVKRRRNRAGQIFCVMARALARSKYVALGGFYRRMAARRGGLVANKALARKLATLFWRVMVKGLDFVETGVAQYEARVLETKHRILHRLARQLGQQIVPNPAAAV

SEQ ID NO: 106106 - protein, 351 aa, unidentified
MDYYTTHTKYNCGIDLHSKQMYVCVLGTEGEILIHKNIKGNDFEYFLKITKPYRSDMTVVCESTFNWYWLADACCEADIEFVLAHALYLKHIHGGKNKNDKIDSKKLAHLLRSNFIPPAYAYPAKHRPMRAMFRLRMNYVWDRSSLLGHLKMNQYAEGLVPVPTKARGRKEWEKSILDQYSDPILRMSAKCDIEMIYSYDKQIALLEKTLVSQAKKFFHREYPALLSVPGIGKIMALTILFEVDTINRFPTVKDFLSYSRLVKGSVASAGKIKGMTGGKMGNAYLRWAFGQIAITAKRCDPIIRVYAEKIINKHGKFKGNAILGNKIARCVYYMLKKGEVFDIEPLISKSF

SEQ ID NO: 106107 - protein, 332 aa, unidentified
MGSSSRMQGKVLSEQATRMQSSAGIDVGKSWLDAHILPAGQRRRVANNPEGIRQLKRWLLGFDCTIVVVEATGKWHRPLYRSLHADGLPVAVSDPYRVRMFAKAHGVAAKTDRLDARVLAQFGAVMNPAIRPPAPEAFEELGELLAARRSAVDTQTALKNQAGITTSKFLVRQIKRRLSALAKDIDALECEIQRHIAAEEPLAKRYAILISIPSFGFVVAATLLASLAELGICSAKQIGMLAGLAPIADDSGQRQGIRFIGRGRSAVRNVLYLAALAATRFNPDMKAFYRRLIANGKPPKLAIIAVARKLAVLANTLITEGRNWLPQHPKHA

SEQ ID NO: 106108 - protein, 338 aa, unidentified
MLYAGIDLHSNNSHLAVLDQDDKRVYHKKLPNMADVLLAELEPFQDALSAVVVESTFNWYWLVDSLMEQQYHVLLANPAAMQQYKGLKHIDDKHDAFWLAHMARLGIIPQGYIYPKEERPFRDLLRKRGHLVRLRTSVINSLQGIISRNCGCSLGGNKIKQLRTNHVAPLLDGQEDLMLSGEVSKDVIDFLGQQIYRIEFLVLERIRLRKSFQCLQSIPGVGKILSLTIMLETGPISRFKKVGNFTSYCRKVPTSWTSNNKKKGKGNRKSGNKYLAWAFSEAAEYSRRHCDQARTFFNKKAARTNKSVAYSALAHKLARAAYYMMRDQVDFNPNKLFA

SEQ ID NO: 106109 - protein, 349 aa, unidentified
MGQAITIGIDIAKSVFQIHGIDADGTVVIRKRVGRAKVLEFFSGLPPCLVGMEACATAHQWARELKKFGHDTRLMPPTYVKAYVKRGKNDAADAAAICEAVTRPSMRFVPIKSIEQQSALMLHRTRDLLIRQRTQLINALRAHLAELGLVAAKGREGLQQLVTAVTESGDERLPSDAGVACQVIVAQLHAVQTQVNRLDKRITQAHRANADSKRLDAIPGFGVILSTAVVATMTDPKAFKTGREFAAWIGLVPRQNSTGGKERLGSISKQGDRYLRRLLVVGAISIVRTARMRPDKYPWVIELLARRPAKVVAVALANKMARIAWAVLAKGETYRAPVRSSNATIAAAA

SEQ ID NO: 106110 - protein, 397 aa, unidentified
MIAVGIDISKAKSTVAVIDSDGTVLASPFTMAHTQPEMEAFVSYLKGLGEPTTILMEYTGHYHYPVLKKLQDEGFPVCIVNPYQMKKYGDVEIHKAKTDKKDALRIAAYALEKSYKLVPYSSMEQKYEDLKFLSRQYNQRISYVAKLKVQLIALLDQTMPGITRILPLNSRNPEKCALLLFIKRFKSFDEIQRIGKARFLASYDVLAKKASERSASSKGLSIYELAVDSITTRGEDPYIWLSQNQCVDLLSATQNAADEIISQMRNIAETIPEYKILRAMHGVGDRLGPIILAEIGDVHRFHSGKALNSYAGNDAPPYQSGQFESRNRHISKRGSSALRKACYEVMQALKLTKPQDDPVYLFMLKKEQEGKPFNVAKMAGVNKFLRIYYARAMELYK

SEQ ID NO: 106111 - protein, 397 aa, unidentified
MDAAGRRLAAARLPEGVAGITRLHEMIGAHLGEDAGAGEDAGAGEVAIGIETDRGPWVSALVAAGYTVYAVNPLQAARYRERHGVSGAKSDKADAHTLADMVRTDAHQLRPVAADSPQAEAIKVVARAHKTLIWERTRHTLRLRYVLREYFPAALEAFDDLAAPDTLELLAKAPDPASAAKLNRSQIRAALKHARRRDIDMKTTRIQAALRSQQLGRAPVITAAYAATTRSIAAVLATLTAQINTLRGQVETHFGRHPDAEIILSQPGTGVLLGARVLAEFGDAPGRYADAKARKNYAGTSPITRQSGKRKITHARFVHNDRLVDALMSQAQSALLASPGARAYYDKQRARGLDHHAALRQLANRLVGILHGCLKTRTLYDEATAWSHHNQDQRTAA

SEQ ID NO: 106112 - protein, 349 aa, unidentified
MGEVSTIGLDIAKNLFQIHGVDADGAVVIRKRVSRARVLEFFADLPPCRVGMEACATAHQWARELRKLGHDTRLMPPTYVKAYVKRGKNDAADAAAICEAVTRPSMRFVPIKEVEQQSVLMLHRARDLLIRQRTQLINALRAHLAELGLVAAKGREGLHQLVAVVTECGNERLPGNARFACQAIVTQLHAVQIEISGLDKRITQTHRANADSKRLDTIPGFGVILSTAVAATMADPKAFRTGRDFAAWIGLVPRQNSTGGKERLGSISKQGDRYLRRLLVVGATSVINCARARPYKYPWVIELLGRRPTKVVAVALANKMARIAWAVLAKGKPYRAPTCSSNAVALAPA

SEQ ID NO: 106113 - protein, 354 aa, unidentified
MDNIRYIGLDVHRDTISAAVLNGSGRLIQQSVLMTRAAAILDFIAGVRGTLHVTFEEGTHSAWLYDLLSRRVEKLVVCNPRRNALLKSGNKGDAIDARKLAELLRAGLLSAVYHGETSALEVQQLARSYTMLTEDTTRVMGRLKAVFRGQAIACTGRKLYGHHRNEYLAALGVCALRRRAERLYLQLDALQLLRRQARHDLVVECRKHTAAKWLQTVPFLGPLRAAVLIARVQTPHRFRTKRQFWNYCGLALETRDSAEYRVIDGQLERKKRPALIRGLNWNYNHELKNVFKGAANAASVGQGEFRKFYLGLLKKGMRPEMARLTLARKIAAIALKIWKKGEAFDAEHLKSQAA

SEQ ID NO: 106114 - protein, 342 aa, unidentified
MEKITTIGLDIAKSVFQVHGVDAGGEVIVRKRLSRARVIPFFAKLPRCLVGIEACSTSHHWARELIALGHDVRLMPAQYVKPYVKRGKNDAADAEAICEAVTRPTMRFVAVKTPEQQSVMMLHRVRLMLNRQRTQLSNATRAHMSEFGIVAPVGRIGLDRLLAIVADKDDERIPPDARICLEMLGAQLTVVKEQILENDRRIRASARDTEVGRRLMEIPGVGPLLASAFVASVADPQVFKTGRDLAAWIGLVPRQNSSGGKERLGGISRAGNQYLRQMLVVGAMAVIRHAERHGTKRAWLIELMKRRAKKVAAVALANKTARMVWALMTSGEHYREPQVAHA

SEQ ID NO: 106115 - protein, 340 aa, unidentified
MDNTFVIGVVVSKNKLAFCLMFQDKVLKQGETANETTAIKSTLGSLLKEFDVTKDQLIVCAEHSGQFNYPLIYSCECDNYKLWLENPNRIKFYCSGLQQGKNYKLSSKQIAVYASRNIEKINISNQRVSEVEHLKQLHNELEMLETDSDKMHSQLFDQKNYMSEEVFNINASRLITLIRGLEDAIITIKSEIKCIFAENSFLSEQMELLTSIEGVDSDLAIKMIVETDAFTRFENCRQFCSHAGIAPLNKGLKTNEKILHAVNPKTDKGIKTILNQAAISVIKRNDNELKNYYIRKMKEGKDEKIVLNAIRVKLVARMFAVIKNNKRYKPNIMETRPLAV

SEQ ID NO: 106116 - protein, 338 aa, unidentified
MKVYAGIDLHSSNNYIGIINEEDQRLYQKRLPNRLEHILEALEPFKESMEGIVVESTYNWYWLVDGLQDHGYKVHLANPSAIKQYEGLKHTDDKWDSFWLAHIKRLNILPEGYIYPKEERPVRDLLRRRLLFVRHRTSHILSLQSSITRNLGYKMSSREIKKLERGDAGKLFDDPFLVLAASNNISAIQFLKTRIAEIEKEVKSHIQLKPEFKYLLTVPGIGNILGLTIMLEVGDISRFLKVGNYSSYCRCVKSERISNSKKKGQGNRKNGNKYLSWAYVEAANFFRRYCPKANAFYQHKKAKKNGVVAIKALSNKLARASYYIMKDKVPYDANKMFR

SEQ ID NO: 106117 - protein, 359 aa, unidentified
MTENPNKESPALWIGVDVSKKSFMAAAKFPWEGKAVYPEDSAEFGNNRAGARRLCKWIGELENEYGGPFGVAMETTGPFSLKLYGNLQKTRPGLHVAICNPLSVSYYMRSLGTNKTDKADAAGIARYAAHIRPCKYREPSKDEAELKRLTRDRTFMVDSRTQYKNRLGSEGDARSRERIRRLIGALDREIDGIDKEIAEYLATKASAECRSEIELMKSVPGVGTSSAAVIYGELGPLSGYTRKQLSAMSGICPATRQSGTSLHKGGLSKRGSKWLRRILYLDSMQTILGSPAMSAFHEKMLKKPDSSKMGARVACMRKLLLILRGIVVSGKKFDKDHVSVRPDVLEKNMKNPEKTEMTA

SEQ ID NO: 106118 - protein, 339 aa, unidentified
MEVYAAIDLHASNSFLAVVDREGKRVFKRRLVNDSAILLKALEPYKEAMQGIAVESTFNWYWVVDAMMEAGYKVHLANPAAIQKYRGMKHSDDKSDAAWLAEMLRLGILPEGYIYPREERPVRDLLRKRTHLVKLRTSLINSLQNILARNTGMRVGADKIKQLTRDLVAPLLEQEEDLALTGQVSKQTIDFLTRQIKKVERQVQRKIELKKEYSCLTTIPGVGTILSLTIMLETGPISRFPAAGNYASYCKKVPTRWTSNGKSKGNGNKKNGNKYLAWAFSEASELSRRFDPEIRAWFDRKVSKTSRMCAHGALGHKLARAAYYIMRDHVPFENKRLIS

SEQ ID NO: 106119 - protein, 347 aa, unidentified
MQVTTIGLDIAKNVFQVHAIDTAEKVVVRKQLRRSQVVEFFKALPACLVGMEACATAHYWARELTKLGHQVRLMPAKDVKAYVKRNKNDAADAEAICEAVRRPTMRFVQVKSAEQQSRLMLHRTRDLLMRQRTQLINALRAHLAELGIVAAQGNAGLKELLKIIAGERDARLPVDAHASLVVLAAGLHAVQTMIGSIDKRIMIEHRSNEASKRLRSIPGIGIVGASAIVATVADPMAFRSGRDFAAWIGLVPRQDSTGGKQKLGPISKQGDRYVRRVLVVGAHAVLRYAKQNPEKYPWLTQLLARRPFKVVAVALANKMARVAWALLAKGGTYYRARALVTVVTAAA

SEQ ID NO: 106120 - protein, 391 aa, unidentified
MPSTNLQTSFEFKGQIFFIGMDVHKRSWTITIRSMGIQVARFTQPPSVEALLVYLKKHYPGGEYYSAYEAGFCGTDIHEQLCKLGVKNIIVHAADIPTTDKQRKNKNDFHDSRAIAEKLEKNDIHGIHVLSREQQELRSLFRLRQQKVIDVTRANNRLKSYLMFFSIELPEELCKTEHLSKKALDWLANLELAVEAGTLSLKTYSEELTYQRSQLSQITKLLRKQMQSHHAKSYQYLLTIPGIGPVTAMGLLAEIADFNRFDDPDEYCSYLGLTPWEDSSGETVRTNGMQPRHNKFLRPLLIEASWTSIKHDRGLFAYYSKHAKRDSKKAIVKVARKVALAARGVVQKQQPYDADYLKKKKEGQQQNETKVFKGTAEMHINKQPDKVQLPG

SEQ ID NO: 106121 - protein, 344 aa, unidentified
MDHYAGIDVSLECSSVCVVDANGKIGRETKVASEPETLIGWFGSLGFGPARIGLEAGPLSQWLYAAMKQAGLAVELLETRHVSDAFKAMPVKSDRNDARKIAQLMRLGWFRPVHCKSITAQEIRAMLTARKLVQSKLLDLENSLRGILRGFGLKVGKTTRTNFAGRIEELVKGHPNLQTIGEALLRVRAVLLAEFNGFEKRVRATSRLHEKARLLMSTPAVGPIVSLTFACAIDDPARFTSSKQVGPYLGLTPKKYQSGETDYTGRISKHGDASVREALYEAAHIMLTKPIKGCSELKSWAMRIARRAGINKAKVALARKLAVVMLRMLKDNAPFNPAAKAATA

SEQ ID NO: 106122 - protein, 387 aa, unidentified
MQKPHDDSKACDATFVQDSTLVVVIEMGLSSWLVAGMIPGVSREPLKKIDPKAEELLQLLYRWRDEAIAAGKEITRIAVAYETGRDSFWLARWLRKRGIDAHVIHATSVAISREHRRAKTDRIDTAMLRRGFLGWLRGEPGHCSMAIVPTVAEEDAKRPHRERDSLVHERTSTINRMKSILIQFGVRNFNPVLRKAREKLDAVRTPEGIPLPPNTVAALRRHMERFCVINEQIKAIEQTRLQQLERDPADRFNAMVFLLVRIIGLGVETAEQLVREILSRQLRDRKAVARYSGLTGSPDESGSKRREKGLSRSGNGRVRKALIQLSWRMLQFQPKSALVLWFKKRTENVQGSRKPMIVALARKLIIALWRYVNTGVVPEGFELRPAA

SEQ ID NO: 106123 - protein, 331 aa, unidentified
MEFYETIGIDISKATFDVHMHKHELSAQFDNTEKGFKKFQQWIEKHNSISLDQTLFIFESTGIYSLKINRFLEEKSWHFKIISGLEVKKSLGIVRGKNDKVDAKRLALYGYRRREEIIPTPPMVSGIEKLSRLVSLRKRLVTQRAGFLATYKEYSRILDQQEHGTVIKSIKQTIDFFNEQIKVLEKEMDKLIQQDKFLYELLILITSIPGVGPEIARQMIVITNAFTKFKTWRQFASYVGIAPFPYQSGSSIKGKTKVSHYANKKIKTLLTSIALNAIRYNKEIRAYYKRKIAEGKNKYIVINSIRNKIVARIFAVVKRKTPYVELMSYAG

SEQ ID NO: 106124 - protein, 412 aa, unidentified
MEVIIERCCGLDVHQETVVACVLIGAPGERPRKEIRTFRTMTHDLEALRDWLQELGVTQVGMESTGVYWRPVYAVLEGRFDLIVGNARHIRNVPGRKTDVKDAEWIADLVRHGLIAKSFVPPAPLRELRELLRYRRKLVESQAAERNRLLKLLETANIKLASVASDVFGVSGRAMLRALIEGEASAEAMADLARGQLRRKHADLILALDGRVEEHHRFLLAMQLRRLEAIEADIAALDQRVGERLQPYCAQHALLMQIPGVDWLVAAVLIAEIGVDMSVFLSVYHLAAWAGVCPGNRESAGKQKSGRARKGNVHLRTMLVGAAISAARTKGSYLKDKFHRLKARRGALRAALAIAHKILVSAYHMLAKNLPYRDLGEAYLDQISQTRTVANLKRRLERLGYNVTLEPKPEPA

SEQ ID NO: 106125 - protein, 348 aa, unidentified
MDKITRIGVDLAKNLIVVHGVDSMEHVAVRKAIPRQKFLEWFANLEPCLVAMEACSAAHYWGRKLRALGHEVRLIAPQFAAAYRKGGKHVKNDRLDAEAICEAASRPHMRFVALKTADQQNVLVLHRMRSGFVEERTALVNRLRGELFEFGVFLPQGIDAFRGHFVEALEDGTTELDGIARTALLAGWHHIQALDEQIAWCDSQIAARVKHDTNAQRLMAIVGIGPLTASAAVATVGDARVFRNGRQFSAWLGSVPKQASSGGKTRLGHITKQGNTYLRTLLFQGARSALTSAHRRTDRLSRWIVQLHARVGWYRTLVAIVNKHARILWAILAKGVRFDPSYTPIRPS

SEQ ID NO: 106126 - protein, 343 aa, unidentified
MAQQTIIGIDLAKHVFQVCMVTPQGTIKTNTTVARSKLLALIARQPPALIFMEACGGAHDWARRFRAVGHEVRLLAPQYVTPFRRGQKNDPNDALALTEAGQRPNIPTVPIKSVEQQDLQALHRVRERLVKHRTAVVNQARGLLLEYGIVIPQGIARLRKRLPRVLEEADNGLSFMMRDLLQSLQGELSALDTRITDVTGQLARLSHEIEACQRLQEMEGIGPLSATALVAALGNGHDFQTSRQVAAWLGLVPRQHSSGGTTRLGGITKGGNSYVRRLLIHGARSVISHVRDKPDAKSAWIRQLVTRIGVNKTCVAVANKMARVAWALLHTGEQYRKPEVLAA

SEQ ID NO: 106127 - protein, 397 aa, unidentified
MYIVGIDIAKRKHEAAVIDGEGTVIIKPFSFTNNCSGYNRLLAMLTKAKLPLDEVSFAMEATGHYWLALFTRLQKEGFRVQVINPVQTNSIRSFYIRQAKTDPRDALLIAEVIRFGHFSESTLHPENIYELRELCRGRHAIVSMQADVKRKVVALLDQVFPEYETAFTNLFGDTSMAILQTCPTPKELSEMRLEELCHLIDVSSHKRFRMAKAQELQELARNSFGFAMAGDVFSTMIRLYAKHLDFLKQQVREMDRKIAEIMETLDTPITTITGIGLTLGAYILSEIGDISRFSSAAKLAAYAGIDPTMRQSGEYNGVRNRMSKRGSPYLRHAIWLAASSAVLHDPALKLYFQKKRDEGKPYMASVGHACRKMVSIIYAVMRDNKAYTPCIPNEISV

SEQ ID NO: 106128 - protein, 363 aa, unidentified
MNATAASPIVGVDLAKSVFQLAVAEGSWRVVESHRLTRTQFERWFVNRRVGLVVMEACGSAHHWARWLNGLGIEVRLLPAAYIRAYVKRNKTDAADACALLEAARCAEIVPVRVKSIEQQALQGLHRTRSLWMGTRTSRINALRGFCREFGIVIAQGSRLGVEQIGRVLADPHAAVPTLIRGTLSLLVEEVRLLEVRIAQLERELTALARTSPACTTLLSIPGVGLLTATAMVAATSGAVSHFHDARHFASWFGLTPKEHSSGSARHLGRISKRGDRYLRMLLTHGARSVLRAAGAAVRAGKSVDGLRQWALTVQSRSNHNKATCALANKLARICYATLRDGEPYGAARLNKKVTRTAFALPT

SEQ ID NO: 106129 - protein, 342 aa, unidentified
MQPILYVGLDLGSSFCYQTVLNAEGALERSRSIPTSEQNLRNAFADLQGDVRVHLEAGELSNWVYSMIAPLVAQVVVSHPRSLAWIGKDAVKDDRIDARKLAELLRLNRVHAVYCEADCSRQTFKQLVVHYEDLSREQARLKSKIKARLRTLGLIRQDGRLFSAAGQIALLDEIKEPIVKLMLAQSFAVLNQMLAALKEAKTAMRDFAAHFPEVELLQTAPGVGIITACRFVAYLQTPRRFSNKRKLWRYCRLGITRRESNGKRLAHPRLDSAGVGSLKDVSRKVFEAARRTKKDHSFKRFYEQSLTNTKNAVHARLSTQRKILACLRAMWFSMKPYRDSAD

SEQ ID NO: 106130 - protein, 440 aa, unidentified
MKNLTVLNSEAAAIDVGSESLHVSIAGGPPKVFGTFTSDLENLRAWLVQQGARTVAMEATGVYWLYLYEALEAGGLKVVVVNGRHVQNVPGRKTDMADCQWLATLHAHGLLRGGFVPDSDIRRLQDYQRLRSDHVLGAAAQVQKLQQALERMNVKLHDVISDLVGVSGLKVIRAILAGERRPGELLALCDPSIQKKKAQRVQESLRGCWKKEQLFALRQALELWETYQQKMADCDRELEQLLNEMAAVCPPSAGAPLKPSPRKALRKNTPVIEGFQALLARICGGHDATQIPGLGPGLVLQLISEVGTDMTRWPSEKHFVSWLGLAGGRKQSGKRKGRLRAQRNRAGRMFCTASRTLARSVDKALGGFYRRLRGRIGAMAANVALARKLALLFYRLLRHGLDYVERGLKSYEAKVLETEARLLRKLAKKQGFTLVPAITN

SEQ ID NO: 106131 - protein, 409 aa, unidentified
MEVIAHRCAGIDVHLRFLVVCLSSSEAGQRRKEIRTFRNETPDLLALRAWLLQEGCTHVGMESTGVYWMPVYRRLEGFFEVVVANAQHLKAVPGRKTDVQDAEWIANLLQHGLLPASFVPGQEQQDLRDLTRLRISLVQERARLVNRVHKVLEEAGLKLSTVLSDIMGVSGRAILHGLCAGESDPVQLARRMRPGVQASEERVVAALTGELREHHRFLLRELLSLIEAQSRSITHVEQELERRLAPLEEKIQRGERITGVSRQVVQLLLAEVGTDLSRFPDAEHLSSWAGVCPGQKESAGKRLSGRSKPGNRYVRAALVQAAHGVRRTATYLGERYRRLKKRRGSKRAALAVGHSILVIYYHLMTTGQEYQEKGVEFFQQTDRAKVERQLVQRLERLGYHVTQPPQPAA

SEQ ID NO: 106132 - protein, 337 aa, unidentified
MKLYCGIDLHSNNHYVSIIDQESKRLKEKRLGNDLSKTLTLLEPYKNDLQGIAIESTFNWYWLVDGLMDEGFTVSLVNTSAVKQYEGLKHTDDKYDAYWLAHLMLLGILPTGYIYPKEKRSLRDLMRKRMLLVQCRTSHVISAQAQFWRSTGTRLRSQDIKKYPVDLLSDISDQYLLLSIQSNLNVIQLLNHQIKTIEETVLSQCKNLPEYTQLKSVFGIGEILAQTIALETGDISRFHQVGNYTSYCRCVDSKKTSNGKKKGSGNKKSGNKYLAWAYMEAANFAIRFYEPARKFYQRKLSKRNAIVARKALAHKLARASYYVMRDNVCFKPEQLFS

SEQ ID NO: 106133 - protein, 369 aa, unidentified
MKKIVKYIGLDVHKNSIVISIAKNGRDKDVNFYGAINHDMNQLHKFLRKQISQGAELKCVYEAGPCGYNIYRSLIDKGIDCIVVAPSLIPKKSGDKIKTDRRDSQNLARLHRSGDLTAVYVPKLEDEALRDLVRARDDCVNALRRAKQQLGAFLLRHNICYSGKSKWSKAYFNWLADIAMPHQAQQITLQEYIDIIQDGKNRIERISQQMRQLSDQSQLSHLNKSLQSLRGVSDIVSTVVVSELGDLTRFDSPVKLMAYLGIVPSAYDSGDKKKRGKITKTGNGHVRRALIEASQAYRLPARKSRAIAKRNKGLPKEVCKIAWQAQVRLCGRYKRLVFRGKNANLVKTAIARELAGFMWAIAHAVPKVA

SEQ ID NO: 106134 - protein, 411 aa, unidentified
MNPVIGLDVAKGESQVQAYLERKKPYKKSFKVKHDLDGLASLLDFIKEVEDISGERPPLVMESTGHYHTPVVQYFEDKGYLIIIVNPLISYKTKSSSLRKVKTDIVDANHLCELYYKEDLEPYKKRGIQLANLRHLTRQHDNITGMFVQTKLQFQAVLDQVFPEYSNVFGDLYSNVSLKILQTYPTSEDILSANNEVLTTKIKEFCNSRSLQWANQQAEKLMTAAAQNPFQQALYSSLALSLDMYINMIFEYKKHLSLLENEIDALAKSIEESKIIQSIPGIGEKIAATIISEIGEIERFNHPKKLVAFAGLDPSIFESGTFKGTYNRITKRGSSRLRQALYMAVKCAIRDCRKQKTTDEILPRNKKLRAFYDKKREEGKPFRVAVIACANKLLHWIYALLKNKTSFQDIS

SEQ ID NO: 106135 - protein, 425 aa, unidentified
MKISQTAQKIKLNQVVDVSVDVHKDSLNFFFETGGKEYSDECSNRTTVISKRLEAYHRIAAEHGMKSLRIICEPTGQYHNKLFRTARRMGFFTSFVNAESVAKFRVIETNDTGKTDTKDPRVIRTLGQLDKVIKHRMISEEYMILRKLNKIYDEVDEMIVSLRCRLDRLLVELFCDYSFKKDFLYTASGLALIEAYECNPYRIIEAGYVGFCARMRKGAPRIQKQTLRRLWEDAQSSVLNEQPEGYVQTLEMHLRQLINDWLEQIRRKEEMVRKMVEVLNRLRGKDPKIPPSTPGVINDKNLARLLGETGPLSDFANGRMLMRYGGLNIRMRQSGKYQGQNKITKRGRPLMRKVLQHIVLPLVREGCLYGQYYYRKKEIEKMPGNKAMTCVARHFLKKFYGWYKSGEAFNQQRFFSCETQYRRAA

SEQ ID NO: 106136 - protein, 340 aa, unidentified
MSTINILGIDIGKFTFHLVGHDSSGREVCRKKFSRPKLIQFLSTIELTTIAMEACGGCHWLARKCQEFGHKVKLIPPQYVKPYVKTNKNDFIDADAIAEATARPTMRFVSVKTESSQVISVIQRIRSSYVKDRTACMSRIGATLLEFGMSFPKSHAKMKVLFQWLAEHGEPIPPMLLLELRDHHDFYLKLNQLILTQEKKLKEIVDHDERAQLLKTIPGVGNLTASRCISDISNVADFKNGRHLAAWLGLVPRQFSTGGKPTLLGISKRGNKGLRELFIHGARAVLVRPEKAVAVFGNWILELLSRKHFNVVVIALANKLARIAWSVLSTKQAFEVRVQA

SEQ ID NO: 106137 - protein, 328 aa, unidentified
MEPDYIGIDLHKAFFQGCSVRGNGERRWEQRWPTTDAGIADLLARCGPESRLAVEASSPTWAFVDRIVEHVGSVQVVDARKTRLKAGYAAKTDRLDAQRLADALRRDSVVGIYYPPPAIRELRELCRYRCQLARVQASVKQRIHALLLRHGVVVPVRSLFSARGHQWLTALALPGWGGASLTGWRQVLADVRARLGPVLAAIRTTAADDPIAHALDARPGFGPVFSVTLRAEVGTITRFPDGPHLASYAGLVPRVERSGSRQWSGRITKAGSPWLRWALIEAAIHQLRRQDDFGRWAHQLAVRKGILKARVAVARALCDELFVVWPRA

SEQ ID NO: 106138 - protein, 345 aa, unidentified
MGETTIIGLDVAKQIFQVHGVSADGKVTVKRQLRRSQMLGFFGKLTRCVVGLEACGGSHFWAREIRAFGHDVRLIPPAYVKPYVKRGKTDAVDAEAICEAVSRPTMRFVPIKTAECQATLMVLKTRDLLVRQRTQAINALRGHLVEVGIVAAKGAAKVEMLFEIIRDENDGRLPPAARTALKMLTEQIEALTERVDTLERKIVAEVRRDDTMRRITTIPGIGPITAATIQALVPDPGAFTSGRHFAAWIGLTPKMHSSGGKERLGKISKMGNPALRSLLVVGATAVSRQVRRGATMSPWLTALLARRPAKVAAIALANKMARIAWALLTKGGEFIRKNPVAEPAT

SEQ ID NO: 106139 - protein, 343 aa, unidentified
MDQYIGLDVSLKDTAVSIRQNRKRIWRGKCPSDPKVLSQIIRKHAPHAKLVVFETGPLSTWFYHALNAERIPAICIEARHAQKVLNETLNKTDANDADGLAQLAEAGFYKVVRVKTFDNMVTRTLVAARSQLVSISKELSNQIRGLLKTFGLIVPKGKGGAFDANVRALLDGNSGLAAVILPLLEAWRDIRKRASNLDHQLLVASRKSRATKLLMTIPGVGAVTAVSYVAAIEDPENFPTSRSVGAWLGLTTRRYQSGEIDYDGHISRRGDSRLRGLLYEAATVLLTRTTARTECSLKTWGLKLRERLGFKRAAVAVARKLAVIMHSMLKAGEAFNPLAGAAA

SEQ ID NO: 106140 - protein, 408 aa, unidentified
MKHHRYFPEAMLRICPGLYDYSVRKNRPVLSDGGPDAVSGLRLSRLFRRSFAPDRRSFSCDKPDSIMDRLSPVTRICKVGFTMENELHFIGIDVAKAKLDVDILRPDGRHRSKKFDNTLSGHEALVRWLRGHDVNRAHVCMESTSTYMEDAAAHLSDAGYTVSIINPALSKAFAQSEGLRSKTDKVDARMLAHFCREKRPSAWEAPHPTERALKALVLRHQALTEMQTQEKNRRETAPEVQLASIDILLGCLSAELARIEKQIKDLTDNDPDMKRRRKLLNSIPGIGEKTAAVLLAYTGLRLKFGTARQFAAYAGLTPVQHESGSSVMRASRMSKAGPVQLRKALYMPALSALYHTAWGKAFRKRLEESGKRAKVIIGAMMRKLAQVAYGVLKSGKAFDASQHELLIA

SEQ ID NO: 106141 - protein, 367 aa, unidentified
MKKVSTVAAKRSGKTSEQKLTVGLDLGDRSSWYCVLDESGAVVLEQRLSTTPKAIDEVFGGMPPSRIALETGMHSPWVSRRLSQCGHEVIVAHARNVRLIGESRRKDDRLDAQTLARLARIDPQLLCPVKHRSAKAQADLTVIRARASLVRARTALVNTARGLAKSYGERLRGCNVRNMNPEKAEGLSPELQAALQPLLAGIESLSEQIRESNQRIERLAEESYPQVALLQQVKGVGTLIALTFLLTLEDPHRFGKSRDVGCYLGLQPGRRNSGQSEPQMHISKQGDPYLRTLLVQGAQHILGPFGVDCDLRRWGLKLAEHGGRNGKKRAIVATARKLAVLLHHLWVSGEVYEPLHNRSRTTVAAAA

SEQ ID NO: 106142 - protein, 374 aa, unidentified
MEKTIKYIGLDVHKDTIQVAIAEEGRKKPVMSYGNILNTSLSIDKLIRKLKSSGHELSVVYEAGPTGYGIYRQLKAQNIECAVVAPSLIPQKSGDRVKTDRRDAINLARLHRSGDLTKIHVPDEEDEAIRDLTRAREDARICAKKAKQRLNSFLLRNNRTYSGKGRWNKTHLAWLSELSMPHPAQQIALQEYIDTLQESLQRIDRLTNQIKNIVEHWRLKPVVKAIQSLRGVSMIVAVTTLAELGDINRFENPKQLMAYLGLVPSEHSSGLKTNKGSITKTGNGHVRRVLTEAAWAYRFNPKKSLHILRRQKDIPKSVCDIAWKAQLRLCNKYRALVNRKVTQVAVTAVARELIGFIWAICREMDSIEDNRLAA

SEQ ID NO: 106143 - protein, 389 aa, unidentified
MSQAQPNDLSRSLTAFEQDNTLLAVIEMGQASWLVAGIVPGVSRHPLKKLEPDETALLRLLQRWRDEAAKSGRTVRRIAVAFEAGRDGFWLARWLRSRGIEAHVIHSTSVAISREHRRAKTDRLDTAMLLRVFLGWLRNERGHCSMVAVPTLEEEDAKRPNRERESLVSERTRIINRMKSALARLGIRGFKPELRKAPQRLEGLRTPEDVTIPPNTLDEFRRDLARLALIREQIGMLEQARLQRLEQAPKTGPHAMVRLLASIVGVGVETADMLVREILSRNLRDRRAVARYAGLTGSPDESGSRRREKGLAKAGNARVRRGLIQLAWRFLRFQRDSSLARWFRDRTEGAKGARRTTMIVALARKLVIALWRMVTAGELPDGVVLRRPA

SEQ ID NO: 106144 - protein, 342 aa, unidentified
MEKVSIIGLDLAKRSFQAHGARAEGGVAFRKKLSREKVLTFLAEQPRCVVAMEACGSAHHWGRTIRDLGHEVRLIPPAYVKPFVKRQKNDAADAEAIVEAASRPTMRFVAVKTEEQQARAMLFRTRDLLVRQRTQLINALRGHLSEHGVVAAQGPANVKVLEEAVEDQGTSLPLLVVELARVFLDQIEGLSKRISGLEKVTAHEAACGETTRRLQTMPGVGPIIALAVETFAPPMDVFKCGRDFAAWLGLVPRQHSTGGKQVLGKVSKMGQRDIRRLLIIGAMAVVRSALRKGSPEGSWLQRMLARKPRMLVAIALANKMARSIWAMLAKAEDYRVPMAAAA

SEQ ID NO: 106145 - protein, 353 aa, unidentified
MKRYSDLTYKGKSAFVGVDVHRKRWDVTIVVEGAEIFGGSIPGSYESLKQMLCRVEGATITVVYEAGYFGYSLHDKVRKDGMACIVTPPSLIPQEYGNHIKTDRRDSRKLAHFAAKGLLKRVWVPSEAERGHRQVLRRRSQLIGDRVRTQNRIKAELRYYGIELDEPRGKWSKVYVENLRRLRLADRWSRESLDRLLEEYEFLSGQIVRQTTLLRELAETVEYREEIRLLQTIPGVGMIAAMHLVLELQDMSRFRNGEQLAAYVGLTPSQYSSADKIRLGRITRVGKNQLRGALVEVAWRLIVKDGRMRQVYEHLKVRTGAKRAIVAVARRTLLIMRRMLLDGQVYRPASLAQ

SEQ ID NO: 106146 - protein, 348 aa, unidentified
MRIIGCDLHARQQTLAMLETTTGETANLTLLHEGNQVREFYSSLPQPVLVGLEAGGSMPWFLNLMEELGIECRVGHPAQIRAAEPRKQKHDRRDAELILKLLAENRFPAIWLPSKELLDLRALLLHRHQWVRMRTRIQNALQAIALANGLRRGPGLWSNDGQEKIAFLPLMPHTACRRSALQVMYRNIKSEIEKLTQQVAEQAVNRCAAQRLMTHPGVGPVTALATEVFLGDPKRFADAKALASYVGIIPREYSSGGPQRLGGITKQGSPLLRFLWGEAGAHAVRRDPELKRFYRRKLVQKGLGKARVAVARKLGIRLWIMLRDEIDYPEFCRRGQMPVSGAACGGDA

SEQ ID NO: 106147 - protein, 330 aa, unidentified
MKKDRITLGVDVSKKTLDICHWGTHDFIKIENNSSGFKQLAKWMRGKGFVSSQVFFIMEYTGGYEYRFLQYCESKGLSYTRKSGLEIKKSMGMVRGKSDKQDSFRIAQYGEEKAYMLEPSGKLNSTIFDLKQLISFRKRLVREMAGYKASSSERKAMYGKDAGKVILKVSKTMIDVYKKEIYRVEREILQLIESDESLNRNYQILKSVKGIGPVNAWMTIVYTENFKAFTDPRKYAVYAGVIPFEHTSGTSIRGRKRVSHMANKAIKQELNQAAKIAITHDKTLREYAQRNLTTKAYPLVLNNVKFKLILIMFSLIGRQEMYREDYHYAA

SEQ ID NO: 106148 - protein, 367 aa, unidentified
MPPLLPGLQPLGVCSSYTTILTVALRFRIYLDVNGIILGRDKIQNFRDNIRSYFSKLPEGSKVVLEPTNNWAAFMEWTFDLLLDIKLANPGKTKAIASARIKTDILDSKVLADLLRTNFIAESYLAPKEVRDIRELVRYRMTLVRLRSQLKTRIRAVLFKVGERVPTANITGPKARKMLANFTLRDIYRDEINSCLSLAEGFTAQIALFEEKIESQAKLDDDTKLLMTIPGISFFSALLITAEIGDYKRFSSGRKLCCFAGLVPSIHASGGKIRHGRIIKQGSANLRFALLQAIPHLIRKHGGLAGHYYRISKKKGTKTARIAVSRKLLAIMLTMLKTRTLFRVDKRIIKEKPFACLPASARALDQP

SEQ ID NO: 106149 - protein, 345 aa, unidentified
MTKLIAGMDLHSNNVVIGLMDMDGKRVAHQKVECRLSEVVKFLAPYKKRLEQVAVESTYNWYWLVDGLQALRYPVVLANPAGMEQYSGIKHADDTNDAFFLAELLRLKILPTGYIYDPQLRPVRDLLRRRLTLVHQRTALMLSFKSLYTRTTGQEMTLSRLKELAIKEAQDLYDHPANQLIAGMQIKHIEQLTESIEKVEKGVLDCARELPFYSKLTTLPGVGKILGMTITMEVGDIKRFAEPGNFASYCRTVEAKRTSNSKKKGENNSKCGNKYLAWAFVEGANFARRYDPQCRRWYDRKVAKTSNVIATKALACKLAKAAWHAMAEGTDYDSQRMFGQAASTE

SEQ ID NO: 106150 - protein, 374 aa, unidentified
MSSQNNTIHVAIDLSNSLWLVGARLPGAERSRMRRITSGDTVALLALISDLRSRHSGGRDRSIEVACCFEAGRDGFWLHRLLTAEGIPTYVVEPASILVNRRAKRAKTDRLDAEGLLRVLAAHLAGDEQVCSMVQVPTPEEEDGKRPHRERQHLVQERTRFENRILALLATQGVRVRPSLRTWERDLATLETGDGRKLPQHLRAELDRLRRRLVLTMELIRELDREREETLAAAPDELTSRKVVALRSIRGIGENFAAVLAREVFYRSFGNRKQLASYVGLTPMPHQSGGMDRDRRIGRAGNARARTTLVQLAWLWLRYQPDSALATWFRERVGTLQGRTRRIAIVAMARKLLITLWRFTETGEIPDGVVIKAA

SEQ ID NO: 106151 - protein, 429 aa, unidentified
MDLVHPRCAGIDVSKRDAKVCVRVAGQGRAGATSTVTTWGAVTNQVLALRDHLIAAQVTLVVMEATSDYWKPFYYLLEDGPFEVMLVNARHVKNLPGRKSDVSDAAWLAQLGAHGLVRGSFVPPEPIRQLRDLTRTRTTIVRGRAREIQRLEKLLEDAGIKVSSVASDISGVSGRAMLEALIAGQRDPVVLTDLAKRRLRSKIPELTEALTGRFGAHHGFLAQLHLDLIDQHSHAIAELTARIEVVIEPFRRFRDLIITIPGISTAVADVVIAETGADMTRFPSAGHLASWAGTCPGSNESAGRVKSTHTRPGNPYLKGALGIAAMSAARSKDTYLSAKYRRIAARRGPIKAIVAVEHAILIAIWNMSTHDVGYVEPGGDYYLRRNPDKTKNRAIDQLHKMGYAVTLSPLQTGLLSVWLTLSVSGSQAA

SEQ ID NO: 106152 - protein, 400 aa, unidentified
MNPVVGLDVAKEESQVQAFLDQSKPYGKSFSMKHTKEELDQFLDFLKEVEEVAGQMPMVILESTGHYHSPVIQYLEEQGILYILLNPIISYQAKKSSLRKVKTDAIDAYQLCVLYYKEDFEPHKIRGIQLLDLRNLSRQQEIVTNMYVEAKLQFHTILDQVFPEYRKVFGDLYSKVSLLMLKEYPTSEAVLTAGESRLAESVIEFCSSRSGEWAWEKAKKIMDSASRNPFQKNVYESHVINLRMYIELLFHYQGHLSDLEDRIVALANEMEEYKIIQSIPGIGEKIAATIISEIGEIDRFNHPKKLVAFAGVDPSVHSSGKFTATINRITKRGSSRLRHSLYLAVLCGIRSSRNKKLKAFYDKKKSEGKPAKVSIVACMNKLLHWIYALLSRKETFLDLA

SEQ ID NO: 106153 - protein, 387 aa, unidentified
MLKTERPAAAIQINLAAIFVSMELSRSTWLITAVLPGNGEKMSKYPIAAGNIAGLFDLFSKLRERSRAKTGQSYPIITIQEAGLDGFWIHRALVKEGIESHVVDPASIATPRRHRRVKTDRIDGEALLRVLLAFKRGEPRVCSMVRTISREDEDRRRIGRERKALMVERVAHVNRIKGLLFSQGITDYEPVYKNRRQRLEELRTGDGHTLPRHMKAQISRELDRLELVINQIKIIEDERDAPIAAQTADSKKPAPVTMLLEIKGLGAEFANTLWSEGLFRHFDNRRQVAAYAGLAPTPWQSGSIDREQGVSKAGNPRLRTTLIQLAWLWLRHQPDSTLAKWFKARVECNGGRMKKTTIVALARKLLVALSKYVTSGVVIEGAAMKNA

SEQ ID NO: 106154 - protein, 429 aa, unidentified
MTSIPSTTAPVVRVAIDVAKLTHQVLLELPSGKRRSLRVANTKMELERFVSLLESLEHPCEVAFEPTGDYHRPLAYVLGQAGCRLAFVSSLAVARTRDAMYNSWDKNDPKDAQVILHLMKTGTTQRYLDPMVTGHQDLQEIAKTYQQVSLRKVRLQHSIVTHHLPLYFPEAERYLHSSRAAWFTDLLLFTPCPAAVRRYTKTAFVAAAREQLVGRKVDKARWLADFYDTACQSVGLPVAADSETMRMFRVVLEEYRALCQLRKRLEADAVTWLADQPDFVRLQTLPGVGPILAMIILAEAGDLRRFACARQFLKYCGFDLCTEQSGQFRGTTHLSKRGNARLRYAFWMAGTVAIRMQQNSFRRKFEDYIRPDPTNTDRRRKAYTAVAAKMARVAYAVIKTGIDYRRFPEAARPGGRIPSPAAVEAQATS

SEQ ID NO: 106155 - protein, 476 aa, unidentified
MEVAAMKHKAQHERGGKRPRRVSISLLERIQPDAAGIDCGERSHFVAVPGDRDPAPVREFRTFTAELGRLADWLAQCRIKTVAMESTGVYWIPLYEILEERGFQVVLVNARHVHNVPGRKSDVQDCEWLRELHSVGLLRPSFRPSADIVRLRCYLRQRETLVEEASARILRMQKALTQMNLMLHVVVTDITGATGLKIVRSILKGERDPVQLATHRDYRCHASPTEMIAALTGNYREEHLFALRQNFAAYEFNLQQIAECDTAIQALVDTLAAQQPPPATASPPARSTRAPKRHQPRFDIRTPLHRLTGGTDLTQIDAIGPHAALQLLGEIGTDMSRWKTEQHFTSWLALAPNNKVSGGRLLSSKTAPSANRAAVVLRRCAMSLSRTSTALGAFYRRLAARVGKAKAITATARKLALLVYRVLAGKLVYQDPGAAAYHQLNRRRELKWLRKRADLLGLDLLDRSTGEVLLHANTVS

SEQ ID NO: 106156 - protein, 341 aa, unidentified
MQPYFVGLDVHKQVIAYCVKTAAGEIVAEGKIAATRAALNEWVRTLPGPWHGGMEATMFSHWIYRHLEPHAARLEMGHAATMKAISAGKKKSDKIDARTIADLLRCQLFPSCFVISPELGALRQQLRFRRLVVEETVMFKNKTAGLLMGAGVEYERRRLHGKRYFKELVKDNEWIDEQMRPLLAFNREQIETLQDMEQRLIRMLERHPRLQARVKALQVIDGVGPVTALTWALETGTPERFGSIKAAMSYCGLTSALRESAGQQKRGPLSKQRNRHLQSVLIEAAKMAPMLNDKLKEVHTKAKEKGGHRNRATLAVARKLVAYLLAADRAFLAKEGERVAA

SEQ ID NO: 106157 - protein, 319 aa, unidentified
MDGSDQLFVGIDVAKAKLDVHLHPHRTAFALARDAAGLAELVSRLRALDPALIVLEATGGLETVVVAALATAGLPVLAVNPRQIRDFARASGQLAKTDRLDAAAIAAFAARIRPELRPLPDAQTLQLRELLGRREQLLGMLVAEQNRRQQLQARRLVKQVEAHLRWLQRQIADIERELDQAIRATPRWRERAELLDDVPGVGPALTRSLLLELPELGRLTRRQISALVGVAPLACDSGTRRGARRIRGGRAAVRAKLYMATLAATRFNPVIRAAYRRLRGAGKPPKVALVACMRKLLVILNAIVRSGQPWRGGEVPAAI

SEQ ID NO: 106158 - protein, 320 aa, unidentified
MSKIDAICFVGIDVSKDLLEIAVRPSGEQWSIENDPLQFPALVERLTELTPSRIILEATGGLETLVASHLGAAGLPVCVINPRQARDFAKASGQRAKTDVVDADGLAHFGEALKPPLRQLPSTETQLLEALLTRRRQLVQMRTAEKNRLSGTNHPRKIIKDLQAHIAWLDKRISQCDDELKTALKASPIWRTNDQLLRSVPGIGQVVSRTLIAELPELGKLSDKQITALVGLAPYANDSGGRRGPRHIRGGRNTVRSALYMATLSAIRSNYRIRTFYQRLLTAGKPKKVALTACMRKLLVILNAIIKQQQPWRRYTLLNA

SEQ ID NO: 106159 - protein, 410 aa, unidentified
MELLYPHCAGLDVHKNSVVACVRHMVDGKVTTRVKTFKTTTQELIALSEWLSSEAATHIAMEATGVYWKPVWHILADGDFQPLLANAAHVKNVPGRKTDVNDAVWLADLMAHGLIRASFVPDQPTQQMRDLLRTRKQMARDRASHIQRIQKTLEDANIKLDSVVTDLLGLSGRRILEALIAGHTMPRALATLAHRRIHASTDELEAALRGRVTPHHRFLLKLHLDQIDAIDAAIASIDQEVSANVEPFRAAIEQLTAIPGISPLAAQVLVAEIGIDMSRFETAGHLISWAGLCPKNDESAGKRRSNRMKKGAPWLKTTLVQSAWAASRTKGSYFQAQYHRLRSRRGSKKAVCAVAASLLTTAYHMLKNGSPYRDLGPDHFSQPEKQKQANRLLKRLQNLGFTVQIQPIAA

SEQ ID NO: 106160 - protein, 458 aa, unidentified
MNRNKSKSKIDHTMPMVHPNAAAIDIGATMHMAAVRADRTPEPVRSFGTFTTDLHRLVDWFKECGVETVVMESTSVYWIPIFELLDARGFTVFLVNARDAKHVPGRKTDVSDAQWLQRLHSFGLLRASFRPKGQIAELRAYMRQRERLLEYAASHIQHMQKALTEMNLQLHHVVADITGATGLRIIRAILAGERDPKVLTRLRDYRCHSSAETIEKALTGSYRAEHLFALEQALALYDVYHEKASACDARIESVLKELSIDRGRRSDPLPSSGRPRSDQANALAFDVRAALFALLGKDITQIDGLGPYLSLKLIAECGDDLSAWPSAKHFTSWLGLAPSNKISGGKILSSRTRRCGSRASALLRLAAVSVGRTDTALGAFFRRLSARIGKAKAVTATARKIAVLFYNAVRHGMEYVDPGASYYETRYRTRVVNNLHRRAKAFGFVLQPMEPPPGVVVS

SEQ ID NO: 106161 - protein, 431 aa, unidentified
MEEVDEQELHVERVAALDLGKAALEACVRVPHESRPGRRLQEVRGYATTTTSLLALADWLRSWGVTRVVMESTSAYWKGVFYLLEAEGFDCWLVNAREVKNVPGRPKTDKADAVWLAKVAERAMCRPSLVQPRPIRQLRDLTRYRRSLIQDRTREMQRVEKLLEDAQIKLSSVASDIFGVSGRAMLEALIGGQRDPKVLAQLARRRLRVKIAALEEALRGFFTDHHAVILRMMLDNIDRLSEQIAALDATIEEAVAPFAAQVAQLDEVTGVGVTAAQELIAEVGVDMGRFPSAAHLVSWAKFCPQVHESAGRKKPKGRGKGNPWLAGTLGNIVATAARTDSFLGARYRRIAKRRGKQKAMVAVGNSVLVIVYHLLSDSEARFTDLGAEHYEARIDKQRRARNLAAQLQAVTGQRIVIRDGKAVIVEPTEAA

SEQ ID NO: 106162 - protein, 390 aa, unidentified
MFYLGIDIGKNNHVASLLDEKGKVVFKAFSFSNSTDGANCLIGKISSYSSALEIGMEATGHYWLALYSFLFEQGFLIHVINPIQTDGWRNATEIRKHKTDVIDSVLIADFIRYGEFLETSLANEDVLSLRNLARFRNYLVSSISDLKRKTICILDQIFPEYQTVFSNVFGKTSKEILLQLSTPSEFESVTAAQLESVLKEIALKKFATKKIQEISSVAKTSFGITFGLQSMTLQLRLLIEQINFIEEQVNEIERQTKTLLEKLSSPITTIPGISTVIGATILGEIGDISRFSNPSKLVAYAGIDASIHQSGNYQSTNNKMSKRGSPYLRTALFRAALIASTHDPVFKAYYQKKRFEGKHHLTCLGAVARKLCYTIHAVLKNNCAYKVQLP

SEQ ID NO: 106163 - protein, 339 aa, unidentified
MNIKRIGIDLAKQVFQLHAVNDHDKPVMNKRLSRQQMLPFFAKLAPTLIGMEACAGAHYWARRLTSLGHVVKLMPPQFVKPYVKSNKNDANDAEAICEALSRPTMRFVTVKPPEQLALQALHRVRQRVTRARTALINETKGLLAEHGIVISTHGATALCRQLPAIIDEPRNELCPLMRQLLRQLYDELTFMSAQLDALTKQVLACVKNDERIQRLLAIEGIGPINASALVAQVGDAKQFRSGRQFAAYLGLVPTQHSSGGKERLGRISKRGNPLLRTLLIHGARAAVNASRKKHDARSLNIQALEARRDTNVTTVAVANKNARIIWALLSKGQCYRKSN

SEQ ID NO: 106164 - protein, 391 aa, unidentified
MIYVGIDVAKDKHDCFITNSDGEVLFKAFTITNNLDGFNELHQKIASVMDDVTKVKVGLEATGHYSYNLLGYLIDKGLPTYVINPLHTNLYRKSLSLRQTKTDKVDARTIASMLMSDVNLKSYSDISYHNEELKSLTRYRFDKVKERAKLKTSVSRLVCILFPELEKLVPTLHITSVYALLSEFPGAKHIATAHLTRLTNLLSEASKGRYGKDTAITFRDAARASIGSNMPAKSLELKHTIKLIQELDSEIDEIEKEIKIIMDEINSPILSIPGINYRMGAMIIAEIGDFNRFDSPDKILAYAGFSPSTYQSGQQDSVYAHMEKRGSRYLRYALYNATKYVCHWDPTFAAYLAKKRAEGKHYNVAISHAVKKLVRVIYHLEKTKQQYIKAA

SEQ ID NO: 106165 - protein, 338 aa, unidentified
MKHTVIGMDIAKHIFQLHCVDPSTGEIKRFKLKREQVLDFFAKQSPVLVAMEGCGGAHYWGRELSKLGHTVRLLPAKLVRPFVLRNKTDAGDARAIWVAAQQSDIKSITIKTEHQQSILALHRIRSQLIKMRIMQTNALRGLLMEFGETLPEGYLALRKALPVSLAALESKLPGMLLQTLREQWTRSQGLDQDIAAIELRLKHALAQSPACKAIAEIPGIGLLTATAAVATMGDPASFKNGREFAAWLGLVPRQTGTGGRIQQLGISKRGDAYLRTLLMHGARSLVNRNKQSVWITGLLARRPYSVAVAAVANKLARILWSVLATGRPYEPATLSAAV

SEQ ID NO: 106166 - protein, 415 aa, unidentified
MSLKIVYKICCGIDVHKTFVVACIASTNDKGVTSYESHRFSTYTSGLKTLLQWLLKRNCKDVCMESTGKYWIPIYNILENDCSIVLAHPKYVKAIRGKKTDKKDAKWIADLFKHDLVAGSFMPPADIRQLRDLMRYRFKLTCFQSSEKNRLQNCLTVSNIQLGNVVSDTFGKSAQAILDKLLENPADTSFDLEPLVYKSLKKKLPELRDAIDGYITPEQVGKLKVIKAHYESLESRKAELEELILALAAPYQQELAILQTAPGIRSDFTAIGIISEIGTNMEAFPSAKHLCSWAGLTPTNNESAGKKKSVRVSKAGCYIKPLLVQCANAVVTSKKHPEIRNRYLRLKKRRGHKKAIIAIARMLLTALYHMLKNGENYNAKLYRKSDLPPANWEITVEQAIIIARNQGYKIKSATA

SEQ ID NO: 106167 - protein, 368 aa, unidentified
MSEYIWVGLDVHLESITAAILEGDAADPEVAKLLGDLMGVRRLFRRLSKKGAVRACYEASGAGFVLHRVLARDGFHCEVIAPSLIPRKTGDRRKTDRLDAVMLVKLYRSGHLTAVHVPTEDQEALRRLLRLRYTYQTYCKATKIRISGILLNRGFVYREEKSTWTKKHRQWLARLRQESEGPFHTALAAELEHLEYLEMQRDAFDAELERIAQSPSYRALVEALCCLRGVKTLTALTLLCEIDDVRRFRSPRSLMAYFGLVPTECSSGERERKGPITKAGNVHARRVLIEAAWNNRHNAGADLILKRRRQGQPPEVVAIAMKAQHRLARKFHRLDQRKHRHVAITAVARELCGFVWAILKEAPQSQTN

SEQ ID NO: 106168 - protein, 407 aa, unidentified
MKTSYFLGIDAAKHKIRAALSDKENRLLWQSDLAVSAGALRQLLAKIKTHVVHKEQLLILIEATGMLHLNWSAALTRAGYAVAVINPLMARRLYRVENSIRDNKTDAIDARGLCTIGALHGEKLLALYRFGLKPEQFALQRLQGVRKALRSSLTNLKKTYQSLVELSFPELGQLLELDGVGIRALLSRAPTPAAITRMRRSSLEKNWMLRPKAAALKLLASDSIADPQLAAASAPALQLLLWSLASLEAQLHKLDQQIQSASLNLDRKSKALIESLPGIGAINSAKLLAWLPNHILHSGNNRKVAARLQAFMGNDPRLRQSGQWKGHTKMSKRGVEILRTAFFQCAFSAAQNDPELRAYYHRKRNQGKTHEVAVSHLMRILTRRLVAVLRSGKPYSSNYNLVLQSVV

SEQ ID NO: 106169 - protein, 364 aa, unidentified
MYDSTMTVTVGLDVHARSIRLAVVRADELLEERTLAYDEEAVERVLRRWPVVRCCYEAGPTGFGLQRFLAGRGIDCQVVAPGLVPQRPGDKVKTDSRDARKLARLLAGGLLQPIHVPTPEVEAARDLVRAREDARLDRMRDRQRLSKFCLRHGLRMPTSSWTVVRRKWLGEQHFEFPAQQQTFDTYVHTVDLVDARIERLERAIRETAEQQPWRGLVARLRCLRGIDTLTALALVAEIGDFDRFKTAEEFMAFVGLVPSEHSSGDKRRQGSITKVGNSHVRRLLVESAWHARRRPKVGYELTRRQRGQHAEVIEHAWRCQQRLYQRWQRMAGRGKPHQKIVVACARELAAFVWAIATEQPLRNT

SEQ ID NO: 106170 - protein, 457 aa, unidentified
MYRELLPLRQALSVELKANLPPAVPGIDSEHLLQSYLDRLTMYVGCDVADQILTFFAVDTAGEELGHLSAANDPQGFEQIWDWLENLRSQHSLRIILLAMESTGVYYWACWDSLAQRPNLARVLYNPRTTEHMTEVLSKKVRNELVDAYALAEQVRLGSTPEVVLSEDADLLTARFCSRAARDLAGQLNRKKNQLRALLRAYNPAISQVFPGAKFHHQAVYALLQQVVFPDECVDAGVEAITAILEAHCRTAFDRQHAQRLVTLCRDTLSRPIGREEIRQRVHHLIDDITTCQKRKTYFNKAGCRLIENRPETPLLRNATGAGPSNTLALVSEIGDVQRFKSGEHLASFLGLTTSKHISGTTIFVSKHITKQGSPNGRYAAVNVAQHLSLRVPKYQQMYERIKNRKPPRKGHFVALVAIARDFVTNVLYDMWRYQRPFFQEVEDYRAYRRKNPRSDE

SEQ ID NO: 106171 - protein, 357 aa, unidentified
MDGSSEQPKMTAGLDLGDKYSYLCLIDTESGEVIEEGRLRTTPETFKRRFASERPMRIAIEAGTHSPWVSRVLEECGHEVLVANARKLRLIYANKQKTDEIDAENLARLARVDPKLLYPLKHRGEDSQAHMALIRSRQALVGCRTQLVNHVRGAVKSFGGRLPKCPAVSFHKRAAEHIPEALWPALEPLLETIGSLTQRIRDYERKLEMLAKERYPETDLLRQVEGVGTLTALTFVLTLEDPYRFEKSRSVGAYLGLVPATDQSGDRNPQKRISKEGDEMLRKLLVGSSHYILGPFGSDSDLRHHGEKIASRGGKNSKKRAVVAVARKLSVLLHSLWLSGEVYEPLRNTHHSGGQAA

SEQ ID NO: 106172 - protein, 391 aa, unidentified
MIYVGIDIAKDKHDCFITNSDSEVLFKSFTISNNRDGFETLFQKIQSVSDDLTKVKVGLEATGHYSYNLLGFLLDKGLPTYVINPLHTNLYRKSLSLRKTKTDKVDSRTIATMMMSDMNLKSYSDTSYHNEELKSLTRYRFDKVKERAKLKSSVSRLVCILFPELEKLVPTLHMASVYALLFEFPSADAVANSHLTRLSNLLAESSKGRYGKDTAVMFREAARSSIGSHMPAKSLELKHTIKLIHELDAEIEEIENEIKSIMDEIHSPILTIPGISYRMGAMIIAEIGDFSRFDSPDKILAYAGMSPSTYQSGQLDNCYSHMEKRGSRYLRYALYNATKYVCHWDESFAVYLAKKRAEGKHYNVALSHATKKLVRTIYAMEKSGQPYQSAS

SEQ ID NO: 106173 - protein, 314 aa, unidentified
MNQVIGIDVSKKTFDVSYSRDQRAVFGNDTPGVAAFIAALEPSDHVVMEATGTYFLKLATRVHDAGFNVTVVNPAVITYFARMRLARAKTDRADAEIIRQYGQHAELPRWAPTEGIFIELNQLDSHLNGLQRDRNAVIGRLEALRQCETISELVAEDLQSQLDDLVVRIKRCEKVLVQQTEHHFPELISLLRSIQGIGKRTAVMFIVLTRGFTRFESAKSFVAYLGLSSFIKTSGTSVRGSGAISKMGNPRMRQLLYMAALTAKRRNLACQAFAQRLTDNGKPPKVVRIAVANKLIRQAFAVCSKQQPYSECYA

SEQ ID NO: 106174 - protein, 418 aa, unidentified
MKKHSKSSQRSEPSLKRTKARGPVQRDAKEVLAEVLEKLTGKLNAPAELTRAKENRRGNTVGPNRDRLTVGVDLGDRWSQYCILGLEGETLAEGQLRTTQEDVREFFQALTVARVVIEVGTHSAWMQDVITEWGHEVLVANPRLMEGSKRRKRKSDRIDANKLARLGRVDPQSLHPIRHRSREVRQDLVVLRARDALVSVRTELINTTRGLVKSMGTRLPRCSSPSFADKVKDAVPVEVREALLPLVQLTEAVNDCIARYDQKIEELGQKKYGHTTLLRQVKGVGPITSLAYVLTLEDPQRFSSSREVGPYLGLVPKQEDSGDSQPQLGISKTGDRMLRRLLVGSSQYMLGAFGPDTDLRRYGLRLCERGGKNAKRRAVVAVARKLAVLLHHLWVTGDVYEPLHHTGAETRTAQATAA

SEQ ID NO: 106175 - protein, 382 aa, unidentified
MNRIIKIGMDVHSTNYTLCAMEPVLDGEDRIFTNIQVTPDYENVIQFIDNLKERLGSSDSYSIECGYEAGCLGYSLYHQLTKAGVKCTILAPTTMLTQQGKRVKTDKRDAAMIAQCLSYGGYHAVHVPTDKDTSVKEYLRMRDDHKLALKKIKQQINAFCLRHGYIYDGHKWTLKHLDWLKKLNLSELYRETLNEYMTSYEEQTAKIERFDKRIEELAADPDYHENVRKLSCLLGIQTYTALSLIVETGDFKRFRKGNTYAAFLGLAPGESSSGEKISRTGITKAGNSRLRTLLIEAATGICKGRVGHKSKALCARQAGNPEEVIAYADRGNIRMRSKYKRMIRHEKKRNVAVAAVARELACYVWGIMTNHIEPREEGKKAA

SEQ ID NO: 106176 - protein, 355 aa, unidentified
MNSQKYIGMDVHQATISAAVMDDQGKLIMECILETKAATILEFIEGLRGTLSLTFEEGTSAAWLHDLLKPHVSHLVVCDPRRNALLKDGNKSDRIDARKLAELLRGNQLKAVYHGENGVRTLKELGRSYLTLTQDVTRVMNRIKALYRSWAIPCRGTTVYAARHRAEWLAKIQEPGVHLRAERLYQQLDLLQPVRQQARYDLLLESRKHQGVKLLRQIPAIGPIRAALLVGLLQTPNRFRTKRQLWAYSGFSVEIHDSGEFRYGRGKRQRNRERISVRGLNDNHNRDLKNLFKSAALSASTRPGPLYDFYAGLLAKGMRPTMARLTLARKMAAITLTLWKKGVDFDPKQLHRQAA

SEQ ID NO: 106177 - protein, 390 aa, unidentified
MWTIGLDAHQRLFVVCILDSSGKLIKTERLRGGPVGQGRPGGPVGQGRPGGPEVLWAYLRKLPEPFQICYEASCGYGYLYDRLATLARRVQVAHPGGVRLIFRAKRKHDRIDARKLATLLFLEQVPTVYVPPIAVRSWRRLIQFRSARAALADRRRLVAQRTAVKNRLRALLRAHGLTAPRRQALWTRRGQAWLAAVEWPTREAALERDLGLDELEHLHARLRTVERQLNALGRRDPRITLLRTIPGVGPRTAEALVAWIDDVRRFRHNRQVGCYFGLVPSQDQSAGTNRLGHITREGPSVVRQLLCEAAWQAKGRSPFLRAYFERIRHGDPDRAKIALIALARYLACVAAAMLRSGEAWRHDQPVAAVAGVAPAEAAGATAGTPATSAA

SEQ ID NO: 106178 - protein, 351 aa, unidentified
MSHNLNDAVAVVGIDIGKNSFHVVGLDSRGAIVLRQKWSRGQVEARFANMPPCLIGMEACVGAHHLSRKLRTLGHDARLMPAKYVRPYSKGQKNDFRDAEAIAEAVQRPTMKFVATKTAEQLDLQALHRVRERLVSQRTGIINQIRAFLLERGIAVRQGLRYLRAELPRLLAAPPDVLSPRMVGVIEGLAEDWRRLDERIEHLSGEITALAHQDAGCKRLVSVPGIGPIISSAMVAAIGTGDAFSKDRDFAAWLGLVPKQISTGDRTILGKISKRGNRYLRVLFVQAAWVVLIKPQSWERHGLKPWIEAAKKRLHRNVLAIALANKLARIAWSVLARGRSFEARPVMASAA

SEQ ID NO: 106179 - protein, 405 aa, unidentified
MFDTEDVGVFLGLDVGKSTHHGHGLTPAGKKVFDKQLPNSEPKLRAVFDRLAAKFGTVLVIVDQPASIGALPLTVARDAGCRVAYLPGLAMRRIADLYPGEAKTDAKDAAVIADAARTMPHTLRSLELTDEITAELTVLVGFDQDLAAEATRTSNRIRGLLTQFHPSLERVLGPRLDHQAVTWLLERYGSPAALRKAGRRRLAELIRPKAPRMATRLIDDVFDALDEQTVVVPGTGTLDIVIPSLAASLAAVHTQRRAMETQINTLLEAHPLSPVLTSMPGVGVRTAAVLLVTVGDATSFPTAAHLASYAGLAPTTKSSGTSIHGEHAPRGGNRQLKRAMFLSAFACMNADPASRTYYDRQRARGKTHTQALLRLARQRISVLFAMLRDGTFYEPRTPKDVELAA

SEQ ID NO: 106180 - protein, 362 aa, unidentified
MNVPAGSNHFPSTEATMRYYTQEHQFYCGIDLHAKTMHVCMVNQPGEILVHKNLPTRADRFLDLIRPYREDLVVAVECMFAWYWLADLCAAEKIHFVLSHALYMKAIHGGKTKNDEIDSHKIALLVRGGMLPMAYPYPKAMRSTRDLLRRRMLLTRTRAEAIAHVQNTVSQYNLPPLAKKLSFAANREGVAEKFPDESVRRMVESDLALMDHLDEQTTALELYLTRHAKVDDPLSYQLVQTVPGIGKILGLVLLYEIHDVRRFASVQRFVSYCRLVKCSHESAGKKSLGKGNKIGNANLKWAFSEAACLMLREVPEAQSLVARREKKFGKAKALSLLAAKIGRAVYWMLKRKEAFDVKKCFC

SEQ ID NO: 106181 - protein, 310 aa, unidentified
MAAVIVGIDVAKEHLDVHIRPGGEAFRVTRDAPGLDELVNQLVPLEPVVVAMEATGGFEAIVAASLGTAGLPVIIVNPAQVRSFARALGKRAKTDPIDAAVIAHFAETTNPEIRPLPDDATRLLSDLLARRRQIIQMIVAERQRARMLTAPRLQKSVARLLKALQRELETIDKDIDDSVRNTPAWRHKEDLLRTVPGVGPTIARTLLAEMPELGTLDRREVASLAGLCPFTRQSGQWRGKSFIGGGRSNVRSMLYMGALSASRFNPVLHAFYEHMLALGKPKTVALIAVARKLLTILNAIIREEQPWLTT

SEQ ID NO: 106182 - protein, 345 aa, unidentified
MNYIGIDLHKTSSQVCILTEDGGLVERRIKTDRESLDKLFAARPRARILVEASTESEWCARHLESLGHEVIVADPNFAPMYATRDRRIKTDKRDARALCEACRLGAYRPAHRTSDRQRDVRAHLSVRETLIRTRSKYIVLIGALARREGCRIKAGPSPSFARRVEAAGLPAHTLAQVEPLLLMLKALNEQIKAADKRLEEIAKADEVVQRLCSVPGVGPVVATTFAATLDEASRFLGAKHVRSYLGLVPREYSSGERQHRGRISKAGSARARSLLVEAAWSLLRWKTERTRALHEWWARIAQRRGKATAVVALARKLAGIMFAVWRDGTEFDPLLLRPRGAPAAA

SEQ ID NO: 106183 - protein, 348 aa, unidentified
MTTMTETPRRITGGVDTHRDVHVVAALDEGGRELGVEFFATTPAGYRAALRWLERFGELGRIGVEGTGSYGAGLARFLAAKGVQVVEVSCPNRQRRRSHGKSDPVDAIAAAKAVLSGDAVTKPKTRDGNVEAIRALRTADRSARHARVKALNQMRALLLTGPQELREQFRGTTVYRLVRGAAKLRPGDPTTAVGGTKYALRILAKRVLELETELAELKAILRPLVAATAPALVARHGVGTFTAGALLVAAGDNPERLRDERAFAHFCGVSPIDASSGTVVRKRLNRGGDRHANEALWRIVMVRMVSDPATRHYIERRTKEGLSTLEAMRCLKRYVARELYPFLATNAP

SEQ ID NO: 106184 - protein, 361 aa, unidentified
MQIIGCDLHARQQTLAMLDTTTGEVVNLTLLHEGNNVREFYSKLPRPVLVGIEATGSMQWFLNLMQELGIECQVGHPAKIRVAEPRKQKHDRRDADLILKLLAEKRFPAIWLPTKELLDLRALLLHRHQWVRLRTRIQNALQAIALANGLRRGPGLWSYDGQSAIAFLPLLPHTAYRRSALLAMYGKMEAEIEKLTQQVAEQAGNRCGARLLMTHPGVGPVTALATDVFLGDPRRFVDGKALASYVGIIPREYSSGGRQRLGGVTKQGSPLLRFLWGEAGAHAARRDPELQRFYRRKLVQKGLGKARVAVARKLGIRLWIMLRDEIDYQEFCRRGQKQQSVAACAGMPETRYGANSHRPID

SEQ ID NO: 106185 - protein, 321 aa, unidentified
MNSSSWSSPNGIVVGIDVAQATLDIASCDDTRVEHLAYDQNTLKMLVRRWKRHPPQLIVMEATGGLERRLAHHLMGAGLPVAIVNPAQIRNFARAAGQTAKTDAIDARLIARFGQLLQPRPGALPDEHEMKLTALVTRRRQVVRVRTAEKNRLSRTGDPAMRRLIRQAIALYSTQLERINGEIIALLETNQIMQQRAAILQSVPGVGTTTAGALIAELPELGRVNRQEIARIVGVAPINRDSGTLRGKRITGGGRVHVRKTLYMATLVATRHNPTIRAFYQHLLAQGKSKMTALVAAMRKLLTILNLMIRDNTPWNPQPHP

SEQ ID NO: 106186 - protein, 367 aa, unidentified
MSSVIYVGMDVHQDSFSLCALASSSGEIIRETRCSADVKNVVKFINHLPENESNQVTLGYEAGIWGYSLHNRLVELGYDCVILAPSTMYSNAKHQMVKNDHQDAQMIAHNLASGTYKVVYVPDQEDDEVKEFIRLIKAMKKELKQTKQRIRAFVLRNGFRFERTPWTGVYLEWLSQLQLTRIKKMVLDEYLVHYHELTDKIERLSRQLGDLSHQERYQEPISKLRCFKGIDTVAAMTIHVETSDFSRFPNARAYAAYLGLTPSEHSSGKNVSLGRITKQGNSTIRTTLVESAQGLVRGNPSKKSKKLKARQINQSGRVINYADRAVNRLHERYERMIHAGKPRNVAIIAVARELACFIWGMENGKIA

SEQ ID NO: 106187 - protein, 325 aa, unidentified
MRIIGVDLHARQQTLAVLDTTTGEVMEKTLTHSGSNVQEFYSTLPGPVRVGIEATGTMQWFLSLMEEMGIDCQVGHPAKIRAAEPRKQKHDRRDADLILKLLVENRFPSIWRPSKELVDLRALLLHRHQWVRMRTRIQNALQAIALANGLRRGPALWSQAGQCTIASLPLAPHTAHRRNELQATYAKFEAEIEKLNQRVAEQVDGRPGARLLMTHPGVGPITALATDVFLGDPTRFSDGKALASYVGIIPSEYSSGGREVRWAKQTRQSTVAVPLVRGGGTRRTPGPGVAALLPSQIDPERSGEGQSGRRSQTRDPALDHVAGSD

SEQ ID NO: 106188 - protein, 326 aa, unidentified
MEHELHYIGIDTAKEKLDVDVLRPDGRHRTKKFANTTKGHDELVSWLKGHKIDHAHICIEATGTYMEPVAECLYDAGYIVSVINPALGKAFAQSEGLRNKTDTVDARMLAEFCRQKRPAAWEAPHPLERALRALVVRHQALTDMHTQELNRTETAREVQRPSIDAHLLWLEAELKRLEKQIKDLTDDDPDMKHRRKLLESIPGIGEKTSAVLLAYIGLKDRFAHARQFAAFAGLTPRRYESGSSVRGASRMSKAGHVSLRRALYMPAMVATSKTEWGRAFRDRLAANGKKGKMILGAMMRKLAQVAYGVLKSGVPFDASRHNPVAA

SEQ ID NO: 106189 - protein, 351 aa, unidentified
MDVLHPRCCGLDVHKSSISACILLREAGRVQKHQRRFGATTQELQALAEWLRQFGVTQVAMESSGVYWKPVWNILEGQFTVVLANAQHIKNVPGRNTDQKDAEWIAQLLQYGLLRASYVPCEIIRDLRDLTRMRASLSQEASRLSSRIQKVLEDANLKLASVATNVLGKSGRAMLEDIIAGEDDPQHLASLALGHLRVKIPQLRLALEGKIRSHHRFLLRRLLDQIQSVEHEIALLDDRLEDIGRQRPYLAQAVARWDTIPGIDRVAAWALLAEIGDNMGQFPTAEHLASWAALCPGNHESAGKRLRGTTRQGSPWLCRMACQCAWAAARTKNTYLSSQFRRLANRPCVDG

SEQ ID NO: 106190 - protein, 304 aa, unidentified
MSKAVLDIAVAPTGEAWSIPNSTEGMQQLVSKLGEVRPTLIVLEATGGLERRAIAALAGASLPVVAVNPRQVRDFAKATGQLAKTDAIDAAVLALFADRIRPKVRPLRDEETQELEALVVRRRQVVDMITAEKNRLAAAPPSKRVRTAIGKTIKWLQKQLEETDSDLDNAVKGSPLWREKDNLLRSVPGVGKVLSRTMLSLVPELGTLGKKQLAALVGVAPLNWDSGQQRGRRCIWGGRAQVRAVLYMGALAAARFNPIIRAFHARLIAAGKLPKVALVACMRKLLTILNAIVRDRTPWTREAA

SEQ ID NO: 106191 - protein, 391 aa, unidentified
MINIGIDVGKFKHCAAVIDDKTGEVIIKPFFFNNDQEGFELFYSKVKQYIRRKHSVGMEDTGHYMISLTTFLLEKKFSVKYINPRSTSLRRKELGMSAKNDRKDALLIAEMLTEKKFWRSISKTSIETSKLRELTRLYHQLQEQQNQDMNRLQRALDIVFPEVNKLSWTRYSKAYMHFLAAYSCASSIAGEDIRNLRKALKTEGRGRQCKVTAEEIKELAKRSVGDDNIAVELEVKSIIAIINTRAEQIRVLDKKIEEFSRQLNSPIVSIPGISHITGMSILAEIGDIHDFPEAAKLISYAGMEPRVYQSGNYDAAHMPISKHGSRYLRKALYQAVFTVCKYDPTFQDYYTKKRDQRKSHRCAQGHCVRKLLRVIYKLLSTDILFDSAQIH

SEQ ID NO: 106192 - protein, 346 aa, unidentified
MEISTIGLDLAKNVFQIHGISATGEVVVRKTLRRSQMLPFFEKLPPCLVGAEACGTSHHWARELTRLGHEVRLMPAMYVKAYVKRGKNDAADAEAICEAVTRQTMRFVPIKSREQQAALSLHRVRSLLIKQRTQLVNMMRSVFAEMGVAIPIGIMKALQMAREIADGESGLDLPTEAANVVAMLAGQLLQLHAQLRKLDLRLAALQRSDDRARRLATIPGIGPIGATALAASVTDPSQFASGRQFAAWLGLTPRQSSSGGKERLGRITKMGDRYLRQLLVVGATALVRYAKEKPGTVDPRFVALLARKPARVASVAIANKMARIAWAVMARGGTFERGHAPMLAAA

SEQ ID NO: 106193 - protein, 424 aa, unidentified
MKNTAAMKRKQVPEGYLVIGVDPHKKRHAAVAITQDFTTQAKFKFDNTGEGLEMMLDRAKAEMVKSCCRGVIFAIETGGHYWRNIAYYLDERGIPFRFINQYTLKRRREGKDLNRRKNDYRDSEVAAQLLCTGEFVESVIPQGVYAELRTSHNTYQRLVKERTRITNLLKGLLDALFPEFTQVFKDPCGLTALSVLSTCPIPRVIAGMTEDEFIAMIEAHHNGRRLMRKKLRALHYSAQISIGIDAGARSVSAEIAFLVDKLELIKRQIRVMEMTLITLVDETEEGKYLLSIRGLNYIAVAGLLAELGCFKLYRSAKQMIKMAGSNPTESESAGKRRSKTPMSKQGRPLLRYCAWTAVIPMLRFNEDFRAWAKQRRERPAHANPLNGREVVGAALNRLLRLAFALVRNQTYYRAAKPALIPVAV

SEQ ID NO: 106194 - protein, 389 aa, unidentified
MKIFVGIDIAKLNHFAAAISSDGEIILEPFKFTNDADGFQLLVSKLESFDKNSIIIGLESTAHYGDNLVRYLVAELYQVCVLNPIKTCQIRKNNIRKTKTDKVDTYVIAKTLMMQDDLRFISFYDLDMMDLKALGRFRQKTIKQRTRLKIQLTTYVDQVFPEIQYFFKSGLHQNAVYALLKEAPSPKEIASMHMTHLANLLKVNSHGHFTKEQAKELRVLAQKSVGANDSAISIQITQTIQQIELLDSQLEKIEAEMTDIMKFNDSVIMTIPGIGYINGGMILGEIGDIHRFSNPNKLLAFAGLDPSVYQSGNFQAKTTRMSKRGSRVLRYALVNAAWNVVRNNATFKAYYDAKRAEGRSHYNALGHCAGKLVKVIWKMLTDEVEFNLE

SEQ ID NO: 106195 - protein, 350 aa, unidentified
MIIGVDYHPSFQTIAFLMEETGECGEQELNHSDGQAERFYRDLKQRGICVRVGMEATGYSRWFERLLAELGFEVWMGDPAEIKAKRVKKQKFDREDARLLRRLMLENNFPQIWVPGPENRDLRQLLWHRHRLVQMRTRIMNQLQALAMNEGYRWKKKLFSEQGRALLEKLSLAPWASRRRQELLELLDRMNPTIEELTAAVEREARKRPEAMRLMTHPGVGPLTALAYVLIIGTPTRFQRGKQIGTYVGMIPCEDSSAGKQRLGHISKQGSSLLRFLLVEAAQAAARIQPDWRRRYLHLAMRRHKSIAKVAMGRRLAVRLYWMWRNGCEYSPSLEFGSYVGQLGTGHGVQ

SEQ ID NO: 106196 - protein, 321 aa, unidentified
MSHFYLGIDVAKAKLDCALRLPNGKFRAKVIPNSLDGFATLLTWLAAQKAESPHVCMEATGIYWEDVAQHLATAGFTVSVVNPAQIKAYGGSRLTRSKTDTVDAKLIADFCAERQPPAWQPRSEAEITLRALVLRLDALQTMRTQESNRLLVAREPVREDIQQHLNWLDTAIQQLIDAINNHIDQHPDLKQQRELLDSIPGIGERTSAIILAFYADTSRFANSRQAAAFAGLDPRQYESGSSIKGKPRLSKIGHAFLRKALYMPAMVTLYKTAWGKQFRGRLAGAGKPNKLIIGAMMRKLIHVAFGVLKSAKPFDSAIHLA

SEQ ID NO: 106197 - protein, 442 aa, unidentified
MRLLNANANEHPLRIKLSAHIRTGIIMELQRNKVCGIDVHKRFLIATILSRDGKKDTQRFSVTLEDLLKFRDWVIENGCEQVAIESTGIYWHPVHVVLEGKMDLIVANAYKIKHTPGRKTDVSDSEWIAELCLNGMIEPSRIFPKDDRELRRLTRAREGYVKQMTQEKNKIHQSLDSACIKLASVISDIFGKSGMYLLNCVLEGRDLDEIIEGIPSGRLKKKADQIKESIKSRLEISQVILIRGSLSLMKSIQERIDELDGEISARIQYRKNDLAIAMSIPGTGFVSATAILAEIGNCTDFKKPEQLAAWCGLVPSLYQSAEKTILGGITKQGSKHIRRMLIQVAYAISRTKDSKLKKFFLRIQAKKGSKVAAVALARKILCILHHLLMNQEMYIEDRDEKNKRQKTLTPPSPIEMPIQEMIDCIVRAGYVVTKSDSIGGFG

SEQ ID NO: 106198 - protein, 358 aa, unidentified
MRRPKAKSTADKLVAGIDLHSNNVMIGVMNQDGKRVAHRKLDCDLKAVTEFLAPLKPQLQSMAVESTFNWYWLVDGLRAQGYPIDLANPAKIEPYRGIKHADDKDDAFHLAELQRLNILPKGHVYDPELRPVRDLLRRRLNLVHQRTALLLSFKSLHARTTGQQLDLAEAKKMEPKEAPKLYRHPANQLIAQVQAEHIQALAKSIARIEKAVLACAQEIPLYEKLLTLPGIGRILGMTITMEVGDIKRFKTDGDFASYCRVVDARRFSNGKRKADNNQKCGNKYLSFSFVEAANFARRYCEHCRRWYDRKAARTSKVLATKALACKLAKAAWHVMARQCNYDEKRMFPELATQPMNQD

SEQ ID NO: 106199 - protein, 401 aa, unidentified
MTDERRPVVAGVDTHKDTHYAAVISVTGEHLAAAEFPATQAGHQALQWFITCHGVLVRTGVEGTNSYGAGLSRHLHDAGVQILEVIRSSRQIQRMRGKSDEIDAYAAAHIALAATNTITANTGTGNIEAIRVIHAARRSALKSRTEAIVQLKSLPMTAPEHTRADYRDLTRHPSRPSPSRLTRPTGNSQVAARTRTALKRLAARYQQLDEEIAAHDSDLTQLIETVNPALVQTKGIATITAAQLLITAGDNPEPTASKAAFTMLPIPASSGRTTRHRLNRGGDTAANSALHRIALVRLATDPDTRAHAAKRKSKKDILRCLKRAIAREVFHLTTHPQPVQSAADLRPARRQPGLTITDVANALGYGITKIPRIERGHIRDTRFLHEYRDWLTSQQPLRIAV

SEQ ID NO: 106200 - protein, 342 aa, unidentified
MKYKLISIDLAKNVFQIALLDQQNTLVSNKKVPRNKLLHTLRQFSPTLVVMEACYSSNHWGRAISKLGHTVKLIPARLVKAFLIGNKNDANDALAIAEASQRPKIHFVAVKTIEQQDIQSLQRIREQLIKQSTANVNQLRGLLAEYGVITGKTKANLMAAIPCCLEEPDNELSSVARSFIHRLYERQKQLTEEVKAVTEQMVSCASQHSDYQLLSGIPGVGPIIASNILGSINSINEFKNGRQLSAWLGLTPSQYSSGEHNRLGKITKRGNATLRKLLIQGARAVINWCDRKNDPLSKWLQQLRKRTHDCKLTVALANKLARIIWAVLSKQTPYDGKLACAN

SEQ ID NO: 106201 - protein, 360 aa, unidentified
MNKKIVAQNSEVVVGVDVHTDSHVIAVKEGKNIVDRFSSRGTLKEWRDYLRKFPGCKMHVVYESGPNGYNLHDCLESLNGEDGREIHVYLAPPSMIPEAAGKKKVKTDRRDAVKLIQAFESDSFRPVVVPDAQQRACRQLVRERERIKKDVHRIKNRIHGLVKFHGLEYPGTERWSGEWKAALTKQAKEKDNAGHIQFVLKAEFKLLDEELKQQAAVEKQMEMLLSDGKKKELFHTLMRQTGIGKVTAAIIATEVADFHAFDNSDAFASYTGLVSGARGTGKVMHLGPITKVGNRRLRWAFVESAWTWVRYDKEAKLRFELLKTRRGARRAIVAMARRLAVRVYHQVVHAAQPAPVAFYD

SEQ ID NO: 106202 - protein, 266 aa, unidentified
MTQTSITTAGIDTSKRKLDIAVHGRTERWQLANDRSGWRRLAADLAGAGVARVGIEATGGYERGVVEALRAAGFAVLVLQPIQVKAFARVHLRRAKNDALDAVLIAACAAAMDQPRIAPDPRMAELAGHLTFVEQIEEDIARFKTRLEHIDQPALRRTVKSDIARLQARRLAHIRELARRLRAHPDLAVRFALVLSIPGIGERTALALIVRMPELGQLSREEASALAGLAPFDDDSGKHKGQRHIAGGRARLRRSLYAAALPAAFR

SEQ ID NO: 106203 - protein, 412 aa, unidentified
MQDILTCAMGLDVHRDVIVACLARGELGTEPEIEIRSFSTLIPEMRKLRDWVLEVECRHVAMESTGIYWQPIYEMLEPCFDGQINILVVNARHMKNVPGRKTDMRDAQWIATLLRAGLLNGSFIPDKTFRELRHLTRYRKSIVHDITAQKNRIDKFLQSSGFRFTAFLSDAFGASGRNIIRHLMEYGDISREALDKCLKTQTRKRIDEILVALNGSLSEHQRSFLRMIFEHLESLERHRHTVEDAISEEIVKHEAALSLLCSIPGIDVTAAASIIAEIGTDMSAFPDSQHICSWAGLSPGNNESAGKHKSAHINKGNPYLKSMLCEVGWVISGKRTLYLSGWYWRVKQRKGAKRATIALARKLLALIYTMLKTGTPYNEECFEIRRKQSERKRASRMVNELQKLGYFVVAPD

SEQ ID NO: 106204 - protein, 345 aa, unidentified
MFVAGIDAHATYSVIAIVSNTGQLVQEPVRIDNTDEERLHELFEPYRPLEVVVETSPAWPWLFDRLQERGIHFVLAHAKRIRVIAESNYKSDEIDAEMLARMRLAGLIPEVYPKCIEQREQAVLLRNRARLVRERTRMVNRIHAQIHNVGLHLERGRLLTQDGRQWVRDVAWPLLGEERRLFIDMQWELIDQIVPMIRTLDHRVEHVGREIPAVALLETVPGIGPYRALLIATETLPIKRFRTPGHLVSYAGLAPRSSQSGLRPIRHGSIPAGANRWLRGTFVRAVVSHVTYAPDSWLSQSYELIKQRLGWQVARVATARRLARAVHAMLRTGEVWHDEPVSRAN

SEQ ID NO: 106205 - protein, 320 aa, unidentified
MNETSTKTAGIDTGKKSLDVATYPTSERLRVANTRNGHQELVAWLSARKIKRVGIEASGGYERAVVEHLREHGFEVALLQPRQVHAFAIYKLRRAKNDRIDAALIAECAANLGGLHEPPDTRLAAFAEHLLFIEQLEYDIAHLKTRREHFTTKRILKQLERDFQRLQRRREAELLLLQVVVCKHDDLARRLELIASVDGIGIRTALTLVILLPELGKVSREQISALVGVAPYDDDSGERTGERHIAGGRSRVRRALFNAALPASQRWNTALVALYGRLKNNGKAHRKAIIACVRKLLIFANAVVERGTPWSKNPPAHRTA

SEQ ID NO: 106206 - protein, 478 aa, unidentified
MAKVKQSAFDRLRLGARLNRKERRAVEQRLSAADPGLEIVNRDAAGIDVGNESHYVAVPRGRDAQPVREFGSWTAALVEMAQWLVRCGIRTVVMQSTGVYWIAVHDVLQKHGLEVYLVDARGTKNVPGRKSDVQECQWLMRLHTYGLLRACFLPAPEIQRVRTVWRLRDQHVRDSSRCIQHMQKCLIAMNMQLHNALSNIGGTSGQAIIRALLAGQRDPKTLSSLRDRRCMASEEEIVHSLQGVWKPDVLFELQQAVDAYDFYRQQMAKCDEQLKQYLALLPARRVEAVDPPSTDMTKKSRKPHKPQGNEPLFDLEAELERILSVNATSIDGINVMTVQTVLAEVGPDLSAWKTEAHWSSWLNLAPKRDVSGGRVIRHVREHRTNRAGNAFRMAAQALIHAHSYLGARCRYLRAKLGGHKAIKAMARILACLYYRLVMKGQKWVDQGMEEFNRRSEQRELDLLQRKAHKHGMQLVPAA

SEQ ID NO: 106207 - protein, 350 aa, unidentified
MTIVENHLLSVTGGIDTHRDFHVTAAIDPNGGVLGVESFETTTGGYRRLVAWLAAFGDIDLVGVEGTGSYGAGIARHLTGKGIRVVEVDRPNRQARHRAGKTDAIDAIAAARAALSGTATGVPKTRTGPIEAIRVLTVARRSAASEWVVILNQMRHLCFTAPEEFRRRFSELSPIILVRTCAALKPRRSDDDIVRFTTLSTLRELGRRGLFLREQTQRLDGEMKPLINQIAPELLGVYGVGYHVAATLLIAAGDNPHRIRSEAAWAHLCGTAPISASSGKIQRHRLNRGGNRQANSALHKIMLTRMASDARTRAYVSKRSADGKTMGETTRMLKRYIAREVYHHLPTTMT

SEQ ID NO: 106208 - protein, 349 aa, unidentified
MEVTTVGTDIAKRIFQIHGVDKNGKTILKKKLMRDQVLSFIVNLPKCLIGMEACGGANYWAREITKLGHEVKLIAPQFVKPYVKSNKNDQADAEAICEAVARPNMRFVPIKSVEQQDVLSIHRIRSRLVRNRTALANEIRGLLQEFGFTIPQGINKVTAKLTEILDSGALSQLSYETFSELKEEFINNNNKIIELEKRLKILAGELEQYRRLTAIPGIGLITATALIASIGNAKYFDNGRQLSAWLGLVPKQYSSGGKERLLSISKRGDTYLRTLLIQGARAVLNAKLRFTTETQRNKKDFSKFTEWMFNLLERCGHNKTAVAIANKLARVVFAVLRTGNDYNEPKVCG

SEQ ID NO: 106209 - protein, 338 aa, unidentified
MAIVCVGIDLAKNVFALHGVDEAGKPALVRPTVPRAKLLEAIAALPPCLVAMEACSGAHHWAREFQALGHTVKLIAPKFVIPYRLSGKRGKNDAADAAAICEAAQRPSMRFVPAKSLEQQGQLCLHRVRQGFIEQRTALINRIRGLLSEFGIVLPLKAATVRREALLHLEDLPGWANLAVGDCLSEVGRLDDRVHEYDRHLAQLARESEAAKRLMCLSGIGETTATALTAAIGNGHDFQCGRQFAAWLGLTPGQYSSGGKTRLGRITKAGDAYLRSLLVLGARAVLAAAKNKTDPISRWVRNVEERRGYWKAVVAMAAKNARLAWAVLAKGDAFKLAV

SEQ ID NO: 106210 - protein, 391 aa, unidentified
MIYVGIDVAKDKHDCFITNSDGEVLFKSFSISNNREGFETIFQRIESVSENLTKVKVGLEATGHYSYNLLGFLLDKGYPTFVINPLHTNLYRKSLSLRKTKTDKVDAHTIASMIMSDVNLKSYSDTSYHNEELRSLTRYRFDKVKERAQLKQSISRLVTILFPELEKLVPTLHMASVYALLSEFPSASAIASAHLTRLSNLLSESSKGRYRKDTATMFREAARTSIGSHMPAKSLELKHTIKLIHELDLEIEEIENEIKIIMDEINSPILTILGISYHMGAMILAEIGDFSRFDSPDKILAYAGMSPSTYQSGQLDNCYSHMEKRGSRYLWYALYNATKYVCHWDETFGTYLAKKQAEGKHYNVALSHATKKLVRVIYQLEKSGQSYIKVS

SEQ ID NO: 106211 - protein, 363 aa, unidentified
MITKTKPRRERPMNVTKYIGMDVHRAMTVSAVLSATGKVVAEAIIETKGSVILDFIQSQRGTLWVTFEEGTQAAWLYDLIQPHVAKVVVCDPRKISTQGNKADRPDAKRLAELLRTNALTAVYHGERSTRALKELARSYSAIVGDSTRIKNRLKAVFRARGIDNSGGGIYTTEERECWTSKLEAGAVRLRVQRLWRELDTLDVLRAEAEKDMVVEARKHPSTRILQTVPGIGPVRAALILAFALTPHRFRSKRQFWGYSGLAVVTRITAEYELVKGRIRRTKRRPALRGLNPNCNRVLKDVFKGAAGTAANGPWRAYFESKVASGNKPELVLLTIARKIAAITLALWKKGERYDETKLTMHAV

SEQ ID NO: 106212 - protein, 371 aa, unidentified
MGKSSKSLFIGLDVHKDTIAVAYAAEDRGTEVVSLGMIGTRQYDIDKLIRKLEAKGATLLFAYEAGPCGYWLYRYLTRWGLSCAVVAPSLIPRKPGDRVKTDRRDAVTLARLLRSGDLSSIYVPTVDDEAIRDLSRAREDAVRDLKRHKVRLKAFLLRQDIRYEGRANWNAAHLRWLARVVCPTPAQQIVFQEYVHAVSEQTDRLGRLETELQTAVTTWRLYPVVAAVQALRGLNLTGAVTLIAEVGDLTRFDTPRKLMSYLGLTPSEYSSGEHRHQGGITKAGNGHARRALVEGAWAYRYPAKVSRHLQLRLENVPAEVRAIAWKAQLRLCKRYRLLSARGKHVNQVVVAIAREMAAFAWAIARTVPIAA

SEQ ID NO: 106213 - protein, 362 aa, unidentified
MKEYIGVDLGKRKAVVVKKDRVGKVTGKVTLAVTEAALENYFSKQDRRSKVVVEATGNWMYLYETIEKYVPEVVLAHPLKTRAIAEARIKTDTIDATTLAELLRLDGIAKAYIPPREVRDARELLRYRASVVSMRMGLKNKVHAVLTKNGMECGFSNVLGKRSRQWLKTLSVRDCYRRELDGYIRLAELSTGLIQEITTKIKEVVSVTPQAQLLMTVPGISYYSALLILSEIGQIDRFPSAKHLCSYAGLVPSVYSSGSKSFHGRITKQGSRWLRWICVEISIHAANGDVAFQSLYRRICRRRGLATAKVAVARKILTVIYAMLKNNEPFRRRRPRHQILAKAWSKKNKESSGHPPGVMIQA

SEQ ID NO: 106214 - protein, 337 aa, unidentified
MKVTLIGIDLAKSIFQVCGVNQAGKRVFNRQVRRARLMELLIQHPEATAAMEACSGSNYWGRELQKRGIKVMLIPPQHVKPFVKGNKNDRNDAFAITEAARRPDLRCVEPRTPAQTDMIQVHRVLDRMIRQRTALINQVRGFLNEYGVVVAQGKEKLLAAMPDLLEDAENGLTPSSRALYQEMYEQWRQANEAIDRIEKGLKSQAGADEAAQRLMKLKGVAVKISTATIAHAGNGHGYKSGRHFSANLGLVPKEYSSGGKQKLGGITKRGNRYLRRLLIQGAWSVVRNADKNDDRLSRWARRLVERRGKHKAVVAVANKMARIMWSMLYHGSEYRAA

SEQ ID NO: 106215 - protein, 400 aa, unidentified
MKESNSKHPQIETAASVALLSNPVEEDAYGAFIGLDTHKDSITVAVAEPGRQEPKLYGRIINKPKNIAKLIQRLSELYGGAVLLFCYEAGPCGYDLYRQIINSGHDCQVVAPSLIPNKPGEQIKTDNRDALKLARYLRSGELTAVWVPDQEQEAMRDLTRARDDMKSQERKARQQLNGFLLRHGHGYPTGKTRWTKTHYNWLEAIRFEQDILQIVLQDYIEACKDATARVKALTDQMMRALPDWSLTPVVESLVALRGIDKIAAMVLMAELGDISRFQSPRQLMAFLGLVPGEHSSGPNRRQQRITRTGNRHARRMLVECAWSYRFPARRSGHIRRKQERASEQAKAISWKAQKRLCGRYRRLVESGKNTKLVCVAIARELVGFVWAIVRQEMPKVAVRG

SEQ ID NO: 106216 - protein, 269 aa, unidentified
MNNSKIQIPVNIGVDVGKANLDIALHPSGEFYSIPNSEMHIRRFVKILKGYSIERIVVEATGRYEHALVQACDQAGLPIIVVNPTSVRRYAQAIGVLAKTDRIDAQVIAKYTATLKPEFKTIPDKTSQKIKDLLTRRSQLLEMSTMEKNRLQILPKTLHRSIKSLLKMLQSQVETITRQIDQEVAKVDHWRIKAEILTSVPGVGKVLTYTLLSELPELGSLNRRKIAALVGVAPINRDSGKLNGKRRTRGGRHRVRTVMFMAMLSSIPV

SEQ ID NO: 106217 - protein, 339 aa, unidentified
MKTIMIGLDLAKSVFQVHGVDDAGQVMLRRRLRRGQVLGFFAKLAPAVVGLEACGGAHYWARQLSALGHEIRMMSPGYVKPYVKRNKTDGRDAEAICEAMQRPTMRFVAVKGEDQQAVMTVHRTRALLVRQRTMAGNALRSAFAEFGVVAAQGIKGLRALLAQLPTPTGIPPQAHAALAMLARQWQALDGDIRALELAIVQAARSDEQSRRIMHIPGVGPLTASAVMAGVADMRHFRSGRGFAAWLGLTPRQNNSGNKCRSGGISKQGQRDLRSLLILGAASHLRQERRRGVKDPWLAKLIARRPVKVATVALAAKMARIIWALLTKGEDYRAPAQLAA

SEQ ID NO: 106218 - protein, 321 aa, unidentified
MAYFRDVVGIDVSKENLDLYVLSAQQRRTVPNTAAGYRDLVSWLKSLGVRMAVMEASGGYERDVAKALRQAGFDVRIVDPKRVRHFAKAAGRLAKNDRIDAEMIAEFGAVFAAAQRCEIPLDAKREHLAGLVAARQALVDHQTSLQNQISACPKGPARQALAAALKPIPASIKQLDRLIAEAIAAHPQFAALAARLDTVPGVGPVTIAALIAWLPELGRLDRRALAALVGVAPFDDDSGKRTGQRYIKGGRGKLRNIVYMAVMGAATKHNPVLKAYYDSLLNRGKLKKVALIACLRKLLTILNTMVAKQQDWNPASMAIAA

SEQ ID NO: 106219 - protein, 441 aa, unidentified
MRHLRTRMAIHHQGFSHLPISQLRGKMSGKREIACGVDVHNKFIVATILSSDGLRVQDRFDTNLEDLLKFKYWLKENGCHKVALESTGNYWLPIYNVLDGSVNFILANAYQIKHIPGRKTDTLDSEWIAEICLKNLISPSLIFPRDRRELRSLTRARESLMKVRTKIKNQVTHELEAACIKLSSVLSDVFGKSGRHIVDGLLNGMDLEKILESIPSGRVKAIKEEIRGTIQANLSSLQIFLLQSHLDTIDAITKQIAKIDSKISYLISSRKEDLRIALSMPGMGFISASTILAEIGDFRDFSSPEKLAAYCGLVPSVYQSAGKMINGHITKHGSPHIRSMIIEVAHAIIRTKRNSRLKRFFLKIKARRGTKIGVVALARKVLCILYHLLISQETYQDDLLSKPRSSKYSNLQSTSMSLDEMIRTIINAGYEVRKNECLESG

SEQ ID NO: 106220 - protein, 318 aa, unidentified
MARIICGVDVSSISLEAFVAPKGATGSFHNTVEGITALLEFCQQQQVELVAMEATGGYEKKAVQMLWAEGVGVAVLNPRAVREFAKCLGLLEKTDRIDAQVIARFAEVKKCEASVPASAEQQCLKALSRRLQQLSRLAADQKNQRHLVSEPRVLRSFDAVLKVAKQQMREVEAEIATLLASDPLWQKLEEGLRSIKGVAGRTVARVLADLPEIGTLSNKAVSKLAGVAPLAQDSGKREGKRAVRGGRRNVRAILYVVAGVVRRYNPDFAAFAERMAAKGKPKRVIRVALAHKLLVRLNARAREARAAFNCAGPVAQNA

SEQ ID NO: 106221 - protein, 366 aa, unidentified
MQKFSIMRAMGSGILQGHQLTIGLDLGDRWSFYCVLNEVGKVLLEQKLPTTPEAMKRTFEKLPASRIVLETGTHSPWISRLLTELRHEVIVAHAQKVQLITKSSREDDRHDARTLARLARIDPQLLGPVRHRSAQAQIHLTVIRARAELVKARTALINAARGLAKSYGERLPKRGTQQVSQKLAAALSTPLREVLEPLLREVESLNERIQEYDQRIEQIAKEVYPEVALLKQVKGVGTQIALTYLLTIDDPYRFPKSRDVGCFLGLRPGRRNSGQSEPQRKISKEGDRYLRTMLVQGAHYILGPFGEDSDLRRWGLKLAERGGKNAKKRAVVAVARKLAVLLHRLWVSGEVYEPLRNTNRAMGAAA

SEQ ID NO: 106222 - protein, 377 aa, unidentified
MKRLKFVGLDVHTETIAVAVAEQDGEVRSLGIIPNREDSVRKLVRKLGPLEQLRFCYEAGPTGYALYWQLTRMGAKWEVVAPTLVPAKAGDRVKTDRRDALKLARNYWAVELTPVWVPDAAQEALRDLVRAREAAKKDELRARHRLNKFLLRHGRRPPMGVKPWTMKYLEWVKREVHFEPMAQEATLLDYLNEVEHAAARIARLDGAIEEAVKCAPPKMRAVIEALQALRGIAHVAAVTVVAELGELSRFGRATQLMSYGGIVASENSSGERTRRGNITKTGNAHLRRVVVEAAWAYRHRPGVGATLRKRQEHVSEEVKEIAWKAQQRLHERYRKLLAKGKNKGVVVTAVGRELLGFMWAIGTKVETAQKESLQQVA

SEQ ID NO: 106223 - protein, 356 aa, unidentified
MEQLTTVGIDLAKDVIAACVLDARGAIVEQRVLRRDAFERWAAQLPASHVVMEACGSAHHWGRWFAARGHTARLIAAEFVVAFRKGGKNDTADAEAVAIAARQPTMRFVPIKSVDQQAILAWHSVREGWKEERTALLNRIRGLLAEYGVVMSRSADRLLAALPKLSEDRRLPDAVRALLLEVREQFAALHARLARCDAQIAAHARSTPAAKRSAELLGVGPVTASALAATIPDAKVFKSGRQFSAWLGLTPRQHSSGGRTRLGRISLRGNVYLRTLLIQGARSTLQQAINAEPSRASRLQRWILALYERKGYYKTLIAIANKHARILWAILAKGEHYDASAWQRHPMNQPSLASNA

SEQ ID NO: 106224 - protein, 401 aa, unidentified
MVSDFMKGRYNLMKIFVGIDIAKLNHFAAAISSDGEILIEPFKFTNDADGFQLLVSKLESFDKNSIIIGLESTAHYGDNLVRYLVAEFYQVCVLNPIKTCQMRKNNVRKTKTDKVDTFVIAKTLMMQDDLRFITFFDLDMMDLKALGRFRQKTIKQRTRLKIQLTTYVDQVFPEIQYFFKSGLHQHAVYALLKEAPSPKEIASMHMTHLANLLKVNSHGHFTKELAKELRVLAQKSVGANDSAISIQITQTIQQIELLDSQLEKTEAEMTDIMKFNDSVIMTIPSIGYINGGMILGEIGDIHRFSNPNKLLAFAGLDPSVYQSGNFQAKTTRMSKRGSRVLRYALVNAAWNVVRNNATFKAYYDAKRAEGRSHYNALGHCAGKLVRVIWKMLTDEVEFNLE

SEQ ID NO: 106225 - protein, 417 aa, unidentified
MAKNINRSNRKKLDSAGANKRAIKVQKTIKSRNEGRDECKARHRWGVQSLLRKLEDAKNAPKQPAPDANVGYHIGIDLGDKKSDYCILDKNANIVAEGKLATTMIEFGMYFREIPRSRIAFEVGTHSPWVSSLLETIGHEIYVANPRKMGGGKKNRQKNDKLDAEALARQVRSDPRALYPIQHRGEKARHALVLLRARHAVVCARTKLICGARGLVKSVGERLPRCSADSFHNVGLKYVPEALRNMLEPIFQQIGTMTDQIKKYDVEVRRMCRQAYPETEMLQQANGVGELTSLAYVLTIDNPGRFAKSRDVGPYLGLVPRQYDSGDSRPQLRITKTGDRMMRQLLVQSAQYILGRYGNDSDLRRHGLKIASRGGKNAKKRAVVAVARKLAVLLHRLWVTGEVYEPLRNSKQQEKAA

SEQ ID NO: 106226 - protein, 318 aa, unidentified
MAMQAGKLIVGTDVAKAELVIHHDASDEVIKLKNSKPDIKRWLKQQPLNTAIAVEATNVYHLDLVELAHGAGLEVYVIDGFQLSNYRKSVGGRVKTDPSDARLLSRFLRNEGEDLRPWSPPPAVYGKVQSLLRRRAALVAARTAMTQSWANESLLKSAFEVFVKSIDRLDLLIQKKLKDVLREAGLQEQVARCQAVEGIGFLTAAALVMAFVRGEFKNSDSFIAFLGMDLRVNDSGQTNGRRRLTKRGCSEIRRLLHNAAMSASRSAAWRDLYEQHRNSGKATTQALVILARKLARVAFALMKNQGEYITRAMKLACP

SEQ ID NO: 106227 - protein, 362 aa, unidentified
MAQVRSWVGLDVHRASVLAATMDRDTGEMQMRRLPGETREVVAFCAALPGPTRVAYEAGPTGFGLARALQAAGVQCVIAAPGKIERPTSDRVKTDERDAQRLLRLLMIDALHAVRVPSIQEEALRDLVRAREDIRGDLMRARHRMSKLLLRHDVRFDGTAAAWTTHHRAWLVKVDLGERGAQVTLRDYLGAIDALIIRRDTLESTIGELVPDSPWADTVARLRCLRGIDTLSAVGLCAEIGDWARFPRPAHLMSYLGLVPSEHTTGASRRLGAITKTGSGHGRRLLVEAAWHYRRAPRNSAPLKRRQAGQPPQVLAISWQAQQRLHRTWQRLDHERGKRRTLVAVAVARELAGFCWATANAD

SEQ ID NO: 106228 - protein, 341 aa, unidentified
MDAGYDGRQIVGIDLHRRRSVLVRMDADTGQRLDTVRIDNDPSALAEQIAKAGEHPEVVLEATYGWFWAVDVLQEQGARVHLAHPLGVKGFAYRRVKNDERDAADLADLLRMGRLPEAWIAPPATRELREQVRHRAKLVALRSGLKAQVHAVLAKQGVHVPMADLFGVAGQQLLDGLHLDPAYNGRVGSLRRLIDALTFEIDIVAKRVTAGLAQHHGFRAVQAIDGVGPILAMVFVAEIGDVTRFPGPEQLCSWAGMTPKHRESDTKIHRGRITKQGNRLVRWAAVEAVQRVRGGAIGAARNRISASRGANIGKVAAARKLLTLVYYGLRDGHIRCLARPA

SEQ ID NO: 106229 - protein, 341 aa, unidentified
MKRFIGIDLHKNQFTVCYRDEKENEELRKYAMSQLDDFKKTLCSEYEIGLEATGNSSHFRDEVKEFVSAVRVVNPSQFKVISSSAKKTDKQDAALLALYLSKGLFPEVRVMDSERARLKSLLGTRDRLTKLRTALKNKIHNVLNAHGIVSKRESLSSRKGLAKVLDHELDDLSKFELRILVDQINHLNEGIDKINQELKDPGNQLPGHKNLTSIKGIGDVSANVLLSVIGDINDFPDAKKLSAYFGIVPRVHQSNEVEHHGRITKRGSKIGRTTLVQCTLIAIRYSSYLRGYYDRLKAKKGSGKAIIATSRKLLGIIYDTLKNDIIWEDFPNGVIQSSRSS

SEQ ID NO: 106230 - protein, 355 aa, unidentified
MTSTQYIGMDVHRESISIAVRNAAGKVVMECVIETKTSTILQFFDGLRGDVQVTFEEGTWAAWLYDLLKPHVTEVVVCDPRRNALLQEGNQNDRVDARKLAELLHHNQLRSVYHGDHGLRTLKELVRSYLTITQDLSRVMTRVKALYRSWAIPCTGKQVYAPRHRAEWLGKISEPGVRRRAEFYYQQLDALRTLRLEVRRDLLAESKKHQAWKRLCGIPSIGPIRAAVLLGILQTPHRFRTKRQLWTYGGVGIETSSSADHRVVDGQLERKKKQMEIRGLNRNYNHDLKNLFKGAAIVAATKPGPFAEFYAELLAKGMRPEMARLSLARKIATIVLIVWKRGVSFDAQHLKPQTA

SEQ ID NO: 106231 - protein, 391 aa, unidentified
MIYVGIDVAKDKHDCFITNSYGEVLFKSFTIPNNRDGFETLFQKVQSVSDDLTKVKVGLEATGHYSYNLLGFLLNKGLTTFVINPLHTNLYRKSLSLRQTKTDKVDARTIASMLMSDVNLKSYSDTSYHNEELKSLTRYRFDKVKERAKLKTSVSRLVCILFPELEKLVPTLHMASVYALLSEFPSAKHVATAHLTRLTNLLSKSSKGRYGKDTAITFRDSARASIGSNMPAKSLELKHTIKLIQELDSEIDEIENEIKIIMDEINSPILSIPGINYRMGAMIIAEIGDFNRFDSPDKILAYAGFSPSTYQSGQLDGAYAHMEKRGSRYLRYALYNATKYVCHWNPTFAAYLAKKRAEGKHYNVAISHAVKKLVRVIYHLEKTKQQYIKAT

SEQ ID NO: 106232 - protein, 315 aa, unidentified
MSKPRTVFFGIDISKEHLDLHQLPQDRAARFEVNSEGISKLITYLKRRKPALIVMEATGGYETNFAAEMVSAKLNVAVVNPRQVRNFARALGILAKTDSIDAHVLARFAQEVRPEPRPLPDKQELALKALVKRRRQLVEMLVAEKNRLSRVSSVKVRDSLNRSIEFIKQQVDELDDQIKNAVQCSPAWREKDNLLQSVPGIGAKTFHNLLALLPELGKLNRRQIASLVGVAPMNRDSGTFRGRRMIAGGRKAVRNTLYMATIAAARFNPTIKAFYIRLRNSGKKAKVALAACMRKLLIILNTILKNQQQFKQSFA

SEQ ID NO: 106233 - protein, 330 aa, unidentified
MRYIGIDISKDSFTVAFSSVKGSKTQSYKNTPKDIQKFIKTLDKEQDHCVMEATGNYTFKLLYLLIEQGYKASLVNPKQTKYFAKTMLSVTKTDPQDACLLACYGEKMTPPVYKMPSEKIILLKQKRTVIRQLRKQLTALKNLEKSLEVLPRKDKNAFNCLNNTISYTEKQTEKLEKELIDDITEDFDKQLDLLTSIKGIGDKLAASLIIVTGGFSFFENPKQISRFLGICPTYQQSGSSINIKGSINRNGDSHLRGMLFLASLAAIRFNTACKELFSKFKAKGKPVKVALIAVANKLIRQAFAVVKSGISYIDGYISKPPITTVKIISN

SEQ ID NO: 106234 - protein, 412 aa, unidentified
MNIIHDICCGIDVHAKTVVVCLIKRGKKQIRTYSTMTDDLLALSEWLVSEGCKHVAIESTGVYWKPVFNILEGSLEVVLVNARHVKAVPGRKTDVRDCEWLADLLRHGLLRASFIPPLPTRELRELTRHRYTLVSDQTAVTNRIIKLAESANIKLAQVASNALGVSGRAMLRALSRGEQDTTKMAEMARGALREKQGQLRRALKGNLTRSQRFVLKELLDQLEQLEAAVARVSEEIREQIEVNSDPFVKEAVRLLQTIPGVGEQVAEVIVSEIGTDMTRFPSDKHLSSWAGMCPGNNESAGKRKSGKTTKGSNYLRAALTQAGWAASHTKNTYLAAQHKKLARRIGKKKSLVAVGHSILVIAYYILKNQASYHELGGDYFDRQNVDLQRARLIRKLESLGLKVTVKVVPEAA

SEQ ID NO: 106235 - protein, 409 aa, unidentified
MGLYCGIDWATDHHDVAVIDGEGHVVARARVGNDAPGFTALLTLLAEAGDSAADPIPVGIETDHGLWVAALRETGRVIYPINPLAASRYRARYSVSGAKSDATDAVLLANIVRTDPDAHRPLPADTDAAQAIRVLARAQQDAVWARQQVGNQIRDLLNEFYPAAIIAFADLDGGFTRPDARAILAAAPTPAQAAKLTPARLRRLLTKAGRKRYLDRDIARLREVFTATYLHQPPAVENAMGIHLSALLGQFDAACTAADALAEAAIAHFDRHPDAEIITSFPGLGMLTGARVLAEIGDDRSRFTQARGLKAFAGSAPITRASGKKTVVLHRHIKNRRLAAVGPIWALASLRASPGARRHFDTRRAAGDWNHQAQRHLFNKFLGQLHHCLQTSQHYDEHVAFPPPLQLAA

SEQ ID NO: 106236 - protein, 371 aa, unidentified
MEHTRFIGLDIHKERISIAVAESGRAGAVEYHGEIANDPGAISKLCDRLRRPGKPLAFCYEAGPCGYGVHRQLTSLGHRCDVVAPSLIPTKSGDRVKTDRRDATMLARLHRAGELTPVWVPDADHEAMRDLIRLRSVVRQIVTRARQHLQGFLLRHGRKHGGGTAWRMAYRRWLSTLAFEHPAQQIAFQDYVDAVMDAERRLKRVEEQIVGLLPEWNLRPVVDALQAMRGIALINAVVLVTEVGDFTRFSNPRQLMAYFGLVPGERSSGQTVRRGGITKTGNAHARRALIEGAWAYRMKPRIGRHKVDRIEALPKVIRDIGWKAQIRLCARYRRLSARGKTANVVNVAIAREMVGFIWSIACAIQSTPTAA

SEQ ID NO: 106237 - protein, 350 aa, unidentified
MVSSVPVQGGTSTKVTTIGLDIAKQIFQVHGADAEGRAVLRRPLRRNQVAAFFANLPLCVVGLEACGGAHHWARVLSRFGHAVRLIAPQFVKPYVKSNKNDANDADAICEAVSRPQMRFVPAKSVEQQDIQSLHRVRSRLVSSRTQLANQIRGLLMEYEMVLPQHVGQLLRGLPGILEDASNELTAFSRRLFASLYDELLDLEDKIEAIERQVRTVHEASEPCQRVAAVEGIGPVTATALIAAMSDGKTFKNGRQFAAWLGLVPRQHSSGGKTRLFGISKRGDTYLRTLLIHGARSVVYRASHKTDSRSRWIADEQRRLGTSKACVALANKNARIVWSLIARGEVYRRAA

SEQ ID NO: 106238 - protein, 425 aa, unidentified
MNYKQNEKINQVKESTLVVGIDIGSTTQYARAFDWRGIELGKVFPFSNSREGFESFKAWMQHLQDKYKKLDAIVGIEPTGHYWFGLGAYLEDEGILLVMVNPYAVKQTKELDDNSQSKNDRKDPKVIAKLVTEGRYSAPYTPDGVYADLRIMVANRKRLIREMTQIKNRFARWFAIYFPEYTDVFGDYEAQSSMLLLKKTCTPEAIVELGAEKINQIWRDAKLRAVGMKRATTLCETAKRSIGLKKGSSAARYEMKLLLEDYEYKKAQLDAVMEEIEKLCRKIPESEQMLAIKGIGVITVAGFLAEVGDVRRFESPRQIQKLAGLSLRENSSGKHKGQTTISKRGRSNLRAVLFNAAIPLIATNPEFKSLHEYYTTRANNPLKKKQSVIAISCKLIRVFYAILANGVTYDAQKMLSDIHRQPQAA

SEQ ID NO: 106239 - protein, 339 aa, unidentified
MKYTPVGVDIAKYLMQIHFVDEYTGEIIDKQLRRRDFLTFFSNRDPCLIGMEACGGAHYWARELKKLGHEVHLLQAKFVKAFRIGNKNDVMDARAIWMAVQQPGKPVAIKNEEQQTLLSVHRMRTQLVKFRTAQINALHGLLLEFGETVHKGRASLDKAIPEVLERLRITLSPFLISLIEEQYYRLSELDKEIDGLEKQLTEWANQHADCQRIMKIPGVGVLIATAAIATMGDPTAFRSGREFSAYLGLVPRQTGTGGRVKLLGISKRGDTYLRTLFIHGARVATLCTKTPPQWVSELKKRRPVSVAIVGMANKLARTVWALIAHQREYEKDYVSIRPY

SEQ ID NO: 106240 - protein, 394 aa, unidentified
MLYLGIDIGKNTHCASMLDETGKFVFKAFTFPNTTEGGDSLATLIKKYVSSSDQLQIGMEATGHYWLSLYSFLLEHDFTVHVINPIQTDGWRKGTEIRKRKTDIIDSVLIADLIRYGSFIETTLSDENVFSLRTLCRFRSYLVDSISNLKRKIICVLDQVFPEYESIFANVFGAASKEILQHYSTPDDLENISVEALAETLSRVSRKKIGIDKAEKLSKLAANSFGITFAKDSFSFQLKLLIDQMTFIESQVKDTENEIKQILNALNSPITSIPGIGVVLGATILSEIGDINKFDDPSKLVAYAGIDASVSQSGQYESTHNVMSKRGSPYLRRALYQAALVASNKDPVLIAFYQKKMSEGKHHKTCIGAVSRKLCYIIYAVLKANRPYEIRQPN

SEQ ID NO: 106241 - protein, 315 aa, unidentified
MDDSVNVCVGFDVSKDSLDGHLLPEGRSFSVPNTPKGHATLLTQLPAPGTCRIVLEATGGYERRVVAELVTAGHFVAVVNPRQVRDFAKAHGILAKTDRIDAGVIARFARDVKPRPVAKTSQKQGELDDLVTRRRQLVQMRNAESNRLQDHLPKLVRRSVQRSIDAIVKDIRRLDRAILELVQSDDDWKQRFELLKTVPGVGDVTAATLVAELPELGQLNRQEISALVGLAPYADDSGRKSGKRFIRGGRKSLRCVLYMAALVATKHNPVLRQFAQRLKAGGKVPKVILTACMRKLLVILNTMVKTNTPWKTALV

SEQ ID NO: 106242 - protein, 347 aa, unidentified
MRFYNRQHQYYCGIDLHVKTMYVCILDGAGQVLVHRNVPSTPAAFLETVAPYRTDLVVAAECMFTWYWLADCCAAEGIAFVLGHALAMKAIHGGKAKNDKIDSHKIAVLLRGGMLPQAYVYPAAMRSTRDLLRRRLHLVRKRGELLAHIQNTQAQYNLPAFDRRLAYAANREGVAAHFPDPRVRKSIEVDLALIDLYDGLITDLELTIVREAKQHDGDAFHRLRSVPGIGKVLGLTILYEIHDIGRFDRVQEFASYARLIKCRKESAGKKLGTSGAKMGNVHLKWAFSEAAVTFLRHNREGQKFLARLAKTHGKGKALSILAHKIGRAVYYMLTRRTVFSMEKFLAA

SEQ ID NO: 106243 - protein, 429 aa, unidentified
MTGSNDTPQRLTLVAIDIAKHYHDVLIEPPAPKRRSRLRLANRREDFERLATHLRGLKSCVMVGFEATGNYHRPLAYFLHRQGFELRLIPTLALARTREAMHNSWDKNDPKDAQVILHLLKTGLAQTWHDPLVNGINDVQELSKTHFQITLARVRVWHTLRNHYFALYFPEIDRFVRSNHSLWMVRLLASFPTPLSITALSEAEFQMQAWNLVGRKVNKRALLAEIYAAAQQSVGVPLALDSAAVTMFRLMLEQYLTLDQLRERIAEQAAILLADHPDSSRLMTVPGIGPANALTILAEAGDLRRFRHHRQFLSFCGLNLSTLQSGKSRGQSHISKYGNARLRTALWMAAQSAVRMRENSFCRKFDQYVRANPLNADLRRKGYTAVTAKLARVVFGLIKQQTDYRPFFEHQFQVDEPALARAVGAASTP

SEQ ID NO: 106244 - protein, 316 aa, unidentified
MEPRFVGIDVSKSRLDVAIRPGGVLFATSNDEAGIIHLISRLQEAPVDLIVLEATGGLEVPVVAALAQAQLPVAVVNPRQARDFAKATGKLAKTDTLDAKVLAHFAEAVRPEPRPILEEDAQALADLLARRRQIVEMLVAERNRLSRARKPVAERIKAHIQWLKSELDDVDSYLAGMIRESPLWREKENLLKSVPGVGRVISFTLLAELPELGTLDRREIAALVGVAPLNCDSGLHQGKKVIWGGRAPIRAALYMGTLVAARFNPAIRLFYQRLIQAGKPKKVALTACMRKLLTILNAMVRHGASWNPTPYEQLVA

SEQ ID NO: 106245 - protein, 411 aa, unidentified
MEAAVITAVGIDVSKSKSTVAVRRPGGEIVLRPFEVHHTNSDLKKLASALKKLGGDIRIVMEHTSTYWRPIALTLKEAGFFVSVVNAMLIHDFSDNTIRKLKTDRADALKIANYALTFWDTLPPFNSEEETRLLLKMQSRANERITATATALRNGLIALADQTFPGVNIAFDPNTKNANGHEKWVDFFLRYWHKDCVCQYSMEAFTESYRGWCKRKNYKFRTNTAHRIYLLAQEGVDTLPKCESTKMLITQACKSLNAVCEAKQSTQLEMLRLAAMLPEYEVVMQMEGAGPITEPALMAEIGDVRRFKNKKALVAFAGIDAPPFQSGAFKSKSRHVSKRGSPHLRRTIFIVSNIILTRSNPENAVYCFMDKKRSEGKHYYVYTVAGSAKFLRVYYARVTEFLCSQPSPDAC

SEQ ID NO: 106246 - protein, 426 aa, unidentified
MSQRDYNKQVAKRQRIRKATLIVGVDVGKSFNALGFMDKEGNVLGSCAKLYNNWEGFEEFINLIEGLKAKHHLRDVLIGMEPTGHYWRKLAYFAKDHGYEVRFVRTTALKHHREIDESSSAKSDQRDALTIANITREGKYIDTIIEDGVLRQLRTLSKARERLLRYSVSAKNSLHAALDDYFPELHEIFWSMGSRSLWTILEQCPFPQDVMLMDVSTLQELIARSSRKKKGSARKAEKLIESAQKSIGIKQIGNADRYRVQMCLEEVKRTVMTLKNIDIQLKCLLKETSAASYLMSIPGIGPLSAAVFLGELGDPTHFHNARQIVKYAGYDPQESDSGSRIGRKFISKKGRWLLRKYLFFMSMRVVVLSNYFQEYYLRKLETKNRIGQQPRRKEMLCAVAIKLIKVIFALLRDKREFEDLVPAAAA

SEQ ID NO: 106247 - protein, 347 aa, unidentified
MKITRIGLDLAKNVFQVFGVDAQDKRVLSRQLKRKDMQAFFQALPACLIGMEACASAHYWAWVLTEMGHTVKLIAPQFVKPYVKGNKNDANDAEAICEAVSRPGMRFVPVKTIEQLHLQARHRVRSELIKQRTAKANQIRGLLAEYGIVIGLGVRCLRHHLPEILEEAENRLQEDFRLLLTGLRDDLVYLDERIKTEDKAIAALANAHASARRLQQLRGVGPLVATALIAALGDGRQFSNGRQASAWVGLVPGQHSSGGKQTLLGISKRGDTYLRTLLIHGARAALRAARDKTDPLSLWLQGLCARRNPNVAAVALANKTMRLAWVLLRREEDYDPLHGRARPAQPA

SEQ ID NO: 106248 - protein, 402 aa, unidentified
MNAVGIDVSKGKSMVAIMRPFGEIVSAPFEIKHTASDINSLVELINSVEGESRIVMEHTGRYYEVLAHQLSEANLFVSAINPKLIKDFDNDSLRKVKSDKADAVKIARYALDKWQNLKQYSVMDELRNQLKTMNRQFGFYMKHKTAMKNNLIGILDQTYPGVNTYFDSPARSDGSQKWVDFASTYWHVDCIRKMSLNAFIDHYQNWCKRKKYNFSQSKAEEIYGKAKELVPVLPKDAITKLIIKQAVDQLNSASATVESLRTLMNETASQLPEYPVVMAMKGVGSSLGPQLMAEIGDVSRFTHKGAITAFAGVDPGVNESGSYEQKSVPTSKRGSSDLRKTLFQVMDVLIKTHPQDDPVYQFIDRKRAQGKPYYVYMTAGANKFLRIYYGRVKEYLSSVPES

SEQ ID NO: 106249 - protein, 368 aa, unidentified
MKEFSKYVGLDVHKETIAVAVAEAGGGEARYVGEIAHTPEAIAKLMRQLKKGPGRISWCYEAGPCGYGVYRQLSAAGEHCQVVAPSLIPKKAGDRVKNDRRDALSLGRLHRAGELTAVWVPDEAQEALRDLTRCREDMKHLQRQARQRLMAFLLRHGRRFGGKSKWTQAHWRWFETVKFEQPSQQIVLQEYLDTVLACNRRLQGLDEQLERVARESVFWPVIQALMALRGVNLLTATTIIAEIGDLHRFESAPQLMAYLGLVPSEHSSGPKQTRGGITKTGNGHVRRLLVESAWTYRHPARKSALLQRRAERTCEAVQDIAWKAQKRLCQRYRHLLRRGKQSVQVCAAVARELAGFVWDLARQVHIAA

SEQ ID NO: 106250 - protein, 422 aa, unidentified
MSQNQPEIQYAAFVSIDWADQKHVWSLQEANSSTREHGEVGHMPEAIEAWIAQMSQRFAGRPIAVAVEQSRGALVFMLSKYEQLHIFPVPPAMTANLRKAFYSSGAKTDPADTDLLQDVLQMHREKLRRLSPDTEATRLIQNLVEERRKLVNEKTAQGNRLEAHLKIYFPQIPHWFGDVDSPLVCTLLERWPTLEALQKARPDTLRSFFRKHHCRKEELIESRIKAIGEAMPALKDRAVVEAQLAVVKVLVQVIQVLHQGIEDFNRQIQEAAEAHPDFFIFESLPGAGAVMAPRLLAAFGSQRERYRNAAEVQTLSGIAPVTESSGKSSWIHFRFACSKFVRQSFHEWAALSITQSQWARAYYELQCRRGKRHHAAVRALAFKWIRIIFRCWKERVAYDEKVYLAALAQHNSPLLAATKIAL

SEQ ID NO: 106251 - protein, 340 aa, unidentified
MFVNYKVMQNFYFIGIDVSKKKLDICVMSNSKVLKEEQVSNHPQAIATVIAGIKEELSMSNDSLIICAEHTGQYTYPLICACKSVGSKLWLENASQIKYCSGVTRGKNDKVDARRIAVYAMRFFDKAKPYQRPTEELMRLKQLEAERSLYLTDLAKYKTQLSDQEGFMEDKIFKRKAKRLKEMIKSLEKTLKEIAQEMADVIYSSEELSRQMRLLKSVEGVGPVVAMNMIIATEAFTRFDNPRQFNCYVGVAPFAYTSGSSQHSRNRVSQRAVKYIKCLLHMAAVAIAHKKTGDLKTYFERKVAEGKNKMTVLNAVRAKLVARMFAVIRNNRVYQPILSV

SEQ ID NO: 106252 - protein, 276 aa, unidentified
MRSKTVLSKKFKTVGQPNIDEHFKVLETYCQDKPHMAVVESTYNWYWLADEFEKRNWNLRLADPSTVSKAGFKYSDDYTDASYLAECVRNGSIRSTAIMPKDDRAVRDLARYRMTLVEDRGRLKTILVNMTTNHLSIKLNSDKLLKEIDEAVEKAASASDEGAADEVLSDYYDNRQVRTKMRSLLRRIRFLTNEVEALDEELTELIKPNVYATSLQSIKGCGYVTSMLIGLEIGDIGRFRTHKDFVSYCRLAPTSKLSNGKSKGLGNAKNGNAYLS

SEQ ID NO: 106253 - protein, 362 aa, unidentified
MSDGSTERTKMTAGLDIGDKYSYLYVLDNDSGEMIEEGRLRTTPDHLCRRFDSAERMKVAIEVGTHSTWISRLLEECGHEVLVANARKIRLIYGDKRKTDKLDAQKLARLARADPELLYPIEHRGEESQTQLAVIHSRDALIRSRTLLINHVRGTVKSFGAKLPQCSAQSFHKKVAGTLPSELAEALEDVVETIGKLTEKIRKYERRIERVCKELYPRETGLLRQIPGVGALTSLTYVLTLEDPDRFEKSRAVGAYLGLVPGKDQSGEQDPGKRISGEGDKMLRRLLVGSAHYILGPFAPDSDLRRHGEKIAGRGGKNAKKRAVVAVARKLAVLLHRLWITGESYEALRNARLSGTLGEEVA

SEQ ID NO: 106254 - protein, 331 aa, unidentified
MRNYYVGIDTSKKTIDASIVNSKNQDLFHDSFLNKSFGFKKLLAWSRLKSKGKEVYFCIENTGHYGRDLCKFLEKNKQIFSIINAAEIKLSSGIKREKSDKKDSELIALYGLKFPERLQTETMLNDQLLGLQLLLGQRKLLQNKELDFQRNIKMMKHCLSNDKVAKSIVRKNTSLKKFLHKNREDVELKIDQYIESNPLLKTNYDLLTSITGIGQIIALNTIVQTHNFTMITDPRKFSCYCGVAPFKNESGTSIRKGTRISFYGHKGLKKILNFGAMNAVKIDPQLKEYYQRKVEEGKNKMSVLNAVRNKLIHRMFAVVNRGTPYVVQRTF

SEQ ID NO: 106255 - protein, 382 aa, unidentified
MVRARHPISKVKLSRPRFGESLTMTNREPTPPDAALVAIDVSKLKNDVLIEIPGKMRRRRLTVINSRAEHDRLVELLTGLGCPVIVGFEATGNYHRPLAFRLLGAGIALRLVSSVALARTREALHNGWDKNDPKDAQVILHMLRIGATQTYADPLVAGINDIQELSKTHEIISKAKTELWHRLLTHYLPLYFPEIARFAGNSRSDWFLAFLERFPTPASITAHSKEAFIDAAWDVVGKKVSKARLLGDIYETACSSIGLPVPIDSSAISMFRMVIAEGRSLIRQRDAIEEQADTALSRNADYQRLRQIPGIGPINAMTILAEAGDLRRFRHHRQFLKFCGSRPCHPSVGSVPGPDEALQVWQWPAPSHLLGCRPGCNPSARQ

SEQ ID NO: 106256 - protein, 369 aa, unidentified
MQRRLETIAIAIAEQDGEVRSLGVIPNREDSVRKLVRKLGTMEELRFCYEAGPTGCVLYWQLTRMGAKCEVVAPTLVPVKAGDRVKTDRRDALKLARNYRAGELTAVWVPDAAHEALRDVVRAREAAKKDQLRARHRLSKFLLRHGRRPAMGVKVWTIKYLEWVKREVHFEQLAQEATLLDYLHEVEHAAARIARLDGAIEEAVKVAPPKMRAVIEALQALRGVAHVSAVTVVAELGELSRFARAKQLMGYGGIVASEDSSGERTRRGNITKTGNAHLRRVVVEAAWAYRHRPDVGATLRKRQEHVSEEVKEIAWKAQQRLHQRYRKLLAKGKNKGVVVTAIGRELLGFIWAIGIKVETAQKEPLQRAA

SEQ ID NO: 106257 - protein, 344 aa, unidentified
MTLVSPSVSVDSVLGIDVAKAKVDTWFERVTASEKPKHQRYDNTPAGHQRLLAWLATQAVGQLHVCLEATGTYSDALALCLHQAGYRVSLVNPLRIKRYGESELRRIKTDKSDAALIARFCRTQQPDPWTPLPPERRELQDLVRSLQDVKQLAQQQGSRHSSGPHTPTVTAATTRILTCLHEEQTALEHQIEHHILAHTCLAADYALLLSIVSIGPQTAAVLLAELGDVRREVLVRDLVAYVGLCPRLCSSGSSVHGPTPLSKRGNAVVRKALYFPAMNAIRFNPFLRPLYHRLLARGKPKMVALTAVMRKLLHLVYGVLVSGQPFDPAHVSVRPVSTPQSVNA

SEQ ID NO: 106258 - protein, 409 aa, unidentified
MMNSLFVGIDVGSRNNVAYLMKPDGSKHSSFSVQNNLGGAKLLSERIVSALGSMQLSDVIIGLEATSIYGDSLVYALREDGSLGRFQRKIHVLNPKQVRKFKDAYPDLPKNDWVDAFVIADHLRFGRIAKEVYMDDYRYQALRTLTRARFDVIQNLTREKQRFANYLFLKCSGMAQDKDIQNTSATTIALMERFETVDDLANADLEELTAFVTETGRGRFADPAATAKAVQAAARGSYRLPKTVNDTVNQAMSVSIASMRALKEQIKVLEKAIEQQFEIIPNTLTSIPGIGKVYSAGIIAEIGDIHRFNSQASVAKFAGLVWHKNQSGEFEAEHSQMIKSGNRYLRYYLLEAANSVRRCDSEFRRYYDLKYHEVNKYQHKRALALTARKLVRLVFRLLKDNRLYIPPEG

SEQ ID NO: 106259 - protein, 395 aa, unidentified
MFIVGIDIAKRSHEAIIIAEDGQVVRKAFSFRNNCTGYNLLLEQVRRLTLVKSQIVFAMESTAHYWLALYARLLKDGYAVMVLNPIQSHSLRELYIRKAKTDARDSLIIADLVRFGRCKASNVPQDKILALRELCRSRAYLVDMAADLKRKLIALLDRIFPEYESLFDSVFSKASIAVLSKYSTPQKVKNANLRKLTDILMESSNGHFGEWKAHQLKEAACSSFGIDDSSGVYSTLLGMFLEQILSLTAQADSLEKQISVFFQEFNNPLTSIPGVGTVLAATILSEIGDITRFSSADKLLAYAGLDPSVKQSGEFKSNQNRMSKRGSPYLRRAIWLASTVAVHRDPMFQTYYEKKISEGLHYMNVIGHVSRKMTAVIFAVLRDGQPYQPILQSAG

SEQ ID NO: 106260 - protein, 449 aa, unidentified
MSRPQVIDDEEHERVHDRVAAIDVAKDTGMVCTRTPHPSRPGAQRASVWTVRARMNAIRVLGRQLRKDGIEIVTLESTSDYWRIWFFVLEACGLAVQLVTAAQAKNLPGRPKTDKLDAMWLARLTEMGLLRASFVPPKAIRDLRDYTRARTRLIHERSRCWQRLEKLLEGALVKLSSVASKLTTLSAQDMIKAMIAGQRDPEILAGLARRTMKAKHDALVEALDGMFDDHHGELAQLLLDQIAALDAKVAQLGARAAELAAAIPEGWGIDPDGTTGPGAGTGPDAPVLNAVARLAEIPGLSPDLARTIIAETGLDMTRFPDAAHLVSWAGLCPSARQSGPRTRSGRKGRGDTWLRGALGQAAVNASRTATFLGERYGRIARRRGKAKAQVAIARSILVIIWHLLANPEARFTDLGPGYYQTRLDTDRKLRNHLRQIQALGFTVTLTKAG

SEQ ID NO: 106261 - protein, 338 aa, unidentified
MNHYAGIDVSLKESHVCVVDASGKIIREGKVASEPEDLIGWFGALGLVVTRIGLEAGPLSQWLYAALRDAGLAIELLETRHVRNALKIMPVKTDRKDAQGIAELMRLGWFRPVHCKSMEAQEVRAMLTARKLVQKMLHEAEMSLRGILRGFGLKVGKTTPVTFEARIRELVAGHPSLEGIAQSLLAARAVLRRELNGFEKRLRAIARCDTRARLLTSVPAVGTIVALTYVSAIDDPARFKSSKIVGAYFGMTPKKYQSGETDRSGGISKIGDASVRAALYESAHIMLTKPIKGCTALKAWAMRIAKRAGMNKAKVALARKLAVIMHRMLADGTTFTPA

SEQ ID NO: 106262 - protein, 402 aa, unidentified
MSINGALGPAAAVVAVDAGKTTAAVLVTDATRQRLLGPLNFSVTAVGVGEVVSRARVVVPTGVIRVGVEAAGHYHRPLLSPAVWPGWEVVELNPAHVAEQRRVMGRRRVKTDAVDLDAITELLLAGRGCPVTEPIAAVAELAGWAAHRRRRGQTLTATKNQLLGQLDRCFPGLTLALPDVLGTKVGRLVAAEFADPHRLAALGTVRFVRFAAARGVRVQTSVADRCVAAARDALPSPEAAVAREVLAADLGLLGGLEAQIATAEERLAALLPLTPFAPLTTVPGWGTIRAGNYGAAVGDPARWPTHRQLYRASGLSPMQYESAGRRRDGVISREGSVQLRRALIDLGIGLWLQDPAAKRYGQGLRARGKNGGVIGCAMAHRANKIAYAMVRDQTGYQPQRWA

SEQ ID NO: 106263 - protein, 337 aa, unidentified
MDTSKHIFQLHGVNAAEEPVLRKKLRRKEMVTFFEKLAPTVIGIEACSASNHWARLLQSFGHTVKLIAPQLVKPYVKRGKNDAADAEALCEAMSRPTMRFVPVKTAEQQAALMLVGVRDRLIRNRTQLINAIRGYAGEFGYTAAKGKAHLGPLLERIQADENLPGLARELFVAQAQEYAQLQAQIDEIDAKLLAWHRADECSQRLAKIPGVGPIGAVLLKMKTPAPELFRSGRQFAAWIGLTPKDHSTAGKVRLGVITRAGDEGLRSVLVVGATAVIQHVRRGGRASPWLTELLKRKSPKLAAVALANKMARIAWKLMLTGENYAVKSAPAPLAGAA

SEQ ID NO: 106264 - protein, 322 aa, unidentified
MLEPVLGIDIAKRKFDVALLVGGKLKHKACKNTREGFEALDLWLQKQKVDRVHACMEATGTYGDALALYLHDAGHIVSIVNPARIKGFAQSELLRTKNDKVDAGLIARFCLAMNPGQWTPPSPEIRRLQALVRRADALISMRVQEVNRLDIAHETIGPSIKEHIAYLDGEIEEVKKQIAEHIHQDPNLRGKRDLLDSIPGIGEATIAVILAELNAFQRFERVENLVAFIGLAPKERMSGSSIKGKPRLSKMGHARLRKALYMPALVSIQYNPVIREFHRRLKERGKNGKVIVCAVMRKLVHIIFGILRSGQPFNPNFKSNFA

SEQ ID NO: 106265 - protein, 346 aa, unidentified
MLYAGLDLSRKRLDFHLLDGEGATVEVGAAPPDADGLHSLTARLDRHGAPIHAAIESMNGARFVHDRLELAGWLVEIADAQKVKGLAPLACKTDRIDAWVLAELCRRDLVPAIWLPDPLVRAERERARWRLHLVRHRSSLKQRVHAVLLTHGKPCPVSDLFGVRGRQLLARLGLPEPWQGTIEASLRLIDELDREIGECERELRRLGADHRYVPLLCTVPGISWVLAYTIAAELGDISRFPAPRKLAGYSGLCPRVYQSGQRDLRGPLAKQGPRYLRWALVEAATHACTHPIYRDRYQQTKARIGKQRGAKVAQIDLARRLSEAIWHMLSRGEPFAPKGATDPLAA

SEQ ID NO: 106266 - protein, 403 aa, unidentified
MSDMITNHADIDVFIGIDVGKHNHHAVALDRDGKQVLSKALPQNETKLRALLGRLRKHGTLLVVVDQPATIGALPVAVAQAESITVAYLPGLAMRRIADLHPGEAKTDARDAAIIAEAARTMPHTLRGIRVADENVAELSMLCGYDDDLAKQATATSNRIRGLLTQIHPGLETVIGPHLDHPAMLAVLAKYPTPKALRHAGKHRVETLLRRQAPRAWKRWAAAIFTALDEQTVVVSGTDAAGLVLPQLATSLAQTRASRDEVLVRIEALVKTHPRFGLLTSMPAVGVRTAARILTEVVGKDFESAGHLASYAGLAPVTWRSGTSIRGDHSSRRGNKILKRALFLSAFAALKDPLSRAYYDKKRAEHKKHNQALIALARRRCNVLYAMLRDGAYFHAPEAATAA

SEQ ID NO: 106267 - protein, 433 aa, unidentified
MKVLYERVAGIDVHKDMVKVAIRSPGEKPWTRKTEILEFRTFYGVLREMARELRRRGVTHVVMEASGVYTEPVYYALCEQDFEQVAVINPAHAKALKGHKTDARDCARVAELFECGLLRGSYIPAPELKEVRDLTRYRMKTVQARTSEIQRLGKALESAGIKLGSVASSITGTASTAMIEALIDGERRGGVLADLAIGRMRAAGKLADLSMALAGRFTGHHALLCRLHLDRIAVFDDGVDGLDERIAGKAARWQREAGLLTSVPGFGDVVAQAWLGEIGPAPHLHFATHEKLASWVTLCPGNNISARKRKHGRTGDAGTYIKPMLVQAAWAAIRVRGRLQARYNRLVRRFGGEKNPGAKKKAITAIAHTLLKIAYQVLKSGTPYQEPGADFYTRRESPGQKQAWLERQMQKLHPGCAITITISPPEAALPPGG

SEQ ID NO: 106268 - protein, 319 aa, unidentified
MAQNDLVVAGIDVAKDKVDVCIRSLSLRRTFASTAEGRRELASWLRRQKVGKAVMEASGGYERQWAKALRDAKIEVRIVDPRRVRSFAQSAGRLAKNDTIDAEMIAWFAETFDEARGQAYDATREQLRQMVNARQALKDMQAKLETQGEHAMPAAVQRMHARILKAIAVELVKIDAAISAMIQATPHFTELAEIIESVPGIGCTTSAALIAAMPELGQANNKIVAALLGAAPYDDDSGRRRGERHIKGGRRRTRNVFYMACLGAATQHNPVLKAFYDRLVAKGKEKKVALIACMRKLICILNVMIARRQKWDANRCALN

SEQ ID NO: 106269 - protein, 401 aa, unidentified
MDLDTSRTPVGIDLAKDSIAVAVGDGDTEVVRAFPLSREGLADLIRFLEPYGPFPDAFVFGLEASGPYTEPLLSWLLQRNARVLQLNPLLISRFRRAQSLRRTKTDAIDARTILHFIAQLAPASMQPCELGDDLQTLAAEYEQITQQVARLKTQIRQQVHALFPELASSSSLFSQRILGLLLAFPSAHAIAKATPAQLEAACTDLPSGRRSRITAQSLYDSACASIGFSTRQREAVLQSKIRQLQHLVQESSIIRNALIRAVRAAHPTTWRLLLSIPGVGQISAALFLAQVRSLSRFPSHRQLSAFIGFDPTTYESGQFKGQGHISKRGSPHLRRTLYLMAQSVARYSNTFRLYMAQLRDRGKAYRVAVIACANKLLRVIMALNRSLTLFVDTPLQEVSHS

SEQ ID NO: 106270 - protein, 348 aa, unidentified
MEHYAGIDVSLECSSVCVVDVTGKIVRESKVASEPEALIGWFGLLGLGVARIGLEAGPLSQWLFARMREAGLAVELLETRHVRDAFKAMLVKSDRNDARGIAQLMRLGWFRPVHCKSMGAQETRAMLTARKLVQSKLRDIENSLRGILRGFGLKVGKTTQRSFAGRVRELAAGHPALQTIVQALLVVHAVLLREFNGFEKRVRIMARTHVQARLLMTTPAVGPIVALTYASAIDDPGRFKSSKAAGPHFGLTPRKHQSGETDRTGRISKIGDAAVREALYQAAHVMLTKAVKGCSELKSWAMRIARRAGMRKAKVALARKLAVILHRMLADGQAFNPAARAKTMTSAA

SEQ ID NO: 106271 - protein, 395 aa, unidentified
MFIVGIDIAKRSHEAIIIAEDGQVVRKAFSFRNNCTGYNLLLEQVRRLTLVKSQIVFAMESTAHYWLALYARLLKDGYAVMVLNPIQSHSLRELYIRKAKTDARDSLIIADLVRFGRCKASNVPQDKILALRELCRSRAYLVDMAADLKRKLIALLDRIFPEYESLFDSVFSKASIAVLRKYSTPQKVKNANLGKLTDLLMESSNGHFGEWKAHQLKEAACSSFGIDDSGGVYSTLLGMFLEQILSLTAQADSLEKQISVFFQEFNNPLTSIPGVGTVLAATILSEIGDITRFSSADKLLAYAGLDPSVKQSGEFKSNQNRMSKRGSPYLRRAIWLASTVAVHRDPMFQTYYEKKISEGLHYMNVIGHVSRKMTAVIFAVLRDGQPYQPILQSAG

SEQ ID NO: 106272 - protein, 424 aa, unidentified
MKDTAARKRKQVPEGYLVVGVDPHKKRHAAVVITQDFTTRAKFKVDNTGEGLAMMLDRARAEMVKSCCRGVMFAIETGGHYWRNIAYYLDERGIPFRFINQYTLKRRREGKDLNRRKNDYRDSEVAAQLLCTGEFVESVIPQGVYAELRTSHNAYQRLVKERTRITNLVKGLLDGLFPEFTRVFKDPGGLTALTVLSTCPIPGVIAGMTEDEFVATIEARHKGRRLMRKKLRTLHYSARGSIGIQAGARSVSFEIGFLVDKLELIRQQIRIVERILVKLVDETEEGKYLLSIRGLHYIAVAGLLAELGCFKLYRSSKQMIKMAGSNPTESESAGKKRSKTPMSKQGRPLLRYCAWTAVIPMLRFNEDFRAWAKQRRERPAHANPLNGREIVGAALNRLLRLAFAMVKNQAYYQDTRPALIPVAV

SEQ ID NO: 106273 - protein, 309 aa, unidentified
MFVGVDISKARFDVAVRPTGELFSQPNSPAGITEMVQHLQGLGPTLVVVEATGGLEQLLVIALAECGLPVVVVNARQVRDFARATGRLAKTDKLDAMVLALFAEAVRPQLRPLPDAAQRALGALVARRAQLVEMTVAERNRLHASHDPAVRGDIQSHLAFLEGRLSQMDRELLEAIVANSALKTRFDLMVSAPGVGKVLAFTLLSELPELGRLNRRQIAALVGVAPLNRDSGQLRGHRGIWGGRASVRRALYMAAVAALRWNPVVSRLYRRLVAAGKPAKVALVACMRKLLVILNAMLRSGTRWMPESR

SEQ ID NO: 106274 - protein, 406 aa, unidentified
MRYYIGVDWADREHAVCVQDESGARVTHRMVAHSAEGFADWGRWLDERRAEGIELWAAIERPDGRVVDFLLDHGIVVFPLNPKALDRARDRFRMSGAKSDPFDAQVAADFLRTDHPHLAPLRPSSEAAQELKAVTRDYARQVRQQTRVLNQLTVTLKEYYPRALEVCPDLKSRWAQEFLAAYPAPAALHGLSERQWTRWARGHRLSAARAAELWPVIAGAQLPVPAHVVRVKARRLAVLLEQLAVTGRAVVAYREAVEGFFARLPSARWAATLPGGRSGTTVPAVWAELGDAQGRWQTAQHLQGHAGMVPVTARSGKAHVVLFRFACNTHLRAAVQQLAFVSLRHSHWARAYYKGCRARGHAHQHAVRALGAKWLKIIFAMWTRSVPYDEQYHLASIGRHHVGQPA

SEQ ID NO: 106275 - protein, 396 aa, unidentified
MPEIWAGVDIGKEHHHCVVINTDGRRLLSRRVLNDETELLQLIDDVPAISTDVLWAVDLNHGGASLLIGLLLSHDQPMAHLTGLAVHRASATYRGEGKTDAKDAFVIADQARVRRDLGLLRPGDEIAVDLRTLTTRRLDVVFDRTRQINRLRAQLLEMFPALERSLDLVNKGPVLLLTGYQTPAAIRRAGPKRIETWLKNRKVRGAAALAKTAVEAAQAQQTALPGEKLAAAMVVRLAKGVMALDEEIAELDALIEARFREHPHAEVIRSLPGMGPKLGAEFIAATGGDMDAFGSADRLAGFAGLAPRPRDSGRVSGNLRRPRRYHRGLLRSMYLSAMVSITTCPASKAYYQRKRSEGKGHKQALLALARRRLNVLWAMIRDGQRYQDSPPVTAAA

SEQ ID NO: 106276 - protein, 346 aa, unidentified
MEHYVGLDVSLKLTAICIVDRTGKIKREGVVSSDPEAIAEFIKSHASHVERIGLETGPTATWLWTELRKLDLPVICIDARHAKAALKMQINKSDRNDAVGIARIMQCGWYKEVRVKDLDSHAIKALLVSRALLVKIKRDLENQIRGLLKNLGLVIGRAKMNVFLLRALQLTEGRPELTAAVAPLLKAREAIEQQIEGLDRKVLRLARNNAQVRRFMTAPGVGPITALCYLATIDDPTRFKKSSSVGAYAGLTARRYASGEVDWTGRISKCGDKMLRSYLYEAANVLLTRIAKWSALKAWGIRLAKRSGLRKAKVAVARKLAVILHRMWIEGTEFRWSSKEATNQPA

SEQ ID NO: 106277 - protein, 366 aa, unidentified
MKKPSTVRVNKNTIFKGHKLTIGLDLGDHWSCYCVLDEAGEILLEQKVAMTPEAMKQTFSKVPQSLIALETGTHSPWVSRLLTELGYKVIVAHAQKVQLITKSSRKDDRHDARTLARLARIDPELLGPVRHRSAQAQIHLTVIRARAELVRARTALVNAARGLVKSYGQRLPKCGTRQVSRELGAGLPAELREVLEPLLKEIESLNERIQEYEVRVEKIAKESYPHVELLKQVKGVGTQIALTYVLTLDDPQRFAKSREVGCFLGLRPGRRDSGESQPEMHISKEGDRYLRTMLVQGAHYILGPFGEDSDLRRWGLKLAARGGKSAKKRAVVAVARKLAVLLHKLWVSGEVYEPLRNSQKAIRAAA

SEQ ID NO: 106278 - protein, 347 aa, unidentified
MRYAGLDVHKRCTQICIQEEDGVLYERRILTERYRLIEEFGKRPKMRMLIEASTESEWVARCLEELGHEVIVGDPNYGPMYAQRSRRVKTDKRDAHALLEACKLGAYKAAHRCSDANKRVRARIAIRDSLVMTRTKFISLVRSFLRQEGIKPERKSSATFTRRVRLLGEVPASLAIEIAPMLDAIDVLSKKIRDADEQVEQLAQAETPQRLMSCPGVGAITAVAFLSQLDEPKRFKSAKQVRAYLGLVPREHSSGEKCSRGHITKQGGTRMRRLLVQAAWAVLRSRATLEAEPLRRWHAAVASRRGKYVAVVGLARRLAGILFALWRDGTTFQPPALPPPAPEATMA

SEQ ID NO: 106279 - protein, 343 aa, unidentified
MNYIGADVHISTIDFAVVGETGRVAKRHRIETSERGMVEFVKSIREPRQLIIEEGTLAGWIKDVMEIRGERVVVTDPKQNRWIGRAENKSDRIDAEKLAQLQRGGYTKEIEHLVGNRRRFRELVMYYHDTVKSVTRVKNKLKAKYRQNGIQCSGETVYDERHFPEWLEKLPQEETVRFQVEGLMQQLVFLEGQKSEILKRVKEIGKEAREISQFRKIAGIDWILACTISALVGDMHRFSSKRKFWKYVGLGIVQRGSGKSVSPSHLTGDYNRRLKWAFKTASWSAIASNDNPFRRQYLRLTMEKGIMEHRAVLTVARSIASTAYAIWKKGAAYDPVIREKIAA

SEQ ID NO: 106280 - protein, 389 aa, unidentified
MITIGIDIAKENHFACVLNNQSGELIIEPFTFKNNKEGFNKLASTIDPFKDYIVGFEDTGHYGDNLLFFLLNNNFKVGLINPITIKMKRKSKLKTAKNDKLDTMLIAQALIHKDEYRLVTMKTYHLRELKKLTRHHHDLKEDLNVYKNRLQKSIDLVFPEFNSLFGSKYGVTYMRLLERFRSAHTISKTDIRTLRKALEPVGNGRSVSFSAEELKELASNSIGEKSSSSEFQVKHLIGSIQMMEEQIVEVDAKIKELSDQLNSPITSIPGIGTFSGMSILSEYGDISRFDSAAKLISFAGVAPYVIESGQFEAARTYITKKGNPYLRKTLYQIALPVIRFNPVFYEYYTLKRNQGKSHRCALGHVVRKLLRVIYHLVSNDILFDETKLI

SEQ ID NO: 106281 - protein, 412 aa, unidentified
MQDILTCAMGLDVHRDIIVACLVKGAVDAEPEAETRTFSTLIPEMQKLRDWVIESECRNIAMESTGIYWQPIYEMLESCFDGEISILVVNARHMKNVPGRKTDMKDAQWIATLLRAGLLKGSFIPDKAFRELRHLTRYRKSVVHDITAQKNRIDKFLQSSGFRFTAFLSDTFGASGRNIIRHLIEHGSIDREALDKCLKTKTRNRIDEILVALNGSLSEHQRRFLNMVFRHLEDLEAHKHTVEDEITEEVLKHTDALNLLCSIPGIDVTAAATIIAEIGTDMSSFPDSQHICSWAGLSPGNNESAGKRKSVHINKGNPYLKSMLCEVAWIMASHRKLYLSGWYWKVKQRKGAKRATIALARKILSIIYTMLKTGTPYNEECFEQRRLRCERKRANRLVNELQKLGYVVVAPD

SEQ ID NO: 106282 - protein, 290 aa, unidentified [sequence omitted]

SEQ ID NO: 106283 - protein, 411 aa, unidentified
MAKRSKKRCEELPILHPDAAGIDVGASELFVAVSVGRDPQPVRSFPTFTRDLNALADWLQQCGIRSVAMESTSMYWIPVYQILESRGLEVCLVNAQHVKNVPGRKTDVSDCQWLQYLHSVGLLRATFRPPGFICAIRCLWRHRSSLIQMAAEHVLHMQKALDQMNLQIHRVLNDITGMSGLRILDAILAGERDPVTLARLCHGGVKSSEDTIAKSLEGDYRPEHLFALRQSLAAFHYYQQPVVEVDQEIQRQLGSLETATTAEPTVPKRTKASAYQRRRYEPRTFDLRSELYRIFGVDLTNVPGISAITAQTILCEIGTDVSRFRNASAFASWLGLCPENKISGGKVLYTKSRRVKSRVATALRMAANSLHHAKDYLGEFFRRITRKLGKPQAITATAHKLARIVVSPAQH

SEQ ID NO: 106284 - protein, 351 aa, unidentified
MWIIGVDYHPSVQQIAFVNTDTGECGERRLSHREGEAEKFYRELKAAGCRVRVGMEATGHGRWFERLLAELGFELWIGDPTKIKAKRVRKQKTDRLDAELLLQLLLEDRFPRVWVPSPENRDLRQLLWHRHRLVQMRTRIMNQLQAVAMNEGVRRKKALWSKSGRAQLESLPLAPWAARRRQDLLELLDRLNPTIEELSAAVEQEAKQRPEVLRLMTHPGVGPITALAFVLIIDSAERFACGKQIASYVGLIPCEDSSSDRRRLGHITKQGNSFLRFLLVEAAQTVVRRDPDWRRRYTHLAMRRDKRIAKVAMARKLAVHLYWMMRKEWNYEQSKKFGSYAGESDYSHGVQ

SEQ ID NO: 106285 - protein, 385 aa, unidentified
MSELNDLSRSLTSLEQDKTIIAVIEMSRSSWLVAGIVPGIERHPLKKLEPSEEELVRLLMRWRTEATKNGHTITRIAVAFEAGRDGFWLARWLRARDIETYVIHPTSVAVSREHRRAKTDRLDTGLLKRVFIGWLRGEPDHCHMAAIPTLAEEDAKRPNREREGLVRERTRIVNRMKSCLARFGIRNFKPTLRKAPERLATLATPEAVPLPPNTLLELRRDMARLRFVMDQIKEVEEARAQRLEQAPQEKTHAMVRLIARVIGVGIETADMLVHEILSRQLRDRRAVARYAGLTGAPDESGNKRREKGLAKAGNARVRRGMIQLAWRFLVFQKDSALARWYRARTESAGKKRKTMIVALARKLLIALWRLVTIGEVPAGVLLRAA

SEQ ID NO: 106286 - protein, 338 aa, unidentified
MSKITTIGLDLAKNVFHMVCCDRHGKIIKRKMLRRSGLLTWFANLPACLIGMESCASAHHWARALQAQGHRVKLIPAQHVKPFVRGNKNDYNDALAIAEAVTRPEMRFVSIKTPQQQDIQALHRLRERRLRDRTALCNQLRGLIGEYGIVFSRGVNVLRKRIPEILEDSENGLSDLFRSLLSQGYQQLTELDAHIDAYTEALDAHSKRDDACVRLQKIPGYGPIISSAFYSAVGNGEAYRRGRDVSASLGLVPRQHSSGDKQVLLGISKRGDRYLRSLLIHGARSVVIQAANKEDALSRWINKTRAARGFNKAVVALANKLARIGWAVLANNTVYQAR

SEQ ID NO: 106287 - protein, 331 aa, unidentified
MTNVIGIDVSKATLDCAYLRNKEQKKAKRKSCINQGRGFNSVAIWSKKITGLAIQELSFVIEPTGIYHESLVNYLYELGATVLLVNPGKVRKFAEGIGFLSKNDIIDAEVLTRYGYMATKLTVWKPVPKDVRDLQSLLKRLNTLEKELRREKNRQEKMQECLEPHPLEKRSIKKSIKRLGEEIKQFKEHIRHHIKETKSLRKGYDLLLTIPGIGEKTAWVVLVILRAKDFRSAPEVASYIGLNPIEKRSGKSEYRKPRLSKAGNSDLRKSLYFPAIVAIRKNPDVKALHDRLRGSGKTEMCAIGAAMRKLIHICFGVLKHQQPYQVQSQSS

SEQ ID NO: 106288 - protein, 377 aa, unidentified
MASTNNGMVAPPLNGIKVPQWSVVHTTQQKGATEMKITTIGIDLAKTVFQVHGVDENGKKVVGKALRRNQVLSYFAQRESCLIGMEACGSAHYWARQLSALGHTVKLMAPQFVRPYVKSNKNDAADAEAICEAVRRPNMRFVPAKDSEQQAVLALHRARQGFVKARTAQANQIRGLLAEYGIVLPQGIGQIARRLPEILEDGENTLPMAFRQLLHRLGDHLKELDRQTTELGAEIQGWHRQNEASQRLADIPGVGPITASALVASVGDARNFKNGRQLAAWLGLVPRQHSSGGKPTLLGISKRGDSYLRTLLIHGARAVIRVAEGKERTPPWLQRLLARRHKNVAAVALANRNARIVWALLAHGRGFQADYVPAMGA

SEQ ID NO: 106289 - protein, 340 aa, unidentified
MKFVGVDLHKHVIKLCVMVVLRGKRSVLSRRSFACSDTASIRDFFEGLGAFQVVVEATSAYEWFFLLIEDLANRLVLAHPKKLRVIAESTHKTDKIDAEVLATFLALDMIPEAYRPSPRVQQHRVLVRHRHWLQGRITAIKCKIRHKAAYYNADIADMFQRRGQSHLASVAMKAADRFEVDALLEQMRLLADALNAADKQLCAFAESATAAEREAREVLASIPQIGPVTIDVVLSELGDWRRFRSSKAAVAYAGLDPGVRQSAKKRLDLHITKEGSRILRWALIEAAWRLVARLPRWRHLFDGLHANTGSKKKAIVGVARHLLCVMFAMLQAGKAYCYAA

SEQ ID NO: 106290 - protein, 339 aa, unidentified
MQPPPIGVDIAKSVFQVHYVDPDTGEIVNRTLKRARFLEYFANRKPCLVGMEACGGAHHWARALTGMGHQVKLMPSRFVKAFNIGNKNDAADARAIWLAVQQPCKAVAVKTEAQQAVLSLHRMRQQLVKFRTAQVNNLRGLLTEYGEVMGAGRASLNRAIPGVLARLVDRLPAVMIDSLREQWMNLTELDKRIREIEHRLAQWMKQEPAVKAIAEIPGVGLLTATAAVATMGNASVFRSGREFAAWIGLVPRQTGSGGKVTLHGISKRGDTYLRTLLVHGARSVLRVKKDPDAWCERLQSRRPLNVAIVAQANKTARTIWAILARGVAYQRDHVSVRPA

SEQ ID NO: 106291 - protein, 372 aa, unidentified
MQSTTKFVGLDVSKEKISVAIADASGETPRYYGSIPHTPAALRKLIKELGPAETLSFCYEAGPTGYETYRWITSMGAHCVVIAPSLIPKRPGDHVKTDRRDAEQLARLFRAGELTPVYVPEREDEALRELVRAREAAKEDTHRARQRILKFLLRHHIEPPATIKRRWTRKYRSWLEQLTFPYEPMQVAFDEMLHTLNEIEQRMGRLEKALVQQATVGSKATLIRVLQSLRGIGLLTAVTLAAEIGSFTRFRSPAQLMAYLGLVPRESSTGLSTRRGSMTKAGNGRLRRSLVESAWSYRHRPAVKGDLAKRLDGMPADIQLLSWKAQERLHYKYRHLIFGKNKHKNVAVGAVARELTGFIWAVARTVEQPVAN

SEQ ID NO: 106292 - protein, 383 aa, unidentified
MTEIRRLVIGGVDAHTDCHHAAALDERGRLLGDAAFATSVEGYHDLLAWLESFGQVGRVGVESTGSYAAGLGRFLAARGVAVVEVNQPHAHTRRRRGKSDPLDAEAAARKVLAGEATAIPKHTGGIVESIRQLRVAREGAVKANTAALNQLYELVITAPDEFRQQLAGRKTSRGKASLCLRLRPDRARLHEPLQAAKLALRTVAERVRELERQIGVLDRYLAQLVATAAPRTTSLLGVSSQHAGQLLVTAGQNIERLANDGSFARLCGASPIPASSGRTSRHRLNRGGDRKANRALHLIAVCRLRYCARTRAYANRRTAEGLTKPEIIRCLKRYIARELYHTLRADLADLGPPTMPPQRTVTINCGAGPIGTTRTRRRRRTRT

SEQ ID NO: 106293 - protein, 349 aa, unidentified
MHRRQITYDWVDRATGETRRGRIAPATREGLRSWLGELPLGDGHVAVEGCTGWRFVVEELGAAGVTAHLAEPADTATLRGRKRRAKTDRADARHLRELLEQDRLPASWIAPAHILDLRELVRLRKTLIDQRTQWKQRIHAVLFHHGLPKPEQGLGTQASRAWLAGVWLPPPSRLLVDVGVAEIDTATHRLAPICGWLRAYARRQPGCRALMRELFGVGPLCAPTILAELGDARRFAGGDAVVRYAGLDVTVYASYGKRSPGHLARQGPEVLRWALFEAAKSSARRTAPDHAYYAQVKDRLTANRATLSTARKLARHARHVLVELGDQALAPVCPELLPPLLAVPLPEAA

SEQ ID NO: 106294 - protein, 338 aa, unidentified
MNTVTLLGIDIGKNTFHLHGQDARGNQLLRKKLNRSQLLPYLAQLPNCKIAMESCGGSQWLARQIEGLGHRVQLIAAQHVKTYVTGNKNDFIDAEAICEAASRPRTRSVPVKTLEQQILSTEHKLRKSWVDNRTGIINQVHGFLLEFGIIFPVGYAALEQVPALMENHELPIRLRNAVERMLLDIQRLTRDIKAIDVEIKLQLSEDAAGMRLLSIPGIGPLIASAIVADVGDASTYKSSRDFAASLGLVPRQYSTGGKTILLGISKRGDKYLRCLLVQGTHALMIRIDKRNDALGACVRKLLASKPPNKVACALANKMARIVWAVLARGGSYNVQQMV

SEQ ID NO: 106295 - protein, 339 aa, unidentified
MNTSVVGLDIAKHIFHLVTQGTDGKMIKKKLKRSELLTFFANYPASIIGMEACGSAHHWARELTRLGHEVILLNARYVKSFVVGNKNDYNDATAIFDAVARPNKRVVAVKTVAQQDIQMVHSIRKELVDKRTALVNQTRGLLGERGIVINQGITQLRQQLPLILEDAENGLTDLSRELFAEQNEKLKALDDDIKAQDQRINRLCNANELSKRFLDVPGVGPLTATMVAADIGDGGKGYQSSRDYAASIGVVPRQHSSGDKQIYLGISKRGNRYLRTLLIHGARAVLKNCAHKTDKLSLWLQALIERRGFNKAAVALANKNARILWAMASNGKDYETLTA

SEQ ID NO: 106296 - protein, 413 aa, unidentified
MERLIERCCGLDVHKATVSACVRVTQQPGSKVEQEVRTFATTTADLLALRDWLIEQRVTHAAMEATGVYWKPVYYVLESDFELLLVNPAHFKQVPGRKTDVADCAWLAQLLQYGLLRASFVPPAPIRELRDLTRYRKSLTEERSRAANRLHKVLQDAGIKLSSVATDTLGVSGRSMLTALAAGTTDPALLAELARGKLRKKLPELRQALAGRFGSHHRFMVSRLLADIDYLEEASTELSKRIEELLAPFAATVERLITIPGVQRRTAEVVVAEIGADMSRFPSAAHLSSWAGMCPGNHESAGKRRSGKTRRGNRWLRTALVEAGSAAGRTKHTALGARYRRLRAHVGHQRAVLAVGRNVLEIAYHLMAEATTYRELGTDYFDRYRAERLKRRSLDQLRRLGYQVTLTQIPTAA

SEQ ID NO: 106297 - protein, 404 aa, unidentified
MAVHLAPVTSSTIVVAVDVGKTSAMLSAADSARQRVVGPVEFAMTRTGLVRVVHRVEAVIPPGAQVKVGIEAAGHYHRPLLDYRWPSGWEVLEFNPAHVAEQRRVAGRRRVKTDAMGLEAIHEVGWAGRGRLITESEECIGGLAAWASHRSRRVTTRTATKNQLLGQLDRAFPGLTRALPDVLGTKVGRLIAAEFADPARLSALGVNRLIRFAALRDIQLRRPVAERLVTAAQDALPTRDAAVARRVLATDVGLLADLDTQISAAEAELVRLVPLSRFATLTSVPGWGVVRVSNYAAALGDPGRWPGPRQIYRASGLSPMQYESAGKRRDGKISREGSVALRRALIDLGIGLWLSEPAAKAYAGQLKSRGKHGGVIGCALAHRATRIAYALVRDHASYDSSRWA

SEQ ID NO: 106298 - protein, 361 aa, unidentified
MKAQASQLDLSGQDIYVGLDVHLTSWTVSIYTAHLEHKTFRQDPRPEALIRYLKRNFPDAHYHGVYEAGYSGFWIHDALTAGGIDMIVINPADVPTTDKERSVKHDPVDARKLARALRAGLLRPIYVPSREAIEDRQLVRTRSRLIGKQTRVKNQIKALVRHFGIGIPPEFERRHWSREFMAWLGSLTTPGEGMQYQSGAVALALLLDELHGLRSQVLSATRAIRRLARTERYRRRVEHLITLKGIGVVSAMILLTELVDIDRFRSLDHLASFVGLVPGKRASGESDPTQHLTHRRSSPLRYILIESAWVAARKDPALNRDFERLAGRMKKTDAIIRIARKQLRRIRFVLRNEMPYVPLPA

SEQ ID NO: 106299 - protein, 367 aa, unidentified
MKKHSSIDQSLSSTDLSACTTLAVDLAKQVFQVAGEDVLGQVRFEQRIKSREAFYEFLQKLPPHVVVLMETGPGAQAWARQLQDQGNSARILPAGLVAKHRSGPKNDRNDALAILRAGRDEKICAVPVKSVAALAMQALHRARQGYVRRRTAVSNQMRGLLLEHGVALAQGDVAISQKIPRVLEDATQPVPALLRELIDELLAEWRHLGERISVLTGRLEVAANADMTAKRLMTVRGIGPVTATALVAKETKPERFPNARKFAAYFGMVPDQHSSGETVRLGDMTKRGDAYLRSLMIQGAHAVLQQLRPDSQQPDDRRLLHWMSRLGRKEAAIRLANRNLRIVWVLLQNDQTYRRHAGDGQQATMSH

SEQ ID NO: 106300 - protein, 371 aa, unidentified
MSGLRLSRLFRRSFAPDRRSFSCDKPDSIMDRLSPVTRICKVGFTMENELHFIGIDVAKAKLDVDILRPDGRHRCKKFDNTLSGHEALVRWLRGHDVNRAHVCMESTSTYMEDAAAHLSDAGYTVSIINPALSKAFAQSEGLRSKTDKVDARMLAHFCREKRPSAWEAPHPTERALKALVLRHQALTEMQTQEKNRRETAPEVQLASIDILLGCLSAELARIEKQIKDLTDNDPDMKRRRKLLNSIPGIGEKTAAVLLAYTGLRLKFGTARQFAAYAGLTPVQHESGSSVMRASRMSKAGPVQLRKALYMPALSALYHTAWGKAFRKRLEESGKRAKVIIGAMMRKLAQVAYGVLKSGKAFDASQHELLIA

SEQ ID NO: 106301 - protein, 349 aa, unidentified
MEYIGVDHHKRFSYVAMMDAKGEVVKEGRINNSREAIRKFLNGSKGPKRAVLEAGRNWTVMHDWLEEEIEEVKLAHPKKVKAIAEAKVKTDKIDAKILAHLLRADLVPEAYVAKKETRIIKNILRQRMFFVRVSTMVKNRIHNIIDRYPEVSNEIDMSDLFGSQGLEWLKEVKLPKEDRRLLDEELELFAYIRKKIKGSDVWVNQIGTKDARVKRLMTIPGIGKFFALLIAVEIDDIKRFRTKDKLASYCGLIPSVHMSADKTYYGKIIKSGNKYLRWAFIEAVWPAIRRDLPLRMLYQKIKAKKKANMAKVAVARRLSTIAYRVLSEDRDYQKDLPGRPHNLITVANI

SEQ ID NO: 106302 - protein, 385 aa, unidentified
MKKNSITKQKVTKPRNRKASKARQTQRGNAAGVAKQVVGLDLGDKSSRYCVLDSEGSVQLERGVATTAQGLSQAFAKMPRSRIALEVGTHSPWVSRLLEKLGHEVIVANARRVRLISESSRKDDRIDARTLARLARVDAALLYPIRHRGEQAQQHLAMIRARAELVDQRTALVNTARGLTKPFGERIGKCDADQMGVEKIHKLAPGIQAFLQPLLVVVETMTEQIQKYDQELAKIARKDYPETALLEQITGVGPLIALTFLLTLDDKERFRNSRDVGCFLGLRPKRRESGQSQPQLGITKEGDVYLRRLLVQGAHCILSKRGPDTDLKRWGLKLAGSGDKRAKKRAVVAVARKLAVLLHHLWVSGEVYEPLRHSQAGAAESAPAA

SEQ ID NO: 106303 - protein, 403 aa, unidentified
MSNYFAGLDWASKAHALCVVDERGGVVDRFEIGHDALGLGELQRRLRRLDSPPIAIERPSGLLVDTLVEAGLTVVPIHPNAVKASRPRYRSHGGKSDASDAYVLADLLRTDGHRFKALTPQGDEIKALQALVRGRDDLVATRVQLANQLRTLLESFWPGAAVVFADIDSPIALAFVERYPTPESARTLGPKRMAAFCAQHAYCGRRSTVDLLARLHQAPTAVCAELEMEAKGELARSLARTLKCLVEQIRLLSSRIEHHVASLEDGKIIMSFPRAGRICAAQLLAELGSVRERFLSDEHLAAEAGVAPVTYASGKSKAVVFRWACNHRLRAALTCLADNSRHANDWAAHVYAKAKARGCDHPHAVRILARAWLRVIWRAWTDRKTYDPTQHRAAQLLLKTARA

SEQ ID NO: 106304 - protein, 418 aa, unidentified
MFKIFRKNCCGLDVHKTWIYACIGITDANGRTEYQQARFSAFSKGLRELSNWLAKHSCTEVCMESSGKYWIPVFNILEKTCFVTLAHPKYTKPQKGNKTDRKDAKFICDLFMCDMIRPSFIPPPEIRHLRDLMRYRFKLTNMLTSEKNRAQNCLTVSNLKLDDVFSDVFGKSSLSIINYILNHPGEIFDVSPFVDGRCKTPIEEIQAAVDGAISREQAVKLRECLDHIRELEAHKAQLEREIQLLVEPFSDILDLLRTIPGLDANPMTAIAVLSEIGGDISVFPTAKNLASWAGCCPRNDQSGRKTKSTRISRAGCYLKPLLVQVANALLRSKKHPEFVERYRRIKVRRGHKKAIIAVCRMLLTAIWSMLSKLVPYTPDGFLQNDRSADESKVLTKSQALDLLKKRGYVIKDDEQFSV

SEQ ID NO: 106305 - protein, 336 aa, unidentified
MRFIGVDLHTTQITVCYLKAEDGFEIKKYRLCELDRFVSELEATDEIAVEATCNTRWFAEQVKEAVSRVVLVNPREFEVVKNSVRKTDKNDALNLARFLRADLLPEVRAKREEAEKVQSLVNTRTKLVRLKTSLINKIHALFVSNGRKLKKTSLSSEKGLDQVLQAEWSAIERVELEIIIEQIRSLKVSIKKSDKAIEEESSKLKGFESLKSISGIGSLSAGILLSVIGNVKDFATSDKLASYFGIVPRVANSNETVKTGRITKRGSKTGRTTLVQCSLSAIKKSEYLKKYYEQVKARRGHGKAKIALARKYLGIIYNTLTNGWVFADFNNFELAE

SEQ ID NO: 106306 - protein, 313 aa, unidentified
MSKTFVGVDVSKEWFDVAVTPSRSSWRVPYTQEALTEFVRQLLPLNVALVVTEACGRLERPLARALEQAHIPVAVVNPRHIRDFAKSVGQLAKTDDLDARVLALYAATISPQPRPLPAVDEESLQSLLARRRQLVGMLSAEKNRLRTAAPKLRPGIERHLVWLQSEIDGLSDEIGQRQENHPLWRETKRILEHVPGVGSTTSAMLTAYLPELGHLDRKKIAALVGVAPFNRDSSQRQGTRSVWGGRREVRAALYMCTMASIRWNPVIRDFYAQLRGRGKRPKVALVACMRKLLTILNAMVRDGTDWECAPSSP

SEQ ID NO: 106307 - protein, 337 aa, unidentified
MELYCGIDLHSNNHYLTLIDENDRRLIEKRLPNDLSVTLKTLEPYRANLTGIAVESTFNWYWIVDGLMDAGYCVKLVNTAKARLYEGLKHSDDRHDAFWLAQQMRLGILPTGYIYPKAERGVRDLLRVRRRLVRQRTTHVLTTQSTFWRHTAVKLPCKVIVGEKKAPWPQLPNAYDELGVAAHRAAIELLTKQIERIERTVLKALKPRADYQMLRTVNGIGEVIAWTIVLETGDLKRFKNVGHFASYARCVDSKRTSNQKKKGEGNVKNGNPYLAWAFFEAAHFATQFLPAARRFYEKKAAQRNPILAMKALSHKLARACYYVMRDHVPFDPARLFG

SEQ ID NO: 106308 - protein, 483 aa, unidentified
MLYRNIGVDLGVTAKHKAQVLDEQGKKVVPNFSFSTSKDDLDALCQQALSGTNQGTKLRFICEPTEMSWFPFAIYAKTNNHDIVRVKSHKGHDLRKYFSRHKKNDKLDASVLAVMPMIDEKATEQIYLSDAKTFSLERRNRQKEKITNEIAAIKNRLSSLYHWVMPGLLDCFGDSFDSRAREFYRHFSNPFRAKESGIDGIRQILEPAGRQKMKPDLPEKLYSIACRSCELYAKASCYVDFTEIQDEVHIELQLLEAQEEALAQIKDRVESLYEKVHPSKNIESLKGISENLGPSFIGIIGNPDRFSSQSKLRCFAGMIPKQDDSGETNKKGLPMTQEGPSRFRRDLFLATDVARQWDPQLAKIYYEEMVNKGHCHTQAICATIPNLLNRILCVLKENRTYQLRNIEGNPISATQARQIIKEQFTVPEEIRQRTRSKINKNKKEERIRNLFKRQSSEMTPQNSHNIPPKDMLQKFEKYFNNAS

SEQ ID NO: 106309 - protein, 347 aa, unidentified
MSATMIGLDTAKSVFQLHGIDAAGKVQLRRKLRRSEVIPLFERQPRCAVVMEACAAAHHWARVLSGLGHEVKLIAPEAVRPFVKKGKKSDAVDAAAICAAASRPDAKLVAAKGLEQQGVLALHSARSLLVEQRTMLADALRGLAAEFGLIAPKGMNKLEHLMALVEADEAFPEQARGVFTGLLEQCRATVDRIAALEAEIVAHARQDDTARRLATVPGIGPITASLIAATVGGNIGAFRSARHFAAWLGLVPRQHSTGGKTRLGRITKAGNREIRTLLVLGATSMVHRAAQWNSAAGAWVRELLERRPVRLVTVALANKMARIAWALMARNDVYRPTGRSLPAQAAG

SEQ ID NO: 106310 - protein, 341 aa, unidentified
MKNKSFIGIDISKNVIDASIFTEGASIKDFPHAVFNNSRKGFGGMVTWLKKNHVVLSNCLFGMEFTGSYSMELEKFLTARKYQFCMLSTHTVKHYPMGPKDKNDKIDSAKIADFLYRYNGTECVKPYKMPDKTMQRLKTLMNERKFLVEQRTCFMNRRQLCTTKEDTQLYDGYIKKLSRDIENIELEEQKLLATDESLLTTYRNLLTIPGIGSVNAINVIVITRNFTAFETARQYASYVGVAPHFRTSGTSVRWRPRPSARSDGQAKADLSMAALIAVQYDAELQSFYNRKLGGKQDSDTKRKALNAVKFKLILRMFAIGKQNRKWKTLDSMSNNEILAIS

SEQ ID NO: 106311 - protein, 295 aa, unidentified
MDNDATGWDELIAKLKDAGVDLVVIEATGGYERGLVCALQGADIVVARVNPRQARDFAKSMGVLAKTDAVDARTLRDFADVLACHKDRAKYITAPVDAQRLELATLMVRRRQLVDMRVAEGNRLELASPVAARSIHSVLKTLDKQIAGIDQNVDDHLGRHFGKQRELLDSVKGVGAVTILTLTAALPELGTLGRRQISKLVGVAPLADDSGKRRGPRRIWGGRSEVRSVVYMATMSAINYNPVIKVFHSRLIAAGKPKKVAIVACMRKLLTILNAILRDQARWDAAKHVQTPKTA

SEQ ID NO: 106312 - protein, 403 aa, unidentified
MNSVGIDISKGRSTVAVMRPFGEVVISPFEVRHTDSELSELARQLKSLDGETRVVMEATGNYHTPVAKLLHDAGLYVSVVNAKLVHGYGNNDLRRVKTDRKDAVKLANYGLDRWLTLPRYVPEEDTRLLLKNCYRQYRQYSKVQTVLKNNLISLLDTVFPNVNRLFSSPIRGDGSEKWVDFVAEFWHCRCVSGKSERAFTNKYQRWCRKHGYNFSEAKAHTIHAEASGYIGVMPKSETTKLLVEQAVAQLRATSAALTALKREMLTLAAQLPEYSVVMGMFGVGPTLGPQLIAEIGDVRRFYSKKALVAYAGLDAPPNDSGDVTGKHKSMSKIGASSLRRTLFLVMSVYLQNAPLDEPVYQFMDKKRAEGKPYRVYMMASANKFLRIYYATVKAYLESLEHTA

SEQ ID NO: 106313 - protein, 320 aa, unidentified
MSLVLQSFLPFPDSCLGTSPHQQGRDPKMIEQCYGGIDVSQERLDVMVLPQGKGFSVANDKAGWSRLIERLAGLHLAAIGLEPSGGYERGLIRALLAAGLSVRRINPNRLRQFARARGALAKNDRLDACLIAEYVAIMPTRVVQRDAAAERVAEVVTMRRQLCDEHVAVENQATHLEDAMLRRLAKRRLARLKADLLLLDKRLAEMIAADPDLACRYERLTSMPGVGPVLAFTLLAMLPELGRISRKQIAALVGLAPYDFDSGKLRGHRSIYGGRMPVRNVLYMAALSACRYNPALKPSVIASPRRARSPRSSSSPSCAR

SEQ ID NO: 106314 - protein, 369 aa, unidentified
MGDHITYVGLDVHKQGIVVAVAEDGLRGEVREYGRIANTPAALDRLARKLSREGVKLRFCYEAGPCGYGIQRHLSARGHECVVVAPSLIPKRAGDRVKTDRRDAASLARLHRAGELTAVWVPDAGHEAMRDLVRARLDAVHALRRARQQLSGFLLRQGCHYGRPAWTKLHRRWLAELKFEHAVHHIVLEDYIAAVEAAQARRDRLTAQIEAMLADWTLAPVVAALQTMRGMALVNAATLIAELGDLSRFTNPRQLMAYLGLVPSEHSSGASVKRGGLTKAGNSAARRLLIEAAWCYRFPARVSRELLLRQEEQPKPIREIAWKAQLRLCARYRKLARTGKPANVVTAAIARELAGFIWAIARRVPPTAG

SEQ ID NO: 106315 - protein, 433 aa, unidentified
MLKLNYMSTLFVGIDVSSKTNAVYAMDFEENKYISSSFGNNQPGADKLVNMIAECMHKHKNLNTILIVLESTSVYSVHISNFLSTSEVLMPYKPYVFCVNPKATSNYRKSYIGMEKTDPTDAYLIADFGRVGRTKKLEPWRGGQFIALKRLTRHRMHLSECITREKTYMVSNLYLKFSELQLLEGDDKPFGSLYGATSSAVLTEFLSPQEIIDMPEEELLTFLAGKSRNRISDLSKTSELLRKAARDSYRLDKCMYEPLSISLASSFNCIHAYQKEIKLIEQAIEKCINGMNPNALLILQSIPGIGPIWASGILSEIGDITVFHSSDALAKYAGLYWPKGDSGDFTSEDNKMSKAGNPYLRCYLGEAANSVRKHIPEYADFYARKYAEVTKHQHKRALALTSRKFVRLVFGLLAKNQLYTGEKLDAEYNIKSN

SEQ ID NO: 106316 - protein, 476 aa, unidentified
MGKCKRNSTAEVKQRKPLRAAKARISAPETTVRAQYRSAIGIDVHLNLLVCNFQTQLDDHREIRESREFYADRTSLDEFAQWCSEKKPEIILMESTGVLWYSPYEALEHVGFQNSQLALINARDAKAAAGRKTDYKDAARLSDLARAGHFSRSFVPPKAFRIQRLLARDIQKNKADLSRCSNRYQKMLNSTGCRASTVFSDVRGKAANAILEAKISNAPNLEDIIKKNCRRLRATPEEIHSALNFVIDSAISEQLAAIRKKIAQLEGYDADAFSRLAELQKPYAKDIKFLMSISGIQERSARLIYAELGPNLLEFFPDSEHFCSWLGICSGSNTSAGRQSSGKCPKGNKWLRRTLIECVNGLSLSKNFAGMDKFFAHKLVRGRRRAIVELAHFLARVIFSVLTHQKPYEERTTTAVRDVLVKRFNRVARQLSGRTDLVVQGDCLVEKATGAILAKISEFSPKPRSEPNVIEVIEPS

SEQ ID NO: 106317 - protein, 393 aa, unidentified
MVCVGIDVAKDKHDCFIISSEGEILADVFTIPNNAEGFDTLLQAIRRSTRPEDKIKVGLEATGHYSYNILGFLLDKGLPTYVINPLHTNLYRKSLSLRKIKTDRVDARTIAAMLMSDVDLKSYTDTVYHNEELKSLTRYRFDKVRERAKLKQSVSRLVTILFPELEKLVSSLHSASVYALLSEFPGAKQISSTHMTHLKAVLKNASQGRYGQEMAETIRNAARSSVGSVMPAKSLELQHTIRLIRELDAEIEDIETAIQAIVDEMQSPITTIPGMGVRMGAVILAEIGDFSRFDSPDKILAYAGMSPSTYQSGQLSLSGAYSHMEKRGSRYLRYALYNATKHVCHWDPTFAAYLAKKRAEGKHYNVALSHAAKKLVRLIFAMEKSQRPYCAAA

SEQ ID NO: 106318 - protein, 435 aa, unidentified
MLSINPIPIMTTITDFAATIGLDWADQKHDLWLRSADSSKTEHITLNQTPEAIHDWVAKLRERFGNRPVAIALETSRGPVISAFLAYDFIVLFPINPKALKNYRAAFSVSGAKDDRTDAMLLEEYVRLHRDKLRALEPDTELTRKLAGLCENRRHLVDERSRIVEKLHSVLKTYYPLAESLMGAQLTTPMGADFLTRWPDLETLKKASLKTLRAFFYQHNSRSSKKIEARLEALAQTKALTTDQAIIAPARFLVLGLAAMLKPLHRTIAVLDEEIKQAMDQHPDAAIFRSLPGAGPALAPRLLVAFGTDRQRFKSAAEVAQFYGLAPVVRQSGNCQTVHMRDRCPKFGRQTFHENGGCAIKEELWAHCYYDDHKERHDGKHHRACRALAFKLIRIYFACWKHRQPYDPARYLRALEKHGSPLYKQVQLTETEKSE

SEQ ID NO: 106319 - protein, 339 aa, unidentified
MDKLYGGIDLHANNSVVVVLDEADQVHYQKRLPNDLAAIIQQLAPFQPHLQGLVVESTYNWYWLVDGLMAAGYRVHLANPAAMQQYAGLKYTNDHSDARWLAHVLRLGLLPTGYIYPKEERAVRDLLRKRSQLVRQKTANLLSIQNLLTRNTGQALRSNQLKQLTPATVSTLVALPEHALALQVTVAVMQHLAEQITQVERAVHARVKLRPAFQSLLTVPGIGRTLALTIMLETGEIGRFPTVGQFASYCRCVGSTKLSNGKRKGQGNTKNGNKYLAWAFVEAAHFAMRHEPQIRQFYQRKQGKTNVFVALKAVAHKLARACYYIMRDAVPFDITRAFV

SEQ ID NO: 106320 - protein, 404 aa, unidentified
MIFVGIDWSETHHDACIVDVDGRVLTKGRVPEGVDGVRKLHEMVAAHVEDPSQVVVGIELDRGLLVGALVAAGYTVHAINPLSVDRYRDRHRTSGAKSDPGDAKVLADLVRTDRHLHRRVAGDTEFAEAVKVLARAHQGLIWSRQRQLNQLRNALREFYPAALEAFGTDLASTDALAVLEVAPTPAEGRSLSSPRIAAALKRGGRRRRIIERADEVKSALRSSQLEAPALLARAYGDVVRSTVRIVAEMTAQIEQLAGELEASFEEHPDAEILRSLPGLGSVLGARVLAEFGDDPDRYADPKARKNYAGTSPITKASGRSKVVLARFARNRRLADALEMWAFCSLSCSDGARRYYDSHRARGNTHRRALRALANRWVGILHGCLRHRDRYSEQRAWLAPADAAA

SEQ ID NO: 106321 - protein, 345 aa, unidentified
MKQYVGLDVSQDQTSICVVDESGRVLWQGKCASTPEAIAATLGSRAPQAERIGLESGPLSIWLCHGLIALGLPVVCLDARHAKAALKLQLNKSDANDARGLAQIVRTGWYREVAVKSLDGQLVRALITARAQLVAQRVDLGNQIRGLLKPFGLLAGKGEGKTFAEKVRSLVPDGPLHDVTEALLRAWEAINKEVATLSRRLVTEARQDDTVCRLMTAPGVGVLVALTYVSTIGDPARFPHSASVGAYVGLTPRRFQSGETDYTGKISRCGDRLTRTYLYEAAGIILNRVSRWSTLKAWGTRLARKIGHKKATVAVARKLAVILHRMWRDGTEFRWSNKEAAVTAP

SEQ ID NO: 106322 - protein, 421 aa, unidentified
MQIVYPRCAAIDVAKKEIAVCVRTPGEEPGGRRSQVRKYKTFYGVLKQMCAWLAERGVTHVAMESTGIYSNPVFHALMESGDFEVIKCNAAHVKNVPGRKTDAADCTWLAELLECGLLRGSYVPAQKIAEARDLTRYRAKLVGSRTSEIQRLQKTLEDAGIKLDSVASDVMGLSSRDMIEALIDGERRGSVLAGLARGRLRAKIPDLSLALAGRFNDHHALMCRLHLRHIDELTELIDTVDKQTGALMVPFAAERDLLMTIPGIGRLTAEVVISEIGTDMSFFPDADHLASWAGLAPANNESGGRRRPAGTRQGNQHLATTLIEAAWACSRTHTRLAAQYHRLVRRFGGYRSIRARKKAAVAVAHTLILIIYNVLDQHVPYHELGEDFYTRRQDPEHYKDKLIARLATLGYTVTVQPAPAA

SEQ ID NO: 106323 - protein, 374 aa, unidentified
MNRTRTVAGLDVHKDSIYLCIMGYDQAIIWENTYGVLTPDLRQMHHDMRAHGVTEAAMESTAVYWVPVWNELCESMELRLVNPYFIKQLPGRKSDVKDARWIAECLLKNLIKGSFVPEPIVQDMRKLNRRIMDLCEDTTYNSNKLDAALQRCGFRLSNYVATTKSKSYRSVLKAIIDGQTDPDELLRLVHGRILNKHGRERVKAALTGSFSETDLIVLRQLKETLDLIEEQTAYCQQELVRLCKEHYPKPYERLQTIPGVKERAATAIIAETGVDMKMFATAASLVGWCGLKPRNDVSNGRFKSRKVTHGNRYPQTNIDRNCMGGITNPKLFLLSFQLPPNYRQEKEQNEDPGGHRPENTRCRMAHALQRRGFH

SEQ ID NO: 106324 - protein, 346 aa, unidentified
MKKIAYLGMDLHAKNFTLGHMDNDGYFRGNMEFPTSESNIIHGLKSIKAKEKYLAIEAGTLTYWAAQVANPFVSQVIVCDPRENALIYKSPYKKDKVDTRKLCRLLRLGELHHVYQPENDDRAIFKTAAQHYIDLRNQLIRFKLKIKAMYRHWGVINVFTSTVYSNSGRDKYLKQIKHLPIRSQLSRLYYLMDQTDAIRKSALKSMKQLGRKYAEIRQFMKIPGIADINAHIFDAFIQTPHRFAKKNRLWKYCRLSVTDRSSDGKPLGFQRIDPSGIGELKALSYRAFMASMKSDNEVKRFYLDSLQRTHNQKHARLNTQRKILAVMYSIWRKGAAYQPELFAGSV

SEQ ID NO: 106325 - protein, 360 aa, unidentified
MRTKVNENLFKDQPFYVGIDDHKKNWTVTILSETFEHKTMSQNPDSELLASYLKRNFPGAIYHAVYEAGFSGFNTCRKLNDLGIKCIVVHPADVPTTQKEKEQKTDKADSRKLARSLRSDEFEAIHVPDQELEADRSLVRQRVRVAKDLSRTKNRVKSLLFQFGIHIPDRFTSSQTRYWSKPYLNWLMELPIEKKSLKKTLDNYILIGKTQRENLLLVTRQIRELSQTDNYKNNYQLLLSLPGIGSTTSMYILTQFGDIKRFLRLDDLCNYVGLVPSMHGSGDKMQTGKMVRRGRKELKIMLIEASWGAIRKDPALMARYNELAKRMHKNKAIIRIARKLLSRIRYVLINQEAYELSIVQ

SEQ ID NO: 106326 - protein, 350 aa, unidentified
MVVVGADVHKRTHTFVAVDQVGRELGQITVTAEEKGHRKAIRWARERFGDDVRWGIEDCRHLSARLERDLLAAGQGVVRVPPKLMAQTRASARTRGKSDPIDALAVARAVLREPDLPAALHDDESRELRLLVDRREDLLKHRTATVNRLLWRVHELDPSMAPPARTMHLAKHQNRLLSWLTSLSGTVAEIALDELRDTIDLTVRVNALEKRIAALVRQVAPALVAMPGCAELTAAKIVGEVAGVSRFKSEAAFARNAGVAPVPVWSGNTAGRVRMTRSGNRQLNAALHRIAITQARLDGLGQAYYRKRLSSGNSKPEALRCLKRRLARIVFNHLTTDHQARSATRVPAAA

SEQ ID NO: 106327 - protein, 435 aa, unidentified
MFSASVLGGVKLEEKELEKPIRAWIGMDWADEKHDVSLYEVGTGKQETMIVRQSPEALQEWLGQLRSRYAGADVAVVLEQGRGGLLNALMGCEFLVLYIINPKSLSSFREAFYGSGATSDPVDAELMRDMVRQNASRFRAWRPDDVMTRSLRLLTEGRRNLVNHSTALTNQLTALLKGYYPQALAWVGTLDTAWACDFLEQWPTLQSLQASSRRQILRFYEKHPRVSLDLNEQLKQIQDARVLTKDEAVLESSALMVQALVSQLRPLLASIAEFDRKIAMIFRKHPDRPIFESFPGAGAALAPRLTAAFGTDRDRFQAAIEMQELAGIAPVTEKSGKKSFVHWRYACPKFMRQTFQEFADHSRRWCKWAKAHYELLRRRGKSHNAAVRALAYKWIRILFRCWKDRQPYQDEVYTKALLKHGSPLSSLLAESVENP

SEQ ID NO: 106328 - protein, 288 aa, unidentified
MQYIAFDAHKHYTLASVARPDGQVVREERIEHERGALQASLARCEPGSPVAVETIGNWYWIVDEIEAAGCIPRLVHARKAKLMMGEINKTDRLDVRGLNRLQPNGTLPTVWIPSGELRDQRDLPRTRMVLVRQRTQLKNRLHATLAKYALHHFEVSDVFGVRGRAVLRQRLELLPPHTAYASGHLLKQVVDLGSQIREFEQRIHTTFKPTAAIQHLMTVPGVGLTLAVVIALEVGDVVRFATAEKLAGYAGTTPRVHASGGKTRFGRSRPDVNRISSGYSSKLRTRSA

SEQ ID NO: 106329 - protein, 423 aa, unidentified
MSEPMRRYVALDLHKSYIVAGAVDGQQRVVLKPRRVPFAKFQDWAKKHLHPTDAVVVEAGTNAWFVHDRLEPLVDQVVVVHPYHVKLIAASMVKTDKLDTLVLAHLLAANILPAIWVPPTHVRELRALVAHRQRLVRQRSAAKNRLHSVLHRHSITPPQGNLFSQANRTWWATLTVSSAERLRIRQDLAIMDYLSPLIAEVEAQLAQLSTAEPWADQMTFLIQLPGVGLISAMTILAAVGDITRFPTPKNLVGYSGLGARVHISGQSRRKGGITKQGRRELRTVMIESAWSAVRAHPAWKAQFARLERRIGAQKAIVAIARKLLVVVWHVLTARAVDRQAETETVARSFMTWGARHGLARNLELSRAQFVRQQLDRLGIGHSLQTFKYCGRIYKLPPSELILTQPSEENTGQAAMGAEEVVYA

SEQ ID NO: 106330 - protein, 386 aa, unidentified
MQTLADRPEAPTAIRTDLGAIFVSLELSRSTWLITSLSPGGGEKMSKQVVRGGDVAGLLERFARLREKARARTGKVFPFVVIQEAGLDGFWIDRALQNEGIESHVVDPASIATSRRRRRAKTDGIDGEALVRALLAYKRGEPRVCAMVKAPTPEEEDRRRLCRERKVLIGERVQHVNRVKGLLFSQGISGYEPLRRDRRRRLDTLQTGDGRRLPDHLKAQVCRELDRLELLLEQIKAVEAERDVLLAAQRVAAPAAMLLDIKGIGPEFAAILWSEGLFRHFDNRRQVASYAGLAPTPWQSGSINREQGVSKAGNPRLRTTLIQLAWLWLRHQPQSALALWFEERVKRNGGRLKKTTIVALARKLLVALWKYVTAGVVIEGAVMKRA

SEQ ID NO: 106331 - protein, 475 aa, unidentified
MKPKKSKSSASKTIQPAAKMPVIHPHAAGIDVGSVEHFVCVPPDSVPEGEPSVRSFGGFSGELDKLVEWLQSCGVKTAAMESTGVYWIPLAQKLETAGIEVVLVNARHLRQVPGRKTDVKDCQWLQQLHSYGLLQGSFRPAQDICCVRSLMRHRQNLTQSCGQQVQHMQKALQQMNVHLHHVVSDLDGETGLRILDAILAGERDAGKLVLLRDALCRKSTPEEMVAALQGDWRSEHLLVLRQALETYRHLLAQMSVCDGEVQAALAQIILPVVEEPAEPAPPNPPASPEPRKKKRFHQRKAGTGLRRDVSAELARICGVDLTQVTGLNALGVMIILSEIGLDMSRWRDSKAFSSWLGLCPGNKISGGKVLSSRTPHVVNRVAILLRTVAPSVGRSETWLGSFHRRMRARLGPAAANTATAHKLATLIYHLLKYKEEYIDVDRLLYEEKLRGKRLARLRKQADELGFEMVQKTQAA

SEQ ID NO: 106332 - protein, 333 aa, unidentified
MKSYFIGIDVSKDTLDVCILNNTNEKELLLKVNNTLEGIEEMIRSSFDQQSDLHCCFEHTGNYGLLLARLLEDQKIPYYQVPALEIKLSQGIQRGKNDKIDARRIAKYVKTYSKDLTPYLLPEQILFKVKNLLTYRSLLIKVRTQFKNAKKSFDQLTKVQDVGYEMDDIAFRIEELNENIALIEKKIYYHISEQEKISRNFDKITKVKGVGFLTAAYMIVLTHNFTSFQNPRKFNCYAGIAPFEHTSGSSIRGKTKTSKLRNRRIKTILFNGANSAIIYDEELKAYYERKKQQGKAHNSIINAVCCKLVYRMFAVVKREEPFVNLTRYNLHMS

SEQ ID NO: 106333 - protein, 460 aa, unidentified
MNRKKAKSKVDRTMPMVHPNAAAIDVGATMHMAAVRADRAPEPVRSFGTFTADLDQLVDWFVECGVETVVMESTSVYWIPIFELLDARGFAVFLVNARDAKHVPGRKTDVSDAQWLQRLHSFGLLRASFRPKGQIAELRAYVRQRERLLEYAASHIQHMQKALTEMNLQLHHVVADIAGATGLRIIRAILAGERDPEALACLRHYSCHSSAETIAKALTGSYRVEHLFALDQALALYDAYHEKASACDVRIEGVLKELIIHRCRDHGSAPPASRRRNRTDQANALAFDVRAALFGLLGKDVTTIDGLGPYLSLKLIAECGDDLTPWPSAKHFTSWLGLAPSNKISGGKMLSSRTRRSGGRAAALLRLAAVTVGRTDTALGAFYRRLSSRIGKAKAVTATARKIAVLFYNAVRHGMDYVDPGASSYETRYRTRVINNLHRRAKAFGFVLQPLEARADAAVS

SEQ ID NO: 106334 - protein, 406 aa, unidentified
MPEGADERPVREFSTFTDDLERLAEWLTSCGVTTVAMESTGIYWIPVFEFLARHGLEVKLVNARHIKNVPGRNSDVLDCQGLQQLHTSGLLRGALRPADQVCTLRAYGRHLMRSASSSIQRMQKALAQMNLQLHNVVTDITGVTGMGIIKALLAGERNPQKLAALQDKRGKNSQETIARSLHGHYRPEPLFSLQQAVELYAFHQQKIGDCDQRVRAQLNQFDASDGQDSAGKPPCRLEDALPRMAGGDLSSMDGISTNTALKIVAEIGIDMSRWQTVKQFTSWLGLCLGSKISGGKILSSATKPVANRAAAALRMAAMTLFNSKSALGAYLRRQRSRLGAPKAITATVHKLARLIYSLLKHGMVYVDAGQQQYEERYRSRLIQNLKRKAQELGYKLVSAQNEPLTA

SEQ ID NO: 106335 - protein, 419 aa, unidentified
MPFKIIRKNCCGLDVHKTWIYACIGITDPNGRTEYFEKRCSSFSKGLRDLSEWLSKHKCTEVCMESTGKYWIPVFNILEKTCSVELAHPKYTKPQKGNKTDRKDARWICDLFMCGMTKPSFIPPAAIRHLRDLVRYRFKLTCMLTGEKNRAQNCLTVSNLKLDEVFSDVFGKSSRSITEYMLAHPGETFDVTPFVDPRCKTPVEEIQAAVDGAISPEQAIKLRQCLNHIDELEKHKEEIEREIFRVSDPYLDALTLIRTVPGLDKNPFTAIQILSEIGGDMSVFPTDKNLVSWAGCCPRNDKSNKTIKSTRISRAGSYLKPVLVQVSNALIKSKKHPEITDRYRRIKSHRGHKKAIIAVCRMLLTAIWHILSDLKPYTPDGYLTPRPVKKEKVLTTSQALNLLKLRGYVIKDDIAAAIP

SEQ ID NO: 106336 - protein, 363 aa, unidentified
MSVQYVGMDVDKQKIVLARLGATPDTRAVEQVIANTPSAVKKYFASLLGAAEVHATYEAGCFGFGLYRQLSAMGVTVVLAAPGLIPRKPADRIKTDRRDAQSLALALRAGQLTGIYVPTEQDESVRDYLRMYESLRGDLRVCKQRVLQFLLRRGISYDGGSPWTVKHRHWLSALPFPQARDRQTLDMYLSQMQELEAKCAEAAAEVEAIAAQDCYRQQTKKLTAFKGIKTLIALSFVTDIGDFRRFSNARQFMAYLGLVPSERSSGNKRRQGGITKAGNSHLRRLLVEAAWHYRSYHPSSRDLTERRRGVEAAVLSYINRAGRRLNRKYMHMLLRGKRSQVAVTAVSRELAGFLWGVMTDQVA

SEQ ID NO: 106337 - protein, 391 aa, unidentified
MFYIGIDIAKHNHEVSIIDDNGKALGKSFSISNSQKGVDKFNTYLDSFNITSENCVIGMESTGHYWINLFSFLVNLKFNVFVINPIQSDAFRKMYIRKTKNDSKDSYIIAQIMRFGEYSSSNISDENIFALRQLSRYRTSLVDECSSWKRKIISILDQVFPEYSKLFSDTFGVTSKELLSKYPLPENMLELSTEELTNLLNKASKGRLGNEKAQEIKESAKNSFGVSFAKQTFSFQIKQIINQISFIESQLKELDNEISNMLKELNSEITTITGIGDVLGACILSEIGDISRFEKASQLVAFAGLDVAVKQSGEFTGTEMKITKRGSPYLRRAIWLAATVASFKDPALSIYYKSLIARGKKHLTAIGAVSRKMCNIIFSVLKNKKAYTPNI

SEQ ID NO: 106338 - protein, 346 aa, unidentified
MLIVGCDYHPRWQQVAWFDTETGEIGEQKLVNGDGEAERWYEQLPVPSLIGLEATGNSQWFLDLLNQLGHEVWVGDAAEIRASYVRRQKNDRRDAGHVLKLLREGRFPRLWVPSAEQRDLRQLLIHRHKRVQIRSRVKNGLQHLAMNQGMQKKSRLWSVAGQKAFRQLPLVGWARCRRQDLLQLLVYLEQQIAPLDRAAQQAAEHDPQARLLLTQPGVGAITALAFVLTMGDVTRFARGKQVASYVGLIPREHSSGGRQRLGAISKQGNTFLRMLLVEAAHSVVRLDEGFRKQYAHRCHSKAKGIAKVAAARRLAVRLYWMLRTHTPYPEIVRIESSPRVPLAGAS

SEQ ID NO: 106339 - protein, 322 aa, unidentified
MAMLSFGGIDVSKDRLDITVLPDEQCSSVSNDAAGWAELIEQLRGSLITAIGVEASGGYERGVVRALLAAGMSVRQINPFKLRQFAKASGILAKNDRLDARMIASFVAIMPTRPAQRQTPMIEQLAAMLTVRRQLSDHKVATENASRLLEGAMLQRLSRRRVAGLTADIDLLDQRLVEIVTADPALAHRFWLLTSMPGVGAVLACTLIALLPELGQMSRKQVAALVGLAPYDFDSGKLKGRRCIWGGRARVRHVLYMAALSASNWNPALKAFHDRLAATGKKPKVVIVAVMRKMITTLNAMLRDGTTWVDRYSGRRSAATAR

SEQ ID NO: 106340 - protein, 345 aa, unidentified
MATMPQTLGGVTVGVDTHGKIHVGAVADPLGRILGTIEVTTDERGFRQLENYAKGLGTIERFGVEGTGAYGATLCRWLTNRGHEVLEVDRPDRKIRRLRGKSDPIDACAAAQAVLSGRASGVPKARDGAVEAIRVLRMARGSAVRGRTQTMNQMHALVTSAVDPLRMQLRSCSPAKLVERCVGMRPGKLDSPAAATKFALRELARRHRALDEEVERFDEELSRLVAKRAPRLVALVGVGTDVAGALLVTAGDNPDRLRSEASFAHLCGVSPIPASSGRIHPHRLNRGGDRSANQALWRIVMVRMSWDERTRAYAARRTSEGLSKREIIRCLKRYVAREVYEVLVA

SEQ ID NO: 106341 - protein, 339 aa, unidentified
MGLYVGLDLHGKSTFAGVIDGEGKQVYKRRLSNDSEVILDELGPYGGDTVGVVVESTYNWYWLVDLLMDHGYRVHLANPAAIQKYKGLKYADDEHDAFWLAEMLRLGILPEGYIYPKEDRPVRDLLRKRGHLVRLRTSLILSLQGIIARNGGVRLNVNKVKARRTDEISPLLAGNEDLALAGAVSKEAIDFLGDKIREIEKVAERRVELREPYRHLFSIPGVGRILSLTIMLETGRISRFAKVGNYASYCRKVRSRWLSDNKVKGRGNAKSGNRYLAWAFSEVANMARRYDGEARSYYQRKMRKTNLMVAHNALAHKLARAAFYVMRDQVPFSPVKLFC

SEQ ID NO: 106342 - protein, 426 aa, unidentified
MKTTTSSPRQAVAAWIGLDWADQQHVGCLYDVASGQQESFRLETCAEAIPLWLAQLRQRYGGQPVAIVLEQRRGALIHALLGCDFVILYPINPQSLAKYRQAYFGSGAKSDAADAPLLMELVRHRPDRFHPWQPDDPETRSLQLLTEGRRRWVDQQTALTNQLTQLLKGYYPQALELAGELSSPGACQFLKRWPTLAALQKARPSQIRQHYQKYGRLPAEEQQRRLERIRQAQPLTEDPAVVLHGSLMLQALVDQLLPLFDTLRKFEQQIAALFAQHPDRPLFDHLPGAGKVLSPRLLAAFGTQRDRWQQAGEVLTYWGIAPVTEQSGRSRWVHWRLACPKFQRQSWHEFAAHSRKHCGWARAFYQQLRARGKGHHAALRALAYKWIRILFRCWQTRTPYNEQTYLNALKQKNSPLLAAIPAASAT

SEQ ID NO: 106343 - protein, 347 aa, unidentified
MTIIGGLDVHRAQITFDYVDTETGETERGQVSPATRVVLRSWLAARFQGRADVALAVEGCTGWRFIVEELQRAGIEPHLAEPAETSHARGPKKRAKTDRIDARLLRDLLLQGRLPESYIPPAHMLEVRALGRHYQALAADRRAWLQRIHAQLFHQGAPAVAALLTETGRHQLESAGLSPAGRQMLTSALTMVQAIDRELDPLRQQLRAAGRSLPGPRALDKLFGIGELCAVIIWAELGDVRRFRNAGQVVRLAGIDVSVWSSAGKRSPGRLVRQGPPMLRWALYEAGKAAARSSSPDYDYYQRVKGRLDGKRAALSVARKLARRCFHTLRELGDEALAAAELKPKAA

SEQ ID NO: 106344 - protein, 428 aa, unidentified
MPYRIAGIDVHKKMLAVVVSNVEVVGEYEFQRRRFQTGPAQLRRLAEWLVEQEVEEVVMESTAQYGQPVWATLEEYWQPQRRNQPGAGSKTGELHLAQAQSNKGAPGRKNDFRDAERSVKRLVAGELTLSFVPDAEQRLWRTLTHRRVQLMRDKSRIQSQLESLLEQAHIKLASVVSDWFGVSARRMLQAMADGETHPEVLAAMAESNLQATPEQLCDALSACRHWNPIYRELVEGIMKQLQFIEQEADLLERRAAEWMGKYQDAVERLAEIPGMGITSALQTIAEVGPEAKRFQSAGELCSWVGVIPGETVTAEQNASSHSPHGNRPMRRILCEAAHAAVKTEGSIFEVKLKKFVQHQKYHEAVWSVAHFMCELIWKILHQGVRYEERGPGVKAKAQQKRIQRQIRELKALGYEVFQRPVLAKPCPA

SEQ ID NO: 106345 - protein, 429 aa, unidentified
MDPSVSLLPPIVAWVGLDWADQKHDVCLQASNGPDVEHRVVEHQPEALHAWVADLRHRFPQGQIAIALEQSRGSLFYALMHYEFLRLYPIPPKALADYRRALYPSGSKNDPTDAQLLLEFLRKHPERFRPWVADDVETRQIALLSEHRRQLVDDRTALTNRLTALLKGYFPQALKWAGDLTAPLAWDFLAQFPSLERAQRASRVEVLKLYRAHARRTPEQLEELCEQIRSAPPLTTDRAIIESSVLMVAPLVGQLRVLQAGVKVLERKLRDLFAAHPDQALFASFPGAGKALAPRLLAAWGADRQRFPGPDNMQCFAGPAPVTVTSGKSKWVHRRYACPTFVGQTFHEFAAQSLLQSPWAQAYYQQQRAKGADHHPAVRALAFKWIRIMFRCWKDRTPYDEARYQQALKRRGSPLATTLSRLEAPPARA

SEQ ID NO: 106346 - protein, 371 aa, unidentified
MNSIVYVGMDVHKEQYTLCCYSYDTDKVEYKQTIPSDYKLVLKYMEQIRSRYEGEVSFVCGYEAGCLGYSLYHQLKDHAVDCKILAPSTMAITNTHHVKTDKRDAANIARCLAFHTYSEVYVPDNDDNDVKEYIRMRDDQKLYLKKVKQQILAFILRQGKRFEGGKTYWTIAHLKWLKTLELSDLQREALDEYLLTYEYLTEKISRFDERIEELASVERYEEKVKHMSCLLGIKTHTALSMIVEVGDFERFEKAPKFASFLGLVPSEDSSDTRVNRYSITKARNSHLRRLLVEAAQSYTRGNVGHKSVALKQRQKGNPPEVIAYADKANERLRRRFYKMTLNKGVNRNVAATAIARELACFIWGMMTEHVS

SEQ ID NO: 106347 - protein, 381 aa, unidentified
MGDHIAAFVAFDTSKLRNAVAIAEEGRTGEVRFLGEIDNTAEATAKLVTKLAAKYARLAFCYEAGPTGYGLYRQITDLGHECMVVAPSLIPKKPGDRVKTNRRDALGLAKQLRAGELTAVWVPDGRHEAMRELTRARGAAVQDVRQKGQQVSAFLLRLGRHYDADKKTWTKAHMNWLASQKFEHPEQRIAFEELLLAVHHARERVARLEEAIRQAVPDWSLAEVVPALMAMRGIDMVTATAFLAEIGDLSRFRTPRQLMAYLGLVPSERSTGDTVERGPITKAGNRRARRLLIESAWAYRHPPRVGKDKQAKVAAAPRAVREIAWKAQHRLYARYRALTRKGKLKTVAITAMARELAAFIWAVNREIANTGGAAAQQGIRG

SEQ ID NO: 106348 - protein, 350 aa, unidentified
MKKVAYLAIDVHARNCVLGHMDFDGTFLGNKRFPTSERHIIQALKAVKAKEKYLALEESNLAYWAAQVARPYVTEVISSDPRENALIFRSANKRDKVDTHKLCRLLRLGELKRVYHPENDDRAIFKAAVQHYIDLRDQQVVLKNKIKAMYRHWGVIEVTGQAVYGTARDDYLQRVKHLHIRNQLQRLYCLMDETESMQKKALRAMKQLGRKYPEIKEFEKIPGIGEILSHTFDAFIQTPHRFAHKRKLWRYCRLGVTDRSSDGKLLGYKRLDKSGVSELKAVSYRAWLCALAGDNEVRRFYSRSLRQTSDHVHARLNTQRKILAVMYGMWKRGDAYRPELFLDSPKMSVV

SEQ ID NO: 106349 - protein, 325 aa, unidentified
MRQPKSHVRPQTQVGLDVSSQTLDAHIRVDGKAFSVPNTDAGFDQLCDMLSAYDVSMILLEATGGYEDNVACYLQLQGFDVVVINPRFARRFAQSMGRLAKTDRIDSAILAQMAFMIDSGPDRDRYIKPVTDEQRKQLSRMSSRRRQVVDLITIEKQRLTHADEYARESINEIISLLNAQLKRIESDILRYVKKNFSELANRLLSVPGVGSQAVTVLIADLAELGHVNRRRISALLGVAPFNHDSGKFKGQRRIRDGRQSVRNVLYMGVIAATRFNPVIKAFYDNLLLRGKPRKVAIIACMHKLIRIINAMMRTGKPFDTSLHGV

SEQ ID NO: 106350 - protein, 410 aa, unidentified
MDVLYTRCAGLDIHRDSIVACVRLAEAGGVTRLVETFATTTTDLERLSEWLRGHGVTAVAMEATGVYWKPVWAVLAGDFELVLANAHHVKAVPGRKTDVNDATWLADLLAHGLIRPSFVPSLSEQALRDLTRARKQLTREKASHVQRIDKTLQAANIKLGSVFSNIMGQSGRALLEALAAGESNPEQLAGLVRTKIRASHAQVVEAVRGRLAAHQRLLLRLYLAQVDALDAAIAAIDHELGERLKPVQETVQRLTTMPGLSPLSAAVVISEIGLDMSRFPSAAHLISWAGLCPKNDESAGKRRSTRLRPGAPWLKTVLVQSAWCAVRVKASYLHALFQRLKARRGPRKAIVAVAAAMLTAIYHMLKRGAAYHDLGPDHFQRTERSCLAARLARKLGELGFDVTLTQRAAA

SEQ ID NO: 106351 - protein, 413 aa, unidentified
MKVLNRRCAGLDVHKDEVVACVRLAMRHKLSHEVRRFATTTRGLLELADWLEASGVTQVAMEATGVYWKPVWHMLEERFQLVLANAAHVHNVPGRKSDVNDATWIADLMAHGLIRASFVPPAPIQELRDLTRTRKQLGREIVQHTQRIQKVLEDANIKLSSLITEVLGASGRRILKALIAGESDAGALAALGGPRLKCSRQELRDALEGRITSHHRFLVGQHLRTIEELEATVTAFDARIEAVLAPFRDAAERLMSLPGISDVAAQVILAEIGTDMSSFQTAGHLLSWAGLTPRLDESAGKRRSTRLKKGAPWLKPVLVQCAFAAARAKNTYLQAQFLRLKARRGPRRLLIGHGKGIPAVSRLGSELNPSPFLQAPVRARRGRIRASRRTSTPAVPRSQTGARPSPPWPRSRR

SEQ ID NO: 106352 - protein, 413 aa, unidentified
MQVVYERCCGIDVHKQTVVACAIVPGADGQPAKDTRTFATMSADLEALAGWLQGLGVTHVAMESTGVYWKPVFNLLDGRFAILVVNAEHIKALAGRKTDVQDAEWIADLLRHGMLKGSFIPSQVLRELRDLTRYRTKLGDEHKSEVNRVQKVLEDANIKLASVASDVMGVSGRAMLDQIVAGQSDPAILAELAKGRLRDKQDLLLKALSGRVRAHHRFMLAQHLSHIDFLDEAIAQLDQQIQEQMRPFAAALATWDSLPGINQRIAEILVAELGPDLQPFEDAEHLASWAGMCPGNNESAGKRKSGRTRKGSPWLRRALIEAAHGAAHTKHKYFQALYRRLASRRGKQRAAVAVGHSLLVTGYHLITRQTAYEDLGGNYFDERDREAVKRRAVRRLEKLGYQVELAPLAAAVG

SEQ ID NO: 106353 - protein, 320 aa, unidentified
MQTPTEGLNIGADVAKDEIVVACSQGSFPARKLANQRTALLAFLKDLPAGSRIGMESTGAYHELLADAAHKLGFVVFVLNPKDARHYAKAVGLRGKTDRVDAELIARMVAHEHTKLHPWIAPTAEQREMARLIKRRAKLSSLRQALAMSLKGLEGFATDLKALRARFDQVLVRIDQRVKALVEASPDRKQHVTHLRTICGVGPVVSAALVNTLERVPLKSADAFVAFTGLDPRPDDSGQHRGKRRLSKRGPAELRRLLYVAAMSAKKKQAWKPLFEHYRAKGLSSTAALVIMARRIARTAWSIYTYKTDFDPARLTKSLT

SEQ ID NO: 106354 - protein, 404 aa, unidentified
MEQVYVGIDWADDHHDVHVTDDSAVALDSFNIPHSYEGIEKLRKRLDKCSSSREKILVAVESHQGLLIYALLEAGYLVYPINPKAMDRYRDRYRMSSSKSDPKDAMVLANILRTDLHLYKPLPRETVADARLRQLTRAHKSLVQQKVKLVNQLTSQLKSYYPVALHLFSKLDRKITLAFLERYPTPEKAAAASLEDLRKFFHKQGYSHQWRATLIHESLQQPSLKAPKELEEVHQTIVLSLVPVLRSFLDEIEKLANEIGKEFKYNPAHEIFSSLPTGEITAARLNGELGSDGTRYPTREYVQTAAGTAPVTRRSGKTIVIFFRWQCNKHLRAAFQDLARESVKQCAWARQYFAEQMRLGHKPSRAYRALANRWAAIIWKMLQERERFDQSRLDKSQVKALSAV

SEQ ID NO: 106355 - protein, 413 aa, unidentified
MEVVHPRCAGLDISKKDAKVCVRIQGRGSRRTSATVTTWGAMTNQILALREHLVQQKVTCVVMEATGNYWKPYFYLLEDTLEVMLVNAHDARNMPGRKSDVSDAAWLADLGAHGLLRGSLVPPPPIRRLRDLTRARTALTRDRARQGQRIEKVLEDAGIKLSSVATDIMGVSGRAMLDVLIDGRDDPAVIAGLAKGRMRSKIPVLAEALTGRFTPHHAFLISMHLTLIDQYGQALGELDTRIAEAVEPFQAARDLLTSIPGFSTTVAEVVLAETGGDMRVFPTAGHLASWAGTAPGSHESAGRVKSTKTRPGNRHLEGALGTAALSVSRSKGTFFSAKYKRIASRQGPMKALVAVQHAMLVAAWNMLTNGDLYRDPGPDYYTRRVPTKTRARAIGQLESLGYRVILEPAAGTA

SEQ ID NO: 106356 - protein, 372 aa, unidentified
MRHHSEAFIGIDTSKSSNAVAIADGVRGGEVRFLGEFPATEAAIRNLVAKLAAKYNRLTFCYEAGPTGYGLYRLIKSLGHECIVVAPSLIPKKPGERVKTNRRDAVSLAKLLRAGELTAVWVPDERHEAMRDLSRARLAANKDLQGKRQQISSLMLRLGRCYPGKTTWGPAHMKWLMSQKLEHREQRMALEELLHGIRQEGERVERLEQAIREAVPEWSLAEVVTALQAMRGINLIAAVAILAEIGDLSRFQNPRELMAYLGLVPSENSTGDTVRRGGITKAGNGRARRILVEAAWSYRYPARVGREKQPKVAAAPRRVREIAWKAQTRLCGRFRTLLRKGKLPTIAVTAIARELSAFIWAINREVMASRQA

SEQ ID NO: 106357 - protein, 403 aa, unidentified
MNAAGIDVSKGKSMVSVMRPLGEVVAKPFTVCHTGSELKELADYLKSLDGETRVIMEHTGRYYEPVAQFLHDAGLYVSAVNPKLIKDYGNNSLRKVKTDKADSKKIAKYGLDNWGELRQYASMDTIRYQLKTLNRQHTLYTKMKTAMKNNLIALLDQTYPGVNALFGSPAREDGTQKWVDFATSFWHVDCVRGMSQTAFTERYRKWCKRNRYNFSSDKAAEIYTGAKDQIAMIPKDDLTKRLIQQTIDSLNTVSKTVEQLKAEMLKLASQLPEFPVVMKMHGVGDSLGPQLMAEIGDVTRFVHRGSITAFAGVDPGANQSSEREAKSVRTSKSGPPELRRTLFLVMDGLLKSMPQDDPVYQFIDKKRAEGKPYLVYMTAGANKFLRIYYGRVKEYLASLETAD

SEQ ID NO: 106358 - protein, 330 aa, unidentified
MFSERTSVGLDVHARSVAAAAIDGVTGELLQAKLTPAHDHIRGWIRALPGPVAVTYEAGPTGFGLSRVLNAEGIRCVVAAPSKLQRPSGDRVKTDARDAVHLARLLRLDEVTPVVVASVEQEAARDLVRAREDCRGDLMRARHRLSKLLLRQGIVYYGGQAWTGKHDAWLRRIGAQGFPNQATTMAFESDYEATLVVSARRDRLDKAIEAMAADSEFTPIVRRLGCLRGVSTLTGFALAVEIGEWDRFTGNTIGSFVGLVPSEYSSGASRVQGSITKTGNTHARRLLVEAAWHHRNRYVAGKTMRDRWELAPAAARSRGERATDDCTNGG

SEQ ID NO: 106359 - protein, 345 aa, unidentified
MVYVGLDFHKYFSFVTVMDGQGEILKRARLQNHPDTLLAFFSQLEDEVTVAVEATWNWYWLQELFEDHHIPMKLVHPQRAKAIASARIKTDKIDSEILAHLLRTDLLPEAHIPTRETRLLRERLRYRASLVRLVAQLRNKLHAVVAKNGLRLPSRNILSKKSLAYLREVSLAEAFRQAVDGYLRVVELLRQEIERVSETIASQAQQDPRALWLTELYGVGYYLALLIVAEIGDITRFPRAKSLCAYAGIVPSVHSSGQTYYTSSITKQGSKWLRWALVEAAHHIQSKPPFDRFYQGVKSRRGPKIAQVAVARKLCKTIYHMLREEENALIVGQARWGHGFLKPQV

SEQ ID NO: 106360 - protein, 392 aa, unidentified
MIYVGIDVAKDKHDCFITNSDGEVLFKSFTISNNREGFETLFQKIESVSGDLKKVKVGLEATGHYSYNLLGFLLDKGLTTFVINPLHTNLYRKSLSLRKTKTDKVDSRTIATMIMSDMNLKSYSVTSYHNEELKSLTRYRFDKVKERAKLKTSVSRLVCILFPELEKLVPTLHMASVYALLSEFPSASAVASAHLTRLSNLLSESSKGRYGKDTAVMFRDAARGSIGSLMPAKSLELKHTIKLIQELTAEIDEIEAAIKRIMDEEIQSPITTIPGISYRMGAMILAEIGDFSRFDSADKILAYAGMSPSTYQSGQLDNCYAHMEKRGSRYLRYALYNATKYVCHWDKSFGTYLEKKRSEGKHYNVALSHATKKLVRLIFAMEKSGQAYIPAV

SEQ ID NO: 106361 - protein, 328 aa, unidentified
MHKDWTFATVLDQTGRVVVRRKLENEHVPSFLENFNVEKIGLESSTYVVPLYRALVDRGFRVEVGHPKKTRYIAEARIKSDRVDSKAIAELVRLEALPQSYMPPPEIAALREKVRRRAFLVRQRAKLMAKIRIVLAYEGLKPPEGLSLFTRKGVDWLESLGLEPVNCYLRLIMAFNGEIRRLSLDLRRMAGLDEDVRLLMTIPGIGYYTALLVKAETGDVNRFSNGEHYCSFIGIVPSTYSSGGVTRHGGITHEGNPWLRWALFEAAMTHVKYDTSISRSYHRIAERRGRKVALVATARRLALCCYSVLKNRRPYRAFPHGQAFHNSS

SEQ ID NO: 106362 - protein, 348 aa, unidentified
MTIVEVARPVTGGVDTHLDLNVAAALDAIGGLLEVAEFPATSGGHRRLLGWLAGFGPVTRAGVEGTGSYGAGLARYLRSAGVEVVEVDRPNRQARRRAGKSDPLDAIEAARAALSGRASGAAKTRDGNVEAIRALVVAKRSARSVKIKTLNQIRHLSFTAPEELRQRLKEVSRQQLGARAAALRPGRREGADPVLVATKTALRILGRRVLALDEEKARIDALLSELVTQTAPELLRLHGVGIDTAATLLVTAGDNPGRLRSEAAWAHLCGTAPIPASSGKVTRWRLNRGGDRQANSALWGVVITRLRNDPRTQAYMTRRLAEGRSKPEVIRILKRYIAREVYHHLPRP

SEQ ID NO: 106363 - protein, 343 aa, unidentified
MQAITTVGLDIAKSVFQVHGVDVQGSVVVRRQLKRRYVLAFFKKLPPCLVGIEACATSHHWSRELQALGHTVRLIPPAYVKPYVKRQKNDAADAEAICEAVQRPSMRFVPTKTPEQQSCLMLHRTRHLFIRQQTAVINTIRAHLAEFGIVAAVGRNGVEELLYVVADPNDGRVPDIARECLEALGKQLQSLKAQILEFDRQINAWHRSNETSRRLDELPGVGPALATALVASVADPKAFRSGRDFSAWIGLVPKQNSSGGKEKLGHITKQGDRYLRSLFCAGALAVIRYAKIHGSKHRPWLSKLLERRPTKVAAIALANKIARMAWAMMATGERYREPVALAR

SEQ ID NO: 106364 - protein, 336 aa, unidentified
MEEPPRRSSTDEFTFALGIDVGKTALELALCNGEKIVARTTVSNDADGHDTLVSWVEDRGGGPEKTCVCMEASGDFEKAIARRLYEEDYRVSVVNPRRIKGYASSQLQRTKTDSADAALIARFGRREDPRPWEPPSAAESRLQELTRARQALQKEKTRTQNRLDEAEDEAVRRAHQNLLDEIEQQIEDLEEEIEDHVEEDPKLKDRCSLLDTIPGIGLQTAAIVVSELGSPERFESARQAAAYAGLVPSHHQSGTSVRGNPRMSKVGNGRLRRAMYFPAMTALRFNSAVKAFGNRLKERGKEKMVVIGAAMRKLLHICYGVLKSGRPFDPSLHPGT

SEQ ID NO: 106365 - protein, 375 aa, unidentified
MKVYVGIDAHTTNYTLAAMFAIDQDPINVNTYAPKISNIVSYCKDLKKRFGEDTEIITGYEAGTLGFSLRRDLEEKNIKCIVVAPSSIPGTEMNRKRRKKTDKRDAKAIAKSLLSHDYSEVHMPDKKDEAVRDYIRLREDIKQDQKRTKQRIGAFCHRHGFHYSESKYWTKKHMEWLRNLPVEGMLKETLDGYLRSLNYHTDRINELDIKINAIAETDKYRESVHKLICFKGIKTLTALALIVEIGDFTRFVKAKNFAAFLGLVSGENSSSDGQNLLGITKQGNRFLRRLLTESAQCFSRFASRTKSKELLQRQSGNTEEIIAYADKANERLRKRYQRLVLISKKPANKANTAVARELACFIWGMMTGNTHTALA

SEQ ID NO: 106366 - protein, 339 aa, unidentified
MSKRSIQVQKTMYCGIDVSAKSLTVAIQHVHQPVEQRSFPNTLIGHKALIVWLRKTKSPVRVSLEATGIYSLDLAFALDAAEGIEVAVLNPKVANRFAQTIRRSKTDAADAEVLAEYARRMPFTAWVAPSPGSMRLRSIVRHIESLSVQSAQNQNRLHAAHGSTSTPSCIVQDLKRSVASLELRIHKLRREAMTLVRQDDLLRKRFELLVSIPGIAQVSGMQLLAELSTLPPDLTVREWVAHSGLDPAHEISGSSVRKASRISRAGNRHLRRALYMPALVASRCDPHAKAFFDSLLARNKARLQALIAVARKLLHAIYGIFRSGLKYEGTQLFPRITLS

SEQ ID NO: 106367 - protein, 411 aa, unidentified
MYYVGIDIAKKTNVSSIINDKDVFIKKSFKFNNDEKGFKEFTNLLSSIDKNIDNFIIAMEATGLLFENLYLYLKGKGYNVILLNPYQTSKFREMDTMKKVKNDNIDAVMIASLIKSGRYSKAYVSEEVYASLRALHRHRASLEEELKKHKRQVSSLLAVVFPEFEQVVKNPFSVSGLALLEKYPTAKHYTYTSPQRILKVFRNIKGNNFNIQKAEKLLELAKSSIYSGNAYDERAFVIQSHIRAIKFLQKEIESIDNEMLKLFNASPSFTKEEEQEVTDIIDNLRSIPGVSDKTLFTIMGECGNLDRFKNINAFIGYLGLYPTLEQSGNKTSYGKLAKRGSKLAKKALYQAAVAAIRHNDEMKKLYCDKVSQGKAKKEALVIVARKLAAIILAIYKNNTPYNPARVFNQNT

SEQ ID NO: 106368 - protein, 380 aa, unidentified
MDVHSKNYTLCAMEPTIGAEDRIFGEVQVAPDYKEIICFIESLKMKLGFYDDYSVECGYEAGCLGYTLYHQLTNAGVKCVILAPTTMLTQQGKRIKTDKRDARLIAQCLCYGGYHPVYIPTGEDDAVKEYLRMRDDHKLALKRLKQQINAFVLRHGHSYTGTKWTIKHVAWLKKVELDPIYRETLNEYMASYEEQETKIERYDKRIEEIASEARYQEKVKKLVCFLGVRTHTALSLIVETGDFNRFAKGNTYAAFLGLAPGEHSSSENVNRLGISKAGNAHLRRLLIEASKGVCKGAIGHKSKELRSRQSGQPAEVIAYADKANTRLRSKYYKMIRHEKKKNVAVAAVARELACFIWGMMTENISISSRKGTSMPAVSQG

SEQ ID NO: 106369 - protein, 346 aa, unidentified
MEAIVERAAGLDVHQGSVVACVIVGAAGRRASRETRTFGTMKRDLAALRDWLIEMGVTHVGMEATGIYWHPVHAALEDAFTVIVGNASHMRNVPGRKTDVKDAEWIADLVRHGLVRASFVPAPEVRVLRELIRHRKAVVGTLASERNRTLQLLESANIKLASVMSDVFGVSGMLMLQALAEGRAAPVEMADLAKRRLRRKVDQLALALDGRLAEHQRLLLGLHIRRLLEIDRDLAEIEAAIKAAMRPFAAQQACLATIPGVDELTAASIIAEIGVDMSAFGTAQRLAAWAGVCPANHESAGKQKQRGTRKGNTYLKATLVTAAISASQAKGTYLRDKFHHLKARMA

SEQ ID NO: 106370 - protein, 374 aa, unidentified
MGWTPPPDNGIDVPKWKSDQPLEPRGASKMKITTIGIDLAKNVFQVHGVDEHGKVVLRKQLRRDQMAVFFANLPPCLIGMEACGSAHYWARKLSALGHTVRLMAPQFVKPYVKTNKNDCNDAEAICEAVGRPNMRFVAVKSVEQQAVLAQHRVRQGFVKARTAQANQIRGLLSEFGLIIPQGIAHIAKRAPALLEEASNELPVSFRQLMQRLLCHLKELDRQVQELEAQIKAWHLQSESSRKLEKIPGIGPLGASALVASIADARSFDNGRQLAAWLGLVPRQHSSGGKSTLLGMSKRGDSYLRTLLVHGARSVIMHAQRRAGNDSWLARLLQRRNPNVAAVALANKNARVAWALLAHDREFRPEDYAAATVAA

SEQ ID NO: 106371 - protein, 416 aa, unidentified
MEILYRCCCGMDVHKKFVVACVLRIDEQGEETRHVQRFETYTEDLLRLSDWLTRSGCTHVAMESTGVYWKPIYNLLEGQLELLVVNAHHIKAVPGRKTDVKDSEWIAELLQHGLLKASFIPPQSQRDWRDLTRYRTSLVQERVRIVNRLQKVLEDANLKLAGVATDVMGKSGRVMLEAILTGATDPEQLAELAKGRLRKKLPQLKQALNGRVREHHRFLLVEQLSHIDYLDEAIGRLSGEIAERLRPFQAEIQRLDTIPGINRSIAEVLLAEIGPDMNRFPDAHHLASWAGMCPGHNESGGKRQSGKTRKGNRWLRQALIEAAHGASHTKDTYLSSQYRRLVGRRGKKRALVAVGHSLLVIAYHVLNRQATYVELGSNYFEQLHRCRLEQNLVQRLQKLGYTVTLEANSASMVLPA

SEQ ID NO: 106372 - protein, 343 aa, unidentified
MEKIGIDVHKVASQVCIQLEDGTFLDRRIATTQAAFATLLGGRPRARIVLEASTESEWVARSLEALGHEVIVADPNFAPMYATRSRKIKTDRRDARALCEACALGAYRAAHRSSDTARERRAQIAVRDALVSSHRKYISLARALVRQDGYRIGSGSARTFATRVQAHALPAAVQARIAPLLTAIAALTAQLAALDQALAQLVRADAVAPRLCTTPGIGPVTAITYGAVLDQVARFGSAKEVRAYLGLVPREHSSGEHRQRGRITKAGHRRLRALLVEAAWSILRSTRPETEAVRAWALRIAARRGKRIAAVALARKLAGILFAMWRDGSAFGHPVSRRPPVAA

SEQ ID NO: 106373 - protein, 411 aa, unidentified
MELIHERVAGLDVHRDSVTACARRPGPRGGTVTDKERFKTTTSGLGRLAGWLADQQVALVAMEATGVYWKPVYYALEDRFEVWLCNAYHVKNVPGRKTDMADAEWLADVAAHGMVRPSFVPPLPIRELRELTRYRKTQIDARAAEIQRLEKVLQDAGIKLTSVASKVLTQSGRAMVEALIAGERDPARLAALAKGKLRPRIAELAEALAGHFGSHHAVAARRILDHLDFLDASITVLTEQITVRTAPYAAAIELLLPVPGLDRLTIDVVIAETGADMGRFPSSAQLASWAGLCPGNHESAGRRRRVGTPPGNQWLRRALIEAARAAARTKGSYFAAQYRQIARRRGPNKAAVAVAHSLLDVIWHLLSTGECFEDLGEGFFDRRRDPERETRRLVHQLQQLGYSVTLATAAS

SEQ ID NO: 106374 - protein, 410 aa, unidentified
MNPLYVGIDVSSKSNVAFLMKSDGSKYSNFSVPNSREGSRQLVKRILSAIISESLTDVVIGLEATSVYGDNLVCFLREDGSLTPYNKKIHVLNPKQVNKFKLSYNDLPKNDYVDSFVIADCLRFGRINKEVYLDDYRYVALKNLTRARFFAVQNLTREKQRFMNHLFKKYSTMAQEKVFSDTFSTTALAVYESFESAEALANMDLHQLTEFIIEKGKNRFPDPDSVAKAIQKAARSSYRLPKTVNDSVNQVLSISISSMRAMESQIKAFDKAIAEQMALIPNTLTSVNGIGPVYSAGIIAEIGDINRFPNQASLAKYAGLVWSQHQSGDFEAQNTRMIQSGNRYLKYYLCEAALSLVRCDAEYRSFYHRKYKEVNKYQHKRALALTARKLVRLVFRLLKDNCLYRAPESK

SEQ ID NO: 106375 - protein, 355 aa, unidentified
MTSTKYIGMDVHKESISIAVMNSAGKIVMECVIETKASTILQFIDGLHGDLRVTFEEGTWAAWLYDLLKPHVTEVVVCNPRKNALLKDGSKSDRIDARKLAEQLYMNKIKSVYHGEHGLRTLKELARSYLTITKDVTRVMNRLKALYRSWAIPCAGNEVYAPRHRSEWLGKITEAGVRRRAEHAYQQLDVLRLLRQEVRRDLLLEAKKHKARKLLRQIPGIGPIRAALLVALIQTPHRFRTKRQLWTYSGLGLETHDSAQYRVVEGQLKRSKKSVTLRGLNKDHNHDLKDIFKGAATRVSSSSGPLHDFYERLLAKGRKPTMARLTLARKIAAITLIVWKKEVRFDANYLKQQAA

SEQ ID NO: 106376 - protein, 402 aa, unidentified
MAYDFVIGVDVGKYFHHACVLDPQGRQVLSKRINQHEGSLRKLFGQFLADDASVLVIVDQPNNIGRLTVAVAQDMGADVRYLPGLAMRQLSRIHVGNSKTDVRDAYVIAHAGLNLPDALRNVDRVEEVFTQPKVLNGIDEDLARAYTRLINQMRSALVGTNPAFEHVLRGQMIHRKWILHLLAKYGGPTKIRRIGKTRLAAFARSHKARNPEPVIDAMLAAIHGQTMSIAGAEYAELGVAMSAKDALAKLEHRKEIEAQVLKLIQDIPQTEILLSMPGIGPRSAAQILMTVGDMSDFPDAAHLASYAGLSPRTNQSGTSIMSNSPNRAGNKKLKNALWQSSFASIRFHERSRQFYERKRKEGKRHNAAVVALARRRLNVLFAMMRNGELYRDISTVQEAAAA

SEQ ID NO: 106377 - protein, 408 aa, unidentified
MSLFVGLDWAKDKHAVCVIDQDGRVRSRLEVPHTAAGLEDLLVQLRRLARASELPIAIERPSGVLVDTLMAAGHPVIAIHPNVVKACRPRYKAAAGKSDPGDAYLLADVLRTDGHRFTPLRPFSDETRALRALVRTRDDLVAQRVALANQLRALLESFWAGAEAIFADIDSPIALAFLAQYPTPTHASRLGEKRLAAFLARHAYCGRRPANELLQRLRNAPASTADELETEAKGETVRALVNVLEPLVLQVQKLSAAVEHAITTHADAATLTSFPRIGRINAAQILSELGDDRGRFSCEEHLAAEAGVAPVTVASGKHRSVTFRWACNKRLRGAITCWADNSRHSSAWAASVYTAARTRGCDHPHAVRVLARAWIRVLWRCWHDRQPYNPVLHGAMNRLAPTARTAGA

SEQ ID NO: 106378 - protein, 363 aa, unidentified
MKIMTGIDLHSNNALCGLMDESGRRLVHKQLPCDLAAILQLLKPYQKRIATIAVESTYNWYWLVDGLQDHDYHVVLANPARMQPYNGKKHTDDVSDAYFLAELLRLNLLPTGHLYDRKTRPVRDLLRRRLLLVRQRTTLILSFKSLNERTLGQHVPLARVKAMKAEEAQARFTDPADQLLSGEQITLMGHLTDSITKLEQHILGVVGKWSTYQRLQELPGIGKILGLTIALETGDAQRFADAGNFASYSRCVKSLRTSNGKKKGENNRKCGNKYLAWAFVEAAHFACRYDDQCRRFYDRKKQQTNPVIATKSLACKLAKAAWHVMKDDVPFDAARVFGPARKSDFGETGREPAKGSGHPSQQD

SEQ ID NO: 106379 - protein, 344 aa, unidentified
MENYAGIDVSLELSSVCVVDAQGKILKEAKVASEPDALVDFFETLGFAVKRIGLEAGPLSQWLHAGLRKAGFETILLETRHVKAALSAMTVKTDRKDARGIAQLIRMGWFQPVRAKSVGAQEIRALLIARKQLLGRLIDVELSIRGILRGFGLKVGPVTRRNFEARIRELVAGQATLERIASAMLSARSALKAEYGRIHKAVLVIVRDDAVCRRLMTVPGVGPLVAITYKSAIDDPHRIAKSKAAGALFGLTPKKYQSGEKDVTGGITLAGDETVRTVLYEAANVLLSRITRFSKLKRWGIDVAKRRGSKRAKVALARKLAVILHRIWVDGTTYRWAEAAPMTA

SEQ ID NO: 106380 - protein, 365 aa, unidentified
MTSMTDQHLEVIAGVDTHGQTHHAAVVDGLGRHLADKEFAATGAGYRQLMTWLGSHGTVAAVGVEGTGAYGAELARVLTRSGLRVVEVDRPDRKTRRLRGKSDPIDAYAAATAVASGRATGTPKTRDGIVEAIRALRVPRRSAIKARTQAINQARQLLVTAPEALRAQLRGLSATELARTCARLRPDDLADPTGATKAALRRLGRRILALAEEIAELDAELKTLTTQAAPALLARMGVGTDVAGQLLATAGDNPDRLRSEAAFAHLCGVSPIPASSGRRDRHRLNRGGDRAANHALHTIALSRMRWDSRTKAYVQRRTKQGLSKKDIMRCLKRHIARDIYRALIHDLQARGAHPSSLAADLPQAA

SEQ ID NO: 106381 - protein, 371 aa, unidentified
MEEFKYVGLDVHKETIAVSVADDQGGEVRYLGEIPNTPEAVVKLARQLKKGGSTLSFCYEAGPCGYELHRQLKGLGHDCQVVAPSLIPTKPGDRVKTDRRDSLNLARLHRAKELTSVWVPDEPQEALRDLTRGREDMKRMQRQARQRLLAFLLRQRKTYSGKKRWTQAFDRWLETLKFDQSIQQIVFQEYIDLVHAMDKRVAAFDQQIEVASTHSVFAPMITGYMALRGVDRLTATTVVAEIGDLRRFSSAPQLMAYLGLVPSEHSSGLSKVRGSITKTGNGHVRRVLVEAAWTYRHPARKSATLQRRAERSPQAVQDVAWVAQKRLCGRYQLLQDRNKLKVQVCTAIARELTGFLWAIGQAMPSPAPATL

SEQ ID NO: 106382 - protein, 450 aa, unidentified
MNIEIKEHGNYNLLRIISAERNFLTGGVKAMHKRNNNKQVEKRQRITNKTLIVGMDIGCEFNAMCLMNKEGTVLGRYPKIYNSRKGFDYFHDIIETAKNKYGFTDVLIGMEPTGHYWRKIAFFAMDKGCEVRFIRTTALKHQRELDESSSAKNDMRDAYTIANIVREGKYIDTIIEDGVFRQLRTLAHTRERICRSNTGSKYALKSALEDYFPELKNIFWSMKARGLWAILEQCPFPEDVLSMGIDKLTKLIAENTKRKAKAKKKAHQIYHAAQTSVGLKNIGEADRYRVASYLSDIKHSESQLKEIELQMKAILENIPFARHILSIPGIGVMTCAVFLGEIGNPYNFQSPKQIVKYAGYDPQEHDSGQKKGRKIISKKGRWLLRKYLYFMVMGIVHRSPFFKKYYENKQKTMKKKEALCAVVIKLIKVIFALLRDRRMFTETSHLKLAA

SEQ ID NO: 106383 - protein, 378 aa, unidentified
MSQSTTLYVGLDVHKDSIDIALAEPSRDAEVRHLSTVAGGNEAVTKALRRLVSAGHRLHIVYEAGPCGFALQRHLGALGWRCDVVAPSSIPRPSGERVKTDRRDAMKLARLARVGELVAVRVPDSADEAMRDLVRGREDAVREQRNARHRLKALLLRNGIAYSGRAAWSGAHLRWLAGVKLGHPAQQIAFQEYLHAVTEAGARIVRHEQALRDALPGWTLAPVVCALQALRGVQLIAAITLVAEIQDFWRFANPRQLMACLGLVPCEDSSGPRRRQGVITKAGNAPARRMLVEIAHQYRLAARVSPSIARRQSDLELPKAVTDIAWHAQTRLCARFRRLSARRLPHNKIVVAVARELCGFVWAIARQVTPEPSLPQAT

SEQ ID NO: 106384 - protein, 409 aa, unidentified
MSSKLYQEKIIPLEFDMFVGMDVDKLSIAITVVDHYFFYKAFKIPYDPDAVVNYMKKHFPKKRIVFAYESGPTGCGLHDRIIKAGYPCLVVASSTVPTARGSRVKTNRLDSKKIANSLRGGQLKGIRIPYGNYRALRHLTQLRNVLVKQCIAYKCRIKALLLVESIKFPEAPAGSQWSKVVLHKLETLKCPQTVRFKLDRLLESLAFSRVQALKAQKEIRRLCQDDKDLADSISCLMSLPGIGWILASNLIARIGDWRLLRNVREIGAFLGLTPRENSTGDDVNEGNITGAGDSIVRNMLIEGSWAAIRKDPELKAFYQRIYNRNPSNIAARKAIVAVARKITTRIYRVLKDRRPYEIRNLVNTKNEMSSEKGRPSASGDDSTLRRTRRYIIKKCSDISYVPTVGSIAR

SEQ ID NO: 106385 - protein, 464 aa, unidentified
MEVVQRRCCGIDVHKKKLMVHVLPAEGQKESKPLEREFRTFTRDLRELRQWLKECGVSEVVMEATGQYWRPVWNVLEEEISGLMLVNPQHVKALAGHKTDRIDSKRLARYLERGELVGSFIPPRSIRELRDLTRGRIHLVEEVNRVKNRISALCETGNIKVSSVATDLFGTSGRRMLRAVADGNRDAGWMADYAQGRLRQKRQQLALALEGDFTECQRWMLREALAHLKFLEGEIAVLDAEIGSRMQPYEDRIQHLITIPGVDRIVAWTILAELGPDVSVFPDAQHAASWAGMCPGNRESAGKQMNGRTRKGNPYLRRDLCQAAWAASHTKETCLAALYRRLRVRCGHTKAIFAVAHHILIVAYQMLRNGEDYKEQGENYFDRQNKPKAVFRLVRRLSGLGYEVTLHPVTASAPTSIAPTPPQDALRPRKGRPCKCQSRGIACKHKSGPTPPDSKLPDRSNPGT

SEQ ID NO: 106386 - protein, 465 aa, unidentified
MSTDKKLQRNRKERKELARRLRSEDPGLAVVHPEAAGIDVGNAAHYVAVRGDRDAEPVRRFECFTADLYRMADWLRSCGVKTVAMQSTGVYWIPLFDILEEWGFEVFLVNARHTKNLPGRKSDVQESQWLLKLHTYGLLNNSFQPLSDIRVLRTYWRQRAEHAVGMTTCIQRMQKALTQMNIQLANVISDLSGRTGQAIVRAMLAGERDAKKLAELSDCRIRATKQEVAKSLEGNWRPELLFVLQQQLEMYDIYQRRIAECDQKLQQHLATITDTAFPLTRERLSEANKSKQSRYMPQFPLSGELLRITGVDLTQIDGINVMTAQTLISEIGLDMSRWKTEAHFASWLGLCPDNRISGDKVLSRGTRRVVNRAATALRIAATTLLKSRTYLGAQYRRLRTKLGAPKAITAMAHRLARLVYRMLKYGQQYIDKGAEYYEQKNRQQQIDFIRKRAAQLGLVVTAACP

SEQ ID NO: 106387 - protein, 441 aa, unidentified
MQILFSRCCGIDVHKDSVTACVLIYAEGKEPEVRKKEFPAHFKSLGNLRFWLMAQKVTHVAMESTGVYWKPVWQALEGHFELILANPFQIKTVPGRKTDARDSQWIAELLAHGLIRPSFVPPRATRDLRDLTRYRVKLVQERNRVHNRIHKVLEDACIKLDTVASDILGATGRAIIQAIIAGQEHPDWLADKARGTLRGKRAELRLALRGQITDHHRLMLGELMEDLEFVERKIWRLETEIATQVDHGKLQRLCSIPGVDLITGCTLLAELGSDMSVFNSPHHAASWAGLCPGNHESGGKRLSNRTRQGNQWLRRALCQAAWAATRKKNSYIAAFFYRKAGKHGIRKAIVATAHKLLIISFCILRDGTEYQELGDNFFDRLHPERTRNRLVRRLQRLGLEVILQPRSDTLPALHPPDRSTVRKRGRPCKCAERGIPCKHVP

SEQ ID NO: 106388 - protein, 444 aa, unidentified
MRAIGLDIHRDFCEVAIAEGGRVRAAGRVGTAPAEIEAFAPGLGPGDTITLEATGNALAIARILAPHARVVLANPKATKAATRLRAKTDRIDARTLAQLLASGFLPEVWTGDAATHALRRRVGRRVHLVRQRTKAKNQVHAVLLRNLAGRPPVSDVFGTHGRAWLERLVLPDDERETLEACLRTVDFLDAEVAAIDRALAPLVLASPDMRRLLTLPGVSATTAATLAGVIGDIARFPTPGRLVAYLGLDPRVSQSGNDPAHHGRISKQGASEARHVLVEAAWVATRTAGPLRAFAQRLAARRGWNIAIVAVARKLTVIAWHMLTRGEDYAFARPILVRAKLREIELRAGAPRARGRSIGVAPTAAERQLEREFAVQAEVAYERLVQDWVPSRKQVREPQAGRASHDAERQPARQGSAPTLHFGPASLPHQRDYAPDPGRQQDGT

SEQ ID NO: 106389 - protein, 394 aa, unidentified
MTAAYTSKGNTSGLVLHLAFELGWSQWKLAFTIGAGQKPRQRTIRARDLAALEVEIAKAKKRFQLDADAPVVSCYEAGRDGFWLHRYLTARGVSNVIVDSASIEVKRRRRRVKSDRLDADKLVTMLVRYQGGERKVWSTVCVPSVSEEDQRQLHREMQELKDDRTRHTNRIKGLLASQGLALEGVDESLPAWLPTARLWDGTALGADLQQRLVREWQRWHFVHGQVLELSRERSRRLRCDATPQVDKVRQLLGLAGIGVNGAWLLVYEFFGWRKLLNRKQAGALVGLTGTPYHSGSSEHEQGISKAGSRRMRKMLVELAWCWLRWQPESALSLWYAQRFASGKGPARKIGVVAVARKLLIACWRYLERGEIPAGAKVVDWRCKMTRPKAKKPAA

SEQ ID NO: 106390 - protein, 353 aa, unidentified
MKKIVVGIDISKEKIDASAIDVRGSQLGVVKLDYQVFENRPMGFRRLLVWARHLVKGVGLEDVLFCCETTGGYDRALCDYIYAKGQDIWREGALQIKRSMGVRKGKDDKADSLMIAEYAMRHMDKAVIYETPSQTVRELKALFLYRHKLVQEKTEKTVRMKQMEATAARSKSMSFILRDARKSIRTIEKSIKECERQIKQLYQDNGDLKKSYEHITSVSGISIVNATAFIAYTNNFKGISTANKIASYWGCASYRERSGTSVDKKAYVKCYSSSQLKAYLTQAAECTVKEHGIYRGYFLRLKAAGKPYRVIINNVRNKLIHLVCSLVTNDMDYEQDHELLRAQRKARAACLAN

SEQ ID NO: 106391 - protein, 357 aa, unidentified
MAQSMSLVGLDVHASQTHAAVLDVATGELRGVRLRMPPGQVVEFLQTLPGPVRAVYEAGPTGFGLARAGVERGIDVRVVAAGKVPRASGDRIKTDKRDAERLARLLAAGELRFAFVPSVADEQFRDVIRAIEDCRGDLMRARHRLSKLLLRREIRWAGPGSAWTQKHMNWLRGLDFADQCSQAVLIDYLSGVEMLLARRAALEQAIPDSRHAPTIAALRCFRGIDTLSGAGLCAEVGDFTRFRPKQLAGFLGIVPTEHTSDTKRRQGSITKAGPVHARRLLVEAAHHYRHRPAVGDGLARRQHGQDPRVIEISWRAQRRLHQRWNVLAGQRHKPAGVVAIACARELAAFCWEAATLN

SEQ ID NO: 106392 - protein, 354 aa, unidentified
MAETLKTAVTVVGIDIGKNSFHIVGLDERGAIVLRQKWSRGQVESRFANMPPRLIGMEACVGAHHLSRRLRALGHDARLMPAKYVRPYSKGQKNDFRDAEAIAEAVQRPTMKFVATKTADQLDLQALHRVRERLVSQRTGIINQIRAFLLERGIAVRQGVRFLRAGLPSILATPPDVLSPRMAQLIEGLAGDWRWLDARIEGLSSEIEALARQDSGCERLMSVPGIGPIISSAMVAAIGTGDAFSKGRDFAAWLGLVPRQISTGDRTILGKISKRGNRYLRVLFVQAAWVVLIKPKSWERYGLKPWLEAAKKRLHRNVLAIALANKLARIAWSVLAHGRNFEMRTTYEATAQTA

SEQ ID NO: 106393 - protein, 388 aa, unidentified
MSFTIDAGVRTETTIRPDHATVFVSLELSRSKWLITALLPCSDKMSKYCVDSGDGTALLDRLARLRARAEPRIGTAVHMVVIQEAGLDGFWIHRLLESNGMESHVVEPASIAVPRRCRRAKTDVIDGEMLVRTLIAFKRGERRVCSMVVAPSPAEEDRRRVSRERRTLIRERIEHANRIKGLLATQGIVGLEPMRKDFRDRVEGLQTGEGQPLRPHLKAEIIRELDRIDLVVRQVGVVEAERDALVKSDNIDTTAPAALLMKLRGIGPEFAAVLWLEGLFRNFANRRQLAAYAGLAPSPWKSGSIDREQGISKSGNPRLRTTMVELAWLWLRYQPGSALSAWFRERAGSERGRSRRIMIVALARKLLVALWRYTTLGELPKGAALKIA

SEQ ID NO: 106394 - protein, 339 aa, unidentified
MNIKTLGIDLAKKSFQLHGLDANGRVVLRRKIMRRDLSAFMVNLPKCQVFMEACGTSNYWGRKFIAMGHDVRLIAAQFVKPFVKSQKNDQNDAEAIVECGLRPSMRFVAVKDTWQQDIQILHRARRRAINARTAIINQVKGLLLEYGILIEECGSKFKAEAWGKLEDGSLELTSTIRSVIRENLREYDFLVQQVAHFDQEIKTAGMASEDCQRLLKVPGVGILGATAFIAAVGDARVFKNGRHVGGWLGLVPRQHSTGGVARLLSITKKGDPELRSILIHGARANLLSMKRKKKPDALSTWALGLLDKKGWGKASVALANKMARMMWHILAYKENYKVV

SEQ ID NO: 106395 - protein, 344 aa, unidentified
MTSMHFIGLDIHKKTISYCVKDVSGTVLSEGTVAATRAQLDDWVKTLPAPWTVAMEATMFTGWIYDHLLPHGAAVKVAHPLMLRAIAAAKKKNDRIDASKICDCLRCDFLPECHMVSAEVRERRRTLRYRKLLVRQNVQLRNKVSQMLMESGVVYNKQKLHKVGYFKELMETNPDISRELKPLLAICRETIVRIGKTESALIRSLRRDPLLHARVERLMTIPAVGPITALTWVLEVDDVARFHSVKQAVSYCGLCGAERSSAETIKRMPISKQRNKHLQSVLIEAAKLAPRLSPELALVYDTEKQKGHANRASIAVARKLVAYLLAVDRSGREFVVAGERRAAA

SEQ ID NO: 106396 - protein, 353 aa, unidentified
MRTYYVGMDVHRATIAIVVLNGAGKVVEQLVVETSATRVRCYLKQLQGRVYVTFEEGTQAQWLYDVVQPLVTEVIVCNPRHNKLLKAGNKSDRIDAQKLAELLRNGALKAVDHRDHGVRALKELVRNYDCLVSDTTRVMNRLKAMFRGRAIACGGHEVYRQDRREVWLSKLTERGAKERAGSLYRQLAALRALRQEAKLAMVREARRAAAYSWLMSVPRLGAVSVAQLLAVVGTPHRFRTKRQFWSYVGLAVVTSSTADMEVVEGVLRRSRRPVATRGLNRNHNHLLKRVFKNAATSACQSEPFKQHYERRLQQGMEPALARLTVARQLAAITLSLWKRGEKFQAERMKRPAV

SEQ ID NO: 106397 - protein, 406 aa, unidentified
MKQIVSVGIDVSKGKSTVCAMIHPNTIIKESFEVLHTVEEMSMLADYIGSLDGEIRIVMESTGHYHLPVAQFLYQKGFFICVENAYIIRQFSRIMLHGAKTDPLDAKKLAKYGLAYWSELKPYKFHPSCYTELSLLSKQYQTYIKLLIAAKQNVIHLMDEMLPGFKEALDTASSVQFSKVKYVDFAKEFYHVDMIKSMGKEIFRENYKQWCKEKGYRFQSEKADELFHLAEDGIPTLPTEFPSTRLCMEVATEQVSQLGYALEQILSQMQNLAKTLPEYQTIRQMGGMGEKLCVRFIADIGDVRRFHNGKALVAYAGIDAPPYQSGQYTGTKRRISKRGNSALRKTGYEVMKSLKSHPPKTDTRVYDFIIKKENEGKSRKQAKIAGLNKFLQIYYARVIEIYKNIV

SEQ ID NO: 106398 - protein, 403 aa, unidentified
MNSFYVGLDWGNEKHAVCVMAPDGTIVGERMLLNDGAVVSVLAAMVGGPLAGLKVAVEARDLTVVDALVAAGCELFTVNPKQVDRFRDRYTSGGAKDDRRDARVLASALRTDPDAFRAVLVESETEMLIRLRGRALRDCTEAFGVVANQLRAQLARYFPAVLTLCPGANERWLWRLLRKASMPERAARLTERTLAALLQACRVRKLTAADLHASLRAERLSIAPGVELACAEQALRLVDQLELLAAQLSCAKKLRNEAVEQLAEQQRRERGVSDVDLVASMPGAGETVVATLFGEAAHLLRDRDSRNLRVLAGVAPITKASGKSHRVVMRRSRSQMLADALFHAARVASMNAPRFKELLARQRARGNNYARALRGVADRYIDVLCAVLRSGVPYDSSRYPKTA

SEQ ID NO: 106399 - protein, 400 aa, unidentified
MLSIGIDVSKGKSTVCGMKPGGEIVYAPFEVQHTREGMSELVSLLRSSGEEVRAVLESTGSYHCPVVAALLENGIFVSVVNSLRMKRFCSQSIRKVKTDRIDAMQIALYGLAYWQELQPARLPEDTYRELQLLARQYYQMTSLLIKAKVDFNAICDQVLPGMQELMSDHAGRHKLSDFVLRYCHTTHILEMGETRFRKDYCKWAEKKGYRNCERMAALIFATAQNGIPVLPNAPSTQIVITEAIRVLHTVEASRDAILTQMQALAKTLPEYSLVREMPCIGDTLAPRLIAEIGDVRRFHSKRALIAYAGIDAPPYQSGKFCANNRHISKRGNRYLRKTGYEVMQSYVMHKPANDPIFTFIEKKRGEGKCGKLAMVAGLNKFLRVYYGKVTELYRSLPAIE

SEQ ID NO: 106400 - protein, 412 aa, unidentified
MTATNQFAAHVGLDWADKKHDVCVQFKNGERVFHVIEHTAEALDVWLTELHQKVKGRIAIALELKKGPVVYALQKYPFITVFPVHALSLARYRQAFSPSGAKDDPQDAELALELMLRYPQKIKAIEPDNADIRLLQQLVEQRRQLVEDKRRFVNRLINTLKQYYPQPLEWFSHRGSLLLCELIMRWPSLQQLKRARHDTIRNFLNAKGGRAMALTEQRVVSIDNSIPLTTDPSVIEANALMATALATQIKVVSEIIKTYDERIETLFDSLPDAGLFKSLPGMGPCMGPRMLAALGDNRDRFNSAEEIQNYAGIAPVTERSGQKSWVHWRWQCAKFVRQTFVEWTAKTVNSSYWARLYYQGQREKGKSHQSAIRALAFKWIRIIYRCWKTRTRYDEAKYLLALEARKSPLLKP

SEQ ID NO: 106401 - protein, 314 aa, unidentified
MQPIFIGVDVSKDTLDAATLPTLQKRRFANDTAGIAELVAWAGQLTPERIVFESTGHYQKQAVANLLAASLAAVVVNARQVRDFAKGLGLLAKTDAIDAGVLARFGEVVPTTVRPLPAPEIQEFQELCDRRGQLVRMLAVEKNHRHARASPKVLKNINAHIAYLEKQIKALEDRLDRFVESCDAFRAKNEVLQSIPGVGPQVSRTLLAHLPELGQGSRQTISALVGLAPYNDDSGQASRSRRIRGGRGKVRIGLYQAAVVAIRHCPEMKTFYSRLKSHGKASKVALIAVARKLLVLANALIRSMKPYEARTNSV

SEQ ID NO: 106402 - protein, 337 aa, unidentified
MDYFAGLDISMDETHVCVVDREGEVVHASKTASTAQAIAVELVKAPSCQRIVFETGRMAPILFHGLSQLGLPVVCIESRQAYQALKSLATHKTDRNDARGLAHLARTGFFKPVHVKSLPAHALRSLIIARKKLVGQRVTLENQIRGLAVVFGIRLPRALTAAFVNQALKGSEGVAGLSVAMRSLIAARTAVMTAVAAIDADMRRMTRASVACRQLMTIPGVGQLTALAFVAAIDDPSRIRRSRDVGAYLGLVPRRYQSGKVDYVGSISKCGDRRVRTLLYEAANVMMTRYKGQLKLKDWAFAIARRSTMRKARIALARRLAIIMHAMLRDGTEFLAA

SEQ ID NO: 106403 - protein, 394 aa, unidentified
MYFVGIDVSKYKHDCFIVTEEGVVIKDTFSFDNNRTGFTLFFNTLSSLGPPNKIRIGLEATGHYGNNLMKHLSVKGYSFVLLNPIIVSRFRSSETLRRTKTDKLDAMLIAEVIASRDFKNYPLLAYHFSDLKSLTRLRDRYVKQRSLYLVHLTNQLDVVFPEFKPFFGDSLQSKTAIYILTKYTLPKRIANLNMLSYDALRKLSRGKFTYPKFVKLKKLARNTVGSSSEIDGLTINSILRLYNLIEEEINTVEAKIEAIMLALDPPTMSIPGIGLMSAAAIVAEYGDINRFSSDAKMLAYAGLDAAHYQSGLANHKGRMVKHGSSYLRQALMNVAFSTLKYIPSLYDYYHRKKDVEGKHHRVALSHVARKLIRLIYKLETSRTRFDLSLYNSHK

SEQ ID NO: 106404 - protein, 364 aa, unidentified
MASVQFVGLDVHKDTIDATVMSGKNGAPDFEKRYTNSPKVVQKLFKSLQQRGPVAAAYEAGCMGFELQRMLKGMGVECLVIAPGKMPRFTSERIKTDRRDARTIAKLLKNGEVTPINVPTPEDEATRDFLRAREDLKQDLGRAKQRLMKFLLRHGYTYRGGSYWTMKFARWLSELQFTLPLLKETFDSYRLKVQELKDQMRMLDERVVAIAVQKQYAQRVARLRCFRGIDHLIALALVVEVGDFRRFATAASFMAYLGLVPREMSSGGSRKQGGITKSGNGHLRKLLIEASWHYRRKPSVSKRLRERREGQPVELIAYTDRAMNRLHQKYIKLVVRGKTKQRAVTAVARELAGFVWGTMNGKIS

SEQ ID NO: 106405 - protein, 375 aa, unidentified
MEGAPMLDTTTFVGLDVHARSIKAVSLDVMTGEVRAATFGYDAGAVAEWVRSVDPRARCVYESGVTGFDLQKRLSGLGVDCVVGAVSKMIKPSADRRRKNDRNDAEFLARMLSVGNVVEVWVPDDECEAARDLTRALEDARDDLSRSKQRLSKFLLRHGLVFDERTPTGRRKGNWTRAHWSWIESIRFAEGADNDVLAYYVDAVRRAAEEKARLEGLVEAEARKPRWRKRVDSLRCLKGVDTASAADLVFEAGEFSRFRNARSFAAWVGLTPSEHSSGESDRRGAITKAGNKHLRKTLVEAAWHYLTCSGRPKDLAKGQAPDRGARRHAAKGVRRLVERREALLARGVHGNKANVATARELACWVWAVGLMAEEA

SEQ ID NO: 106406 - protein, 313 aa, unidentified
MAKDKLDVAISEDPAAPVDTIANDPPAIADLVKRLSALKPAVIVVESTGGLERPLLEAMLDAQLPVALVHPGRVRHFAKGVGILAKTDRIDARVLVRFARQAEPRLAEKRRKNHDELRDLVACRRQLTATKTQQTNRRGATFAKPALKSIDAVIKTLDKQIASLDKQIRHIIDADDDFKYLDGLLQSVPGVGPAVSATLAADLSELGQTDRQCVAALAGVAPFPDDSGTTKGKRSIRGGRADVRCALYMATLSAVRFNPVIKLFAQRLKSAGKVNKVMITACMRKLLALINAMVRDGLTWDQLDVVKKLASTH

SEQ ID NO: 106407 - protein, 442 aa, unidentified
MAVRKRLEIEFPNAAGIDVGASSHFVAVPADRDERPVREFAVYTEDLQVLADWLKACAVDTVAMESTGVYWIALYELLERSGFRVLLVNTRHVKNVPGRKSDVLDCQWLQQLMSFGLLAGAYRPDDEVCVLRAVMRHRDNVIQGQARQIQHIQKALVQMNLQLPEVLSDVMGVSGQAILRAIVAGERDPRVLAKLRDARLKADEAQIAKALQGNWREEHLFMLEQALALFDAFQVQLAGCDAKLEALLNRLRCGDGTPQGKSKAKSRAKNAPKFDLRTALYRWCAVDLTRIDGLEVTTVLKVLAEVGPDLSRFASVKHFCSWIGLCPGTKISGGKRLSGQTRCSSNRVKQALKMAAANLIRSQSALGAYYRRLCARMDKPRAITAAAHKLARLIYLMLTRGEQYVDRGQAYYEERHRQRVVASLQRKAASLGLRLTPCDHPS

SEQ ID NO: 106408 - protein, 473 aa, unidentified
MQMEHPVCGGIDVHKDTLTACLRRVDANGHVSKEGRECATTYPSLLALSDWLVEQHCPIVAMASTGVYWKPVYHVLVGTVEVYIGNAHELRRRPGKKTDKRDAAWSAELLAHGLIRPSFVPPPDICALRDVTRTRVALVQTRSQSKNRVHQLLEDTNLKLGSVVSDLFGVTGRRMLAALVAGERDPQVFASLALGTLKHKRPQLARALTGQFTAHHGTLLALVLELIERLDRQMATLDQQIGAWVAPLHAQSAQLDSIPGVDSIAARDILAEIGTDMSRFGDAARLASWAGVCPGNHASAGKRYRGKTCTGHRSLRRVLGQCAWGARQTPTFLGRTFRRLEVRLGKKKAALAIAHTIRVIVYHLLAEGTCYEEARYDQWNPRQEARERHRAIKALERLGYTVTVERAASSSGRRLLSSASGIGWPFVPKTREGRSGSSVSTRGQLFRRNSMECEKFYSDEHSCCWHVYCLEKP

SEQ ID NO: 106409 - protein, 309 aa, unidentified
MKEELVYVGVDIAKAYLDAAIGNEKRRFANDALGHRQLINWIKQMPASVQVICEPSGGYERALVRALVAAQLKISLVPANRVRQFARAAGILAKTDRMDAKVLCAFGEAMQPGTISASQLEQEHLRELESQRRHLTHLLVMEQNRAARMSDLWVCKLNRRLITQIKKQIEQVDLLIQQQIKASRELSSRAEKLTAISGVGARTAALLLAQMPELGQLNRREVAALVGVAPFNRDSGRMRGKRAIYGGRRSVRHGLYMAALVAARHNPILCAFYLRLRAAGKPAKVALTATMRKLLIVLNSSLKPDLTYA

SEQ ID NO: 106410 - protein, 454 aa, unidentified
MCLEDRPVLEPNAAGIDIGAREIFVAVPPGRDEHPVRACATFTEDLEQLADWLVACGVTTVAMESTGVYWIPLYDILESRNLKVCLVNARHMKNVPGRRTDWHECQWLQYLHSVGLLRGAFRPEAEVTAVRTIMRHRTELVQMSSQHVLHMHKALTQMNLQIHHVIDDITGLTGLAIVDAILAGQRDPVELAKLRNWRIKADPETIRKSLVGNWRDEHLFTLRQSRELYRTYQQQMVKCDQEIEKLVGGLEPRVDPEEKPLPPDRKRYRGAKKRAKKNGQPDTGFNLRTEAYKLFGVDVTQIPGLETMALPLFGEVGRDMSKWPTADHFASWQGLCPDNDISGGRVLWKGTRRVRNRAGQMFRQAAYSLHHSLTPMGDYLRRMKTRLGPAAATTATAHKIAVIFYTMVKNQVEYDETIWATRDVKRQQRIEARLKRQANQLGYQLVPLEEKPAA

SEQ ID NO: 106411 - protein, 436 aa, unidentified
MDIVHPRVAGIDVHKKVIWVAVRLPGKAPGHREVTVRRFKTFWRSLQEMAAWLAELGVTDAAMESTGVYWWPVYHALAGARIEVCVCNAAHMRNVPGRKTDLRDCQWIAELHEYGLLRASFIPAAEVAALRQRTRYRKKLIGQRSSELQRLSKVLEDGGVKIDSVASTLTTASARDMIEALIAGQRDPAVLAQLARGVMRKKIPELQMACDGRFTDSHAQMCRLHLDAYDHLAAKIAELDLLVAKAAEPFAAVITHLITIPGIGQRTAQVIVAETGADMARFASPARLAAWAGLAPGDNESAGKRKKAAARQGDRHLRAAMVEAAWTVSRTATRPGARFRRLARRFGRGNEKKAAVAVAHTLTCIAWAVMRYDRDYAEAGADYYDHRDARNRDHLVRHYQQALARLGYQVTLTPPGDGHSPSAATTTPATPPGQAA

SEQ ID NO: 106412 - protein, 430 aa, unidentified
MEQVNGIRLREFRQVKKEIRGSTEHLIVGLDIAKEKHNAFFGTAAGRTLHKGMFFDNTYEGFQKLLIQTDALKVQHGLQKVVFGLEPTANYHKPLGEYLIKGGHLVVLVPAAATSKNRELLDGRWDKHDTKDSANVADLIAQGKCLYYDCPGEELRSLRGLLSLKKRLKKEEHGLRVRIRNQLLAQYFPEMDQHFGSVASLNVVQRCLDPSLISIMEYDEFCRTVAPGKVNLAQQRRLTQIWRAAKQSIGCSVGEAVSIEAQIMVTGLNRVRETIKTVDDKIENICLGFPEYSFLLTIPGFGPDVSSKVLAAIGDPHRFTSGKQVLKMAGFDLCASRSGKTSQSATPVISKHGKGDLRYALYQAAIISSLKYKEFIVYHTNKIRGREREKGIGTKMRVKLAAKFLIIAWTLMKKKEPFDPKYLNQGDGKV

SEQ ID NO: 106413 - protein, 402 aa, unidentified
MNAVGIDVSKGKSMVAIMRPFGEIVSTPFEIKHTSSDINSLVKLIKSIEGESRIVMEHTGRYYEVLAHQLSEANLFVSAINPKLIKDFDNDSLRKVKTDKADSVKIARYALDKWQNLKQYSVMDELRNQLKTMNRQFGFYMKHKTAMKNNLIGILDQTYPGVNTYFDSPARSDGSQKWVDFASTYWHVDCVRKMSINAFIDHYENWCKRKKYNFSKSKAEEIYGKAKELVPVLPKDDITKLIIKQAIDQLNSASITVESLRTLMNETASKLPEYPVVMAMKGVGTSLGPQLMAEIGDVSRFTHKGAITAFAGVDPGVNESGSYEQKSVPTSKRGSSDLRKTLFQVMDVLIKTHPQDDPVYQFLDKKRAQKKPYYVYMTAGANKFLRIYYGRVKEYLASLPES

SEQ ID NO: 106414 - protein, 474 aa, unidentified
MENKELFLGIDASKGYADFALMNVALELSEPCFQLDDTNTGHEKLSEIIETYFLSNPEMTLYCGIESTGGYERNWLNYLLFLGVRYKMKSVLINPALVKGISKAALNRSITDETSAVNVALYLANFKNKILYLQEDGQQKNPFESGRSLYTYQKMIVKQSVQLQNQLEKIIYQHFSEALIYCRHGMPKWLLKVLNKYPSPKDICKAGTSKLVRIKGISQQCAQGLINKAEKNSQSCDQNIAFIISHTTAEIIHKEQEIAAIDKYMAKEYSHHPLVKLLSTIMGVGTMTAILILFEIEDINRFATAKKLVAYFGLNPEYRISGDGKMGNHLSKKGRKMMRARLYMCCLTAAHRDPMMKQLYARYRGMGKNHYFAMGVLMHKMLRVIYGILKSMKPYDIAIDLQNREKASEKKENTALLRLQNVRENRKKSRRYISHKTEDLAPISKRKHKKIKELETSQTLEGVLIRDHHQPSQK

SEQ ID NO: 106415 - protein, 407 aa, unidentified
MELLVSILKRVIGLDVHQAQITACAIIEEPDGTVRVEQRQFGAFKRDRRELAKWCASFAPDEVVMESTGIYWKSPYAALEAAGILAKVVNARHVKNVPGRKTDVGDAQWLATLARAGLLRNSFVPPSKMRELRLIARQRQKLVGMLSSEKNRLHKVLTDGGIRLGVVVSDLHGQSARAMVKAIVDGQSPHEVLKLASKRLKASREELFDALQGELTDSHRFVLDELMRHIEEIEARIGRFDKRLLEGLASEQNALILLQTLPGVDLIGAAMLLVEIGTDMAAFGNADRLASWVGICPGNNESAGKRKSGRVRKGNLYVRRLLCEFAHAASRTKSAFKSKFEALIVRRGHKRSIVALAHKLLRTIFFMLDRGEYYRDSATDYEALSVQRNAARWIKKLISFGFIPKPA

SEQ ID NO: 106416 - protein, 368 aa, unidentified
MIKRFHGIDRHKMSSTVSILNQEGVEEKLVTIKGNLKNYIKNLGPCDAVAIETGIGCFYWANRIESRGAKCFIIDPYRFRIIKDSWKKTDKNDCRNIAKALWVYIITGEFGLPEVYKPKRDVIELRKLFAQYRNMNKYINMLKNNIQAILLDDGIVLTLKDKKHLLSEKEDEEFLDCLDITDASKICIKASLDILWKATSQKEVLTREIIRAGEPFKDKVKILISIKGITPLSALAFLADVGDIKRFKSVRKMNSYLGLVPKVKESANKGKSCHINKASRNLTRTILTQSLIQAMDASTYLRSSYEDTKIRRGAGRARIGLIRKLCGIMRRMLLNGELFRNVKKPLYEKKMKQYDKLLKEFEEERKTA

SEQ ID NO: 106417 - protein, 316 aa, unidentified
MVLPPCFVGIDGAKDTLDVALRPTAETWSVANDDAGIAALVAQLRAAAPTLVVLEATGHFHGAVTAALAAAGLPVVVVNPRQVRAFARAVGILAKTDRIDARVIAHFAEAVRPTPRPLPDAATQDLRAVLLRRRQLVEMLTAEHHRLASAPRRIHDAIQTHITWLECQLTDVDTDLTQAIEASPLWQATDEVLRSIPGVGPVLSHTMMAQVPELGTLGAKPMAALIGVAPFNRDSGTLRGRRTVYGGRAAVRAVLYMGALVATRHNPVIKAFYERLCAAGKAKKVALTACMHKLLTIMNAMVRDLKPWQPQEVAIA

SEQ ID NO: 106418 - protein, 374 aa, unidentified
MRFYNQPHRFYCGIDLHATSMYLCILDHDGQIVFHQDLPTEPDVFLQAIAPYRDDLVVCCECLFCWYWLADLCHAQKITFVLGHALYMRAISGAKTKDDKIDSEKIARLLRGGNLPYGYVYPKGLRETRDLLRRRMYLVRKRAELITHVVNTNTQYNLPPFGKKLAYARNRQELNILKRFSDASVRKNIELDLSLLDSIDELINDVELYLTRTVKVDLPQAYYLLNSIPGVGKILALVLLYEIHDIRRFADEGQFLSYARLIRPLKRSSNKVVGGGGSKIGNAYLKWAFSEAACLLVRCSEQAKCFLARKENKHGKAKALGILAARLGRTVYQMLRRGEAFDAQRFWNGEPRGKSTAGSGAGQAQGSTWRRARV

SEQ ID NO: 106419 - protein, 321 aa, unidentified
MTTAQTFIGIDVAQDSLEVASRPAGDQWQVPNDPAGIAALLPRLRALQPTLIVLEATGGLELPVLAALGSAGLPVVAINPRQVRDFAKAIGKLAKTDAIDARVLAHFADAVRPPVRPLPDAATRALGALVTRRRQLVEMLTAEENRRRTAATAIRADIQAHISWLRKRLKGVDTELSQAVRSSPLWREQEDLLRSVKGIGPVVSVTLLADLPELGTLDRKQVAALVGLAPMNRDSGRMRGKRTIWGGRASVRAALYMAALVGSRCNPVLQALYTRLLAAGKIKMVALTACMRKLLTILNAILKHRTRWAPPAPTAAASASL

SEQ ID NO: 106420 - protein, 410 aa, unidentified
MQTVVERGCGLDVHQATVVACLLVLRKNGTVHKQLRFFGTTTRELLNLRDWLLEEGCTHVGMESTGVYWKPVYAVLEGALQIVVANAQHVKKVPGRKTDVKDAEWLADLLCHGLLRPSFVPPKPIRELRDLTRYRRKLVEAQATERNRLLKVLEVANIKLSSVATDVFGVSGRLMLRALIAGKASPQEMAKLAKGKLRAKIDELEPALEGKLEPHHRFLLQLQLRRVEAAEQDLATLEEQIQQMLEPYAAQLKLLDEIPGVNLGLAAVIVAELGVDMKVFESVSQLASWAGVCPGNNESAGKRKSSHITKGNVYLKTALVEAANAAAKAKGTYLRDKFYRLKARRGYKRAAVAIAHKMLVAIYHMLSQNVSYNDLGDLYLDRLNKHHLTRNLVHRLERLGFQVTLELKAA

SEQ ID NO: 106421 - protein, 364 aa, unidentified
MNNTIKVEWPSREGTRSEVNPGKAVIKLGIDLHQEHYVVVAQEGGGNPKPAQRFKPGTFLCWAEKLKQKSGAEMHAVYEACGFGFGLQRQLTALGITCYVVCAQKLDERNKRVKTDGLDAKALCLKLDRFVGGNREALAVVRVPTEEEEQLRAIHRQREQLVKTRKRLEAQGRSLMVNHGMEPVQRWWKPRAFAVLAVPRWLKELLANSQPILLGLEEKIRALTIQLQSAASPNQPRGLGRMSSVVIDREIGNWHRFVNRRQVGSYTGLCSGEYSSGQTRLRTCVTKHGNPRLRAALVELAWRLVRFQPQYKPVVKWRRVLAKGALATGAARKKAIVAVARQLAVDLWRIRTGRLNPAQLGLSI

SEQ ID NO: 106422 - protein, 341 aa, unidentified
MPAIGIDTHKRTLAACAVDDIGSVLDERTFACTKAGFVELAAWAGGAAPEATIGIEGSASYGAPVAHHLMAAGFVVREVPPHLSRRERGRSRRPGKSDPGDALAIARVTLREPDLPPVRLEDRSTELGLLADARDDLVHAQTRARNRLHAHLVVLLPGYGRTLAQLVSGRQLLAIERALDGQAGVRAELARALLAEVRDLGRRASELERSIAALVAGHPLLALPGVGILTAARLVAETGDVARFRSPAAFAMLAGVAPIPASSGETRRMRLNRGGNRRLNRALYTIALSQAWHHEPAKAYIARKRASGKSWAEAVRCLKHRVSRPVFRLLQAGQPECAHAA

SEQ ID NO: 106423 - protein, 341 aa, unidentified
MSTATLVGIDLGKHSFHLHGQDKAGREVFRKKTTRQQMMRLLGNLPSCTVVMEACAGSHFLARQLMAFGHEVKLISPQFVRPFVKGNKNDFIDAEAICEAASRPAMRFVTPKTETQQTLSVLHRMRESLVRDRTKTANQAHGFLLEFGISLPKGLSLVRRLPCTLGEHELPPRLATLLKRLHEHFCYLDEQIRALDKEMDNQLAADDLGSRLLSIPCVGPITASLLCAEMGDGKQYGGSRDFAASVGLVPRQYSTGGRANLLGISKRGDKNLRRLLVQCARVYLQRLAFQQGALADWVRSLRERRHSNVVVCALANKFARIAWAIGANHSEFEAGPSALAA

SEQ ID NO: 106424 - protein, 387 aa, unidentified
MPQLNDLSRSLVALDQDSTIIAVVELSQSSWLVAGVLPGIERQPQKKLEPSAERLLGLLHRWRDEAVRAGKKITRIALAFEAGRDGFWLARWLNARGVEAHVIHPSSVAVSREHRRAKTDRLDTELLKRGFLGWLRGERGHCSMARVPTIAEEDAKRPNRERECLVGERTRIVNRMKATLARLGVRNFKPTLRKAAERLATVHTPEGTPLPRNVLAELQRDMARLGFVVSQIREIEQARQKRLEQEPETAPHAMVRQVARVIGIGLETADMLVHEVLSRPMRDRKAVARYAGLTGSPDESGARRREQGLARAGNARVRRGMIQLAWRFLRFQKQSALAQWYRARTADSRLGTRKTMIVALARKLLIALWRFVTTGETLDGVILRPAG

SEQ ID NO: 106425 - protein, 338 aa, unidentified
MNITTVGIDLAKNIFHLHGVNANGKVVLQKRRSRDRLREWAINEPPCRIGMEACSGSNYWARVFVAQGHDVRMMSPQFVKPYVKSNKNDRNDAEAICEAVTRPGMRFVQRKTVEQQDIQSLHRIRSRLVGQRTALVNQIRGLLHEYGIVLPRGIRQVRSRLPELLEDGENALTMFSRELFADLYDELRCLDERAASMERKIQWLFRRSEVCRRIARVEGIGPITATALVATVGDAGAFRNGREMAAWLGLVPRQCSTGGHSRLLGISKRGDRYLRTLLIHGARSVVRAAERKNDTGSSWIMELKVRRGNNIASVAVANKNVRIVWALMTRDEEYLAAT

SEQ ID NO: 106426 - protein, 432 aa, unidentified
MESTQASTAPSFSDLTHYAGFDWGKDRHHLAVVDGQGRLLLDLPFEDTAAGWGQVRQELARFPRLGVAIETRCGPAVERLLAAGLVVYPLNPKAAERYRERKAPSGGKSDRLDARSFADALRTDGQAWRTLLPQDPLTMELRILCRDEIGLIAQRTALVNQLQEALHEYYPTALQVFEDWTSPSAWAFVLKFPRPAALVSVGKRGWEKFLHAHKLYRPQTAARRQELMAKAGEFVNPNPAVTKAKSLLAVALARQLRLLEDQLDDYRERITELFRNHPDHDIFGSLPGAGEKLAPRLLAECGDNRAEFDDPQALQCYAGTAPVSFQSGKMHRVRLRRACNHWFRATVHLWADQSRRWCVWAQTYYQQKKARGMAHAAALRCLGNRWLKILWRMWQDRTSYNEALHLRNQVTHGSWVIALLPASPDKPVPNPA

SEQ ID NO: 106427 - protein, 453 aa, unidentified
MAQGSGLTRGDRNRNRKIGLLRGVVRRDRAVLAVDLGEDKQAAVLVDHEGRVLARKMVKAKAHQLGGLLEWAAGQAARAGFAGLVVACEPTGHRWKALMGLADAAGAGFCCVQSLAVHKEREKDDYTRDKTDHRDAYLIGRLAVRLDCYLPERAEEAWARLRHLGARRSGLVADVISCTRQVADLLACAWPAALATAARPLESTTWLAAMGVVTDRCCGDPARLRKMGYDKFLAAVRRELPRWGAKRVYRKIATGLWDALAGRGGVAAQRRGALERVHLLLGDWRSLLARLADTEQRMCAVLEELGLAALAASIDGVSALSVAVILAETGDLARFASGRAVVKHAGLNPAENTSATLAGRTRISRRGRPGLRTAAWRACWPGVRHNRVLAARYAHLTSRDGNRLSGGQARAACAAALLRWLWAVITRRQAWDARIAAGTIPARAGTVTAPAAA

SEQ ID NO: 106428 - protein, 391 aa, unidentified
MIYVGIDVSKDKHDCTIVSSEGEVLADVFTVQNNLDGFKLLLQRIKSVAPDLSKVKVGLEATGHYSYNILGFFLDKGLSTYVINPLHTNLFRKSTSLRRTKTDRVDARTIAAMMMSGVVLSSYTAISYHNEELKSLSRYRFCKVQERAKLKQSVSRLVNILFPELERLVPTLHLVSVYALLAELPGANQIASSHLTHLTHLLSTASKGSYGHDKAVEIRDAAKRSIGSIMPAKSLELQHTLRLIHELDAEINEIEGILKQMMDKIASPILSIPGISYRMGAMILAEIGDFSRFASPDKLLAYAGLSPTTYQSGKLDNAHAHMEKRGSRYLRYALFNATKYACIWDSSFAAYLARKRSEGKHYNVAISHAARKLVRLIFALQRSGKPYVPAT

SEQ ID NO: 106429 - protein, 410 aa, unidentified
MEVIVERPGALDVHNASVVACVRLPGEQGRREERLAEFATTTRGLLALHDWLLAHGATRVAMEATGVYWKPVWAVLEDDFECVLVNARHVKQVPGRKTDLKDAQWLCQLLEAGLLRASLVPPKPIRTLRNLTRYRKSQIRDRQREANRLHKVMQETGIKLDCVASDLLGKSGRAMLDALVAGTTDPEVLADLARGQLRKKLPALREALAGRFSAEHSLVVGRILAHIDFLDESIEQLSEAIEEQIAPFVPAVELLCTIPGVGRRAAEVIIAETGGDMSVFPTAKHLTSWAGVCPGNDQSAGRRRSGRTTKGSKWLRGTLIEAAKAAARSKDTYLQAQYARLRVRRGSSRASVAVAHSILTACWHMLQTGELYNDLGGDYFARRDPERTTKRLVAQLERLGHIVTLEQAAA

SEQ ID NO: 106430 - protein, 371 aa, unidentified
MGKDSTTKFIGLDVHSKTISVAIADEGRKGEVRHYGTIENTVEAIEKVIKSLTATGAEPRFIYEAGPCGFALYRYLTGNGFKCIVTSPAMIPKRGNVRIKNDRRDALTLARLYRAGELSGIYVPDPEDEAIRDLTRARNDARQAERKAKQRLNSFLLRNNLIYPRKTKWNRAYFYWLGFVVMKHPAQKIALQEYIEAVHEGTERVKRLSEQISLAVEEWRMAPTVKALQSLRGVSLITATITVAELGDISRFRHPKELMAYLGLVPSEHSSGESIRRGGITKTGNSHARRVLVESAWTYKHHARVTLPLIKRQEGLPRSICQISWKAQLRLCARYRRMMARKKPMQVVVIAIAREIAAFMWAIAKEVEATA

SEQ ID NO: 106431 - protein, 419 aa, unidentified
MSFKILKHNCCGLDVHKTWIFACVAITDSLNRTEYKQARFSSFTKGLQELCDWLAKYNCIDVCMESTGKYWIPVFNILEKNNLWVTLSHPKYTKPQKGNKTDRKDAKWICDLYMCGMVKPSFIPPADIRELGDLVRYRFKLGCMITSEKNRAHNCLTVSNLKLDDVFSDIFGKSSRSITEQILQHPGETFDVTPFVDSRCKTPVEEIQAAVDGAISAEQAVKLRQCLSHIDELEKHKAEIEREIFRLSDKYGDALTLIRTVPGFDKNPLTAIQVLSEIGGDMSVFPTAKNLVSWAGCCPRNDQSNQKIKSTRISRAGSYFKPVLVQIANALIKSKKHPEFAARYRRIKARRGHKKAIIAICRMLLTAIWHILADLKPYTPEGFLEARPVKEAKVLTASQALHLLKQRGYIIKDEAVPVT

SEQ ID NO: 106432 - protein, 325 aa, unidentified
MIHQVLGMDVSKETVDISIYNGSYHSHKVLKNTPRVLLSYIKKYDKQTLHLVMESTGIYHLRLAMAASEHGYMVSIVNPLIIKRYGEMKMRRVKTDKADAKLIAEYAYEQKPPLFRPASKERSQIQQLLKGLEDLHQSKSQMKNRLEAYDHGLGITPALRESITKIISTIDEQIDKLTDELNDNMDKYYPELKEKLTSIPGVGAKTASTIIAYYGEFENFQTAKQAVSFAGLNPNPRQSGTSVNRGSNISKKGHSIIRKTLYMCSLSLVRCNPEFKCYYEKMVSEGKAKKKALVAVANKILRQIFAILKYDREWTPYYSLKYKNA

SEQ ID NO: 106433 - protein, 387 aa, unidentified
MEPNGQLHPQTRHWGTMTRDILMMADWMAAQGVTPVALESTGVYWKPIYNLLEGRFTVLLVNARHLKQVPGRKSDIRDCQWIAQLLQHGLLQGSFIPPRPQRELRDLTRHRTQLVEEKTRTSNRIEKVLEDANIKLGSVASEVMGVSGRAMIQALLEGEKDSAEIADLARRSLRGKIPELQKALEGHLTEHHRFLLRLLWKELTQQEALIAELEAKIQELTRGFAPQIERLDGVPGVDRRVAEVVLAELGSDMNPFPTHRHLSAWAGMCPGNEESAGKRRKRRITPGNRWLKRTLVQAAWAATHTKNSYLASQYRRLAGRRGKKRALVAVGHSILVILYYLLKDGRHYADLGNDFFDRLEPQRLTRYYVNRLQRLGHKVTLEPCVTV

SEQ ID NO: 106434 - protein, 343 aa, unidentified
MQTITAIGLDIAKSVFQVHGVDADGQVVVRRQLKRRYVLAFFQKLPPCLVGIEACASAHHWARELQALGHTAKLMPPAYVKPYVKRHKNDAADAEAICEAVTRANMRFVATKTPEQQSCLTLHRARHLLMRQQTSVINAIRSHLAEFGIVAPVGRNGVEQLLGVVADSNDKRLPEVARACVAALGAQLRVLKVQILEFDRMIRAWHRSSEASMRLDQVPGVGPVLATALVASVADPKAFRSGRDFSAWIGLVPKQNSSGGKERLGNISKRGDRYLRSLFTTGALAVIRYAKIHGTRHRPWLTALLARRPTKVAAIALANKLARMAWAMMAKGERYKEPAALAA

SEQ ID NO: 106435 - protein, 408 aa, unidentified
MQAVHERCAGLDIHKKTVVACVLTGSGKQIRTYGTMTRQLEALADWLAAEQVSHVAMESTGVYWKPVYNLLENRGLELLVVNARHIKNVPGRKTDVKDAEWIADLLRHGLLRASFIPGRDERELRELVRYRRTVIEQRAHDVQRIQKVLEGANIKLSDVASDIMGASGRAMLERLVEGEDDPVALSQLAQKGLRKKQDQLQQALAGSIGAHQRAMLRHLLDHVKFLERQIEELDGQIQERTRPFEQVIDHLDAIWGLGRRSVEEILAEIGVDMSRWPTHRHIASWAKISPGNHESAGKRYSGRTGMGNRWLRAILVEAAMNVSRNPHSYYAALYQRISRRRGKKRAMVAVAHSLLVAIYHMIKDGTLHHDLGSDHFERLDRGQIARRAIRRLERLGYQVTIQEAAPAA

SEQ ID NO: 106436 - protein, 320 aa, unidentified
MNDSIGIDISKAHLDVYHPADTGTSARFSNDPTGFRALTRFIGPKQPDLVVYEATGPYHARFEQAFSRRLPLVKVNPLQARRFAQACGTRAKTDAVDARMLAQMGSALDLVPDVPAAENQNELKELQIARTALVKDRTRLRNRLKTQTLGFTRRQTKARLAQIERQLKALQSEMASLINTCPKRTRAYAILRSIHGIGEVAAAAILIECPEIGTLGKKQAACLAGLAPMTRQSGTWKGKAFIQGGRKHLRDALYMPALVASRFNPDLRDKYQAMINAGKPAKVALTTIMRKLIELANALIRHDRKWKPKLGACLSNTKIQ

SEQ ID NO: 106437 - protein, 335 aa, unidentified
MKHYAGLDLSMETTQVCIVDESGRKIASMKVESAPDMIAHALREAGGVERAVIETGRMSPAICHGLRDLGIPVICIDARQAHQSLKALKANKTDPHDAAGLAQLARTGFYKEVYVKSPAAHGVRSVITTRNHLVESRVRLDNMIRGLCATFGFKPGPGQGKAFIDRVMEAANIPGLGQSITALLAVRTGLMKQIKEMDLVLREFAHRSQSCRQLMSIPGVGVQTSAAFAAAIDEVGRFRQSRTVGAYFGLAPRRHQSGEIDWTGRITKQGDSMLRKLLYEAANSILTRSRGSFALKGWAMKIAKRRGLRKARVALARRLAVIMHAMLRDGTLFEA

SEQ ID NO: 106438 - protein, 352 aa, unidentified
MEQFIGCDAHKEYSVFVAVNEKGNAGEALRVAHDRQLYRKFLARLPPGSEIAVEASGHYSWLVDEMERSGHHPKLCNALEAKRRMGLTNKTDKLDARGLAILLRNGTLPEVWIPPSELRDQRELLRMRIFLVHLKTRVKNRIHGTLARHNVVVPGADLFGVASRLRLEARLPELPLHCREAVERELATLDFLETQIESAEHQLEAIMKVSAEADLLKTLPCVGKILSMVLMLEIGRVDRFPTAAHLASYAGLVPRVHSSGGHTRMGQICGNVNRNLKWAFVETGNLIVVNQRGLAGTHVVRLYQRIKRKKNHQKAVVAVARHLAEAAWWVLTKQEVYRDPRVARQALSSTHG

SEQ ID NO: 106439 - protein, 445 aa, unidentified
MGSKTKRKRPLEVVYPNCAGIDIGSREHWVAVDPEHDKPVRRFKAFQDELEALAGWLRSVGVKVVAMEATGVYWIAVYELLESKGFEVHLVNSRATRQVSGRKSDVLDCQWIRQLMSYGLLRGAFRPPEKVTALRAVVRQRQTKVQEQSRCVAHLQKALTQMNVQLDNVVSDLMGKTGQAILRAIIAGERDPQKLSKLRDRRLRADEATVARSLYGNWREEHLLALSQALAHYDFLTGQIGECDQQILRALAVLPSRTAEAPTAAVKVFRSRHRSTAEHKELHRELRRVMGVDLTAIPTIAIDTALVLAAEVGPDLSRFPTEGHFSSWLNVAPPTRITGGKPLRGPGPHVVNRAGQALRQAASNARRSDSFIGASHRARLARMDSAPAIKATAHQLARILYAMLTRGQAYVEQGIRAFEAERRERQLRALERNARKLGLTLAAVA

SEQ ID NO: 106440 - protein, 430 aa, unidentified
MEEDVYYGRCAGIDVHKKVLIVCLRTGRKTEIKTFGTLTHEIREMVVWLKDNGCQMTAMESTGSYWKPLYNIFEQENLPVMICNAYHLKNVPGRKTDINDAQWISKCLSQGLLNPSFIPDREQRELRDMTRFRKSQVEERARNINRMQKFLEGANIKLGSWLTDVEGKSATQLLELVIGKPDFTVEDVAGCMHGNMKSTADELFLSLEGYMTPTQREFFRHVINVIRQQTTQIEQTDAMIKCSLSDNYKEAIKVLSTIPGIGEISAEQIIAETGTDMSRFATPQRLSKWAGVCPGNNESAGKRKSGKTPPGNKTLKSTLTQSASSAKRKKESFFHAQYNRLVPSRGKNKATIAVAHSLLIAIFFVLSGKTFKDLGADYYTNFNREKKINSHVKQLSKLGVVIPEDVLHNIIRNDARANPNATTVLNIKPA

SEQ ID NO: 106441 - protein, 412 aa, unidentified
MEVLYACCCGLDVHKKSITACVLWAEGKGKARKEKRRFGTFTRELLQLADWLRACGVTHVAMESTGVYWKPVWNILEGQFEVLLVNAQHIKAVPGRKSDQKDCEWIADLLQHGLLHGSFVPPKEMRELRDLTRYRVSLAQEENRIANRVQKVLEDANLKLASVASDPLGVSGRAILKAILAGEEDTERLAEMSKGILRKKIPDLRLALEGRVTEHHRFLLQELLDHQEFLEKKMAEVEAEIEKRMRPFAAEVERLDTIPGVDRVTAWSLVAEVGVRMEQFPSAGHLASWAGLCPGSFESAGKRLSGRTRKGSASLRRCLCQVGSVVSHMRDNYLSAQYRRLAARRGGKRAVLAVAHTVLVMAYHILKRKQNYQELGADYFDRLNADAIRRSLVRRLERLGHRVTLEPLPQFA

SEQ ID NO: 106442 - protein, 422 aa, unidentified
MEELVRVLFIGDDWAEDHHDVELEDEGGRRLARARLPEGLEGITRLHALVAEHAPAAWAELPSEQVAGQVVVGIVTDRGPWVTALRSAGYVVYAVNPLSAARYCERHSTSGAKSDAGDAHVLAEIVRLDRAHHRPIAGDSELADAVKLLARAHQNAIWERTRLVLRLRSTLREYFPAAIEAFADLTASDTLSLLERAPSPALAARLTRGQLTAALRAARRHHVEAKAVALQEVLRAPALRQPPVVESAYASVVAGQLRIIAALNAQIAGLGEVMGEHFDRHPAAEIYLSQPGLGVVLASRVMSEFGDDKTRFADARARKNYSGQSPITRASGRKTIVLARYATNRRLGAALHMQAYAALTGSPGARAYYDTIRSRGISHHAALRQLANRLVGILHGCLKTGSLYDENTAWQHRQTDTHVAAA

SEQ ID NO: 106443 - protein, 457 aa, unidentified
MVAVMIGIDPHKSSHTAVAIGAGEEPLGELRVQACPSQAEQLRAWAAGWPTRAWAIEGAAGLGCLLAQQLVAAGERVLDVPPKLAARVRLLQAGDTNKNDPNDAFSVAVAALRSPAPRPVLAEDHAVVLKIWAKRHRDLARLRNQAACRLHAVLCDLVPGGHPKEISAAQAARILERATPTDAVAQARCELAAEFLTDIRRLDAQLREANKKLAAAVKASGTSLTGLFGVGPVIAGTVIGDVRQVFRFPSRDHFAAYNGTAPVEVSSGGRKAWRLSLRGNRRLNHAIHMAAVTQIRHTHSDGRAYYEKKIAEGKTGKEALRCLKRRISDAIYAALVADARQAAAACAKGPGGQPGNHSVSRAASSHPERRLFGQATPGPATTLRPAHNPGGGARHSPVAAIQPPAKPQVQVERPQRSEDERPGGAARRRPHSAARKAPRDPDLASEDTTAKKTQATA

SEQ ID NO: 106444 - protein, 360 aa, unidentified
MFCERTSVGLDVHARSVVAAAIDGQTGEVFRARLTPAHTEVLGWVGGLPGPCAVVYEAGPTGFGLARALTAEGIRCEVAASSKLHRPPGDRVKTDARDALHLARLLRLDEVVPVRIPTPGQEAARDLVRAREAARSDLMRSRHRLSKLLLRHGLVYSDGKAWTSTHDRWLRRLSFDSAATQAAFDDAYETVALAAARRDRLDEKITAMASGGEFTAMVHRLACLRGISTLTGFALAVEIGDWDRFTGGSIGAYLGLVPSEHSSGQSRSQGPITKTGNIHVRRLLVEAAWHHRTPYRPSVVLQRRWDQATPAVRARAHAGNQRLHARWVSYNVRKKRGVVANVAVARELAGWCWSLAVLPD

SEQ ID NO: 106445 - protein, 425 aa, unidentified
MQETTQHDAVDVGRGRHHAVALDRNGKRLYNKALPNDEVKLRALIAELKTHRRLLFVVDQPSTIGALPVAVARAEGVLVAYLPGLAMRRIADLHAGETKTDARDAAIIAEAARSMPHTLRSLRLADEQLAELTMLRGFDDDLAAQVTQTSNRIRGLLTQIHPALERVLGPRLDHPAVLDLLERYPSPSAPAAANEKTLANRLTKLAPRLGKNLAAEIVQVLNEQAVIVPGTQAAAIVMPRLAQQLAALRKQRDEIAAEVERLVLAHPFWPVLTSMPGVGVRTAARRLTEAAPKAFATAAHLAAYVGLAPVTRRSGSSIRGEHPSRRGNKVLNAPCSSPPSLPYETQSHGPIPRARSSRASATTKHSSRSHGDAATSCLPCCATAPFTHPSQPLTLDERHRAPARAVPQHRRAAPRPCAGCDPAPM

SEQ ID NO: 106446 - protein, 476 aa, unidentified
MNIKGTKKKNQVVTANIFEQQELLKKAEVIKENLTASTWRELETNGKFDKNKKLSFISDDMLILGCDVGSETHYVRAIDTRGRELSKSAYSFNNDYEGFQSAKEWAVKIAAEHDKSQIVLGLEPTGHYWFCLATWMIANGISVVQVNPYAVKQTKEVEDNSQLKDDRKDPKLIANLVKDGNFGMPYLPEKIYAELRRLSMFRDQLNEDRIRTINRMHREMKIYFPEYKEALGKVDGAFSLELLKEAPFPDELTALGEEGIRQILGSFAKLRGRGYSRAREILQYAKASVGIKDGSIASKAAVKWFVQKIMELDVELAVIENQINQKCQEIPHTGNVLEISGIGENTLSGILAEMGDISRFDDVKEIQKLSGLGLVACSSGKHKGETKISHRGRKRLRYWLFQAAKSAVAHAEEFKELHMYYTTRADNPLKKMQSLIVIACKLLRIIYTILNTGTKYAPKKMLMDIRRPENKEAIVA

SEQ ID NO: 106447 - protein, 368 aa, unidentified
MEEVRAFIGLDVHKATISVAAADAGRSGEVRHIGTIENNPVAIGRLARRLVRRHGNVEFVYEAGSCGYNVQRQLAGMGLTCRVCAPSLTPRKPGERIKNDRRDAIALARLHRAGELTYVWVPDALHEALRDLVRARHAACQDVRRDRIRIQAFLLRCDLRFEGKPWSTRHRRWLCNRQFTHPAQQIAFQTYLNALEHDEARKLEVEGQIRELLATSPWAMQMQALQALKGVGPVVAATIIAEVGDFSRFTHPRQLVAYFGLAPGEHSSGSMVRPRGITKAGSSIARTVLCEAAWSYRTAPKVGQWMKERCPPVPYDIKALAWKAQLRLHKTYRRLTARGKRSVVATAAVARELLGFVWSIGQRVPLGT

SEQ ID NO: 106448 - protein, 355 aa, unidentified
MTSSKYIGMDVHKESISVAVRNAVGKIVMECVIETKASTILQFFDGLRGELHVTFEEGTWAAWLFDLLKPHVTKLIVCDPRRNALLQDGNQNDRVDARKLSDLLYLNKLNAVYHGDHGLRTLKELGRSYLTITRDQSRVMSRIKAIYRSWAIPCSGKQVYGLRHRAEWLAKIQEPGVHRRAELYYQQLDALRTLRQQVRKDLLTESKKHEVWKRLCAIPSMGPIRAAELLGILQTPHRFRTKRQLWTYCGLGVVTSSSADHEVANGQLRRKKKHVQIRGLNENCNHDLKNLFKGAAVVASIKPGPFAEFYAALVAKGMRPEMARLTLARKIATIVLIVWKRGVCFDANHLKLQTA

SEQ ID NO: 106449 - protein, 345 aa, unidentified
MKITTVGIDLAKNVFAIHGVNEHGRTVLKKVLKRDQVAAFFANLPACLIGMEACASAHYWARKLQGMGHTVRLIAPQFVKPYVKSNKNDAADAEAICEAVARPNMRFVPIKNVEQQAVLAQHRARQGFIKARTAQANQIRGLLAEFGFIIPQGIANIAKRVPELLEDATNELPGSFRLLVQRLMEHLKELDHQADEVEAQIVTWHRDNELSRKLAEVPGIGPITASALVATVSDAKNFDNARQLAAWIGLVPRQNSSGGKNVLLGISKRGDTYLRTLLIHGARSVICAFQRKKNKVDGWLGALLARRNPNVVAVALANKNARIVWVLLAHGREFRPDYTSAKAAT

SEQ ID NO: 106450 - protein, 277 aa, unidentified
MMAQNDLVVVGIDVAKDRVDACIRALALRQSCPNTAQGHHKLVAWLRKYHVSRAVMEASGGYEREWRKVLHNAGIEVRIVDPKRVRSFALSAGRLAKNDAIDAEMIAWFAETFSEAPNQTHDAAHEELVALVKARIGLVELKTRLQSQDAHAAPGQVRKTHARVLKGLAAEIEKLEAAIAAKVKATADFAERAAIIESVPGFAETTSANLLAGMPELGHVSDEIAAALIGLAPYDDDSGQRRGERHIRGGRRWIRNAIYMPCLGAATQNNPVIKALL

SEQ ID NO: 106451 - protein, 422 aa, unidentified
MSYCPVAGIDVSKQFSDMCILSPDNKIFAQEKIYHDETSINRANALLQKAERLFFSKPVIVMESTSHYHLILFQFFSEHGYDVIVVNPLQSNSMKDFSIRKRKTDRVDAFKLAMMYRTKTLRPSQIPQTATRALRQLCRHRAELLNDVSSYKNRLTALLDQTFPGYDKVFSDVGGVTSCAVLVRFPTPTILLVEEESELVDVIAAASKAGYNFAKKNAGLLISAAQKAQTLGIHSCADETLIVCTIQMLRTLSESVLQIETAIDNLMAQIKEMRNNVSLLQSIPGIGSHSAALLLGEIGDISLFKKPKQLAAYFGLDPTERQSGSFRGTKNKLSKRGSPYARAALHMGVVNSICKRRKDSAANPVLLSYYEKKCKNKPAKVAQAASMHKLVFIVFAVLRDQKPFELKTPEQHAVEQGFVKAA

SEQ ID NO: 106452 - protein, 322 aa, unidentified
MSQPNPLCVGIDVSKATLDIAASSDVAQFTVSNDSDGFDAIITALRRHSVALILMEATGGLEVAVACSLQTEGFEVAVVNPRQARDFARAMGYLAKTDRIDARVLAQIAEVINRHPERKRFIRALPEAERQVLAAMVVRRRQLIAMLVAERNRLHPSHPQNKKSINTIIKALEDELARLEKDMNSHIRSHFKEIAKRLSSIKGVGTMTVSALLAEIPELGTLSRREISALIGVAPVNRDSGTMRGRRTIFGGRAGVRSALYMAALVATRFNPVIKTFYVRLLATGKAKKVALVACMRKLLTILNAMLRKNEEWDESYHYVAP

SEQ ID NO: 106453 - protein, 347 aa, unidentified
MDHVGMDLGKRESQIAILTDDGELINIRIRTERHRLVEVFGRRPKAKIIVEASTESEWVARCLEDLGHEVIVADPNYAPMYAQRTRRVKTDRRDAHALAHAGKAGTYRPAHRTSTERRDLRARLAVREAVVRTRAAWITRIQSLVRREGSRLRTGAPETFLTRVKELALPPTLTTVIAPLLELLGPLNKQIAALDEELERIVAADEVTRPLTTVPGVGPVTATAFVATVDDVTRFRDAHQVEAYLGLIPCEWSSSEAQRRGHITKAGNGRMRWLLVQAAWCILRRRKRPETAALRDWADRIAGRRGRSIAAVALARRLAGILFAIWRDGTVYDATKVRGPMTARRAA

SEQ ID NO: 106454 - protein, 368 aa, unidentified
MKKNNTCLKSPKRSKTRQRSITIGMDLGDKTSRYCVLDSEGEIVREGTVATTKKGMKQRFGNLARCRIAIEVGTHSPWVSRLLSSLGHEVIVANARQVKLISTSSRKDDRLDAQTLARLARVDPQLLRPIRHRSEKAQGDLMQVRVRAALVDTRTGLVNTARGLAKAMGERLPKCDADQMGVGKMQGLPAVLVEALAPLLETVELLTQQIKASDQKLEQLAGRDYPETELLRQVSGVGSLISLTFVLTVEDPKRFRKSRDVGCYVGLRPRRSESGESRPQLGISKEGDEYLRKLLVQGAHCILSHKSPDTDLKRWGLKLAGKGNKNAKKRALVAVARKLAILLHHLWVNGEVYEPLRNSRLLEQKAVA

SEQ ID NO: 106455 - protein, 361 aa, unidentified
MFIERTSVGLDVHARSIVACGLDTVTGRVVRRRLVPSAESVLAWLRELPAPVAVAYEAGPTGFGLARQLAAAGVRCVVAAPSKLQRPAADRIKTDARDALLLARLLRMDEIVEVRVPSVEQEAARDLVRAREDARGDLMRCRHRVSKLLLRHGIVYSGGHPWNGVHETWLRHQQFGQRGIQLAFDADLEAMLLTLDRRDRLDKAIIEMATGGEYAAVVRRLGCLRGVSTLTAFGLAVEVGDWHRFTGATIGAYLGLVPTESSSGQQRSQGSITKAGNTHARRLLVEAAWHHRRDYRNPGPAMRARWNLASPAAKARGHAGNHRLHQRWQTFVARRKKTVIANVAVARELAGWCWSLAVLDD

SEQ ID NO: 106456 - protein, 409 aa, unidentified
MRYYLGVDWADQEHAVWTLDEGGRKISARTVAHTATGLSEWGRELDEWRAQGIELWAAIERPEGRVVDFLLDHGVVVYPLNPKALDRARDRFRQSGAKSDPFDARVAAEFLRTDHGHLTALQPSSAAAQELKYLTEDCQRLIRQQTRLLNQLTATLKAYYPRALEVAELSTALARAFLTAYPTPDALSRLTERQWQRWARAQHLSASRTAELWSTLLAPQLPVPAHVVRAKARLMQTLLAALDPVLAGVAGYRQTIDDFFAGMPAAPTARTLPVGERGLLVPTLWARLGDAPDRWRSFRHLQAQAGTVPVTVRSGKQRSIHFRYACDKTLRYVVDHLAFRSLQRSDWARAYYDQQRARGHGHRQALRALGAKWLKIIFVMWRDGVAYREEHHLANIARQQLRCSARKTA

SEQ ID NO: 106457 - protein, 372 aa, unidentified
MGKSITDLSSVTTVGLDLAKHVFQVHGVDASGRVVVAKAIRGNKLLEFFASLAPCLVGLEASGSAHHWARELITLGHVARMMPPAYVKPYIRRQKNDASDASAICEAVTRPSMRFVGVRSRENQAALMRHKAREMLVTQRTQLLNGLRGHLTEVGVIAPQGLRCARELAELIEACDETIPFDVCEALAPLVVQLRNLDEAIPRLDRIIAKLAQKDETARRLMSIPGFGPITASAMAATIQDASSFAGPREFAAFLGLTPKQNSSGGKPKLGRISKMGNRYLRKLLVVGAHAVLFHRKPHTDPLRIWAKKLIEKRSPSSLSPWRSPTRWRASPSQSCGARRSIGKFRRKEPRYGSRPGSPRAQAAQESRVTKR

SEQ ID NO: 106458 - protein, 324 aa, unidentified
MSDATVGIDVSKETLDANCARGQRKQGRIFANSPDGWKLVLSWLKAMSCEQAHVCMEATGRHSLGVALALHDAGHVVSVVNPAQIRDFSRTKLGRNKTDKVDAALIREYAELFKPGPWAPPSPAMRRLCELQTVRAGIVSNRVEWKNRIGSGLGDSTATTLAAATIEHFNNQLEAIDRAIGETIDQDAELRSRRDLLLSVIGVGETLAALLLAEMPEPGVLRRSGEIVAYAGLNPSHHQSGSSIDRPTRISKIGNATLRSSLYMPALSAMRFNPAVAALVARLKRAGRLKPKQIVVAAMRKLLVLCFGVLKTGKRFAPAIAMPG

SEQ ID NO: 106459 - protein, 324 aa, unidentified
MVVIDDDEQELARVKVVADKSQVAALLDFAQSYVPRRWAIESAGGLGFLLAQQLVRAGEDVVDVPATLAARVRLLGSGRGSKNDPNDALSTAIAALRDPYLRTVIVEDHAMVLRLLADRHQDLTSLRTQAACRLHALLAALTPGGVQRRLSAAGAASRLRSIHPANSVQAQRKEMATDLVADIRRLDKNIAEVKKRTKTAVAASGTTVTDVYGVGPIVAALLIGHSGDITRFPSSGHYASYNGTAPIEASSGTVVRHRLNPRGNRQLNHALHMAAVTQLRNDTPGRAYYLAKIDAGKSKKEARRALKRKISDQVYRRLRADAAT

SEQ ID NO: 106460 - protein, 409 aa, unidentified
MYFVGIDIAKKTHQAAIICSDGKLIGKPFKFSNTVDGFNLFLEKITAVNTDLSQFEIGMEATGHYWLNLYTWLSDKGFRLHVINPLQSDALRNLYIRKTKTDSVDAKIIADVIRIGQYSETQLADENIIALRDLNRQRFYLVDMAADLKRKIIAMMDRIFPEYQDFFSDMFGKTSVQIMKEYTSPEQILQIPTERLTQLLKKASRGRFTETKAKELKALAANSFAALLSSEMTTLLIRQMLEQLDLLEKQIADIEHIIAAQFAQFNTKLTTIPGIGTTLGATIFSEIGDINRFDKPKQLIAYAGMDPSVKQSGNFVGTQSHMSKRGSPYLRRALWLAAVVAVSHDDLFKYLFQQKMNAGKTYAQAMGYICHKLLNTVFAILKTGEEYKPVYPPQIDVSKFADQPINSQL

SEQ ID NO: 106461 - protein, 363 aa, unidentified
MTIAMREQRNEISFSGQKIYVGIDVHLKSWSVTVLSETSVLKKFSQNPNPEALHGFLTRSYPGAEYHSVYEAGFCGFWIHERLTALGIDNIVVNPADVPTKSSEKLRKTDAVDSGKLARSLRANELKGIYTPDSVSLEMRSLIRLKNSITKDTTRQKNRIKSQLRYLGIEIPQEFLEPFSNWSKRFFAWLKEVETLTPSGRQALDIQIRHLEELRRQKLEMTRAIRVLAKTDRFREPLRLIMTIPGFGQTTGMAFLSEICDITRFRNAERLAAYIGMIPMCHSSGEKDGTGNITVRKHAVMRCNLIEAAWVAVRQDPTMNLFFIEQCKRMPKSKAIVKVARKLVNRIYFVLKHQTEYGNRVVS

SEQ ID NO: 106462 - protein, 384 aa, unidentified
MLSIGVDAHKRLHVAVALDEAGRVVDRWRGPNSADGWQAAYAWAVALGNPRQWGIEGAWNYGRGLAQCLVAGGDVVYEINPRWTAACRRQARNRAKSDPLDAQAVALLVWPDGGSLPRVGVEDQTVLLDLLVTERETAQAEAVHLRGHVHALLLQIDPEYLNHLPTLTSQKGVAALLIYENIDTPLKRERAAAVRRTAQRLRLALDQVAELTSRITDLAVAAGLTPLTRLCGINLLTAAALAGILGPGLRFTSDADLASYAGAAPLETSSAGAIRHRLNRGGNRRLNAILHRIVLTQARHAPDGRAYLARRRTDGKSTREAFRALKRFLARTSGTFGGSASPARRYSRLPSSPLQHRSVGTQLVERGVPRASTTPSGPPLTGFS

SEQ ID NO: 106463 - protein, 419 aa, unidentified
MSRTIAGIDVHKRVLMVVVVSVGEDGGAQHTVEKKRCGTVYSELDRLRDWLREKGVTEVVMESTAQYWKPVWMALEGSFELGLAQAWSNRAPRGKKTDFKDAERLARRHLAGELTMSFVPGTEQRQMRELTRRNAQLNREVVRIQNQIESLLEPTRIKLSGVISDLFGATGWRILKALAEGESDPDKLAALADNRIQCPRDRLVDALRGTVTAIQRRLLNQLLKDAELAETQKRELEEMTGELMRQHTGPIQKLIRVPGIRLRSAEDIIAEIGPDAGAFPSAAQLSSWVGACPGRAESAEKNQSARCAKGNMSLRRALCEAAQAAVNTKNCRFQQKFKRLLPRLGYPKAIWAIVRHMCVVVWNILHQGADYVEHGGQTTLGAIRRRAQRLNKELRAAGLAVVIVPLTMETQPISAASAG

SEQ ID NO: 106464 - protein, 337 aa, unidentified
MNSSGRTIAIDTAKRVFFLHGENEFGKMILRDKLTRERLLPYLANQPASTIAIEAGSGAHHWCRAFVRLGHEVRMIHAKFVRPFVKSNKNDWNDAAAICEAAQQPTMRFVAPKSLEQQDLLTMHRIRERIVSQRTGLCNQIRGLLAEYGIVLPQSVSRLRRALPDVLEDAENELTVRGRELIASLLEEFRAIDERIKPYDRAIEQASLDSWTCRRLRSIPGIGPVGATAVVATMGDPKAFKNGRHFAAFLGLTPQQHSTGGKSRLGSISRRGDVYVRRMLIQGAHSILKHIAHREGPRADWLSALVARRGRQVAAVALANKSARIAWRGERSIPGAA

SEQ ID NO: 106465 - protein, 412 aa, unidentified
MEVVYACCCGLDVHKKSITACVLWAASQGKGRKEKRSFGTFTRDLLRLADWLAECGVTHVAMESTGVYWKPVWNILAEQFEVLLVNAQHIKAVPGRKTDQKDSEWIADLLQHGLLRGSFVPPRPTRELRDLTRYRVSLAQEINRIANRIQKVLEDANIKLASVATDALGASGRAMLEAMLAGEQDSARLAEMSKGLLRNKIPELQLALEGRMTEHHRFLLRQLYDHLRFTESKLSEIEQEIDRRMRPFQDEVTRLCTIPGVDRVTAWGLLAEIGLNMNQFPTSAHLASWACLCPGSFESAGKRLSGKMRKGNVSLRRCLSQAAWAISMMKNNYLSALYRRIAARRGAKRAVMAVAHALLVIAYHLLQRKENYRELGADHFDRIDAGRIRRSLVRRLERLGHKVTLEPLAQTA

SEQ ID NO: 106466 - protein, 437 aa, unidentified
MMLESIPYLSVGLDVGADLTWMSIMLPNGTLIGKPFKIVHSDPQSRELAVTKIKEAQEAYSLESRCFLESTGIYHIPLLCFLRDKGFDCSVINPIITKNSTNMNIRKLHNDKFDSKKAAKVGLDASLKTSIVPDDAVIDLRNLVRDYYYFKDLQSAVVLKLNAELKVSFPAYLDVFSKITTQTSLKLLEAYPLAADMLAAPKDELVETIRTTARFGEKYALAKYDALQAAAKDAAVFGRALPSNALRIRLYIKIYREYQAHLDSILEELHKAVDTLEGTTVHGRISLIQSLHGVGFLSAVVLIAEMGSFDLFPSPKKLYAYFGMDPGVNDSGKFHGDRVHMSKRGSSLARRIPHMVAINNLKVEKGTKAPVNPVIYDYYIRKCTSKKKIVAVGAVMHKICNIIFAMLRDNKPFELITPEEHCEQYLATHPDKAPSAA

SEQ ID NO: 106467 - protein, 403 aa, unidentified
MFAGWDWATESHDVTLIGDDGARIDRWALAHTETGIDGTLARLRRHGDPAEIPVAIETTRGLVVDRLLAAGHPVIPVHPNAFNAIRPRWGAARAKNDPGDSFKLADYLRTDSHQLRTLAPTLTETLQLQALTRQRADHVEARVAAVNQLAALLDEHWPGGKAVFASLDSDIALSFLDRYPTPQDAASLTAGRLETFCKRHGYSGKRPGTVLLERLRTAPTPASRLGQATIARLVGIQVRLVRALRATIRELDTSIAKALTDHPYAELIAGLPRIGTINLGQVIGEIGPMLERADSCAQLAAETGAAPVTKESGKHRAVTFRHAANRRARQALMTFADNSRHGNDWAARIYNDARARGKRHPHAVRILARAWLRIIWACWRDKTCYDPAVHHTTSKINSRQGLT

SEQ ID NO: 106468 - protein, 428 aa, unidentified
MKTKLKEEKINGKDELLASYDVSGEELHFCTEYSRDGKVYSIEDVVSNRTRAIKNHFLELEDICRKLGFKSIHVICEPTGGYEKTLILVARKMNFKVSYVSGEATKKARVIESNDDSKSDNKDKFIVLTLAKMSKTLNCRQLPSAYSRLRLLGEYYDDAANNTMRIRTEISAVKLKLFPDFPFKCSYLYTRAGEALIEKYGLNPFNITKYSWGYFWQRMKVYLKQPEKEKLLKLYRSAVSIVNYISEAEASVSERQLRWLWETYQTSLKRKERLKTELCELYKTLPEYKSLAKIEKVSDSLMARLIAETGPLSDFKNSAKILRYAGLNLRVRQSGKYNGLNKISKKGRALLRKVLYQMVFSCLMGEGKIYHENYIRKKETSQTGLIAMVSIMRKALKMILGVSKSSIEFDIERVYKDQSEYIKLDLTA

SEQ ID NO: 106469 - protein, 281 aa, unidentified
MKRKLVVGIDVGKERYAVSLFDGERFRDFSVPSSPQELLRRVTPYLPGKTRRVLFVMEATGVYHLKLALFLKERGYPVSVVNPFVVKKYAEMLQKKAKTDPVDARILAQFGFFASPPPFVPKDKKAYLLEEIQKTIEDYQKRRTEILNHLEALKHHPFPHPRLQKLYEEELQRIKETLKTLEKEAEDLALQYAPRAYELLLSIPGVGKRLACAILGILSPLTRFARSKELASFLGLTPQIDQSGKRKERAWMKKGESLPAETPLSFRSQCFPVQRAVQGAL

SEQ ID NO: 106470 - protein, 367 aa, unidentified
MRKNNTNWVGMDVHADTINVSVYQGDEKLPKEEYEIQTDARSLGRLLKRLQGLPGEVRCVYEAGPCGYVLQRYLTKNKILCEVAAPALIPRKAGDRVKTDRRDARNLGRLYRAGELTMIYIPKEEDESVRDLIRAREAAVKEVRRVRHYLGKFLLRHGHRYRDGKQWTTKHKAWMKGIRFELSSSRILFEEYELALDQAEERVKRLTREIEEIAKKPEREKLVSALMVMRGVQVITAMTILFEIGDLRRFSRAKDFMAALGLVPSEYSSGGKTSRGSITKTGNTHVRRVLVESAWHYRHRPTVGKTIKARRVGKPPELLSIAQKADVRLNRKFRRMTDRGKRSTVAAVATARELAGFVWAIGQQEHP

SEQ ID NO: 106471 - protein, 323 aa, unidentified
MGAVVNQIPSSFASPLFVGIDVSGPFLDIAYHGSVETFRLPNAPEGFAELINRLLPLKPELIVLEATGKLERAVLQALCQAGLPAVAVNSTWVREFARSAGQLAKTDRIDARVIARYGAVMKPKVRPLTDEQTQQLQALILRRAQLIEMLTAEQNRRKRAHKSALPSIDEFIQFITQRIKDADRDIDSFLHTNELWRKNEALLRSTPGVGKTTAATLIAFLPELGSLNNRQIASLVGLAPFNSDSGTHRGERHTKGGRHFVRRALYMACVAAQRANPYLKAFCDQLRARGKKTKVAFVAGMRKLLTQLNAMMRDGTAWNPPKP

SEQ ID NO: 106472 - protein, 310 aa, unidentified
MPNTQYVGVDLCKRELVADLSAEAKPRAFAQDEAGHAALLAALPPGAHVVCESTGGYQRALVKALQAAQVPVSVVLPHRVYHFARSRGIRAKTDAIDARLLTAFGRDRKPAPLPAPRPGAEELQHLVRARQQLTAQLNEESSHDEHCTLPFLQAQAQARRQFLENQIKAIEQRLRALIKADPLWRHQAQRIREVQGIGEVSAWTVLAEMPELGQMDRGQAGALLGVVPDPKQSGPREGRRHISGGRAYARKVLYMAALTASQHNPVLAPFYRRLTQEKHKPHHVALTAVMRKLIELLNRLLADPNFVLAS

SEQ ID NO: 106473 - protein, 421 aa, unidentified
METAMDEVLEVLYTRCCGLDVHKKTVVASVIITPPQGRVQKHLHTFSTTTTGLLALLDWLGAFQVSHVAIESTGIYWRPIFNLLEGECEVILVNAQHMKAVPGRKTDVKDSEWLASLLRQGLLQASFIPPKAIRDVRDMVRYRKRLVSQRTQEINRIQKVLETANIKLASVASDVVGVSGRLMLQALIDGKADATALAELARGTLRRKLPQLQEALEGRVDDHHRCLLKHLLAHIDWLEKALEQLQREIEKQLSSYQKALDLLMSIPGLKLLSALTILSEIGDDMSRFPSAKHLASWAGVCPGNKQSGGKRMSGKTTKGNAHLQAALAEVVWVISHTNDNYLSAQYHRLAKRIGKAKAVVAVSHSLLVIIYHVLRDNKPYQELGADYFDHLDTQRIANQSVKRLEALGFHVTLEPQKEVTA

SEQ ID NO: 106474 - protein, 390 aa, unidentified
MAKAQRSAMVQYSIQKADYRHVVSLDVHDKNTYIYAMDLRSGEIICDHNVQGSVSVALKVIDKLGIKKDETVVLYESGGCGFSPARMFDKAGYACKIIAANSIPRKGSGKRKNDRTDAINNFQYFMAGTLRFVQIPSEEEVADREIVRYRRDVTQKIGKQKQIIYAFAKRYGLVFDATKTSWTKAHRQWLKTVTMHSSARFVLDRHLRELENLETELGEIEAVLDKLFSTNTQYKALKELYSLLPGFGQVNATTMVLEGGDLGRFPHPNALMSFTGLIPGKRSSGGSDPSMSITKEGNRYLRLALVNAASVYRDYRLVYSKKNIAGMQCTIRKEFLERVQKRLCMRYRHLRDKGKAGNKTRCAVARELAGFVWELSNKIAPKLEEYPLAA

SEQ ID NO: 106475 - protein, 333 aa, unidentified
MWDKATGEMLERALSHERKEEVRAFYAGLQGPVRVGIEASGQSQWFEQLLAELGHEVWIGDAAKIRASCERKQKTDRRDAELLVKLLDEERFPRIWVPTPAERDARQLLLHGHKLVRMRTQLKNQLQALALNQGVQRKRKRWSEAGRKQLEALPLLPWASRRRAELLVLLDQLEASIGELDGAAAEQANTRPAVRRLMTHPGVGPITALAFVLTMGPAQRFRRGKQVARYLGLIPTEHSSGGRGQRLGPISKQGNPFLRGLLVEAAQSAVRHEPEMRRAYQRLAQRKCRALAKVAMARKLAVRLYWMLRTEVDYAQLIQGSHAGQLESFRGRV

SEQ ID NO: 106476 - protein, 337 aa, unidentified
MLNKPSVSIGVDLAKAKFDVLMIGSAPKSRGRTFDNSAAGFAAFENWAGEHGAFPANATVTMESTGRYGERLCAHLQRGGWTIHVVNPARTAAFAKSLGHRSKTDLLDAEAIARFGLAHADALGAWVPADPRIMALRGLLRRRAQLREMATMEKNIGGDLDPKVDRTLAKLNAAHLAFIERQIARIDGAMKRLVEDDAELRPHFEHLTAMVGVGELTALELICHVLGHDFDSARACAAHAGLTPAHRQSGSSLNGKPHLSRQGDAHIRRALYMPALSIVRRAGPMADWFKSLVARGKAPLAAVCAVMRKLIHIAYGIIKGGKPYDPTLAFAPMPGAA

SEQ ID NO: 106477 - protein, 337 aa, unidentified
MATMTIRIGLDIAKNIFVVYGVDRNGKKTLSKKLKRQSVLSFFAQLPPALIGIESCGSSSYWGRELKKLGHDVRLIAPKYVKPYLMKEKNDLNDASAICEAISRPNVNFVAIKTEEQQEILMVHRVRSRSISTRTSLMNQIRGHLAEFGYVFSQGREKCKKELMDFLSDNDLSPLVMEIVHDLYASVLREEERIAQFDRLIDRWARSHPVARELLTLDGIGALTASAVVATAGDSKIFKSGRQFSAWLGLVPRQYSSGGKSKQGRITKKGDTYLRTLLIHGARTVLLMSSRGKGVHTEWVEKLRKSKPDNVVAVAYASKQARMLWAMMFKYQNNGIC

SEQ ID NO: 106478 - protein, 320 aa, unidentified
MNNDKLVIGVDVSKKYLDVAFGSQDKSPEHLEYTDKAVADLVERLQQLQPAMIVLESTGGFEKPLMVALFQAGLPVARIQPQRIRYFAKSLGLLAKTDQLDARVLAHYGEAVHPSATPLPTERQQWLAGLVARRTQLIEMRVSEQNRLSTTPKSARSSIQEHLAYLQAEIARIEAEIDDFIDQTPQMQEKRDIITSVPGVSNVTAAVLLARMPELGHLNRKQIAALAGLAPYNKDSGGRKGRRAIYGGRADVRKVLYMAALSAARFNPVIRAFYQRLVKAGKQPKVALVAVMRKLLTILNAMVRDRQPWTPPAHHTSPSA

SEQ ID NO: 106479 - protein, 338 aa, unidentified
MNYYAGIDVSLEALSVCVIDASGKIFRETKVASEPEALIAWLGSLGVSLARIGLEAGPLSQWLYAAMRQAGLAVELLETRHVRNAFKIMPVKTDRKDARGIAELMRLGWFRPVHCKSMEAQETRAVLTSRKLVQKMLHETEMSLRGMLRNFGLKVGKVAAAQFEFRIRELVEGHPTLAAIAASLLATRATLRREFNALEKRLRAIARSDTRARLLMSTPGVGMIVALTYACAIDDPSRFKSSKIVGAHFGLTPTRYQSGETDRTGRISKIGDSSVRAVLYEAAHVILTKAVRGCTALKSWAMRIAKRAGMNKAKVALARKLAVIMHRMLADGTTFQPA

SEQ ID NO: 106480 - protein, 404 aa, unidentified
MVLVGIDWSEKWHDICLMEESGQLLDQRQIEDSAAGLTKLQSLIAKHAKDPAEVVIGIETPRGLMVQALHAAGYAIYAINPLAASRYRDRHAVSKKKSDRGDAMMLADLVRTDRHRHRPLGEDTQLAEAVKVLARSHKSLIWTRQQLGNQLRSALREFYPGALEAFGKELCEAESLDLLKRAPTPAQGRALSLAKITSTLRKAGRRKVEERAAAIRDALRAPRLEQPALVAQAYGVTVADLAGLIQDVIVRIDRQEKELGLSLKGHPDAEIYLSLPGLATVLGARVLAEFGDDPNRYQDGKARKNYAGTSPITQASGRTKVVMARFVRNEWLADACQRWAFSAISASPGCRRYYNALRDRKKSHDEALRALANRLVGILHGCLRHRQLYREDIAWPPPEAATAA

SEQ ID NO: 106481 - protein, 362 aa, unidentified
MAQVRSWVGLDVHAAKVVAATVDRESGELGVRRLSGRTGEVVAFCAGLPGPARVAYEAGPTGFALARALEAAGIGCVVAAPGKIERPAQDRVKTDRRDAERLVRLLMVDGLHAVRVPSGEEEALRDLVRAREDVRGDLMRARHRLSKLLLRHDLRFDETARAWTIAHRDWLTRLELGDRGAQVTLLDYLGAIDALLVRRDTLEVAIGELVPGSPWADTVARLRCLRGIDTLSAVGLCAEIGDWRRFARAGQLMSYVGLVPSENSSGEKRRQGQITKSGSRHARRLLVEAAWHYRRPPRRGTTLARRQAGQHAHVLALSWKAQQRLHHTWRRLDHERGKRRTIVAVAAARELAGFCWAIATAD

SEQ ID NO: 106482 - protein, 437 aa, unidentified
MSGKKSLELRVSVDVGYRRHSVAMGLPSGEVLEEFEISHRPEGFEQFFSRIEKHQKVRNCEVAVAMEGFNGCARPLDAMVRRRGYRLYNINNLKLARFKEIFPGAAKSDRIDARKGLELFQLSDHLPLAKEVLQEVKGTPQENEVLKRLTRRRRRLVDERVRVISNLQTDLQAVCPGLLEITKNAGNQWFLNFLVSAATLPQLARLRPSTLLKVPAVGRKYARLIEDWQKRAHFSEEVEWVSEMIQEDAKRCLELDEKIKALKAKIKGVAKDSKIAKTLLSIPGFGTICTAELAGEIGTIERFSKEGSLALYLGMSTLDNSSGKYQGSKQPKHVNRRAKAAMMVALDRHRKYVPESQRYYEKKRSEGKKHNQAIRALGRHLCRIIYKMLNDEREYEFRPDKGNTKTKVRSRSCVKTQIRKPKISAKGKITTSTNGAR

SEQ ID NO: 106483 - protein, 411 aa, unidentified
MEQIHDRVAGLDVHRDTVAVCVRTPGPRGGAQTEKARFDTTTAGLAALAEWLAGHAVALAAMEATGVYWKPVYYALEGRFELWLCNAHHVKNVPGRKTDMSDAEWLADVAAHGMVRPSFVPPPPIRELRELTRYRKTQIDVRAAEIARLEKVLQDAGIKLTSVASKVLTQSGRAMIEALIAGQRDPVALAELAKGKLRPKIPQLTAALRGHFGAHHAIIAARILAHLDFLDETIGALDARIAARVAERYQSAARLLADVPGLERRSVEVIIAETGADMSRFPSPAHLASWAGLCPGNHESAGKRRRVATTPGNQWLRRTLIESARAAARTKDSYFGAQYRQIARRRGPNKAAVAVAHSLLDVIWHLLTTGEVFTDLGADYFISRQDKEHQARRLTRQLEKLGFTVQLTDAG

SEQ ID NO: 106484 - protein, 345 aa, unidentified
MTYYTGIDVSLRSVSICVVDDKGEVCLEAKVAAEIDAIVDRLHRFSGDVKSVGFEAGTLTQYLTYGLQAAGFEVICLEARQVSVTLAAMRNKTDRNDARGLAQILRTGWYSRVHVKSLHSHQVRALLASRKAILKKCVDLENELRVLLKVFGIRLPSRVGHGSFDAELRETVCSDDMLACALVPLLDARTVLYKTYLKLDNAVKGLVRVDPICRRLMSIPGVGPVTALTFKAAVDDPNRFKSSRTVAAHFGLTPRRFQSGEVDNPGHISRAGDADVRSALYVAAHSLLTRNAQWSSLKAWGVRLAKIRGHRRAVIAVARKLAVILHRMWIDGSEFRWGSPTATVV

SEQ ID NO: 106485 - protein, 392 aa, unidentified
MSQQHCHFDASRSLTALEQDSTIIAVIEMSQSKWLVAALVPGVARHPLKKLDAQEEGLLKLLHRWRNEAGQAGRAIRRIVVAYEAGRDGFWLARWLRARDVEAYVIHPTSIAVSREHRRAKTDRLDTELLMRAFLGWLRGEKRHCSMVAIPTIEEEDARRPNRERQNLVTEQTRITNQMKAIFVRFGIRAFRPTLRNAEEKLKGLRAAEGTALPDNTRAELCRLLARLRVVREQIRAVEQERLRKLAVVPTEQKSSQAMVRLIARVLGIGIETADMLVNEVLLRHWRDRKAIARYAGLTGSPDESGKRRRERGLARAGNARVRCGMIQFAWRFLRFQKDSALAQWFAARTTDGRGSTRKTMIVALARKLLIALWSLVTRGEIPQGLILRPAL

SEQ ID NO: 106486 - protein, 317 aa, unidentified
MNAQINQNEINVGVDTGKTQLDIYIRPLDIYFVVTNDDEGIKEAIVEIKKHKVTRVVIEATGRLEQPFIMACAKANIPFVIANPVNIKRFAGAINQKAKTDKLDAQLIAHYAEVIKPKLSQLKPEQIRLMSDLLSRRRQLMDMQTREKNRLQIMPKEITSSIKPVLTVLKNQLEKTDNKLHKLIESCEEYKIKNDIIQSVPGVGNVVAFNLISEMPELGYINNKEAASLVGVAPFNRESGSYKGKRMIRGGRSQIRTAMYMAMMSAIQCNPTFKAVYHRLIATGKPKKVAIIACIRKLVITLNSMVRDGVYWDPKMN

SEQ ID NO: 106487 - protein, 323 aa, unidentified
MSSFVGIDVAKNTFDIATHLPNGKHKTKAKLPNDAKGFKAFEAWLNKQVEPTALIVMEATSIYHLELAEFVYNKGYRVCVVNPATTHAYADSELRRIKTDKSDAKLIADFAREKAEKLQLWAPEPLKYRQLKAMVRRLDDLQEMEQMELNRLDVSDEKVKDSINSVLRHIEKEIAETHKAIKKHIDDDPDMRQMRDLIVTIDGIGQKTLERLLAELGDLRKYDDPRKLVAAAGLNPKLQDSGKLKGRTVISRIGSARVRAGLYMPGLVALKHNEAIIAMKERLKANGKAPKQIICAAMRKLLHFVYGVLKSGQPFDPKLALAR

SEQ ID NO: 106488 - protein, 270 aa, unidentified
MNPSTIGVDVSKAWLDAHRLVDGAARRFANDKTGRKALIKWMGAAPVKRVVFEPTGPYHRARERALDIAGLPIAKVNSGHARRFAEAAGKLVKTDRADAAMLARMGEALDLEPRPCVSQTIAELKELHLARAALIKDRTAATNRAKAITLSLLERRNKKRIAEIDAKIVEIDAAVEQRIEGDPLLTRRFEILLSVPGVSKFTAFALLIEMPELGRLEGGQASSLAGLAAVRRQSADEGRLCQAPQGEARQGRHHRPYAQNDRPRQRLVAR

SEQ ID NO: 106489 - protein, 344 aa, unidentified
MKNYAGLDVSLEETALAIMDETGRTVREAKVASEIEAIDAWLGKTGIAIDRLGLEAGPLSSWLHAGLKERGWLVICIETRRLRAVTRAMPVKSDRKDAAAIAQVMRTGWYRQVHVKSLASQQLRVLLRHRKILQAKRQDLENELRGTLKAFGLKLGTVGRAKFAERVSGLVAGEPWLERLALPMLAARAALLKSFNELHALVLKIVKADAVCRRFMTIPGIGAVNALAYKTGVDDPTRFRHSADVGPHFGLTPRRYESGETEVVGSISKCGDAMVRSLLFEAALTLLHRVKVASILKRWARALAKKIGTRKAAVALARRLAVIMHRMWLDGTDFNPSLIRAAAT

SEQ ID NO: 106490 - protein, 343 aa, unidentified
MRIVGITGGVDTHADNHVAAAVDRNGGLLGVESFPADEVGYEDLLAWLASFGELVRVGVEGTGSWGVGLTRFLTDHEIVVVEVDRPNRQTRRKQGKSDPTDAISAARAALSGEATVTPKSRNGPVEQMRVLLVARRSGREQRIQSLNQLRHLVFTAPEPIRVRFKDRPKAGLVSEAANMRPNRGSDPIIYRTNLVIRNLARRVRSLNSEIKTIDQTLVQLINETAPSLLELYGVGVDTAASLLVTAGDNPERLHSERSWAHLCGVTPIPASSGKVTRHRLNRGGDRQANAALYRIVLTRMSSHEETRRYAARRREEGLNTAEIMRCLKRYVARQTYKHLPHMI

SEQ ID NO: 106491 - protein, 418 aa, unidentified
MSQRDTLFCGIDIGKARHVACVIDADGGRLMRSQSFTNDAAGFALLRQRLEDIRRGKPLLIAMEATGHYWYALHEYLTLQGYQVIVLNPLQTSHQARKQIRKTKTDKKDAYHIATLVKNGDFLRTVIPGDVATTCRQLTRLWFALRCQRTRLGQLIGSTLEWLWPEFEGHFADPLCATAQAVLRLAPSPQALCAVDLPTLTTLIETTSRRKLGEDLARRLLESARTSVGMRRGNQGATEAITTLLLQLDANKPVRQRLGDKIEALSANIPACLLTLPGVSPISAVSLFAETDPISTFTNPDQLVAFAGLDPAVFQSGEYDAPHRHVSKRGSPHLRRTLWLMAMGAILHPGPLRDYYQRRRKGGLHHTSAVTATALKLCRITWRIMTDQRDYTPEPPARQVSVAAVKTNASPKKRKASR

SEQ ID NO: 106492 - protein, 428 aa, unidentified
MKKHMLSTLFVGVDVSLRSQHAVMLDFFGEQHASIPFPNNTSGASLIISEIIKHATIIKATHVVVAMESTSFYSFHLCNYLFQSPELAAYQTKVYCLNPKVISAYQKTFIDVDKDDPHDAYGIADFARTGKITSEPFQGSQFVALQRLTRARLHLVENLSREKSYVLTNIFIKFSELAAISVKDPDSPFSNKFGATSMAVLEEMSPDQIAYASLDELIDYLMEKGKGRFTDPEAKAKLLQKAARDSYRLDKALYEPLNAAIAASFNCIKALETEVKAVDKAIEKAIGGLASNDYKCLLSIKGFGPVISAGLIAEIGFISRFSSEEKLAKYAGLTWRKKQSGAFTSDITYMTKTGNQYLRYYLGEAVMSLLKNHNSEYTDFYRKKYDEAIRFKHKRALALTSRKLVRLIFALLRDNRLYTNRKERVKAI

SEQ ID NO: 106493 - protein, 331 aa, unidentified
MKFKEIIGIDVSKSTLDACLHSLGISLVVENSKSGYRKIISWFKRNSDIPLDQVLFCFEHTGLYSFNLACYLSEKNVNFILVPGLDVKLSLGIQRGKSDKVDAKKIALYAFRRKDEVTPYQMPAKSLTKLRQLLSLREKLVKQRAGYEGTLKDQSVVLKVKDNALLFSIPRRLIKHLNKQIDSIEQEINLILEASPEIKKKYELIISITGIGRQTALNLIVITNNFLLFDNHRKLASYAGVAPFPNTSGTSIKGRTKVSNLANKKLKALLSSCASSAIQHDPELKLYFKNRTEKGIHKMNTINAVRNKLLARVFAVLKRGTPYVTMCRYAA

SEQ ID NO: 106494 - protein, 339 aa, unidentified
MKEVSTVGLDLAKKVFQVHGVDARGTVVVRRALRRSQLLAWFAKLPRCLVGMEACATAHYWARELVKLGHDVRLIPPAYAKAYVRRNKNDPADAEAICEAVSRPAMRFVAIKSERQQAAAGIHRVRDLLMKQHTMLRNQLRGLMAEFGIVAAKGRHGLGELLAILADAEDQRIPSPLRAGLLLIGETLRETDRKLATIDRQLAAAGREDATYRHLITAPGYGPILSSAMAAMVIDPAAFRRSSDFAASLGLVPRQEGTGGRVWLGPISKRGNGYLRRLLVNGATSLLNSKRAKQDPWLVKLLATKPRKVVAVALANKLARIGWALMTRQEDFRSRLAAA

SEQ ID NO: 106495 - protein, 354 aa, unidentified
MEKIAIGIDFSKETFDMTVLDTQKANGKLDADALAKAPHEQFKNQRSGFRKSLSWIRKVTGRKLDKDNAIFCGEATGKYSIRMSEYLREQGLFIWIDSGLRIKNSMGIVRGKSDKADSCRIAEYAFRHWDKAELYEPLEKDVSALRELFLYRDHLVAIRKATEQRNSLIKEFSDVVGESSFIKRSGDRIVKELKEEIKRCEEEMRKLVESNEEMEKAYDCITSIKGISLINGVAFIVYTNNFKWFGNNPRKIATYWGVAVFGKESGTSVKGRTKTSKCASRKLKRLISEAATCAIRWEPRIKAYYERLMAKGKHHGVAMNNVKNKLIHIITALAVNKTMYSDTYEEDRKLKKVG

SEQ ID NO: 106496 - protein, 416 aa, unidentified
MNAVGIDVSSRKSTVAVLRPLGEVVCLPFDVTHDIAGLASLAEKLKAIDGETRVVMEHTGRYYEAVEKALHEAGLFVCAVNPLLIKEYGANSLRRVKTDKADAIKIARYALDNWADLRDFTPMDAIRYDLKTLNRQFQLASKQRTASANNLIALLEQSFPGIRKCFDSPVRSDGTQKWVDFAHSFWHVDCVRKQPFPAFCERYRKWCKLHAYLFKLSNAEEVYALAKRAVVLTPKSKVVKVLVQEAANQLISISRSVEVYRAEMDRLAAMLPEYPVVMAMYGVGKSYGPQLMAEIGDVRRFERKQALVAFAGIDPMPNQSGDKNVRSNKSSKRGSPYLRKTLFNVIRTYLQCAPQDEPVFQFLNRKRAEGKPFYVYMLAAANKFLRRYYAKLRDYFASLDTLQPVAPIPTILKAAL

SEQ ID NO: 106497 - protein, 319 aa, unidentified
MNTVSSEQVIGIDVSRDWLDIYCLPDRKRLRLPNTSEGHAHVVSLARRRGALVCFEATGGQEWRLWASLDAARIVARQLPPAQVKAFAASRGTRAKTDRIDAELIARFMVFRPEAGRRHPTGKLRAIRASTSKRAQLVEMRKRLLVQIKAHEKLATAGMFTDMDVELKALLDTRISELEERIEQAVAADGTLAETARILRSIPGVGPVASTMLIAEMPELGAISGEQAAALTGLAPIAHDSGALRGKRTIAGGRRALRHVHFQAALVAANHNPTLKAFAQRLRDAGKPHKVIITAVARKLVNIANALCKARKPWGLQGA

SEQ ID NO: 106498 - protein, 419 aa, unidentified
MLYAAIDIHKHAFQAAVLDPETGALVEARFSADRESLGRWAEEWRGRVGAVAIEATTGWRWVWRELVSFGFEVQLAEPVQARALLGRRRSAKTDRLDARWLARLLAKEMLPASWIPPEEIQQLRDRTRLRKALAEDRRRWGQRLHAFLLHEGWPCSKARLLTPEGMRWAAALRLPVHARLQVDSLLAIIGALETQLDTLDSELRRLARADQRCQALQSIYGIGPILACHLLAEIGEACRFRRGEQITRLAGLDPVVDESGETRRRGHLAKAGSPHLRWALVEAAVHANRQGAPDVAVYRTTRARRDATVARLTVARKIGKRVYHTLRELELSAARLLKWNEPSLCFPDSTTCPRPSRAEIGMGSCPTLSTARPPPSLLIRRSLDRCNSSTRSSAAQAAVSSRVSSLSLSFFSWSWSFFS

SEQ ID NO: 106499 - protein, 424 aa, unidentified
MKVTYKTCCGVDVHKSFLVATIITTTGGIEPSYQKKRYSTFNNSILEFKQWLLDNDCHELCMESTGKYWIPVFNLLEDEINVTIANPKWVKAVKGNKDDTKDSKWIGDLFRLGLVKGSYIPCKKIRILREFTRYRYKIVSCRSSEKNRYQNALTVCNVALDSVVSDIFGKSSTSIIDYLLEQSGNSINHEEIASKLLKSLKSKEDAVIESIEGYQMTDSQKYRMHLVRAHMDYITAEINDVDREIEKLISSDPDFENAIQFLMTIPGVKRDSAITVISEIGIDMTQFSSSKRLCCWAGLTPGSNESGGKKKSVRVTRAGVYLKPALVQCAHAAVKSEKSPYYKKKYESLMKRRGKKRAIVAIARMILTAIYQMLSTGESWNPSDLYKIDIPEALLEKQKAKAIKQAMKLLQREGLYPPPEPIAS

SEQ ID NO: 106500 - protein, 401 aa, unidentified
MKYGVGIDISKGKSTVSIISQAGEVMELPFEINHDSNGLKILKDTIDKYHKEDIKIVMEETGTYHLPVLNFLLDEGYFVCADNAFKIKKYLDRDLRKVKNDNKDSLKIAEYCCDNWYRIKKYENSSQTYKDLKFLSRQYTAQMSVQTKEKVQLSNLCDLLFPGYYSLLNDNNFILGITVFKKYYHPTLVIKKNKDSFIKDVDKIAKKLGHRSAGITIANKIYELAKNTVSPHPSNEYSQLSVDCCVDLLILTINTTNKIISKMDELASTLPEYDTIKSMEGCGNKLTSRIIAEIGDIRRFKNAGSIIAYGGLDAPPYQSGQFEATIRHISKRGNKYLRKTGYEIVKCIKSNKKVGEEIYEYIIQKENEGKAKKVAKIAGLNKFLRIYYGLVKKKYKELEIW

SEQ ID NO: 106501 - protein, 394 aa, unidentified
MFYLGIDIGKNTHVASMLGEDGKPLFRAFSFSNTTDGGESLLAKLSGIVPAEIEIGLEATGHYWLAVYSYLHGRGYKLHVINPIQTDGWRKGIEIRRRKTDVIDSVLIAELVRYGEFIEAQLPEEAILSLKNLTRFRSYLVDSIGDLKRKVICVLDQVFPEYQGVFSNIFGKTSKEILLQFSSPADLENVSADTLAELLGALSRQKLGLEAAEKLSAAASKSFGVTFCRDSFTFQLRMLIEQIKYIESQVKDTETEIETIMTNTASPITTIPGIGKTTGAVILGEIGGIERFDNPAKLVAFAGIDATVLQSGEFEGTNNRMSKRGSPYLRRALYQASLVAATGRNPDPVLRAFYLKKISEGKHHSTSVGAVSRKLCYIIYSVLKENRPFEVRIP

SEQ ID NO: 106502 - protein, 360 aa, unidentified
MTTARIAGIDLGDKWSSVCVLGGTPEAEVEEESRIRTTREGLERWLGCREPMVVVIEVGTHSRWVSEVIKEKGHAVLVANARHLRMIYARDTKTDRGDAEILARVGRVDPNLLHPVNHRSGENQKDLAILKARNTLVECRTKLINHVRGVVKSFGERLPGCSGETFHQDKVREMIPEELKVALHPLVDQIGCINAMIRRYDEDLEFIVNQRYPIAKRLQTVPGVGPVTSMAFVLTIDDPSRFEKSRDVGPFLGLVPRTDQSGNQDPELRITKAGDVLLRKLLVQCAHHILGPFGGESDLRSWGLRLAERGAKRAKKQAVVAVARKLAVLLLAMWRSGEDFVPVRQERSKRPEPQLTAFAG

SEQ ID NO: 106503 - protein, 346 aa, unidentified
MLYAGLDLSRKRLDFHLLDGEGATVELGATPPDADGLQRLSERVTQHGAPVRAAIESMNGARFVHDRLELAGWQVEIADAQKVKGLAPLACKTDRIDAWVLAELARRDLVPAIWLPDPLVRAERERARWRLHLVRHRSSLKQRVHAVLLTHGKPCPVSDLFGVRGRQLLARLGLPEPWQGTIEASLRLIDELDREISGCERELRRLGADHRYVPLLLTVPGISWVLAYTIAAEIGDIGRFPSPRKLAGYSGLCPRVYQSGERDLRGPLAKQGPRYLRWALVEAATHACTHPTYRHRYQQTKARIGKQRGAKVAQIDLARRLSEAIWHMLSRGEPFAPKGATDPLAA

SEQ ID NO: 106504 - protein, 328 aa, unidentified
MTMNPAPRVFNHIVAFDVAKESLAIHVLPGDERQAIANKPKAIRKLLIAQTRRNAKLGLGPLLVVCEATGGYERHLLEICAELGIAAHKAHGSRVRNFAKYLGLIAKTDPIDARVLALFGLKTENLRLHTPLTPALTALIDLRARRDQVQAMLLAETGRLEHVRYAGVTRSLKEHIASLRKSLTALEAQIAAHIQANEALARKAALMRTLKCIGPGTVAALLAYMPELGALSRTQAASLAGVAPFDERSGKLSLPSHIEAGRAAVRRALYMAALTATRHNPIMKSFAERLKRNGKCAKVVITAVMRKLIVTLNAMLRSEEPWRHAQTA

SEQ ID NO: 106505 - protein, 334 aa, unidentified
MTMEMLAIDLGKQSFHLHGIDADGVVISRKVSRAKLENAVTELDPAIVAMEACASAHHWGRRFSSAGRQVRLVNPRFVKAFVRGSKNDAIDAEAIFDAASRPTMRFVPVKTTEQQDLQSLHRVRERLVVQRTSLINHARGLLAEYGVVLPKGPWRFRQQVPSAVAEADLSNLARELFTELMDQLTDVEARLAKLDAKLVSICREHEACRRLAALPGVGPVIATALVAAVDDGRHFRSGRELAAWIGLVPRQYTTGGKPRLGGIGRRANHYLRRQLIHGARAVISRLAAKDDGRSVWLKGIVARAGFNKALVALANKTARLAWVLLARKEDYLPA

SEQ ID NO: 106506 - protein, 399 aa, unidentified
MPELWAGVDAGKTHHHCVVIDADGTKLLSRRVANNEADLVKLIDDVRELAPDVLWAVDLNAGGAALLIALLVNHNQRLLYIPGRTVHHAAGTYRGNGKSDAKDAFVIADQARMRRDLHPMTTGDEIAIELRILTARRYDLTADRTRSINRLRAQLLEYFPALERAFDYSTSKAALVLLTGYQTPAALRECGQDLLTAWLRDRKVRNSAAVAAAAITAAAAQRTVVPGEKTAAAMVVRLAKGVMALDEEIAETDALIEGRFRRHHHATAVLSMPGVGPLLGAEFVALTGGGMAAFGSADRLAGVAGLAPVPKDSGKVQGNLRRPRRYNRRLLRTLYLSAQIAIRCCPTSKTFYDRKRREGKAHKQAVLALARRRLNVLWALIRDNRTFQPCTPQPAATAA

SEQ ID NO: 106507 - protein, 416 aa, unidentified
MLFIGDDWAEDHHDIELEDEAGRRLIRARLPEGLEGITRLHALVAEHAPAAWAELAPEQVAAQVVVGIETDRGPWVTALRAAGYQVYAINPMSAARYRERHSTSGAKSDAGDSHVLAEIVRLDRDHHRPIAGDSDLADAIKLLARAHQTAIWERTRQVLRLRSTLLQYFPAAVQAFEDLSAPDALALLARAADPDRAARLTRGQLVAALRAARRHRVEDRADVLQAVLRAPALRQPATTQGAFAAVVSGQVGVIAALNEQITRLGQVVGEHFGRHPAADIYLSQPGLGVVLAARTLGEFGDDTARFADARARKNYSGQSPITRASGKKSIVLARYATNRRLGAALHQQAFSALNASPGARAYYDAIRARNIGHHAALRQLANRLVGILHGCLKTGTLYNEDTAWAHRHTTAEKAAA

SEQ ID NO: 106508 - protein, 428 aa, unidentified
MSTHDTLFCGIDIGKARHVARIIDANGNILMRPTGFTNDAAGFALLRQRLDDTRRGKPLLIGMEATGHYWYALHEYLTAPPLAAPGQQGHPVVVLNPLQTAAQSRKQIRKAKTDKRDTGGIAVLMKNGDFRRTVIPGELASTCRQLTRLWFALGCQSTRLKQLAQSTLEWLWPEFEAHFSDPLCATARAVLRLAPSPRALLTVDLPTLTKLVETTSRRKLGEDLARRLLGSARTSIGMRRGSEGAAEVITTLLLQLDAGKPVRQRLKDKIEALGATLPACLLTLPGVSPISAVSLFAETDPISTFTNPDQLVAFAGLDPAVFQSGQYDAPRRHISKRGSSHLRRTFWLMSMSAILQPGPLRDYYKRRRAAGLHHKSALTAVALKLCRITWRIMTDQRDYTPEPPNPKSKVSPNAKPANASPKKRKLSR

SEQ ID NO: 106509 - protein, 383 aa, unidentified
MDQKQGTLSRDKSAPGPVLYVAFELANSTWKLACSDGNKLRYVTVTAGDLAQVRGAITGARRHFDMGDEVHTVSCYEAGRDGFWLHRYLHSCGIDNVVVDSASLEVNRRLRRTKTDRIDAGKLLSMLVRYHGGERYLWRVVRVPSREDENARHLHRELEALKRERTRYRNRIHGILIQQGLRIKNPSTKKFVQALELMRIWDGRELPPEMKVRLVQVHERLRLVEEQISCLVKEKTLRLKEETARMAQVAQLMRLPGIGPVSSWTFVMEFFGWRRFRNRREVAALAGLTPTPYDSGKRLREQGISKAGNRRVRTLAIEIAWAWLRFQPRSKLSRWFLERFAGGGSRMRRIGIVALARRLLIDLWRFLEYGVVPEGAQVRPLAI

SEQ ID NO: 106510 - protein, 458 aa, unidentified
MVQTKRPRSRREMPAVHPDAAAIDVGATMHVVAVPPDRDPEPVRTFGTFTADLHRLADWLRACRIKTVVMESTGVYWIPIFEILEQKGFDVQLVNARDAKHVPGRKTDVSDAEWLQRLHEHGLLRGSFQPKGEVKALRSYLRQRERLLDSAATYIQHMQKALTQMNVQLHHVVSDITGVTGMRIVRAIVAGERDAATLAAFRDSRCKEPVETIREALIGNYREEHVFALTQALELYDIHQKKVAECDKRIETVLKQLKATRPTPAKPLPAPRHKTKQSNAPNFAARDALYAVLGIDLTQIHGLGPYLALKLVGECGTDLSAWPSAKHFTSWLSLAPRNKISGGKILSSATRRSNNRAASLLRLAAVTVGRTETALGAFFRRLSARIGKAKAITATARKIAVLFYNALRHGMKYTDPGAAYYEERYRQRVLSNLQRRAKAFGYVLQAAAPQAPQAVGVS

SEQ ID NO: 106511 - protein, 408 aa, unidentified
MDLTPMHKRVIALDVHQAKITACAVVEHDDGRVEVTKRDFGAFKRDRRALAQWSLEIAPEVVVMESTGVYWKSPFAALEAVGIIAWVVNARHVKAVPGRKTDMADAQWLATLARAGLLRASFIPPVDFRQLRLVARQRQKLVGMCSAEKNRLHKVLVDAGIRINVLVADIHGASARAMVKALIAGQPMHEVLECKGRLRASREELFEALSTEQFSAVHRFVAEEILQHIEQIEQRIARLDQYLLEGLRAWQPQLNLLQTIPGIDIQGAAMLLVEIGADMTVFGSAERLASWVGICPGNNESAGKRKSGRIRRGNAWVRRLLCECAQAAARTRCALKAKFESLAIRKGHKKSIVALAHKMLRTIYAMLASGTHYQDRSVDYEALSVTRNAPRWIKMLRKHGFIAETSAA

SEQ ID NO: 106512 - protein, 374 aa, unidentified
MNSVGIDISKGRSTVAVMLPFGEVVISPFEVRHTDSELSELARRLKSLNGETRVVMEATGNYHAPVAKLLHDAGLYVSVVNAKLVHGYGNNELRRIKTDRKDAVKLANYGLDRWLTLPRYIPEENTRLLLKNCYRQYRQYSKVQTVLKNNLISLLDTAFPNANRLFNSPARADGSEKWVDFVAEFWHCECVRERSEKAFVNKYQRWCRKHGYNFSEEKAHAIYHEASGHIGVMPKAETVKLLVEQAVSQLRVTSAALAALKQEMQSLASQLPEYPVVMEMFGVGPTLGPQLIAEIGDVRRFYSKKALVAYAGIDAPPNDSGDVTGRHKSMSKVGASSLRRTLFLVMSVYLQNSPLDEPVYQFMDRKRAEGKPYA

SEQ ID NO: 106513 - protein, 416 aa, unidentified
MYYVGIDWADENHQVFITDDSAQRLSAFSIKNSRSGVEELFERIRYFVKDQKQALFALETSKGLLIDSILDAGYTVYPINPKSVDRYRDRYKVSGHKSDDFDAMVLANILRTDRHNYRPILPDSPITRELKILTRECCSLIRLKTMLSNQLTSCLKDYYPVALELFCKLDQPITLLFLKNFPTYQQAKQVSLPQWGKFLSKHHYRVGVKKKAHEIYLKLQEPQFNVEPFVDNAKARYTLALVEQLQLLLSQIKSFENKIEQLLKQHTDSEIFLSLPGAGITLAARMVSEFGDNRERYKKVSSVQAEAGTAPITESSGNWKFVHFRSACRKSFRNTMHQFAFCSIKESPWAKQRYQQYVASGKKHTQSIRCLANAWLEIIFPMWKNYMPYSEQRHLLKYVKEQKPVNYSRNLNYLSV

SEQ ID NO: 106514 - protein, 341 aa, unidentified
MKSTVIGLDLAKTVFHYVNVDASGKPLGKRELSRTQMIRHFSNMEPSRIAMEACGSSHYWARTLTAMGHTAELLPPQFVKPYLRGQKNDFNDAKAIGLASIAGGIRPVEIKSEAQQIDIAYQTARSLVSRQRTAQGNHIRGLLAEFGIAVRTGFKPLREKLCELTDVGSTLAPRLKSLLADEYEHLCELDQRLEWHDREVKRTAKESVRCQALIEMPGIGPVVSVALVNWFGDAKQYKRGRDAAAALGLVPSQHSSGGKSRLGKISKRGDSFTRCQIVHGARAAVRAAANKDDNLSRWIQALVERRGVNKATVALANKLVRIAWAILATGCCYEQKLAAKV

SEQ ID NO: 106515 - protein, 367 aa, unidentified
MSESSVFFVGMDVHKDSIHFAVLTEASPSPVLQVRKPSTHKAVDEILDKLHGQGTVFACYEAGPCGYGLARYIESKGIQCQVFAPSKIPRKPGERRKTDRRDSLKLAQLLRYGAGTPVHILSEQDEAVRELLRYRDQVRRKAGKEKQKIRMFLLRYDRASCEHKPWTQPYMKWLYGLDMGQSLLTDVLRRRLDCLEYLQVELKELDKQINEIASQERYKDEISSLRCLNGVGTLTALALRCEVGDFRRFPTARSFMAFLGLVPSEHSSGNTIRRGSITKTGNSYLRRLLVESSWKFVSREKNSGALCKQREGLDHQLVEYAKKASRRLHNRYHRLCFSRGNRRIAVTAVARELSGFVWGIMTGHVAI

SEQ ID NO: 106516 - protein, 463 aa, unidentified
MRAVALTSGGELRFERQYRDDDTSDHGQLWDEKERGSDVGMGERLLVGVDWDSAGYEICLLDPAGRIVEQFRVRHRADELGEFVCRLVDRVGATEEALAVAIETPRGALIELLLERKIPVYAITPKQAERLRDRHRPSGVKDDRLDAYVLADGLRHDRHLFRRVEADHSLIIELREVTRADEDLAQEWNRLGNQLRQQLQRTHPHLLELIGNAQKPWFWELVEQVVVKETRLTRAKIRGLLERHRIRRWMPEEVEAVAKQPMLRVAPGTLKAVQLQLELLLPRLRLVDAQRRACGKRMEELLDLYAQETLPGKASAPSTIEIVRSLPGVGVRVASILLSEASHQVESTEPGALLRAYSGVAPITRRSGKKISVLRRYSCNRRLQHAFYHQARTSVQSDALARAYYASLRARGHTHGRALRAVADRWLRILDAMLRTRTLYNPACLRAAAASANAAEATRQVAA

SEQ ID NO: 106517 - protein, 370 aa, unidentified
MAHSSTLFIGLDVHKETIAVAYGAEEREAEVVFLGTVGTRQCDIDKLIRKLQSKGKTLHFVYEAGPCGYWLYRSLSKKDLKCWVVAPSQIPKKASDRVKTDRRDAVQLARLLRSGDLTPVYVPAVEDEAIRDLVRAREDALKDGKAAKARLKAFLLRQDIRYEGRATWGPAHLRWLAEVVCPTPVQQIVFQEYVRAVSEHTERLPRLEAELQTQVTTWRWAPVVEAIQALRGVQFTVAVTLIAELGDLSRFDNPRQLMSYLGLTPSEHTSGERRRQGAITKTGNSHARRALIEGAWAYRYPAKVSRHLQLRLEKLPKVIQDISWKAQVRLCKRYRRLMARGKNANQVVVAIAREMAAFVWAIARTVTGAH

SEQ ID NO: 106518 - protein, 365 aa, unidentified
MERYIGLDVHCKESVYVAQDVEGRVVREGAVETTEEGLKAMVEEVGAPAGTKVGLETGTQATWVARTLERLGMKPVVIDAHEVRAKARRVGQKSDRRDAWEICDGVRRNLYTAIVYVPSEPVERLRRVLSRRRHFVKARTQQVNAAKFVLRSRGLREVCKSLTTAKAWQRLLANPRAQAVRDHLVLHEAVWRVVQENVETLDNELTDAAKPFAPIVSELQTLSGIGPITAAAYVAALGTPERFPDSSHVVSYLGLAVSTYDTGERERHGHITKRGAADVRGLLCEAAQHASKPNHPLNPYFIRLYARYGRNVAIIAVAQRMARILFQMWRTGQDFDVRKLNVRPVQKFRTKAYYFEIKPPKALKA

SEQ ID NO: 106519 - protein, 332 aa, unidentified
MEHCAIDLGGRESQVCVRRANGDLLFEGRYDTALLPDYLRQLPPSRVILETAAEAFRIADAAKEAGHEVKVVPATLVRTLGVGARKTKTDKRDARVLSEVSCRIDLPSVHIPSARSREWKSICGMHDALISSRTKLINNLRGWMRGQGLRLPRGTAETFAQRMTRLQPLPEYVASQVEALAELTERTRASVRRIEAIALNDELCCRLMTVPGIGPSTAVRFVAAIDDISRFDSAHKVEAYLGLAPGESSSSERQQRLSITKAGPATVRWVLIQAAWALQIRCRTAAARPLQLWAAEIARRRGRLIATVALARKLAGIGYALWRDGTTYQPPR

SEQ ID NO: 106520 - protein, 423 aa, unidentified
MKEWKEITHYAGFDWARDHHVVVIVNQQGQIVADFEFEHSVEGWKSFGEKTAGFANLAVAIETSQGAAVDQMLQRDYTVYPVNPAAAASYRQRKAPSGTKTDHLDGWSLADALRVDGQGWRALQPADELSTQLRLLCRDEVALIAQRTLLVNQLQQALVEYYPAALEAFEDWVSPATWDFVLEFPTPEALTKAGKRRWEKFLHTHRLWRPETVEKRLTIFSQADQFKASAPVTKAKSQLALSLCKLLRTLQQQLDQYREQIEALFKNHPDHDLFGSLPGAKKMLAPRLLAAIGSDPGRYGTFQVLQSFAGTAPISFESGKIHKARIRWNCDKFMRHTMHLWADCFHRVSPWGQAYYRKKRQEGMTHACALRCLGQRLLKILFRMISDKKSYDAELHARNQKKHGSWVLALIEKPAAQIGEQPL

SEQ ID NO: 106521 - protein, 409 aa, unidentified
MAYRIAGIDVHKKMLAVVVAEGLSEGQMWFERARFGTMESELGRLANWLKERNVGEVVMESTAQYWKPIWQKLEGQCQLYLAQAQSNRGPRGRKRDFVDAERLVRRHMSGELILSFVPDAEQRLWRIMSRTKYQLRRDRVRLQNQLEALLEEAHIKLSSCVSDLLGMSSRRILEALSKGESDLQRLVAMVDPNLRATEEQLQDALQQAPYLSEPHRQILGLFLARLQLIEEQIEALNSNLGQALRQYNDAVLRLAEIPGFGVDSAQQVIAEVGPTAATFPSPQELSSWVGTCPGKEESAEVSKNNRSPKGNRMMRRLLNQAANAAVKTKGSVFENLYRRWVCRLGHNKTIWAIANRLCRLAWKILHQGVRYIEYGNCPNPKAVKARAKRMIRELQALGYQVQLLSPPSP

SEQ ID NO: 106522 - protein, 497 aa, unidentified
MSTASQQEQGKKGSDAPRSASKRQASGSHRPQGKGHRRRSKRSKETRSELTITNPDAAGIDVGARTHYVAVPEGRAEVSVRSFGADTAQLDELAQWLKDCGITTVAMESTGVYWVSLYQKLEEAGFEVLLVDAHQVKHVPGRKSDVQDCQWLQQLHSYGLLRAAFRPEDSICRLRTLKRHRKSSVQYASMWIEHIQKALNEMNLHLHHVLSDISGQSGLAILDAILAGERDPRKLASLADHRVKKSQAQIEAALTGDYRPELLFVLSQALQNYRQIQQQIAQCDLRIEKQLAQIADCTNPSQDPEPTLRSPDSAGGKPRKTKPKDALEVSLAGHLKRILGVDLTAIPGLNVLAVLTLLSEIGTNMTKWRNEKAFVSWLGLSPNNKISGQRVLSSRTRKVLNRAATILRLAAMVLGHSDTPLGSFYRRKRAQLGAPKAITATARKLGCLIYRLIKNGQGYQETDVHIYELKYKDQILNSLRKRANSFGFDLVEVPKAA

SEQ ID NO: 106523 - protein, 435 aa, unidentified
MSSKAYRATRVNEVNWEQIARGKEGLGVTLGIDVGKFDLWVVCRWADGRFERPWRVKNPWEIPTFLGLVRQIQAGRKLVVALEPSGTYGEALRQALGDNGIDVQRVGTKASHDYAEVFDGVPSQHDSKDAAVVAELAALGKAKPWAYQAADSWEEELAYWVEEMVAQRQILTPWQGRLEGLLARHWPEASQVLKLSSGTLLRILKRYGTPQALAADPDAATRLARWGRSLLSAAKIEELLAGARSSVGVRAGPWQQRQIQEYAERVLAARQQATRAQRRLRQLAAGHPVLQAQGKVVGVPTACVLWTSTGDPRHFDSAGAYRKAMGLNLAERSSGTYQGRLRISKRGSARTRKWLYFAVLRLVQQCGVRPWYEAKKARHEGEARRVLVAVMRKLAVALYHVGVRNEGFQPRRLFGRIGRGSGRSAARCGTRPQRA

SEQ ID NO: 106524 - protein, 351 aa, unidentified
MMIIGVDYHPSFQTIAFLMEETGECGEQELNHSDGQAEKFYRDLKQRGICVRVGMEATGYSRWFERLLAELGFEVWMGDPAEIKAKRVKKQKFDREDARLLRRLMLENNFPQIWVPGPENRDLRQLLWHRHRLVQMRTRIMNQLQALAMNEGYRWKKKLFSEQGRAQLEKLALAPWASRRRQELLELLDRMNPTIEELTAAVEQEARKRPDVLRLMTHPGVGPLTALAFVLIIGTWERFPRGKQIGNYVGMIPSEDSSAGKQRLGHISKQGNSLLRFLLVEAAQAAARIHPDWRRRYMHLAMRRHKSIAKVAMGRRLAVRLYWMWRNGCEYSQSVEFGSYAGQLGTGHGVK

SEQ ID NO: 106525 - protein, 313 aa, unidentified
MKQVQSNVFIGVDVSKNSLDVAVGPSGESMRFANSEDGIALLADFIKPLAPTLVLFEATGGWEMNAVRHLAAKRLPLVVINPRQVRDFAKATGQLAKTDAIDARILARFGEAVKPEVRPLKPLELQKLDALNTRRRQIVEMLTAEQNRMVSAPEWIRPDIEEHIAILKKRLAAINRDLNKLIRKSPLWREKDQILQSFPGVGPVMAMTIIADLPELGTLNRREIAALVGVAPLNCDSGMYKGKRKIWGGRAAIRSVLYMCTLTAIRHNPVIRDFYQRLKRAGKLPKVAITACMRKILVILNAMMKSRTCWQTT

SEQ ID NO: 106526 - protein, 352 aa, unidentified
MPNYTRVVIGGVDTHGRTHHAAVIDQQGRLLGDREFPAHRGGYRQLLGWLGRHGQVGVVGVEGTGSYGAGLTHYLLDQQVRVVEVDRPDRRTRRQRGRSDPIDAEAAARAVLAGTATAAPKRRDGIVESIRALRTARSGAVKARTAAINQLKGLLVTAPASLREALDGRSPPALVAACARLRPDQTALADPVQGTKAALVVVAQRIQLLDQEVTLADQRLATLVGRAAPRLLGLLAIGNDHAGQLLVTAGQHPERLRGEAAFAHLCGVAPIPASSGKTRRHRLHRGGDRDANRALHLAVVVRMRCCPRTRASVRRRTKQGLSKPEIMRCIKRYLAREIYHALVADFEALHST

SEQ ID NO: 106527 - protein, 333 aa, unidentified
MNKITLIGIDTAKQVFHLVGVDARGHYIWRKQVRRARLLSTLAQLECCEVVLEACGASHHWARNIKALGHTVRLIAPQHVKPYRRGQKNDYRDAEAIISAALSPGMHFVGVKRVDQEAEQALHRVRSRLMSHRNAAANELRGLLGEYGVVFGRGMKPLREGARCFVETEEAHTLGLIELVNDVLEEIDVLQRRMDHYERQINQRVQADEISRRLREELSGVGKLGASALRVKVADVRDFGNGRHFAAYLGLAPGHSGTGGQVHIGHLKRGHDRYLRQLLIHGARSALRHLGDKQDAQSCWLRGLLERRGFNIASVALAHKNARQAWAIMAREQ

SEQ ID NO: 106528 - protein, 375 aa, unidentified
MIAYVGIDAHTTNYTLSTYLERSAAPVNTNTYSPAVANIVSYCKGIRKKFGNDTEIIVGYEAGCLGFKLKRDLEKNGLTAKILAPASITGTEINRRRRKKTDKRDAEAIARSLKNHEYSEVYTPDEEDESVRDFIRMQQDHKKQLRVIKQQICAFTTRHGYTFTDGKNYWTKKHLKWLKELPLEGINKETLDSYLLSYETVSDRLEQMNRRIEEIAEKDKYREAVHKLICFKSVKVLTALAVIVEIGDFTRFVKAKNFAAFLGLVAGELSSSDDQNQTGITRQGNTFLRKLLVECAQSFSRASSGKSEALKKRQEGNTPEVIAYADRANERLRKRYMRLVLRNRKSHNKATVAVARELSCFIWGMMTDNIHTALA

SEQ ID NO: 106529 - protein, 368 aa, unidentified
MKKNTSNKRRTGKGNRQEQEKEAFAFYIGIDLGDKYGETCVMNPAGEVHQQCRLRMKATDLEDYFRSIGRSRVAVEAGGQSQWVAELIERCGHQVYVSNTRKVAYIYESDDKDDPGDAYKLAELVHFKPRLLHPIQHRSQALQADLSWIRAREALVESRTHLINTIRGISKAFGERLPKCSVESFTAKLAAEIPAAIRGAVAPLLETIDDLNEQIHYYDQMEEQIARERYPKYRLLEQVNGVGVHTALSYMLTIGDPERFQKSRMVGCFLGMRPRKQDSGESRPQLGITKAGDEYLRKTLVNCAHYILGPHGRDSDLRRFGLRICERGGKNAKKRAVIAVARKLSVLLHRLWVTGEAYEALRNGKKVA

SEQ ID NO: 106530 - protein, 339 aa, unidentified
MTHMTVGADIAKNVMQLHYIDAETGEIVNKPVKRAVFLEHFANRAPCLIGMEACGGSQYWARKLTAMGHEVKLMPGKFVKAFVMGNKNDAVDAKAIWLAVQHAERSVAVKTETQQAVLSLHRMREQLVKFRTMQINGLRGLLTEYGEVMGKGRAALDKAIPSVLERLVDRLPAILIDTLREQWNGLAELDKQIAGIERRLQMWMREDKACKAIAAIPGVGLLTATAAVATMGDAKTFRSGREFAAWIGLVPKQTGSGGKVQLLGISKRGDTYLRKLLIHGARAVLCLTKEPGPWAEGIKKRRPLNVAIVAQANRIARTIWAILAHDRPYEKGYVSVKPV

SEQ ID NO: 106531 - protein, 348 aa, unidentified
MNENGLYWVGLDVADRTFDAALASPGQHANAATFKRLPVETFARTCEGVAEFVVWLRRRVPSEAPVRCVMEATGIYSIELTVLLCAQCPELRPAIVNPERTSAFHKSLGLRNKTDDMDARALAFFGLERQPDPYEPLSRHQAELRALSRCREALIITRTAHENQLAQAPPSVLVKKALKTMIRRTAKEIETMEKEMRRVIETNADFRRDYDLLTTIPGVGFVTAAVVLAEFGDLRRFGCGRQIGAHAGLTAYKDESGECKRSGHMSKKGNPRVRKVLYMAALSASTFNAPMRTVYNRLLANGKEKMVALGAVMRKLLVLMRAIVVSGIAFDPCGKPCGKLAQHSQKNP

SEQ ID NO: 106532 - protein, 374 aa, unidentified
MTMMHQRQIRYIGLDVHKLTIAVAIAEEVGAPSSYGSIANEPSAIRTLLTRLGDPEVELRVAYEAGPTGYALHRQLTKMSIDCIVVAPSLIPKRSGDKVKTDRRDALKLARLLRSGDLTPVWVPDEAHEALRSLVRARADAKSDQLRAKHRLSKFLLRHGCWPPIGVRNWSQRYFTWLRQLAFEYLPDQVVFADYLAEVTAAGDRIKRLEAALHQCAQSSSQVALIRALQAFRGIGFLSAVTLVAEAGDLRRFRTAPQFMAYVGVVPSESSSGGKQQRGSITKTGNSLLRHVLGEAAHHARRAPRVSGTLKQRQAGLPREIVDLAWRAQLRLHARYRHLSSRIGALKALTAVARELAGFVWAAGHVLQEVPAAA

SEQ ID NO: 106533 - protein, 382 aa, unidentified
MKVSYQTCCGVDVHKSFLVATIVKTTGGIEPSYQKKRFSTFNNSILEFKQWLLDNDCHDVCMESTGKYWVPVFNLLEDDINVVIANPKWVKAVKGNKDDTKDSKWIGDLFRLGLVRGSYVPCKKIRILREYTRYRYKLISCRSSEKNRYQNALTVCNVALDSVVSDIFGKSSTSIIDYLLEQSGTSINHEEIASKLLRSLKSKEDAVIESVEGYQMTDAQKYRMRLVRAHMDYITAEIGTDMSQFSSSKRLCCWAGLTPGSNESAGKKKSVRITRAGVYLKPALVQCAHAAVKSDKSPYYKKKYDSLVKRRGKKRAIIAIARMILTAIYQMMSTGEQWNPSDLYKIDMPVALVEKQKAKAIKQAKKLLQREGLLPPDEPLAS

SEQ ID NO: 106534 - protein, 339 aa, unidentified
MKTIMIGLDIAKSVFQVHGIDEAGNVVHRRQLRRSQLEGFFSNLDPAVVGMEACGGAHHWARLFESLGHEVRLMAPGYVKPYVKRNKTDGRDAEAICEAMQRPTMRFVAVKSVEQQAVTTLHRARALLVRQRTMTANQLRSLFGEFGVVARQGIKGLRSLIAELGDTSAAPPLAVEVLIRLARQWEGLNGDIEALDKRIVAEARDNEAARRLMEIPGVGPVSASAIVATVGDASQFRSGRGFAAWLGLTPRQNNSGNKRRSGGISKQGDRHLRTLLILGSTAHLRYEPHRKTKDPWLTGLMARRPAKVVAVARAAKVARIIWALLVKGERYRAPARLAA

SEQ ID NO: 106535 - protein, 389 aa, unidentified
MIYVGIDVAKDKHDCCILGSEADKLYPVFTIPNNKAGFDELYGKIFSVADDKTEIKVGLEATGHYSLNLLGSLIDKGLATCVINPLHTNLYRKGLSLRKTKTDKVDASSIAMMLMTDKTLKPYSDTSYHIEELKSLTRYRFNKVQERAKLKTSATRLVNILFPELEKLVPSLHMASVYALLSEFPGASYIADSHLTHLKNVLKTASKGRYGRDTAVAIRDAARDSIGSVMPAKSMELKHTIHLIEVVTDEIDEIESSIKSIMDASGSPIMTIPGINYRMGAMILAEVGDFSRFSNADQILAFAGLSPSTYQSGQLDSCHSHMEKRGSRYLRYALFNAAKYVCHWDETFGAYLSKKISEGKHYNVAVSHAVKKLIRTIYRMELTGEAYRK

SEQ ID NO: 106536 - protein, 367 aa, unidentified
MTSVALCTGPIHLGLDVSKNKIAVGILRPDEVSPDTEVIFNDEASTRRLIGRFPDRGRLRVCYEAGPTGFGLYRLLSSMGVACEVVAPSLIPKAPGDRVKTDRRDCRRLARLHRAGELVAIRVPTEAEEAVRDLCRARADLVCDRTRTRHRLSKFLLRHDRIWRDATAWTVKHEQWLVGQRFDDPALRTTYGHYRASLAARDAELAAVEADLAHWFSHGPFAEAVTRLAAYRGVAQLGALTIASEVGDWRRFPAARTFMGFTGLVPSEYSSGESVHRGHITKAGNAHLRTQLIESAWAYQHRPNLGLTLRRRQQQVTPATAARSWTAQQRLCARFRRLGARKTSRNVVTVAVARELAGFLWAEMTTD

SEQ ID NO: 106537 - protein, 411 aa, unidentified
MRVYHTICCGIDVHKKSVTACLMWGPADQEPQCEIRRFGTMTSELKSLAEWLKQAHCEVAAMESTGAYWKPVWNVLQADVHLILANANQVRALPGEKTDNKDGRRLASYLRHGLIRASFVPPPDIRELRDLTRYRRKLLANGAAERNRIQKVLEDGNIKLGSVLSDVFGVSGQRMLHALVEKPSVDVEQVAALAHWRLEPKMEALKKALEGRLTAHHRFMIDLSLGHMQYIEQQILRLDEQIALHVAPYQQQFQLLQTIPGIAETAAASVLAEIGPDMSPFPDDGHLTSWAGICPGNNESAGKKFNTKTRKGNPNLVSTLVESGWASMHTKNSHFRAKYYRIKARRGSQRAIVAVGHTLLRTIYVVLKTGQPYHEPVRPLLNENQRTRKAQRLSRELRNLGFEVTLKTKNA

SEQ ID NO: 106538 - protein, 459 aa, unidentified
MGMTLGIDLACRAAHVASLAGPDGALVWRGRSFFTRPADLEKLWRDVDCVPGELTVVMEPTRNAWIPVAAWFRRRGAKVVLVPTTQSADLRAYYSKHTKNDRLDSAILARLPLLHPEGLREHVGDGPADPLRRVVKQRSSIAKRRSAIFHRLDAQLELLGPAWYDALGTDYGKATLQFLAHYADPATVIRLGQARLARFLQRYSHGHWREGKAAELIAAAKESLQLWDTDGMDFAELAADIAVEAEQAMMLTAQLADLDERIANLYAEADPAGIIRSAPGVGPVIAGIIAGRLGDPHRFTSLAAVRSYSGLVPKINQSGKAEHVGGLTKAGDPLLREAMWMAAEQARKLDPQLAAKYKRLMDSERHHGTAVCHIATTLLTRIATSWRNNEPYQIRDLNGTPLTQDEGKRIVQEQYQVKKNPKKQYKRATNHKAGREPQESPSAPTSRPATTKPTSPRAA

SEQ ID NO: 106539 - protein, 351 aa, unidentified
MKTMTKQLQGEELFVGIDLHKHRWHVTIRTADVEIFSNSIVGRWEDLRRVISRYKDCQIHAVYEAGYFGFWLFDHLTQYGVECIVTPPSLIPQEHGNRVKTDRLDSRKLARLLAKGLLKSIWVPSAKERFHRQVIRRRRQLVGDRVRTQNRIKSELCFYGIDLPAARSKWSQVYFANLQRIKFKNHWMQKSFNQLLEQYEFLSTQIDKQTQLLKQLSQLPLYCDRVKILCSIPGIGILTAMEILLELQDFSRFRRAQQLAAYVGLTPSQYSSADKIRMGRITGAGKNSVRSALVESCWHLIRKDKAMRKRYEQIKARAGGKRAIVAVSRKLILCIRRLLLDNRPYEYEPVI

SEQ ID NO: 106540 - protein, 386 aa, unidentified
MDPDGRVLDSRRVSDSVRGLGELHELIGAHADEPEEVVVGIEIDRGLLVAGLLGAGYEVFAVNPMASSRYRDRHAVSGAKSDPGDAKVLADLVRTDRHNHRPVAGDSELAEGIKVLARAHQSAVWGRQRQVNALRSALREYYPAALEAFGTNLSHHDAVAVLSVAPTPALGRQLSRSKIASALRRGGRSRNVETKAEQIQNVLRAEHLEAPPVIAAAYGNVARSALRLIEVFTTEIAALELAVAENFEQHPDAKIVHSLPGIGTVLGARVLGEFGDDRTRFATAKCRKNYAGTSPVTKASGRSRVVLARHARNRRLGDALDRWAFCSLTHSLGARRYYDEIRGRGKTHNQATRQLANRWVGILHGCLEAQTPYREDIAWPTGKAAA

SEQ ID NO: 106541 - protein, 340 aa, unidentified
MNFTTYGLDIAKRVFQLYWVTHENGEIHNRKFGKQELLEFFAQREAGLIAIEACGSAHWWRRKLMALGHEVKLIHAKFVRPFVQGNKTDAADAKAIWTAARQPGMRMVAGKTEDQQALLALHRMRLSLIKFRTMQVNQLRGLLYEFGVTLKGGRQAGLSEIQQRMAELEEIVPGVLFEAIKEQLNRLDEIEADLKNIERRIKDWQKQQAACRKIAEIPGVGMLTATALVATMGEADSFKSGREFAAFVGLVPRQSGTGGKIKLLGISKRGDTYLRTLLIHGARAVMFNAKDKGAWSEALLQRRPANVAIVAMANKMARTAWAILAHDREYQKGYVSQVPT

SEQ ID NO: 106542 - protein, 362 aa, unidentified
MKNSIRRQPTVEWKQRPAITVGLDLGDRFIHYCVLNQDGEVIEEARIPTSEAALRRQFEGEPRQRIAMECGMHSPWISRLLNQLGHQTIVANARKLRAISENESKNDRADAQTLARLAYSDPHLLWPIQHRSVERQRDLNLIHMRDALVRARTMLVNAVRGVVKSAGGRLPKCSTEGFAVHAAPMLPVELRTATQPLLEQITILSRQIQRMDRQIETLAERYPEIAGLRTAPGVGPIIAAAYVLTLDRADAIRGSRAAGAFLGLRPKQRQSGDSDPQHGISKTGNRYLRKLLVQAAHYILGRFGPDSALRRWGLKLAATGGKRGKKRAIVAVARKLAVILHCMWRSGQSYQPFPQPIAAAAA

SEQ ID NO: 106543 - protein, 379 aa, unidentified
MAIETRCPASTAAGETLFMALELGSTTWKVAFATTRGMRPRVRTISARALSQLRAEIGTAKTRLGLCADAPVRSCYEAGRDGFWVHRALAAEGIANVVVDPASIAVDRRARRTKTDRLDAIALVIQLMNAAAGDRRGWHELRVPSVQAEDDRQLQREWDAVREDHTRVRNRIHGLLATQGVRVKLTADFLEQLRGAQLWDGTPLPAELVARLERDWTQLQHVDDRLTRLKELRQARVAPDRTDVVATQTRHLAELKGIGVNSALTLSTELFAWRGFANGREVGAIIGLTPSPYRSDQRMVEQGISRAGNRRVRALSIELAWSWLRWQPGSELSRWFHARFGQHGRARRIGIVAVARKLMIALWRYVETDTVPKDAVLKV

SEQ ID NO: 106544 - protein, 343 aa, unidentified
MNKVYVGLDLGSSTFQQAVINDDGVVIMNRSYPTSEANLRSAFANLRGEIHVHLEAGELAPWAAAIIAPLVKRVVCSHPKDNAWIAKDGDKCDRVDAYKLAELLRINRFKEVHYAPDQPRRNFKQLVQHYDELTGHQARWKTKLKARLRMQGVIVTGERLFSRTGRTAVLARIESRDVRTAISQLYEVLDQSVAAQEQARLLMLHAAQAFPEIKLLRTVPGVGPIGACRFSAYIHTPQRFSSKRKLWKYSRLSVSHRSSNGKPLRRPKLDYSSGCGRLKDVSRKAFEAALRSRADNGFKRAYQRALETTHDKTHARLTVQRKILSTMRAIWISRTPYRDELSR

SEQ ID NO: 106545 - protein, 380 aa, unidentified
MQQQSYVGLDVSMAETAVCIVDGTGKKLFEAKVPTDAAAIAAAIRKHTLGHLERVGMETGTMAPWLWRELQAQGLPVVCLDTRHAHRALSLRVQKTDRNDARGLAELVRLGWYREARVRSMDAQFMRALMLSRRQLMQVVRNVSNQLRGALKVFGLARTSTAGKGFRAKVQALAAEHEWARPVLDPLLAVLVATEVQLKTITTKLVRLARDDQDIRRMMTVPGIGPISALAFKAAIDDPKRFMKSQAVGPYLGLVPRVYQSGESEWTGRISKTGDELARTYLYEAAGVLLHQVPSWCALKAWGAPCPQERSQASKGRRCPQARGAAARDLGRRHTVRMAIGAGGARGGLILIFRSQAEASVSGRRVWRSRNVNRGPRPRV

SEQ ID NO: 106546 - protein, 356 aa, unidentified
MKSMPAPESPVTVGVDTHLDQHVAAVVDEAGRLCGTQGFAASTRGYVALVTWAERFGPVERIGVEGTGTYGAGLARFARAYGLQVVEVNRPDRSTRRRQGKSDPIDAQAAARATLAGVAATTPKTREGQVEMIRVLRVARRGALKARVAAAEQLHGVLYSAPEELRQPLLGLKTKNLVGICMAMRPGPLTSPTAATKTSLRTLARRWQQLQAELDQLDGQLQTLVAVAAPTLVALPGIGVDTAGQLLVTAGDNPQRLRSEAAFAHLCGVSPIPASSGRTDRHRLNRGGDRRANNALWRIALVRMHCHPPTRAYVERRTKQGLSKLDILRCLKRYIAREVYHHLTSPPTTAPTTCPK

SEQ ID NO: 106547 - protein, 354 aa, unidentified
MIIIGVDFHPEFQQIASVDTDTGEFQEKRLTHCEEAEKFYRAVAASGQKVRVGMEASGHGRWFERLLAELQIELWIGDAAEIRAKRVRKQKTDRQDAQLILRLLLEDRFPQIWVPSWKNRDLRQLLWHRHRMVQARTRIMNQLQAVALNEGLRCKKRLWRERGRQQLESFRLAPWASRRRHDLLELLDRLNPTIAELSLTIEQEVEKCPEAQRLMTHPGVGPLTALAFVLIIGEANRFQCGKQVASYLGLVPLEDSSGNRRRLGHITKQGSSMLRFLLVEAAQVTARSLPQWRSKYLHLMMRRGRKTAKVAMARRLAVRLYWMMRQGWDYQQWSKFGSHAGQPGNRDGVPSNTE

SEQ ID NO: 106548 - protein, 378 aa, unidentified
MTCGGASSAQVCYATPVVKTVELEEVPMQIVGALDVHRRQITFKTLELASGESARGRISPAARGALRQWLERFAGQQGEFVLEGTTGWRFVVEEIERAGHVVRLADPTETAARRGRKRRAKTDDADCELQLRLLLAGELPEAWIPPVQILELRTRVRLRKTLIDQRTAWLQRLQAQLFHQGVPPGLKPRTAAGRDALARVELSPAGREAVELCLRMLDQLDRELEPIDRALLAFARRQPGCRALTGQLYGVGAVTAPAILAELGDARRFRSSDDAVRHSGLDVTVWQSDRKRAAGHLSHQGPALLRWALFEAAQCAARRSSPDNAYYRNVAKRIDHNRACLSVARKLCRRAHHILRELGDDALAPTDPATPKLVDAAA

SEQ ID NO: 106549 - protein, 406 aa, unidentified
MIFVGIDWSERRHDVCVLDAEGVVLGKAKVSDDVSGVGRLHAMLAEHVDDPSDVVVGIETDRGLLVGWLVQAGYHVFAINPMAASRYRDRHVVSRAKSDPRDAKVLANLVRTDRQNHREVAGDSELAEAVRVLARAHQNLIWSRQRQVNALRNTLREFYPGALRAFSPSQLASVEACSVLAMAPTPTWAREKLTMPRLRRSLAASGRKRNLERRAGQILEALQAEELSAAPLVEQAYGDVVGSLVMVIDGLTHQIAKLETELAERFEGHPDAEIITSLPGLSSVLGARVLAEFGDDPTRYADGRARRRYAGTAPITRASGTRLVVLARVARNRRLFDACYLWAFSSLTSSSGARRYYDAHRARGKTHHQALRALANRWVGIFHGCLIHHELYREDVAWVVHADAAA

SEQ ID NO: 106550 - protein, 483 aa, unidentified
MKKKNIYVNQSQELLRLFEEAGNGANVMCVPIDYAKKDHVAMFCDGYGHILRKPFPVKNSPEGIEYLTEQVTRSCLHRHIDLKHVFFGGEDVGSFAENFIHTLRSGGWIVAGVNAQDAKKQRANLQASTDRLDLMGIASMLLNRRANCSPAQSGIYRNLRTLVRHRRKLVAMSTEVKNRVHTFVDQLFPGFLDDKKSGISPFSNSSLYLMENRFSPRQIRRRKRPKLIEILHRYGTEKPENAAAKLQEYAARVLLPPDEYISTLQVSLAHHVKLFRCLQDSIHQLEHELAVWLAQTQGAFLTTMRGIGIVLAAGVCAEIGNPDAQKPVNNLVSYSGIIPRVKQTGGPEGKTHTGKVAKRSNRILKDYVVQSANQLGLHGPEDLMTDYKRREAAGQHADFGIGRRYLRTGMCLMRTSQIYLPPRLRNNTAATQEERAGYYLMTWPALRQKWNKADALDAAFDKDRPLGRWRNMVQELYEIKLKL

SEQ ID NO: 106551 - protein, 343 aa, unidentified
MTQYVGLDISLKETKLHVLDEAGNRVWRGRCATEPAAIAAAVRRYAPTAVRIGLETGPLTTWLWTALTAEGLPMVCLDARHAKKALDMKVNKTDANDAEGLAHLVRTGWYREVRVKSRGAMLAKALLGARSQLLSMSLALENQIRGILKTFGRIVPKGAGGLFEKNVRALITDDAEIAAVILPLLQARQMARSKCAALDRRLIGSVQGDATCRMLMTMPGIGPITAVAYLAALEKPDTFKRSRAVGAWLGLTPRRFQSGEVDYDGHISRRGDGQLRALLYEAAAVLMTRVRRESALRSWGLVLWKRLGFKRAATALARRMGVVLHAMWKSGTPFNPTLGAATP

SEQ ID NO: 106552 - protein, 485 aa, unidentified
MILFRRFPRSDRLGRSRITELKLDKDMPKKSSNKAKSQRSRERALLQKVHLNAAGIDIGADAHWVAVPEDRDASPVRSFGVFTRDLILLCEWLKRCQVETIVMESTGVYWIPLYQMLERKGFEVRLVNAHHVKNVPGRKTDVKDCQWLQQLHTFGMLGGSFRPQAQMCVVRSYLRLRDTLSKDCNSLVQRMQKALTEMNVQLHRVISDITGVTGMSILRAIIAGERDCLKLAQLRHPQIKSSALDIAKALEGDYCQEHLFALQTALELYDSYLLKIMACDRHVQKALSTFEAKTSAPAPELNGMRSAEKRQEALRRHHLEQMTGADLTKLPGLDLLAVERILSEIGLDMSRWPSEKHFCAWLNVAPNHRISGGQILSSKPRKNANRAAAALRLAAQSAMQSKSAIGAFIRRIKSRLGAPTAINAGAHKLARLVYRMLKFGKAYVETGQEAYEKFFKERTLRNLQRKAHQLGFQVTPITTPTVPVS

SEQ ID NO: 106553 - protein, 325 aa, unidentified
MQVHFVDEHTGEIIDKQVKREKFLEYFSNREPCLIGMEACGGSHHWARELQKLGHKVRLLKGRFVKAFVMGNKNDVMDARAIWLAVQQPVKSVAVKSEEQQATLGLHRMRQQLVKFRTAQINALHGLLLEFGETTHKGRAALAKEVPEALERLKERLPLYLINMLDEQYQRITELDEHLDHIEKQLQAVARQNETCQRLLNIPGVGPLIATAAVATMGDASAFKSGREFAAFIGLVPRQTGSGGKIRLLGISKRGDKYLRTLFIHGARAAALLTKEHGPWITELKKRRPASVAIVAMANKLARTVWAIAAHGRKYDKNHVSIRPD

SEQ ID NO: 106554 - protein, 363 aa, unidentified
MKTQSNKKTELKKQNFDGKTIFCGIDCHKKSWSISIYIDSSYYTYIHQVPDAEALKTYLTDNFPGAKYIACYEAGFTGFSIQRKLAVLGIECMVINPADVPKTNKDTFSKNDRNDSKMLAEALSKGMLHGIYIPTEELESDRRMMRYRKFVQKNLAAKRNTIKGLLFSSGIKIPDNMDNSHVSKNYIEWLKEIDFGYSTVRFTLDQMIADMEYLRRKLLDLNKQIRKLSKEEKYKSLYDILLSVPGIGLITAMTMITEIGEIKRFQSFNKFNSFIGLCPSEFSSGEKDRKGKITPRSHKAIRELIIEAAWVAKNHDPALAYKYSDLIKRMTGKRAIIVVARKLLSRIYAVWNIKSQYITGIQQ

SEQ ID NO: 106555 - protein, 319 aa, unidentified
MITVGVDAHKTVHVGVALNEAGEVVGRWSGGNTVAEWERFQAWLADLGDERQVGIEGAGSYGYGLAQALVAVGETVLEVNSRLTALGRRHARRQGKSDALDAQAVAEIVRREGTSLPHVGYDEQASILAHLAEERESLVSEATRVRNRLHALLLKVDPEYKRNAPSLRSKRVIAELRTYESGSAPTGLKGELVASVRRQASRLNDLLIAIEELGEQIEARAVRYQPLTQITGISYLTAGTLAGILGKHTAFRTDAQLASYAGVAPLEASSAGNGRYRLSRAGDELRGRAQGHGRHGRRRYLHRSDDGPHARGRCTALPG

SEQ ID NO: 106556 - protein, 453 aa, unidentified
MGEAKKRKLKEKKAPEMPVLNPTAAGIDIGATEIYVAVHPDCDPEPVRSFATFTKDLHELADWLKACNVESVAMESTGVYWIPLFQILESRGFEVCLVNARYYQNVPGRRTDVSDCQWLRHLHSVGLLRSSFRPSDQVCALRSLVRHRDSLIQSASSHVLRMQKALDQMNLQIHHVISDITGITGLRIIEAVLSGERDPAKLAGLRDGRIKASEETIIKSLVGDYRREHLFTLRQSLAAWRNYQELMTECDREIEEQLKAFESAIDVQEKPLAPPKVHRRSRYTNEPSFDLRGHLYRVFGVDLTAVPGISALTAHTLLAEVGPDISRFRSAAAFSSWLGLCPDNDISGGKKLSVKTRPVSNRASCALRMAVNGLHKSQTWLGDFFRRMRAKLGPPKAVTATAHKLARIVHLLLSTRQPYDESVFAKMEEATRLRKQAKLKAQAKALGFNLIPA

SEQ ID NO: 106557 - protein, 326 aa, unidentified
MVNALGIDVAKDKLDVVLLNEVAQEHGGVFANNLKGFKQLQHWLNKRVEGELHVCLEATGQYGEAVAEFLFQACYTVSVVNPARIKAFAASRLSRQKTDQTDARLIALSCQTQKPEVWTPPAPEQRALQAMVRHLHDLKAMRQQESNRLTSGVSAQPVVHALQQHIGFLDGQIAELERQIHEHLDHYPSLKQQRDLLDTIPGLGDISIATLLAEVPNLLAFDTAAQLAAYAGVTPRQFRSGTSVHRPTHISKCGNARLRAALYFPAMVALRHNPVVHAFGERLRANGLPPKAVVVAAIRKLLHLVYGVLKSGRPFDPNYAVQALHA

SEQ ID NO: 106558 - protein, 445 aa, unidentified
MANEDRQETSEGREAIDEGFPVLREDVAGIDVGSAEHWVCAPARTGRGRDVAVFAATTPGVEQLAAWLKDRGVTSVALESTGVYWVAPHEILEAHGFTVVLANTRQLGRVPGRTKTDRRDCEWIQRLHSCGLLRGAFRPVEQICMLRTLVRDKATLVAERADWVRRMQKALDQMNVRVHRAVAEVDGATGMAILRAIVAGERDPHQLARLRDYRCRKSEAQIADQLTGHWRDDHLFSLQQALKMYDTLSDMIAAYEREILQRLETMTSVDQRDAQAPPPASATKARAIKSRGEDPLRHALYRMSGVDLTTIDAVGVETVNVVLSEYGPNLSQFSTEKQFVSHVGLAPHTPKSGGKVVKKRTKKPGRASARVGAALRMAATSLRHSQTALGAYYRQVARRLGADVAVFATARKLAQHIYRLLRWGQPYMDEGAVAYDQRYQLAPIA

SEQ ID NO: 106559 - protein, 334 aa, unidentified
MWYVGIDLHRTTVVLAAVNDIGEAMKPITIPCNDTVTIVSTVKALGQFRAVIEATGTYRWLYDLLHHHGTILLAHPMRLRAMIQRRTKTDKLDAQLLANLLRINQIPLAYIPPEPYQQLRDLTRCRARLGRQQAEVKIRLRGLPARQNRESPYRVPFGPRGLGWFRGQDFGPIENMVRDELLERHRHYAKQMLLFDKRLEELRQVFPQVETLLEIHGIGLYSALLIVAEIGEVERFRTAKQVGAYSGLTSRVHQSGGHCYQGSITRQGSPWLRWVLVQAAMQAVRKDMALKNFYNRIRKRSSAKIARVAAARKLAEICWKRLCRWQREHADQAA

SEQ ID NO: 106560 - protein, 338 aa, unidentified
MYYSGIDQHKLFSVITTVNDDGIIVKQAELKNNEFDILNYFASLGNTHSATVETTGGWYWMNDLLSSHGINLKLAHAKYVKAIAYAKVKTDKVDSHILAQLLRLNFIPEAYKISDDVRPLRDTLRARLRLSQKRTSCLNFMNRMLEKFNINDPSLLSDFYKLQYQQFDYQEHLLKEQMLTLEKSLYPSLIPNNDIQRLLWIPGIGKMNAFTILLEVGDINRFLSEKNFFSYCRLVPSARNSGGKSKQRSSKDGNKYLKAVFSDAAVHALQYYPPIKKYHDSKLRRKKKQVAHAIIAKEIARIVYYVLKHKSDFNNHFKGIKIDQKKSYQWPRITNPYA

SEQ ID NO: 106561 - protein, 411 aa, unidentified
MTGSLKRHAVMISMDGKRCYGASGEDKASSSLEQPTGCPMPQPNDLSRSLAALDQDSTLIAVIEMSQSTWLVAGIVPGIHRQPLKKLAADEGTLLQLLYRWRDEATKTGRTIDRIAVAYEAGRDGFWLARWLRGRGIEAYVIHPTSVAVSREHRRAKTDRLDTELLKRAFLGWLRGEPRHCSMAKIPTPQEEDAKRPNRERENLVSERTRIVNRMKSTLARLGLRGFKPTLRKAAERLDGLRTAEGVPLPPNTLAELRRDMARLRFVMDQIREIEAARLIRLEQHPELASHAMVRLLARVIGVGIETADMLVHEILSRNLRDRKAVARYAGLTGSPDESGARRREKGLARAGNARVRRGMIQLAWRFLMFQKNSALAQWYRMQTTDHRGTTRKTMIVALARKLLVARFGSW

SEQ ID NO: 106562 - protein, 379 aa, unidentified
MKKHCNSAMESEVRAKRVKSRGPVRRETRDVMAELVGKLSKKMDAKALSARLGEEYRRNAVCPNLDRLTVGMDLGDQWSHYCILGLRGETLAEGQMRTRQQEMAEFYGGLAESRVVIEVGTHSAWVREGIAECGHEVLVANPRLMEGSKRRQRKNDRIDANKLARLGRVDPQSLHPIEHRSKEVRQDLLVLRARDALVAARTELINTTRGLVKSMGARLPKCSSPSFAAKVEEAVPSEVREALLPLVRLAAALSDNIQAYDQQIEKLASKKYGHTKLLRQVKGVGPITALAYVLTLEHPERFAKSRDVGPYLGVVPKQEDSGDSQPQLGISKAGDTMLRKLLVGSAHYILGPFGPDTDLRRYGQRLCERGGKTRRNGPR

SEQ ID NO: 106563 - protein, 343 aa, unidentified
MQTISTIGLDIAKSVFQVHGIDAEGNVIVRRQLKRRHILTFFQKLPLCLVGIEACASSHHWSREIKALGHTVRLMPPAYVKPYVKRQKNDATDAEAICEAVRRPTMRFVETKTPEQQSCLTLHRTRHLFIRQQTAVINAIRAHLAEFGIVAPVGRQGVDKLLDIVADARDTRLPEVARACLAALGNQLRMLKAQILNFDRMITAWHRSNETSKRLDALPGVGPALATALVASVADPKAFRSGRDFSAWVGLVPKQNSSGGKQKLGSISKQGDRYLRSLFTAGALAVIRYAKIHGTGHRPWLTALLARRPTKIAAIALANKIARMAWAMMARGERYREPVALAA

SEQ ID NO: 106564 - protein, 356 aa, unidentified
MKQLKCIEKFVQGKAVFCGIDVHAKQWDLCFFCEGEVVEKLVIPGSFDRLKSHTECRYKGACSVHFVYEAGFSGFWLYRRLTALGHRCTVTPPSRVPGVDNKVKTDKRDAEKLARFLAGGLLKSVYVPSPSIEMDRQLLRLFRSYKKKLTRVKNQINAILRLHGLSWDKTVGCRWTKRHVAWLEGLSFDHEACRYVIDRHLEEYRFLRSHIADLTKRIRKLSRSNAYQKHFGYLISCKGVGLLTAMTFLLELGELWRFPDTIQFCGYLGLTPSQHSSGERVRLGHITHEGNSHIRHVLIESAWTVIRHDPFLRDKYDRLRARSTNGKKAIVAVARSLAVRLRRCVLDETPYAIGVC

SEQ ID NO: 106565 - protein, 342 aa, unidentified
MQITTYGLDLAKRVMQLHWVDMETGEIHRKQLRREALLEFFANRQPGLVAMEACGSAHYWGRELRKLGHEVRLVAAQFVRPFVKANKNDAADAAAIWETVQRPDMRFVAVKSEEQQSVLALHRMREQLIKIRTMQVNQIRGLLCEFGADLPQGRQRGLKEVPDALANLEDSVSPMTLDTVRRQLKRLDELDQDIADIEKRLTLWKKDQEAVIRLMAIPGVGLLTATAIIATVGDMKSFRSGREFAAFLGLVPRQSGTGGKVRLLGISKRGDVYLRTLLTHGARAVVNFQIKNRNPWIDKLLSRRPHNVAVVAVANKMARTIWALLVKNSEYDTNHTALKAAA

SEQ ID NO: 106566 - protein, 350 aa, unidentified
MQLHTIGIDLGKTLFHLVGLNQRGEVVLRKKFSRKQLLHFTANLEVELIGMEACGGSHFLGRALREQGHEVRLMPAQYVKPYVKTNKSDYIDAEAIAEAVERPKMRFVPIKSDDQLDLQSLHRVRERWVMRRTAVINQIRGLLLERGITLRQGRRHVDEALPGILEDASAKLSGAVRLLLAQLKLEMDHLQMRIDEADAAIQKIAGENEACRRLVAIPGIGPVTATAIIAAIGNGAAFKKGRGFSAWLGIVPGEYTTGGKQKLLGISKRGNSYLRRLLVQGARAVLQQSAKQSSGLSAWLAQLTTRVHSNVAAVALANKLARMAWAVLAKNEPYRPPMLVGTATPGLACR

SEQ ID NO: 106567 - protein, 388 aa, unidentified
MPAAETPVAYLGIDVGKSSHSACALDAGGGVAFRAELANRPDDIDRVLERAGSGALVVVDQKRNIGALVLARAHAHGNPCAYLPGYAEKQARGMFPGTAKTDAIDAEVIARTALGVPRALRPAPEEPEGTASLRILSSQREFASSARTRAKNRLRATLLEADPALEGAVDPSSRWQVSMLAEFGGAAGCSAAGWRRFSNAARRAGAPAAGARRLWEALLASSRSGRRLPAGEDVAVRILAREIASLDADIEELDSLVADSLAGDEVYECLLTVPGIGPKTAAALVTSIDISAFRGHDELASYCGVAPSDRRSGSSIRSTSPQHGGNRQLKNLLIFSCNSLIGTDNRFGRYYGECRARGMRHSKALKAVARKRLKVIYAIMRDAVPYAA

SEQ ID NO: 106568 - protein, 342 aa, unidentified
MKLFVGLDVSLSKTSVCVISEHGKIIKEAETESEPDFLTRLLDDLDGSIAAIGLEAGPLSQWLHRGLTKAGLDAVLMETRQVKGALKAMPIKTDRRDAEGIARLLHLGWFRPVHCKSVSAQEVRAVLGARKAIQQGMLALEMSMRGLLRNFGLKVGAISRGRFEARIRELADGNPMLETATAPMLRARASLRQELAGLEKRVRQFAGDDAVCRRLMTMPGIGAVVALTFRAAVDDPARFRSSKRVGPWVGLTPSRNQSGERDVSGGITKAGDVNLRRALCQAATVMMNRGRSTWLRTWGAQLAQRRGRKIAMVALARRIAVILHRIWVDGATFQSAAAPNTV

SEQ ID NO: 106569 - protein, 359 aa, unidentified
MTSASMPDLLCGQQPDLPEDLVIGVDTHRDANVVVALSVTGRVLGNASFPTTTDGYQQLLAWSRTRGRLCRAGLEGTGSYGAGLNRYLHNQGVAVIEVNSTDKATRRRRGKNDVIDAEHAARAVLAGTATAVAKTVDGPAEALRLLKLAKNSAVKARTQALNQLKAVLVTADATLRDSLHGLGPKTLLRRCAALTAGPDLSHAATAAAYTLRSLAVRILALSTEIDEVTAQLHTIIDAHRPQLLQRLGVGPDIAATLLITAGDNPGRLRHEAAFAALCGASPVEVSSGRTDRHRLNFGGDRQANAALYRIVLTRLRHDPATRAYRDRRKTEGKTPREIIRCLKRYIAREIYSLLLPATP

SEQ ID NO: 106570 - protein, 376 aa, unidentified
MREKLRFLGLDVHAETIAVAVAEPDGEMRSLGTIANREESVRKLIRKLGPAEHLRACYEAGPTGFVLYWQLSQLGVECAVVAPSLVPKKPGDRVKTDRRDALKLARSHRSGDLTAVWVPDEDSEALRDLVRQREAAKQDQLRARHRLTKFLLRTGQRPPLGLKAWTERYLRWLAQVRYTQPAQEATRLDCMNEVEHMSARVKRLEEAILEVVKLAPQPMQELIRGLQALRGVAHISAVTIASELGNISSRFESARKLMGYCGVFPSEDSSGKRIRRGGITKAGNAHLRRIVVESAWCYRHLPRVGEKLRKRHQGVPAEITEIAWKAQHRLHKRYMTLMARGKEQRKTMTAIARELLGFIWAIGIKAEAACKQQLAA

SEQ ID NO: 106571 - protein, 348 aa, unidentified
MKKLVAGMDLHSNNVVIGVMDLDGLRVASGKVACELKAVEQFLAPFKPRLEQVAVESTYNWYWLVDGLQAKKYPVRLANPAKMEPYSGLKHGDDTSDAFFLAELLRLKILPTGYIYDAQLRPVRDLLRRRMLLVQQRTALLLSFKSLYTRTTGQALALNQLKALAIPEAQQLYTHPANQLIAGLQLEHIEQLNASIAQLEKSVLDSARELPGYARLTTLPGVGRILGMTITMEVGDSQRFADAGNFASYCRTVKAERISNEKKKGENNAKCGNKYLAWAFVEAANFARRYDEQCRQWYDRKAAKTNPIIATKALACKLAKAAWHVMTADVDYDAQRVFGPRPTPALKT

SEQ ID NO: 106572 - protein, 356 aa, unidentified
MSRKASATGAVAVIGIDIGKNVFHLIGFDKRGAIVLRQKLSRGQLQARLANLPPCLVGMEACVGAHHLSRRLKALGHDPKLMPARYVRAFLKGNKNDFRDAEAIAEAVQRPTMRFVATKTAEQLDLQALHRVRSRLVSERTAIVNEIRAFLLDRGIAVAKGLHRLRAALPDILATRTDLLSPRLLHIIEDLVADWRRLDERIDNVSLEIGVLAQEDAGCERLMTVPGIGPIISSATVAAIGTGDVFSRGRDFGAWLGLVPKQISTGDRTILGKISKRGNKYLRTLFVQAARVVLLRPASWERYGLKPWIEAAARRLHHNVLAIALANKLARIAWSVLHHGRNFEVRKMSEPASQPA

SEQ ID NO: 106573 - protein, 322 aa, unidentified
MDAQPLASPSAIGIDVAKGHCDVKFPDQSGTVAFQFDDAGFTSLLERLVRFPKALIVLESTGGYERRLVAELVTAGHRVAVVNPRRVRDFAKALGQLAKTDSIDAHVLALFGERIQPRESEKSSEKQQELQQLVVRRRQLVALRTAESNRFDQTTSKFALKGIRQVLALLDKQRAKLDAEIARLIEADDDWKAKNEILQSVPGIGPGTSATLLAELPELGRINRQRVAALVGLAPFNSESSTIKGRRTIKGGRRSVRCALYMAAISARRCNPIFQNFAKRLEQSGKRFKVVITACMRKLLVTLNTMIQKKTAWNQQITPASP

SEQ ID NO: 106574 - protein, 398 aa, unidentified
MTESSDCESVLVFIGVDVGKDTHHAVAINRSGKRLFDKALPNDENKLRSLISDLKQHGQILLVVDQPATIGALPVAVARSEGVLVGYLPGLAMRRIADLHAGEAKTDARDAAIIAEAARTLPHALRTLKLADEQIAELSMLCGFDDDLAAQTTQASNRIRGLLTQIHPAPERVLGPRLEHPAVLDLLQRYPSPEKLASLGEKKLAAQLCKLAPRLGKRLAADIAQALAEQTVVVPGTNAAAVVLPRLALQLITLRKQRDEVALEVEQRVLAHPLYPVLTSMPGVGVRTAARLLTEVACRAFASAAHLAAYAGLAPVTRRSGSSIRGEHPSRRGNKALKRALFLSAFTALRDPLSRAYYTRKMSQGKRHNQALIALARRRCDVLFAMMRDGTFYTPQGS

SEQ ID NO: 106575 - protein, 392 aa, unidentified
MYIIGIDIGKNHHEASIVSPKGKQIGHSLCFATTHKGADSLMSFIFKNIGDSPCVFGMEATGHYWYPIYSFLKAKGYTIYVINPIQSDSLRKMYIRQTKNDSIDSFLIAEVIRFGQFSTTSMADENILAMRQLCRYRDSVISSRTEIKLRISTIMEQIFPEYEKQFSSLWLSTSMGILEKYLTPENIQNAPLDELYGIIKDKSHNRLTMDKALSIKEAAADTFGIKIAQEAFSFQLKQLIDRMHFLDQQIETLDCQILGYYEKFDCYLHTIPGIGMIGAATILAEIGDTKRFKSSSALVAFAGIDPTVRQSGEFNSIHNHMSKRGSPYLRHAIFLAATTCSFHNSPLNAYYKKKREQGKHHLTATGAVARKLTTIIYAVFRDGKPYEPKKFC

SEQ ID NO: 106576 - protein, 390 aa, unidentified
MTNIYLGLDVGKTNHHATALTTTGKKIWDKPLPQSEPKIRELLEKLNGQGTVLLVVDQPKTIGALPVAIAQDMGIQVAYLPGLTMRRVADLHPGEAKTDARDAFIIAETARTMPHTLHTITVTEETTAELSMLCGFDDDLAANATAISNRLRGFLTQIQPHLERSLGPRLSHSAVLKLLKKYPAPADLKTAGKTKVRNLLKKNASRLTEEIFLTLGEQTVVVAGTAIVTPIISALVVQLELLLTQRAQTEQQILALVEAHPLSAVIRSMPGMGVRTSARILTEVVGKDFKDASHLASYAGIAPVDRKSGTSIKRTQASRRGNKAFKRVLFLSAFDSLKVDQASRRYYDRKCAEGKRHNQAIMALARKRLNVLFAMLRDGCFYECRVPVGT

SEQ ID NO: 106577 - protein, 343 aa, unidentified
MDHFAGLDVSVKETSVCVVDETGKIVREVKVASEPQGLLAVLANPAYHFKRIGLEAGPLSQWLYSALAEAGLPVICVETRHMRAVLKAQINKSDRNDARGMAQMMRVGLYRPVHVKTLRSQKLRMLLTHRKLLQSKAIAIDNDLRGTLRNFGLKVGIVGAARFEARIKELIENIPDLAVLVEPLLVVRRVLREQLGILHRRLLAVVRDDDVCRRLMTVPGVGPVVALTYRATVDVPARFRKSKSVGAVFGLTCVKYQSGEIDRRGAISRCGDEMMRTMLYEAAQNMLFHSTRWSWLKAWAMKIARHRGMKKAVVALARRLAVIMHRIWVDGTEFYWTRETVPA

SEQ ID NO: 106578 - protein, 403 aa, unidentified
MNSVGIDISKGRSTIAVMRPFGEVVISPVEVRHTDSELSELARQLKSLNGETRVVMEATGNYHAPVAKLLHDAGLYVSVVNAKLVHGYGNNELRRVKTDRKDAVKLANYGLDRWLTLPRYVPEEDTRLLLKNCYRQYRQYSKVQTVLKNNLISLLDTVFPNVNRLFSSPIREDGSEKWVDFVAEFWHCRCVSEKSEMAFANKYLRWCRKHGYNFSEAKVHTIYAEASGHIDVIPKSETAKLLVEQAVAQLRATSAALAALKHEMQALASMLPEYPVVMDIFGVGPTLGPQLMAEIGDVRRFYSKKALVAYAGLDAPPNDSGDVTGRHKSMSKVGASSLRRTLFLVMSVYLQNAPLDEPVYQFMDKKRAEGKPYRVYMMASANKFLRIYYATVKAYLESLEHTA

SEQ ID NO: 106579 - protein, 389 aa, unidentified
MKIFVGIDIAKLNHFAAAISSDGEILLEPFKFTNDADGFQLLVSKLESFDKNSIIIGLESTAHYSDNLVRYLVAEFYQVCVLNPIKTCQMRKNNVRKTKTDKVDTFVIAKTLMMQDDLRFITFFDLDMMDLKALGRFRQKTIKQRTRLKIQLTTYVDQVFPEIQYFFKSGLHQNAVYALLKEAPSPKEIASMHMTHLANLLKVNSHGHFTKELAKELRVLAQKSVGANDSAISIQITQTIQQIELLDSQLEKIEAEMTDIMKFNDSVIMTIPSIGYINGGMILGEIGDIHRFSNPNKLLAFAGLDPSVYQSGNFQAKTTRMSKRGSRVLRYALVNAAWNVVRNNATFKAYYDAKRSEGRSHYNALEHCAGKLVRVIWKMLTDEVEFNLE

SEQ ID NO: 106580 - protein, 421 aa, unidentified
MSTVVIGMDPHKRSATIEVMDSDETVLGRGRYGTDPSGYRAMVRAVRHWPQRVWAIEGCQGIGGPVARRLLADGEQVVDVPPKLSARTRVFTAGQGRKTDATDAHAIALAAVRSRGLRRAGGDVQLEVLRVLADRRRALGEDHTRMISQLHRLLLDLIPGGAKKDLSAAQAKVLLAGVRPRDPGGRARRRVAAELIADLERIYQRKKAADKELTAALKATGTTLMSLDGIGPSGAARLLVEVADITRFPDRGHFASWNGTAPIDASSGDHVRHRLSRAGNRQINRVLHIMAVVQLRHPTKGRAYYDRKVAAGKTPNEAMRALKRRLSDVVFRQMMADARAARTGPGGHEGAATGSSAAGSDPDAGSSDKSLPGPATSDPTPPSHPILPATPAAIIPRRTAADVKRALLDGGQDRRTLARRE

SEQ ID NO: 106581 - protein, 419 aa, unidentified
MKVTYQTCCGVDVHKSFLVATIVKTSGGIEPSYQKKRFSTFNNSILEFKQWLLDNDCHDVCMESTGKYWVPVFNLLEDEINVVIANPKWVKAVKGNKDDTKDSKWIGDLFRIGLVKGSYIPYKAIRILREYTRYRYKLVSCRSSEKNRYQNALTVCNVALDSVVSDIFGKSSTSIIDYLLEQSGTSINHEEIASKLLRSLKSKEDAVIESVEGYQMTDAQKYRMRLVRAHMDYITAEIKDVDKMIENMISSNPDFENAVQFLCTIPGVKRDSAVTIISEIGTDMSQFSSSKRLCCWAGLTPGSNESAGKKKSVRITRAGVYLKPALVQCAHAAVKSDKSPYYKKKYESLVKRRGKKRAIIAIASMILTAIYQMQSTGEQWNPSDLYKIDMPVALVEKQKLSSKPRNYYNEKEYSLLMNH

SEQ ID NO: 106582 - protein, 364 aa, unidentified
MQYVSNNTELSSHEETRCQFNGSTGVIKLGIDVHQQFYVVVLQEGGTNPKPPQRFRKEGFLHWAARLKQHGGEVHAVYEACGFGFGLQRALGALGIQCHVVCPQKLDEHNKRVKTDRLDAKALCLKLDRFVQGNRDALALVRIPSEKEEQLRAIHRQREQLVKARKQLEAQGRSLMVNQGMEPVRSWWKQHRFVALPVPTWLKELLANSQPILLALEQRIRALTVQLQSGADPDQPRGLGAMSSVLIDREIGNWHRFNNRRQVGSYTGLCPGEHSSGNTRLQSCVTKHGNPRLRAALVELAWRLVRFQPNYRPIVKWNAVLRKGALTTGAARKKAIVAVARQLAVDLWRIRTGRVSAQKLGLIN

SEQ ID NO: 106583 - protein, 365 aa, unidentified
MIAGIDTHKDTLAVAVVDDAGRLIAGGDIPNTERGFVQLVNMFDTHHVLRVGIEGSGNFGRAVAVHLVLRWQPDWPVAVVEVPTLMTSRERRGQLGKGKTDPVDALAIARITAREQQLPPVRLTVGPAADLRALLDYREDLVRERGALVNRAHSELGGLRPGYQQQIPILTTRARVRAALELISDDTSVRATLCRRRLERVITIDTETAELKRQITGLVAAADTTLTDLYGVGPLIAARFIAEIVDIHRYPNRNAFAAANGTAPLPASSGRTVRHRFNPGGNRQLNRSLYTIAITQIRGDTEGRVYYERKRAAGKTKREALRCLKRRLSDIVFTTMRHDAANAAARTNQPPQPADLGQSGCGRRK

SEQ ID NO: 106584 - protein, 351 aa, unidentified
MIIIGCDFHTRFQKIAMVDTEIGEITKRRLEHGNGEARAFYAALPGPARVGMEATMNAQWFERLLQEYHHELWVGDAAQIRAAAVRKQKTDDRDALHILDLLVRDKFPRIWIPSPENRDLRQMLRHRDKLVGIRTSVQNQLHALAMSQGLCRKAKLWTKAGRKELEGLPLDPWASRRRWELLQLFDQLDPQIDELDKVVIQEAEKRPAAVHLMTQQGVGPVTALAFVLTVGPVERFPTSKHLVSYLGLNPSEDSSGGRQRLGAISKQGNSMMRHLLSEAAQTAVKFDPELRRDYLRLKFRRGISGVAKVAIARKLAVRLYWKLREVAQPNTAARMQGSPTSPMVEATPSRN

SEQ ID NO: 106585 - protein, 376 aa, unidentified
MGDHSEAFVAFDTSKLRNAVAIADAGRTGEIRYLGEFENSGAATAKLVRKLAGQHRRLTFCYEAGPTGYGLYRQITSLGHECIVVAPSLIPKKPGDRVKTNRRDALSLVKLLRAGELTAVWVPDRHHEAIRDLTRARGAAVLDLRRKRQQMSAFMLRLGLHYPANRHTWTKAHMSWLASQKLEHAEQRLVFEEMMLAMRQAQERIERLEQAMRAAVPDWSLAEVVTALMAMRGMDLVSATTFLAEIGDLSRFRTPRELMAYLGLVPSEGSTGETIIRGPITKAGNGRARRMLVECAWSYQHPPRVSKDKQAKVAAAPRAVREIAWKAQHRLNRRYRALVRRGKLKTVAMTAVARELAGFIWAISREITIAGAAAGK

SEQ ID NO: 106586 - protein, 343 aa, unidentified
MQIRSVGIDLGKTTFHVVALGDNGKVLLKKKFTQRQLIIFTANLQATLIGLEACAGAHFLGRALRGQGHDVKLIPAQFVRPFVKSNKNDFLDAEAIAEAVGRQNMRFVPIKTDDQLDLQALHRVRDRLITRRTSVINQLRAFLLERGLVFAKSPAKLRERMPEILENAEEDLTPRMRNLLALLWNEWKDLEQQVVDLNHEVELIASSDAACLRLRQIPGIGPLVATAIVASIGNGAAFHKGREFAAWMGLVPKQYSTGGKAKLYGISKRGNRYLRKILIHGARAMVLRCKRDRVPMGAWMTALEARAPRNVLIVAAANKLARIAWAVLSSGQDYRAVQEPVAA

SEQ ID NO: 106587 - protein, 412 aa, unidentified
MDALIERAAGLDVHQGSVVACIILGAAGRRPTKEVRRFGTMRQDLAALRAWLLEKGVTHVGMEGTGVYWQPVYAALEDAFTLIVGNAAHMRNVPGRKTDVKDAEWIADLVRHGLVRASFVPPPEVRVLRELIRHRKALVGTLAAERNRTLKLLESAGIKLAGVMSDVFGVSGMLMLRALAEGTADAATMADLAKRRLRRKRDRLALALDGSLAEHQRFLLGLHIRRLEEIERDLAEVEAAIGAAMRPFAAQQALLVTIPGVDALTAAAIVAEIGTDMAAFGTAQRLAAWAGLCPANHESAGQQKRRGTRKGNPYLKAMLVAAAISASRTKGTYLRDKFHRLKARMGPKKAAVAIAHKILTAVFHMLQRAVAFIDLGADYLDRIDKHRTAKRLVRRLDALGYTVMLCPKMAGP

SEQ ID NO: 106588 - protein, 320 aa, unidentified
MRNAVGLDISQNTFDAAAIVNGQRKQALFDNSINGFASFKAWLDGFDCELHICMEATGNYFEDVADYIGQFYTVSVINPYKISEYGKSRFHRTKTDKQDARLIAEYCHTAMHKDLPVRQKISIGHYRLKRLLALYDQLKTQKTAQKNRLKVAKDEFVRKIHQAQIQELDQHIQQVEAEIQAITNSNQDLKAVSDRLQTIPAIGKLTAAILTNYLLSGDFKTANQFTAFAGLNPQQKESGTSVKGRSSMTRYGNRRLKSALFMPAMVALNRNYFPDFVKRLKAKNKPKMLILGALMRKLLVVAYYVYKTQKPYNPERYKPA

SEQ ID NO: 106589 - protein, 380 aa, unidentified
MADQPWGARFGNFGASLAAVGYEGAARPLSQSVRLMLCDGRLPLPGHDGGPLMEGTMTFELVAIDLGKQSFHFHGVSSDGEVVSRKVARAKLFELINELAPATIAMEACPGAHYWGRRFQKAGHQVRLIHPRFVKPFVRGAKNDAVDAQAIYDAASRPTMRFVPVKTLAQQDLQALHRVRERLVCQRTALINQTRGLLAEYGIVLPKGPAKLVAEGPGAAAAAPLSELARGLFASLFEQLQDLETRVEVLDARLVAICRDDPASHRLATLPGVGPVIATALVASVNDGRQFRNGRELAAWIGLVPRQHSTGGKTRLGGIGRQANHYLRRQMIHGARSVAFRTVGRDDARSRWVQELIARRGFNRAVVALPTRRRGPPGRY

SEQ ID NO: 106590 - protein, 329 aa, unidentified
MSALICGLDVHKDSTYATILNGEGKVINQTRMNNEKVLSYLTHYKVGRVAMESSTAVAPLFRQLASKGFDVVVSHPKKTRYIAEAKIKSDRVDSKAIAELARLDALPLAYVPDIETARLREKVRRRAFLVRQRAKLKVKIKSVLTYEGIKPPLDHGLFTLKGAEWLHSLNLESVDSYLRIMSTFNREVKFLSKQLLGVAEEDEDVKLLMTVPGIGYYSALLVKSEIGNIDRFPFGERLCSYAGLVPSTHASGKTVRHGGITKEGSRWLRWVMVQAAQTHVHRFDSTVTRMYNRVAQKRGHRVALTAAAHKLLLVCYSVLRNKRPYYDQA

SEQ ID NO: 106591 - protein, 359 aa, unidentified
MRTQITKDAFIGQKIFVGLDVHKKDFKVSVIAGGVLYKTFSSPPDGQKVFSFLQQNFPGAEYYSAYEAGFSGFWLHKQLMGLGVNSIVVNPADIPTTDKERRQKEDQRDSRKLARDLVAGQLKAIYVPTEKTIHDRILMRSRHTIVKEIRRSKQRIKSLLYFQGIRYPDKFAIEGNHWSKNFIKWLESIIFENESGKQGLQIHIETLRHHRQLLLQTNRQIRALSKSDQYRERVENLISVPGIGMLTAMNLLTELETITRFENFNHLCSFAGLVPATDSSGDDDVTTGITPRKNSGLRSAMIESAWVAIRNDPALMSAYLQYCKRMSSTRAIVRVAKKLLNRVAHILRKNEKYQKSIVK

SEQ ID NO: 106592 - protein, 343 aa, unidentified
MQVVRIGLDLAKYVFEVHGVDNHGKVVVRKRLRRDAVAGFFANLPACLVGMEASNGAHYWARVLTELGHQVRLISPQFVTPYVKSNKNDQNDAEAICEAVGRPSMRFVPPKSTDQLAVQAVHRIRRRLVADRVRLVNQIRGLLSEHGIVIARDIAQLRRGLAVIVGNINDDLSEMLRALMRELQEELSELDTRIAAYDRRIREIFRTSEQCQRLGKIEGVGPVTATALVAAVGDKSCFKNGRQFAAWLGLVPKQRSSGGRARLFGISKRGDRYLRTLMIHGARAALSRANGKQDPRSLWLGKMRQRRHPNVAAVALANKNARIVWAMLTGGAAYEPALSVKAA

SEQ ID NO: 106593 - protein, 420 aa, unidentified
MKVVYQTCCGIDVHKSFLVATIIKTTSGVQPSYQKKRFSTFNNSILEFKQWLLDNSCRDVCMESTGKYWIPVFNLLEDELNVTIANPKWVKAVKGNKDDTKDSKWIGDLFRLGLVPGSYIPCKPIRILREFTRYRYKLTSCRSSEKNRFQNALTVCNVALDSVVSDIFGKSATSVIDYLLKQPDNSINHEEISSRLLRSLKKKSESVIESIEGYQMTDAQKYRMRLVHAHMDYITSTISDIDSMIDSLVEPYENAVQLLCTIPGVDRSSAITILSEIGTDMTQFSNSKRLCCWAGLTPGNNESAGKKKSVRITRAGVYLKPALVQVAHAAVKSNKSPYYKAKYERIMKRRGKKRAIIAVARMILTAVYHMLSTGEAWNPTDLYKIDMPEPLKNKQKEKAVKQAMKLLIAEGIIKEPLLAS

SEQ ID NO: 106594 - protein, 477 aa, unidentified
MVAAREALNRKQRRDLARRLRVEDPGLDVMHPHAAGIDVGNSAHYVAVRPDRDPDSVRRFECFTADLHHLADWLVHCGVTTVAMQSTGVYWIPLYEILDARGFDVYLVNARHTKNLPGRKTDVQESQWLLKLHTYGLLRNSFHPPAEIRIVRTYWRQRGDHVHAVSTCIQRMQKALTQMNIQLANVISDLSGWTGQRIVRAILAGERDPVTLASLSHPGIHATRDTIAKSLEGTWQPDLMFVLQQEVAMYDAYQQRIAECDQALERHLKGVADKVADRFPDAEPSETPPRTIGRARSKRSRKAGSHTPEFDLGSELYRISGVDLTRIDGIDVGVAQTVISEVGVDMTRWKTEAHFASWLGLCPDNRITGGKVIRKGTRHVINRAATALRLAATTLLRSQSYLGAQYRRLRGKLGAPKAITAMAHKLARLVYRLLKWGHEYVDKGLQYYEDRHREQQIQLLRKRAAKLGLQLTAPEVA

SEQ ID NO: 106595 - protein, 341 aa, unidentified
MEQATTIGLDIAKHVFQVHGADGAGHVLFRKRITRVKLLGFLAAQAPCVVAMEACAGAHYWAREIGKLGHHVRLIAPAYVKPFIKRQKNDAADAEAICEAAQRPSMRFVPVKTEEQQANGIVFRARDLLVRQRTRCVNALRGHLMEYGYVFPKGITHVEALVALVEDLHSSLPDRVRVILTLLVDTFTALEAQITALDAEINQRSKSDPTARRLMTIPGVRPITSTAITALVPAAEGFPAGRDFAAWLGLTPLQKSTGGKPKLGAVSKRGERTIRRLLIIGASAVVQQASRRGAPKGSWLAQMLARKPKMLVTVALANKMARVIWALLVKGGTYRTPIAAA

SEQ ID NO: 106596 - protein, 304 aa, unidentified
MGWTQPHCLQRPLEGQDGTLDHPKTKTVGRVQRWRLQTIGIDVAKDVFGVYGVDGRGQVTVRERLVRKHLLEFMSKLPACLVGLEACTSAHYWARELGQLGHRVKLMSPRFVKPYRKSEKNDANDAEAICEAVARPSMRFVPIKSAAQQDLQALHRVREQLLKSRTALVNQVRGLLAEHGIVAPRGIARARRLLVETLTEPERHGLSEVFRETLLEIAGRLRLFDQRIQAYDLRIERVFQHDERCQRLAAVQGVGPLVATAMVAAVGNAREFKSGRELSAWLGLVPRQHSSGNRSMLLGAKPRA

SEQ ID NO: 106597 - protein, 416 aa, unidentified
MNLTTLFVGIDVGKRNNVVRLMDGGGDTLKLFSVANNADGAAKIQEKLRRTLLDTDYSKITIGMESTSIYGDHLAAFLRKDEFLRKWECKVYVLNAKNISKFKESYTELPKDDNIDTLIIADYLRFNRLPKSAALDEKYLALRSLTRARFQAAQNLSREKTRFIETLFQKFSTLDSAKVFSNTFGATSLAVICEFLTVDDIVNMPVQGLADFVNQKGRGQFPDPEAVANALQAAARSSYRVSKAVNDSLNQLLAVRLIGIRAIEDQIKTLDKAIESSMGAFQNVLSSIPGIGPVYSAGILAEIGDIIRFDGQSALSKYAGLAWKKHQSGGFEAANTKMYTTGNKYLKYYLLEAANKVRMHDTEFARYYRLKYREVPKHQHKRALALTAKKLVRLVYSLLSNNRLYRTPSQKDTNSL

SEQ ID NO: 106598 - protein, 313 aa, unidentified
MAQILPTVGIDVSKDWLDVAVRPSKAQFRISNDAAGWAELCRRLKPIAPRAIGVEASGGYERGLTHALLAADLPVRMINAWKLRQFAKAAGLLAKNDRVDAHAIAWFTEALPSREVIHDPAREHLAELVQARRQLVDAKQAFANQLEHMRDALLRRQMARRIRQLEADEAALDQRIVQTIAAEPTFAARQELVCSMRGVGPVFSSTLVALLPELGSVTNRQIAALVGVVPYDFDSGKMRGLRCIFGGRADVRRVLFMAAQAAAMWNPDLKAFKQRLRAAGKKPKVAIVAVMRKLIVTLNAMVRSGTKWQAKTA

SEQ ID NO: 106599 - protein, 346 aa, unidentified
MTQYKRIGIDTSKAVFTLHGIDQRDQPTLRINLRRSQMISFFRKLPPTEVAMEACCGAHYWARELTALGHAVLLIPPQYVKPYVKRGKNDRNDAEAICEAAGRPGMHFVPAKSLSQQAQGMVLKVRDTLIGQRTLLVNTLRGHASEFGVVAGKGVGRVGSLLAAIEQDATIPAEARDMIALLGQQIEHLDIKIKALEARLNAAHKANAVSRRLATIPGLGPVTALTLATEIDPAAFASGRHMAAWIGLTPKEHSTGGKQRLVGISRAGNERLRSLLVVCATSVIKAATMPASKQMTSWLRGLLQRKPRKVAAVALANKIARVAWAVMTYGTVYRRSPTNVEVSDAA

SEQ ID NO: 106600 - protein, 316 aa, unidentified
MSQYGTFVGIDVSKDRLDVHVLPDGQSFSALNDESGASELCQRLSALAQPVLVVMEATNVFWKTAATCLGSAGLQVAVVNPRQVRDFAKATGTLAKTDAIDAQVLALFAQRVCPPARALPSPQCEIARELLARRAQLIGMRTAEKNRLASARAKKVRKDIQATIVFLDKRLAAVDTEIDQWLKDTPIDQTRLNLLKSFDGIGHGSARALLIGVPELGSLSGKQIGALVGVAPFARDSGNKRGQRHISGGRPAVRAALYMPAITAIRCNPIIRQFYQRLIKAGKHHYVAIIACMRKMLVILNAMLKSNQSWKAPQGA

SEQ ID NO: 106601 - protein, 348 aa, unidentified
MMIIGCDYHPSWQQICWMDTLTGETGEKKLDHASGEAERFYRQLPGPAVIGMESTGNCQWFVEMATTAGHEVWIGDAAKIRASEVRQQKHDRRDAALILKLLVEGRFPRIWTPSGEEKDLRQLLIHRHKLVRIRVQVKNELQHLAMNQGVTRAGKLWSKTGEKVLHELPLKPWASRRREDLFKIREMLNGQIALLDQAVVEVAQKNEKAKLLMTQPGVGPITSMAFVLTMGDVSRFPRGKQVASYLGLIPREYSSGGHQRFGPISKQGNGFMRMLLVEAAQVAVRYDPQMRSEYLHRCHRKAKGVAKVAAARKLAIRLYWMLRTNTGYPGVVRVESSPRVPVVIRHGG

SEQ ID NO: 106602 - protein, 380 aa, unidentified
MTCKECGQVVKLTRTMNKCHSNTELSSHEETRCQFNGGRCAIKLGIDVHQDFYVVVEQAGGSNPKPPQRFQKEAFLSWAARLKQKSGAEVYAVYEACGFGFSLQRKLSALSIKCYVVCPQKLDEQNRRVKTDGLDAKALCLKLDRFVQGNRDALAIVRLPSEEEEQARAIHRQREQLVKARKQLEAQGRSLMVNHGLEPVQNWWKPRTFTALPMPQWMKELLANSQPILVALQQKIAALTVQLQNAASPDQPCGLGKMTSVIIDREIGDWKRFNNRRQIASYTGLCPGEYSSGNTRVQSCVTKHGNPRLRAALVELAWRLVRFQPNYHPVRKWRQILAKGALANGAARKKAIVAVARQLAVDLWRIKTGRLNAEELGLIN

SEQ ID NO: 106603 - protein, 344 aa, unidentified
MSEITTVGLDLAKRVVSLCGEDGFGQVVVQRTLRREAVLGWFAQRRPCLVGMEACASAHWFARELTALGHSARIIAPEFVRPFRLSGKNDAHDARAICAAVRQPQLRFVTVKSAEQQARLVVHRLRQGWQEERTAGINRLRGLLAEFGRVYPNSAPAALAGARAILADETLPPALRRGVVGQLEHLREIEAHLADCDREIAQDVRDDPRAQRVARLTGVGVLTASAVTATVADAHQFRCGRQFAAWLGITPRQYSTGGKPRLGRITRRGDTYLRSLLVQGARSALQAALRAAPSRRTRLSAWIVTTYARIGYHKTLVAIANKHARLLWVLLTRDEPLRAHAAMN

SEQ ID NO: 106604 - protein, 403 aa, unidentified
MHQSSTLYVGMDVHKESIAVAYVAKDHDAEVISLGTFGTRQCDIDTLIRKRPSKAKHLVFVSEAGPCGSWLSRYLTKKDSVCWVVAPSFIPTKAGDRVTTDRRDAMQLARLMRSGDLTPVYVPAVDDEALRDLSRAREDTLRDLKAAKLRLKAFLLRHDIRSTGRANWSPAHLRWLSEVVCPTPAQQIVFQEDVQTVTAQSERLGRLALELHEQVKTWRFAPVVEALQALRGVQFTVAVTTVAELGDLTRFENPRQLMHYLGLTPSEYASGARRQQGSMTTTGNTHARRALVEGAWAYRYPAKVSRHLQRRLEKLPPAIQAISWKAQVRLCTRYRQLMATGKHANQVVVAMAREFSAFMWAIAKQVAGSPKAESWRRIDAQAFKVSNLSWKRRSPGLVSPSAA

SEQ ID NO: 106605 - protein, 401 aa, unidentified
MEVFCGIDWSERHHDVALVDASGVLLGRRRISDDLAGFTDLTGLLAEHTEQPARVDVAIETDRGLLVAALRAAGHRVFAVNPKAVDRYRDRHAVSGAKSDPGDALVLAHLLRTDRHAHRPLPADSDLGQAVSVLARAHQDLVWARQQDTNRLRSLLREFFPAALAAFPDLTTKTALTVLAAAPTPSAAGRLSRANLVDLLHAAGRGTRPTDAGRLAATFAADQLRQPPLVEQAMGEAVRAIVRTLTATNDAITGLEQALAASFDLHPDAEILDSLPGLGLILGARVLSEFGDDPTRFAHAVSRRAYAGTAPITRASGRHKAVLARHVRNKRLADACYLWAFTALTKSAGARAFYDRRRAAGDRHSAALRRLGSKLIGQLHHCLNQRTHYDETLAWATPTNP

SEQ ID NO: 106606 - protein, 390 aa, unidentified
MSQPFDASRSLTAFEQDSTLVAVIEMSQSNWLVAAVVPGVERQPLKKLDAEADALLKLLQRWRDEARKAGRVVRRIVCAYEAGRDGFWLARWLQAHAIEAYVIHAASIAVSREHRRAKSDRIDTELLMRSFLGWLRGEKRHCSMVAIPTMAQEDARRPSRERESLVGEQTRIGNRVKAVLALFGIGGFNPKLRKAAEKLETLGTVEGTSLPEKTGAELRRDLERLRLVRDQIRAIEGERLRRLAAAPRTATGPHAMVRLLARVFGIGIETADMLVNEALSRNLRDRRAVARYAGLTGAPDESGKRRREKGLARAGNGRVRRGMIQLAWRFLTWQKHSRLAHWFRERTADGRSTTRKTMIVALARKLLIALWRLVTTGELTEGIKLRPAGA

SEQ ID NO: 106607 - protein, 385 aa, unidentified
MNILAIDLGKFNSMCCFYDTDTQEYRFQAVATTRPYLTAVFTHHKIDLVVMEACGPSGWINDLCQEFGLKTLVCSTNDEAWRWKNVKRKTDKDDALKLSRMAMMRQLTPVHVPSHTVREHRTLIKYRKKLVGRINQIKNSIRGLFACRGIEIDRGQPAWRTGRELINSHRKSLVECSLEELWRGQLDAELTQLDSLADQLADVERRLDVIANEDERIQRVRTIPGVGRKTAEVIVTALDDVDRFKNARQVSAYIGLVPRQYQSGETDRNGRITKRGSRLLRTMLVECAWLSLRYNEWSRTTYDRIHGGQKTRKKKAAIALARKIAVVAWSMLKHKTDWDPERAGIVAKEPAKEGPTRDTNQGRCDRGTHTDASSVGQVAESSMTS

SEQ ID NO: 106608 - protein, 338 aa, unidentified
MYYTGIDLHKKTSFITTIDATGKIVTRANLQNVEEDILAYFATLDKETRIVIESMASWYWLYDLLTGEGFEVVISNPVKTKAIASAKIKNDKLDSHMLAQLLRADLIATVHVSSLETRKLKELLRHRSRLVRDATRMKNRIHMLLRKNNFRSPFSDLFGVQGLRYLEEIDLPDYHRQQVETYLLLYQKLREQIEPLTQRVRALAKGNHTAQLLMTIPGIGPITAMFIMAEVDDISRFRSYRNLASYAGLVPSLDASAGKEKRGRITKQGSRYLRTALVEAAQAAVRMKNCRVSIFFRRRIVKGGYQKAIVATAHKILQYAFYVWKNQTPYKETYPVCA

SEQ ID NO: 106609 - protein, 433 aa, unidentified
MRTVALDVHKRFAEIAVHEDGGLRRLGRIETGRLRAFAESLGPDDHVVLESTSMTWAIAELLAEHAGRVTVSNPMRTRAIASAKVKTDKIDAKVLAQLGAADFLPEVWAPDEFTRALRRRIAHRSSLVRQRTRLRNQIHAVLARNLIETPFTDVFGQGGRGWLAEVQLPAHEREQVDSNLRLHDALDVEIELAERQLAEQALARPDVRRLMTIPGVGAITALALVAVIGDVSRFPSPRHLVGYLGLDPRVRQSGEKTARHGHISRAGQAHARGLLVEAAHTAIRTPGPLRAFHARIAVRRGKQIALCATARKLTVLVWHLLTKDEDYAFAAPTITQRKLRALQRKAGDTGPRISLAGETKRKALEQRFLHEAERNYQRNVAFKASRGAGAATGDTTPTAVKAADDARQAPQSPDACSSRSGSPAPQRILAPSP

SEQ ID NO: 106610 - protein, 343 aa, unidentified
MDQIIRIGMDTSKRFFQLHGVDAEGRPVLRRQLTRAQVLPFFEKLAPTFVAMEACGAAHHWARVLTRLGHEARLIAPQLAKPYVARGKNDAADAAALCEAASRPHMRFVPAKSMDEQAALMLAGQRERLVRQRTQLVNTIRGHGAEFGLIAAKGPAGIGPLLERLARADIPALARELFAELGEEHAALCGRIAALDRRLRGWRNANETARRLEAIPGIGPLIASLLVMKAPDPHLFKSGRDFAAWLGLTPRDHSTAGKARPGRITRAGDPMLRSLLVVGATAVIWRTRRGAAKNPSGWLEALIERKPAKLAAVALANKMARIAWKLMASGERYAGGDVAVVAA

SEQ ID NO: 106611 - protein, 402 aa, unidentified
MNAVGIDVSKGKSMVAIMRPFGEIVSAPFEIKHTASDIHSLVELINSVEGESRIVMEHTGRYYEVLAHQLSKANLFVSAINPKLIKDFDNDSLRKVKSDKADAVKIARYALDKWQNLKQYNVMDELRNQLKTMNRQFGFYMKHKTAMKNNLIGILDQTYPGVNTYFDSPARSDGSQKWVDFASTYWHVDCVRKMSLNAFIDHYQNWCKRKKYNFSQSKAEEIYGKAKELVPVLPKDDITKLIIKQSVDQLNSASITVESLRTLMNETASKLPEYPVVMAMKGVGTSLGPQLMAEIGDVSRFTHKGAITAFAGVDPGVNESGSYEQKSVPTSKRGSSDLRKTLFQVMDVLIKTHPQDDPVYQFLDKKRAQKKPYYVYMTAGANKFLRIYYGRVKEYLASLPES

SEQ ID NO: 106612 - protein, 607 aa, unidentified
MSTIASLDRIGVGIDTARYGHRVSFLRPDRKPAAKPLTVMENRAGYQALQDRLNQLHEQHPTAHFHVRIDAAGQYAVNLELFLRGLKLPMTISVGEPKRNKDYQKAHFPKRTTDDTESQAMARFAVIELPNATPAPSTPMILLREVAGRLQSKVKQTTQAINRLHNLLARVFPELATLTEDISVGWVLKLLDKYPTAERIAQAQIASLEKIPYLSVEQAHAVHQAAKQSVASLRGELAEALVRDLVNQLRLCQKAEQHLHQLLLEAFADLPASPHLQVLTITGIGEATAAALVAKIVDINRFATPNHLVSYFGVFPEESSSGVDKHGKPLPPGTLIMSPKGNDLVRFYLWNAARTAIQHNPAIRALYRRLRAKGKRGDVAFGHCMRKLLHLVYAVWKTDRPFDKEHFPWEGSSDTQPSATTPPSADAGTTPSANEKAVGHKRDLPAEEVVTTADSTLEPASPAVKPASQSAAPRPKVDFACVREHVTMEQVLQHLGYFASLRGRGRQRRGPCPVHSQPTAPERTFSVHLGKNAFQCFHAECAVKGNVLDLWAAIHRLPLYEAALDLAETFQVPRNREEEPVKGTSSPRTATAKTSAPAAATATDGAK

SEQ ID NO: 106613 - protein, 484 aa, unidentified
MAPARNPLMNRKRRKELARQLRSEDPGLEVLHPNAAGIDVGNNAHYVAVRPDRDPQPVRRFECFTADLHRMADWLHRSGVTTVAMQSTGVYWIPLYEILDARGFEVYLVNARYTRNLPGRKTDVQESQWLLKLHTYGLLSNSFHPTAEIRTLRIYWRQRGDHVAAIGTCIQRMQKVLTQMNVQLANVISDLSGRTGQAIVRAIVDGERDPEKLAALRDSRIRASHQEIAKSLEGTWRPELLFVLKQEVDMYDNMYDTYLRRLTECDRELEAHLQRFAAKLPPTPSSPTPTATPTGPSNTPTRRTKRNKKPQGHAPQFDLGRELQRISGVDLTRIDGIDVVVAQTIISEVGVDMGPWKDEGHFASWLGLSPDNRVTGERIIGKGTRQVVSRAATALRMAASTLLKSQSYLGAQYRRFRTKLGAPKAITAMAHKLALLVYRMLKFGHEYVDKGASYYEERHRQQQIALLKKRAAKLGLQVVQPQAA

SEQ ID NO: 106614 - protein, 320 aa, unidentified
MAKKKSKSFIGIDVSKQHLEVAVHESDCQFRCANKVNAFDKLIVELIDWRPALVVLEATGGLEIPVVSALQAAGLPVVVVNPRQVRDFAKALGQLAKTDRLDARVLAHFAAAIKPPLRSLKSKEELELAALTGRRDQLIEMLIDEKNRRASAASDTVRDQIKEHIDWLEECIAELDDQLKALLQSSALWQAKDDILQSVPGIGPVVSFSIIADLPELGTLNRQQISKLVGVAPLNRDSGQQRGTRHIYGGRAELRRVLYMAALSASRHNVVIKEFYERLCAKQKPFKVAITACMRKLLSIINVMVRDNTCWKSPQQTVSA

SEQ ID NO: 106615 - protein, 338 aa, unidentified
MVLKTVGLDTAKHVFQVHGADAGGRTVLRKRLRRSQIPDFFANLPKCVVGIEATQGAHYWSRVIGAFGHEVRLVAPQFVKPYLKGQKNDARDAAAICEAISRPEMHFVPRKSVEQQDLQALHRIRSRLVGSCTQLGNQIRGLLAEYGIILPLHLNQVREQLPIMFSEDHPLLTSFSRELFASLYEELCTLDERIQAMETRIQRVFSTNDRCQRIAAIEGVGPITATAIVAAVADASVFRNGRQLAAWLGLVPRQHSSGDKQRLLGITKRGDPYLRTLLIHGARSVVYRASRKTDSRSRWIADKQRSLGTTKTCVAVANKNARIIWALLAKNEPYRVAA

SEQ ID NO: 106616 - protein, 319 aa, unidentified
MGEVITIGLDIAKSVFQVHGVDGLGAVVIRKRVSRAKMLDFFAGLPRCLIGIEACPAARHRARELQAIGHTVRLMPPSYVKAYLKRSKSDVNDAAAICEAVTRPSMRFVAAKTKEQQAALMLHRARQLLVRQRTMLSNAIRGHLSELGIVSAKGRNGTDELLEIISEDADSRIPLAARSVLKVLAAQYSAIGAEIASISKSILVWHRSCEPSRRLEEIPGIGPIVATALVAEISDWKAFSSGRGLAAWIGLVPKRHTTGGKDKLGSIAKQGNRYLRWLLVNGAMAVIRYAQKHGTKKHPWLGRLMARRPTKVAAVALAN

SEQ ID NO: 106617 - protein, 394 aa, unidentified
MFLVGIDIGKHKHSFCIINKETGESIVKPKFFNNNKVGFEELLSSFKGLPKKDILIGMEDTGHYHFALLKFLLDKKYQVALINPVTTDLTRKLSGSHTKTDKLDTLTICDVLTSNQRTKPYRISKVDRFDLYEQKQLTREHHNLKEQSNVLKNRLQKSIDIVFPEFNSLFKSMYGVVYMNILKEFGSADALAHSDIRTIRKCFDFKGRGKRIELTAEKLKNAAINSIGFPSIAEVVQIKHLVNQIELVEEQIEELDKKIEEFSIANNSPILSIPGISHFSGTSILAELGDIHNYSKPSQIIKFAGVAPLTYESSQFMAKHTAITKKGSTYLRKTLYQIILPVINNNKVFKDYYNLKLSQGKGYRCAQGHCVRKLLRVIFQLLSTNTQFDPALLV

SEQ ID NO: 106618 - protein, 346 aa, unidentified
MKDITVLGIDLAKNVFQLHGADSHGRKLFSKQVTRQGLFKFVGNLKPCVIAMEACGGSHHFARLFRDYGHEVRLMSPQFVKPYVKGNKNDSADAEAIAEAVTRPTMRYVGIKEVEDQDIQGLHRYRERLVKNRTQLMNQIRGLLQEYGIVVRQGKSHLLKTLVALRENEVNKELTPMNKELFWDAYEELMDLDQRIEKYTVKLEILSKKDERSQDLLTIPGIGSITATAILAAVGDPHVLKSGRELSAYFGLTPKHQGSGQKTRILGISKRGDRYVRSLLIHGARSLVKVVGEKTDPRSQWIKQLIDRCGINKAVVAVANKNVRIVWALLTKQMCYQENYGLNEVA

SEQ ID NO: 106619 - protein, 364 aa, unidentified
MHYVNNTELSSLEGTRRQFNGGRCAIKLGIDVHQDFYVVVAQVGGSNPKPPQRFQKEAFLHWAARLKRKSGAEVHAVYEACGFGFALQRQLSALSIQCYVVCPQKLDEHNRRVKTDGLDAKALCPKLDRLVQGNRAALARVRVPSEAEEQLRAIHRQREQLLKARKQLEAQGRSLMVNHGLEPVQNWWKPRTFAALQVSDWMKQLLQNSQPILIGLQEKIAALTGQLQRAASPDQPRGLGKMTSVIIDREIGDWHRFRNRRQIASYTGLCPGEYSSGNTRLQSCVTKHGNPRLRAALVELAWRLVRFQPNYHPVRKWRAVLAKGALATGAARKKAIVAVARQLAVDLWRIKTGRLSAEELGLIN

SEQ ID NO: 106620 - protein, 505 aa, unidentified
MAAPTTGHQPASSLPPTGRPAQAQAHRQAYNRRKTRAKVRSEAFRQREAAQVEALPVQHPHAAGIDIGSRSHWVCVGFTTDAASCLIREFPAHTAGLKAIAAFLREHQVTSIALESTGIYWVPLYELLQAEGFEVLLVDPSYSHQLRGRPKTDRRDCQWIYRLHSVGLLAAAFRPDEQTCQLRAYLRQRGNLVRQASRHVQHMQKALEQMNLKLTEVLSDITGKTGRAILRAILRGTRAPEKLARYRDKGCKASEAEMAQALTGTYREEHLFELKLAYEAWQFTLGQVDKVDGQVALQLGRMKGDRALPPLKPKARPKRRANSPRFDVRAALYYVVGLDLTEIEGVSALTALTVISEVGPGVSRFATVKKFCSWLGLCPNWQKTGGQIKSSRTRRGVNRAAQALRLAAQSLHHSQGALGGFLRRMKGRLGTQPALTATAHKLARIVYLALRHGLTYVRQTQEEYEAQMKEKQLKALRRKARQLGLEVVEKPSVSGAPAAAGPAQG

SEQ ID NO: 106621 - protein, 410 aa, unidentified
MSESPYAFYVGVDWASETHQFTVLTPERRLEAERRIEHTGRALGEMADWLTALADGEPARIAVAIEVPRGPVVETLLERGFHVFAINPKQLDRFRDRHSPAGAKDDRRDGFVLADSLRTDRPAFRQVHVDDPLLIQLRELSRAEEELQTELRRLSNRLWEQLQRFYPQVLRLSPAVDEPWIWALLQLAPTPVAARALRRATLARLLARHRIRRVTAETVLAELHSPALRVAPGTTEAAREHIAMLLPRLQLLHEQRGRCARRIEQLLDALEGSDAEHRDVTVLRSLPGVGRVIAATMLAEAARPLAERDYHAVRTQGGVAPITRQSGKSVLVSMRYACNHRLRNALYHWGRVSAQHDPSTRRHYRALRQRGHGHARAIRGVIDRLLVVLMAMLRTGTTYDPARRRVPAAA

SEQ ID NO: 106622 - protein, 340 aa, unidentified
MEKRYIGIDLHRNRFTCWIRLENERTYVTEWELEDLGRFVKKLRGSDEIAVEITGNTRLFYDAVAPHVARVVVVNTNQFKVIRQSVKKTDPHDARALALYLSKNMLPEVRMKDKEHAQLASLTQTRDTLVKLRTALKNKVNNILSARGLNLAKEALSSEKQLAEVLELPFDEIVRIELRVIVEQIRGLNKSIAELEKTIGEEGSKLEGHKGLSSIKGIGKITGAILLSVIGEVNDFADEGHLASYFGIVPRVSNSNETERSGRIHKRGTKLGRTALVQSALIAANYSPYLKRFYEQVKARRGAGKAIIALARKFLGIIYRTLKNKWIFEDFPNFVLAEES

SEQ ID NO: 106623 - protein, 351 aa, unidentified
MLIIGCDYHPGVQQIAFMDTETGEFGERRLEHGEGEAEKFYRDLQQAGIRVRVGMEATGHARWFERLLQELHFELWIGDPLEIRATRVRKQKTDRHDAQLLLKLLLEDRFPRIWVASWENRDLRQLLWHRHRLVQMRTRIMNQLQALALNEGVREKKRLWGQAGRAQLESFVLAPWASRRRKELLELLDRLNPSIRELNAAVEQEATRRPEVRRLMTHPGVGSLTALAFVLIVGTPQRFACGKQIASYVGLVPTEESSGGRRRLGHISKQGNSLLRFLLVEAAQATVRSDPDWRRKFLHLAMRRERGIAKVAMARKLAVRLYWMWRKEWDYEQVKRFGSHAGQPGNPLGVQ

SEQ ID NO: 106624 - protein, 345 aa, unidentified
MKITTVGVDLAKNVFQVHGVDERGKAVLRRQLKRKDVLSFFANLEPCLIGMEACGSAHYWARKLSELGHTVRLMAPQFVKPYVKTNKNDRNDAEAICEAVGRPNMRFVAVKTAEMQTVLALHRARQGFVKSRTAQANQIRGLLAEFGMVIPKGIGNITKRLPEILEDGENELSGMMRQLLERLGEELKALDKQVGEMERQITLWHRDNEQSCKLETIAGIGPISASALVATLGDAKSFKNARQVPAWLGMVPRHEGTGGKATLGGISKRGDVYLRTLLIHGARAVINAAERKPDQADGWLKRLLVRRNKNIAAVALAAKNARIAWALLAHERSYQHDYVATRKAA

SEQ ID NO: 106625 - protein, 317 aa, unidentified
MSKHSMNCAGIDTGKRQLDVALDGRSDRLKVGNDAEGHAVLTAWLRRHRVKRVGIEASGGYEQAVVCHLRRSGFVVVVFQPGQVRAYGNFRLKRAKNDKIDADLIAACTAAVRKIHPPPDPRLAALAEHQTMIDQIVDEMARLKNYVESSRDPRSQQFWKAEIKRFRGVFRQELKQLVAAIRQHRDLAERLDLILSIDGIAVRTAVAILVRMPEIGQVSRQQAAALAGLAPYDDDSGERHGSRHIAGGRKRLRGNVYAASLAASMRWNTELIELYQRLIARGKEHKVALTACARKLLVFANAVVARGTPWVSHAAAH

SEQ ID NO: 106626 - protein, 351 aa, unidentified
MSQTPRTSITAVGIDIGKNSFHVVGQDDRGAIVLRQKWSRSQVEARFANMPPCLIGMEACVGAHHLSRKLKALGHDARLMPAKYVRPYSKGQKNDFRDAEAIAEAVQRPTMKFVATKTADQLDLQALHRVRERLVSQRTGIINQIRAFLLERGIAVRQGQRSLRAELPRILATPPDVLSPGMVRVIEGLAADWRWLDERIEGLSREIEELAKRDAGCERLMSIPGIGPIISSAMVAAIGTGDGFAKGRDLAAWLGLVPRQISTGDRTILGKISKRGNRYLRVLFVQAAWVVLVKVKPTRWEGHGLKHWIEAASKRLHHNVLAVALANKLARIAWSVLARGRAFEASKLQAA

SEQ ID NO: 106627 - protein, 343 aa, unidentified
MYYIGLDVHKKTISYCVKDAAGRVHQEGKIGSTRRELDGWIRTMPQPRMIAMEATIFTGWIYDHLLPYAEKVKVAHPLMLRAIAAAKKKNDKIDAGKIADCLRCDFLPECHMASTEIRDRRRTLRYRSLLIKQMVQMKNRVSGLLMETGVSYNKQRLHKVGYFAELLTTNEEVNESIRPLLKLSREMICRSQRLDYALVSSLERDPLLKERLRRLRTVPGVGPITALTWALEIGDYTRFASIKQAISYCGLCGDEKSSADKVMRMPISKQRNKHIQRVLVEAAKLAARECHELAVIRAKELERGNSNRATLAVARKMVCYMLAVERRKQDFVPAEKFSRTAAA

SEQ ID NO: 106628 - protein, 346 aa, unidentified
MTIVEDRPVVTGGVDTHADVHVAAALDPIGGLLGVRQFPATAAGYADLLEWLGEFGTVALVGIEGTGSYGAGLARYMADASVRVVEVDRADRQDRHRQGKSDPLDAVSAARAAQSGRASGTPKGRDGAVEAIRALMVAKRSARNERTQAINQARALILTGRDDLRARLARHTPAALAAELAALRPRPGDVPGYATRIALRELGRRVQFLDAQLGRLDELIVPLVTARAPGLLSLHGIGPDTAALLLIAAGDHPERLRNEAAWAHLCAVAPIPASSGKTSRHRLNRGGNREANHALWRIVITRMSSHPATRAYVDRRSKEGLSKKEIIRCLKRYVAREVYRHLRDGG

SEQ ID NO: 106629 - protein, 407 aa, unidentified
MGITCGVDWAEDHHDVVVMDDLGTVLEGRRIDAGVDGYADLLALIADHGGSAADTPVALETDKNLLVLALRAAGFTVYPINPRAVARYRERHYQAGKKSDHGDASVLADILRTDRHQHRPLPATSDHALTIKALARQHQEAIWALHQTTSRLRSMLLEFYPQALKAFPNLNHKAALTILAAVPTPTAAQRMTSRRVVALLHRCGRRNDPDLVTRILTELKAPALRQPPTVEEAMGLAAKTLIDILTQMHAAVASLNDALAEQFSQHALAPVLTSAPGLGTVLAARILAEVGDDPHRFKTPASLRAFAGTAPVTRASGRSSYVKARKVRNKRLGDACHWWAFSTLTKSPGARAHYDHRRTIGDTHNAALRNLANKLLGRLWWCIQNQLPWDESAAWPTASSNSQAAAA

SEQ ID NO: 106630 - protein, 311 aa, unidentified
MTEHTIGVDISKSHLDVFDAERRKAKRFENSISGFRAFEKWLGKAHIARVVYEPTGPYHRNFEERFCDKLPLVKVNPLQARRFAEACGTRAKTDALDARGLARMGGTLELEPDMPVAKVTRILKDLQVARAALIKERTRLNNRAHVQTNPVLKRQTKARLALVEKQLCELDREIDALIKADKTSARRRQIVQSIPGLGSVASAAILTYLPEIGTLDRRQVGSLAGVVPYNRDSGQWRAKSFISGGRKPLRDALYMPALVAMRYNPDLKAKYEALRAAGKPAKVAIVAIMRKLIETANALVKADRIWVPKTS

SEQ ID NO: 106631 - protein, 387 aa, unidentified
MPQLNDLSRSLVALDQDSTIIAVVELSQSSWLVAGVLPGIERQPQKKLEPSAERLLGLLHRWRDEAVRAGKKITRIALAFEAGRDGFWLARWLNARGVEAHVIHPSSVAVSREHRRAKTDRLDTEMLKRGFLGWLRGERGHCTMARVPTMAEEDAKRPNRERECLVGERTRIVNRIKATLARMGIRNFKPTLRKAAERLATVRTPEGMPLPPNTLAELQRDMARLGFVVSQIREIEQARQKRLEQETETGPHAMVRQVARVIGIGLETADMLVHEVLSRPMRDRKAVARYAGLTGSPDESGARRREQGLARAGNARVRRGMIQLAWRFLRFQNQSALAQWYRARTADSRPGTRKTMIVALARKLLIALWRFVTTGETLEGVILRPAG

SEQ ID NO: 106632 - protein, 387 aa, unidentified
MEVLYQSCAGIDVHQANIVVCILHGPLTSTRPKREMATFDTTTKGLRACHDFLSQFHVEAVGMESTGVYWRPVWHALCDDFELILAQPAHMKAIPGQKTDKKDAHWIAKLTRIGLLPRSFVPDETIQELRELTRQRKHYVESRNRETNRIHKFLQSGGIKLTTYIEDIMGLSGRNLLQLLVDGTPITPRIVHQSVYTSLKKKVPQLLEALDDYFSDHHRFMLKQSLEIYDFYQKQIELLEERMNVYLSQYEKHVEILDSIPGIDVITASVIISEVGVDMSQFPTSGHLASWAGLCPGNNESAGKKRSTKIRHGNSYLKKCLCQAAFAVKRQKGSPLAERYYQIQSRRGSQKATIALAHQLLKIAYILLKEQMTYPEFLAQKRLLGTS

SEQ ID NO: 106633 - protein, 324 aa, unidentified
MSKNTLFVGIDVSKDTFDVYEPSMGHQKFKNDKEGFRLFHKWLNKDCWCVIENTGSYHQPLAFFLLKKKYSVSVVNALVVKRFIQMKLQRNKTDKSDAKMIAMYGSNQPLELWEPDPEYIDCCKMLQSCIQTYFKQQTALSNKLHSLKSKGSEYRVLVNSIQRQKKSIQSEIQKLEEALETLIKENEPEMLSQLTSIPGIGRKTAIFLIVSSNAFKNFESAGQLKSFYGLAPTERSSGSSVRGVSRISKSGNALIRNHLFMCSFTACQCNPACKSLYERLVAKGKSKKLALIAVCNKLIIQAYSIAKSGLMYDENYKSRLIVKG

SEQ ID NO: 106634 - protein, 409 aa, unidentified
MRIIGLDIHRAFAEAVAWDEGELKRMGRIDMRRPLLEAFAKKLSKDDIVVVEATGNASSVAVVIAAHVKKVVIANPKQVRIIAHAKIKTDTIDASVLAQLYASGFLPEVWIPDEPTQALRRQVTRRNQIVRQRSRLKNIIQSILHSHLIPSCPHADLCGASGRAWLFHQVLPEDERLAVERHLREFDRLGEDLKVIERDLARSALGNEGVKRLMTIPGVDMVVALAIVAAIGDVGRFEQPQKLVSYLGLNPSVRQSGPGPAYHGRITKQGRGHARGMLVEAAWAAARAPGPLRAFFLRVRARRGQHVAAVATARKLAVIIWHLLRKGESYAWARPALHAKKLRDLELKAGYKAERGQRGAAHTYNVKSHRDQERRWVEQAETAYARFVAGWNPRGPKRARTGAANEGRQ

SEQ ID NO: 106635 - protein, 342 aa, unidentified
MKSTTIAVDLAKSVFQVAVSHHPGKVAESYRLSRSQFLRFLAERQGALVLMEACGTAHFWGRKAQQLGHQVLLLPPGHVRPYVRRNKTDRTDAKGLLEAHRNEDIHPVPVKSVEQQALAGLHRLRSAWMGDRTARINLVRGILRELGFTIPVGACHVVPRAWEVLDAPDSELPASLRLALGAALREIRDLEARVKDVEKQLRALAAQTPVIKRLLSIPGIGLLTATALFAFVGSVQRFASCRHFASFLGITPREHSSGLSRRLGRISKRGDRYLRSLLVHGARSVLLAAKRYQQPDRLRAWALRLRATQGHNKAVVAVANKMARIVWAVWRYETSYQSRPAV

SEQ ID NO: 106636 - protein, 429 aa, unidentified
MEEIDDTDLVVERVAALDLGKAGLDACVRVPHTHHPGRRMQELRSYGTTTAQLLELAAWLRHWHVQRVVMESTSTYWKGVYYLLEAEGFDCWLVNAREVKNVPGRAKTDRADAVWLAKVAERGMCRPSLVHPPDIRRLRDLTRYRRALVQDRTRERQRVEKLLEDAQIKISSVLSDLHGVTGRAMMDALINGQRDPHTLARLAKGSARKKTARLEEALRGFFTDHHAMILQMMLANSDRLSAQIAELDGRIQEAVSPFCAQSARLADIPGVDVMAAAELIAEVGVDMTRFPSAAHLVSWAKFCPQTHQSAGKSKSQSRGKGNPWLAGTLGRVVFANSRSETFLGARYRRLARRRGKQKAIVATGNSLLTVVYHLLLNSDARFCDLGPGYYESRINKHRRARDLATQLQALTGQHIVIRDGKAVITDTAA

SEQ ID NO: 106637 - protein, 365 aa, unidentified
MPTTTKFTDFSGQSFYVGIDVHKKSWTVTVRALNIELSHFSQAPDAIQLAHYLHKRFPGGRFFSAYEAGFCGTSHHDALCSAGIDNIIIHPADLPESDKEKKNKTDLHDSRAVAKYLESGVLTGIYVMPVDQQEQRSLYRCRQATVRSVTCCTNRLRSLLDYYGVKLPDNLRDKEYISKYFLDWLGKLQLSTDQGTETLHHYLEDLQYHRKQLLLVTRKLKKEFAEHYQQRYTCLLSVPGIGPVTAIALLAETGDLSRFKNPDEFCSYLGLIPSERSSGERVYSSHIQPRCNTHLRPLLIEAAWTAIRRCPVFLTYYRKHAGKNNKKAIVKVARKLALTAKAVALKKEVYQADYYIYQMSATAIG

SEQ ID NO: 106638 - protein, 428 aa, unidentified
MNDNEIIRHQQFCQLKEVIRGSDQHLIIGIDVAKEKHHAFMGTATGKSLLRRLIFENNLEGFSKLMTHVEAVKVQNGLPLGVFGMEPTGNYHKALGSYLINGGYQVVLVAGQAVKNNRSLLDGRWDKHDTKCAANVADLISQGKCLFYDSPPEAIVELRSLLSLRRRLKKEEHSLRMRIRNSLLAKHFPEMDRYFGQCLSENLSIVYWCMDPKKIAEMDFGRFFQLVTTRERGLAQQRRLKAIWQAAAASIGCAVDRASQFEAQVLVEKILQVQKEIKDTQQLIETISQQFMEYYLLLTIPGFGPYVASLVLAVIGDAWRFGSAKQVLKMAGFDLSAERSGKKSKEAVPVISKKGNAALRYGVYQAAFIASTRNIDFVEYYTNTLRGRERERGIKTKMRVKLAAKMLVIAWTLMKKKEEFNPDYLKQG

SEQ ID NO: 106639 - protein, 323 aa, unidentified
MTPTFLGIDISKKDFHVVLLKEERGSKPKKFTNNTEGFESLNKWLKKSGVEELHACMEATSIYGDALAEFLYEAGYQVSVVNPARIKGFAKSELLRTKTDSVDAALIARFCAAIKPSLWKPAPPEVKDLQALLRRLESLTEMYQQEENRWETATETVAKLTKAHLDYIKEQQAEIKKMISDHFDQHPHLKQQRELLTSIPGIGEQTAAVLLAEVGRIEDYKKARQLAAYAGLTPCERSSGTSVRGKTRLSCTGNVRLRKALYMPAVVAMRCNPLLQAVSERLLGRGKVKMQVIGALMRKLVHLAFGILKSQKPFDPTYLLATP

SEQ ID NO: 106640 - protein, 406 aa, unidentified
MAAVMIGVDPHKGSHTAVVIGPAEEPLGELRVRASAGQAGKLVGWAAAWPERTWAVEGAGGLGHLLAQQLVAAGERVLDVQPKLASRVRLLQAGDTNKNDPNDALSVAVAALRSRTCRQVVADDYPAVLKVRAERHRDLARTRNQVACRLHAVLCDLVPGGHSKEISAAQAARILAQVTPSGAVALARVELAAEFLADLRHLDAQLRGTRKKLAAAVRASGTSLTQVFGVGPVIAGTIAGDVGDVARFPGRDHFASCNGTAPVEVSSGNRTIHRLSLRGNRRINHAIHMAAITQLRHKHSEGRACYDKKVAEGKTHKEALRSLKRKVSDAIFARLQADARQAAAARTKGPGGQPGNGSDSSAASSHPERRLFGPATPGPDTTIRPGTTAGTPSPSKPTSKKTRPAT

SEQ ID NO: 106641 - protein, 337 aa, unidentified
MKVTLIGIDLAKNVFQVCGVNQAGKQVFNRQVRRAKLMELLVQYPATTMAMEACSGSNYWGRELQQRGFLVKLIPPQHVKPFVKGNKNDRNDAFAITEAARRPDLQCVAPRTLVQTDMIQVHRVLERMIRQRTALINQLRGLLSEYGIVVSHGKEKLLVALPDLLEDAANSLTPSSRALYQVMYDEWRQMNAAIERIEKVLAAQAKADEAAQRLMQIKGVATKIATAMIAHAGNGQGYQSGRHFSANLGLVPQEHSSGGKQRLGSITKRGNRYLRRLLIQGAWSVVRYADRREDHLSRWAQQLVARRGKHKAVAAVANKMARIMWSMLYHQTAFRAN

SEQ ID NO: 106642 - protein, 362 aa, unidentified
MKQFIGCDVHKKYSVFVSVDETGRAGRPVRVSHEASELATYLESLPAGSPVAVETTGHWYWMFDAIEEAGLDPRLTHALAAKRMMVSPNKTDKLDAKGLATLLLNGSLPEVWAPGAEIRDLRGLMRSRLAMRRMGTSLKNRIGAAFARYGLPKNWSGDLFGSGTAATECLRRSLEALPAQSRFATTRELELLQALEKQVEAVTTRIAGSVGKLGWVRRLRTLPGVGEILGPTIYLEIGEIGRFATPGNLAAYAGLVPSVHSSGGHTRLGRIRRECNHFLKWAFVEAAEVVVCHQETMSARHVVRLYRRVKNNKADRHNKAVVAVARHLAESAWHILKGNQDYREPQPTPGMIQRYFSAGRPL

SEQ ID NO: 106643 - protein, 355 aa, unidentified
MDKIKTNFSGQTIYVGMDVHKESWNLGIYLNDIFVRNLHQKPNPKMMADYLHKNFPGAIYRSAYEAGKFGFWIQRQLTSLGVECLVVNPADIPRSQKDSLQKTDPRDARNIGLRLQSGFLRGIHIPDEQQEADRAFFRHRKKILKDLNRCKNRIKGLLAFTGIDIPEAYDNANWSHNFINWLKALDCKQAPRRRALDYKIRNMEFLRKELLSISNDIRKMMREQRYKTSYYLLRTIPGIGPLTAASILVEIGDVKRFNTFCHLNSFIGLLPMERSSGQSENKMSLTVRKHRQLRSDLVESAWTAKRTDPAMALYFQEQAKRKDPKIVIIKIARKLLNRIRYVLINQQPYEFGVLK

SEQ ID NO: 106644 - protein, 343 aa, unidentified
MDYYAGIDVSLKESSICVVDGIGKVVREVKVASEPEALVLYFGELELPVSRIGLEAGPLSQWLHAGLVAAGCDVVLLETRHVKAALSAMTVKTDRKDARGIAQLLRMGWYRPVHAKSVTCKDTRALLVGRKLLQGKLLDVELSIRGILRGYGLKVGEVSRGRFEKRIRELTAGHVTLETVIGAMLVARTALWNEFTRLHREMLKIARADKICRRLMSTPGVGALVALTYRSAVDDPTRFGKSSTVGAYFGLTPKKYQSGETDRDGGVSKVGDALVRTALFEAAHIMLTRATRFSSLKRWALDVAQRRGMKRAKVALARKLGVVLHRMWVDETEFRWGKAATAA

SEQ ID NO: 106645 - protein, 362 aa, unidentified
MVKRGHRCTGPKHQKEKRSMDYFAGLDVSVKDTSVCIVDGTGKLVREVKVASEPDALLQVLRNRAYRFKRIGLEAGPLSQWLFSALGEANLPVICVETRHMQAVLQAQINKTDRNDARGIAQMMRVGLYRPVHVKTLRSQKLRMLLTHRKLLQSKAIAVENDLRGTLRNFGLKVGMAGATKFEGRIKELIENLPDLAVLVEPLLIVRRVLREQIGVLHRRLLAVVRNDEVCRRLMTTPGVGPVVALTYRATVDVPARFRKSKSVGAVFGLTSAKYQSGEIDRSGRISRCGDEMMRVMLYEAAQSMLRSKKWSWLKAWAMQIARRRGMKKAIVALARRLAVILHRIWVDGTEFRWTREVVTAV

SEQ ID NO: 106646 - protein, 437 aa, unidentified
MITQTVIHPDAAGIDLAAEVHYVAVPADRDPQPVRNFGPTTEQLNVLADWLQKCGIRTVAMEATGVYWIPLFELLEARGLEVCLVNAQHVRHVPGRKSDVQDCQWLQFLHSVGLLHASFRPALEVCAVRTLLRHRDSLVQGASAHLLRLQKALDQMNVLLHRAVTDITGTTGLAILDAIIAGERDSVKLAAHRDHRCKKSEAEIAAALRGDWKEDQLFTLRQSLAAWRFHHQLAEECLQEVHRLAAKLESCTEEAPPPPTKRGRQPDAAVRTLLFQKFGVDVTAVDGVNTHVGYTFLTEVGPDLSRFASPENFASWLGLCPNNKVSGNHQLSVSTRPVSNRLATALRMAAQSLNRVESSLGDWFRRMRAKLGPAGAVTAAAHKLARILYTMIKTGTAFDPTKLGNPALIRQRKERSLRKQAALLGFSLQPAKAGAVS

SEQ ID NO: 106647 - protein, 363 aa, unidentified
MLTERNLNMKKSLYCGIDLHSSNAVYVILDENDKVVFKKRLPNRLATVLDALKLFRKKIAIVAVESTFNWYWLVDGLMDAGYPVCLANPAAIDQYDGIKQANDLTDATFIAHLARLGILPTGYIYPKEYRPVRDLLRRRSLLVKYQTSTKLSLQNMFMRQTGQGFSYLGIRKFSDKELGMLLSDNEHLLFVTSQQLDLIDMLKKKIKQFEKMILAKAELKPEYEHLLTIPGVGVILALMIMLETGDIQRFAKVGNYTSYCRCVRAHCTSNGKVKGKNNSKNGNKYLSWAFVEAVHHAKGCCPRAKKFYDRKFSKRNGALATKALAAKWSKAAYHIMKNQEAFDLNKMFGWHNDAVVDLVKGLD

SEQ ID NO: 106648 - protein, 416 aa, unidentified
MKIVRPICCGMDVHKNIIVATIGITNKKTRITEYIQETFSTLNPDLLNLKQWLINHKCFDACMESTGKYWIPVFNILEDEINIYLTHPKYVKAIKGKKTDKKDSKWICDLFKHDLIKFSFIPPKEIRALREVSRYRYKLVGMRSSERNRYQNCMTVSNIGIGSVFSDPFGKSAQAIMKEVLESDIIEDEKILKCIHGSCKNKDKILDSIKHCNIETDQRFKMNESMTHMEELQVHINNCEIEMMKRAAPMFDRFMHITQLPGISTLSAILIISEIGVDMKQFESDKQLTCWAGLAPANNESANKKKSVRISKAGQYLKPLLVQCALGAIKDKEGYFGIKYSRIKKRRGHKKAIIAIARMMLVSIYHMILTGETFNPSDYESFRNPNPPIKQQVLTEESAIEFLKKSGFDVSKLTKP

SEQ ID NO: 106649 - protein, 343 aa, unidentified
MQTVTTIGLDIAKSVFQVHGIDAEGKVVIRRQLKRRYVLAFFQKLAPCLVGIEACASSHHWSRELKGLGHTVRLMPPAYVKPYVKRQKNDAADAEAICEAVTRANMRFVATKTPEQQSCLMLHRTRHLFVRQQTAVINAIRAHLAEYGIVAPVGRNGVEELLGVVADPSDKRVPEVARACLAALGAQLRMLKTQILEFDRMINAWHRSNETSKRVDEIPGVGPALATALVASVADPRAFRSGRDFSAWIGLVPKQHSSGGKDKLGGISKQGDRYLRSLFTAGALAVIRYAKIHGAKHRPWLTALLARRPTKVAAVALANKIARMAWAMMARGERYKEPVALAA

SEQ ID NO: 106650 - protein, 349 aa, unidentified
MGEVSTIGVDIAKSVFQVHGVDADGTVVIRRRVGRAKILEFFSKLRPCLVGMEACATAHHWARELKKLGHDARLMPPTYVKAYLKRGKNDAADAAAICEAVTRPSMRFVPIKSVEQQSTLMLHRTRDLLIRQRTQLINALRAHLAELGLVAAKGREGLCQLVTVVTECGDERLPSNARFACQAIVGQLHAVQTQISGLDKRITQTHRANPDSKRLDAIPGFGVILSTAVVATMTDPKAFKTGREFAAWIGLVPRQNSTGGKDRLGSISKQGDRYLRRLLVVGAISIVRTARMRPDKYPWVIELLGRRPAKVVAVALANKMARIAWAVLAKGETYRAPTRSSSAAVAAAA

SEQ ID NO: 106651 - protein, 338 aa, unidentified
MKLYGGIDLHSNNSVIALLDEEDKVVYRRRLPNDIRLVRAELAAFGEEIEGLVVESTYNWYWLVDGLMEVGYRVHLANTAAIVQYAGLKYADDDTDARWLAKLLRLGLLPEGYIYPKEERPVRDLLRRRSKLVQQHTGNLQSVQNLLARNLGHSLSANRIKRLSFDEVDGLLPDPDLALAVKGNLAVMRTLQGVISLLEKTVSKRIKLRPAFKPLLTVSGIGQILGLTIMLETGQIERFTKVGNYASYCRCVGSEHLSNGKRKGRGNTKNGNKYLAWAFVEAANFAVRYNPQIKRYYQRKAARTHRVVAIKTVAHKLARACYYILRDQVPFDVNRAFT

SEQ ID NO: 106652 - protein, 315 aa, unidentified
MTKPLTPVNVGIDVGKAQLDVCLLERNLTLQVDNEPDAIRALISRLARYRLARIVIEATGRLEQPFVQAALTKGLPVVVVSPIKVRRYAAAIGQLAKTDAIDAVLIARFGADIKPVAHTPTDPQSQQIKDLMVRRRQLVDMRTMEKNRRPIMPDTLAAGIDQLIATLDEQITALDERIDQAVDHHAGWRHKRALLTSMPGIGNTVAHTLLGDLPELGHLSRKQIAALTGVAPFNRDSGKQRGKRRIRGGRASSRTALYLSAMTAVRFNPDIKRFYERLVAAGKHKKVALTACIRKIVTALNAMIRDNLKWKPAMT

SEQ ID NO: 106653 - protein, 416 aa, unidentified
MEVLHRRCAGFDVSKNDVKVCIRVHQADGRASYETTTWGATTRQILALRDYLIGQQVSTVFLESTGDYWKPFYYLLEDQLDPVLVNARQSKHVPGRKSDVSDAAWLADLGAHGLLRASFVPPQPIRELRDLTRARVQISRDQHRQLERIDAVLQAAGIKLSSVVSDLTGKSAWTIMRAMIAGMTDPDQLAELAIGKLRPKVGQLVEALESGRFGDHQRFLLQIQLDGYERLQADLDRLEDRIEGLMSPFRARIEQLTSIPGISTGVAQVIIAETGGDLSVFPSPQQLTSWAGVAPGKHQSAKRERNVPTVPGNKHLERALGIAVMAILRGKKDNYLKARYRRIARHRGAARAMVALQRSLLVIIWHMFRDGSHYQDLGAEYETRRRARQALHTAVKTLHDLGINVTIDPSQAAAVA

SEQ ID NO: 106654 - protein, 343 aa, unidentified
MFYVALDVSLRSVAVCIIDQDGKVKLERSVPSEVPDLVRCLREFGQPIHQVGLEAGTLTQHLTYGLREAGFDIVCMEARQVNAALSAMRNKTDKHDARGIAQILRAGWYSRVHVKSVEAHHTRALLTSRKVMQRKCIDLENEIRGLLKVFGVKLPMRLSRGAFNEAVRDTIESDPALSHALLPMLQARGVLFDTFLELDRRVKRKAREDAVCRRFMGVPGVGEITALSFKAAVDDPARFKTSRTVGAHFGLTPRRFQSGEKDNPGGISHAGDRDMRAALYAAANAMLMRSIAWSSLKAWGVKLMKTKGRRRAIVAVARKIAVVLHRMWADGSNFRLGSQEAAT

SEQ ID NO: 106655 - protein, 319 aa, unidentified
MHCIGVDVSKQELVTFDGKRERIFPNTHGLPEFDRFLKRAAGAFVVFEPTSTYSRRLETLCRTQRISCCQLNPRVVPHLRLVGKGRSKTDSSDAELLYRYGIERGHNEAVELKNDSLAESIQARLACYRVAQKARVACQGVAEALIQDPATPRELLAELKEEIADLKAKERHHLLAAERLVEGDAQAAQQLARLLSIPGVGPITALTLLALFRKYADANRRQIVALAGLDPIQFQSGTSVHGKSRISKRGNREVRKRLYEATLSAARYNPNVSAMYRRLKEQGRPEKVARIAAARKLLLIAHAIYTSGEPFKEPNQKEA

SEQ ID NO: 106656 - protein, 412 aa, unidentified
MDVLFERCCGLDVHKKLVVACVILTQYDGEPERIVHSFGTMTDDLLKLADWLEACGVSHVAMESTGVYWQPIWNVLEDRFTLVLVNAQHVHQVPGRKTDVRDCEWLAELLRHGLLRGSFVPARAQRELRELVHYRTALVRQRAQVTNRLQKTLEGANIKLASVATNVIGVSGRAMLSGLARGETDPAGLAQLARGRMQRKQADLESALNGRMGPHQQFLLQEQLALVDSLDASIKRVNDEITRRLQPNVELMERLDEIPGLGPRVIQIILAEIGADVSRFPSAAHLASWAGLCPGNHESAGHQQTGRTRKGNPWLRTALVEAAQAAARVKRSYLAAQFRRLAARRGVKRALVAVAHSLLTIIYALLTRGSTYADLGAAYFDERDRHHTSQRLVARLERLGYRVNLEVPATTG

SEQ ID NO: 106657 - protein, 324 aa, unidentified
MLPTLGIDISKDSFHVELSLSEKLRHRKFTNRKEGFSELGNWLVKHKVKQVHACLEATGPYSEELASYLNQQGHTVSIVNPLQIKAFGQSELLRNKDDRPDAGLIRRFCEKQQPPAWTPPPAHLRELQALTRHLENLLETKQQQLNRLEGPKPKGVIKSLRKLVAYLDAEIARTEKQIDDHIDRHPDLKQQCQLLESIPGIGKRTAAKLLAEIEDISHYKSARQVAAYAGLTPKNNRSGTMRGKTRLSKTGNARVRKALFLPAMVAKQHNPIVRSFCQRLARNGKNKMEIIGAAMRKLIHIAFGVLKSGKMFDPNHELLLSSGS

SEQ ID NO: 106658 - protein, 356 aa, unidentified
MNKASPHDIIVGIDTHKHTHAAVAVTGLGARVGELTIRVGLEGYRELEAWARSLGAVRAFGIEGTGAYGAGLARFLRATGHTVHEAGRPDRGRRHRHGKTDHLDAEGAARAVLGGQATALPKAGTGKVEMIRHLKVARDTAVKARTQAMLALKAIMISAPAALREQLEAVAGRVALVRHLAALRPGPLTTTTASAKASLRAIARRWLDLDVEIRSHDAHLGRLAERCAPEMVAAHGMGTATAAEMLVLVGDEPERIHSEAAFATLCGACPVPASSGKTSRHRLNRGGHRQANAALHRVVVVRMRTHQPTIDYLRRRTAEGKSKREIIRCLKRFVAREIFGYLCRPSKGVCPAQNAA

SEQ ID NO: 106659 - protein, 346 aa, unidentified
MEHYVGIDVSLELSSVCVVDGRGKIVKEAKVASEPEALVCFFKELGVPVNRIGLEAGPLSQWLHAGLTQAGFETVLLETRHVKAALSAMTVKTDRKDACGLAHLVRMGWFQQVHAKSMGSQEIRALLVARKQLLGRLLDVELSIRGILRGFGLKVGQVTRKTFEARIRELVTGQATLGRIAEAMLSARATLQAEYEKLHKAVLGFVREDAVCRRLMTVPGVGPVVAVTFKSAVDDPSRIGKSKAVGALFGLTPKKYQSGEKDVTGGITRTGDEMVRTALYEAANVLLSRITRFSKLKRWGMDVAKRRGSKRAKVALARKIGVILHRMWIDGTTYRWAEAKPIAVQG

SEQ ID NO: 106660 - protein, 391 aa, unidentified
MKVSYQTCCGVDVHKSFLVATIVKTTGGIEPSYQKKRFSTFNNSILEFKQWLLDNDCHDVCMESTGKYWVPVFNLLEDDINVVIANPKWVKAVKGNKDDTKDSKWIGDLFRLGLVRGSYVPCKKIRILREYTRYRYKLISCRSSEKNRYQNALTVCNVALDSVVSDIFGKSSTSIIDYLLEQSGTSINHEEIASKLLRSLKSKEDAVIESVEGYQMTDAQKYRMRLVRAHMDYITAEINDVDKMMENMISSNPDFENAVQFLCTIPGVKRDSAITIISEIGTDMSQFSSSKRLCCWAGLTPGSNESAGKKKSVRITRAGVYLKPALVQCAHAAVKSDKSPYYKKKYDSLVKRRGKKRAIIAIARMILTAIYQMLSTGEQWNPSDLYKLICL

SEQ ID NO: 106661 - protein, 418 aa, unidentified
MIDDVQWFVGIDWATQSHRVCLLDVEGRHVSERDFAHGGAGLTELRDWLLEKTKAVPGQIAVAIETPHGPVVETLLDHAFLVFAINPKQLDRFRDRFTVAGAKDDSRDARVLGSALRTDRHAFRRLVVDDPVVIELREWSRMSEELQQERIRLANRVRQQLWRYYPQAVELTDDVADDWFLALWQRVPTPAIAAKASEQTIARILKDHRIRRLDAATVLQTLRKTPLFVAPGTTEAASAHIRNLAARLRLVNQQIKEAHQALDGLCARLEAATESPSGQNCEQRDVTILRSWPGIGRIVLATLLTEATEPLRARDYHALRALAGTAPVTRRSGKQCFVIRRLACNKRLQNAVHHWSRVAIQHDTAARRRYDALRRRGHGHARALRTVGDRLLYALCTALKRQTPYNPNCQTAQVTASL

SEQ ID NO: 106662 - protein, 422 aa, unidentified
MLEETQDTEEIIGRVAALDIGKAELVCCVRVPSARGSGKRAQEVRTYPTMTRSLLVLADRLGELGVTRVVMEATSDYWKSPFYLLEAHGFEVWLVNARDVKHLPGRPKTDKLDAVWLAKVAERQMLRPSFVPPPPIRRLRDLTRYRADLVATRTAEKNRVEKLLEDAQIKLSVVASDIFGVSGRDMMAALIAGERDPKALAQLARRRLRAKLSLLEEAFYGHFSDHHAFLLQTMLSRIDQASADIATLEAHIEAEIAPFAQAADRLDEICGVGRAAAQVIIAEIGVDMGRFATPGHLVSWARFAPGVKESAGKKKGKATTGHGNPYLARVLGEAAVSAGKTNTFLGERYRRIARRRGTKKAIVAVGRSILIIVWHLLADPDARFHDLGAGFYDTRIDADRRKRNHVRQLEALGYTVTLQPAA

SEQ ID NO: 106663 - protein, 297 aa, unidentified
MKVVVGIDVSKDWFDIAWKENDRIKTQRFDSTASGINQLMKATPADAIYVMEATGVYHARLAVTLFETERNVAVINPLVIKRYGQMRLSRVKTDTADASLILSYGESVEFMLWKPEPHHIQELKVAQGWLDDLTEDMTRLSNRGHAQSYLVVRSAMVDRQFLRRKEQLKQDITECEAHLEKQVKKHFAELYKLLNSIPSIGSKTATQLIISTGGFTKFISIKQLSAYVGVSPTTYESGSSVRGRGGIAKMGQGRLRQLLYLCSWTARKCNPSCVALYERLQAFAVATKKTAYSPEFA

SEQ ID NO: 106664 - protein, 355 aa, unidentified
MIRSVGIDLAGVGEHKVRCLDEEAQLCDGFGFETTPEGLAKLEERVFRDGSNPVIVFEPTGLAWFVVAVYLRARHPDCRLVRTQARNVVALRKYLRRSSKSDRIDALTLAKMSFVDIERLNDVYLPPAKINAILRLARQRQRLESDIAGRKKRILSITDGYLPGVRQPFSNLWSPQGREFLRSQLNPLAVVRAGEKALNRFLTQARVRGKKEANESHWVFRACQNIATIYEMSRSSGTVDEEFFADLQDEIARELRLMEAEEAESDAIAQRIEILYRELHPSDNLRTILGVGELTAPVFLAVVGDPTRFRSQSAFANYNGVVPDSRQSSDTEAKGLRMTKAGPSIMRWHSSRQVR

SEQ ID NO: 106665 - protein, 341 aa, unidentified
MKAIGIDTHKATLAACLVDDLGKPLAERTFANDPAGHRALLDWGLELGPEATIGMEGSAGFGAAAARFLLAEGRTVREVPPQLSHRERLRTRRAGKSDPGDALAIARVTAREADLPPVRAADATREIALLVGAREDLVAEATRVRNRLHADLVALVPGYGTSAANLVAARNRGTAGRLLRPLRGVQAELARERLARLGRLTSEARVLELRLGRLVADHPLRQLPGAGVLVTAKLIGEAGDVRRFRSADAFAMLAGVAPIPASSGQTQRLRLNRGGNRQLNRALYVIALVQAWHHPPAQAFIARKRAEGKTWREALRALKRHLARVVFRLLTSPAAEVRLAA

SEQ ID NO: 106666 - protein, 400 aa, unidentified
MLSIGIDVSKGKSTVCGMKPGGEIVYTPFEIQHTREGMSELLSLLRGSGEEVRVVLESTGSYHCPVVAALLENGIFVSVVNSLRMKRFCSQSIRRVKTDQIDAMQIALYGLAYWQELQPTRLPENTYRELQLLARQYYQMTSLLIKAKVDFNALCDQVLPGMQELMNDHAGRHKLSDFVLRYRHTTHILEMGETRFRKDYCKWAEKKGYRNRERMAALIFATAQNGIPVLPNAPSTQIVITEAIRVLHTVEASRDAILTQMQALAKTLPEYSLVREMPCIGDTLAPRLIAEIGDVRRFHSKRALIAYAGIDAPPYQSGKFSANNRHISKRGNRYLRKTGYEVMQSYVMHKPANDPIFTFIEKKRGEGKSGKLAMVAGLNKFLRVYYGKVTELYRSLPAIE

SEQ ID NO: 106667 - protein, 353 aa, unidentified
MSNGMALEDARAAVAGVVVMGLDQHRAQITAEWLDTATGEVARTRIAPADRQAVRRFLARFGGRQLEVALEAATGWRFVVEELAAVGAVAHLAEAAQTSALRGNKKRAKTDRSDARHLRELLMTERLPESWIPPAHLLDLRARVRLRHALVNQRGEWAQRLQAVLYHHGCPARRYLTTSDGRVWLERQPLPDTAREQVTVALALTDALDAQMGPIDKQLGAFARRQAGTRALMAHYGIGPLTSVVILAELGDARRFSSSREAVRYAGLDITVHQSDKRRSPGHLSRQGPPALRWALFEAAQSTRRKTSPDRACYQQTADRIGGNRACLAVARKLLKRSYHTLRELGDEGLAPA

SEQ ID NO: 106668 - protein, 348 aa, unidentified
MRFNILKTLKCKYMKTYKLIIGIDVSKRKLDVCFLVDPLSKQHKFLIVSNDSKGIGKILTTAKKYSIALKDTLLCFENTGIYSLPLVCYLGKAGADHWEVPAIEIKRSKGISRGKNDRMDARDIALYAHTHLHKLRLCKMPAKDISKLRLLFTEREKLIKSIKGLERTVEIKEFMERDITRDVLRINKKTVKYLHKILKEIEQKMQEIINSNQEISKKHKLIQTVPGVGPQTATYLIITTKSFTCFSNWRKMACYAGVVPFEYKSGSSVRGRAKVNHLADKKLKTLLTMCALNAKKGDKEIELYYKRKVAEGKNPMLVINSIRCKVLSRVFATVKRGTPYVKTCNFAA

SEQ ID NO: 106669 - protein, 357 aa, unidentified
MIAMKYYTSTTQFNCGIDLHARQMYVCVMDRDGKKLVHTNIKNNDFAYFLKLVAPYRHDLTVCAECMFGWYWLADACAEAGIHFVLAHALYLKSIHGGKNKNDRIDSEKIANALRTNMIPPGYVYPAAKRPLRALLRQRLFYVWNRGELLARIQSHQLAHNRPTSRQHIYNRQPWAEHLLAQEPDPARQFALQNDLALIGHYDTQLAALEKELLKLTKQTASRDFTLLQTTPGIGDYLGLTILHEIGDIARFPTVKDFLSYCRLVKGTVASAGKIKGLRGAKLGNPYLRWAFGEAAVVAKRDPLVIGPLAQRLEARLNNKFKANTVLAIKLARAVYFMLKQKTVFDSDRLVAALSRN

SEQ ID NO: 106670 - protein, 350 aa, unidentified
MRFYTGQHRYYCGIDLHAHTMAVCVLDATGEIVLERNLAATPEAFLGAIAPYREGLVVACECLFTWYWLADLCAKEQIPFVLGHALYMKAIHGGKAKNDRIDAHKIAVLLRGGMLPQAYVYPPGMRETRDLLRRRLHLVRKRGQLLAHLQNLRHTYNRGAFEKRIAYPSNRQGVVAHFAGEPMVQANAALDLSLLDHYDKLLVELERRLVRQAKKEAQNGFHLLLSIPGIGRVLAMTIVYELHDVKRFERVQQFASYARLVKCANESAGKRKGTSGAKMGNVHLKWAFSEAAVLFVRHSAEAKLLLARLTKRHGKGKALSILAHKIGRAAYYVLVREKPFDATKLFAHAS

SEQ ID NO: 106671 - protein, 359 aa, unidentified
MFNNSTFFIGLDLGDKQSHIFVLDPKGEVIEESRLPTNPTSLQRKFASFPRSRVAMEVGAHSRWASQLLKDLGHEVLVANARKLRAIYSNPRKGDRADAETLARLARLDPNLLSPIHHRSPQAQADLAILRSRDALVRSRTLLINHVRSVAKSSGARLPSCSADSFSNKAAASIPQPLCPALLPLLETIASLTQQIHAYDHRIRTLGETRYPETQPLRRIDGVGPITALAFVLTLEDPSRFQKSREVGPAIGLVPRTDQSGDRDPQLRITKTGNSYLRRLLVNSAQYILGPFGPECELRTWGLMLAERGGKNAKKRAVVAVARKLAILLHRLWKNGEIYDPFYRSRSNAGQPVIASAAA

SEQ ID NO: 106672 - protein, 363 aa, unidentified
MFTERTSVGLDVHARSVAAAAIDSVTGRVFQTKLTPSYEHIRSWLTDLPGPAAVVYEAGPTGFGLYRDLSAAGIRCEVAAPSKLQKPAGDRVKTDARDALHLARLLRLDEVTSVAIPTVDQEAARDLVRAREDCRGDLMRARHRLSKLLLRHGLVYDGGAAWTGAHDRWLRTEAAPQLTWPATRMAFEADYEHVLTMRARRRRLDTAIEEMAAASEFTPVVHRMCCLRGVSTLTGFALAVEIGDWTRFTGNTIGSFVGLVPSEQSSGASRVQGSITKTGNTHARRLLVEAAWHHRPRYRVGSVLRSRWEQAPAAARVRGDEGNRRLHGRWVGFLERRKRPVTANVAIARELAGWCWSLAVMDC

SEQ ID NO: 106673 - protein, 406 aa, unidentified
MDKPSAETAVLNTERGGTHLYFVGIDISKFKHDCAIIDEIGDTITPSWSFSNDCEGFSLLKELLDSLEGEKKIGFEATGHYGQNLKLFLENNGFTFMEFNPLLINRFVRSKSLRKTKTDSIDALMIAQYLMTVEYKPYPPSFYALEKLKSLTRFRDSLIRQRSKQLVELTNILDKVFPEFKPFFKGRFSATALYILSHYASTEKISNMNSKSYEPLRRLSRGKFSMVDFVELKTLARNTVGSTNDYLLQEMGITIDIYNQLQSKVEEIELQINDCVLGLAPPMLTIPGTGVASAAVILSEFGDLSKFCSPSKLLSFAGLEPGYFQSGTSESTGKMVKHGSSHLRYAIMNCAQTVINNEPTFATYYAKKRAEGKEHRVALTHVAKKLLRVIYTLQTKGLSYNPDLVR

SEQ ID NO: 106674 - protein, 341 aa, unidentified
MTLYIGVDIHARQQTLSFLDTEDGTTGQVELQHERDDVKGFYRQFQGEVIVGIEACGYTNWFEELIEQLGHKLLVGDAAEIRRLARRRQKNDRRDADLLLDLLVHNEFPALFRYSRESREMLRQLRYRHKLVKLRTMVANTLHALAINAGLSLRAKLLTKGGRQQLRTLQLSAISQQQRDELLSLADELTRRIQTVEQWLQTQARSDARVQRLQTHPGVGLLTSLCLVHTLGDLSRFSSTRKVAAYVGFDPMEDSSAERKAYGGISKAGSRLLRYLLVEAGQTAAKDDQHLKQFYRRLLPRRGKARAKVAVARKLLIRCFIMGRAEIDYAEFLRRGHKQAE

SEQ ID NO: 106675 - protein, 360 aa, unidentified
MAERFVGIDVALREHRIAVLDRDGEAVGPSFTIAASPDGVTTLLRTLAARGATTAQTLIGLEASGHLWENLEAALGGAGYRVLVLNPLQTRRYRDVVRRKAKTDDIDAHVIAGLLRSGAAQASYAPDEQIQSLRELARLRARLLADRQDYQRQLIAQLDVVLPEHRVVLGDLLTARARGILAQFPTAQHLAHASPRAIRRAAEDAGARGFSLDDATGVRDHARRSLYSGKAAVARAHVVRTLVSQLERLTSAMDEVDHAATTLLPPSEPGTSPSDAELLQTIPGIGPQTAATLLGEFGALTRFTDARALVAYVGFYPVISESGDRAAPPRLSRVGPRIARHSLYLAAVNAVRHSREWRTI

SEQ ID NO: 106676 - protein, 417 aa, unidentified
MCIRDSNCCGLDVHKTWIYACIGITDSNNRTEYKQARFSSFTKGLNELCDWLAKYNCKDVCMESTGKYWIPVFNILEQHSFWVTLSHPKYTKPMKGNKTDRKDAKWICDLYMCGMVKPSFIPPADIRELRDLVRYRFKLTCMITGEKNRAQNCLTVSNLKLDDVFSDVFGKSSRSITEHILQHPGEKFDIAPFVDSRCKTPITEIQAAVDGAISKEQVVKLRQCLDHIDELNKHISEVEQEILRLSDKYEAALNLIRTVPGFNKNPLTAIQVLSEIGGDMSVFPTAKHLVSWAGCCPRNDQSNQKIKSTRISRAGSYFKPVLVQVANALIKSKKHPEFITRYKRIKARRGHKKAIIAICRMILTAIWHILSDLKPYTPEGFLESRPVKEGKVLSTSQALNLLKQRGYIIKGEPLAVS

SEQ ID NO: 106677 - protein, 377 aa, unidentified
MQKVRWVGLDVHAETIAVAVAEPDGEVRALGVIPHRPEAVRKLMTKLRATGPLRVCYEAGPTGYGVYWQLTGLGIPCAVVAPTLVPVKPGDRVKTDRRDALKLARSYRAGDLTPVWVPDAAHEALRDLVRAREAAKQDQLRARHRLAKFLLRHGRRPPQRMAPWTQRHLAWITHQVHFAQAAQEATLLDYLHEVEHAAARVARLERAIDAAILEAPPQMRAVVEALQALRGIATISAVTIVAEVGALSRFARARQLMGYSGLGAREHSSGARSRRGAITKTGNAHLRRIVVEAAWAYRHRPAVGKALRARQAALSPAVTALAWKAQHRLCGRYRRLLGKGKCQPQVVTAVGRELLGFIWAIGRAAEADGAPRPAQAA

SEQ ID NO: 106678 - protein, 454 aa, unidentified
MEMVMERSMKQQDKPKKRGPRLEVTNPNAAGVDIGCASHYVSVPAERDDEPVREFKSFTVDIHKMADWLTACGVDTVAMESTGVYWIPVYEILERRGFKVLLVNARHVKNVAGRKSDVLDCQWLQQLHSYGLLRGAFRPADQVCVLRSLSRQRAMLLRLQARHIQHMQKALVQMNIQLANVISDVVGETGQKILRAIVAGERNEHVLAGMRNVRIKASEEEIVQSLRGNWRDEHVFALKQALELFDFYAKQVADCDALMEQQMIELHQHDRLPGKARKTSHRNKPKFDLRTRLYQMCGVDLTRIDGIDVCTAMTVLSEVGVDMSKFPTAKHFAAWLGLCPGTKISGGKVLGSKTQKCANKTAQALRQAASCLKNSQSALGAYYRRMCAKMDKPKAITAAAHKLARLIYSMITKGEEYVDQGQAYYEERYRQRVEYHLRKRAESLGLRLVPMEVA

SEQ ID NO: 106679 - protein, 465 aa, unidentified
MKRHRRRPSPKPRTSPHALERLHPHAAGIDCGSAEHFVAVPPDRDTTAVRSFPTFTADLYRLADWLTACGVTHVAMEATGVYWIPIFEILDARGFQVILVNARHVKNLPGRKSDVSDCEWLRDLHILGLLRGSFRPADGIVALRGYLRHRATLIESAGRLVQRMQKALVQMNLQLPLVVSDITGVTGLRILRDIVGGHRDPHQLAAHRDYRCRASEAEIVGALTGHYRAEHVFVLQQNLELFDVYQRQLTACDVAIEAHLAQLAATTAPPASPLPAARRRQKPRANEPRFDLRTPLHQLTGVDLSQIDGIGPYNALRLLSEIGTDMSRWPTEKHFTSWLTLAPHNKVSGGRLLSSRTQPSANRAAAILRLAAMNLGRTQTALGAFYRRVAFRIGKAKAVTATARKLAVLIYRTLKDHLVYADPGADAYDAHHRVHVLRRLRQRAHNLGFGLIDLSTGEVVEGAVS

SEQ ID NO: 106680 - protein, 335 aa, unidentified
MKHYAGLDLSMETTQVCIVDENGRKLVSEKVESSPEALAEMLERNGPIERAVIETGRMSPAICLGLRELGVLVVCIDARQGHQSLKAMKANKTDPHDAAGLAQLARTGFYKEVHVKSPAAHGVRSVISARGHLVEARVRLDNMIRGLCATFGYRPGAGQGKAFLQRIKQAAHIPGLGDAIASLLSVRAELVEQIKEMDRRLRVIASQSQACEILMTIPGVGVQTSAAFAAAVDEAGRFRQSRNAGAYFGLVPRRHQSGELDWTGRITKQGDGTVRKLLYEAANSILTRSRETFALKTWALNIAKRRGLKKARVALARRLAVIMHAMLRDGTLFQA

SEQ ID NO: 106681 - protein, 369 aa, unidentified
MRFYNAQHQFYCGIDLHARSMHLCILDQAGTVVFDRNLPCRPDVFLRAVAPFREDLIVGVECMFAWYWVADLCQEHKIPFVLGHALYMKAIHGGKAKNDRIDAGKIARLLRGGNFPIAYAYPQGMRETRDLLRRRTYLVRKRAELLTHVQILNAQYNLAPFPKKLSFAANRVALNIAERFSDPSVQKSVTVNLTLVDQLDTLIGELELYLVRTATVDDVQAYHRLQTIPGVGKVLALVLLYEMHHVRRFDSAGQFLSYARLVRCVHESAGKKLGCGGKKIGNAHLRWAFAEAACLFLRCSERAKKWKQQQAAQRGEGKALAILAARLGRTVYHMLRKGEAFDEARFWEIKPAATGSSSLSRKETCHARD

SEQ ID NO: 106682 - protein, 409 aa, unidentified
MYYVGIDIAKNFHVVTIIDSNEKKATSKPIRVTNCIDGFNKLIDKLNTLSSNTNDFLIGLEATGIYGENLLEFLNSYGYNVKLLNPFQVTRYREQHTMKKVKNDNIDSWIIALFLKDGKFSSGYVTDDEYQSLRTLYRNRASIQSDMKEVKKRILTQITVTFPEFENFIDPFSISGLALLDKYPTAHHYKHSSVDRILKIFRHIQGNNFNANKALELLELSKNSIYSGKAKDARAIAIKSSIRLLKMYQEELSILEDEILSLLDKKGISKEEDVPTNSLIENLKTIPGVSSKTIAAIISECGDLSRFAKATKLIGYLGLFPTENSSGNSKSTGRLSKRGSSLAKHALYLASVSCLIHNKELKQYYDTKRSQGKSKQEAIIAVSRKLATIIYSIFKYNVPYDPARVFAKS

SEQ ID NO: 106683 - protein, 429 aa, unidentified
MDEVEESDRMVERVAAIDVAKAELTVCVRMPAGASGRRRQEVLAYQATTSAILQMADWLHAQEVTLVVMEATGDYWKPPFYLLEDDVECWLLDAKQVKNLPGRPKTDREDAIWLAKVAERGMARPSFVPPKPIRRLRDLCRYRRALTQERTREKQRVEKVLEDAQIKLSSFIRDIHGVSGREMIEALIAGERDPKALAQMARGRMRTKLRVLEEALTGHFADHHAYICRMMLDNIDRLSQQIAELTAKIDELIVPFEHQVAQLDEVAGVGRISAQDIIAEIGVDMTRFPTAAHLVSWAKFCPQVKQSGGKKPSNGTTGKGNPWLAGALGEIAISTSSTHTFLGARYRRLVRHRGKKKALVAVGNSVLTVVWHLLSHPQARYHDLGADFYDTRIDKDRHARNLARQLQHLTGQHLRITDGQLVVGQSTAA

SEQ ID NO: 106684 - protein, 355 aa, unidentified
MLIIGCDYHPSFQQIAFVDTDTGELQERRLEHREEAEKFYRGLWVRGMKVRVGMEASGQARWFERLLAELQFELWIGDAAEIARKRERKQKTDRQDAQHILRLMLKDDFPQIWVPSGENRDLRQLLWHRHRMVQARTRIMNQLQAVALNEGLRSKKRLWREKGREQLESFRLAPWASRRRHDLLEFLDRLNPTIAALSQAIEQEVEKCPEAQRLRTHPGVGPLTALAFVLIIGKPDRFQCGKQIASYLGLVPLEDSSGNRRRLGHITKQGNSLLRFLLVEAAQVTTRSLPEWRSKYVHLTMRRGRKIAKVAMARKLAVRLYWMMRKEWDYEQLKKFGSQGRKSGSHAGEPTASTR

SEQ ID NO: 106685 - protein, 343 aa, unidentified
MKLHVLGIDLGKTVFHLVGLDSTGKVVIRKKCSRRQLLAFTANLEVQLIGMESCSGSHFLGRALRDQGHQVRLMPAQYVKPYVQTNKSDFLDAEAIAEAVQRPRMRFVPIKSEEQLDLQALHRVRERWVMRRTAVVNQIRSLLLERGLTLPKGRSHVDALLPRILEDAQLRLSGCFRVLLAQLKIELEQSTARIEQMDGVIQKTAKENEDCQRLTEIPGVGPVTATALIAAVGNASAFGKGRNLAAWMGIVPGEYSTGGKQKLLGISKRGNRYLRTLFIQGARSVVQQRHKQAPGLSSWLAQLLARAHQNVVIVALANKLVRMAWAVLCKKESYRAPILAVAT

SEQ ID NO: 106686 - protein, 450 aa, unidentified
MALQAIRPKVAGIDVGSRQHWVCGPARDDGEPNVQVFGTTTAQLQELVEWLARQGTESVAMESTSVYWIPLYDLLEARGIEAVLVNARQMHNVPGRKTDFHDCQWIQLLHSCGLLRGSFRPSVVVTAMRAIHRQFANLVEERSRCVQWMQKALDQMNVQVHKAVTDLTGTTGMAIVRAIVAGERDPVRLSALRQNTCQKSAEEIARCLTGTWRDEHLFNLSSALQLYDAIEKMIASYESRLLEAMAALEPDERKDSPVPVHPNPTKEKAIKARGDQATRTALWRFAGIDLTRIDGIGVGTTKIILTEVGLNLAAFPSEDNFVSWLRLCPRSPMSGGKTLKKKRNSLGANRIAASLRMAALGLRNTKSALGAAYRRIARHKGADVAVFAMARRLAQLVYRMLRYGQDYIDIGETAYESRFQARRLAGLRETARSLGYSLTPQPTAPAASAG

SEQ ID NO: 106687 - protein, 375 aa, unidentified
MKEKVRFLGLDVHAETIAVAVAEPEGEVRSLGTIPNRAESIRKMIRKLGTAEKLRACYEAGPTGYVVYWQLAELGVQCEVVAPTLVPVKAGDRVKTDRRDAEKLARCYRSGDLTAVWVPDEGSEALRDLVRAREAAKQDQMRARHRLSKFLLRSGQRPPTGVRPWTRPYLIWVAQLRFTQSAQEFTRQDYLHEVEHMRARVTRLEQAITEAVKLASPALQQVINDLQALRGIADISAVTIAAELGQVSRFGSARALMGYCGAVPSEDSSGKRIRRGGITKTGNAHLRRIVGEAAWSYRRPPCIWYGLRRRQESISEEVKEIAWKAQHRLHKRYMKLGAAGKPQGKVITAVARELLGFIWAIGIRAETIASQQAVA

SEQ ID NO: 106688 - protein, 392 aa, unidentified
MTTSVGIDVAKEVHWVCAIDSGGKVVLNRKLLNTPEDLQQLVVELLALPAPQRVGIDVLGGIASLAQAVLLQAGVALVHVPGLAVNRARQGTVGGESKSDPRDARVIAEQVRTRTDLRAVTAQTELDIELRLLVSRRGDLSIEQTRRLARMHDLLVGIFPELEHAVDLTSKTALTLLSRFVTPLELRQASDAQLRAALGALANRSFARKLITTARVVAARQTIAVPGEALTARLIKELAAEALRTIEQLATLDRELEQRLASHPDAALIRSLPGMGALMTAEFIAEAGTIERFRSPDALAAAAGLAPVLKQSGKSRRLQRPHGGNKGLKRVFYQSAFASLHSPDSRAFYTRKRQEGKRHHQAVIALARRRINVLWAVLRNRQPFHTHVTTNA

SEQ ID NO: 106689 - protein, 322 aa, unidentified
MFDNQLWCSRPIDTWSSKTVLERGSLHRLPSNPNGCKGIEARILQGRVQEDLMETKVFVGIDICKDSLDVAIGPGKEIITFANDQKGVNALIKELSRIGPELIVLESTGGYERLATSSFVEAGLPVVIVNPRQVRDFAKSVGILAKTDAIDARVITRFAEAVKPDVRQLKDRETSELTALVTRRRQIVEMIVAESNRLKLANKRNKKDIKDHIRWLEKRLDKIESDIGKMIQNSPIWRCKDDILQSVPGIGPTTSAVLICDLPELGLLGPKKIAMLAGLAPLNCDSGKFRGRRRIWGGRASVRSALYMGTLAATRYNPAINA

SEQ ID NO: 106690 - protein, 340 aa, unidentified
MVHVGVDLHKRTSQIAVLTEHGELMRDRLINDVERMRRFFAELPPKTPVAIEASGTWWWLVDLLESLGHHPVLSHPKQTKAIASARLKNDRVDADRLVLLLRGDLLPTVWIPPAALREARELIRHRVQLAWVRGEIRNRVAALFARRNVQPTAGKSWFTTRGAQELEHLPLAHIPHRVREDSVALLRLLDAQIRQLDVEITQQWGSDPRVQRLCTIPGIGPFIAIVLVLELGHIHRFPHAKQVASYVGLTPRIRASADRIRTGHISKEGNSLLRWVLGLAATQAARRPGPLRAWFYAVRKRRGKKVARVALARRLAEIVYHVWKQECDFFTVVRHGVVRG

SEQ ID NO: 106691 - protein, 358 aa, unidentified
MEHNTKLDFSDQDIYIGLDIHKKNWTVSIFTKDFEHKTFSQNPEPDILVNYLHRNFPGAYYHSVYEAGYCGFWIHEALKAHGINNIVSHPADVPTKDKERKRKNNRVDSRKLARSLRNGDLEAIYVPNRKALEDRSLMRARRNAMKEQTRYKNRIKGFLSFFGIKIPEQFQEGRWSGAFIQWIENITMERSTGKTSLLFYLNELKHYRTKIAYLNREIRNLATQELYKERVELLKTIPGIGTLTAMILLLELVDIARFKNLDQLASFVGLVPGEHSSGDDDDIHYTDMTPRSHHYLRAMLIEAAWVAVRKDPALILAFNELTKRMKKQDAIIRIAKKLLNRIRYVLKNHQPYVTAVVQ

SEQ ID NO: 106692 - protein, 350 aa, unidentified
MKTKSSAITIGIDLGDRKHAVCVLNAKGEILKQETITNSRGSLVALSRRYPGALMAMEVGMHSPWTSRFLKEQGHRVLVANPRKVHAIYKNVRKSDRNDAELLARMARSDEKLLSPVEHVSEEMQRDLLQIKLRDNLVRQRVDIISSVRFTLKSLGITLPSPNSDAFAKKARATLRKEHSDMLALIEPSLCVLDGMTEQIRTLDQSIAAMAAEKYPESEFLSQVGGVGLLTSLTFILTIGDPTRFQRKRDVAAFLGLVPRRDQSGETDKQLRISKAGNTYLRRLLVGCAQYILGPFGPDTALKRKGLKLTEKGGPRAKRKAVVAVARNLAVLLLTLWHDEAIYEANRGAA

SEQ ID NO: 106693 - protein, 346 aa, unidentified
MADIIRIGIDTSKSVFQLHGVDASERPVVRKQLSRREMIKFFEKLPPTIVALEACGASHHWARLLGGFGHEVKLIAPQLAKPYVKRGKNDAADAEALCEAVSRPTMRFVPMKTTDQQAALMLVGMRTRLIKRRTQLANAIRGIAAEFGVTAATGMCRIEPLLGTIAADETIPPLARELFALHAQEYAGLKREIEQVEEKLMAWHRSDECSQRLAKIPGVGPIGASLLMMKTPDPQLFKSGRDFAAWMGLTPRDHSTAGKTRLGGITRAGDELLRSTLVVGATAVIRHVRQTQGKNASPWLLSLLERKKPKLVAVALANKIARIAWKLMVSGENYRRNMVLPISAIS

SEQ ID NO: 106694 - protein, 313 aa, unidentified
MESTKPAVTDVGLDVSKDRLDYTLDGHHVVQVPNAPAGHARLVTQLRRQPGVRVVCEASGGYERAVVAHLLTAGLEVCVVQPGRVRAFAHAEGLLAKTDRIDAGLLRRYGENMQPRLAVPTDPVALVLRELLEHRRQLSDILVATGNRLGLAGATLRPRLERQQAFLREELAAVDQLIEQHIASDDDLRGKAARLRELQGVGPVLAATLLAYVPELGQIDSAELSALVGVAPFARDSGQSRRARHVRGGRAVVRKVLYMAAVASIRCNPILGTFYARLRATGKPAAVCLVAVMRRMLGVLNRLIAEPHFVLVR

SEQ ID NO: 106695 - protein, 338 aa, unidentified
MKKYSGIDLHSNNNVVVVIDEADRVVYRRRLPNELAKVLEALEPYRAELAGVVVESTYNWYWLVDGLQAAGYKVHLAHPARMKRYEGLKRSDDDSDALQLAHLLRLGILPTGYIYPAAERALRDLGRRRLQLVRHRTMHVLAVENVQARETGARMTGDRVKRLSAQQVDALGFGEDVTLGMQANVAVIRTLNAEIAKLERRLLQRLKPRPEYALLSTAPGIGRVLGPIILLETGSTERFAAVGNYASYARCVDSVRLSNHKKKGEGNVRNGNKYLAWAFIEAANMARRWCPEAKRFHDRKRARTNAVVATKALAHKLARACYHMLKNGERFDMQRCFG

SEQ ID NO: 106696 - protein, 347 aa, unidentified
MLHAGLDLSRRKVDVCLLSESGEQVDQLAAPPDADALRTLARRIDAVHGEPVCAVIESMTGARLVHDTLEQEGWQVEIADAQKVKGLAPLACKTDKIDSRVLALLSQRDLVPAIWLPDPRIREERELARFRLHLVKHKSALKNRVHSTLINFGKPCPVTDLFGVEGRALLARLQVPEPWRGNITASVELIDDLECQIAQINRKLREGHAEHPYIPLLMSAPGIGWVLAFTIAAEIGQIERFASPEKLAGYTGLCPRVNQSGDKDRRGPLTKHGPTYLRWALLEATMHALKHPAYAQRYQRNKRRLGKQRGAKVAQVDIARRLTHAIWHMLSRHQQFAPRGAAFRLAA

SEQ ID NO: 106697 - protein, 403 aa, unidentified
MKHVIAFDISMGKSYMVIYNAQKQCVFESEIKHSKLEFEKLQEKIHELTDKTGELPGIVFEATGIYSRQLERFMQDNQYTYCLLNPLEAKLQCDSLRIHKTDRSDAHRLALTHFTATRRVAHGTNHIFHQLKSLSRFYSELDGELSVIRSRMHKVIQLTFPELEKMFTSKSDLFLNFVQLFPHPDCVLGLSKTIIKNRIRTNTNKKISNITAEKKAIQILEIAENSYPAVSQNDVLYDQLKLYARRYQELLHQKECCINKMVCVAEQRAEYDIILSLPGIGPNTAVRLMAEIGDITRFNNNKQLNAFAGIDIRRFQSGKTFFKDKINKRGNKHLRKLLFLIIQNMIKQRRYGQNHIVEYYDKLKTQPYNKCHKVASIACVNKFLKLIFHLITHDIHYDYRLTA

SEQ ID NO: 106698 - protein, 458 aa, unidentified
MPKKSLKKAKSQRSRERALLEKVHLNAAGIDVGADTHWVAVPEDRDENPVRSFGVFTSDLKALCDWLKGCQIETIAMESTGVYWIPLFQMLERNGFEVRLVNASHVKNVPGRKTDVNDCQWLQELHTFGMLRGSFRPEAQICVVRSYLRLRDSLSKDCNSLVQRMQKALTEMNIQIHRVISDITGVTGMSILRAILAGERDCIKLAQLRHPQIKSSAQEIAKALEGDYRQEHLFALQTALELYDSYQFKIMECDQQVKKALAGFEPKVRVPAPDLSRLRSAERREEAIQRHNLEEMTGADLTKLPGLELLAVQRILSEIGLDMSRWPSEKHFCAWLNVAPNNRISGGKILSSKPRKNANRAAAALRLAAQGAMQSKTAIGAFIRRIKSRLGAPTAINAGAHKLARLLYRMLKFGKAYVETGQQAYEKLFKERTLRNLQRRARELGFDVTPMASAALVS

SEQ ID NO: 106699 - protein, 295 aa, unidentified
MHVTTVGLDLAKHVFQVHGIDQNGQVLIRRQVRRSEVIGFFRRLPPCLIGMEACSTAHFWARELAALGHEVRLMPAAYVKPYIKRGKSDALDAAGICEAVTRPTMRYVAIKSSEQQVVLMLHRTRDLLVRQRTMLVNALRGHLAEYGIIAPQGLPSVPKLREMAEKARGAAVPELAWRCIRLIIAQLEEAHVRITEAEQEILAWHRTNELSQRLETIPGVGLITASALAATISDPRSFRSGRHLAAWIGLVPRQSGTGGKVRLGHISKQGDRYLRRLLVLGASTLLRHARGKASA

SEQ ID NO: 106700 - protein, 340 aa, unidentified
MRKLYAGCDLHGNSNFGGIRDETGERVFHKKLPNDLALMLAMLEPFREELVGIVVESTYNWYWMADGLMEKGYQVHLANPSAIQQYEGLKHADDKHDAFWLAEMLRLGILPEGYIYPKQERPVRDLLRKRGHLIRLRTSMVISLENIICRNVGRKVSANDVKRLGEDRVTPYLEGQEDLALAGQVSKNTVDFLSEQIQEIEKAVLKRVRLKKSYRLLLTIPGVGKILALVIMLETGPIRRFATVGDYGSYCRKVPSQWTSNEKKKGSGNRKSGNRYLAWAYAEASEFARRYYPEPRVYYQRKMQKTNAAVAHSALAHKLARAAYYVMRDQVPFRMEKLFG

SEQ ID NO: 106701 - protein, 401 aa, unidentified
MKTVLSVDVAKNKSMIMLMNSDGEILIDTKEIKHNLEDFEKAKEEIKEINPENLTVFMESTGTYHLPVERYFKENGFNTLVINSLTTKNNYDTIRKTKTDKKDCYRLAKLFFVNEVEYHELSKKDLYANLKAMTRQYFYLLQQNVSCKNRYKRLLNICFPELEKIFKSTRIYDDTALNFIKEFPHAEIVKEKRIDALYNNLYKTNGRNLNFYKRLSETIKIASANSYPGVDKEHKDVKNFSDMAKIVQNNNNVINELRDKMIETAKKSPYYEIINSFYGIGEILTAEILGELGDITRFDSPKQLIAFCGLDPTIKQSGKSINVKGAISKRGNKYARYILFNCSQMVVKLGASNYPEHPVYIYYQNKKAEGKHYYESLTACSTKILRMLYSMCKNNKQFLEN

SEQ ID NO: 106702 - protein, 355 aa, unidentified
MDNKKYIGMDVHQATISVAVRDSAGKLVMESILETKASTILDFIRGQGGNLSVTFEEGTSAAWLYDLLKPHVAHLIVCDPRKNALLKVGNKNDRIDPRKLTDLLRAGLLSPVYHGESGVRTLQELARTYLTVTKDLTRVMNRLKGVYRSWAIPCAGQTVYAPRHRSAWLEKLVQPGVRRRAEQLYQQLDKLVEIRREARQELLRESRKHPAREYLSQIPRLGPIRVALLIALLQTPHRFRTKRQLWAYCGLALQTRSSGEYRYSGGQLQHSKRPPAIRGLNVNHNHDLKSLFKSTATQASGANDPWGDFYQNLLARGMKPAMARLTLARKMAAIVLRLWKKGEHFNPEPLKRKSA

SEQ ID NO: 106703 - protein, 334 aa, unidentified
MWHVGIDLHRLSVVIAAVDDEGNSFGTRRIDCQDRQAILATMRSLQPFRVVIEATGTYRWLYNLLRPLGTVLLAHPLRLRAMVQRRSKTDKLDSQLLANLLRINQIPLAYIPPENYQQLRDVTRHRARLSRQAAAAKTQLRSLLARHNLVAPYKCVCGVRGCRWLATQDFGGIDNLVRDELLLRLEHYRHQLAVIDARLKELRAHVPQVEALLGIHGIGLYTALLVIGELGEVERFRTARQVGSYAGLTARVRQSGDHCYRGAITREGSPWLRWILVEAALQVIREDGALKNFYQRVRKRSGAKKARVAVARKLAEICWKRLIGWSGRPAICVA

SEQ ID NO: 106704 - protein, 417 aa, unidentified
MNTQSESMPLERFVAIDIHKEYVAVGALDAQLDIVLQPRRVRMDRFGTWIQKHLRPSDAVVIEATTNSWHIYDQVAPLVGQTVVAHPPEVKLIAHARVKTDRRDVIVLARLLAAGLIPEVWVPPQPVRELRALISHRWRLSKMSVMTQNRLHSVLHRHNLVPPKGKLFSQQNHTWWQAQAFCPSERLRVQQDLSTLAHLKAQIEEVNQELGRLSTQDPWASQAALLLQIPGLGLILTMTTLAAIGDIARFDHAKKLVGYAGLGAGVHDSGKKHREGHITKRGRKELRWAMVEAAWQAVRSNEYWKAQFTDLKRRKHPNAAIVAIARKLLVTIWHVLSKQECYRYASEEDLAFKFLMWSWSLDEDQREGLTRQQFVRYHLLRLGIGNDLTRIERNGYPRRIAGVEEVLALRPDLKLPH

SEQ ID NO: 106705 - protein, 342 aa, unidentified
MKLKRIGVDLAKQVFQIHGVDSHEQVKCRKQLKRSQMLDFFRQLEPCLVAMEACGGAHYWARELIKLGHEVRLIAPQFVKPYVKSGKNDANDAEAICEAASRPTMRYVPVKSEEQQAALSVHRIRSRAIRARTALVNEVRGLLAEFGLIEARKGVKATRALLAHVSQESGVLPVAMRELMGELRDALQENDDRIAHLDRLIQQQASQDKRVQRLMKIEGVGPISATALVAAVGDARQFKSGRQLAAWLGLVPSQHSSGGKERLGSISKRGDTYLRTLLIHGARAALTASAQKTDPRSTWINELKCRRNTNIATVALANKNARIIWALLSKDESYNPAACSTQ

SEQ ID NO: 106706 - protein, 482 aa, unidentified
MSYRNIGVDLGVTAKHKAQVLDEQGKKIVPNFSFHISKENLDALCQKALEGASQGTKLRFICEPTEMSWFPLTIYAKSNDHEIIRIKSHKAHDLRKYFARHKKDDKLDANVLSVMPMIDEKATEEIYLPDAKTFALERCNRQKEKITNDIAAIKNRLSSLYHWVMPGLLDCFECHFDSRAREFYRHFTNPFRAKEAGVDGINRILEPAGRQKMKPDLPEKLYSVACSACKLYANASSWIDFKEIQNEVHIELQLLEAQEESLAQVKDRVESLYEEVHPSKIIETIKGIGENLGPSFVSMIGNSQRFSSQSKLRSFAGMIPKQDESGENNKKGLRMTQEGPSRFRRDLFLAAEISRQWDPQLAKIYYEEMVNKGHCHTEAICAVIPNLLNRILCVLKENRPYELRDTDGNPISTKEAEQTIKQQFTVPEEIRQRTRSRRSRKNRKEERIRNLFKRQLEASQDSYNIPPKDMLQKFEKYFNNAS

SEQ ID NO: 106707 - protein, 349 aa, unidentified
MTDAATIGIDIAKRIFQVHGVDKNGKTVLKKKLMRDQVLTFMANVPKCLVGIEACGGANHWAREIIKLGHEVKLMAPQFVKPYVKTNKNDQADAEAICEAVSRPNMRFVPVKSVEQQDILSIHRVRNRLVKNRTALANEIRGLLNEFGIIIPQGINKIITKLTEVLDSGDLSPISQQTFSDLKEEFIENNKKIKELENRLKVMTSGLDKYQQVTSIPGIGLITATALIASIGNVSCFENGRQLSAWLGLVPRQVSSGGKEKLLGISKRGDMYLRTLLIQGARAVFNAKLRFSTESQKTKNDSKFIQWMLNLYDRSGHNRTVVAVANKLARVVFAVLNSGNDYIENKVCS

SEQ ID NO: 106708 - protein, 347 aa, unidentified
MRFYAKQHNYYCGIDLHARTMYVCILDSKGQVVLHENMKANPKALARTIKPFQDDLIIAVECMFAWYWVADFCEDNNIPFVLGHALYMKAIHGGKAKNDKIDSYKIASLLRGGTFPMAYVYPRSMRSTRDLLRRRMHLMRKRAELLAHIHNTNSQYNLPEIGKNLRYKSNRSLVENRFDDKSVQKSMDMDVELINFYDEKLSSVEWYILKHARVHDYHSYMLLKSFPGIGDIISLVILYEIHDINRFPKVQDFASYARLVKCKAESAGKTYGTSGAKIGNAHLKWAFSEAAVLFLRCNPKAKAYVEKLAKRHGKGKALSILAHKIGRAVYFILKRKEPFNTDLFLAA

SEQ ID NO: 106709 - protein, 393 aa, unidentified
MNSLSTAKYTAFVGLDWADAKHDICLQAAGSDRREFDCFAHRTERIEEWALALQQRFGGRIAVALELSKGPIVYALQKYDSLVLFPINPSTLAKYRQAFQPSRAKDDPTDAELALDLLIRHPERFKPLTPQSVPMRQLCLLVEQRRRLVGDKNRYVNRLGDALKQYYPQVLEWFKRHDTVLFCDFLARWSTLTGVKRARKTTLRTFFKVHNARSEKLIEARLCAIQAAQPLTHNAAVISAHRLLAEILVEQLRVTLNAIDRFDEEIAATAAKLPDYELLFRPLPGAGPVMAPRLLAGFGEDRQRYGGAEELQKYSGVAPVTERSGKKTRVHWRRQCPTFVRQTMVEWAGQTVKYSFWAGGLMGATLGTLLRVISAGPGRVFNRQPRPLDPGLG

SEQ ID NO: 106710 - protein, 410 aa, unidentified
MKRVIGMDIHRTFAEVVFWEAGQLRHTGRVDMTRAGLEGFGRTLNKEDEVVIEATGNAMAVVRALEPHVARVIVANPLQVKAIAHAHVKTDKIDAGVLASLRAANFLPEIWLPDADTERLRRQVARRNQVVRHRTRIKNEVHAILHAHLIPPCPHDLFARLGRAWLERQNLPDDERAAIARHLRELDRLGEDLDALDRDIAQMVIEDPAVRRLLTITGVNLIVAAGLIAAIGDVRRFTSSEKLVSYVGLNPRVRQSGLGLAQHGRISKQGRSHARAMLVEAAWAASKAPGPLRAFFLRVRARRGHQVAAVAVARKLAVLCWHLLTKQVDYQLSRPALVAHKVRAMELQAGHPAQKGNKRGSTFAYNVKELRHREIEIARQAEHAYEQLVRGWQRRRPAKQRTGAANEERR

SEQ ID NO: 106711 - protein, 417 aa, unidentified
MQILVERGCGLDVHQATIVACLLIVLKNGTAQKQMRTFGTTTRELISLREWLLSEGSTHLAMESTGVYWKPIYAILEGAFHNVVANAQQVKKVPGRKTDVKDAEWLADLLCHGLLRSSFVPPKPIRELRDLTRYRRKLVESQATERNRLLKLLESANIKLASVATDVFGVSGRLMLRAMIAGKASAKEMADLAKGLLRKKIPQLELALEGRLEEHHRFLLKLQLDRLEAAEKDLAILERRIQEKLNPYVAQLTLLQEIPGIDWTLAAVIIAELGVDMSVFPTVTQLTSWAGMCPGNNESAGKRKSGRIPKGNVYLKTALVEAANAAAKAKGTYLRDKFYRLKARRGYKRATVAVAHKILVAIYHMLSQNVPYNDLGDLYLDKLNKHHLTRNLIHRLERLGYSVTLTPRNQETAAIAA

SEQ ID NO: 106712 - protein, 323 aa, unidentified
MQGQKSSERSAQPGVYVGIDVCKDWLDVYLHPIGQKFRVANTPEGLKALKRRLAELPVELIVMEATGKFHRQAHRTLHAAGLAVAVVNPLRARLFAEAVGQFAKTDRLDARVLALMGQALEPSALAPAPEAIEALQELARARGAAIADQTALSNQRGASQIAFLKAELGRRLKALAGHIERLEAEIERRIGADAALKRRYDILLTIPGVGPVAAVALVIGLPELGACSGRAATLLAGLAPLARDSGDKAGERHIGGGRAFVRTGIYFAAVTAARCNPQLRDDYRRLIDAGKKGKVAITAIMRKLVVLANVLIKEDRPWRPIHA

SEQ ID NO: 106713 - protein, 343 aa, unidentified
MDYFAGLDVSVKETSVCIVDDTGKIVREVKVASEPDALLAVLKNPAYRFQRIGLEAGPLSQWLFSALAEAGLPAICVETRHMRAALKAQINKTDRNDARGIAQMMRVGLYRPVHVKTLRSQKLRMLLTHRKLLQSKAIAIENDLRATLRNFGLKVGVVGTVKFEARIKELVENLPDLVVLVEPLLIVRRALREQIGILHRRLLAIVRDDDVCRRLMTIPGVGPVVALTYRATVDVPARFRNSKAVGAVFGLTPSKYQSGEIDRTGGISRCGDEMMRAMLYEAAHIMLVRSTKWSWLRAWAITIARRRGLKKAVVALARRLAVIMHRMWVDGTEFRWTREAAAA

SEQ ID NO: 106714 - protein, 343 aa, unidentified
MPTSTPSPPRYHLFVGVDLAAQTFTTVWMTPDTSPGRPVALDQTPQGFAALQARLLTTGHAAADILVVMEATGSYWVALATTLAQSGFAVAVINPDQAHNFAKALLQRAKTDAIDARTLARLAATLQPAPWTPPPAIYTELQQRLAERDALVGLRQQVRNQRHAPVQLPVVIPAVRAHGGADCDVRRADRCYRAGDHPDPATGCRVGGERRLLVSIAGVGVLTAAWLLVTTLNFTIGATPEAVTAYAGLAPVPKESGTSVRGRGAIGHGGNKRLRTALYRATLSATRDNPLIKAFYDRLRAAGKPAKVARCAAARKLLHLAWAVVRKGQVFDPLYRQRPQSTA

SEQ ID NO: 106715 - protein, 349 aa, unidentified
MKLSYVGVDLAKNVFQLHGVDRHGQAVWRRRLRRGQWLQVLLDTVEPGCVIGMEACGGAHHWARRLQAHGYAVRLIAPQFVKPYVKSNKNDLVDAEAICEAMSRPGMRFVALKSAAQQDIQAMHRIRAELVGQRTAKANQIRGLAGEYGIVAPRGLHQLRRAVPCWLEDAENGLSERFRGLLAELHRDLRYLDERVGALDTLIARSVQQDPLARRLLAVRGIGTLTASALAGALGDGSGFRKGREFAASLGLTPRQHSSGGRERLLGISKRGDPYLRTLLVHGARTVLHRAKGRDDGLSQWLNGLAARKHTHVAAVALANKTARIAWAVAAGGRGYEPARAAGAHAASP

SEQ ID NO: 106716 - protein, 369 aa, unidentified
MTDLTLFVGLDVHKKTISVAMVEATAGAEVRFYGTIANTPDAIRGLCKKLTKDGQQLHFCYEAGPCGYGVQRQLSRLGHRCDVVAPALIPRKVGDKVKTDRRDAMMLAQTLRAGQLTAVWVPDEAHEAMRDLVRLRAQAMRDLRKTRQQLLSFLLRHSLVSPYGHWTKMHRRWLGELIFAHPAQHLAHEEMLQRIERAEALCDRLKRAILELVPQWSLAPVVQAIQALRGVSLIVASVIVAEVGCFSRFDSPRQLMAYLGLNPSEHSSGAMIRRGAITKTGNALARTCLVEAAWTYRFPARVSQIIRDRLNGLPEPIRNVAWKAQVRLSARYRKLIAAGKPAPKVVVAIARELVGFIWAIARMVEPKFA

SEQ ID NO: 106717 - protein, 473 aa, unidentified
MPRNGDEKDVLLMSLTGLESQNIKEDVMTQGSSLSRGDKRRNAKLARLRELVPVGNAIAAIDLADEKQVVVLTDHDSRVLARRRVKAKAWRLGPVLEWVRQQACEHGFEDVTIGCEPTGHRWRVLDQLAAQRDMTLVCVQPLLVGRARESEDYTRDKTDDKDAVLIARLVAQLRCYLPERADETWAELRQLGSYRDRLITTATAGVQQLRDLLGCAWPAVLSTAADPLDSITWCAALAVVLDRCDGRPERLARGGYQRFEDAVRRQFGRWGGQRGPRRRIVAGVYGALTDPAGVAAQRRGALQRAKWVLADWRTTKTRLAEVETRMLEILDELELTDLVSSIPGVSALGAAAILAETGDLTRFDSPRALVKHAGLCPRENSSGTMTGRSRISGRGRPRLRLAAWRAVWGALSHNSVMAARYRHLTTRERNRLTDGQARAAIAAALLRWIHVIVTQRITWDAAIVGAAKLPAAA

SEQ ID NO: 106718 - protein, 343 aa, unidentified
MKREFYIGVDVSKNWLDLAYYDGVVVDWKQGHIRVDNKESGYSQIGRWLKKLGVDRESVLFCMEHTGLYSQDFRIWLEQVGYVYGMVQPRKMHRFEPDLGENERALDRIKTDGTDSFRIAMYCEKHCRKIKASPSRLPGESYFKLKRLIAERKLYTNQSSVYKLQLHDISAYDTEDSRERKKAGQDFLARQLRQTDAEIRRIVESDPALSRNYGLLCSIKGTGLVVAVETIVLTENFTSITNPRKYACYIGIAPARKESGVSVRGGEHVSRKGFTQAKADLSMSALQGIRCDNGIRAYWERKKAEGKHSGVILNAVKFKIVLRMFAVIRRQKPYVELNEFCQK

SEQ ID NO: 106719 - protein, 415 aa, unidentified
MALKIVYKICCGIDVHKTFVVACIASTNDKGVTSYESHRFSTYTSGLKTLLQWLLDRNCKDVCMESTGKYWIPVYNILEKDCSIVLAHPKYVKAIRGKKTDKKDAKWIADLFKHDLVAGSFMPPADIRQLRDLMRYRFKLTCFKSSEKNRLQNCLTVSNIQLGNVVSDTFGKSAQAILDKLLENPADTSFDLEPLVYKSLKKKLPELRDAIDGYITPEQAGKLKVIKAHYENLESRKAELEELILALAAPYQQELAILQTAPGISSDFTAIGIISEIGTNMEAFPSAKHLCSWAGLTPTNNESAGKKKSVRVSKAGCYIKPLLVQCANAVVASKKHPEIRNRYLRLKKRRGHKKAIIAIARMLLTALYHMLKSGENYNAELYRKSDLPPVNREITVEQALMIARNQGYKIKSATA

SEQ ID NO: 106720 - protein, 422 aa, unidentified
MKTWNDITHFAGFDWAKDHHDVLVLDGAGKIVAEFRFDHTASGWVLCQEKLAQFPQVAIAVEAGHSAAIERLVTLDYRVYPVHPRSSKSYRTRKLPSGTKTDHADCWALADALRLEGESWRVLTAPEPLVQQLRLLCRDEVALIEQRTALVNQLQQALYEYYPAALEAFNDWCAPSAWAFVERFPTPQSLVQAGKRKWQNFLHAQKLFHPEWSQKRMEIFANADQFCGAEATVAAKSALAVATVKILQALEAQLARYRALITERFKQHPDHGLFASLPGAGPKLAPRLLGELAALKPLADTPQALQCLAGMAPVSYQSGKVSVVYLRHQCNRFLRATVHLWVDLSRHYCDWARVYYETHRKKGQSHACALRCLGMRWLKIIAAMIRNQTPYDAAIHTRNQLQHGSWVLQLQPVQIIKKNGGD

SEQ ID NO: 106721 - protein, 429 aa, unidentified
MNIKPIAGIDVGKFFSEMVIISPSNELFARMRIHHDSNADMRRAIELLKKAEKDFASRPFIVMESTGHYHKILFHFLQKSGFEVSTINPIQTNCIKNFGIRKVKNDKVDARKIALLYRFHELKPTSISNEDIDCLRSLCRQYYKLSDELTAYKNRFISIVDQLMLNFKEVFPNVYSKTAIAVLEECPTPTAIIEADRDKLISIIQNNSRKSLEWATKKYELLVSKAREFEPLSINNAANVTMLGIHIAMIKTLQENLDKVLKAIHQLIADDLSKDLPAMALTIQLLQSIPGVGFLSAATIVAEIGDFNAFSKPKKLVAYFGIDPSVRQSGEFTGTHNKMSKRGSRLLRRVLYTIALANIRTKRNNEPCNPVLMEFYKKKSQNKPKKVAIGAVMHKLVFIIFAVLRDRKPFELRSPEQHAKILAKNRTVA

SEQ ID NO: 106722 - protein, 315 aa, unidentified
MSDGPCCIGIDVATAQLDMALRPSGERWAVPNEASGVMTLVDRVKARHPTLMVLEATGGLERAVTSALATAGLPVVVVHPRQVRDVARATGQLATTDALDARALAHVADVIRPTPRPRPDAQTQERRALLGRRQQLIGMRTAEQNRLAGTNARLTKDIAAHMTWLNAAIATLDDDLETILRASPLWRENDDLLQSAKGIGPVCARTLLLELPELGTLTRQQIAALVGVAPLHCDSGTLRGRRMIWGGRAHVRTVLYMGTLVATRFNPQIKVFYERLLAAGKVKKVALTACMHKLLTILNAMLKHRTPWQPQEVQS

SEQ ID NO: 106723 - protein, 401 aa, unidentified
MDPHLCIGIDVGCKAHRVGIATPDGSMLEEFDISHTDAGFQDFFRRVEARKQQLSLPVAVAMEGYNGYARPLDRLVQEKGYRLFNVNNLKLARFKEVFPGAAKTDPIDTRKILELFRLKDQLPMAKDAIQEVVAAPVVNEKLKRLSRRRRNLVNEKARVLNRMQADLQAVCPELLAATNDADNLWFLRLLTFRDDLRQLARLHRTTVLQIRGVGQKYSRIIQDWQGKAQFSNEAEYVGPMIIQDARRILELRSQIHALDEDMAELADQSEIVCRLSSIPGFGKTSIAELAGEIGLMQRFAAETSLALYVGMCPLTHQSGQMCRARIPRQVNTRCKAAMMTAVAHHYKCVPQSQAYYDRKRAQGKTHNQAIRALGRHLVRVIWAMLRDQRDYEPREDVHPMT

SEQ ID NO: 106724 - protein, 332 aa, unidentified
MYFLGIDLSKLKLDLSLFDGEEELFNEKRKNEIDSIEEILDELIDRFQLNKNELLICAEYTGNYSYPLVRTALKKGLNLWIENPATIKWSSGVQRGKSDKIDAKRLAIYAFRFQDKARLVTVNDPIIDKLKYLQSERELLVADRAKYLAQIKDQPNFMPRTIFEEKKKRLDTIIKSLSKAIKIIEEQVKNLINQTTCFKEQMEIMTSINGVGDQLATYMLIATEGFRKFNNPRQFCCYAGIAPFRYTSGTSQRSKSKISHRADKKAKKLLHMAALSSVKSNHEMKIYFNRKVKEGKNKMTVLNAVRAKIVHLIFALIRENRKYDHFYINQFA

SEQ ID NO: 106725 - protein, 384 aa, unidentified
MTPLYDRATYGRTGPMSTSVVYVGLDVHKDSIVIAVAREGREAAENWKTIPNDGVRLRKALKTLVKHGEALKVCYEAGPTGFGLCRRLREAGVDCMVVAPSLVPGKPGDRVKTDRRDARKLAHFLRSGDLTEVYVPDEAVEAIRDLERARDDAKCAERVARHQLSKFLLRHDRRWEGTTWTQKHRDWIRGQRFAYPAQQRVLEDYLKAVEDLAERVERLTVQVEELVQATALAPLVRALQAFRGISVVSAVTIAAEVGDLRRFPTASQFMSYVGLVPSEESTGKRHRQGAITRCGNSHLRRILVEAAWHYRHLPLMSKELRRRNQGIAAGVQRIAWEAQKRLNRRLYHLLQAGKSVQKAMTALARELAGFIWAVGQEEKLLEAA

SEQ ID NO: 106726 - protein, 357 aa, unidentified
MRRPKAKSNDKLIAGIDLHGNNLVIGVINQDGTRLMHRKLDCRLEQVEEFLRPFKLRLQSMAVESTFNWYWLVDGLRAQGYPIDLANPAKIEQYSGLKHADDKDDAFHLADLQRLNILPKAHVYDPELRPVRDLLRRRTNLVHQHTALLLSLQSLYARTTGQRLDLGEAKKMEPKQAPQLYEHPANQLIAQVQVEHIGALAKSIHRIEKAVLDCAREIPLYEKLLTLPGVGRILGMTITMEVGDISRFKTACYFASYCRMVDAKRLSNGKCKADNNQKCGNKYLAWAFVEAANFARRYDESCRRWYDRKAAKAGKIIATKALGCKLAKAAWYVMAQQCNYDEKRMFPELANKPMKTS

SEQ ID NO: 106727 - protein, 464 aa, unidentified
MTDKKLWRNRKERKEWARRLQSEDPGLEVVHPHAAGIDVGNGAHYVAVRPDCDPEPVRRFECFTADLHRLADWLRSCGVKTVAMQSTGVYWIPIYEILEDHGFEVYLVNARHTRNLPGRKSDVQESQWLLKLHTHGLLNNSFQPPSEIRVLRTYWRQRGEHVHGAATCVQRMQKALTQMNVQLANVISDVSGLTGQAIIRAMVAGERDPRKLAELSDPRIQASREEVARSLEGNWRPELLFVLQQEVEMYDTYQQRIAECDEQLQKHLASFVDTIPRQSSQAEPERKKTKPAKNAPRFELGRELQRITGVDLTRIDGIDVMVAQTLISEVGLDMSRWKTEAHFSSWLGLCPDNRTSGDKVLARGTRRVVNRAATALRMAALTLMRSRTYLGAQYRRLRTKLGAPKAITAMAHRLARLVYRMLKYGQRYVDKGAEYYEHRYRRQQIDFLRKKATKLGLQITLEKS

SEQ ID NO: 106728 - protein, 327 aa, unidentified
MTLPALGIDIAKLKFDVCLMNTQGKLKHKIFSNTAAGFAQLAAWLSKQQVERTHVCMEATGAYGEALAYALHAAGHRVSVINPAAIRAFAGSRLSRTKTDKVDAELIARFYLAQQPLAWTPPAPAVRELQALVRRLEALIEMRVAEENRLEAGSVVAAVRASVEAHVAYLSAEIKRTEEVIRNHIDNHPNLKQQSALLDSIPGVGKTTAALLLAEIVDVTQYRSARQVAAYAGLVPRQRRSGSSVRGRTRLSKIGNPRLRKALYFPAITALRCSEFFQSWAQGLRERGKCKMSVIGAAMRKLIHLAYGVLKTGKPFDPDWTKEAQNA

SEQ ID NO: 106729 - protein, 276 aa, unidentified
MSVSNQRCAGIDVSKGTLDIAISNIASQFTVPNGTDGFTQVLRELKRNETRLILMEATGGLESCVACYLQSEGFDVVVINPRQARDFARAMGYLAKTDRIDARVLLQMSEVINQHPERERYIRPLPDAHRQILAAMVVRRRQLTIMLTAERNRLHPSHPLSHASIRSIISALKGELARIEGEMAIHIKEHFSELSELLNAVKGVGSATVAVLLAEVPELGSLSRREISALIGVAPVNRDSGTMRGRRTVFGGRASVRTALYMSALVGTRHNPVISG

SEQ ID NO: 106730 - protein, 404 aa, unidentified
MIFVGIDWAEAHHDVCVLDDTGGILATRRIPEGLDGVAGLHALLAEHAEAPDDVIVGIETDRGLLVDALLAAGYTVHAINPLAASRYRERHTTSRAKSDRGDARVLADLVRTDRQHHRPIAPDSELLDAIKVLARAHQSLIWTRQRQTNALRNALREYYPGALAAFDDLAHPDALAVLAVAPDPERGRKLGKARIVAALRRGGRQRNLERRASEIRDALQAPQLTAPPLVTEAQAANASALVAIISTLVEQIDRLEAELAEAFARHPDAEILRSLPGLGDILGARVLAEFGDAPDRYADARARRNYAGTAPITRASGTSRVVIARFARNTRLFDACYQWAFCALTRSPGARAYYDAHDPGPNTAKVARRKLANKLVGILHGCLARRTLYDEDLAWSAIVEELAA

SEQ ID NO: 106731 - protein, 342 aa, unidentified
MTNMHYIGFDIHKKTIAFCEKTVDGTIVEQNTIPSTRNAIKIWASQRTTPWIGAMEATLFTGWIYDSLLPYATELKVGHPAMLKALAVAKNKNDRSDAERLADLLRCNLLFESYMAPEYIRELRRILRFRNLMVREATKMKNKTSGILMEVGAQYNKKKLHGQRYFDELLDSLDYVPESVTELLRFCRINTTHFVTMQKQLTKGLVKHPDISERVKLLMTIPGVGEITALTWVLEIGEVERFTQIRRAISYCGLCSAQSESAGVERRGPISKKRNKHLQTVLVEAANLAPRWNSQLAAVHDKELATGNRNSATLAVARKLVAYMLSVDKNQKVFEFREADAA

SEQ ID NO: 106732 - protein, 412 aa, unidentified
MLFAGDDWAEDHHDIELMDASGRVLARARLPEGAAGMSRLHAMIGEQLGEDADDGEDTEVAVGIETDRGLWVQALVAAGYVVYGINPLQAARYRQRHSVSGAKSDPGDAHVLADMVRTDSHQLRPVAGDSPGAQAVKVVARAHKTLIWERTRHVQRLRHQLRDYFPAALEAFEDLDAPDTLELLAKAPDPASAAKLTTAQIAAVLKRARRRNVSEKTTAIRASLRSQQLAQPPQVTAACAAVVRSLTAVITTLSEQIKILESQVAAHFSQHPDAEIIMSQPGLGPVLGARVLAEFGDDPHRYASAKARKNYAATSPITRQSGKKKTVIARYVHNDRLRDALDGQAFTALNASPGARACYDAHRAAGSGHRAALRKLANRLTGILHGCLKTRTRYDETIAWPEHASQEIKAAA

SEQ ID NO: 106733 - protein, 394 aa, unidentified
MRSVGLDLGVRHIAFCEVKDGKVVERGAVRSLSQLASRLGPKSAPAEVGFEACREGWHVHDTLKKWGHRPRMLDTTRIRQIGVGQHRRKNDAIDAEAIALAVESGRVAEAHVLSPQRRALRAQLSVRGALVQTRSQYVTTIRGLARAAGILLPKSATASFVEKVAGSTMDDELRALIAPLVRTMQVLDTEIVQVEARLSTMAEQDPSIALCATAPGVGLIVAATYVSVIDDAKRFRNAHTVAAYLGLVPGEATTGGPSKRRLGGITKQGNTYARSLLVQSAWSILRARSGTDPLKRWGDHIAQTRGKKIAVVALARKLSGVLWAMLRDGTLYDSALEAQESARGVSEQARRTASRARVLECAAKKLRRSAPPADAKAARPPAKAGRTARRARTA

SEQ ID NO: 106734 - protein, 343 aa, unidentified
MGHDTRIAVDVAKAVFEVAISDRPGHVVRRERLTRDQFLPFVAQQPVATVVMEACGSSHHWARKIEGLGHGVVLLPPHQVRPYVRGNKTDRTDAKGILEASRNEDIHPVPVKSVAQQVLTSLHRLRSGWVAERTARLNALRGLLRELGFFIPMGAENVVPALHALIEDAESDLPDGLRNILYEACQEIRDIESRIKKTEAQLDATAQQIPAVALLRTVPGVGPLTSTALVAFLGNIQRFPSGRHLASYLGLTPREFSSGLKRRLGRISKRGDGYLRTLLIHGARSVLLHARKAQPDRLRLWAHKLEKTLVHNKAAVAVANKMARILWAVWSRQTPYGSLRKAA

SEQ ID NO: 106735 - protein, 339 aa, unidentified
MDTVCFLAIDLAKNVFQLHGVDAAGKPVLRRRVGRVQLTELVLRLAPCTIGMEACSGAHHWARQFQHQGHTVKLISPQFVKPFVKGNKTDGNDAEAICEALQRPSMRFVPIKSVEQQDVQSLHRARSRLVSNRTGLVSQMRGILTERGIVFAQSITRARREIPAVVADTSNALTPLAREMLADLMDQLRELDKRIAGFDRRIDAVFKASETCQRIAQIEGVGPKTATAIVAAVSDPKDFRNGRHFAAWLGLVPRQSSSGDRTHLLGISKRGDRHLRTLLIHGARAVLRTAPTKHDKKHAWALALQARRGANRAIVAIANKMARVIWSMLATGQSYQKAV

SEQ ID NO: 106736 - protein, 322 aa, unidentified
MSVSVLGIDIAKQKFDAALIVDGKTKHKTCKNSAEGFETLMLWLEKQGIKKVHACMEATGSYGEDLAIYLHEAGHIVSIVNPARIKGFAQSELIRTKTDKIDAALIARFCLAMKPGAWIPPSPEIRSLRALVRRVDSLIDMRSQEKNRLSTAHESVISLIKEHIAYLDQEIEKIRRQIADLIEQNPHLKRRKELLDSIPGIGKATIPHILAELDDLEKFNHVRQMVAFIGLAPKETLSGSSIKGKPRLCKIGHARLRKALYMPALVSIQCNPVMIAFYNRLKEKGKNGKVIVCAIMRKLVHVIFGVLKSGKKYDPNYKPASA

SEQ ID NO: 106737 - protein, 342 aa, unidentified
MKATTIGIDLAKHLFQLHGVDQHGKTVLKRQLKRDQMLSFFTNLPPSLIGMEACGSAHYWANKLQGMGHTVKLMAPQFVKPYVKTNKNDAADAEAICEAVTRPNMRFVPIKNGEQLAVLALHRARQGFVKARTAQANQIRGLLAEHGIIVPKGIAHISLRLPELLEDAENNLPGTFRQLIERLGEHLKEFAKQVNELEEQIWCWHKENSASQKLAKMPGIGPLTASALVASIGDAKQFENGRQLAAWLGLVPKQHSSGGKQTLLGISKRGDIYLRTLLIHGARSVLRVAERKTEYAGSWLAGVMERRNHNVTVVALANKNARIIWALLAHEREYDADHAVAA

SEQ ID NO: 106738 - protein, 410 aa, unidentified
MEPILINCAGMDVHEKKVDVCIAHGPFDKPPKFEIRTFSTMTSDLEDLKTWLKKYEVTTIGMESTGVYWKPIFNVMEGDFEIVLANAQRLKAIPRKKTDIIDCKRIANLLRYGLLPNSFIPPREIRELRDLNRTRRKLVGMMTSEKNRLIKVLEAANIKLSSVVSKIYGVSSLAMIRCLLEKDKLSREDISQMAKGKLRKKLDLQEKALNGKITDHHRFLLKMHLQNIDHLSKQIIMIDEEIQKKMVPFQKEARLIQTIPGISEVNASAILAEIGVNMSQFPDEAHLSSWAGICPGNNESAGKKKSGKTQKGNSFLKGALTESAWSASKTKDSHYSAIYQNIVRRRGKKRALVAVAHRMLIDIYFVLTKGEPYQDTGAKAVHERTIKRKERSMIRSLEKAGYSVTRAVTA

SEQ ID NO: 106739 - protein, 409 aa, unidentified
MRYYVGVDWADQTHAVWVVDASGTKITARTVPHTAAGFSEWGRELDEWRAQGIERWAAIERPDGRVVDFLLDHGVVVYPVNPKALDRARDRFRLSGAKSDPFDARVLADFLRTDYLHLQALQPSSDVAQELKLLTEDCQRHIRQQTRLVNQLTTTLKAYYPRALEVAELTTALAREFLQAYPTPDALTALTTRQWQRWAHGRRLSEARIGALWAVLQQPQLPVPAHVVRAKARLMLSLVEQVTPVVAAVAQYRKAIDDFFASMPAAQWARTLPIGKHGITAPTLWARLGDAPGRWESFRHLQAQAGTVPVTKRSGKQRSVHFRFACDKSLRHVVDQVAFLSLLSSAWARAYYDQQRARGHAHHQALRAVGAKWLKIIFVMWHRQVPYDEPYHLATMARQQLRQRQQQIA

SEQ ID NO: 106740 - protein, 419 aa, unidentified
MRQNKTKKLGKVNGNTLIAAIDIGKKVNCGYFRAPDGRDVKPFGFYNLRNGFESFWARLVKFQEENGLEDIVVGFESTGPYAEPMLHFLRKKKIKLVQTNPMHTKRLKELTGNSPNKTDEKDPKVIADVIALGHALTLVIPEGPAAELRRLSQARERAIKSRTSMSNQLQHLLFVIFPELSWTIRNMKSKSILHLVENFPAPESIVGIGIEALCATLRKTSRGKLGRDRAEQIFEAAQKSAGISEGKESILLEINHLVLNIRNEDRFIEGLESQMKHYLMQVPYSQSILSIKGIGDVTAAGLIGEVGDFRKFSTISEVMKLAGLDLYEISSGRKKGQRRISKRGRSYLRKILFFAAINMVKDKGILHAHYQQMLGRGMPKIKALIAMCRKVLRIIFAIVRDNTVYVSNHQHRFCSKLAA

SEQ ID NO: 106741 - protein, 360 aa, unidentified
MRYSTSIGIDTHAKKNSICALVKETGEIFTAKLSADPDDVIRWIQGQGFPKPIRCCYEAGPTGFSLARALNDAGICCIVAATSKLPYRTDRQKNDRIDAEWLTRMLDSGAVRSVMIPTKEEESLRHLSRLRGEVASDLRKAKQRVASLLLLTKTTYTLTKKRWTKTFNIWAESYEFDCAADTFVFRMKVSAVLRLEERLAEIEDEIMQIIEASPELQEKMKRFTVLHGVGKVTAFSLVCEVYDFERFKNGSAFASYIGLVPTENSTGEKVVKGRIAKKGNSHLRRLVVEAASCYSKPIRDVASEDTSVPEPVRAKAEKCKLRLKNRSRALKKRGVPTNKAKVAVARELCEWIYHIAVMPA

SEQ ID NO: 106742 - protein, 456 aa, unidentified
MSRKRRSSKKTGTPVLHSLNPNAAGVDIGATEIYIAVPADRDPQPIRHFSTFTEDLHAAADWLKSCNIETVAMESTGVYWIPFFQILEARGLQVFLVNAHHVKNVPGRKSDVSDCQWLQYLHSVGLLRGSFRPEQEVCTVRSILRHRDGLVQMASSHVQHLQKALDQMNLQLHHVISDITGMTGLAIIEAILAGERNPQTLAKLRDRRIKATESTIAKSLVGDYRREHLFTLSQSLAAYRHYQELIGACDKEIEQYLETFESKADPPEDPKWKSQDGQKTRGGRPAFDLQSHLYRIFGVDLTEIPGVHTLTTQTLLGEIGPDLSRFANAAAFTSWLGLCPDNRISGGKILSVKTRKVKNRAATALRMAAQSLYRSQSYLGHYFRRMRAKLGAPKAITAAAHKLARVIYHMLTTRQPYDETICGQNELQNRQRLEARLRKQARDLGLEIVAARTGAV

SEQ ID NO: 106743 - protein, 352 aa, unidentified
MARTTKFHSVTTTIGIDMGKNTLHMVGLDASGAIVLREKVSRGRIGSRLANLPPCLIGIEAGMATHYVARELAALGHNVKQVPPAYARPFRQGHKNDFRDAHAVAEAVQRPTTRFVPAKTNEQLDLQALHRVRSRLVSERTAVINQIRGFLLEHGIIVRQGQRFLRHLLPDILAKRTDVLSPRMVRIISDLVGDWRQLDERIETMTDEIETLAKSDDSCRRVMTVPGIGPLISSAMVAAIGNGTAFAKGRDYSAWLGLVPRQMSTGDRTILGRITKHGNGYLRMLFMQAARVILLRPTNWSKHGFGAWLVRAAQRLHPNVLAAALANKLARIAWTVLAQERSYEARVTKAAA

SEQ ID NO: 106744 - protein, 376 aa, unidentified
MTWGCQAGVETANLTTVMKHYKITNTETYESIKLGIDAHAKWYYVARQLDGATPQPVQKMDFEGLLHFVARQKRLAREVHTCYEAGAFGYHLHHQLAALGVTNYVVQPQDWDERGKGVKNDRIDAQALCQRLDRYVRGNHKAFSVVRVPTAEEERERAISRQRQQLVRERQRLQAMGRSLLAMHGIHVSGKWWQGKTWSEIRSEAPEWVIERLEVFSRLIAPLEAESAKLTSQIEAAAADQKIPKGVGPLTFEVLRREVGDWSRFTNRRQVSSYTGLCPREHSSGGKRRSGSVSKSGNPRVRAMLVEMVWRMTRWQSGYHGLQKWLPVLADPARAGAARKKAVVAIARQLAVDLWRVFTGQNTAENVGLVYLPDAA

SEQ ID NO: 106745 - protein, 346 aa, unidentified
MVVGVDVHKRSHAAALVDGNGVVLAALRIPNSVAGVERLLGWLTEHDARDAVIGIENAAGYGRLLCAALAAAGCEILNVPAWRTHRDRHEQGRGKSDPGDAVAIAHVVLRKREQLGPALEPELIRALALLEGLRRQSVYNRTQAIQRLRAIWTQVDPEGEARVIHCQRQRELRKLTRIAFGAGIAEQAAARCIRELAREIERLNARIATLEHELEQLLRECGNPFADLAGAGATVAVALIAHSGDVRRFKDKGAYARFCGVAPMRCGSGQTADHHRFDRGGNRQLNAALHRIAVVQARVDPRAQAFLTRKRAEGKTTREARRALKRHLANVVYRRLHAWAENALPT

SEQ ID NO: 106746 - protein, 411 aa, unidentified
MRIVGLDVSRSVAEIAYLEDGTLHAGGRTGLRRDELERFAAKLRATDHVVLEATGNTTAIVNVLRAHVARVAIANPLQVRLIAEARVKTDKIDAAVLAQLYASGFLPEVWMPDERTLALRRQIARRSQLVRQRTRLKNEIHAVLIAHLIERCPATDLFGKKGRAWLGVQPLPLDERLGVEQRLRELDRLGDDLREVEQALAQATIDDARLRVMLTITGVNITVAIGLLSAIGDIERFPNPEKLVSYFGLNLSVYQSGPAPARHGHITKRGRSYARAMLVEAAWGATQAPGPLRAFFLRVRDRRGQQIAAVATARKLAVIVWYVLTRGEPFAWDRPALTAHKLRALELQAGMPAQHGSRKGSAAAYSLKSVRQQERAVAEQSERTYQRLFNRWKQSRPKSDSAPIRWPEART

SEQ ID NO: 106747 - protein, 339 aa, unidentified
MYKFIGIDISKSTLQVYIEIKNENISILNTKKSISSLYSKLKKNYKKEYKNLVFIYESTGPYSSLLKHFCAQKNILSYVVNPRQSSNFAKALDNRSKSDIIDAKMLFDFRVMAKVEDIKVLVIDQTQETLGEMLSYYKLLQKQRNGFSNHLESLESKEGNSFIIKQLNKEIKQLKEQEKNIIEQMRQLITSDEILSIKFENIKTIKGIGDLSSIALIHLFITYPQANRQQITALIGLDSIEQTSGTSINRKSRISKKGSAIYRSILFMPVLCAIRSNPYMQVFYDRLKENGKHSTLAQIAVMKKMILIVHSLYKNNKKFDATLYEKRVSWNMETIENIA

SEQ ID NO: 106748 - protein, 449 aa, unidentified
MSTLNSAEEKPSYAARIGLDWADQKHFWTMLTADGKLTRGELKHTPEAIEIWAVELARSFDGRPIALALEQKRGALVAILSKYAHVHLFPIHPTKLGHYRKSVCASGAKSDPSDADLILDYLVKHPEWLPGLIPDTVETRSLQFLVEERRKLVHQHTSQLQILIYWLKQIFPQMLEWFDDMSTPLVGDLLQRWPQLPALQKASEKTLRKFFAEHNCRSEERIQQRLDEIGKAVPATTDAALLKTGDICIHLTVQVLVVLRAGIAEFDRQIEAVYQSHPDRFLMASLPGAGPVLEPRLIAALGTNRERFESASSMACCFGIAPVTVSSGNSHSVHWRWACSKFVRQTFHEWANCSLRSCGWAKEHYDKQRLKGKGHHASVRSVAFKWIRILFRCWRDRVPYSEQQYMEALRKHGASTSTPAAVVANSTSMLSGVQWESCGGFSKLAKISS

SEQ ID NO: 106749 - protein, 421 aa, unidentified
MDEITEEPTALVERVAALDIGKATLTACVRVPHETKPGRRRQEVRTCATTTRSLLGLRDWLVCQGVTRVVMEATSAYWKPPFYLLEDDIAECWVVNARDVKNVPGRPKTDKLDAVWLAKLAERGMLRPSFIPPRPQRQLRDLTRYRRTLTHERTREKQRTEKLLEDAQVKLSSVISDIFGKSGRDMLDALIAGQRNPYALAALARGTMRAKTSVLQEALTGHFTDHHGFLLAMMLSRIDALTAQIGTLTTRIEQAIAPFAHQVAQLDEIPGIGIIAAQDLIAETGADMSRFPTPAHLVSWARFALKARQSAGKTRPGSTGKGNPWLGGTLGESAAAAARTSTFLASRYKRIVKRRGKQRALVAVGNSLLTIAWHLLSDPSARFTDLGPTWHDRHTPQRRKRQLIAELERLSGMKVTLEEAA

SEQ ID NO: 106750 - protein, 358 aa, unidentified
MVDKVTEAAVVGGVDTHKDLHVAAVVDQNNKVLGTQYFSTTRQGYRQMLAWMTSFGTLKRIGVECTGTYGSGLLRYFQNAGLEVLEVTAPDRMERRKRGKSDTIDAECAAHAAFSGIRTVTPKTRDGMIESLRVLKTCRKTAISARRVALQIIHSNIISAPDELREQLRNMTRMQLIRTLGSWRPDASKYRNVTNVYRISLKSLARRYLELHDEIADLDVMIAAIVDELAPELIKRNAIGYESASQLLITAGDNPQRLRSESGFAALCGVSPVPVSSGKTNRYRLNRGGDRAANSALHIIAIGRLRTDAKTKEYVARRVAEGHTKMEAIRCLKRYISREVYTLLRNQNRRINSIPITA

SEQ ID NO: 106751 - protein, 406 aa, unidentified
MEAIVERCAGLDVHQATVVACLKVGAAGAKPRKELRTFGTTLPELEELRDWLKTNGCTLVTMESTGVYWMPVYAVLEDHFEMVVGNAHHIKNVPGRKTDIRDCDWISELARHGLIAKSFVPPRPIRELRDLTRYRRKLVQSTASERNRLLKLLESANIKLSSVASDVFGVSGWAMLQALVEGTQSPAEMAQLARRRMRRKLPELERALQGRLEEHHRFLLGVQMRRIETMEADVAELDKRLREKLAPYSKPMRRLMQIPGVDWVIAEIGVDMSVFVNAAHLASWASLCPGNHESAGKQRSGKTRKGNVHLKTALVTATVAASKAKGTYLADKYRRLKSRRGALRAAVAIGHKILVIAYRMLADDSDYQELGDGYLDQLNTRRNASNMVRRLRQMGYDVQISLKEAA

SEQ ID NO: 106752 - protein, 415 aa, unidentified
MSLKIVYKICCGIDVHKTFVVACIASTNDIGVTSYESHRFSTYTSGLKTLLQWLLNRNCKDVCMESTGKYWIPVYNILENDCSIVLAHPKYVKAIRGKKTDKKDAKWIADLFKHDLVAGSFMPPADIRQLRDLMRYRFKLTCFQSSEKNRLQNCLTVSNIQLGNVVSDTFGKSAQAILDKLLENPADTSFDLEPLVYKSLKKKLPQLRDAIDGYITPEQAGKLKVIKSHYENLESRKAELEELILALAAPYQQELAILQTAPGIRSDFTAIGIISEIGTNMEAFPSAKHLCSWAGLTPTNNESAGKKKSVRVSKAGCYIKPMLVQCANAVVTSKKHPEIRNRYLRLKKRRGHKKAIIAIARMLLTALYHMLKNGENYNAELYRKSDLPPANREITVEQAIIIARNQGYKIKSATA

SEQ ID NO: 106753 - protein, 370 aa, unidentified
MKDYSEVFVAFDVAKLKNAVAIAQDGRDGEVRYLGEIRSTEAATRKLVAKLATKHAKLTFCYEAGPTGYGLYRLIKSLGHDCIVVAPSLTPSKPGDRVKTNRRDAVGMARLLRAGELTAVWVPDERHEAMRELARARAVAQKDLRSKRQQISGCLLRMGYHYPGKKTWGRAHLNWLTSFKLDHLEQRIAFEELMGAMRQAKERSERLEQAIREVIPDWSLAQQVVALQAMRGIDLITAVGVLAEIGDLSRFESPRQLMAYLGLIPSERSTGDRVRRASITKAGNTRARRLLIESAWSYRHPARVSKDKQAKVEAAPRAVREIAWKAQTRLCGRFRSLTRNGKKSTIVATAIARELSAFIWAINREVAATQ

SEQ ID NO: 106754 - protein, 463 aa, unidentified
MQTRPLEAVAGFASVSGSSAHLWVERRDEVPTRPAMPQGSGMQGATLAHVTTSTIDPTLTEAAATEVFAGIDWGGSFHQICLIDEDGKVLRQQRVPHDAAGFDELDRLLTCHRARLRVAIERAEGLLVEHLHLLGVEIFCVSPKISARARERYRMAAAKSDAFDAFVLADTLRHEHRHWRALTPPSPVLAELRAISRDRDRIVIAQQATENRLRAVLEAYHPAPLHLFSTLDRDITLDFITDYPTPEQAGRVGTARMDGFCRRHGYSGRTQPEVLVERLRPHLLSAGEGTVAGKAFSASLFTEQLRMLNTHLRAYDKRLDELLERHPDTPIFTSFPGVGPLVAATLISEMGDDRHRFPAPGALLAEAGLSPVTRASGRTRQVRFRYASNRRMRHMIDWWMFTAIREDDWTRQAYDHARARGQGKYRALRGLGSRWTRILWRCWTDHTRYDPAIHHRNPEPTTA

SEQ ID NO: 106755 - protein, 371 aa, unidentified
MGRNSTTKFIGLDVHSKTISVAIADEGRKGEVRHYGIIDNTTEAIEKVIKSLTATGAELKFIYEAGPCGFALYRYLSGNGFKCIVTSPAMIPKRGNVRIKNDRRDALTLARLYRAGELTGIYVPDPEDEAIRDLTRARNDARQAERKAKQRLNSFLLRNNLIYPRKTKWNRAYFYWLGFVVMKHPAQKIALQEYIEAVHEGTERVKRLSEQISLAVEEWRMAPTVKALQSLRGVSLITATITVAELGDISRFSHPKELMAYLGLVPSEHSSGESIKRGHITKTGNSHARRVLVESAWTYKHHARVTLPLIKRQEGLPRNICQISWKAQLRLCARYRRMMARKKPMQVVVIAIAREIAAFMWAIAKEVEATA

SEQ ID NO: 106756 - protein, 384 aa, unidentified
MKNNTIIFVGLDTHKEFTEVAYCEDQRGSEVKHLGRVSSAKVSLTKMARQFESKYPQATLHFVYEAGPCGYWIYRLLTSLGHCCYVVAPSLIPKKPGQRVKADKRDAQDLARLVRNGDLDPIYVPEPADEAIRDLSRARERAMHDLNNARFQLKALLLRNHINYSGKSNWSLKHLRWLTEIILPHPSQQFVLQEMIQTISERNARLERLDNELAHHVKQWRYYPVVKAIQALRGVRLLTATGVIVELGDLTRFDSPRKLMSYIGTTPSEHSSGGKRHLGAITKCGNGRARRLLVEAAHSYRYPAKISKELQLRQEGLPKEVIDQAWQAQQRLCRRYQRLIHKGKHRSVVVTAIARELIAYIWSISKEVTLPRIDPKTRISRVPA

SEQ ID NO: 106757 - protein, 344 aa, unidentified
MDHFAGLDISVKETSICIVDDTGRIVREVKVASEPEALLQVLKNPAYHFKRIGLEAGPLSQWLFSALAEAGLPVICVETRHMRAVLKAQINKTDRNDARGMAQMMRAGLYRPVHVKTLRSQKLRMLLTHRKLLQSKAIAIDNDLRGTLRNFGLKVGVVRTVKFEARIRELVANFPDIAAMVEPLLIVRRTLREQFCVLHRRLLAIVRDDEVCRRLMTTPGVGPVVSLTYRATVDVPARFRHSKSVGAVFGLTCAKYQSGEAEWSGRISRCGDEMMRVMLYEAAQSMLRSKKWSWLKAWAMQIARRRGMKKAIVALARRLAVIMHRIWVDGTEFRWTREQAAAAA

SEQ ID NO: 106758 - protein, 321 aa, unidentified
MKKEIFVGIDVSKERLDIGIYPGDETRTFDNNEQGIAKLLVLMSSVSPTLIVLESTGGLETLAVSSLCEKNLPVVVINPRQVRDFAKATGTLAKTDAIDAKIIARFAHSIRPEIRPLKDKNVQRLSALNARRRQIMTMLVAEKNRLKRAPQPNKKNIKEHIDWLEKTLANIDDDIQKTIKKSPVWKANSDILQSFKGVGPVLSASLLGDLPELGCLNRKKIAALVGIAPLNCDSGKYRGKRRVWGGRSNVRRLLYMATLSAMRSNPVIKSFYSRLIEAGKPHKVAMTACMRKIITILNAMLKNRTFWESPANYSLDIKHSC

SEQ ID NO: 106759 - protein, 406 aa, unidentified
MSTKHGSFACIGITDSNKRTVYKQARFSSFTKGLQELCHWLAKYDCTDVCMESTGKYWIPVFNILEKNNIWVTLSHPKYTKPQKGNKTDRKDAKWICDLYMCGMVKPSFIPPADIRELRDLVRYRFKLTCMITGEKNRAHNCLTVSNLKLDDVFSDIFGRSSRSITEQILQHPGETFDVAPFVHGRCKTPIEEIQAAVDGAVSKEQAVKLRQCLNHIDELEMRKSEIEREIFRLSDKYEDILTLIRTVPGFDKNPMTAIQVLSEIGGDMSVFPTAKNLVSWAGCCPHNDQSNHKIKSTRISRAGSYFKPVLVQVANALIKSKKHPEFSTRYRRIKARRGHKKAIIAICRMILTAIWHILTDLKPYTAKGFLEPRPVSKEKVLTASQALNLLKQKGYVIKDEPIFIS

SEQ ID NO: 106760 - protein, 415 aa, unidentified
MFYGLDVHKEFIQVCRLWPDGKRRQDFQIPATAEAIEAFACTLTRKDQVALEVTFHTWAICQLLVPHAGRVVAVDATQVKAIASARIKTDKVDAHTLAQLLRADFLPAVRMPSAETWALRQLISQRRLLLKQQTATKNTIHAILQRRLIPLPAGWTPFALKTRRWMRELALLPAERFMLDNALDLLEQIEIRVAGVDEQLLRHAKISESAKLLMTIPGIDVIVAIGLLAAIDDIQRFPSPQKLASYFGLVPRVRQSADRCFHGSITKAGSSTGRSLAIEAAQVLARSSSPLAATYYRVRHKRGHNVAVTALARKLIHVVWQLLTKCEPYRYASLPRTRIKLAKVSTDRPRAHVIPQTIEEVYAEAGLPALRDASPGERRAATNNRRTRTRLVNAAGNPAKDKKMQRGVTTRLTNS

SEQ ID NO: 106761 - protein, 443 aa, unidentified
MPDTPVTIPEPAWAAFVALDWGSQKHTWSLQPADGGQSEHGSLDHTPEAVAVWAAGLERRFGGRPVAVALEQKRGSVVNLLLGYPHLVLFPVPASMSACYRKTFVPSGAKIDPGDAGWILDLLLRHRDRLRQLEPDDANTRLMQMLVEERRQLVDDKTRLTLRLQDCLKQYFPQLLRWFGDVDTPLVADLLQLWPDLQHLRRCHDGTLRTFFRQHHSCDEELIRQRIEAIRAAIPATHDPAVLEAGSTKAHHLTESIATLRDQIARLERRRDELTAEHPDHAIFASFPGAGRATVPRLIVAFGTCRERYQSAFEVECNSGIAPVHIASGKTDRVSFRRACQKFTRQTFQEFAGQTIPRCGWAKDYYQAHCHRPEQHHAAAPALAFKWIRILFRSWKDRKPYDEQLYLTSVRRRRGLLGPALASATSVEWKTVAGFSKLSEKNS

SEQ ID NO: 106762 - protein, 333 aa, unidentified
MHYVGIDVSKRSLDVCLLAEGSKGSRKTKTLSNGQDSAQNLAKWLILQKCELSQTHVIMEATGIYHEYLACGLHQMGILTSVINPCRSREFAKAMGSFTKTDAVDAYVLAFYGCLKQPEAWTPPEEEVRKLRALLQHRDSLLNDKLRIDNRLNTLKSTEAVQEVMDSLSLVNQYLKSEVARIERLISSHIAQHPGLKRDLKLLMSVDGIGKQIGWNMLAVLRGNNFKSAEQLAAYLGVVPVERRSGTSVHGRARLSKIGSSNIRAKLYMGALTAISKNSHIKALYERLLAKGKMKMSALGAAMRKLVHLCYGVLHTQQPYDEKYKAKIINFSS

SEQ ID NO: 106763 - protein, 379 aa, unidentified
MSTTAAHEDQDSMEPRLLMAFELSEGKWKLGFTVGAGQQPRERTITAGDRAALQREVQRAQQRFGLPTGCPVLSCYEAGREGFWLHRYLQTLGVHNLVVDSSSIEVNRRRRRAKTDRIDLRQLMAMLVRFSQGERKVWSVVRVPAPADEAARQPQRERRTLVQERTRSRNRIKGLLAAQGIRLRTVEGLGPRLATLQLWDGTPLSPELQAQLRREAERLAQVETQLRTLEAERRQRLRSVPDVVSQQVKKLQELRAIGPHSAWVLSTELFSWRGFRNRRQIGGVLGLTPTPYDSGNQRREQGISKAGAPWLRATAVELAWGWLRYQPRSALSQWYQRRFGQGSSRLRRMGIVALARKLVIALWRYLAADELPRGAELKA

SEQ ID NO: 106764 - protein, 369 aa, unidentified
MRLYTLKAAPAASAVELKNNNKSSKAKRILVGCDVHLRGYQVARKIDEGAIGVVDNFRSEEGLLLYIEKQRQQAEQVVVVYEAGPLGYTLYRKLSATGVLCYVCAPDSTQQRKKRRKNNQIDARSLTSKLFNYLNGDPHALQLARVPSEAQEQQRMASRQHDQLVEERKRLGAKGNAMLLSQGIGSWSNWWRPKAWSQLSRVAPQWLLERLQIWVDVLKILDEKISLAKAALARACSGPRPKGVGALSQMQLQSEVLDWSLYRNRRKIACLVGMVPSEWSTGDKESRGSITKVGVPALRRIIVEMVWRMVLFQPQYKPVQKWQEVLKGPNPALKKKAVVAIGRQLMVDLWRLQTGRVTAQDLNLIMVEN

SEQ ID NO: 106765 - protein, 437 aa, unidentified
MEKKKKHQFPILFPNAAGIDISSKEHYVAVNPESSENPIRAFGAFTEDLHAISNWLKECNVTTVAMEATGIYWISLFLILEEAGFEVVLVTAKHVKNVRGKKTDVSDAEWIRQLHSCGLLSASFQPDKFTRSLRTYMRHRKNLIEMSATHIRMMQKALEQMNVKIHHVITDITGKSGQAIIAAILDGERDSNKLVALCDGRVKADAKTLIKSLEGIWKEEHVFELKQSYEFYKMYHSKLKECDIEIEKILRQQSGIEKKDNDVFKPKGNKNNMNFDGKGILKNLLGTDLTEVFGLTETNITEIISEVGTDMSKWPTPKHFASWLNLAPNNRISGGKILSSRIQKKKNNAGQIFKMAAFAIQRSKNWLAMFFHRIKNKRGTQKAVVATARKIAMIFYKLVNEKVEFNPISIENYTEGFRNQEIMKLKRKAQSLGFQVV

SEQ ID NO: 106766 - protein, 352 aa, unidentified
MRWVGLDFHKRYITACALDNDGQVVAEHRRLPADVVPLVGWLPALGDAVTVAMEATRYWAWLHDQLSAAGIAAVAAHPYQVKLIWQARCKTDPIDARKLADLLRTNLLPSIWVPDVEVRARRKLLRGRAYLVRLRTSVKNRIHGHLTAENCRAAVTDLYGRAGRAWLQTVALSPMGRVQVDLLLELVDALDARIGRLDDRVKRLVKHDPVAQRLQTWPGIGTFGAALLLAEIGTIHRFRSSHELAAYAGLTPSTQSSGDTTRHGSVGRAGSPWLRGILIEIVQSLKLAPGPVGQQYQKLLRSNGKAKATVAAARKLCCYLYWCLKEDWSYDAWLRQHERLEVRPVQPLGSAA

SEQ ID NO: 106767 - protein, 319 aa, unidentified
MNSITKTSIRNKERNVGIDIGKDTLDICIYECEKYWQADNTSEGVKTLIKQLNRYQLSRILVEATGGYERRLVEACAEKGLPVIVVQPLQVRQFAKAQGILAKTDKIDARLIAQFGVVMQPQFRPLPSKKVRLVRDLLSRKRQLNETRTQELNRLHKAPKVMIPSHRRLIKLLDKDIVWVNERLYKEVMAIAEWQRVYELVSSVPGVGDGIAFTLLGELPELGKLSYRQIAALTGLAPFNRDSGYMKGRRRIKGGRAPIRTVLYMGMLSAIQHNPVMKQFYEKLVAQGKHKKVALTACMRKMITILNAMVRDDKVWKMT

SEQ ID NO: 106768 - protein, 344 aa, unidentified
MEHYAGIDVSLELSSVCVVDGAGRIVREAKVPSEPEALVRFFAQLGVVVSRIGLEAGPLSQWLHAGLTKAGFETVLLETRQVKAALSAMVVKTDRKDARGIAQLLRMGWFRPVHCKSPPAQEIRALLVGRKLLQAKLLDVELSIRGILRGFGLKVGVVSKGRFAARIRELVTGQAMLERVIEPMLRAREALRAEYHALHRAVLGIVREDTICRRLMTVPGVGVLVAITFTSAVDDPGRFTRSRTVGAHFGLTPKKYQSGETDVTGGISKVGDAMVRSALYEAANVMLTRASRFSTLKRWALEVAGRRGMKRAKVALARKLATVLHRIWVDGTSFRFGKEVAAAA

SEQ ID NO: 106769 - protein, 462 aa, unidentified
MTVPKKKGNRKNAAPLPASLPAIRPMIAGLDVGSSQHWVCGPARDDGKPNVRVFGTTTDQLNELAAWLAEQGVESVAMESTSVYWIPIYELLESRGIEVLLVNARQLHNVPGRKTDFSDCQWLQLLHSCGLLRGSFRPGEAITRLRALQRQLANLVAERTRCVQWMQKALDQMNVQVHRAVADLTGATGMAIVRAIVGGERDPARLAMHRDPRCRKSAEEIARYLTGNWREEHLFNLASALRLFDALETEIAAYDAQLLKEIESLQPPERQEDPVPPHPNPAKEKAIKARGEQQARTTLWRFAGVDLTRVDGISAGAAQIVLTEVGPNLAAFPSEDHFVSWLRLCPRTPISGGKPLKKRRNGLGANRIAGVLRMAATSLQRSKTALGASFRRVARHKGGAVAVFATARQLARLIYRMLRYGHDYVDIGEKAYDHRFHTRRLAALTETAKSLGYTLVPNIAAG

SEQ ID NO: 106770 - protein, 418 aa, unidentified
MTLFVGDDWAEDHHDVEVLDAAGKRLVRARLPEGIVGMTRLHELVAEHLDDEAVDVETGMLAADQVVVGIETDRGPWVSALLAAGYAVFAINPMSVARYRERHSTSGAKSDPGDAHVLAEIVRLDRDHHRPVAGDSTEVEGLKMIARMHQTLVWDQTRHLQRLRSALREYFPAALAALAAAKLELTDPDALELLERAPDPDQAARLSRSKIAGMLRRARRRDVEARAELIQTALRAAALRQPPALQAAYVTVVGTQIRLLVGIIAQLPELEEVLGAGFGRHPDAEIYTSQPGLGVVLGARVLAEFGDDPHRYRDAKARKNYAGTSPITRASGRRIVVLARYARNRRLGDAVHQWAFCALTASPGARAYYDSLRTRGIGHHAALRQLGNRLVGILHGCLKTRTRYDETTAWAHHHAAAA

SEQ ID NO: 106771 - protein, 287 aa, unidentified
MTYYAALDVSLRTVNVCIVNDAGDIKFEAKVVSEVEDIITCLRGFKGEIGQVGFEAGVLTQYLTYGLQAAGYEVVCMEARQVKAALSAMRNKTDKKDARGIAQILRTGWYSRVHVKSLESHHIRALLSSRKAILTKCVDLENEIRGLLKIFGVKLPSTLGHGPFDKGVRGTIEQDPALSHALLPLLEARLVLYRTFLEMARRARKMAQADAVCRRLMTAPGVGIITALTFKAAVDDPTRFKRSRTVAAHFGLTPRRSSLGRWTIWVASPKSAMPMFERHCMSRPMRC

SEQ ID NO: 106772 - protein, 367 aa, unidentified
MKKVSTVAAKPSRNNSPQKLTIGLDLGDRNSWYCVVDEAGQIQLEQRVRTTAKALGEVFGAMPRSRIALEIGTHSPWISRLLSELGREVIVANARKVRLIGESRQKDDRLDAQTLARLARIDPELLYPVKHRSAKAQADLMMIRARAGLVRARTGLVNTARGLAKSYGERLRGCNVRNMNPEKAEGLGPELQCALEPLLAGIESLSERIREYNERIEQLAQQSYPQTALLKQVKGVGTLIALTYMLTLEDPHRFQKSRDVGCYLGLQPGRRNSGRSEPQLHISKEGDPYLRTLLVQGAQHILGPFGIDCDLRRWGLRLAERGGKSGKKRAIVATARKLAVLLHHLWVSGEAYEPLHNRNRTTVAAAA

SEQ ID NO: 106773 - protein, 363 aa, unidentified
MNSMASPTAAVNVIVGVDTHKHVHVAVAIDDAGQRLGEHRIPVDTVGYQDLERWAKSLGRVTSFGIEGTGSYGVGLASFLRRHGHKVVEVNRGDRRARRANGKSDTLDAELAARSVLAGTSTAVPKSADGVVEMIRQIKVARDIATKGRTSAIITLKTIVVNAPPELREQLDPLADKALIDRCAGYRPGKVTEAISSTKHTLRSLAKRWQFLDAEVKGHDRILDELTQRVSPTLRDGFGIGPDTAAELLIVMGDNPDRVRNEACFAKLCGVAPIPASSGMTNRHRLAWNGHRQANAALYRATILRMQYHEPTKAYVKRRTEEGLSKRDIIRCLKRFIAREAFARIMTDFRARIEIQDATRINS

SEQ ID NO: 106774 - protein, 400 aa, unidentified
MASMTSAIPTAQPDRVVIGGIDTHKDIDVAALLDCAGMVLGTAEFPTTRAGYRQLLGWMGSAGHLGGVGVEGTGSYGAGICRQLSAAGVEVVEVNRPDRSQRRRRGKSDALDAAAAAEAARSRNRIAIPKSRDGQVEALRVLRLTRVSAVKAPTKALQLLQQLIVTAPEQLPDQVGELPRMELIGCCAAWRPHSHDAADPSVATRIALKKLARRYLQLAEEISDSDTLLDGLVTDLAPQLIAVTGIGTDTAGQFLLTAGDNPERVHSEPAFAMLCGVAPLPASSGKTQRHRLNRGGDRQANRALHVIATTRKRCDHRTQAYLKKKIAEGHTRREATRSLKTPHRPRGLLPAQPGTSHRPVPPSRPASRRADAVKVEPPTRGTTLTAPSTGTPSKTEEPAP

SEQ ID NO: 106775 - protein, 428 aa, unidentified
MEHPFLSVGIDVGADFSLMAVALPTQEILGRPYKILHSSLNSLQGAISRIRSLETQYGLKAKVFMESTGIYHFPLYYRLKDEGFNAFVLNPLITHANSNINVRGVHNDKFDAQKIALLGLKPKLKTSVVPDDNVAAVKTLVREYHTMKKECTQYICRLTSQLRQTFPQYLPLFSQVNGKASLEILSRYQTPEAIINANRDEIIAVLKHYGRGKFNAAEKYERLIQAASEAMLFGHSNAGNVYLIRHFIEMIRLIDAQTDKLLAQIRKSVNGQPDARLARQVNLLQTIPGVGFLTAVTLVCEIGDFNAFRRPKQLYAYFGLDPKVRQSGNYIGNELKMSKRGSPYARRSFFILALQSVSLRKNGEPKNPVLRAFYQEKCKTKEKMTVLGAVMHKVCNIVFAVLRDEKPFAFITPEEHRILFAALAGDAA

SEQ ID NO: 106776 - protein, 346 aa, unidentified
MLYAGLDLSRQRLDVHVLDDQGQTVEVTAVRPDADALRTLASHVFRQGQEVTAVIESMTGARFVHDQLELRGWDVAIGDAVKVKGLAPLAAKTDKIDARVLAELARRDLVPEIWLPTPDVRAERERARFRLHLVRHRTALKNRIHSTLISFGHPVPVADLFGVSGRELLASMEVPAPWGETLATSLEMVDDLDARIGACAEELRALGADHPSIPLLMTVPGVGWILAYTIASEIGDVHRFASPKKLAGYTGLCPIVSQSGSRDRRGPLSKNGPKYLRWALIEAAIHAARHDHYKERYERTKHRLGSQRGAKVARVDLARQLAAAIWHVLTKNEPFAPAGPAISLVA

SEQ ID NO: 106777 - protein, 370 aa, unidentified
MENITYVGLDVHKATVCVAIAEGGRSGEVRQLGVFENRPELLLKLAARLSKGGRRLSFCYEAGPCGYGLHRLLSGCGHECVVVAPSLIPMKAGDRVKTDRRDAVMLAKLHRAGELTPIWIPDAAHEAMRDLVRARATAGRVLSKARQHLQGFLLRHEQIYRGVRAWTLAYRRWLTTVRFAHPAQQIVLQDYIHAVQDAEARRDRLTRQIEELLPNWSMAPVVTALQAMRGVALVVAVTVVAEVGDFRRFANARQLMAYLGLVPSEHSSGATIRRGGITKAGNALARRVLIEGAWTYRMPARVSRKLYDRNEKLAPAIRDIAWKGQIRLCSRYRRLAAAGKPKVVVTTAIAREMVGFIWAIARIAQPTLQG

SEQ ID NO: 106778 - protein, 322 aa, unidentified
MTRENYVGIDVGKKSLDLAVYDAKKTTTFPNTEEGIEELLLTLLKINPSLIVVEATGGYERPLVVALLSQGFPISVANPTRVRALAKASGKLAKTDAIDAHLIAEYACLMKPQPISSFDEAFLRLQALVKRREQVIGMRTAEKNRLDKSPLFVEEYIERHILQLEEEVALLEKEIQTLAASIPHCREGMELLSTIPGVGFITSVTVLALLPELGTLDNKAIASLAGLAPFNRDSGKKQGKRKIFGGRKRVRRVLYLSTLSAISCNPVIREFYERLIERGKPSKVAITACMRKLLTIMNAMARDNTPWQEFSLPEVEILSSAS

SEQ ID NO: 106779 - protein, 321 aa, unidentified
MSASSVVVGIDVAKAHVDVAVLGCPSSIAQRFDNEAEAHSALAAALKPLGVALVVMEATGGYEAALACALQAAGLPVAVVNPRQARDFAKSVGRLAKTDRIDARMLAEFAGVLVRRDDLASFIRPLPDAQQQALAAMVTRRRQLVTMLLSERQRLQLAIAVVRPSIEAMIEAIRKQLDDVEAKMASHVQAHYVELDKLLRSASGIGPVASATLIAELPELGRLNRREIAALVGVAPMANDSGNTRGRRRVQGGRFEIRRVLYMATLTAARRNPAIKTFYDRLLAAGKLPKVALVACMRKLLTMLNAMVKTNKPWDKSLHGA

SEQ ID NO: 106780 - protein, 350 aa, unidentified
MTTIARRITGGVDTHLDVHVAAALDERGAQLGVESFAATAAGYSELLRWLEGFGTLELVGVEGTGSYGAGLTRHLLGHQVAVVEVDRPNRQRRRRTGKSDPHDAVAAARAAQGGDATGSAKTRDGNVEAMRVLRVARSSARRSRTQAINQMRSLVSTAPEELRAELRDLSIYKVLTVASAYRHTGRTDVTTVTKLTLRTLARRALSLEEEVKEIDRVLKTLVAETAPDLNAVDGVGTDVASALLVAAGDNPERLKTEATFAKLCGVSPLDASSGKQHRHRLNRGGDRQANSALWHIVFTRMVNDPRTKHYIERRMKEGRTKKEAIRCLKRYVAREVFAQLPRSALALDNP

SEQ ID NO: 106781 - protein, 315 aa, unidentified
MQKLLNIGVDVAKDAVVVGCDEQGSAVRSIPNRRTALTVWLASLPKPSRIGMEATGCYHELLADLAYQSGHTVFVLNPKDTRHYAQAVGLRAKTDRVDALLIARLIAHEHARLHPCHPATCAQRQLGRLLRRRAQLVKLKGALRQSMKGMTGLARDTSALVAQMDALIAKLEQGMDTLIASMPGPQEDRRKLETINGVGAVVSAALIEPLTRLPFRSSDAFVAFTGLDPRPRDSGRKVGKRRLSKRGPAELRRLLFNAAMAATRTDVWKPIYEHYRAHGLPATAALVIIARKIARIAWSIHRYHTSFDPQRLKTP

SEQ ID NO: 106782 - protein, 414 aa, unidentified
MNDTKLKYAAYVGLDWADKKHDVCVQIGDDEKRTYHVIEHNPEAIEQWLVDLHNQVKGNIAIVLELNKGPIVYALQNYSFVTVYPIHGLTLARYRKAMFPSGAKDDPTDAELALDMMLHYPKKVTPLKPSSDATRKLNHLVAQRRLLVEDKRRNVNRLINALKQYYPQPLDWFSHRDSQLFFEFLLKWSSLQSLKRARHTTVASFFKSYGGNAVSNTAKRIEAIDAALPLTQDDAVIMPHQMLVVALCKQMLTLVENIRLYDKAIRKLFEEMPDAKLFDSLPGTGPCLAPRLLAAIGEDRNRFNSALEIQNYAGLSPVTERSGQSCWVHWRWQCAKFVRQSFIEWAAKSVHQSYWAGLYYANQKAKGKSHQQAVRALAYKWVRIVYKCWKTRTPYDESKYLKALRERNSPLLAA

SEQ ID NO: 106783 - protein, 368 aa, unidentified
MNRKSSKLYVGMDVHKESIDIALAEMGGEVRHHGRIGGDMNALTRAVRKLESLGQPLVFVYEAGPCGFGIYRMLATRRHECWVVAPSNTPRRVRDRIKTDRRDCLKLAGLARAGELEPIYVPDPVDEAMRDLVRAREDAVIMQRQVRQRLGALLLRNDVRYAGKTPWTEAHRRCIARLVLPNPAQRIAFEEYVLAVAESTERVRRLTQSIEAQLEDWRWQPLVVALQACRGIQLIHAARIVAELGDLSRFTHPRQLMAYLGLIPSEDSSGDRRHQGAITKAGNSSARRALVEAAHAYQYRAAVTPVIARRQSGIPKVVTDIAWKAQLRLCARFRRLAVRGVNRNKIVVAVARELAGFVWAIAQQIKPK

SEQ ID NO: 106784 - protein, 324 aa, unidentified
MTSVSTVNAPMTYLGIDVSKDKLDLAVEGQAEVVIFANDAAGIGQLIERLRQLRPALIVLEATGGYERLLLNTALEAALPIARVQPGRVRHFAKAQGLLAKSDGIDAHLLALYARCLQPAVSEKRSQNQLELDALLVLRRQLIDTRTALTNQMQMADSSFVRATLAKLLRQIHDRIKQVEKRIARLIDSDDDLAGRRDLLLSVPGVGKTTAATLAAQLPELGKIDRCQISALVGVAPYNRDSGKWAGKRAIFAGRAAVRSVLYMATITAIRCNPVIRTFAERLQKAGKLPKVVITACMRKLLTILNAMARDGLTWNPKCQLQSD

SEQ ID NO: 106785 - protein, 367 aa, unidentified
MTTVDVTRPVTGGVDTHLDVNVAAALDAIGGLLGVAEFPTTPVGHRCLAEFLASFGTVTRVGVEGTGSYGTGLSRFLRSTGVEVVEVDRPNRQSRRRTGKSDPVDAIEAARAALSGRAQGEGKNRDGNVEAIRALVVAKRSSRSTKIQTLNQIRHLGFTAPEELRSRLKAISRQHLGAEAAALRPRAGGDTVVFATKTALSLLGHRGLLLDAERERLNVLLAELVEKTAPQLLEIHGVGVDTAATLLVTAGDNPGRIRSEAAWAHLCGVAPIQASSGKVSRVRLDRGGDRQANSALWGVVITRLRTDPRTKAYMERRLKRGPLQARDHPGSEALRRPRGLSPPASRIAHSQQRAWPENRLASTWLPL

SEQ ID NO: 106786 - protein, 411 aa, unidentified
MRVHHNVCCGIDVHKKSVTACLMWGPADKEPEFEIRRFGTMTRELQNLAEWLKQAGCEAATMESTGSYWRPVWNVLEGQIAKLILANAQHVRALPGEKTDRKDGKRLAELTRHGQVRPSYVPPRAILELRDLTRYRSKLLSAGSSERNRIQKVLEDANIKLGSVLSDVFGVSGQKMLQAFVKQDSVATGKVAQLAQWSLKPKIEAIQQALEGKLTDHHRFLIDVSMRHMRFIEEQLIRLDEEIQRRLQPYQEEYALLQTIPGIKETGAARILSEIGADMSPFADGDHLSSWGSVCPGNNESAGKKFQSKIRKGNVHLLSALTECAWAATKKKDCHFRNKYYRLKSRRGSQRAIVAIDHAMLKCVYVVLSQRKPYEEPKPTSLTEAQKQRKASSLCRQIRALGYDVKIQKTA

SEQ ID NO: 106787 - protein, 465 aa, unidentified
MKQHPRRRPSATPRTSPAALDHINPNAAGLDCGSANHVVAVPPDRDPQQPVRTFATFTGDLHRLADWLVVCRITHVAMEATGVYWIPVFEILEERGLTVSLVNARHVKNVPGRKSDVSDAEWLRDLHIMGLLRGSFRPADEIVALRAYLRHRSTLIEGASAHVQRMQKALVQMNVQLPLVVSDITGMTGMRILRDIVAGQRDPRMLAQHRDHRCHASEAEIAAALTGHYRPEHVLVLAQHLALYDAYQQQLLACDGAIATHLAALAAPVPAPAAPLPPARTARRTRTGNEPTFEMRTPLHRLTGTDLSQIDGIGPYTALRLLSEIGTDMSRWPTEHHFASWLTLAPRNKISGGRLLSSRTQPSANRAAGIFRMAAMALGRSGTALGAFYRRLSSRIGKAKAITATARKLAILVYRALKGELVYADPGADAYDAHHRTQLTRRLRHRAAKLGFALVSLDTGEVLQS

SEQ ID NO: 106788 - protein, 406 aa, unidentified
MKQIVSVGIDVSKGKSTVCAMIHPNTIIKESFEVLHTVEEMSMLADYIGSLDGEIRIVMESTGHYHLPVAQFLYQKGFFVCVENAYIIRQFSRIMLHGAKTDPLDAKKLAKYGLAYWSELKPYKFHPSCYTELSLLSKQYQTYIKLLIAAKQNVIHLMDEMLPGFKEALDTASSVQFSKVKYVDFAKEFHHVDMIKSMGKEIFRENYKQWCKEKGYRFQSEKADELFHLAEDGIPTLPTEFPSTRLCMEVATEQVSQLGYALEQILSQMQNLAKTLPEYQTIRQMGGIGEKLCVRFIADIGDVRRFHNGKALVAYAGIDAPPYQSGQYTGTKRRISKRGNSALRKTGYEVMKSLKSHPPKTDTRVYDFIIKKENEGKSKKQAKIAGLNKFLQIYYARVMEIYQNIV

SEQ ID NO: 106789 - protein, 452 aa, unidentified
MQDQDKPAVLVRAVAGIDAAITARHHIALREFFDDGTEHLSRFTVDPTLAGLERLSQRLAAVPAPVTAVVEPTSMTWLALTLAVERAGGQMEMIGARHSSRLRGAIMGKNKSDVIDSEVLTHAGEIFDLPRLVLAAPGQLALRRAVVRRAGAVIDGNRYWRRLLSLARWAFPDVWAAFAGSESTALAVLGRWPDLRSLASARAATLTAVVAEHTRDVADTPARATAIKTAAPQWADFWEGHLDLDALAVDVAEHLTDLHESRVRVERFTSHARQWWERLYGDDPLILSLPGIGPATGACIRAYFGDGSAFDSAKKAANYVGITPSNWSSGTMHQARRAIDKEGPAPLRLAFYQAASVARTMDPQLAAFYYRLMIEHGHCHTQATIAVARKLAERTWKTLTTGQMYELRDLEGRPLTKRAAKELIASRYTVTPKQRTQSRSHTLTAKRARLTR

SEQ ID NO: 106790 - protein, 339 aa, unidentified
MNITTIGLDLAKNVFQVHAVAADGSVVFNRSLRRSQLLNFFERTPPCLVGMEACATSHYWARELKALGHDVRLIPPAYVKPYVKRGKSDAVDAEAICEAVTRPTMRFVQPKSCEQQAVLSLHRARELIVRQRTQIINAIRSLLAEFGVTVAQGVPRIMAFARSLSVGDQVGLPEIAKEVVANLCHQLLSLERRVRWYQRKIEQHCRTDERARRLKQIPGIGPVTASAIVATVGDASQFRNGRELAAWVGLTPLNKSSGGKERLGRITKMGDRYLRKLLIVGATSRLKSIKPSGDIQDDWISQMLERKPFRLVSVAIANKTARIVWAMLSKNEEYRGQTT

SEQ ID NO: 106791 - protein, 367 aa, unidentified
MKKVSTVAAKPSKKISQQNLTVGLDLGDRNSWYCVLDESGQIQLEQGVRTNAKALQEVFGAMPHSRIALEIGTHSPWISRLLSELGHAVIVANARKVRLIGESRKKDDRLDAQTLARLARIDPELLYPVKHRSVQAQADLMMIRARAGLVRARTGLVNTARGLAKSYGERLRGCNVRNMNPEKAESLSPELQAALEPLLNAIESLSERIVEYNERIENLAQASYPQVALLKQIKGVGTLIALTFLLTLEDPHRFRKSRDVGCYLGLQPGRRNSGQSEPQMHISKEGDPYLRTLLVQGAQHILGPFGVDCDLRRWGLKLAERGGKSGKKRAIIATARKLAVLLHHLWVSGEVYEPLHNSSRRTVAAAA

SEQ ID NO: 106792 - protein, 344 aa, unidentified
MNITVYGIDIAKQVFHVIGLNQAGKVVVKRKLKRSQLLSFFANRIPCRLSMESCASSHYWGRELTKLGYEVKLLPGQHVKPFVRTNKNDYNDALAIAEASARPGMYPVSIKTIEQQDIQALHRMRQASVADRTALCNQVRGLLGEYGIIVNQGVCALRKAIPSILEDAENGLTALFREMLAQKQRQLQQLDEHVDYYSGKIEQQAREDEITQRLQTIPGFGPIVASTYRSVIGDGSAFNRGRDVSASLGLVPRQHSSGGKDVLLGISKRGDKYLRSLLVHGARAVIRQAHRKDDALSRWVMRLVERRGKNKATVALANKLARIGWVVTTRGVDYQPRQLETAAV

SEQ ID NO: 106793 - protein, 355 aa, unidentified
MDSTKYIGMDVHKDAIAVAVMNAAGKVVMESILETKAATMLQFIRGLRGNLLITFEEGTWAAWLYDLLKPHVSKVTVCNPRKNALLKSGNKGDRIDAQKLAELLRNGSLSAVYHGERGLRTLRELSRSYLTITKDLTRVMNRLKALYHSWGMACSGTRVYAPRHRAEWLSKIKEAGVRRRAEFTYDQLDGLQALRRAVRRDLLAESRKHRATTLLSQIPGMGPIRAALVVAFLQTPDRFRTKRQLWAYSGLAIEKHGSGEYRYVDGQLRRSPKAVALRGLNKNHNHDLKSIFKSASVRASTAAGPLQEFYENLLAKGMKPSMARLTLARKIAAIILIVWKKGEHFDGEHLKPQAA

SEQ ID NO: 106794 - protein, 318 aa, unidentified
MPQKTRFVGLDVAKSKVDACIRSEGLRMSAPSTPEGRAELVAWVRANRVGRAVMEASGGYERGWAEALRAAGVEVRIVDPKRVRHFAKAAGRLAKNDPIDADTIARFAEAFPDGEAQPHDPARDEIDRLVAARTALKDVEDRIKQQGEHGPPPIVAKALAAIAKTTRAELRRLEAAIAAKIKANPGFARRAEIVTSVPGLAGQTAAGVIAWLPELGRIRNEAAAALIGAAPYDDDSGGRKGQRHIKGGRRKLRNLLFMPVMGAATQHNPVLKAYYQRLRARGKQAKVALIACMRKLIVILNTMLARDETWDPPARAAA

SEQ ID NO: 106795 - protein, 318 aa, unidentified
MYCIGVDVSKQQLVTYDGERRRTFPNTSELKELAAFLEERGEQTTVVFEPTSTYSRALESFCRSRKLRCWRLNPRVLPHLREVSQGRSKTDRTDAELLWQYGQDHGPGQPLEEDHLGHTLRVYLSCYAQAQKARIACQQLREALSHDPNTPAEVLEGLGREIDRLKLREERMLAQAQACIEEDEEVGEGYALLLTIPGVGRVTALVLVALFRRYPEANRGEIVAVVGMDPTEHRSGSSIHRKARISKRGDGFVRKTLYEATLAAVRFNPGVRGIYRRLKEKGKPEKVARMAAARKLLLIAHAVYRSGQPYRAPAHVGG

SEQ ID NO: 106796 - protein, 501 aa, unidentified
MNINHFPQEKLATFHAMNQSAIGIDVHSNLIVGVYQSSRFNSTRASIDGDTWNGDSTKKGLEDFAKWCKERKPEVLLMESTGVYWQSLYESLENEGFSNKDIVVVNARDVKNRRGNKTDLSDAIHLAEIARNGDYRASFVPKKEVRQLRCLWRSYHTLKNTRKRLLNVLHKQLCQVGCRASSVFSDIRGKIATQVIELLIGDKSGDELKEAIASVIKRSRGRLKATPDMVYEALRTDMDSKVWYSIRQHLEHIKFIDKQLEAAFANLTIQSAPYEKTIQLLQTIPGIKYLTALGIVCELGDDLSAFKSVRKFSKWIGHAPGNNESAGKRYSGRTTPGNKYLKILLVECAAGIGLMKKGFLHEIHQRFKERIGTKRANVALAHKLCRIIYSILKNRTPYQERYKPILKEHRLGKAIKAVDGLRNVGLSCDDIEVTDTETGNSTIIYGANKYRRKLMKNKWYTEGKQSEMCFSHLLNSIRPVSAGNRLRLTLNLLRYLCYLTY

SEQ ID NO: 106797 - protein, 465 aa, unidentified
MGAGKMNRKQRKELGRRLQSANPGLEVVHPRAAGIDVGNGAHYVAVRPEQDAEPVRRFECFTADLHRMADWLEACEVKTVAMQSTCVYWIPLYEILEQRGFEVYLVNARHTKNLPGRKSDVQESQWLLKLHTHGLLNNSFQPTAEIRVVRTYWRQRGEHVRGASTCIQRIQKVLTQMNVQLANVISDLSGLTGQAIVRAILAGERDPRKLAELSHPRIRAGREQIAKSLEGNWRSELLFVLKQEMEMYDTYQHKIAECDRELEATLKQFGVPERASTEQPKIPNAKKTKRIQRNAPGFNLTSELHRITGVDLSRIDGVNAIVAQTIISEVGLDMTRWKTEAHFASWLGLCPDNRISGDKVLARGTRHVINRAATALRMAATTLIKSQSYLGAQYRRLRTKLGAPKAITAMAHRLARLVFRMLKYGQEYVDKGTQYYEQKHREQQLHLLKKKAATLGFQVVETGVA

SEQ ID NO: 106798 - protein, 389 aa, unidentified
MYFIGIDISKYKHDCCIISAANQKVVSKVIIKNNKAGFNELLTIIHSLANPADIRIGFESTAHYALNLELFLENSLLTFMEVNPVLISEYKKSKTLRRTKTDSVDCESIARWLMTVEYKPHSKGFYHAYSLKSLTRLRDKLIRQRSFYLVKITNVLDHTFPEFKPFFNERLSKTALYLLENYGSAEKMARMNSASYEKLRSVSRGKFSPQQFLRLKELAVNTVSVNNSIFDVELNSLLSLYKSLVKEIDTIKKEINQLIEEVHPHYMSVPGIGPLSAAVIYSEYGDISNFTNPGQMLAFAGIEPGINESGTESHGGKMVKRGSSQLRYTLINCCLPLIRFDMTFATYYAKKRGEGKPHRVAITHVAKKLIRVIYALESQDIDFNAQELR

SEQ ID NO: 106799 - protein, 511 aa, unidentified
MPKVIHQRGNGSAKNPSPELVNNFAAAHSCGGEQLAAPKPRLDSPRPARARQRSPTSVAAPGPSAERTSPQEGSCIRLRRSRVPERLCTLTPVKPNWTEQNYFAALDWAKHHHDVIVVDRIGAIVADFQFPHTAEGWTQFEQQMQKFGKCPICLETSSGPAVDQLLQRDYVVYPINPKAAQRFRERKNPSGNKTDRHDAWSMADALRTDGHAWAQLIAQDEATAALRLLCRDENVLIEQRTALVNQLQAALAEYFPLALESFDDWTKPFAWAFIRSFPTAEALSKAGKRRWEKFLHAHKLWRPETAETRLQIWQRGQQLNASAPLSAAKGLLALSLVNVLQSLQKQIDEYRQRIRAAFESHPDHGVFGSLPGAKDKLAPRLLAELGSQREVFPDADSLSCRAGTSPVSFESGQLRKARIRWACNDFLRHTVHLWADQSRKTCLWAQLYYQTKRKSGHSHASALRCLGKRWLKVLWRMWQNRAPYDESIHLKSLHEHGSFVAKLLVGAPTQV

SEQ ID NO: 106800 - protein, 442 aa, unidentified
MEILYRCVGGVDVHKKQVTVTARTPGPLGGARQETTRTFRTFYGELLAMARWLVAERGVSHVAMESTGPYWWPVWSALREVGGPGLVVEVVNAAHVKAVPGRKTDVKDSQWLAQLMEVGLLRGSFLPPEQVRQLRDLTRYQTKLTEERSREKQRLLKVLEAAGIKLDNVASDTFGVSGRSMLEALVAGERDPAVLAGLARGVLRGKTDDLRLALAGRFTAHHGQLVALHLARIDHLDQMLAQVKQTIGRLGPDPAQGLAAPFATQIGLLVTIPGIGERAATAVISEIGVDMARFPTAKHLAAWAGLAPGNNESAGRRRSGRRRKGNAQVCSILVEAAFAASRTRSRIGARYHRLHRRFGGRANPGAARKAAFAVAHTLIKIIWSVLAGGEPYTDLGDDYYTRRVDPQTRTRSLIAQLEALSGKKVVFCEHGDDPGGGQPRAA

SEQ ID NO: 106801 - protein, 451 aa, unidentified
MSGTKKARRKRDISPTHPNAAAVDIGATLHVAAVGPDQDPEPVRSFGTFTGDLHRLADWFQQCGVRTVAMESTGVYWIPAFEILDQRGFEVILVNARDAKHVPGRKTDISDAQWLQRLHEYGLLRASFRLKGEVAVLRGYLRQRERLLDYAGSHIQHMQKALTQMNLQLHHVVTDITGTTGMAIIRAIVAGERDPAVLAAHRDPRCHASTETIRQALVGNDREEHIFALTQALELYDVYQAKMALCDVRIEAVLKRLRKASSSPAGKPPPVRTPKKQANAMAFDVRAALHGLLGCDVTQIHGLGPYLALKLVGECGTNLSAWPNAKHFTSWLCLAPSNKISGGKVLSSRTRRSGSRAAALLRLAAVAVGRTETALGAFYRRLSARVGKAKAVTATARKIAVLFYNTLRYGMEYSDPGASHYEERYRRRVLTNLERRAKSLGYVLQEASAPV

SEQ ID NO: 106802 - protein, 411 aa, unidentified
MYNAVGIDVSKGKSTVAVLQPAGVIIRKPFNVNHTSSELDELAKYIGSLEGETRVVLECTGRYHEPVVKTLSEAGLFVSAVNPHLIKNFGNNSIRKVKSDPADAKKIARYTLDNWIELRQYSSMDNTRTQLKTLNSQFSFFMKQKVAAKANLIALLDNTYPGVNKLFDSPVRDDGSEKWVDYAYSFWHVDCVRKIGLKTFTERYQAFCKKHHYNFQPAKPAELFLASKDLIAVFPKEASYKLLIQQSIQQLNLASSHVEELRSKMNELASTLPEYTTVMGMYGVGKTFGPQLIAEIGDISNFSHREALTAFAGVDPGVDQSGTHNSKSNKASKCGSNRLRKTLFQIMSTLLHGSKLVPKITIIKIIHFTIDFLLAGFNIPIFSNTFPPKGVTICPAPPVISPHSAAWPFIP

SEQ ID NO: 106803 - protein, 356 aa, unidentified
MQLHDTLTIPKIFIGLDIHKKSWTVSIQTDLFFHKTYSLPSVSEDLYQYVERTFTNHQVHLVYEAGCCGFSVARYFLNLGWNVLVVNPADVKTGDKERYQKTDALDSKNLSNQLKAGVLKGIYIPTEAQEQFMTLARHRTQITKKLRQTKSHIKSMLLFHGIKVPDQFDNSNWNNDFISWLEQLKFSTSCGNLALQGKIRLYKFIKSEYLEIANQMRLHCRKNNKKDYYLLKSIPGIGGYLASVIIAECGDLRRFNTEAQFSSYIGLVPGIYNSGDSEKCLGITPRSRSQLRSYLIEAAWVAIRKDIEMQQYYRKHQGKNVKSIIVKVAHKMARRILSVIKTETPYQINHNLVVEQ

SEQ ID NO: 106804 - protein, 455 aa, unidentified
MSLLYRRCAGMDVHKKSITVCVRVRGLRGRSETETACFGTFTQQLQEMVEWLKARQIRHVAMESTGVYWKPVWNVLESSAWKFDLLLVNPQQVRALPGKKTDREDSRRISRYLQQGLLRGSFVPPEATRQLRELTRRRTHLEGDRNRVINRIGRLLETANVKLGSVLSNIVGKSGRAILNAIAGGEKNPEVLASYTVGRVKCTPQELAQALEGRYDHHLRWLLRESLADLDALDRRVGAVELRIGELTAGQREVIGRLCTLPGVDVTTAYTLLAEIGTDMSRFPDAKHLASWAGLCPGNAESGGKRFSGRTRKGDRYLRRILIQNAWAVAHMKDCALTALFFRVAAHAGMKKAAMAVAHRILVLAYYILRDGVEYREAGGDYYDRKNPAQTVKRLTRRLERIGFEVALKPKKTGQQEGHRSAPPPDQTCKRCNAWGIACIHARPRPILKPKKVSD

SEQ ID NO: 106805 - protein, 322 aa, unidentified
MDDRVEIYGVDISKAFFDVVDQNYRHFKFGNNKNGFQDFAENLNENSLVVMEATGCYHYCLAQFLYENNFKVSVVNPLSIKRFIQMKLSKVKTDKSDAKAIYEYAQINRVPIYTGRSSIQAKCLQLLSLQDFYVKQRTAIKNKIQGEKSLGSPSEEVEISLKRTLNILNIEIKLLQDQLEILVNEIHNKQLSQLMSIPGIGIKTAMLLIVLTDGFTSFENSRQLCSYAGITPTIRQSGSSIKGRSRISKLGNPKLRNLLFLCSFSACKHNKPCKELYLRIVAKGKSKKLALIAVCNKLLKQAFAIARSNENYQEDYSGKILI

SEQ ID NO: 106806 - protein, 414 aa, unidentified
MEVLYPRCCGLDVHKSSITACALLREQGRIRTERRRFTTMTQELKSLAAWLRQLQVTHVAIESTGVYWKPVWNVLEGHFTIVLANAQHVKNVPGRKTDAKDSEWIAELLQHGLLRSSYVPPEIIRDLRDLTRGRATLSQEASRLASRIQKVLEDANIKLSSVASNTLGKSGRAMLDALVAGQIDPEQLADLALGHLRAKIPQLRLALEGKIREHHRFLWKRLWHPLRFIESEIDLLDQRLEGLGQQDPTLAAAVARGTTVPGVDRVAAGSLAAEIGIAMEQFPTAAHLASWAGLCPGNGESAGKRLSGQTRKGSPWLGRRACQCAWAAARTKNTYLSAQFRRLAAKRGRKRAIIAVAHSILAIAYYLQKKRCDYRDLGSGYFDRLHADGLKRYLVRRLEALGHKVTIEAVGNAA

SEQ ID NO: 106807 - protein, 416 aa, unidentified
MTFKIVRFICGGMDVHKNLIVATIGTTDKQTLTTEYIQQSFSTFYSDLIRLKEWFISHDCYDVCMESTGKYWIPIYNVLETELNICLTHPKYVKAIKGKKTDKRDSKWICNLYKCDLVKHSFIPEKEIREMREIARYRCKLVYMRSSERNRYQNCLTVSNISLASAVSDPFGKTATNIMKELMQSEVIEDDKILKLIHKNCKDKDKILDSLHGYHIESDQRFKMDTVMNHIEYLDKQIQACEAELIKRAYPLRDYFQHITHIKGISALSAILIVSEIGTDMNQFESDKQLVNWAGLSPANNESANKKKSVRISKAGQYLKPLLVQCALSSIKDKNSYFGIKYCRIKKRRGHKKAIIAIARMMLVCIYHMILTGEEFNPCDYESLTNPKPKKEPIMTVESALQFLKDSNFDFSSIQL

SEQ ID NO: 106808 - protein, 353 aa, unidentified
MNSSIKYVGMDVHKEMTVIVALDAAGIQLSRLIVRTNSTAILSAIRAIDGEVHLTFEEGIHSTWLYDLLKPYIAHLLVCNPNKIKKPLSQNKSDDIDAFNLANLLRLGDLKGVYHGEHSLRTLQELAHAYQYIVADCTRIKNRLTAIFRARAIAYRADALYRSQDRKQWLAKLEPAVQHRARLLFAQLDALLPMREKAEAEMVKEARKHPAFKLITSIPYLGEIRTALIIATMLTPFRFPSKRPLWCYSGFAVVMSSSADYEQVDGRIVKTSKRAYSRGLNHNFNRTLKYVFKSAANAANTGVFKQYYDGLRAKGMKDSLARLTLARKIAAVTLTLWKKGEKFNPEKFLMATK

SEQ ID NO: 106809 - protein, 315 aa, unidentified
MTKQLLPVNAGVDVSKDKLDLYLLERDLALSVPNNEQSIASLLKRLARYRLERIVVEATGRLEHAFVSAAIAKGLPVVVVPPLKVRRFAEAAGQLAKTDAIDARLIARFAAALKPTTRPVTDANSKLIKDLVVRRRQLTSLRTTEKNRRGVMPEALKPSIDRIIASLDREIASLEQLIQDAVEQHAAWRHKRDLLTSMPGIGPSVASTLIGDLPELGSLSRRQIAALTGVAPFNRDSGTFRGKRRIRGGRAHSRTALFLSAMVAIRYNPDIKRFYERLLQTGKHKKVALTACIRKIVTALNAMLRDDKPWHSSFA

SEQ ID NO: 106810 - protein, 343 aa, unidentified
MDQYVALDVSLQKTAVCVLNASGSVVIEAELPSEPAALTAFIRTHAPRAARVGLESGPTSPWLWHSLRAAGLPVVCMDARHAHAALSVRPSKSDRNDARGLAEMVRMGWYREVQVKSLAAHERMALLGVRRRLVDMRVEIDGQIRGILKTFGLVVGSGNKGAFAQRARMLVQDHPVLSALVDKLIEVRAVAVAKVAALDKEIRRFVRDDPTLRRFMTVPGVGPVTALAFRSTIDEPDRFKRARDVGPYLGLTPRRYQSGETDRQGRISKCGDRFTRTCLYEAANVLLTKVQRWSPLKAWGTRLARRIGSKKARVAIARKIAVILQCIWTDGTEFWWTKEPATA

SEQ ID NO: 106811 - protein, 326 aa, unidentified
MGAVVNQIPSSFASPLFVGIDVSGPFLDVAYHESSETFRLPNAPEGFAELIHRLLPLTPQLIVLEATGKLERAVLQALCQAGLPAVAVNSKWVRDFARSTGQLAKTDRLDARVIAHFGATIKPEIRPLTDEQTQQLQALILRRAQLIEMLTAEQNRRKRAHKSALPSIDEFIRFITQRIKDADRDIDAFLHANELWRKTEALLRSTPGIGKTTAAALIAFLPELGSLNARQIASLVGLAPFNSDSGAHRGERHIKGGRHIVRRALYMACVAAQRANPNIKAFCDRLRAKGKKTKVAFVAGMRKLLTQLNAMMRDRTPWNPPHHDHL

SEQ ID NO: 106812 - protein, 314 aa, unidentified
MGTAVEIFVGIDVSKAWLDVAVHEKEEAFRVSNDEVGIASLVQRLKKVKPALIVLEPTGGFEMLVAAELTQANLPAVVVNAKRVRDFARATGKLAKTDKLDARVLAHFAAAVRPPLRRLRSEEEEQLTALLTRRRQVVDMLTVEKNRLVTVRAKMRPAIEAHIRWLSENLKELDQEIEDFVESSPLWKEHDALLQSVPGVGRVTSGTLLAMLPELGKLNRQEIAALVGVAPLNKDSGKKQGKRRVYGGRADVRSVLYMAALAAKKYNPVIKKFYDRLIQHGKEKKVALTACMRKLLVILNAMIRSHQPWHPQAV

SEQ ID NO: 106813 - protein, 344 aa, unidentified
MTIIRIGLDTSKHVFHVHGVDGDEQPALRRRLRRSQVEKFFAKLPPTRIGLEACGASHHWARVLRSLGHEVVLIPPQYIKPYVKRGKNDAIDAEAICEAMSRPGMHFVPIKSRDEQAALMLLKVRDLLMKQRTMLTNAIRGHAAEFGVIATKGPQNLAELLERLGEDANVPAPARELLNSLAGQIAALEVRLEALEAKLKAHHKADPRSRLLATIPGVGPITALSLTLKVPDATVFRSGRHFAAWLGITPREHSTAGRQRLGKISRQGDEGLRQSLVLGATAVIQQVKRRFKAQRVSRTDSPWLLQLLARKPEKVAVVALANKMARIIWAMLVSGELYRQPQAV

SEQ ID NO: 106814 - protein, 338 aa, unidentified
METYSGIDLHSSNNYVGVINDKDQRLYRKRLPNRLDVVLAALEPFKDSLEGVVVESTFNWYWLVDGLMAHGYKVHLANPSAIKQYEGLKHTDDKWDSFWLAHMLRLNILPEGYIYPKEERPVRDLLRRRLLFVKHRTAHILSLQSMISRNLGIQMSCRAIKSFDEEAPETLFDSPHLLLAARSNIAVIHFLRERIKLIEKAVKSHIKLREEFKYLLTVPGIGHILTLTIMLEVGDINRFPQVGNYSSYCRCVKSERLSNGKKKDENNRKNGNRYLSWAYVEAANFARRFCPYAQAFYQRKMAKTNGIVAIKALSNKLARASYYIMRDQVPYDPKKLFS

SEQ ID NO: 106815 - protein, 360 aa, unidentified
MSELHSASPSSTVIIVGVDTHKFVHVAVAIDHLGTRLASCSVAVDRAGYAELLGWARALGRIEAIGIEGTGSYGVGLASYVRRQALRVVEVSHCDRRKRRNNGKSDTLDAESAARSVLAGVATAVPKSADGAAEMVRQIKVARDTAVKARSAAIIALKTLLVNAPCELRESLEPLTDRKLIDRCARLLPGVLDDTTASTKYALRALATRWLSLAGEIETHDEGLDAITMAAAPTLRQAFGIGSDSAAEMMIVAGDNPTRVRSEAAFAKLCGACPIPASSGVTHRHRLFRGGHRQANAALYRIVTVRMRWHQPTMDYVVRRTAQGLSKRDIIRCLKRFVAREIYHGLLGDHRARNAVTVAP

SEQ ID NO: 106816 - protein, 520 aa, unidentified
MATTRSRSRPSRRRTPISVGKPRGVLHPRVQQVGPEHFGIVCFDCHKPSSKFFLADFYGRHLIPPTVVEHNRPSLDAAVAQVRRAFDQHQLRDGVVAIERTGRYHRVVQRAFAAAGFETRILHPFVTKQYRQPVDPGNKTDDADLAAIHRATVTGCALLEATRDEAWTTLQLVIRHRRDLVCKGAALNCQIRDHLGAAVPGYADCFDQLWESPIPWHLLRHYATAAQLHAAGLTTLCQSLRQAGIRFQRRTVQTVLDWAEQAAPGDVAAGQHLRIALALYDDRQRKTQEILALEREIAGLLVRTPYVLLLSFPGINVVSAADYGGEMGPIEHYANCKSITGRAGLRPSRYQSNQVDYADGPLVRNCNRSLRAAILGIADNLILCNHHFQHLAMRWSAQGKDPRDIHIRVGQRFCRISFQMVAGRQVFRHPCIQGRHYILDKLNAFHREHDTPMPELLRDLQAAIGQLPPREYAAEARPLQEEMQRIQEGRRRGPQLLGDILPIVFARLGVSALPCGESGE

SEQ ID NO: 106817 - protein, 345 aa, unidentified
MIIGCDFHPSWQQIAWLDSETGETEERKLVHASGDATRFYQQLEAPVLIGMEATGNSQWFIELVQDLGHEIWIGDAAQIRASYVRKQKTDKRHAAHILKLVVEGRFPRLWTPDREQRDLRQLVLHRHKLVEIRSRVKNELQHLALNKGMQRKAKLWSQAGQKLLRELPLKPWAACRREDLLGLLTMLNQQIGTLDQAVQQAAEEHPQAKLLMTQPGVGPNTALAYVLTMGDVSRFPRGKQVASYLGLIPREESSGGRQKLGAISKQGNRLLRSLLVEAAQIAVRYDPGLRKQYLHRCHQKPKGVAKVVAERKLAVRLYWMLRTGKPYPEIVRIESSPRVALVGAS

SEQ ID NO: 106818 - protein, 392 aa, unidentified
MVVSVGIDVSKDKHDCFIVSSEGEVLADAFIIPNTMDGFHHLLQRIRHCTAPQDKIKVGLEATGHYSYNLLGFLLDNGLTTYVLNPLRTNLYRKSLSLRKTKTDRVDARTIASMLLSDVGLKPYTDTAYHNEELKSLTRYRFDKVKERAKLKSSIARLVCILFPELEKLVPSLHIASVYALLEEFPGAKQVANTHLTRLKALLETASNGHYKRDMALEIRNAAKNSIGSQMPAKSLELQHTIRLIRELDREIDEIEEQIQSIMDELHSPITTIPGLGFRMAAMILAEVGDFTRFDSPDKLLAYAGMSPSTYQSGQLKNCYPHMEKRGSRYLRYALYNATKYVCHWDPAFADYLAKKRAEGKHYNIAISHAAKKLVRLIFAMEKSRQPYCSAA

SEQ ID NO: 106819 - protein, 463 aa, unidentified
MSVRLGIDIACRAAHQASLADDQGRFAWAGRRFRTTPSDLTALWAMLPAGIDPADVLVIMEPTRNAWVPLAAWFRRRGARVVLVPPERSADLRRYYAKHAKSDRLDSQLLARLPMLHPDGLHAESGLGPGDALKRAAKLHSTLTHRRTQSLARLDAQLEILSPAWHGAIGAELGSRTVLKFLGAGYADPHVVRRLGRTRLTRFCYRHSRGAFGEPMADAILAAAAETLQLWAGNELDYPDLADDIAIEARLALQLTEEIKDLDERTALLLAQADPKAILTSAPGVAHITAAAILGRLGDPARFASLAGVRAFTGLVPTLDASGLTGRHGPPTKRGDAVLRQALFMAAGQARRIDPTLAAKYQRLMVSAGKHHNSALCHIATALLNRIVACWRTGQPYALRDVDGTPVTKEQARAIIAERYTVPKDLRAQRRTTAAGTGRRSKKSQSAPSTGPSTTNATTHPAA

SEQ ID NO: 106820 - protein, 338 aa, unidentified
MNLYVALDVSLEFAAVCVMDEEGELVLERKVASDPAAIAGLLFELPEHPCCVGLEAGPLSEWLARGLAQAGLDAVLMETRHVRAALSAMVAKTDRNDARGMAQLLRMGWFRPVHRKTMNAREQRALLAARSTLGRRLRDVENSVRGILRGFGIRVPRLPRGRWSDGVRGALQGNTVLRGVVEPLLAATQALRDQLAVVDKRARDAARQDAVCRRLMTMPGVAAIVALTYRAGVDQPERFKSSRQLGPCFGLTPRRYQSGETDRSGAISRAGDASVRVALFEAAHVMLTRSTHWSKLKAWAVAVAKRRGAKRAKVALARKIAVILHRMWIDGTEFRFVA

SEQ ID NO: 106821 - protein, 346 aa, unidentified
MSHKTAATVAHTIGIDTGKNTLHLIGLDDQGAIVLREKIARGRIAARLANVPRCLIGIEAGMATHYVARELSALGHDVKQVPPAYSKPFRQGHKNDFRDAYAVAEAVQRPSTRCVPVKTDDQLDLQALHRVRSRLVGQRTAVINQIRSFLLEHGIAVRQGLRFLRQQLPDILAKRSDVLSLRMIRIMEDLSGDWRRLEERIEHVTKEIEVLAHGSESCRQLMTVPGIGPLIASAMVAAIGNGAAFAKGRDFAAWLGLVPKQMSTGDRTILGRISKRGNRYLRTLLMQGARVILLRPANWAKHSFGPWLTAAANRLHHNVLATALANKLARIAWTVLMQARSYEARV

SEQ ID NO: 106822 - protein, 350 aa, unidentified
MNISHYIGFDVHKKSVSYCVKAADGKIIEEGRLRATRQVLREWAQKRQEPWHGAMEATLFSGWIYDALKPFAAELQMGNPSMMKAIGAAKKKNDQLDARKIADLVRCNLLPACYVAPVEMRELRRLLRYRNTVVAHAVRMKNKMSGLLMEVGVEYSKQQLHGKKYFTELMGQLEEVPESVKDMLRLSRSALEMFETTQRQLLNRLQKEPTLVKRLELLRSIGGVGEVTSLTWALEVCDPRRFPSIGDAVSYCGLTSALVSSADKQQRGPISKQRNAHLQTVLIEAAKLAPRWNKQLAELHERELKRGNRNRATLAVARKMVAYLLAVDRSGKPFEVRNSPTKEMEAEKVA

SEQ ID NO: 106823 - protein, 400 aa, unidentified
MLSIGIDVSKGKSTVCGMKPGGEIVYTPFEVQHTREGMSELVSLLRSSGEEVRAVLESTGSYHCPVVTALLENVIFVSVVNSLRMKRFCSQSIRKVKTDRIDAMQIALYGLAYWQELQPTKLPEDTYRELQLLARQYYQMTSLLIKAKVDFNAICDQVLPGMQELMSDHAGRHKLSDFVLRYCHTTHILEMGETRFRKDYCKWAEKKGYRNCERMAALIFATAQNGIPVLPNAPSTQIVITEAIRVLHTVEASRDAILTQMQALAKTLPEYSLVREMPCIGDTLAPRLIAEIGDVRRFHSKRALIAYAGIDAPPYQSGKFCANNRHISKRGNRYLRKTGYEVMQSYVMHKPANDPIFTFIEKKRGEGKSGKLAMVAGLNKFLRVYYGKVTELYRSLPAIE

SEQ ID NO: 106824 - protein, 438 aa, unidentified
MMDQVEPVSGESGASKPVESFGSLTHFGGFDWGASEHQFAMVDRQGNVLMNLRLNDDAQGWASLREAIAPYPHLGVAIETSTGAAVERLLELNVIVYPMSPKAAERFRDRKAPSGVKSDFLDAWCFSDALRSDGHGWRQLRPLDPLTAELRILCRDQISLIQQRTALVLQLKAALHEYYPIALEAFDDWTKQFAWEFVLQFPDPIRLLSASKHKWEKFLHAHKLYRPETAQKRLELFARAKEFASPSQAVTKAKSLLATSLARSLCTLEDQLEMYRQRIGELFENHPDRDCFGSLPGAGEKLAPRLLAELGNDRARFESHESLQLYAGTAPFTRQSGKSSVTRIRRFCNKTLRATVHHWANLSRTDCVWAESYYQQKKNSGMSHAAALRCLGHRWLKILWKMWQNRTTYDEALHTRNQIKHGSWVMALQASPASSTIS

SEQ ID NO: 106825 - protein, 391 aa, unidentified
MLAVVVSDVEVYGEYQFERRRFGSNPENLRLLAEWLLEQQVEEGVMESTAQYWKPVWGALERYWKPICQKREGAGQKSGTLHWAQAQSNHGRRGRKKDFPDAERLVKRLVANELIQSFVPDPEQRLWRTVSRRRYQLTRNRSRLHNRVESLLEEAHIKLSSVVTALLGVSARRMLTALAEGETNPATLARLADRRLRATPEQLSDALGACTELHPVYRELLKMMLEELPLIEKQIDQLDHEMANLLRSHQDAVERLAEVPGLGADSAQQIIAEVGPSAATFPSPQQLSSWVGVCPGDEESAGVNYSHRSPKGNRHMRRLLNQCANAAVKMKGSVFEIVYRRFVARLGHNQAIGAISHRLCRLIWLILHQGVRYEERAQRSANDRTTSAPPE

SEQ ID NO: 106826 - protein, 321 aa, unidentified
MAATDTQAAGERAVGIDVSATTLDVAVHGGRGWQAANAPGGIAALVAAVDALHPTVIVLEATGVYHQAVTSALAAAGLPVVVVNPRQVRDFARSTGQLAKTDRLDAAVLAQFAAVVRPTPRPLPDDALLELRALLERRRQLVEMLTAEKNRLAVARRSVRPSLQRVMRALERALAEADDDVGQWLRRSPVWQAQDALLRSVPGVGPQTARCLIAQLPELGRLTRREIAALVGVAPLARDSGSFRGRRTCWGGRAPVRAALYMAVISGIRCNPVLRACYQRLRAAGKPAKLALTACIRRLLTILNAMLKTQQRWQPAPATTA

SEQ ID NO: 106827 - protein, 351 aa, unidentified
MMIIGVDYHPGFQQIAFLVEETGEYGERRLDHSGGEAENFYRDLKARGISVRVGLETTGYSRWFERLLAELGFEVWIGDAAEIKTRRAKKQKTDRQDAQLLLKLLLEENFPRIWVPNPENRDLRQLLWHRHRLVQMRTRIMNQLQALAINENRYWKGKLWSEKGRAELEKLPLAFWASRRRQELLELLDRMNPTIEELTFAAEREAKKRPEALRLMTHPGVGPLTALAFVLIIGTPERFACAKQICNYVGLIPCEDASGGRQRLGHITKQGSSLLRFLLVEAAQAAVRCNVDWRRRYRHLAMRRQRNIAKVAMGRRLGARLYWMWRNGREYSPSLEFGSHAGKLGTGNGGQ

SEQ ID NO: 106828 - protein, 347 aa, unidentified
MAHIGVDLHQNSFTVCRLAANGSEAFETWQLCAADLDRFCLSLDADDEIAVEATGNSAWFREQVIACVGRVVVVNPRQFQVIRRSVKKTDRNDARALAFFLSKDMLPETRPKTVAQSELASVTHTRDLLVKQRTRLLNKIHALHNRHGIKLKKESLSSKRRLMALDIGRFSKLEQIELTVVRDQALSLSKSIAELDREIEQAAGDMDGYDGLVSIKGIGPRSAAVFLAGIGDVNDFESADKLAAYLGIVPRVNRSNETDNRGRITKRGNKLVRTTLVQCTLIAIRYSGYLNAYYRRIKDRRGAGKAIIATARKLLSIIYETLKNRWIFEDFTTFTRQQGPVPAGQPS

SEQ ID NO: 106829 - protein, 397 aa, unidentified
MSNFKVFVGIDISKESFSACAIHSPEEIIFEEKFPMDSHGFKAFIRKLSAFPKESILIGKESSGCYYVNLFVYLSQKNFNCVVLNPLIVKGVQSMEIRKTKTDRSDARRIAFALYTAQHSLPQKSFLSHEFRELARERERLSQQIARLKNDIEKALVVLFPELERRVNIYTEGILRLLEKYPSAWALKTAKTSDIEQILYSKRGRALSVTAQQIKQWAQDSIAQFFPIREILLQSKIKELFFLEEQLEVITEQLKRSCEEAALCQDIEILKSIKGIGDTTAMHFIAEIENINRFSSPKKLIAYCGVDPTVYESGKFKGSSRLSKRGNRHLRRVLWLMAVSVVMYNSYFREYFNRRRQQGLPYKKAILAVAHKLLRVIYAMLKKKTTFKVSHLPSPCM

SEQ ID NO: 106830 - protein, 417 aa, unidentified
MLFDAAGRPPAINLNQRNCMAPHHKRNSAKAKSVPPSLPTLHPHAAGIDVGARAIYVAVPPGSAPDPVRCFPTFTEDLHALRDWLKECGVTTVAMESTGVYWIPLFQILEAAGIEVCLVNARHCKNLPGRKTDVQDCQWLQQLHAVGLLRGSFRPADQVCAVRTILRHRDALVRGAGRCVSHLHKALTQMNIQLHHVISDLTGVTGQAILTAVLAGERDAQKLAALKDHRIKASRDVIAKSLRGDWRAEHLFTLKQTQALWLQHQSLIAECDAQIEAMLQTFDARVDVPAAPLPPAKAGNKKAQRNEPRFHAREECYRVLGVDLTAVPGFASPTVLVLLCELGPEFAAKFPTAKHFGSWLGLCPDNRITGGKIYSVRTREVKSRVAEALRLAAQSLWQARNYFGDLYRRWKARLGSP

SEQ ID NO: 106831 - protein, 365 aa, unidentified
MPTRKLQNSEDFQGQKFYVGIDVHKKSWAVTVRSLHLVVDHFTQPPSVTGLLSHLQRKFPGGEFYSTYEAGFSGTGVHEELCKLGIKNIVVHPGDIPRTDKETKNKTDIHDSRSLAFNLEKGNLHPIFIMSRQQQEFRALFRLRETKARDVARAINRLKSCLLYFGIDYSSIFEGYISARVITWLRKLHLTNEAGSFTLKKYIDDLVHQRNELGKITKALRNQAKKDYSLPYQCLLSVPGIGFITAIGLLAEIGDFNRFKAPGEYCSFLGLIPWQHSSGDSIQVKGIQPRCNKHLRPLLIEASWAAIRHEPSLLKYYRKHAVKNTRHAIIKVARRLALIAKGVAQKLRPYQSDYAEMCSLGIVVE

SEQ ID NO: 106832 - protein, 372 aa, unidentified
MKEHTSKKQDARKNNQKASKEPKEKFAFHVGMDLGDKNADVCVLDADGEVSEEFRLPMKGADFQAYFVTIPRSRVALEAGGQSRWAAEVIEKCGHKVYVSNTRKVPYIHQSDDKDDPGDAYKLAELVYLKPRLLHPIQHRSQEAQADLSWIRAQEALVESRTQLINTVRGISKAFGERLRKCSVEAFTVKLAKQIPAAIRGAVAPLLETIDHLNGRIHEYDEMEEHLARERYPKYWLLDQVNGVGVHTALAFMLTIGDPGRFEKSRQVGCFLGMRPKKQESGESKPQLGITKAGDIYLRKTLVNCAHYILGPHGKDSDLRRFGQRICERGGKNAKKRAVVAVARKLAVLLHRLWVTGEKYEPLRNSQKRVAA

SEQ ID NO: 106833 - protein, 378 aa, unidentified
MRTLGIDVGKDSFTIAAISPKGEVIAKLSCNLNSDGIESFKNFISPSDKIAVEASGPYSSIISAHIQNMGISPYLVNPLLAVRFKQASSLRKTKTDSLDAVWIAKLSQDHSPQPAQGYLKEGIRLLERQIETTSKQIACLKNSILQTLHSLFPELEREFDPFSKGILKLLSKFPSAQAIAQAPQEEITSCFPSKGRKIELKKLLKLARDSIGMSDPSREAVLKALIAQLLCLIDVREELKHKLEEEVERLYQQELELIKTVPGFGSLTSSSFIAEVGDISRFSSAKKLVAYAGLDPSVYQSGRFTAKSHISKRGNRHLRRILFICAQQAVRYSPTFKAYFLRLRARGKTYRQAMVATASKLLRVTYAVLSSRVFPNIV

SEQ ID NO: 106834 - protein, 357 aa, unidentified
MGKSIKNLSSVTVVGLDIAKNVFQVHGVDAKGATIMARSVRRGGLLKFFASLPPCLVGMEACSSAHHWGRALIELGHEVKLIPPAYVKPYVRRNKNDAVDAAAICEAVGRPAMRFVAVRSVENQAELMRHRARELLAGNRTRMLNALRGNLAEIGVVAAQGVQHAYGLKRLVADGFDDNGEIVVADGVRRALAPLVRQIDAIDEEIAAIDKEIEARVKADETARRLMTIPGVGPVTASAILATVRDTSAFASGREFAAFLGLTPRQSSTGGKQRLGRITKMGDRYLRKLLVVGACATLSHRKGHNDALRVWASSLLERKAVKYKFKLTAVALANKVARIVFALMTRGGEYDERSVAA

SEQ ID NO: 106835 - protein, 358 aa, unidentified
MAGKVTETAVVGGVDTHKDLHVAAVVDQNNKVLGTQFFSTTRQGYRQMLAWMTSFGALKRIGVECTGTYGSGLLRYLQNAGLDVLEVTAPDRMERRKRGKSDTIDAECAAHAAFSGIRTVTPKTRNGMIESLRVLKTCRKTAISARRVALQIIHSNIISAPDELREQLRNMTRMQLIRTQGSWRPDASEYRNVTNVYRISLKSLARRYLELHDEIADLDVMIAAIVDELAPELIKRNAIGYESASQLLITAGDNPQRLRSESGFAALCGVSPVPVSSGKTNRYRLNRGGDRAANSALHIIAIGRLRTDDKTKEYVARRVAEGHTKMEAIRCLKRYISREVYTLLRNQNRQINSIPITA

SEQ ID NO: 106836 - protein, 340 aa, unidentified
MVHVGVDLDKHSSQIAVLTEDGDIVQQRLANDVAGLEKFFGQLPPQSPIAIEASGTWWWLVDLLEQLGHRPVLSHPKQTKAIAAARLKNDRVDAERLALLLRGELLPTVWIPPAALREAREFVRHRIQLVWLRSVVRNRLQAMLARRNLQPTSGKSWLTQRGQRELRQLPLTEAPSQIREDCTALLPILDAQIRRLDAELVRRWGQDPRVQRLTTIPGIGPFIAIVLVLELGDIHRFASAKRVASYVGLTPRVRGSAGRVRAGHITKEGNRLLRWVLVLAATQAIRRPGPLRTWFHAVKKRRGKKVARVALARRLAEIVFHVWTAECDYFTVVRHGVVRG

SEQ ID NO: 106837 - protein, 335 aa, unidentified
MKKFDYYIGIDVSKLTLDVTLLHECVNTTKTEYYKIENNEKSISQFVKNKLGKYDLEQILFCFEDTGIYSMPLSYYLNDNELIYWQVPSVEIKRSKGIARGKDDKIDSKDIAFYAYTHKHKLRQGKVSATSIQQLRLLFTEREKVLKALALFEKTSENKKFISKEVFNAVACVNKPVINQLKKTLKSIEKKMLAIISMEEKLNQKYKLITSIPGVGMQTAIYILIATKGFDAFENWRQLACYAGVAPFPYQSGTSIRGRNKVHPLADKKLKSLLNMCAICAVRYDRELKEYYQRKVKDGKAKMLVINNVRAKLLARVFAVINRGTPFVNTCKFAA

SEQ ID NO: 106838 - protein, 343 aa, unidentified
MQTVTTIGLDIAKSVFQVHGVDANGQVVIRRQLKRRYILAFFQKVPPCLVGIEACASSHHWSRELQALGHTVRLMPPAYVKPYVKRHKNDATDAEAICEAVGRPNMRFVATKTPGQQSCLTLHRTRHLFIRQQTSVINAIRAHLAEFGIVAPVGRHGVEQLLQVVADKSDKRLPEVARTCVAALGAQLQTLKAKILEFDRLIMAWHRSSETSRRLDDIPGVGPALATALVASIADPNAFRSGRDFSAWIGVVPRQNSSGGKDRLGSISKRGDRYLRGLFVAGALAVIRYAKIYGTKHRPWLTALLARRPTKVAAIALANKIARMAWAMMAKGERYKEPVALAV

SEQ ID NO: 106839 - protein, 448 aa, unidentified
MSNGSGVSRGDRNRNARLARLREAVPVMNAIVGIDLADAKQMVVVTDHEWRVLARRTFRRRAWELGAALDWAAARAAAAGFTGVSVAVEPTGHRWRVAGQLAAERGMAFVCVQPLMSAWARRAEDLTFDKTDDKDAVLIARLAAQLRCYLPEPADETWGRLRHLGIRRARLVAGSVSQVQQMRDLPECVWPAVPGAARQPFKPTTWRAALTVAWERAEGDLGRVTVLGRRRFGAAVRRQVARWDAVHPWQKIIDAVFGACADPAGVPALRRGALERVALLLAGWRDTQARLAGTGTRMIAVLAELGLTGLVTSVTGLSTAGAASILAETGGPSRFTSGRALVKHAGLAPGEKNSGTCTGRSRTTGHGRPALRLAAWRAVWGALKSNPVYAARFTHLTSREHNQLSTGQAHAALAAALLRHLHAVITTGQRWDPAIAAGGRPGPALIAA

SEQ ID NO: 106840 - protein, 392 aa, unidentified
MVVSVGIDVSKDKHDCFIVSSEGEVLEDAFIIPNTMDGFHYLLQRIRHCTAPQDKIKVGLEATGHYSYNLLGFLLDNGLTTYVLNPLRTNLYRKSLSLRKTKTDRVDARTIASMLLSDAGLKPYTDTAYHNEELKSLTRYRFDKVKERAKLKSSIARLVCILFPELEKLVPSLHIASVYALLEEFPGAKQVANTHLTRLKALLETASKGHYKRDMALEIRDAARNSIGSRMPAKSLELQHTIRLIRELNREIDEIEEQIQSIMDELHSPITTIPGLGFRMAAMILAEVGDFTRFDSPDKLLAYAGMSPSTYQSGQLKNCYPHMEKRGSRYLRYALYNATKYVCHWDPAFADYLAKKRAEGKHYNVALSHAAKKLVRLIFAMEKSRQPYCSAA

SEQ ID NO: 106841 - protein, 316 aa, unidentified
MSDSTRLVVGIDVAKDSLEVATSASERWQVSNDPAGQEALRDRLRGEGVGLIVLEATGGYEVAVVAVLAHSGLPVVVVNPRQVRQFARSLGRLAKTDAIDAGVLVSFGVHVAPEVRPLPDEQTQLLEALLRRRRQLLGMIQAERNRLLLARGPVRTDLKQHIAFLVRRLKDIDRDLEGRLRASPVWREREKLLSAVPGVGRQMLLSVCAALPELGRVPSRQLAALVGVAPYNCDSGTLRGRRHCWGGRADVRGVLYMATLAATRCNPLIRPHYQRLLAAGKPKKVALVACMRKLLVIMNAMVRDGEPWNPQLTLAR

SEQ ID NO: 106842 - protein, 372 aa, unidentified
MNYNTVYVGMDVHKESFSLCSFTIEEDKASHAQKIESDYKQVLKYLDFLRTIYGNDANFVCGYEAGCLGFTLYHQLTDHHVNCVILAPTTMLQQRGKKKIKTDKRDTALIARCLAQHNYSPVHVPTAQDEEIKEYIRMRGDHKLALKKVKQQILAFCLRHNYRYDGNSHWTQAHMTWLKALQPSGLYQEILDEYLLTFDNLTDKLERLDKRIEELASKEEYQENVKKLSCFLGVKTQTALSTMVEVGDFKRFATADRFASYLGLVPGEDSSGDGQQRLGITKAGNTHVRRLLVEAAQSYSRGQIGFKSKELKSRQNGNSPQVIAYADKANERLRRRYYKMVLGQGKRCNVAKTAIARELACFIWGMMTDRIA

SEQ ID NO: 106843 - protein, 354 aa, unidentified
MKRDKYMGMDVHQATTVVVVIDSEARLVLETIVATEQAAIVRLLESISGPLQVTFEETTQAGWLYELVRAHVREVIVCDPRRNKLLTEGSKGDKPDARKLAELLRAGMLRSVYHGNHGTRTLKQLVRAHETLSGDCQRTMVRIKALYRGQGIGTSGRGVYQAKQREHWLRQLSEPGMKQRALWLFEQLDQLRLLRKQAKEAVLVEGRKHRAVKLLGTIPQLGPIRSAQIVAILDTPYRFRTKRQLWSYAGLAVVTHMSAEYEIRDGRVVRTRKPLATRGLNRNCNRGLKEVFISAATGGGHSEPYRSYIENLLKNGMREQMARLTLARKIAATALHIWKKGESFDPKKLNLATT

SEQ ID NO: 106844 - protein, 417 aa, unidentified
MNTENYAALVALDWGETEHAFAAQVGESPVETGTMPATPETLHGWLEELHKRVGGRPVALALEGGKSAVIHALVAHTWLVVYPVHPATSDRYRKAFVPSGAKDDVPDAIVLLKILSQHREHLRPLKLDSAETRKIAALVAARRKAVDERTRLACELGSILKTYYPQALELCGREPATALALDFLTRWPELRSLKAARRVTLIAFYTSHNSRRSEVIEERLAIIAKARALTEDRAVIEPASLQVRMLVDLLRPLQRNISLMDESIAEAFDAHPEAALFQGLPGAGPATAPRLLAAFGTDRSKYPDASSMQKCAGIAPVKQKSGRQLWIHWRWNASKFLRQTFVEWAGQSVPKCAWAKAYYLQQRAAGKRHQATLRALAFKWIRILWRCWRDRVPYDEGRYLASLRNQKSPLAARLAIT

SEQ ID NO: 106845 - protein, 376 aa, unidentified
MSEITRALIARVGVDLAKQVIQVHAVDATGRRVVARALKRDQFLAWCAQLPPGCLVAMEACASAHHWGRKLRALGLDARLIAANFVTPYRMEGKSGKNDMTDAAAICETASRPHMRFVAIKTAEQQGVMSLHRVREGLKEERTACINRIRGVLGEFGLVFRQSPKVLRAVLAEVIEDASNELPARARWVLTRAFEHWRELDEHLRWCDQQVGQHVRASPQAKRAAKIIGIGELGASAITASVGEFKQFRAAHQFSAWLGLVPRQNSSGGKTSLGRITKRGDDYLRTLLIQGAKSAVMSAAKRDDPTSRWLAALTARVGWQKACVAMANKNARILWAVMSREQGFDPQFVSVKPDAKKPAAQRAGNPAPPCPAACTA

SEQ ID NO: 106846 - protein, 408 aa, unidentified
MNAVGIDVSKGKSMVAALRPMGEVALLPQEFLHTEVGLEQMAYAIIALGEDTRVVMEATGRYHEPVAAALHEYGIYVSVLNPLFIKQSGGGSIRKVKTDKADAMKIAKYGLDNWVDLREYTPMDTVRQQLKLCSRQYNLYMKTVVSLQNNLISLTDKTFPGVNELFSSPERADGHQKWVDFVMTFWHCDCICRVSEKAFTERYQKWCKRKGYHFSTEKALDLYAGSCGHFTTLPKNDNIKLLITTAAQQLLAGKMTLAALRAEMTRLAMQLPEYDTVRAMYGVGQTTAAQLMAEIGDVRRFPRRSSIVGFAGVDPGVDDSGKHIAKSVPTTKRGSPHLRKTLYQIVCTYLRKAPADEPVYQFPDKKRAEGKPYFVYMTAAQNKFLRIYYARVKECLEAFDAQQDIAQS

SEQ ID NO: 106847 - protein, 339 aa, unidentified
MTEITRVGLDLAKNVFEVHAVNAQEQVVVRRSLRRSQVLTWFAKQPLCLIGIEACGTANHWARELTTLGHTVRLIPPAYAKQYVRRNKNDAADAAAICEAVSRPSMRFVPIKTVEQQADSVTHKARQILIKQRTMAMNSLRSLMAEFGIVVPPGPQHIGKLLAILADPEDTTVAAVARTALNTMSELLSTLEMQIGILDKDIRARARTDVTARRLDTIPGFGPILSSAIAAIVTDPRHFDSGRDFAASLGLVPRQDGTGGKVKLGPISKRGNGYLRRLLVNGATAVLNGKNARNDPWRAKMLDGKPRKLAAVALANKMARIAWAVMTRQQDFRPRAVPA

SEQ ID NO: 106848 - protein, 438 aa, unidentified
MSNKVIFNLDELFISVGIDVGADFSWMSIALPNQQFVGKPYKILHNSIDSLTTAVSKIKEAEELYSLESRIFLESTGIYHYPLFCYLRDKGFNCSVINPIITKNSTNINIRKVHNDRFDSKKAALVGLKPDLKVSLMPSDLALNCRNLCREYYDLMDNRSAYVNKLQGELRMAFPQYLGIFSKVTINTSLTLLETYTSPSAFLEADKQEIIDIIKSTARFGLTYAQNKYNALIQAATDANQFGYIIDSNIKRIRLYISFIRKYDEELNSILESLHELVDANEDADFVKQIHLIETFKGAGFLSAVSIMGEIGDFSAFSKPKQLFAYFGVDPAVKQSGKFEGTKVQMSKRGSAIARRVIHTLTLQSISISRNREAKNPVLREYYLKKCDSKPKLVAMGAVSHKVCNMIFAILRDNKPFKIIAPQEHIKQYNSAKCDIAA

SEQ ID NO: 106849 - protein, 409 aa, unidentified
MDTIVERCCGLDVHQAVIVASVLIGEPGKRVQKQTRSFRALTAGLSELQQWLREQGVTHVAMEATGIYWVPVYAHLEGQFELIVGNATHIKSVPGRKTDVKDSEWIADLARHGLIRKSFVPPKDLRELRDLVRYRMKLVQSRTAERNRLLRMLETANVKLSSVMTDVFGASGRAMLAAIVSDSYVPADVAQLARGLLRKKTDDLALALHGRVEKHQRFILRMQLTRLDQVEADLKEIDAEIDARLVPYRAQFDRLIEIPGVDRVTAATIIAELGIDMHVFPSHRHAAAWAGVCPGNHESAGRKKRAPARKGNVHLVTALVQAALCASRAKGTYLRSKYWKLVPRLGKKRAAMAVAHKILVAVYHMLAADVAYADLGEAYLDKRNAAASSKGLVKRLEGMGYKVTLEKAA

SEQ ID NO: 106850 - protein, 431 aa, unidentified
MTRPNPTPTTAVLVAIDVAKSRNEVLIEVPGNRRRRRLTVANTRTEHDRFIAELQALAPRPVIVGFEPTGHYHRPLAWRLVQAGFDARLISSVALARTREALHNGWDKNDPKDAQVILHMLQIGAAKPYHDPLANEINNIQELSVTHEVISRAKTEVQHRILTHYLPLYFPEIERFKGNTRSDWFFALLEQFPVPAAITALSKEAFVAAAWSVVGRKVSKSRLLGDIWETAHRSIALPVSPDAPAIEMFRVVLGEARRLIAQRDAIEEAAIDLLGDHSDFQRLQQVPGIGPIHALTILAEAGDLRRFRHHRQFLKFCGLDLSTYQSGQYRGKTKLSKRGNARLRRTLWMAAQVAIRQRENSFRDKFDRYVARDRHDPDLRRKASTAITAKMGRVVHAIIKRGDDYRPFVEGPVPGGGTPLYWCREGASATL

SEQ ID NO: 106851 - protein, 409 aa, unidentified
MDVTITRVAGLDVHQASVVATVRMPDGAGGRTMVTATFGTMPPDLVALRDWLQRYQVTHVALASTGVYWKPVYYMLEDGFTLLLINMLALKHVPGRKTDVKDSEWLAQLLECGLLRASFVPPPAIRELRDLTRYRTQQVRDRAQEVNRLCKVLEDAGLKLTTVMSDIMGASGRAMLTALLEGTTDPTLLADLARGRLRQKLPLLQRALAGQFRSHHAFLIRQILTKIDFLEETISQLTDEVDQRLRPFEPILAALDTIPGVDRIGAMTLVAETSADMTRFATAGHLCSWAAVCPGHNESAGKRRSGRTRQGNRYLRGALIQAGLGAMRTKDSALQAMYYRVKRQRGHKKAVVAVAHQILEIAYYLMRDGVTYRELGPDYFSARSKDRAVRRHVKQLEALGFHVTIEKAA

SEQ ID NO: 106852 - protein, 400 aa, unidentified
MGCTDHSAHLRAAVREEDSSLFMALELSKSVWLAAASAPGSEKISKYRVAAADVAALLALLTRLRAQAERYRGGPVQVVSIHEAGLDGFWVHRMLEANGVESHVVDAASIAVDRRSRRIKTDRIDVEKLLRTLMGWARGERRICSMVRPPNPADEDERRLTRERGTLVTERTRHVNRIKGLLATQGVFGFEPLHKNRRKRLEELQQWNGQPLPPRLKTELARELDRLELVMSQLAALEAERDQALQARRAAARNPTKAPSLGTTSAGEVGSQLLQLRAIGPEIASVLSLEAFYRHFNNRREVAAYSGLAPSPWKSGGIDVEQGISKAGNARLRTTMIQLAWLWVRHQPGSALSRWFHERVGDKRGKIKRIAIVAVARKLLVVLWRYVTQGVVPEGAALKA

SEQ ID NO: 106853 - protein, 449 aa, unidentified
MAKSKRRLKGIPIIHPGAAGIDIGSRFHVAAIPPDLSEQSVRTFQAFTSDLHAMADWLIQAGVTTVAMESTGVYWVPVYEILEDRGLEVILANARDARGVPGRKTDVNDAQWLQKLHACGLLRASFRPDRQISALRSYLRQRERHLDYCAAHIQHMQKALTFMNLQLHHVISDVTGVTGMKIIRSIVRGQRDPKQLATLRDARCKATEETICAALAGNYQPEHLFALEQAVLLYDFYQLRVHDCDEKIAAALDTLNQATTVPDIPLPKPRHKTRQPNALNFDVRVPLYQLTGTDLTQIHGIGPYLALRLISECGTDLSRWPSAKHFTSWLTLSPGSKISGGKVLSSYSRKTNNRITAHLRLAATTVGRTDTALGAFYRRLSARIGKAKAVTATARKIAVLFYNAMRYGMDYKDPGAGHYEQQYRKRVVKGLHRRAAEFGFTLHEIECVS

SEQ ID NO: 106854 - protein, 345 aa, unidentified
MNKVMAGIDLHSNNLVIGIMDMDGKRVASQKLSCKLKEVVGFLSPFKQRLEQVAVESTYNWYWLVDGLQALGYPVVLANPAGMEQYSGIKHADDTNDAFFLAELLRLKILPTGHIYDEQLRPVRDLLRRRMTLVHQRTALMLSFKSLYTRTTGQERSLGELKELAIKEAQDLYDHPANQLIAGMQIKHIEQLTGSIEKIEEAVLDCARELPFYSKLTTLPGVGTILGMTITMEVGEIKRFAEPGHFASYCRTVAAQRMSNHKKKGENNSKCGNKYLAWAFVEGANFARRYNEQCRKWYDRKAAKTSNLIATKALACKMAKAAWHVMAEGTDYDSKRMFGQAASRK

SEQ ID NO: 106855 - protein, 429 aa, unidentified
MNSTQNKKIEQVKETTMIVGIDVGSEKHYFRAFNWRGIELTRKPVAFSNSMEGFNSFYDTIVELMQKSELEEVLVGIEPTGHYWFDLGQFMGEKDIKFVMVNPHHVHKTKELDDNSPSKNDRKDPRVIAGLVRDGRYFYSYMPTGVYAELRNASNRRFVLVEEQTRAKNRLQKWIAVYFPEYKGIYTHIDAKGGLLVLKQAPTPEEIIKLGEEGIIKIWKDAKLRGNGHKKAMKILNAAMRSIGLKAGLTEARMEIQDLIEDYELQTKRLERVNDLIKELCQQIRYADKLLEIKGIGITTVAGFIAEVGDITRFDSTKELQKLAGLELVADSSGKHNGKTKISKRGRKRLRYLLFEAAISVVGKNEGFKEIHRYYTTREKNPLKKMQSLIAVACKLIRVFHVILTKGISYDASKMLKDIRYPGEQLKAA

SEQ ID NO: 106856 - protein, 387 aa, unidentified
MTALKDVSKLIPRDYEIFIGLDVDKKKMAVTCTDHGTLQRSLSLPNSAAQLLNYTRKHFPGQQVAFVYEAGPTGFGLYDELTAAQQLCLVVSPSMVPSAPRNRVKTNRLDSKKLSEGLRGGQLRGIHVPPQAYRELRHLVQLRDAQVAQLQATKCRIKSLLLYEGIPFPAANEKWSAAVLRQLEIIPCNASVRFKLDRLMDTLQFHFETAAKVQKEIRRFCNAEPGLKASIDFLTSLPGVGTITATHAVARLGDWRQINNVRQIAGFLGLVSSEHSTGEKENRGPITRIGDQRLRNKLIQCAWVAIRQDPELRAFYRQIYERQPKKVAARKAIVAVARKLTTRMYAVLKQQRPFVMRADSSIAPLTTEETAGLRERLATAQNDQSDS

SEQ ID NO: 106857 - protein, 352 aa, unidentified
MKVSTLGIDLAKNVFQLHGVGCNGQTVLKKKLTRDKFLPFLMQLEPCLIGMEACASSHHFARVLRQYGHEVKLIPPQYVKPYVKTNKTDAADAEAICEAVARPNMRFVQIKTAEQQAILVLHTERNILIRERTACANSMRAILAEFGIIMPRTLSQLYKKIPEILEEYDNELSPFVRCSVARQLEHLQGVEDQITLIEQELSRWAKTQPACQRVMKVPGVGLMTATYLVASVGNGQQFHSAKQFAAWLGLVPREFSSGGKQRLGRISKRGDRYFRYLLVHGARAVAAVIERHKDNMPWLYRLLNKKAYNVAVVAQANKTARILWSMLVHHTEYRTLSVFEIISNTDKAQEQK

SEQ ID NO: 106858 - protein, 428 aa, unidentified
MDEVNRNRLDEFRQLRQEVRHSEEYLIVGIDIAKDRHYAFFGTPTGKTLLRRLVFSNDHEGFRRLLEQAEALRVQHGLKKVVYGMEPTANYHKPLGEYLIGLGRTVVLVSGVTVARNRESLDGRWDKHDGKDSANVADLISQGKCLYYEHPSPELRGLRGLLSLKKRLKKQEHGYKVRIRNQLIAQYYPEMDREYERLGAEGLSVVRWCLPASEMAQLDVEPFIERVTSRRVRMEKRRRLEAVWEKAGESIGCDGVPGLDHEAKVMVEGLRQVREMVKETEDRIEELCKPFPEYHCILTIPGFGPDVSAKVLAAIGEPDRFQSGKQVLKMGGLDLSADRSGKNSDRAIPQISKRGKADLRYALYQAALIASLKNRDIMIYYTNKIRGREKEKGIQIKMRVKLAAKLLVIAWTLMKKKENFNPAYLNAE

SEQ ID NO: 106859 - protein, 264 aa, unidentified
MYVGLDVHKDFCQAAFLDNKGNIVKDRRFENTASGLAELARDTKNQHVVMESSTAAFNVYDSLVKTCDVKVAHPRKIRLIAEAKIKTDKLDARVLAQLLRAGMIPESYVPSQENRQARLIVRHRASLVSVRTQIKNKIFALLLKEGIQIPFKEKYGKKGMLFLKNTALGEAQRASLDSLLALLGELNKQIDDAEKRIEEHASNDAYAVLLKTHVGVGWTTALAVASEVCDIGRFSSHKKLCSYFGLVPSVYQSSSQAAQTEEAT

SEQ ID NO: 106860 - protein, 345 aa, unidentified
MTIVKTRAITGGVDTHADVHVAAALDPIGGLLGVREFPATVAGYAGLLGWLGGFGAIALVGIEGTGSYGAGLARHVTAAGIRVVEVDRSDRQDRRRQGKSDPLDAVSAARAAQSGRARGAPKGRDGAVEAIRALMVAKRSARSERVQTINQARALVVTGPDDLRTRFARHTAAGLVSGLASLRPRPGDVVGYATRIALRELGRRAEFLDAQLERLDEFIAPLVAARAPGLLALHGVGPDTAALLLVAAGDHPERLRSEAAWAHLCAVVPIPASSGKVTRHRLNPGGDRQANHALWRIVLTWMSAHPPTLIYVERRTKEGLSKKEIIRCLKRYVAREVYRHLRPAA

SEQ ID NO: 106861 - protein, 356 aa, unidentified
MTRSTPVQSYVGLDVYIGIDVHQRTYTVWAQVDRVKIKKWSMPASPSQLAQQLKKYFAGGLIHTVYEAGFSGYGLHRELQGQGIDTIVVHPAAVEVAAHDRVKTDKRDAQKLATQLEAGRLKGIRIPSPEQEQRRLLSRTRSQLVRNRARIKTQIRMKAHQFGLIAPEERREMSLRWVDDLLAMEISVEFNLVIRSLVAVWKSMTEQIQALERQLRHQANVDPTEATYRSAPAVGPMSARVLANELGDMSQFKNERQLFSYTGLTPRERSSGDTIRKGRITKQGNTHLRGILIEIAWRARGKDPDLARHYDQLSTRMGGKRAIVAIARKLIGRIRAAFRKGELYQTNYQGILAVTP

SEQ ID NO: 106862 - protein, 343 aa, unidentified
MQAVTTIGLDIAKSVFQVHGVDAEGKVLIRRKLKRRYVLAFFQKLPPCLVGIEACATSHHWSRELKALGHTVRLMPPAYVKPYVKRQKNDAADAEAICEAVTRANMRFVETKTPEQQSCLMLHRTRHLFIRQQTSVINAIRAHMAEFGIVAPVGRQGVEALLEVAADGGDNRVPEVARSCLAALGAQLRALKAQILEFDRRITAWHRSNETSRRLDAIPGVGPALATALVASVADPKAFRSGRNFSAWIGLVPKQHSSGGKDRLGSISKQGDRFLRSLFTAGALAVIRYAKIHGTKHRPWLTALLARRPTKVAAIALANKIARMAWAMMARGERYKEPVALAA

SEQ ID NO: 106863 - protein, 364 aa, unidentified
METVRFVGLDVHADSIAIAVAEPGRGEPGFLASIPNDCALLLKRLRRLGHVKCCYEAGPTGFGLQRMLAGEGIECAVVAPSLVPMRAGDRVKTDRRDAVRLARFLRSGDLTEIYVPDEATEAMRDLERARDDAKKAERTARHQLGKFLLRHGRRYGGKTKWTKGHIDWVQTQHFAHEAQQRVLEDYLRAVQDQGERVARLTASVVELVETWSLRPLVKALQALRGINVISGAVLAAELGDIRRFATAPKLMGYIGLVPSEHSSGEGRQLGGITRSGNGHVRRILVEAAWAYRFRPRLSRAIAERSAGVTPGVRSVAWRAQERLCAKYRRLTARGKNTQKTVTAIARELAGFVWAIAREPELLAK

SEQ ID NO: 106864 - protein, 356 aa, unidentified
MNNSNKLNFAGQPIYIGLDVHKKSWSVSILSQHCEHKTFTQPPEVDKLVSYLRRYFPGASYHSVYEAGYCGFWIHDQLQEKGIDCMVVNPADVPTKNKERRGKRDPVDCRKLARTLRSGEIEGIYVPSRSQLEDRSLIRTRMHMVRKQTRCKNQIKSMLLFYGIHLPEQLLNSHWSRPFIRWIESIRMQKASGDMALKIHLEELKHLRQIIASLNRAILALARTEQYQIPVRLLKTVPGISTLTAMTLLTELSDIARFPSLDEMSSYVGLIPDTHSSGEKEHVGEITQRRHRQLRGLLIEASWVAIRKDPVMLMAFAQYCKRMRKTRAIVKIARKLLNRIRYVLKNQAKYVPAVIE

SEQ ID NO: 106865 - protein, 342 aa, unidentified
MDYYAGIDVSLEYSSVCVVDANGKIIREGKVTSEPEALISWFSSLGHELSRIGLEAGPLSQWLFAAMREAGLAVELLETRHVRKAFEAMPVKSDRNDARGIAQLIRLGWFRAVHCKSMNAQEVRAVLTARKIVQTKLLDVENSLRGILRGFGLKVGKTTARSFAGRIQELVKGHPHLEAIGEALLSVRTVLLREFNAFEKRVRAMARSDARTRLLMSTPAVGPIVALTYASAIDDPARFKSSKQAGAHFGLTPKKYQSGETDYSGRISKIGDASVREALYQAAHVMLTKPVKGCPQLKSWAMRIARRTGRSKAKVALARKLAVILHRMLANGTPFNTAAAAA

SEQ ID NO: 106866 - protein, 320 aa, unidentified
MAEITNLTHIGIDVSKDWLDIVVLPSGETFRIENTEEQMSVLIGKLESLKPERIVLEATGGYERLVTSRLYLAGLPVCRVNPKRVRYFARSLGQLAKNDKLDAKVLARFGEVVKPALTQLPSEHEQRLSALLTRREQLSAILVAEKNRLGTASAHVRPSLDEHVTWLKKQLKHLDKEVDAFITATPDLKEKDDFLQEVQGIGKKTAAKLIADVPELGACDRKQIAALIGTAPYDHDSGYKKGQRAIGGGRPDVRKVLYMATLAATRFNPVIKAFYQRLLTAGKKKKVALVACMRKLLTILNAILRDRKPWNPTRACPAVP

SEQ ID NO: 106867 - protein, 331 aa, unidentified
MMAASRSKQGKVAMLPKDLTAFFQRVAPARLIMEVGGQSPWVSRLAQAAGLEVIVANPRRVQLITRNERKNDRTDAELLARLGRVDPQLLSPVTHRSVECQADLALKRARDVAVASRTALINHVRGAIKSFGQRLPTCSADGFHKRVLTQLPAELVPALQPIVRLIGQITDEIKCFDARIEQLADERYPATKLLRQVSGVGPVTALSFVLTLDTPSRVLDSRQVGPYLGLVPRTHDSGASAPQLRITKSGDPALRRLLVIAANYILGPFGPDCDLRRFGLKLAAQGGKNGRKRAKVAVARKLAVLLHHLWKTGEVYDPFHLAKKRGELMPA

SEQ ID NO: 106868 - protein, 342 aa, unidentified
MQVTTIGLDLAKNVFQVHGVDAEGGGVVRKKLRRVDVLAFFSALPPCLIGMEACASAHHWARELTRLGHEVKLMPPSYVKPYVKRGKNDAADAEAICEAVTRPSMRFVPAKSAEQQSAVMLHRSRDLLIRQRTMLANALRGHLAELGIVAAQGLRKLPALIEILLDETDRRIPAMARQVLGVLVTQLQDLQIRIKALERALLAWHRTSRASRRLETIPGIGFITATAIAATVTDPTHFKSGRQFAAWLGLVLRQNSTGGKERLGRISKMGDRYIRRLLVIGATALIRFARNRSTPLTAWADALLARRPARLVSVALANKMARIAWAVLLRGEAYRAPVAATA

SEQ ID NO: 106869 - protein, 379 aa, unidentified
MNAITLHLGLDVHKDSITLAIAEGKPQGEIRLFGTITNDLHAVERALTRIRKAHPGASLEVAYEAGPCGFGLARRLQQLDVPCLVAAPSLIPKRPGSPFKTDPRDACSLARLLRAGELTAVYIPEPTDEAIRDLCRARTDAVDDLRRCRQRLKSFLLRHGYRYQGKANWSQPHLRYLRELVLPHPAMKTILEEFLQGIDAAHQRVQRIEASLVSLLETWRLKPAVHALRAFRGFQLVAAMITVSELGDIHRFAHPRQLMTCLGLVSVEHSSGPHQHLGAISRCGNSHARWLLTECAEHYARPPKISKELSRRQEGQPPDVRALSWKAQHRLHLRFTRLLARRLPRNKAKVAVARELCGFIWALLRTQPCYRLATGGAAS

SEQ ID NO: 106870 - protein, 360 aa, unidentified
MKIQRTSVGLDVHARSVVACALDGDTGEVFQRRLTPDHAEIVAWLGDLPGPVAVTYEAGPTGFGLARALTAAGIACEVAAPSKLIRPSGERVKTDTRDAAHLARLLHLGQITAVTVPTATQEAARDLVRAREDCRGDLMTARHRVSKLLLRQGIVYSGGKAWTRDHERWLRTQRFDDQALQLSYEAAFDATLACLDRRNRLDDAITALAAASEFTPVVHRLGCIRGVATLTAFGLAVEIGDWHRLTGRSIGAYVGLVPCEYSSGDSRSQGGVTKTGNGHVRRLLVEAAWHHRNRYQPGAELRRRWDLASPAARARGQAANRRLHTRWSAFDARKKRPVVANVAIARELAGWCWSLAVMPD

SEQ ID NO: 106871 - protein, 429 aa, unidentified
MNYTQNEKIEQVTDTTMVVGVDIGSQTHYARAFDNRGRELTKRVFSFQNDIEGFNSFHLWIEKLKNENKKTAVLIGCEPTGHYWFAFAKYVQDHQKTLVMVNPFSVKKIKELDDNSPKKTDAKDPKTIAKLVVDGRYSIPYMPEGIYAEIRDLVYSRDRIMKQHNISANRIQRWLAIHFPEYLGLYTRFDATSGLAVLEQAPLPKDVIALGVEGIRKIWHDKKMRGRGVTEDRAKTLVEAAHNSVGLDGGIGTKSELYMLLEEHLLWTSQLEAVNKVLEESIRKVQHVEKLLAIKGVGSVTIAGFIAEVGDIRRFKSPKQIQKYAGLEIVENSSGKHKGRSRISKRGRRKLRKSLYQVMVPLLARNKEFRTIYDYYVTRVKNPLKRRQAMIAVSCKLIRVFYAVLTKGVDYDRFKMMSDIHHESGLIAA

SEQ ID NO: 106872 - protein, 344 aa, unidentified
MNQIIRIGMDTSKHFFQLHGVDSAERPVLRRKLRRNQVLVFFAELPPTVVGMEACGAGHYWTRELRKLGHEVKLMAPQHVKAYVKRNKNDGRDAEGLCEAMSRPTMQFVPMKTEEQQAALMLVGVRQQLIARRTQLSNAIRGYAAEFGLTGAKGLGKIEPLLAQVAQDESVPALARELFAMEGHEYSQLQVELKAIELKLMAWHRANADSRRLAEIPGIGLIGATALVMKTPDPRAFPSGRRFAAWLGLTPKDHSTAGKTRLGKITRAGDEMLRSVLVAGATAVIQQAKNGRGRPSPWLAALLKRKPPKLAAVALANKIARIAWKLMATGESYDGARMPNALAA

SEQ ID NO: 106873 - protein, 402 aa, unidentified
MNAVGIDVSKSKSVVAIMRPFGEIVSTPFEIKHTASDIHSLIELINSVEGESRIVMEHTGRYYEVLAHQLLEANLFVSAINPKLIKDFDNDSLRKVKSDKADAVKIARYALDKWQNLKQYNVMNELRNQLKTMNRQFGFYMKHKTAMKNNLIGILDQTYPGVNTYFDSPARSDGSQKWVDFASTYWHVDCVRKMSLNAFIDHYQNWCKRKKYNFSQSKAEEIYGKAKELVPVLPKDAITKLIIKQAVDQLNSASTTVESLRTLMNETASKLPEYPVVMAMKGVGTSLGPQLMAEIGDVSRFTHKSAITAFAGVDPGVNESGSYEQKSVPTSKRGSSDLRKTLFQVMDVLIKTHPQDDPVYQFLDKKRAQGKPYYVYMTAGANKFLRIYYGRVKEYLASLPES

SEQ ID NO: 106874 - protein, 353 aa, unidentified
MDKYIGFDIDSKKVSVCVIESGKQDLYATIGPDIGSMQRFLDSLKQSGSPLYLAYEVSGYSGYLHDCLSPHVDRITVANPTKTTWIYRTAKKTDRIDARKLAVLLSIGELPTVYVPNKEVRQWRQTILHRRNLVKEICRIKNRIRAVLKSVGHFKAGHKGGWWKKANTHWMELLASGAELWQMQLEQLLAEYGFLNQQLEKVTSRLDVYLTSKPGAKLIMSIPGIGPRTAEAVLAYTDQVNRFDGSREYCSYFGVVPKLDESGDCRRVGHITKHGPSVVRWLLCEAAWKSIRKSPSLKRFYERVMHGDVKRKKKAIVAVCRKLLSIMRAMLTTGEMFNEGLVLRRDDSLEHAA

SEQ ID NO: 106875 - protein, 376 aa, unidentified
MSKLRFVGLDVHAETIAVAVAELGGEVRAHGVIPNRLESIRKLVHKLGPVEHLRACYEAGPTGYVLYWQLTQLGIACEVIAPSLVPTKAGDRVKTDRRDAEKLARCYRAGELTAVWVPDAAHEALRDLVRAREAAKKDQLKARHRLGKFLLRHGRRPEGLKAWTKQYLEWVKTRVHFDQPALEVTLADYLEEVDHVAARLLRLEKAIDEAVQKAPPEIRTVIEALQALRGVAQTTAATIVSELGSLSRFQSPRQLMGYSGLVAREHSSGNRVQRGGITKTGNSHLRRVLVEAAWAYQHRPNVTGFLLRRQKHLALNEEVKKIAWKAQQRLHKRYRGFAARGKNKNQIVTALGRELLGFIWAIALEAEKQHRLAQAA

SEQ ID NO: 106876 - protein, 323 aa, unidentified
MNHKVGNDNTVARFIGIDVSKQWLDVACLPERETRRFGNDCAGLEQLCAWIVPLAPELIVMEATGGFETNVATALAARGLALAVVNPKHVRDFARAFGILAKTDRIDALVLAGFAQKVHPPVRPLPDEERRELIDLVDRRRQLVTMRAEEKTRLTQATPAARQDIKEHIEWLNERLRRLDIDLTAKLRSSSLWKTKEQILTSAPGVGRVTVATLVARLPELGTLNRRAIAALTGVAPFARDSGQHRGRRMIWGGRADVRNVLYMATVTAARINPVIRSFYLRLKQAGKPAKVALTACMRKLLTILNTMVRNNQPWQIPPTQTI

SEQ ID NO: 106877 - protein, 465 aa, unidentified
MMKTPKSKSRSHQPRANETSDLRPINPNAAGIDIGSEFHWVSVPKDRASESVRRFGCYTADLYALADWLAVCGVKTVAMESTGVYWIALFQILETKGFEVKLVNAHHVKTLPGRKTDILDCQWLQQLHSYGLLSGSFRPEDQICVLRSYIRHRDSLIKSACVHIQRMQKALTQMNVQLHKVVSDITGTTGMAIIRAIVEGERDPQILAAKKHHRAKRSEAEIAAALNGDYRSEHVFVLQQELQLYDVYQTHIAACDRQIQECLSQFSEKVNLNEFPLPQPKHIRHKPQGNEPAFDLRTHLYRISGVDFTAIDGLGILTVQTIISEVGLDPSRFPTVKHFTSWLGLCPCNRITGGKVKSSQTRLVVNPATNAFRMAAQTAGKSNSALGAFYRRLRSRLGTPKAITATAHKLARIFYRLWTTGGNYQDIGMDYYEQRYQERVINNLQKKALALGFELVPQPQANTVS

SEQ ID NO: 106878 - protein, 456 aa, unidentified
MKELQMCVGIDLARRSEHKAVVVRRDGSAPKKAFAFSHDLDGFRSLCDYIGRQTGTGSVEGVTVNFEPTGGVWETLGLFLKKQGADVYFTRPDVVSQMRKVHSRFAKSDRIDAYALARIAFSFPDRLIPLVEIESRVRALRSLSAQRRRIVDNTSQWKNRLTSKLEVVWATMLAKLDKDQRFCGLARAFFVKFVDPRSVTRYGRQRFYTWCGKTAHGNTDPQLFDTLWHGACKVAALWKELESSGAMHVDWETLGEMIKQDLRMIESFEKEINLLDQRIREARRQTPECDVVQQLPGFGNVVSVTVASTLMPVERFGNSKKCGAFTGYTSRQKASAGRQIDGLKITKTGNCRLKRDLALAADRAMRCDPELAAFAIRLLNAGKHYNKVRVAVGRKLAERAYSLLKRFARSETHVRYIWRDLQGHSVTKKEAADIARKLWADYNARKKQKGNPPTAA

SEQ ID NO: 106879 - protein, 369 aa, unidentified
MSNGPVYAGIDVSKAHLDVATTASSDGWRVTNDPTGIEELVGRLRQIAPELVVMEATGGFEVPAAVALAAADLAVVIANPRQVRDFAKSTGQLAKTDAMDASILALFAERVRPPVRPLPDAEARALDAVVGRRRQIIDMITAEKNRLGFAQPAVQKGIKKHIRWLERQLADIDNDLDQLIRSSPVWNAKNDLLRDVPGVGPNLARTLIAELPELGSLSHKQIAALVGVAPLARDSGAFRGKRMVWGGRAPVRCALYLSIWSASKWNPVIRVFYQRLRARGKPPKVAQVACMRKLLTILNAILRDGRRWDPEIPLQQLQLQHSCQRIGILLRDQLADAGSRGASRVTQDPLRFPRQQQFHVGLRPPMALH

SEQ ID NO: 106880 - protein, 345 aa, unidentified
MLNCNVIAIDLAKNLFQVCKTDKNGKVIFNKLFTRAKLKALLTKEKKSLVAMGSCGGTHYWARMAKKVGHQVKSINARKVKAFRQGQKTDANDALAISVAARQPHIKESRLLSTQEQCLQSIESMRDLLVKQKVSLGNQLRGLLLELGHAIAQSDAKLRQAIPEILEDAENELTHSFRFSIDIIYQRFIDTIDEVKLIEDKLAEVIKQDKTCQRFQALEGVGPVCAILMKVALGNATHFKNGREAAACFGLTPVQHSSGGKEKIGSISKVVGNKKLRSALYKGALAVVSQLEKREVRSQKEVWLKGLTARRGKKVAAIALANKTVRTAFALLKHDQVYQPQLLVA

SEQ ID NO: 106881 - protein, 362 aa, unidentified
MPPHRLEDEGMTMTTLTRSITGGVDTHLDVHIAAALDERGTLLGVESFATNLRGYRQLLTWLESFGEVELVGVEGTGSYGAGLTRHLHDAKVRVVEIDRPNRQRRRRRGKSDPEDAVAAARAAKAGEANGEAKTRDGNVEAMRVMRVARSSARRARTQALNQMRSLISTAPEPIREELRYLNVYRLLEHCVAYRPAEKRDLVSITKRTLKMLAERSVSLEEEIGELDAVLKPLVRVTAPELIACSGVGTDVASALLVAAGDNPERLRNEATFAHLCGVSPIDASSGKHERHRLNRSGDRNANSALWHIVITRVVCDPRTRHYIERRMKEGLTKKEAVRCLKRYVAREVFNLLPRRHFAIDSP

SEQ ID NO: 106882 - protein, 389 aa, unidentified
MFFVGIDVSKFKHDCIILNDSGNVVTDSFTVHNNAIGFATLLNALSSFSKETLKIGFEATGHYGCNLKSFLQKNGYSFVEINPLLIHNFAKQNSLRRTKTDSGDAKTIARFLMKDNSPCANIAPYDISELKTLCRFRFSLKNQRKILLLRMNNVLDKIFPEFYSLFKNKLSATALFILSHYGSVQSIANLSTRSYEVIRQVSKNTFSLPNFIRLKQLAKDSVGIHSETLEYELKTVLSLISDISEKIEDLEKMITNIVTEINPPTLSIVGVGPLSAACIISEYGDIKRFSSSNAMLSFAGLEPSVFQSGAFTASSAHMVKHGSSYLRYAIVNCCRTLRLHNEVFASYYLKKINEGKSFNTALIHLAKKLIRLIFALESKGEPFDPAKQR

SEQ ID NO: 106883 - protein, 439 aa, unidentified
MNHQRLQTQREALAGKIVIGIDPAKDKHQAAVVDAHGNQRGSSFSFPVSATGYSETLWRNMAKVVPNCNVQNVVFAIETACNLWETLAFYLRSRGYTVVLVSPLSTHHSRPIMSMEFSRTDPKDAYLVATVAQRGAYHAYEQFPPESHAMHLLAITYDKLRKNRAQNRARIRSLLDRVFPEFPRILDIDTDTAVYLLRKYLFPDEFLAMDIRSETKTIEQISRRQCGRATLEKLQAAARTTIGIVRQSDERLADRLALDAYLALIDTLERHMHRVLEELIVRAKQLPQYERINSLSGAGPKLTALFLGEVQDLSRFTHYRHLEKLAGLNLRLYDSGRYSGTRHISSIGNNRLRWIIYKMTEETAKRVPEVRIKYLRRQLKRRKHVKNVVAAVPQLLQLIIAMEKHHHTYTQRAEAVAAMHELEEHYNALKASSHKRTAA

SEQ ID NO: 106884 - protein, 355 aa, unidentified
MKQGTQLDFSGQTIFVGMDVHKRSWKVSIRSEHMELKTFSQEPSAKTLINHLKHNYPSATYKAVYEAGFCGFGYQRELSEAGINCIIVHPADVPTTDKEKQRKSDTVDCRKLGKTLSEGSLEGIFVPGIEQQDDRGVIRVYQQMIKDQTRFKNRIKGWLNFQGIIIPGNDDYKYWSNNFTKWLKGLSLTPSARITLDVLIQGYEQARALVLTATRQVRALSRQDRYIEKIKLIRSIPGIGQISALLFATEIGDMNRFKELDQLCDYVGLVPKIHGSGDKEAVLGLTHRGHHQLRETLIEASWTATRLDPAMTMFYNDCLKRMKKNRAIIKVARKMLNRIRFVMKNQREYVSAVLK

SEQ ID NO: 106885 - protein, 409 aa, unidentified
MERQLERCCGLDVHKESIAACVRLGGRTGKAEQYVQTFGTTVAELLVLHDWLAAHGVTHVAMESTGVFWKPVFYALESDFTCLLVNAAHIKQVPGRKTDVQDCVWIAQLLEHGLLRGSFVPPAPNRDLRDLTRYRKALIHDRTRVANRLHKALEEAGIKLASVASDILGVSGRAMLAALVQGTTDPAVLADLARASLRRKLPALRQALANRFRPHHAFVLGQLLAHLDYLEEAITTISTEIERVMAPFAEPLRRLDTIPGINQRTAEVILAEMGPDMSAFPSARHLASWAALCPGQHESAGKHKSGKTRKGNRWLRTALIEAAAGASRAKNSALQARFRRVLRHRGPKKAVVAVAHALLRMVYHVLADGTVYREAGADYYDRHHSQRITRRALQTLERQGYRVTLEPPA

SEQ ID NO: 106886 - protein, 401 aa, unidentified
MLHSLLIAPAAREEVATLFVGFELSKKTWLIGLYAPELGKTISRHKVDGGDVNTALRLIATAKLRLEKLGRPVRVVSVYEAGYDGFWLHRRLTAARIENRVIDAASIPVDRRSRGAKTDRIDLELLIRMLLALERGETRICRVVQVPSPEEEDAKRQHRERATLVAERTGHSNRITGILMALGIRDVHPRRRDFVARLEKLVTATGEPLPAHTKRALVREHERLCVVERQVKEIEAAQATAMRAAAAKLLCEKQEEAREADAAERSAAQAAALVRFKGIGQVSAVPLCREVFYRRFDNRRELGGYVGLAPSPYNSGAKQVDQGISKAGNRHARTLAIEIAWLWVRHQPDTALTRWFVKRVGDAKGRIRRIAIVALARKLMVALWRYLTTGLIPEGAVMTEA

SEQ ID NO: 106887 - protein, 337 aa, unidentified
MQVSLIGIDLAKNILQVAGVNRAGRQIFNKTIKRNKLLDNLHQYPGCIIAMEACSGSNYWGRTLEAQGFEVRLIPPIHVKPFVKGNKNDRNDAFAITEAAIRPHMQFVKPRTLEQTNAFMLHKVRERWLHQKVALTNQLRGLLTEYGIVIGLGDSVLRAQLSDILEDADNGLSLSTRSLIQTIWQEWSETEERLAGLNKQMQISAKQDADCQRLMGIKGVSTITATAIKAFAGDGKQFKNGRHFSANLGLVPKEHSSGGKQSLGGITKRGNGYIRRLLIQGAWSVLRYAEGSDDKLSKWALKVFERRGKHKAVVAIANKMARICWSLLANQTEYRAV

SEQ ID NO: 106888 - protein, 427 aa, unidentified
MSGIENGGQEPEFAAFVGIDWADQKHVWCLQGQHSTKRESGELEHTPEAVEAWVAQLCQRFGNRPIAVALEQSRGSLVFMLAKYEPLHLFPVPSTMSASMRKALYPSGSKDDPRDADVLLDLLLQHRNKLRRLSPDTEATRRIQNLVEERRKLVDEKTEHTNRLASHLKIYFPQMLNWFEHLDTELVCALLERWPTLEELQKVPPSKLRKFLGKHHCRNQELTEWRILAIRQSIPAIRDRAVIEAKSAAVKVIVQLIRILLEGIADLDERIEEAAAVHPDFFIFKSLPGAGPALAPRLLAAFGSQRERYRNAGEVQTYSGIAPVMEKSGKKQWIHFRWACPKFLRQSFHEWAGHSIGYSVWARAYYRQQRGKGVDHHGAVRALAFKWIRIVFRCWKERVAYDESKYLAALTRRGSPLVAVVAIAKAL

SEQ ID NO: 106889 - protein, 414 aa, unidentified
MEIVHSRCAGMDVSKRDAKVCVRVAGAGRRKTLETVRTWGSTTKSVLALREYLIAEQVSLVVMEATGDYWKPFYYLLEDADFEVMLVNARQVKNLPGRKSDVSDAAWLAQLGAHGLVRGSFVPPAPIRQLRDLTRARTAMIRERGREIQRLEKLLEDAGIKLSSVASDITGVSGRLMLQALIDGQHDPAAVADLAKRRLRAKIPDLTEALTGRFSEHHAFLAGIYLDAIDQRSQQIADLTGRIEVVIEPFRCFCDLIDTIPGIGERCAEVIVAETGADMSIFPTAAHLASWAGTCPGSNESAGRVKSTATRPGNPYLKAALGAAALSIANTHGTYLATKYRRIAARRGPKKALVAIEHTILVAIWTMAHTGALYDDPGADYYTRRDPERTRRNAVNQLQRLGYQVTLTPAAASA

SEQ ID NO: 106890 - protein, 445 aa, unidentified
MNAVGIDVSKGKSTVCIRQPGEIVLAKPFDVRHNAASLQSLAERIRELSGESRIVMEHTGRYYEAVAKVLHEQGLFVSAVNPVLITNYGEYKVHGVKTDSADADKIARFALDRWGLLREYSGMDSIRYDLKTLNRQFQLASKQRTAFSNNLVDLLEQTFPTLRKLFESPVRADGTQKWVDFAEAFWHVDCVRKLGLNAFTEKYLKWCRKHSYNFSAEKAALIHVTAKELVVLVSNAEINKFMIQQAAKQLTFISQSVECYRAQMLKLASQLPEFPAVMTMFGTGNSLGPQLMAEIGDVRRFKDKHSLAAFAGIDPTRNDSGQKNSRKNRTTKRGSPYLRRTLFLIMTVLIQKSPAEDPVYQFLCKKRTEGKEYYVYMTAAANKFLRCYYGKVREYLKEQNLWDTLPIESMNEITPDVADEPDSDIEGDPFSAAANALMIDSVNPV

SEQ ID NO: 106891 - protein, 327 aa, unidentified
MNTLPSSILSIDISKDHLDTDGWPVTWRQHLPNSSAGIARLIRKAQALQAFVIFEATSVYDRALMAALEAAGLAYHRANPRKAREFAKASGFLAKTDRVDALMLAEYARRIPLRVSEPACPLRQALNRLLDRRDQLVTLRKQELTRLKQVSDEAILAEMKALISVIAARIANYEAQIKAHLKAHPELEEEAKRLGSAPGVALITASSLLAYLPELGKRSAKAITALVGLAPLARDSGRWRGQRRIWGGRRKVRALLFLAARHAEKHPAFAEFAQRLQQAGKPRKQIRIAVARKLLLALNAMMGLLRQALLTSRDTVAGSARRAGAGL

SEQ ID NO: 106892 - protein, 338 aa, unidentified
MDTKFYVGIDVSKLVFDLAILKVTNHQKGAMITERFENNAQGIKALHKWLKDQKVSLDDNSLVVIENTGVYHRLIWAYCSEHNLPIHIGNATHIKWSLGIARGKNDRIDSQRLCNYAHKNADELKATPVLNPVFIKLKDMLTARSRLLAQAGSIQVYLKELKLSNSAETQKLIEKAHKAALEGIKKSIAEIEKEIHQIIGEDKSIKKNYDLLITVPGIGHLTAAYIICCTNNFAGKITGKQLASYAGVVPFGYSSGTSVKGRDKIHKMANKELKKMLHLCAITSIKHYVEFKEYFDRKKSEGKHPMSIVNAIRNKIVLRAVAVVNNQKAYVDNYKKAA

SEQ ID NO: 106893 - protein, 344 aa, unidentified
MGQFVGLDVSLHETAVCAVDADDGHVIWRGSCGSTPEAIAATVGEHAPTVVRLGLETGTLSPWLARGLEALGLPVVCLDARQAKAVLSLRINKSDANDAHGLAELVRSGWYRQIQVKSQAAYQLQALVGARAQLVKIKVDLMNQMRGLLRTFGLVVGKGGGGKFDERVRELIAEDGALRTPIEALLCSWRQVCEQIGVLDRRLVAVAKRSATIRRLMTVPGIGVVAATAYAAMIDDPSRFARSASVGAYVGLTPRRHQTGELDYTGRISKRGDPLVRSYLYEAAGVVLHRMRRPSWLKSWGRKLVNRLGFKKTAVAVARKLAVILHRIWIDGSRFAWSREQATV

SEQ ID NO: 106894 - protein, 350 aa, unidentified
MKNPVAEAIQAALRPERRVGIKRTSTRLEEAHPTPPDRECWVGIDVAKVHLDVATWPTVEHLRVTRDDAGLAELAGWLQARTPTLIVLEATGGLETPVVAALVETRLPTAVINPRQARDFAKALGRLAKTDVLDAEVLARFGQAIRPDPRPWKDEETQELAALIQRRRQVVEILTAEKNRLSIAHRQVQPDIQATITWLEQRLRDLDDDLQRRLRASPVWREQDDLLQSVPGVGPVTAATLLAALPELGTLNRRQIGALVGVCPFNRDSGQSRGRRMIFGGRAGVRAVLYMAAVTASRCNPVIKAFYQRLRAAGKPAKVALTACMRKLLTILNAMLKAKTPWQPPEECRS

SEQ ID NO: 106895 - protein, 345 aa, unidentified
MEHYVGLDVSLKLTAICIVDRTGKIQREGVVHSDPEAIAAFIKSNAPHVVRIGLETGATSTWLWTELKKLGLPVICIDARHAKAALKMQINKSDRNDAVGIARIMQCGWYKEVRVKDLDSHAVKALLVSRALLVKIKRDLENQVRGLLKNLGLVIGPAKMNTFALRAAGLTEDRPELAAAVTPLLKARMAIEQQIAELDRKVMKSARNNAQVRQFMTAPGIGPITALCFLATVDDPGRFRRSRSVGAYVGLTTRRFASGEIDWTGRISKCGDKMLRSYLYEAANVLLTRVAKWSALKAWGIRLAKRSGLRKAKVAVARKLAVILHRMWIDGTDFRWSKETAGQTA

SEQ ID NO: 106896 - protein, 402 aa, unidentified
MNFFVGLDWASQAHAVCVLDVAGQVCWQGSVEHSAEGLAELRRRLARFGPPASLPIAIERPSGLVVDTLMDAGHPVVPIHPNALKASRPRYSAAGSKSDPGDAFILGDLLRTDGHRFRPLQPLSDATRALRALVRSRDDLVAARVALANQLRALLDCFWPGAAAIFADVDSPIALAFLSRYPTPHSAERLGEKRLTRFLVQHAYCGRRPVPELLARLRAAPIAQTGELEAEASGEVVRALIAVLLPLVSQIQQLSAAIAAALPQHPDGPLLQSLPRSGSVNAAQILAELGDDRTRFSTDEQLAAEGGVAPVTHESGKHRAVSFRWACNKRLRQALTTFADNSRHASPWAAAIYAAARRRGCHHPHAIRVLARAWVRVLWRCWQDHRPYDVMLHCAAQRAAAA

SEQ ID NO: 106897 - protein, 351 aa, unidentified
MKTNTLVNTETQARIGQLKLGVDWHVDQFRVVRMCDGQSPQPAQRFTAASFLPFVQKQLTLADQVFVVYEAGPGGFHLHRQLTALGVTAFVVHPQKLDPQHKGVVTDKTDARELTLNLDRYLRGNVRAMSVVRVPTPTEEQRRALSRQREQLRRERQRLAAQGRSLCLTQGIRLRGEWWKAPLTLPDWLEARLAIWRQLIAAVEALLAALTKQVEALAPKERPKGLGPLTLGLLIAELCDWARFKNRKQIGSYTGLCGGVSSSGQSHCDLSITKAGNARVRWALIELAWRMVLYQPQSKAVQRWRHQLLNPHAAARQKKRALVALARQLAVDIWRWQTGKVTPEQLGWLMV

SEQ ID NO: 106898 - protein, 307 aa, unidentified
MSSVGIDVGKDALDVALHGQKGVKRFANTSAGVRALVRHLQARAATRVVLEATGGYEEAALAAIAEAGLWVARINPRQGRDFARATGQLAKTDGLDAGMLAEMAAVFHDRLRQHRPIAPWQTELRGWLRRRHQVTEAIQRTKQQLAMTDAVIRPLMRRTLAALQREQKAVDAAMKVLVQEHATPAVGSSKGLGPMFQATMLSLMPELGELSRQQVAKLVGVAPMNRDSGQTQGKRRIQGGRAEVRVALYMATLSAVRWDPPMKAHYQQLRARGKLAKVALVACMRKLLGIVNARRRDELRMDGALVA

SEQ ID NO: 106899 - protein, 315 aa, unidentified
MDSATVYVGIDVAKEQLVVAVHPTQMCWETTNEQKAFPSLARRLLALRPTGIIVEATGRYHQPLARALAKAGLSVCIVNPRQVRQFAGAAGRLAKTDAIDAHVLARYGQALQPQPRGVRDAEAQQIQDLVARRRQLVRMRVAESNRLDGVSSVVAASGRRIIRTLDHEITSLDTAIDRALSAERWRDTAAIVASVPGIGPQSTRSLLTELPELGTLNAKEVAALVGVAPLNNDSGRFRGRRTTWGGRRDVRSTLYMATLSAVRYNPPIRAFYQHLVDAGKPKRVALIASLRKLVVLLNALVHQHRTWTLEVPRAA

SEQ ID NO: 106900 - protein, 341 aa, unidentified
MEVTTIGFDLAKSVFQVHGVDASGEAVIRKQLRRRQVLPFFRKQSPCLVGMEACATAHHWARQLEALGHEVRLMPPRYVKPYVKRNKNDAADAAAICEAVTRPTMRFVAVKSAEQQSVLMLHRSRALLVRQRTMLVNAIRAHMAELGIVARVGLPQVSALLAVIADEADDRIPPLARSCLQGLAAQLMSLEGEIATAGQRIHAWHRSNEVSRRLESIPGIGPITASALAATITDPSVFKSGRELAAWIGLVPRQNSTGGKERLGRISKQGDPYLRWLLVVGAMTVIRHARRRGTANPWLAELIAHKPTKVAAVALANKLARTAWALLQHGGTYQTHTAAAA

SEQ ID NO: 106901 - protein, 341 aa, unidentified
MAQASTIGLDIAKRVFQAHGADATGRVVFRKRLVRAKVLEFFAAQPPCVVALEACGGAHHWAREINKLGHTVRLIPPAYVKPFVKRQKNDVADAEAICEAAQRPGMRFVPVKDEARQANAVVFRARDLLVRQRTQCINALRGHLAEYGHVVPQGPAHVDTLVALVEDPASSVPESARAILKVLISALEVLGTQIEELDGEITRRAKADPVARRLMTIPGIGPIAATAITALVPAPEGFRAGRDFAAWLGLTPLQKSTGGKQKLGAISKRSERTIRRLLILGASAVVRWASQRGAAEGSWLARMLPRKPRMLVTVALANKTARIVWALLVKGGTYRAPAVAA

SEQ ID NO: 106902 - protein, 354 aa, unidentified
MTSTKYIGMDVHKESISIAVMNAAGKIVMECVIETKANMILQCIDGLRGDLHVTFEEGTSAAWLYDLLKPHVTELIVCDPRKNASMREDSQNDKIDACRLAELLRIDHLSPVYHGEHGLRTLKELVRSYLTVTKDLVRVKTRVKAIYRSWAIPCNGKEVYGACHRAEWLGKITESGVRRRAEFYYQQLDALRVLRQGVRRELLVESKKQKAWKRLCQIPAIGPIRAAVLLGILQTPHRFRTKRPLWKYSGLAIETCSSADHRSIHGQLQRSKKNSVRGLNQNCNHDLKNLFKGAAIVASSKPGPFQEFYAALLAKGLRPEMARLTLARKLATIVLIVWKKGVCFDAQHLKPQTA

SEQ ID NO: 106903 - protein, 354 aa, unidentified
MMIIGCDFHPSWQQISWVDVETGETGERKLVHASGDAKRFYEQLAGPVLIGMEATGNSQWFIELVEDLGHTIWIGDAAQIRASGACPERSRRVRKQKTDKRDAAHILKLVVEGRFPKLWTPDREQRDLRQLVLHRHKLVEIRSRVKNELQHLSMNKGMQKKRTLWSREGQQMLRELPLKPWASCRREDLLGLLAMLNQQVGALDVAVQKAAEENPQAKLLMTQPGVGPNTALAFVLTIGDVSRFPRGKQIASYLGLIPREESSGGRQKLGAITKQGNRMLRSLLVEAAQVAVRYDPGYRKEYAHRCHQKPKGVAKVAAARKLAVRLYWMLRTNVAYPEIVRIESSPRVPLVGAS

SEQ ID NO: 106904 - protein, 315 aa, unidentified
MANQGLVVGIDVSKTQLDVAFGAREDLEAFANDDKGIARLLERLSAAAPSLVVMEATGGYETASASAIAAAGWPLAVVNPRQVRQFARATGRLAKTDRIDASVLSAFGELVEPRTTRLPDEEAQALQALLVRRQQLVAMRVQEHNRLEHAQAVMRKHIKKHIDWLDQEIGKLDVDLTAGLRKSPVWRAKDELLRSFKGVGRVTSGTLLVALPELGALDRRRIAALVGLAPFNRDSGKMRGRRSIYGGRGRIRTLLYMAAVTAIRSNPVIRAFYEKLKTRGKPHKVAIVACMRKILTILNAMVRESTPWTPEIKAV

SEQ ID NO: 106905 - protein, 320 aa, unidentified
MATQRTENYIGIDVSKAELEVTVHERDYACCCPNNPRAFPGLITELRAWRPTLIVLEATGGLEKPLVNALHAAGLPVVVINPRQVRDFAKALGLLAKTDRLDAQVLAHYAAVIKPPLRPIKSADEQELDALTGRRGQLVEILAGEKNRLKSATSPTVREEIKAHIEWLEGRIAVLDRQLKTFLKKSANWQRRNDIYQSVPGIGPVVSLSLLAELPELGSLNRHQISKLVGVAPLNRDSGKHRGARHIFGGRASVRSMLYMAAFNAIRSNPVIKAFYQQLRARHKLYKVAITACMRKLLTILNVMVRDNSTWKLNVRPLSV

SEQ ID NO: 106906 - protein, 399 aa, unidentified
MFTQRKSLTLLDLFEFEQNVRNRAALYIQNIQPGDKTKGDFSLFILKIIGMKTIVKQVAGIDVAQDELVVCLGRMYDDWTPELYGSKTFANTAKGFESFMGWVNKLRDPSVPVRFVMEATGVYHESLAYYLAEQQQEVSIVLPNKISNYARSLEVKTVTDKTASEAIALFGLERKLDQWKRPNPVYKKLRQLTRERDQLIQIRTIVKNQLHAEQAEAEPNKTSVARSRKQIAFLEKQEQEIKTEIAALTKGNEEVKKTVKLISSLTGVGVLTAVTVIAETNGFELIRNKRQLTSYAGLDVKEKQSGTSVKGKPRISKKGNKYLRKAMHMPALTAIRHDERFKAVFARLVSKHGIKMKAAVAVQRKLLEMMYILYKTNTPYDKNYLQNQGSELINNSSKN

SEQ ID NO: 106907 - protein, 412 aa, unidentified
MLDSSEVESTAADGVFIGLDWGNSHHQLCILDAAGRMVHQGKFAHDIAGARGLTERLHRHGPVQGIAIERSEGLLVETLQQQGHRLFCVSPKMSARARERYRLAPSKSDAFDAFVLADSLRHEHRHWRPLAAPSSLLAELRALTRDRERLIWNQRDVENQLRAVVLAFHPGVLHLFSSLDRDITLAFLRDYPTPAHAGRVGVARMAAFCARHGYSGRTRPELLVERLRANLLSASAGTTAGKAFTAALFVEQLELLNTQVRAITKRIRERLAEHPDAAIFLSFPGMGEVTAAIMLAEMGEDRARFPTAGVLLAETGTAPVTRSSGRSRTVKFRYAANKRMRHAIDWWAFVAVRENDWAHEAYWQARARGQLHNRAVRGVGARWTRILWRCWTDHTIHDSALHLKGPPASITA

SEQ ID NO: 106908 - protein, 404 aa, unidentified
MTAVMIGVDPHKGSHTAVVIGPAEEPLGEIRVRASAAQAEKLAEWAAAWPERTWAVEGAAGLGRLLARQLVAAGERVLDVQPKLASRVRLLQAGDTNKNDPNDALSVAIAALRSRTCRQVAAEDHPAVLKVWSKRHRDLARLRNQVACRLHAVLCDLVPGGTSKQISAAQAARILGQVTPSGAVELARAELAAEFLEDMRHLDAQLRGTRTKLAAAVKVSGTTLTEVFGVGPVIAGTIIGDIADVSRFPGRDHFAAYNGTAPVEVSSGNRKIHRLSLRGNRRINHAIHMAAITQIRHPHSGGRAYYDKKVAEGKTHKEALRCLKRQISNAIYACLQADARQAAETTAAGPGGQPGNDSDSSAAGSHSERRLFEQATPGPGTSLRPGTTTGTPSKRVSKKTQTTT

SEQ ID NO: 106909 - protein, 346 aa, unidentified
MNQITRIGMDTSKHFFQLHGVDTAELPVLRRKLRRNEVLGYFAKHPPTVIGMEACGAGHYWGRELRKLGHEVKLIAPQHVKAYVKRNKNDGRDAEGLCEAMSRPTMQFVPVKTEQQQAVLMLMGIRQQLITRRTQLSNAIRGYAAEFGLIAAKGLVKVEPLLAQIARDENLPVLAREMFTLQGRDYARLQVELKAVEVRLMAWHRANADSRRLAKIPGIGPIGATALVMKTPDPCLFPSGRHFAAWIGLTPKDHSTAGKTRIGKITRAGDEMLRSVLVAGATAVIQQAKHNRGRPSPWLLALLKRKSPKLAAVALANKIARIAWKLLTTGENYDGARMPVASALAA

SEQ ID NO: 106910 - protein, 362 aa, unidentified
MSQAKWLVAAVVPGVERQPLKRLDADEAALLKLLHRWRNEASQAGRQIKRIVVAYEAGRDGFWLARWLRVHGVEAYVIHPASIAVSREHRRAKTDRLDTELLLRAFLGWLRGEKRHCSMVAIPTVEEEDARRPNRERGNLVTEQTRIMNQIKAILTRFGIRTFRPTLRKAEEKLEGLRTAEGAPLLENTRAELRRHLARLRVVREQIRAIEHSRLGKLATTPEKGPHAMVRLLARVLGVGVETADMLVNEVFSRRWRDRKAVARYAGLTGSPDESGKRRRERGLARAGNARVRCGMIQLAWRFLRFQKDSTLAQWFQARTADGRGGTRKTMIVALARKLLIALWRLATTGEASDGIVLRPAS

SEQ ID NO: 106911 - protein, 361 aa, unidentified
MQITTIGLDIAKNVFQVHGIDANETVVVRKRLRRSQVLAFFKALPPCLIGMEACATAHYWARELTKLGHRVRLMPAKDVKAYVKRNKNDAADAEAICEAVRRPTMRFVQVKSAEQQGQLMQHRTRDLLMRQRTQSINALRAHLAELGIVAAQGDKGVKELLSIVADEKDARLPIDARASVIVLAAQLQAVQTLIGSIEKRIKTQHRSNEASKRLETIPGIGVIGASAIAATVADPTVFRSGRNFAAWIGLVPRQDSTGGKQKLGRSPSKATATCGAFLSSARIPSCGAPSRILRNISGSRNSLRGGPSRSWRWHLPTRWLAWPGRCWPMAAPIGRLCLRQRRKESGDGRMRFCSCVHELQG

SEQ ID NO: 106912 - protein, 351 aa, unidentified
MSKRTNSIAVSTIGIDTGKNTLHMIGLDEKGVIVLREKVSRSRIAARLVNMQPCLVGIEAGMATHYMARELVALGHVVKQVPPAFAKPFRQGHKNDFRDAHAVAEAVQRPSTRWVPIKTDDQLDLQALHRVRSRLIGDRTAVINQLRGFLLEHGIAVRQGHRFLRQQLPRIVATRTDVLSPRMVRIIGDLIEDWANLDERIERVTDEIEGLARTNVSCGRLMTVPGIGPIIASAMVAAIGDGAAFAKGRDFAAWLGLVPRQMSTGDRTILGRITKRGNRYLRMLFIQGARAIQLHPASWAKHSFGPWLAAAARRLHCNVLTVALANKLARIALTVLVQGRNYETRIEPIPA

SEQ ID NO: 106913 - protein, 371 aa, unidentified
MEKSITFVGLDVHKNSIEVALADAGREGEVRHYGAIDGDLDSFCRLVRKLVSTGKELHFVYEAGPCGYEIYRYLTAKDFDCAVVAAPAGDPTKGGRKRIKNDRRDAMTLARLHRAGELTYVFVPRADDEAMRDLTRAREDTSNAQRVARQQLSGMLLRTGVRYDGKTSWGLAHFRWLAKIKMPTPAQQVVIQEYIHAIKETTDRLERLTQQIAELVPAWRMFPVLQAYQALRGVSLIVAATVVAELGDLTRFDNPKQVMAFLGLVPSEHSSGEKTRKGGITKAGNSHARRVLTEAAHAYQFPARVSRAILQRQEGLEKAILDIAWKCQVRLCSRFRRLMAKGKNRKTVVTATARELIAFMWAIAKQVPVAA

SEQ ID NO: 106914 - protein, 341 aa, unidentified
MPGPRARIRKVGQPDSPSTSRKEPVKSESEVFVGIDVSKARLDIHVLPSQQAWSTANESPDLDDLVARFAALNPTLIVLEATGGLERRALALLLAAKLPAVAVNPRQVRDFAKATGHLAKTDTLDAAVLALFAERIRPAVRPPLDEQTQELDALMVRRRQVVDMITAEKNRLAAAPPSKRVVQAIRKIISCLQKQLDEIDTDINSAIRNSPAWKAKDDLLRAVPGVGKVVARTLLAQAPEIGSLTRKQIGALIGLAPLNCDSGTYRGRRRIWGGRAQVRAVLYMGTLSAIKHNSVIAAFHARLIAAGKLPKVAIVACMHKLLTILNAMLRSNSPWSPGISS

SEQ ID NO: 106915 - protein, 318 aa, unidentified
MNTNILQNINIGVDTGKAQLDIFIRPLNLFVTVSNNDKGIKDAIKTIKKHSPERIVIEATGRLEMPFVLACAEAKLPIVRANPIHIKRFAGAIGRRAKNDRLDAELIAHYAEAIKPDISIIKAENIRLMSDLVIRRNQLLSMQTMEKNRIKVLPKSLHSTIKPMLTAMKKQISNIEDKLVKLIESSPDYQTKNDILQSVPGIGNIAAASIISNAPELGYITNKQAASLIGVAPITRESGRYKGKRVIQGGRAQVRTVLYMAMMSAMQCNPVFKATYTRLVQSGKPKKVAIIACVRKMVVILNSMLRDGVMWDENIAKN

SEQ ID NO: 106916 - protein, 337 aa, unidentified
MKYCGIDLHGNNSWEVIIDEQDRVLYSRRHANDLPRLLAMLEVHRSELSGIVVESTFNWYWLVDGLQEVGYRVLLANTAAIKQYDGLKHRGDESDARQLAHLLRLGLLPQGHIMPKAARAVRDLARKRMQLVQQRTAQILSIESSLSRHSGWKLSSNRIKCLRQADLDEMRLDEMPMLGLKANVAVMQALQTQIDGLEKVLADYCRAEPGYQLLRSVTGIGEVLATVILLETGGIERFAEAGNYASYCRCVGSAHLSNGKKKGEGNTKNGNRYLAWAFVEAANFAVRHCEAARRFYQRKKAARNSIVAIKAVAHKLARACYHMLKTQTPFCVERCFA

SEQ ID NO: 106917 - protein, 367 aa, unidentified
MAGASNVGIDLHKTTLTFGLTNIEGNLVNDVSMDTKCVNKITKFVSELPRPIHCAIESVGMYEWLWELLEPIVDKLVLADAVELRYRAGKRNASTDRVDAKFLSLLVWRNEVPEAFVPDKLTRQLRRLGRHWHGITELMTNLKIRMRWILMQHNFPGPDVITGPSAQKWFLAQGDHLDPLAQFTFSQMLETIEHLERQRVGIRRLIIEFSKMDKFRDDTELLKTVPGISEILAAIILAEVAGFQRFYSDDAIACYTGLTERTKESAGNHSPGHISKSGSPILRWALCEAANTLVRSDPIYRALYNRILRHTHVKAKAKVAMAQKLIRWLWKMHKTREPFKRGGSTGHTKNANIARLRAKAIIAPALA

SEQ ID NO: 106918 - protein, 341 aa, unidentified
MKITTIGIDLAKEVFQIHGVDEYGKIVLRKQFRRNNVIKFFANLEPCLIGMEACGSSHHWARKFVEFGHTVKLMAPQFVKPYVKTNKNDMTDAEAICEAVSRPNMRFVPIKNVEQQAILSVHRARQGMVKARTAQANQIRGLLSEFGIVIALGVHSINKRVPDILEDAENGLPGAMRHLLKRLNNHLKELGRQVEELELQIKLWHKENEASQKLETIPGIGPITASAIVATIGNAREFKNGRQLAAWLGLVPRQHSSGGKHILCGISKRGDRYLRTLLIHGARAVIRYAAHKEIPNSWLEKILARRNKNVVAVALANKNARIIWSMLTTNTLFKPGFMTTR

SEQ ID NO: 106919 - protein, 343 aa, unidentified
MQAVTTIGLDIAKSVFQVHGIDAEGKVLIRRQLKRRYVLAFFQKLSPCLVGIEACATSHHWSRELKALGHNVRLMPPAYVKPYVKRQKNDATDAEAICEAVTRANMRFVETKTPEQQSCLMLHRTRQLFIRQQTSVINAIRAHLAEFGIVAPVGRKGVEHLLAIGTDGSDQRVPEVTQACLAALGAQLRMLKAQILEFDRRILAWHRSNETSRRLDAIPGIGPALATALVASVANPKAFRSGRNFSAWIGLVPKQHSSGGKDKLGSISKQGDRYLRSLFTAGALAVIRYAKIHGTQHRPWLTALLARRPTKVAAIALANKIARMAWAMMAKGEHYREPVALAA

SEQ ID NO: 106920 - protein, 447 aa, unidentified
MRHVAGFVSLTLLERHQRFEACPALAFENSRDGFHALAERIRTLAPFEHCFTLLEKTGQYHKALVQYLQELDIPVYVMHVQERPKAMMKTDKRDALGLANTLYNQLALGIQVSDKTQLVRRDVPPTPAAAQLKGFIRHRYELVHEATQRKNKLIAICDEVFPEFTRILHDPNGPTALALRERFPTPAAFATASLSALQEVRGKARCISDARLLELQRLATESIGTKDIVRQRGLVLEQTQLTRELRLLQEHIAQLESEITTIVAQAREGRILQSLGIGPIQTATVIAAIGSIENFPNAGCLKSYFGWSPTVIQSGSSIDYSGQTHGGTRTMKQMMFLIVSNLINRDTEWAKLYDRLVKTKCPYDERTGQRKGKLRIIGRVAGQLIETMYALLKTDAEVLSKVLPQTTPPEPTLYDPEKHRQHREGHYQPLKVAARRPVLTLLPHASE

SEQ ID NO: 106921 - protein, 406 aa, unidentified
MLFVGDDWAEDHHDVEVQDETGRRLAKARLPEGISGIARLHALVGRFLPEDVDAAEVKIGIETDRGPWVAALVASGYQVYAVNPLQSARARQGNGVSGAKSDAGDAHVLADMVRTHSHQLRTVAGDSKEAGAVKVLTRMHQSLIWDRTRQVQRLRSSLREFFPAALEAYEDLDSPDVLELLTKAPEPSSAARLTRAQISAVLKRAHRRDRDTKTTAIMAALRTEHLTQPPVIAAAYGATVRALAALITTSNEQITALEGPVEACFGQHPDAEIYLSQPGLGSILGARVLAEFGDDPTRYDGARARKNYAGTSPITRASGKKKVVLARYVRNKRLTNALHQQAFSALSGSPGARAYYDALRDRDIGYNAALRQLGNRLVGILHGCLKTRTCYDEATAWDQHTQRVAA

SEQ ID NO: 106922 - protein, 407 aa, unidentified
MAGVMIGVDPHKGSHTAVVLDAGEVVLGQVRVTARTDQLLRLQRWAQPWPDRVWAVEGARGLGRLLTQQLLAAGERVVDVQPKLAARVRLLNTGQVNKNDPNDARSVAVAALRSRQVSEASLEDHTVVLRVWARRYRDLGRLRTQVMCRLHTVLCEMVPGGFSKEISAGQAIQVLAGITADTPMTAARLELAHDLVDDLQRIDDQRREVRRRTARAVASSATSITEIYGVGPIVAATVIGYVRDIHRFPTRDHFAAYNGTAPIEASSGNRKIYRLSRRGNRQLNYVIHMAAVTQIRNHGTAGRAYYDRKIAEGMTGKAALRSLKRKVSDAIYNRMISDAGRPPSNDTAKDPGGQTGNDSASSVTGSHPEPPALRRSHSRASAKPRAQASQAPNSSSLRSSRPRRRSP

SEQ ID NO: 106923 - protein, 392 aa, unidentified
MYIVGIDIGKNHHEASIVSPEGKQIGRSLRFATTHKGADSLMSFIFKNIGNSPCVFGMEATGHYWYPIYSFLKAKGYTIYVINPIQSDSLRKMYIRQTKNDSIDSFLIAEVIRFGQFGTTSMADENILAMRQLCRYRDSVISSRTEIKLRIGTIMEQIFPEYEKQFSSLWASTSMGILEKYLTPENIENAPIDELFEIIKDKSHNRLTRAKAISIKEAAADTFGIKIAQDAFSFQLKQLIDRMNFLDKQIEALDCQILEYYEKFDCYLHTIPGIGMIAAATILAEIGDINRFKSSSALVAFAGIDPTVRQSGEFSSTHNHMSKRGSPYLRHAIFLAATTCSFHNSPLNAYYKKKRDQGKHHLTATGAVARKLTSVIYAVLRDSKPYEPKSFC

SEQ ID NO: 106924 - protein, 343 aa, unidentified
MQTITTIGLDIAKSVFQVHGVDAGGQAIVRRQLKRRYVLTFFQKLSPCLVGIEACASAHHWSRELQALGHTVRLMPPTYVKPYVKRQKNDATDAEAICEAVTRANMRFVPTKTPEQQSGLVLHRTRHLFIRQQTSVINAIRAHLAEFGIVAPVGRRGVEELLNVVADPNDRRVPEIARACLSALGAQLRRMKEQILEFDRLIRAWHRSNEMCMRLEEAPGVGPVLATALVAAVADPKSFRSGRNFSAWIGMVPKQHSSGGKNRLGNISKQGDRYLRGLFVAGALSVIRYAKIHGTKHRPWLTALLARRPTKVVAIALANKIARMVWAMMARGERYKEPVALAR

SEQ ID NO: 106925 - protein, 312 aa, unidentified
MTEQIQVAAGLDLHKSFIVATILTITGDKMINRFDRTQSGLIALKDWIISHKVEAVGCESTSDYWVRIFDLLSPICSVIVGNARDMKALSHKKTDRIDSEFIALITLKGMIHPSRIFPAEHREFRSTIRLRHKLVQKRSSIKNEIHHILDSELFRLSSVLTDIFGKSGALIMKGILNDMPVDEILSLLPASVLKKEDALREVLETTLSEGALARLASCLRIIKTLNQEIAELTSISTNYAITNFPREYEILKSVPGIGDITAVTLLAEIGDVKDFPTGDKLASWLGIVPRVYQSADKLYTGSITKRGSRIAR

SEQ ID NO: 106926 - protein, 354 aa, unidentified
MKRTTKYVALDVHQATTSASVREEGGRVIARTILPTAAPALVEFFQGMRGAIHVAFEEGTQAQWLHDVLAPLVDRVIVADRRGTAQQGNKGDQTDADQLSELLRRGALRAVYHSSSHRETIRELARAYTNLVEDSTRVMLRLKALFRARGIRTPGKHVYHPSHRAEWLARLSGQGVHFRATALYAELEVLRELRPKAKAALLTEARRDPAWHVLRTIPFLGPVRVALLLATMQTPWRFRTKRNLWAYSGLAVVSRSSADYLLVQGRPVRRGRAPMTRGLNRNHNRVLKNVFKSAATAATARPGALQAFYRGMVARGMREDLARVTLTRKLAALTLRLWKTGDHYDPAQLTVQAQ

SEQ ID NO: 106927 - protein, 321 aa, unidentified
MTHFYLGIDVAKAKLDCALRLPNGKFRSKSIPNSPEGFALLDAWLATHNAAESHVCMEATGVYWEAAAQFLSTKGFTVSVVNPAQIKAYGTSCLIRTKTDKADAKLIASFCAERNPSPWQAPSEAELTLRALVLRLDALQTMRTQESNRLDVSRDAVRNNIQHHLAWLDAEIKHLARAINTHIDNHPGLKQQRDLLDTIPGLGERTIAIILAYYADTGRFANSRQAAAYAGLDPRQYESGSSVKGKPKLSKVGHAFLRKALYMPAMVALYKTVWGKQFKGRLALSGKPPKLIIGAMMRKLIHVAFGVLKSQQPFNSILHSS

SEQ ID NO: 106928 - protein, 413 aa, unidentified
MKRRQRTIQEDTLLVGIDIGMERNTAYCTNMSGNGTKTIIFTHTREGYEKLMEYMLMMQRKLGCTGCLVGYEPTGPYGEPLIHYLIHKGVPLVQINPMHTKRLKELNDNSPLKTDKKDSRVITDIMRLGYTLNVVVPEGDAAELRRLMNLRDRHIDERVALMNYLRQLIFLIFPEFFQAIKSLRSTTAMMIVREYLATGSLWKTDHESLGRAIRTTSMGKLGHGEAMRLLHAAHTSIGITKGVSGIMMDMSHVALQIAMIHSLIQEAEHCIEKILKNIPSARYIRSIPGIGSITTAGIIGEIGDFNKFRTQGEVVKFSGLNIYEVSSGKHTGKRKISKRGRSRIRNLLYLAALGTVKKQGIMHAYYTRLLGNSLHKTSALVAVARKLLKIIHAVVRDECMYVREEKEVEQKAA

SEQ ID NO: 106929 - protein, 350 aa, unidentified
MIIIGCDYHPSFQQIAFVDTETGELQEQRLAHREEAEKFYRELAGGGKKVRVGMEASGHARWFERLLAELKVELWIGDAAEIRAKRVRKKKTDREDARHILQLLIEDRFPRIWVPSWENRDVRQLLWHRHRMVQMRTRIMNQLQAVALNEGLRCKKRLWRENGRKQLEAFRLAPWASRRRHDLLELLDRMNPMIAELTLKVEQEVEKYPVAQRLKTHPGVGALTALAFVLVIGDAERFRCGKQIASYIGLVPAEDSSGERRRLGHISKQGSAMLRFLLVEAAQVTARSDPEWRSKLFHLAMRRGRKIAKVAMARRLAVRLYWMWRQGWDYQQLLKFGPHAGQPGPGVGVK

SEQ ID NO: 106930 - protein, 345 aa, unidentified
MPIVGGLDIHRKQITFDYLDTVTGEVRRGQITPADRAHLRAWLARFTGRDDVAFAVEGCTGWRYVAGELAAAGVAAHLAEPADTAAARGRKRHAKTDKTDSRLLRTLLAEGRLPECWIPPAHVLEYRALLETYHDLRRERTAWAQRIHAVLFHQGAPQLGDGALRSEQGLAALREASAACLSPAGQLQIAIALDTIAALEARMAMVRKQLLAAARHLTGAKVLATRLYGVGPVTALALTCWLGGAGRFSSSRKAVRFTGLDVTVWSSDRKGPPGRLSRQGPPVLRWAVYEAGKTHARSSAPDHAYYAAVKDRKNSKRAALSEARKIVRQACHILTELGDDAFTAA

SEQ ID NO: 106931 - protein, 391 aa, unidentified
MTITTHERECTKGSTLFMAMELGKREWLLGFSTGPGQRIRRRTITTSEWARMPNEIAAAKERLGLPAVAPVVSCYEAGPDGFWVHRYLTTLGVENRIVDSSSIEVTRRARRAKTDRLDVQKLLRLLIRYRGGERDALRVVRVPDEAAEHRRHWDRELLTLRRDRTRVTNRITGLLATQGVRVKVRADFPTRLARLRTWNGAPLAPELRARLEREWQKVALLTTQITEMRQARRRVLRQAPDAALEPVRRLMRLRGIGENGAWLLGLELFAPWRALRNRREVGGLTGLVGTPYTSGTLEHDQGISHAGNAAVRAIAIELAWCWLQYQPQSALAQWYRARFARGGRVAQKIGIVALARRLMIDLWRYVEHGVLPAGAELKSAPRHPTRGRVAA

SEQ ID NO: 106932 - protein, 342 aa, unidentified
MIDTMIGVDLAKNVFQLHGASLTGEVRFRKKLSRPQFRKFMEDQPASVVVFEACGGAHFWTREMQQLGHQAKLIAPQYVKPFVKRQKNDAADAEAIVIAAQRPEMRFVEPKSNAQIARGVVFRSRDRLVRQRTEQINALRSVLYEQGQVFPTGLHQMKKIEEFLQQADNGLLALVREECEELVASISDLTTRIDAKTIKLKKLSQQSEMSRRLQTIPGVGPLTAMAIEAFAPAMDIFRCGRDFAAWIGLVPKQHSSGGKARLGKISKEGQVDIRRLLIIGAMTRIAWVGRKPIQDGSWLDRMLKRKPKMLVAIALANKMARTIWAVLTKQEDYRDPAKTAAA

SEQ ID NO: 106933 - protein, 422 aa, unidentified
MAPREQVEYAALIGLDWADQKHDYCLGVVGTDPVEVGVFGAQPEAVAEWINELRKRFPEQKVAICLEQYRGGLMHQLMPVEFIDLYPLNPQALANFRKAFAVSRAKDDPTDAHLMWEYLLKHRDRLRGWTPEDVDTRRLALLVEDRRKTVDLRTQLSNKLTATLKGYFPQALELIGAQVTSPMAADFLKRWTSLGAIKKCRAATIQKFYTQHQVRDAHLCEARLALIRDSLPLVEDPAIVEASILKAQALSRQIVCLNEDLNAYGQRIAALFAAHPERALFEALPGAGPALAPRLLVAMGTDRQRFASAEEVASYSGIAPVTERSGKHTWIHWRLSCCKFLRQTFHEYANRSRQKSGWAAAYYDSQRARGKSHHAAVRALAYKWIRIIYRCWEQREVYDEARYLASLERRNSPLTKVMAEAA

SEQ ID NO: 106934 - protein, 337 aa, unidentified
MIMIGCDFHPGLQQIALLETETGRREDLRLTHDGEGTQVRQFYAALPHPVRVGLESSGYSLWFEELLEELGHELWVGDPGRIRKAAPRKQKTDRNDARLLLQLLEEKRFPRIWVPDRATRDLRQLLMHRHKLVTMRTAIKNQLQAIALNRGLQRHRKLWSEDGRERFETLALPPWTERRRNHLLRLLDQWDAEIAELDQVVRREAEAHPDACYLMRRQAGIGPIAALATVLTLGPVERFPTSRKVASYAGLIPTENSSGPHQRLGHLTKQGSPFLRFLLVEAAHTAVRFDPNFKRAYWRLVERRGKPIAQVAMARKLLTHLYWMLRRRREEPCSQPA

SEQ ID NO: 106935 - protein, 402 aa, unidentified
MAMTTRFIRFCGIDIAKDKHVLCVLDRDGTQIIRPASFKNNVDGYQHLLTRLKETGKTGSMLTGMEATGHYWYSLHDFLQRNGYTVAVLNPIQTARQAKQMVRKCKTDKYDAYHIAQILRSGNYKPAAIPGEQGMACRQLTRLRYAMMNQQMRIKQLIWSRMHPVWPEYESLFTNPFGSTGRTLLRHTPTPQDVLDIDVKELADMIRVSSHGKFGPIKAQQIHHAAQQSVGMQRGVEAIGMGIGCLLDQFEALDPIRQQLEEKIAALAQTLPQYLFTLPGASDLNIASLYGEIDPIGTFKEPSQLVAFAGLDATVFQTGQYDNPRRHISKRGSPFLRRTLWLMAYRAVYQEGDLREYWLKKKAQNKHHLVAVTAVARKLCHIIWRIMTDQRDYLPDRQNLNS

SEQ ID NO: 106936 - protein, 346 aa, unidentified
MLYAGLDLSRKRLDFHLLDGEGATVEVGAAAPDADGLRGLTRRLDRHGLPIQAAIESMNGARFVHDQLERAGWQVEIADAQKVKGLAPLACKTDRIDAWVLAELSRRELVPAIWLPDPHVRAERERARWRLHLVRHRSSLKQRVHAVLLAHGKPCPVSDLFGVSGRKLLARLALPEPWYGNVQASLRLIDELDREIDDCEHELRRLGADHRYVPLLCTVPGISWVLAYTIAAELGDIARFPTPRKLAGYSGLCPRVYQSGESDRRGPLSKQGPKYLRWALVEASTHACTHPAYRDRYLRTRTRLGKQRGAKVAQVDLARRLAEAIWHMLSRNQPFAPAGATDPLAA

SEQ ID NO: 106937 - protein, 460 aa, unidentified
MRILGIDLATKAKHRAIIANRRGQFIGPVIKFRTRSSDLERLYTRSQRGMEADETLVVVMEATDIVWYPVSVYFERRGATVHVVNPRMSADLARFYNRHASSDRLAARTLARLPVVLPDELYPLVLSGADYLTLQRGCKELDRLVTQASAIKNRLQSTDHLGWLDLKLRVFPKPLGSPARWFRDHFYEPRRVIEAGASGLRQAWRAAEDVYDGDEDWIDPLLALAQEVSSLYGDQGAYLDYPALAAAVHREQQRLVELEADAHHVRLNVTRPLYRKLHPSRNVETLRGVGQDSGAVYTGFIGLPERFPNNRRFRGWHGIIPRSAQSGESESKGMRVTKTGPNPVKKYGYLNADVARQWDPRIAFIYHDQMVNKGKHHTQAVCACATHLLDRVRVILLGDRPYELRDVDGTPVTRKKAREIVLERYVVPDEVRRRNNKRARKARAARRAERKHNRKRSRSR

SEQ ID NO: 106938 - protein, 337 aa, unidentified
MEQPTQYVGIDLHRRRSVIVRRNHAGETLETVRIDNDSRALAAELAKAGERPEVILEATYGWYWAADVLQECGANVHLAHPLGNNWGNRRVKNDERDATDLVDLLRLGRLAEAWIAPPPLRELRELIRYRAKLVHLRTSLKAQVHSVLAKEGVAVPMTDLFGSKGQRLLDSLALGDAYRIRVTSLRDLIEVVGREITMVEAEIAPGLAGDLGYHAIQAIPGVGPILAAVFVAEIGDVSRFKSARHLCSWAGLTPTHHESDEKVRRGHITKQGSRLVRWAAIEAVVRQHGWTAVSKHHRAVAERRGNKIGRVAAARKLLILVYYGLRDGEVRCLAEPG

SEQ ID NO: 106939 - protein, 374 aa, unidentified
MGNIIEAFVAFDTSKLRNAVAIAEAGRAGEVRFLGEIENTEAAIAKLVRKLAAKCGRLTFCYEAGPTGYGLYRQIKSLGHECMVVAPSLILKKPGERVKTNRRDAVALVKQLRGGDLTAVWVPDPRHEAMRDLTRAREVAVEDLRCKRQQLSAFLLRQGRRYPGERAWTKAHRDWLVSQKLEYAELRIAFEEMLLAMRQAQERIERLEQAIRVAVPDWSLAEVVTALMAMRGIDFISATAFLAEIGDLSRFPTPRELMGYLGLVPSEDSTGDTIKRGPITKAGNRRARRILVECSWSYQHPPRVGKEKQERVAAAPPAVREIAWKAQCRLSARYRALTRKGKLKTVAVTAVARELSAFIWAINRQIANPRAVAR

SEQ ID NO: 106940 - protein, 346 aa, unidentified
MSEIIRIGMDTSKHIFVLHGVDAAEHPVLRKKLSRKQVLEFFAKVPPTVIGMEACGGSQYWARELRKLGHEVKLMAPQLVKPYVMRNKNDWRDAEGLCEAMSRPSMRFVPVKTAEQQAALMLTGIRNGLIARRTQLSNAIRGYAAEFGLIAPKGLDKIEPLLARIAQNEDLQALARELFAVQGREYARLQVELEEIEARLMAWHRSDALGRRLAQIPSVGPIIATTLVMKTPDPGAFRSGRHFAAWIGLTPQDHSTAGKTRLGKITRAGDEDLRRLLVIGATAVIQQARRGRGHHSRWLLALIQRKPAKLAAVALANKVARIAWKLMATGESYDATRMNAAAAVAA

SEQ ID NO: 106941 - protein, 310 aa, unidentified
MEPIFVGIDVAKDRLDVHVQPSGQAFSVSRDDAGLAELVRRLQPLGATLSALEAPGGYEVVVAATLAAAPLPVAVINPRQIRDFARAPGRLAKTDALDAQAIAGFAAAVRPAARPVADADARLLGELVARRRQLVDMLGAEHNRRRLIEPPALKRRLDAHIRWLERALRELEGDLDTTVRASAIWRATEDLLRSVPGIGPITAYTLIADLPELGRLDRRKIAALVGVAPINRDSGTLRGRRMIAGGRASVRPVLYMATLTAIRHNPVIAAFYHRLVSAGRPGKLALTAAMRKLLVILNAILRDQRPWRPA

SEQ ID NO: 106942 - protein, 362 aa, unidentified
MEFFTGLDVGMDETAICVVDDKGNVALQVTVLTDPGAIKAALKPYLGRLRRVGHEAGALSPWLHGELLRLGLPAICLETQHVRAAMSAQRNKTDKADALGLAHLMRTGWFRKAHIKSESCYRLRLLLTHRRNLKRKFLDLENAIRHSIKSFGIRIKGTGRGRFAQAVREAVAGDPLVAALIEAMLNARAALWKEYCRLHDLLIKFVAGHELCRRFMQVPGVGPVAALSFVTAIDDPSRFKRSRDVAAYFGLTSRRWQSGSSIDVQGRISKAGDGDVRRALYEAASALLTRFKRKDKVKSWGMAIAKRASHRKAVVAVARKLAVIMHAMWVDGTFYCGDPTATPADVRAHTAVKDGKLLRGYA

SEQ ID NO: 106943 - protein, 369 aa, unidentified
MRRDILHIGLDVDDNFFTGAIFNSRTGKTEIFRVRPTIGALLKYLKKLEEKGEEFRICYEATYIGYSLCRELRKRGIECEVIAPSLIPVKPGKKVKTDKTDAINLSRYYSRGDLTIVNVPDEEDEAVRSLIRSRSFVVEERKRLKLHILSLCRVHNLNYKSESKRKNYWTQMHIKWLKEKIASLNENLRKCFELLIEQYISQNIIIEEYDREIKAASEKERYSKKVKALNCFRGLDTLSSMTLITEIGDVKRFSHPNKLTCYSGFDIREYSSGGKEQKYGITKMGNKRIRTTLIESCQFNFSEVKISRRLKLSREGAEMKYINIADRCMERLRKKSIMMKVKNKHHNKIKTACAREMLCFIWEALMLAS

SEQ ID NO: 106944 - protein, 362 aa, unidentified
MTDQHLEVIAGVDTHGQTHHAAVVDGLGRHLADKEFAATGAGYRQLMTWLGSHGTVAAVGVEGTGAYGAELARVLTRSGLRVVEVDRPDRKTRRLRGKSDPIDAYAAATAVASGRATGTPKTRDGIVEAIRALRVPRRSAIKARTQAINQARQLLVTAPEALRAQLRGLSATELARTCARLRPDDLADPTGATKAALRRLGRRILALAEEIAELDAELKTLTTQAAPALLARMGVGTDVAGQLLATAGDNPDRLRSEAAFAHLCGVSPIPASSGRRDRHRLNRGGDRAANHALHTIALSRMRWDSRTKAYVQRRTKQGLSKKDIMRCLKRHIARDIYRALIHDLQARGAHPSSLAADLPQAA

SEQ ID NO: 106945 - protein, 316 aa, unidentified
MSDLVYVGIDVAKDSFDVASDPAGLTLSLPNDPTGRQQLLDALATHTPALIVLEATGGYERGLVADLLHAGQKVVIANPRQVRNFARGIGQLAKTDRIDAQVLARFARMVQPKPRPQPSKQTAHLAELVTRRRQLTNLLTQESNRLPMARHAKVRKSLQKIIRALEQQIIDLDKIIRDDIASDDGLRHKDEILQSFKGVGPGTSAMLLSHLPELGRLNRQEIAALVGVAPWDIQSGQWAGKSRIWGGRKEVRGMLYMAALTAIRSNRAIQTFYQRLESHGKAFKVAITACMRKILVILNTLVRNDCLWSPQPPKNA

SEQ ID NO: 106946 - protein, 339 aa, unidentified
MNATTFGLDLAKRVMQLHWVETGTGEICRRQVKRGQVLEFFAQREASVIAMEACGSAHDWGRKLVALGHEVRLIAAQFVRPFVKSNKTDAADAQAIWEAAQRPGMKFVALKSEGQQAVLMMHRMRSQLVKMRTMQSNQLRGLLYEFGVDVPVGRAVGIERMTDELAKLEGVLPAVVLDTVREQLARVRALDKDIAAIERRLAAWKKDDAASQRLMAIPGVGLLTATAAVATVGDAKAFKSSREFAAFVGLVPRQAGTGGRVKLLGISKRGDVYLRTLLIHGARAVIAHGKQRDAWLDKLLARRPFNAAVVALANKMARTIWALLAHERTYQKDYAAQVA

SEQ ID NO: 106947 - protein, 356 aa, unidentified
MLSKKISGNKTKNNSSLTTTESYDHYIALDWSERNMAVARMSKKDTEPKVIDVPSDLKELKLYLANLKGKKILTIEETTTSQWLYVELYDYADKIFICDPYRNRLLSDGPKNDKIDAGKLCKLLKNGMMKEVYHSTNELYELRKLVSYYDDEVKAGVRLLNQKSAIYRAENKSWKKKEEIEASRVNKFIVAQLDEKIESYQEKKKRYEEEFSRISKKNKVIRNLQSIPGLGPISSVTILSMVIDGRRFKSSNHYLVYSGLVKHDKLSGGRSYGRRIPRYSRRLKGVYKSAAVRVTSTDNPLREYYEYLLNEKKLPEYNAKHALARYIAKISLGIIKSGEKYKPYKWRENKKEKEAA

SEQ ID NO: 106948 - protein, 403 aa, unidentified
MNGPIVSVDVSKGKSDYQAFKDLNVKFTDVRSIKHTKEGFDEIVNLVKDMEIKLETEVCVVYEATGVYHRVLKKVLEDNNIKQFIINPLLSAKTRKNDSLRSPKTDKLDPKSIAKTYYNQSLHSSYKPQTTYHELRELSRYYEDILVHIRKDKVAFRAQLDIVFPGYDTLFDDLYGAVSLTVIEKYPHPELLQKKSINTVSKIIQKKTRHRQAVSNKMASKAIEYSKTIYSGCGKDDIDVLILERLIKKLNEDLNEAERTINEMIRLVQELPNFIIIKSIPGIGDNLAARIIAELGDMTRFKKKNELVAYAGLDPRIYESGQKDGAHMHITKKGNKRLRCLLYLAVTCSIRLKRDDNSIKDFYIKKMQQSNPMCSKAAKTACASKLVRIIYSMCKTGELYQYK

SEQ ID NO: 106949 - protein, 378 aa, unidentified
MKVSILGVDLGKTSCSIVGLDGSGCLVLRRRVRWEKLVEFVAALAPVVVAMEACCGAHHLGRVFGAAGIEVRLMSPEYVRPYVKAQKNDDRDAEAIAEAATRPTMRFVPVKSEEQSDVQALHRARERLVSERTALINPLRALLLERGIVAPKGRRELEDELAVFADEKGGALSPRIRLLIKGPRAEWRQLDERIAAFDTEFAKMAREDEAARRLGTIPGIGVINATALVAALGDGHSFGRGRYLAAWLGLAPRQMTTGGKPRQLGISKRGNRYLRKNLSHGERAVLRRLLHQETPLGRWVRALAGRAHMNVVVVTLAAKLARIVWAVRRKGRPFDLAAAAMSRGPDRSDGRCARRPFLSAGGEEDGLTVERQHGNLDH

SEQ ID NO: 106950 - protein, 349 aa, unidentified
MLADQLDYVVGVDTHLDEHVLAVVVAPTGAVVARQAVRANAGGYAAALRFVAEAATGARAWAIEGAGHYGAGLARFLAGRGETVLELSRSPRAERRLRGKDDSLDAARTARAALASETHALPRSGERREALRLLLIARRSAVDVRREALVQLRGVIVTAPDPLREQLRGLPVGRLLERCSRLRRSSSARPEELTTRLVLRSLARRIDAATSEAAELEHELLAHVRALAPQLLDEPGVGPIVAAQLLVAWSHRGRVRSEAAFARLAGVAPVPASSGQTTRQRLSRGGDRQLNRALHTVVLHRRQHDPETKDYIARRTAEGKSRREAIRLLKRYLARRLYRLLQHREPLLA

SEQ ID NO: 106951 - protein, 312 aa, unidentified
MSEEKFFIGIDVSKARLDVAVEPCGKYASFGNTEEDMAGLIDFINSISPTLIAIEATGGFERLALRALSLARLPVVAINPRQVRDFAKCLGILAKTDKIDAHVIARFAATVKPEIRHLKSEDEQMLDALNARRFQIVEMITAEKNRLASAPKWTKKDIQGNIKGLEKRLAKVNRDIDDLIKKSPTWSERGKILKSVPGVGPVMLSTILAALPELGTLNRKKVSALVGVAPLNCDSGKFKGKRMVWGGRAKVRSVLYMCALSAIKCNPKIRTFYDRLRQAGKAFKVAITACMRKLLIVMNTMAKNETYWAVSK

SEQ ID NO: 106952 - protein, 341 aa, unidentified
MPGPRARIRKVGQPDVPSTSRKEPVKSESEVFVGIDVSKARLDIHVLPSHQAWSTANEGPHLDALVARLATLKTTLIVLEATGGLERRALALLLAAKLPAVAVNPRQVRDFAKATGHLAKTDTLDAAVLALFAERIRPEVRPPLDQQTQELDALMVRRRQVVDMITAEKNRLAAAPPSKRVVRAIRKTISCLQKQLDEIDTDINSAIRNSPAWKAKDDLLRAVPGVGKVVARTLLAQAPEIGSLTRKKIGALIGLAPLNCDSGTYRGRRRIWGGRAQVRAVLYMGTLSAIKHNPVIAAFHARLIAAGKLPKVAIVACMHKLLTILNAMLRSNSPWSPEISS

SEQ ID NO: 106953 - protein, 416 aa, unidentified
MSHKIAGIDVHKKVLMVVVMDATIPEETPERRRFATMPSDLRRLASWLRERDIKEAVMESTAQYWRSVWLELEPHMLLHLAQAFSNRAPRGRKHDFRDAERLVRRLLADELILSFVPDGEQRIWRNLTRSRTQLTRDRVRLQSQIECLLEEMRIKLSSVVSDLLGASGLRILHALAKGETDPKELAALRDDRLRCTEAQLVDALTGSSQPMHREMLALQLEHLELIETQMEKLSRMIAQVMKPHQEAVMRLAEVPGFGVESAQQVISEVGAEASTFSSAAELTSWVGVCPGKDESAGENHNSRSAKGNRYLRRVLNQAAHAAVRKKGSHFQTVFRRLLPRLGYQSAIWAIAHRLCRVVWKILHEGATFIEQGNQPDPAKRKRRAKDLERALRRLGYDVVISLINPAIQDGTPVLGS

SEQ ID NO: 106954 - protein, 348 aa, unidentified
MTVYIGVDFHARQQTISYLTTEDGEIQGLQLEHGQPEEVRRFYGQFAGQRVVVGFESSGQAAWFEELLEELGCEIWIGHATAIRLFARRRQKNDRRDADLILDLLVRGDFPRIHRYSAESRAVLQQLRYRQRLVKLRTMLLNSLVFMAASRGVVLRSQLKTKRGLERLQQISLPPALGEQRDELCQLLLELKPKIDKVESSLAATAEADIRVQRLRTQYGIGPLTGLCLAHTLECPERFANPRKVTAYVGFDPVEDSSGERRRIGSISKQGSRLLRFLLVEAGQIAVRRDQELARVYQRVLIRRGHAKAKVAIGRRLLVRAFIMLRDEIDYAEFQRRGVAARSSRGIA

SEQ ID NO: 106955 - protein, 400 aa, unidentified
MELSQCHTQKGDLMIYVGIDIAKLNHFASAISSEGEILLQPFKFTNDYDGFHLLIQKLDSLDSNNIIIGLESTAHYGNNLVEFLVKHNYKVCVINPIQTSTMRKNNIRKTKTDKVDTYIIAKTLMMNPHHFFSQHDLSIMHLKDLGRFRMKLIKKRTQGKIQLTSYVDQAFPELQYFFKSGIHQKSVYAVLKEAPSTTDIASMHLTHLSHLLEVSSHGHFKKDTATELRILAQKSVGCNDSSISTQITRIIQLIELLDSQVHDVESEMELIVNSLASIIMTIPGIGFINGGMILGEIGDITRFSNPSKVLAFSGLDPTVYQSGNFNASHTKMSKRGSRPLRYALINAAHNVVRNNKTFKDYYDQKISEGKSHYNALGHCAGKLVRIIYKMLTDNVPFNLD

SEQ ID NO: 106956 - protein, 302 aa, unidentified
MRIIGLDIHRAFAEAVAWDDGKLKRLGRVDMRRHLLEAFAKKLSKEDVVVVEATGNASSVAAVIAPHVKKVVIANPKQVRIIAHAKIKTDTIDASVLAQLYASGFLPEVWIPDEPTQALRRQVTRRNQIVRQRSRLKNIIQSILHSHLIPSCPHADLCGAGGRAWLFHQVLPEDERLAVERHLREFDRLGEDLKVIERDLARSALGNEGVKRLMTIPGVDMVVALAIAAAIGEVRRFDRPEKLVGYLGLNPSVRQSGPGPAYHGRITKQGRGHARGMLVEAAWAAARAPGPLRAFFLRVRIC

SEQ ID NO: 106957 - protein, 416 aa, unidentified
MKNPTNYAALVALDWGETTHTFAWQRTHDPEVHRGSIAATPEALYTWLETIRQSCGGQPVALAIEAGRNGLLHALAEHSWLTIYPVHPATSARFRQAFAPSGAKDDGPDSEVILALLRQHRERLSAFVPDTPATRELAALVEQRRGAVDERTGSVNQLSALLGRVYPQALTLAGEDLAAPLALAFLRQFPSLASAKKAGPKRLENFYRQHNVRSEERIQERLTLLASSRAITGDEAILRPAALELSRLLDVLEVLNRHIALDDQAIATAFAEHPKAQIFASLPGAGPVLAPRLLTLFGERAERYPDAASLQKYAGVAPVRERSQGRLWVHWRWAAPKFLRQSLVEWAGQTVPRCTWAKAYYQRQKAAGKGHHAILRALAFKWVRILWRCWKDHTPYDDNRYLAALAKRHSPKPKPA

SEQ ID NO: 106958 - protein, 338 aa, unidentified
MAILYVGIDLAKSVFAVHGVNEAGKPELVRPSVPRAKLHELVAALPPCVVATEACTGAHHWARLFAAHGHTVRLIAPKFVAPYRMSGVRGKNDAADAAAICEAVQRPNMRFVPPKSLEQQSHLMVHRARQGYVEARTACINRIRGLLSELGHVLPLKADTVRRQAGALLEELPGWANTVVGDLVSELHRLDERIAGYDRHIAQIAREDERAQQLMQLRGVGQTTATAIVAMIGRGHEFKCGRQFAAWLGLTPGQYSSGGKTRLGRITKAGDAYLRSLLVLGARAVLAAASNRTDRVSRWAIALEARRGYWKAVVAIAAKNARMAWAMLARGESFKLPA

SEQ ID NO: 106959 - protein, 346 aa, unidentified
MEHYVGLDVSLKLTAICIVDRTGKIEREGAVASDPQTIAAFIKSYAPNVVRIGLETGPTSTWLWTELNKMGMPIICIDARHAKAALKLQVNKCDRNDAVGIARIMQCGWYKEVRVKDLDSHAIKALLVSRALLVKIKRDIENQIRGLLKNLGLVIGRAKMNVFAMRATELADARPELAAAVEPLLKAREAVGEQIADLDRKVMRLARNDAQVRRFMTAPGVGPVMALCFLATIDDPTRFKRSRSVGAYAGLTSRRYASGEIDWTGRISKCGDKMLRSYLYEAANVLLTRVAKWSALKAWGVRLAKRSGLRKAKVAVARKLAVILHRMWIEGTAFKWSSKQAASQSA

SEQ ID NO: 106960 - protein, 366 aa, unidentified
MERTFVGLDVHARSVVACALDDRTGELSKARLVPENETVLAWLQALPGPVAVVYEAGPTGYGLARFLTGRGIRCVVAAPSKMYRPSGDRVKTDARDALLLARLLRLGEITAVTVPSLAQEAARDLVRVREDVRADLMRARHRTSKLLLRQGILWSGGTAWTGAHEQWLGQQRFELPGLQAAYDTTLETVLLATSRRARLDKAIVEMAHEPQWWPTVSRLQCLRGVSTLTAFGLAVEVGDWGRFSGSTIGAYLGLVPTESSSGEGRRQGSITKTGNTHARRLLVEAAWHHRRPYRPTKTMRDRWDLAPAAARARGHAGNQRLHERWLRFNERKKRTVIANVAVARELAGWCWSLAMLEERATPAARR

SEQ ID NO: 106961 - protein, 371 aa, unidentified
MFQPIRYVGLDVSKETIAVAVAEPDGSVVEYGDIPNDPSSVRRLVEKLSRDAQLRTAYEAGPTGYPLHRQLTSLGVENKVVAPSLIPRRPGDRVKTDQRDAVQLARLLRSGDLTPVWVPDEAHEALRDLVRVRDDARTEGLRAKHHLSKFLLRQGVSAPARVGRAWSAQHQAWLNTLTFRDRAAQVTFDDYLACVRASTERIRRLDAALLECGATSPHVELLRAFQAVRGIGFLTAVTIVAEAGDLHRFRSAPAFMAYVGLVPSEHSSGGSRRRGHLTKTGNRLLRHVLGEAAHHARLQPAVSEALKQRQQGVPKEVVEISWRCQQRLHHKYLHLGGRIGRQRAISAVARELAGFVWAIGQALQPVAAVAA

SEQ ID NO: 106962 - protein, 329 aa, unidentified
MISETGKLLGTLSVSTDTAGYLNLVSWANSFGHLRRAGVKGTGTYGAGLTRVLRDHEIEVLEVNRPDRAMRRSRGKSDPTDAENAARAVLSGRATAVPKEHSGAAEAMRAVSVARRSAVKAKTQAINQLRALLVSAPQEIRERLLKTNTAECVASCARLRSLGNTPMLQTLTTALRLLAKRWLTLAEELKSLDTMLDDLTSQHARRLRERFGVGPQTAAVLVAVAGDNPERLKSEAALAALCGTSPLQASSGKTVRHRLNRGGDRSANNALWTIVMVRMRSDPRTRAYVERRTKEGMSNKEIHRCLKCYIVRELYPLILADLADSTASA

SEQ ID NO: 106963 - protein, 458 aa, unidentified
MNKQQPKQKVQVNALEQINVNAAGIDVGSEEMYVAVPPGRDEESVRCFPAFTADLHQLADWLKSCGIDTVAMESTGVYWIPLFEILEESGFQVYLVNARHLKNVSGRKTDVLDCQWIQQLHTYGLLRPSFRPPEQIVAIRTLVRQREMLVGYRSAHIQHMQKALTQMNLRLPNVLSDITGVTGLKIIRAIVAGEQNPKILAEFRDGRCKKSEAEIIKSLEGHYKREQIFALKQAVELYDFYDKQMQACDRELEVMYKEFDPPQDPGTPPPTPQQGKPCRNKTSFELASSLYRMTGVDLTQIDGVNALTIQKVLSETGTDMSKWPTVKHFASWLRLCPNNKITGGKVFHTGVLPTQNRANAALRIAASSLKHSNSALGAYYRRMRAHIGAPAAITATAHKLARIIYFMLRDHKPYHDCGADYFEEQQRTIAIRNLSRKAAKLGLRLEPSTPPAVPGFVS

SEQ ID NO: 106964 - protein, 479 aa, unidentified
MHLPVNEPVETRLPVRSAEVPLRRLSAVNGLVPWRGSPCRKSNGESAPAPERQYRDRCSSRRVEPRVKEERILHNDFHFFAGIDWGSERHRVCLVDQQGHPVAERWIDHSGSSLAELVDWLRERAEPRSLAAAIEIPRGAIVETLLEHGFAVYSINPKQLDRFRDRYSPAGAKDDRRDAFVLADSLRTDMLCFHAVRLDEPVMIRLRELSRLEDELSEEFNRVANRLREQFHRFFPQLLQFSESASDPWLWTLFEIAPSPDRAAKLTEAKITRILGQHRIRRIDAKQVRAVLKTRPFTLAPGAAEAASEHALLLLPRLRLLHQQRTDLARRVQAILDQMATPTEPQSSQHRDAAILLSLPGLGRKVAATMLSEASEAIAARDYHALRCYSGTAPVTVQSGKKKVVTMRMACNKRLRNALYHWARKSILWDPKSKSTYAQLRACGKSHGTALRSMADRWLKVLVSMLRHNTLYDLQHRAA

SEQ ID NO: 106965 - protein, 318 aa, unidentified
MKTSKNQSNVYIGIDTGKHSLDVHIRPLDIDLSVTNDEKGIKKLMAEFKKYNVISIVIEATGRLEHEFIITCSKHNLPFSVINPAHTKKFAGAIGRLAKTDKLDAQLLAHYGEAIKPAISSLKPEKIRLMSDLLSRRCQLMTMQTMEKNRMKIMPKSIQGMIKPILTAIKNQLDKVDKKLSDTLETCEEYKVRNDILQSMNGVGKVVAFTLIAEMPELGSLTNKQAAALVGVAPINRESGTYEGKRYIRGGRHRIRTVMYMAMMSALQSNVTFKTLYQRLVGAGKSKKTAIIACVRKMVVTLNAMVRDGEKWHAPAAL

SEQ ID NO: 106966 - protein, 349 aa, unidentified
MKFYTKQHRFYCGVDLHADAMYLCILDATGEIVLHKNIATRPKDFLKQIKPYRDGLVVGCECMFTWYWLADLCADEEIDFVLGHALYMRAIHGGKAKNDKIDSHKIAVLLRGGSFPLAYVYPKEMRATRDLLRRRNHLARKRAELFSHIQNTATQYNLPEPLGRIAKPSDRGDLLTKFRDPIVRRMVEIDLLTIEHYEELLGTLERQLEKVAEHHDPISLALLKSIQGVGRILGMVILYEIENIARFPREQDFASYCRLVKPAKESNGKKYGHSGKKIGNAHLRWAFGEAVVLMLKGNKPAQAVLQKLASKHGKGKALAILSHRLGRAVYYMLKNQEPFDQDRFLRLGA

SEQ ID NO: 106967 - protein, 350 aa, unidentified
MMIIGCDLHTRYQQIALLDTETGELIERRLEHESGEARAFYAGLSGGVRVGIEATGHTHWFEVMLAELGHELWMGDAAKIRASVIRKQKTDARDAAHLLELLRQGRFPKIWRPSPAERDLRQLVWHRQKLVWMRGAVKNQLHALAMGEGVCRKKKLFTAKGRKELEGLALGPWASYRRQELLRMFDELASATAQLDAAVEQAAKSQPQAVRLMTHPGVGPVTSLAFVLIIGPVERFERSKQVVSYLGLNPQEHSSGGKQRLGSISKQGNPMMRSLLVEAGHTAARFDPALKRMYHRLKFRRGASVAKVAVARKLAVRMYWMLRSTADYAQLVRMQGSPWATLVENSASLG

SEQ ID NO: 106968 - protein, 354 aa, unidentified
MNEKQMKVYGGIDTHADTHHVAVIDATGRRLADVQVPATAAGYQAALRFLGSWSALVSVGIECTGSYGAGVSRAIREVGIEVFEVNRPNRFDRRIRGKTDVFDAYSAAEAVLSGRATAAPKGSDGLVESLRVLRTSRLSALSARTATINQIKGMLVTAPEQLRARYRGMSNTKLIAALAATRPTVTPTTAAEATAYSLRLLARRWLALTEQVEDLAGHMQRLLDAHAPALMSVYGCGPDTVAQLLITAGDNPARLRSEAAFAALAGTCPVPASSGKTNRHRLNRAGDRKANSALYHITIVRLRYDEETRQYAERRTAEGKTKMEIIRCLKRYLVRQLYPLIVQTLQPQHSTLTA

SEQ ID NO: 106969 - protein, 346 aa, unidentified
MLYAGLDLSRKRLDFHLLDAEGATVDVGTSPPDADGLQHLSERVALHGEPVSAAIESMNGARFVHDQLELAGWQVEIADAQKVKGLAPLACKTDRIDAWVLAELARRDLVPAIWLPDPRVRAERERARWRLHLVRHRSSLKQRVHAVLLTHGKPCPVSDLFGVRGRQLLAKLGLPEPWQGTIEASLRLIDELDREIGECERELRRLGADHRYVPLLCTVPGISWVLAYTIAAEIGDIARFASPRKLAGYSGLCPRVYQSGERDLRGPLSKQGPRYLRWALVEAATHACTHPIYRERYQQTKARIGKQRGAKVAQVDLARRLAEAIWHMLTRGEPFAPAGATDPLAA

SEQ ID NO: 106970 - protein, 396 aa, unidentified
MFYVGIDIDKKNHEASIINSTGKLLDKSISFSNSQAGCAKLVSLLDKFEADSSNVIIGMEATGHYWVSLYSYLIDLGFTVYVINPIQSDAFRKMYIRQTKNVSKDSFIIAQIMRFGEFSTTSLADENIMALRQLSRYRLALVDECSDWKRKCIALLDQVFPEYSKLFSDTFGVTSRELLSKYPTPEDMLSIDTNTLTELLSKASKGRFGISKANEIQESVSSTFGVNFAKDAFAFQIKQIISQINFIEDQLKELETEISTLLHKTNAVITTITGIGDVLGAIIIGEIGDISRFESAPQLVAYAGLDVAVKQSGDFVGTQTKISKRGSPYLRRAIWLAATVAAFKDPALSIYYQSLKARGKHHLTAVGYVKFRQMIIPAIQFYWVLRNSVVLFLTRD

SEQ ID NO: 106971 - protein, 433 aa, unidentified
MGLIVPTVMPPERADQPPSYDGFVGIDWGSQQQQVSVLDRDRRRMGERVVDHDGASLAQFVAWLWGLSAGQPQRVAVAIEVPRGAIVEGLVERGFHVFAMNPKQLDRFRDRHSVAGAKDDRRDAFVLADSLRTDQPSFRRLRLDDPQLLVLRELSRAEETLLEAFRRSANQLRDQLHRFYPQMLQLCSAADAPWLWDLIDLAPTPAHAALLREEQVQGVLKAHRRRRLKAHEVLACLQTPARPVAPGAVQAAQAHCRFLLPCLRGLAEHLQACGQQVGALLHTLAEMPGAGEGPSDVAIVQSLPGVGRKMTAWLFAEAAQPLAERDYQVLRTHGGVAPVTKQSGKRRVVVMRRGGNPRLRHALYHMARVARQRDAHFNSVYAALRAKGQRHGQALRSIGNRLLRILMAMLRHRTCYDASRIHREPVVQMGETI

SEQ ID NO: 106972 - protein, 414 aa, unidentified
MNIDITDQEGGGPRFYIGIDTHTDTHTLAVLNTAGHVESTATYPTTMDGLTTICRLIGSLGDPEDLMIGIEGTNSYGAGLNRALQGAGYTTWEVLRPTRQVRRRDGKSDPIDAVEAARTVMSGRGISIPKTSDGPAESLRYLTRVRNKYVSMMTSLTNMITALLITAPTPIREKYIKASPATLKALASSRPGVLDPESVDFHVMATLKSLAQTHQGLQQSADGLEQQMSTILAQHYPALMDVAGVGPCNASKLMAMAGDNPQRIHSEGAFAKMCGASPIPASSGRTDRHRLNRGGNRQANAALHSITLSRMRHHQPTKDYVARQIARGKQTPDIMRQLKRAICREIYPLLQNPAHIEPTPDLRALRISHGITQTQAATALGTWPSRISDIETRQRPLPTLKTNYHHWLQTLDTP

SEQ ID NO: 106973 - protein, 361 aa, unidentified
MSSIVYGGLDVHKDSIAACLLVRDTGEMVAEQLPNDRTRLLRAVHRWAKLGELHLCYEAGGAGFVLQRWLAAEGIDCVVIAPSRIPRIPGDRVKTDTRDARKLATLFAAGLLEPVRVPDPEDELVRAVVRLHAELTRDLTRSKNRALKYLATLGHYYRDGRPWTQKHRAWLTHLPLEPLAHLVLQTHLDELDHLQAQLAGVDRQIAEQAATARYQEGVQRLLSVKGIQVYSAMVLLTEIGDIRRFADAPHLMSYFGQVPREHSSGTRERRGPITKAGSSRVRWVLTEAAWHQLSRPGQCARVRQHRATQPPAVVAIAQKAEQRLHHTFWKLAARKDRRTAVTAVARELTGFIWALLSLPAA

SEQ ID NO: 106974 - protein, 338 aa, unidentified
MKLYCGIDLHSNNSVIVILDEADKVVYQKQLNNDLRSILEQLSVYKGKITAIAIESTFNWYWLVDGLMDAGYTVKLVNTTAVQTYSGLKYSTDKDDARWLAHLLRLKILPTGFIYPKEERSVRDLLRKRSQLVHQSTTNILSLQNILARNTAQSLSSYKIKNLADEQAEKLLDDPNITLALKCNLNVIRCLQSSITEIETTVLQQVRIRAEFKQLLTVSGIGEILGLTIMLESGDMNRFSKVGNFSSYCRCVKSERLSNGKKKGEGNRKSGNKYLAWAFIEAANFAIRYNDKIKAFYQKKKAKTNGIIATKAVANKLARACYHILKDQVPFDVNKSFG

SEQ ID NO: 106975 - protein, 338 aa, unidentified
MKKNYFVGIDVSKHTLDAAFIVEQDDQRTEPCWKVFDNNEEGLSSMKTWLQNNQVSFNDNTLFVIENTGLYHRRLVNFCNKHQLNLCIENGAQVKWSLGIARGKSDKVDSRRLATYAVRFADRLKPAAALHEGVQAIKDLITLRNRHIVQLSSLRTHLKELKATTNTKAVKELEKIHLPLIRAMKTAIKKTEAAIIKKIQANDLTKKQYRLLLSIPCIGPVTASYLIACTNAFTLCSNGKQLACYCGVVPFEYQSGISIKGKYHVHKMANKNLKALLHLCAISAIKYVQEIKDYFNRKVEEGKHKMSIINAIRNKLVLRAFAVIRNDKPFVENRCIAP

SEQ ID NO: 106976 - protein, 317 aa, unidentified
MPTSGSFIGIDISKTRLDLAVHGAGTPWQVAYDAAGVKQVVTTLLPLAPTLIVLEATGGLEPRVVSALVAAQLPVVVVNPRQVRAFAQATGILAKTDRLDAQVLAHFAAVMQPTPRPLPDAATQQLSAVLTRRQQLVDMMTAESNRLASQANSALRKRVRVHIAWLTQELGRTEKELTQLIQQSPVWRVQDDLLQSAKGVGPILSQTLLAEVPELGQLNRKQMAALIGVAPFNRDSGGQHGKRRIWGGRARVRAVLYMGALVATRHNPVIKAFYERLLAAGKEKKVALTACMRKLLTILNAMIQHQTKWQDMRSMSH

SEQ ID NO: 106977 - protein, 341 aa, unidentified
MNVKTIGIDLAKNVFQIHGVDEHGKRLFNKQLRRAQMASFFANIPPCLSGMEACASAHFWANKLISMGHNVKLMAPQFVKPYVKTNKHDAADAEAICEAVTRPNMRFVPVKTAEQQAVLALHRSRQSFIKQRTAQANQIRGLLAEFGIVVPRGIQQLQRRLPELVEDADNPLPVLFRTQLSLLQHHMAYLFDVIATLDKQIEQCYRQNALCQRIGKIPGIGPVTASALIATIGKANNFENGRQLAAWLGLVPRQHSSGGKQVLLGISKRGDTYLRTLLIHGARAVLQSAKHKQDAVSSWANQLMARRNNNIASVALANKNARTVWALLAKEREYCAPIISA

SEQ ID NO: 106978 - protein, 347 aa, unidentified
MKIATIGLDLAKTLFQVHGVDSQGHIVVRKQLRRADVLPFFAKLEPCVVGMEACGSSHYWGRELTKLGHTVRLIAPQFVRPYVKNNKTDAADAEAICEAVNRPNMRFVPIKTQAQQTMLSLHRARAGVVKSRTALANQIRGLLSEFGIVLPQGIRLLGQRAIEALSNREYEHCEQFRTLIQILVEHLRELGNKAAELEGRIRAMHRTDEAGQLLETIPGVGPLTASALAASIGNPRAFRDGRELAAWLGLVPRQHSSGGKPRLLGISKRGDTALRTLLIHGARAVIRMAATKPEMADSWVMKLCRRRHKNIAAVALAAKNARTAWALLVRKQVYQVSHVPIRSGVTA

SEQ ID NO: 106979 - protein, 368 aa, unidentified
MGSVAVVAMDIHKKFSKAVVMDEAGQILWECEVEHGDLAVMSEFFSRFEAGAHVVMEATFNWPWIADLAQGAGLCVHLVDSMRAREMAKGYAKSDRKDAIYLGKLFLSSEIFPEVYLAPVDVRDKRYLFRQRSLLVRTRTAVKNAVHGQLFRLGYVTDEEVSDLFGVSGRQYLAGLEVGEKERFLLEEKLKVIDVLALHMGILEGKIAVQLEEDPRAAILMSVPGIGKLVAYAILAEMGQVERFADRRALSAYAGLLPLEDRSGGKANPKHTGQKYNRWLRHAALEAVSGALRSSGRMKSLYMRVKLRNRSTPGKARVAVAREILELAWLLLTRGQYYQEDPPGRPGSRIEVSSRPNRASQAALCARS

SEQ ID NO: 106980 - protein, 341 aa, unidentified
MDHYAGIDVSVEYSSVCVVDGCGKVVREGKVASEPEALIGWFGSLGLSLARIGLEAGPLSQWLFAAMRDAGLAMELLETRHVRNAFKTMPVKTDRKDARGIAELIRLGWFRPVHCKSMAAQETRAILTARKQMQSKLHDVEMSLRGILRGFGLKVGKTTPKQFDGRIRELVGGHPTLEVIAEEMLGARAALLRAFNGFEKRVRAMARHDAKARLLMTTPSVGAIVALTFASAIDDPARFRSSKSVGAHFGMTPKKYQSGETDYSGRISKIGDSCVRTGLYEAAHVMLTRPVKGSALKSWAMRLAKRAGMQKAKVALARKLAVIMHRMLVEGKPFNLATPAA

SEQ ID NO: 106981 - protein, 341 aa, unidentified
MKVSTIGLDLAKNVFQVHGIADDGSVVIRRQLRRGEVLPLFSGLAPCLVGMEACGSAHYWARELSALGHEVRLMPPRYVKPYVKRGKNDAADAEAICEAVRRPSMRFVPIKSVEQQGVLVIHKTRDLLVRQRTVLVNALRSHLAEFGIVEAKGLSKAATLLAVVRDKADQRVPATARAALDALVDAFDALVRQLKTLDAAIMRWHRASAASRRLATIPGIGPITASAIAATVAEPTAFRSGRHFAAWLGLTPRQNSSGGKDRLGGISKQGNPYIRRLLYIGAVGVVRYARKRSALESWVANLLTRRPARVVTTALANKMARIAWAVLARGQDYRTGQPVAA

SEQ ID NO: 106982 - protein, 353 aa, unidentified
MDSVKYIGMDVHKEAISIAVLNSSGKLVMECVIETKAATILQFFEGLRGSLHVTFEEGTWAAWLYDLLKPHVTKIVVCNPRRNALLKEGSKSDRIDARKLAELLRSNLLRPVYHGEHGVRALKELARSYLTISKDLGRVTSRLKAIYRSWGIPCAGKQVYAPRYRAEWLAKLTEAGVCRRAEFYYQQFDALRPLRQEVRRDLLAEAKKHSATKLLREIPFIGPVRAALIIALLQTPHRFRTKRQLWTYSGFGIETHSSADHRSVDGKLQRSKKQLSIRGLNHNHDLKNLFKSAATIAAAKPGPFQEFYDALIAKGIKPEMARLTLARKIAAITLVVWKKGVRFDAQYLKPQTA

SEQ ID NO: 106983 - protein, 326 aa, unidentified
MVTSVGVDISSESFAVCVIDSGSHRNQFDNTESGFTACHSWMQKQGIVASEALAVLEATGVYWEALALYLHQQGYRVSVVNPAQVKYFARSILQRGKSDPQDAELLARFAASMNPRVWEPPSAISEELQTLMRQRDAYVAMLTQERNRLHALKRSAHQSKRAITISEQTIRFLQQQVKELDESFKDTISHDARWQKLLSLLQTVPGIGLVTAAVLLTETGALSAFHSARQLTAYAGIAPAPYSSGKTVLRQPHISKIGNPRLRRAFYMAALSSIRFNPAIRSFYNRLSAKGKPKKVVIVAIARKLLVWSFAICKSQEPFNPQYALA

SEQ ID NO: 106984 - protein, 353 aa, unidentified
MHTHKKSFDPVATIGLDIGKNTFHLVGLDKRGAIALRIKVSRSQLVRRLVNLPPCLVGLEAGSGSHHIARQIQALGHDVRLIPAQYVKPFLKGHKNDYRDAEAIAEAVQRPTMNFVAIKTPEQSDLLSLHRVRSRLVRQRTAIINQIRGFLIERGITVRQGPTPLRRVLPQVLASPPEVLSPRLLRLIAELDQDWRRLDERLEALSTEIASLSEDDPACQRLMSVPGVGPIISSAVVAAIGTGSGFKQGRDFAAWLGLVPKQESTGDRTKLGRISKRGNKYLRTLFVQAAHVVLARRPAAALRALWPWIEQASKRLAHRNLLAIALANKLARIAWAVLARGRDYEPRITANAA

SEQ ID NO: 106985 - protein, 430 aa, unidentified
MEIVHPRVAGLDVHKKVVWVAARLPGERPGERTVTVRRVKTFWRSLRQMAAWLAGLGVTDAAMESTGVYWWPVYHALAQAGIQVCVCNAAHMRNVPGRKTDLADCQWIAELHEHGLLRASFIPTGAVAELRARTRYRKKLIQQRVSEGQRLSKVLEDAGIKIDSVASELLGKSGRAMIEALIAGEREPGRLASLALGRLRRKTEELAMACDGRFTAAHAQMCRLHLDAYDHLTGQIAELDALVAEAAAPFAVLIPRLVTIPGIGRRTAEVIVAETGGDMARFATPARLAAWAGLAPGDNESAGKRRHAAARKGNRYLRVAMVEAAWATARTRTRPGARFRRLARRFGRGHEKKAALAVAHTLTRITWAVLSRGEDYADAGEDYYEQRDRRNREHLIRHHQQALARLGCQVTLIPPGDGSPPGTGPSQPAA

SEQ ID NO: 106986 - protein, 407 aa, unidentified
MEVLYPRCAGLDVHAANVVGCVRIAVGGTVTYTHRTVSTTTRGLLDLAEWLTAQGVTHVAMEATGVYWKPVWHVLEDGFTLVLANAAHIRNIPGRKSDKNDATWIADLLALGLIRSSFVPPAPIQDLRDLTRTRKQLVRELSRHTQRIQKTLEDANLKLTEVISDVLGQSGRAILTALVAGETDPERLIALTRGLKASHETLVHALHGRVTAHHRFMIQLHLTQVTALEQAVAHLDARIGEALAPFRAAVSLLTTMPGVKTTAAAVIVAEIGVDMAVFPSAGHLLSWAGLCPRLDQSAGKRRSTRTRQSAPWLKTTLVQIAWPASRKKDSYFHAQFLRLKSRRGPKKAILAVAATMLTDVYYMLRDGVEFHDLGDQYFAQGDKDRITKRLLRRLRDLGVEVEVKNAA

SEQ ID NO: 106987 - protein, 347 aa, unidentified
MNITRVGVDIAKSVFHVHAVDRRENTQWQAKLKRSQWLESLCEHVDPGAEIGMEACASAHHWGRELQKRGYRVKLIAAQFVKPYVKSNKNDRVDAEAICEAMSRPGMRFVAVKSVEQQDTQAAHRIREELVGHRTAKANQIRGLVGEYGIVAPVGIQKLRFALPQWLEDAENGLTDEFRVLLAELADDLRHLDGRISGLDERIAQCVKNDPVAWRLLELRGVGPLTASALAGALGDGKGFRKGRDFAASLGLTPRQHSTGGKDRLLGISKRGDSYLRKLLVHGARAVLRHAKARDDGLSQWLNELAARKHVNVATVALANKTARIAWAIVHNETAYDPMLSATKQAG

SEQ ID NO: 106988 - protein, 328 aa, unidentified
MFYLGMDVAKAKLDCCLLLDEAAGRRKTKVVNNTKSGIVDLLAWSAKQNVSPEELHVVMEATGVYHEQAALALTDAGITVSIINPAQIKDFGRGLAVRTKTDGVDSFVLARYGALLKPAAWQPPPPEARMLQALLARREAIAQDLQRERNRQEKADATDTPEQIRQSLADSIEFLVKQLADLQQEIDRHIDKHSNLKDDMALLQSIPAVGPQVGGNLLSVMHSHNFGSAEQLAAYLGLVPVERQSGSSVLGRAKLSKAGPARIRAVLYMAAVVATRCNPHVKTLYDRLLARGKSKMSALGAAMRKLVHLCFGVLKTRQPYQANYAKIA

SEQ ID NO: 106989 - protein, 357 aa, unidentified
MSKQNAAGVDTHRDTHSIAIIDSGGQILKQWTISATVEGYQQAIADAVEFGDVVWGIEGTGSYGRGFADSLLKAGATVYEVPGNLTKRHRRHSSRKGKSDQQDAQAIAEVVLREGDRLPRVEQLDEQEAIRLLYDRRDRCVRSRTESINRLRAGALRLALRDLPQDLTSGVALDRYEDALRTVLASSHTSRALIDEMSDTIADVRRLNSTISALERRLIPFVSRLVPDLIEMRGVSTVVAAGLVGHAGNLNNCRNADAFAMRAGVAPVSCSSGRSDSVRVNTGGNRQLNRCLHIIALTQIRSDGHVGKVYYDRKRSEGKAHRSALRALKRQLATVVFLRLKTASTKVDAAAPAAIAA

SEQ ID NO: 106990 - protein, 354 aa, unidentified
MTMLAETVDAIIGIDTHRDSHEVEIADVTGKPIALMRIGNDSGGFAQLLAAIAELAPGPRVAVLVEGSRSYGIGLARTLTAAGLLVIECGQPARRQRRGKGKSDPIDAHLAVLAGLRMDTSQVPELRADGDREALRILLGARQEITVASTAQASRLRALLLAGDDADRQAARTALTTTVLQVLAQRAVPAAGRDHAVRQAEIRRLALALGQARRELKENLAQLAAIAEDIAPGSTKGYGIGPVSAAQAIVSFSHPGRCRSEAAFAALGGTCPIPASSGRTIRHRLNRGGDRALNRAIHMIAVTRIRGCPRTRAYVARRTAEGKTGPEIRRCIKRYIARELYRHLTRSMTPPAAP

SEQ ID NO: 106991 - protein, 320 aa, unidentified
MTYIGIDVSKDSFVVAYPAKSGYTTKTFKNTTSGVRQFITSLPEGCHCVMEATGNYSMLLLYLLQQSNITVSMENPQKIKHFARAMLSTTKTDEIDAKLIAMYGEKMEPAPYKIPSESIIQLKQKRTVLRQLKKQLTMMINLQHSLSVLPKQDPTAKVATEQTIKFLRKQISKLEDEISHLSNKEFKRQMELLTSIKGIGENIASALIMATGGFTYFSSAKQISRFLGLCPTYQQSGTSVNVKGHINRNGDPYLRSQLYLAAVSSIVCNSACRKAFLKMKERGKSGKVAIIAIANKLIRQAYAVVTNNQSYIDGYVSTLA

SEQ ID NO: 106992 - protein, 351 aa, unidentified
MDRYIGLDAHASSCTVAVLGPSGRKLQCQVLETNAKALIGFLQTVPKNRRLIFEEGTHSNWLYEVLAPHVQETVVVAVRQSRGPKDDERDAFGLAEDLRIGNIKVKVYKKQGEFSTLSHLARAHSTLVVDTVRCQNRIKSLFRSRGITTVGKQVYSVNGRSQWLPQLPNQACGQAKFLYEQYDALREIRKQAEKEMLVEARKHSVYKVIKTCPGMGKIRTAQIMPIVVTPYRFANKRQFWAYCGLGIVMRSSSDWVRTQNGEWIKASIQKTRGLNRNFNRSLKHIFKGAATTIICRANKDDPLYRHYQGLLDGGTKPNLAKLTISRQIASIVLSVWRSQEVYDPKKLSPKT

SEQ ID NO: 106993 - protein, 366 aa, unidentified
MKKISTAATQKIGKIEGQRLTIGLDLGDRSSWYCVLNEAGEVLLEQKLATTPKAMKEVFGGMPRSRIALETGMHSPWVSRLLGELGHEVIVAHARNVRLIGESRRKDDRLDARTLARLARIDPQLLAPVKHRSAQAQAHLMVIRARAGLVRARTSLINTARGLTKSYGERLRGCNPRNMNPEQAQGLSPELQVALEPLLAEIESLSERIREYNERIEGMAQESYPEVALLKQVKGVGTLIALTYLLTLEDPCRFRKSRDVGCYVGLQPGRRNSGQSEPQLHISKEGDPYLRTLLVQGAHHILGPFGADSDLRRWGLKLAERGGRNGKKRAVIAVARKLAVLLHRLWASGEVYEPLRNSRQLMPAAA

SEQ ID NO: 106994 - protein, 344 aa, unidentified
MKISTISIDLAKNVFQLMMFDDQHKIRQEKRLNRAAFLQFIQQHPPCKVVMESCYSANFWGRELQKLGFEVRLIPAQHVSPFVRGNKNDRNDALAIYEASQRPHIRPVPIKTEHQQEILMLHKIRERLIAERIALTNQTRGVLTDFGFVFNLGHQGFLEGLVELESKELSEIKRMVVKNALDDYKRLRERQLQIEIALKKFITESAAAQILLTLPGVGPIIASAFAASIDKGQAFHSAKDFAVWLGLTPKQSASGLRSSMGGITKRGNNYLRKQLVHGARTLLRKASVKPDALNQWITELRCRKHVNCVIVAIAHRLARLMWVLLTRNSSYQAQPAKNLELVSM

SEQ ID NO: 106995 - protein, 334 aa, unidentified
MWHVGIDLHRETVVIAAVNDTGEASKPITVGCEDTETIESVVKAFGSFRAVIEASATYRWLYDLLQPYGTILLAHPFRLRAMVQRRTKTDKLDAQLLANLLRINQIPLAYIPPEPYQQLRDLTRRRARLGRELAEAKIHLRALLARQNRHAPFRVPFGVRGLAWFRGQDFGWIENLVRDELLARLKHFGRQATIIDQHIVRMSSAFPQTQALTEIHGIGLYSALLIVAEVGEPERFRMAKQVGAYAGLTSRVHQSGGHCYRGSISRQGSAWLRWILVQAAMKAIREDAALKNFYTRVRKRSSAKIARVAVARKLAEICWKRLRRWQREHADQAA

SEQ ID NO: 106996 - protein, 327 aa, unidentified
MSKEGSGSMPQETRIVVGLDVAKRKVDACIRSAGLRFAAPSTPEGEAELILWAQANRIGRAVMEASGGYERSWAQILRTAGVEVVIVDPKRIRHFAKAAGRLAKNDRIDAEVIAWFGEMFCDRAVEAQDGAREEVDRLVQARTALKDLEDRVKQQGEHQPPAVVVKAMRAVAKAMRAELRALDAAIRAKIKANPGFARRAEIVDSVPGLGDQTVAGVIAWAPELGKISNEAAAALIGAAPYDDDSGDRKGVRRIRGGRRKLRNLLYMPVMGAATLHNPVLKATYQRLIARGKPAKVAIIACMRKLIVILNTMLARDQTWSPSAGAAA

SEQ ID NO: 106997 - protein, 313 aa, unidentified
MSEIGTYIGIDVSKSYLDVYAPSLGAFRVEYTDGGLEELVERLSHLEIALVVMEATGKMESVCAAFLANSGMPVAVINPRRVRDFACASGRLAKTDKIDAEVIALFGGSMKPEPRKIRNEDEQRFDELLTRRRQVIGMTTTEKNRLGTTRDRKLHRRIIAHIKWLEHELSDVNREMSDAIEASPVWRVKDALLRSVPGIGETTSRVLIAELPELGELTRKEIASLVGVAPMNRDSGALRGRRTISGGRPAVRTALYMAALSASRYNPDLRSFYQRLVAAGKPKKVALTATMRKLIVMLNAVVARGTCWQPECP

SEQ ID NO: 106998 - protein, 417 aa, unidentified
MNAVGIDVSKGKSTVAIYRPGDQVILSPRNFHHTQTGINSLIEIIKGLDGETKVCMEHTGRYYEPVATWLSDAGIFVSTINPLLIRAFGDDSLRAPKTDKADAKKIARYTLDRWAKLKQYGHMDETRNTLKTMNRQFGFYMDQKTAMKNNLIALQDQTFPGANTFFDSPARKDGSQKWVDFAHTYWHVDCVREKSLEAFTEHYQKWCKRKGYNFSADKAEKIYHKASDLIAVFPKDAYTKQLVRQAVAMLNLASETVETLRAKMDQLASTLPEYPVVMAMNGVGPTLGPQLMAEIGDITRFEKRGSLTAFAGVDPGKNESGQYSQKSVKTSKKGSPHLRKTLFQIMDSLIQRSPEDDPVYAFMDKKRAQGKPYHVYMTAGANKFLRIYYGRVKEYISGISEDVKQPHQTSNGKEICS

SEQ ID NO: 106999 - protein, 417 aa, unidentified
MKVVYPICCGVDVHKTFLVATIITSEGLTPHYQKKRFSTFNNSILAFKQWLLDNQCFNVCMESTGKYWIPVYNLLEDQISVTVANPKWVKAIKGNKDDNKDSKWIGDLFRLGLVPGSFVPDKPFRILREYTRYRSRLVSSRSSEKNRFQNVFTVCNVALDAVVSDMFGVSASSITDYILTSDSFDPSVCASFLKRSLKNKADEVMESIEGFMMEPAQKARALIVRDHLEYLNQRIAELDRMVDVLVAPYEDIIRLLCTVPGIDRLSAITIISEIGTDMSQFASSKRICSWAGLTPGNNESAGKKKSVRISRAGVYLKPALVQVAFAAVKSNEFPYYRFKYERISIRRGKKRAIIAIARMILTAVYHMLSTGEAWNPCDLYKIDMPQNLQDSYKKKAIRQAKQLLLSQGITDLLQMPA

SEQ ID NO: 107000 - protein, 308 aa, unidentified
MTIHPCFIGCDIAKSHLDLFEETSGTSLRIANTSEAIATWLSSLDSQTSFVAFEATGPYDRVLRQALEQAGCRFARINPGRARDFARATGRLAKTDAIDAHMLAAMARMLALTPDTASDPARNALAQLHKRRDQLVETRACERVRHSEGQDPSGSLARHLAWLDAEIATLEHLVSEALRADETLTRTQALLRSAPGVGPVTAATLIALMPELGHVSPKAVAALAGLAPFNNDSGRRRGQRMIKGGRRRVRRALYMAALAAIRTSPRFKAFYETIRARSAAAKVAIIAVARKLLVTLNAMLKTHTAFQA

SEQ ID NO: 107001 - protein, 412 aa, unidentified
MEVLHRVIAGLDVHAKQVVACLRVQIGQRCRRTLRQFPTTTPGLLELHAWLIEQGCPIVLIESTGVYWRPVFNILEGSIEVILANAHHVKTLPGRKTDLRDAEWLADLGAHGLVRSSFIPPAPIRELRELTRYRKALIQARSSEMNRVQKVLESANIKLGTVVSDVFGASGRAMLRALVAGERDADRLAALAKGSLRTKLDQLIPALTGRFSDAHGFLLRQLLDHVEYLDRQIATVSAEVARLCGPFEEPLALLETIPGVGRATAEVLLAETEGDMRHFPTAHHLASWVGICPGNNESAGKRRTGRTRKGNRWLRAALCEAAWAASRSKGTYLQSQFRRLAFARGKGGKRAAVAVAHSILIAVWHMLAHRVPYRDLGPLSLTTREPERAKRVLVRKLEQLGYHVSLAAKVAA

SEQ ID NO: 107002 - protein, 376 aa, unidentified
MGWSGRAPALPATNLARGAKDKEHPMSHNLNSTITVIGIDIGKNSFHVVGLDERGGIVLRQKWSRSQVEARLANMPSCLIGMEACVGAHHLSRKLKAFGHDARLMPAKYVRPYSKGQKNDFRDAEAIAEAVQRPTMKFVATKTVDQLDLQALHRVRERLVSQRTGIMNQIRAFLLERGIAVRQGQWFLRAELPRMLAAPPDVLSPRMVRIISGLAADWRLLDERIEELSGEITEFAKQDTGCERLMSIPGIGPLISSAMVAAIGTGDVFSKGRDFAAWLGLVPKQISTGDRTILGKISKRGNRYLRTLFVQAAWVVLVKIKPSRWEGHGLKHWIEAAKRRLHRNVLAIALANKLARVAWSVLARGRAFEASKLQAA

SEQ ID NO: 107003 - protein, 391 aa, unidentified
MVCVGIDVAKDKHDCCILDSEGTTLVDCFTIPNNMDGFKSLLQTIQDCSQKSDKIKVGLEATGHYSYNILGFLLDNDLPVYVMNPLHTNLYRKSLSLRKTKTDRVDAKTIATMLLSDVDLKSYTDTAYHNEELKSLTRYRFDKVQERAKLKQSVSRLVTILFPELEQLVSSIHGTSIYALLSEYPGAKQISEAHLTRLANILVKTSRGHYRKDKATHIRDAARISIGSVMPAKSLELKHTIKLIQELASEINEIEDAIRKIMDELKPPILSIPGMGFHSAAMILAEVGDFSNFNSPDKVLAYAGCSPSTYQSGKLTNCYAHMEKRGSRYLRYALYTATKYVCYWNPVFTEYLTKKQAEGKHYNVALSHATKKLVRLIYALQKSGKAYLAVT

SEQ ID NO: 107004 - protein, 364 aa, unidentified
MQTYLRYCVGLDISKDNLQVCLSVIDTTGRVTVKATTKVPNKPTGFSALVNWVARHRKLELPLTYLMESTGVYHEAVAWYLHQQDQSVSILLPNKAKHYLKSLGYKSKNDKIDAQGLSRMGLEQQLALWKPLSKNLYGLRLLTRQHQRLQELKTQSTNQQHALEHSAFDSSFIDKQLTKLIAVYDAQLAALETAIKELIETDPVLKPKVDALVKVKGLALLSVAVLVAETNGFEGFTNQRHLVSYAGYDVVENQSGNHSGKTRISKKGNSRLRRILHMPAFNAVRFHEPTCEALYTRVYERSGIKMKAYVAVQKRLLLMAYALWRHGVDYDPKYLANRAEKDKKIVPTSGTTRDQLAEAELSYL

SEQ ID NO: 107005 - protein, 370 aa, unidentified
MLDTTTFIGLDVHARSIKAVSLDVMTGEVRAATFGYDAGAVAEWVRSVDPGARCVYESGVTGFDLQKRLTGLGVDCVVGAVSKMIKPSADRRRKNDRNDAEFLARMLSVGNVVEVWVPDDECEAARDLTRALEDARDDLSRSKQRLSKFLLRHGLVFDERTPTGRRKGNWTRAHWSWIESIRFAEGADNDVLAYYVDAVRRAAEEKARLEGLVEAEARKPRWRKRVDSLRCLKGVDTASAADLVFEAGEFSRFRNARSFAAWVGLTPSEHSSGESDRRGAITKAGNKHLRKALVEAAWHYLTCSGRPKDLARGQAPDRVARRHAAKGVRRLVERREALLARGVHNNKANVATARELACWVWAVGLMAEEA

SEQ ID NO: 107006 - protein, 341 aa, unidentified
MTLVMGMDQHREQITAEWIDTITGEISRARIALADRIAVRTFLARFDGAGLEVALEATTGWRFLVEELQRAGAERHLAESAETSGLKGKKRRAKTDWADARHLRELLLIGRLPESWIAPAHLLDLRARVRCRHTLVHQRTEWQQRMHSVLYHHGVPRARKLLTLANRERIAAIKLPAAAREQLTIALEMIDAIEVQIGPVDLALRAYARKQPGCRALIDQIYGLGPLTSVTLLAELGDTRRFQNSRDAVRYSGLDVTVYQSDQHRVSGRLSRQGPPALRWALYEAAQAARRPSSPDRPYYEQLAERLGGNRARVAIARKLLKRSYHVLRGLGDQALEPVTA

SEQ ID NO: 107007 - protein, 340 aa, unidentified
MRIIGCDLHAAQQSIAMLDCETGEVIEKTLHHQDAEVRDFYRALPAPVVVGIEATGTMGWFLQLMDELGIACRVGHPAAIRQAETRRQKHDRRDATLLLQLLVEHRFPAIWMPTTELRDLRALLLHRHQWVRMRTRVQHALQAIALNHGLRRGPALWTRDGQAAIAALPLPRYATDRRNELHALYRHLTEQLGRLDDRVAQEAQGRPRATLLMTHPGVGPVTALATEVFLGDPRRFRDAKALASYVGMIPSEYSSGPKQRLGAISKQGNAFLRFLWCEATQHAVTHDPALKRFYRRKLQQKGFAKAKVAAARKLGIRLWIMLRDQIDYAEFCRRSSARQA

SEQ ID NO: 107008 - protein, 350 aa, unidentified
MVVVGADVHKRTHTFVAVDEAGRKLGEKVVTAITAGHAEAVMWVRERFGTEVVWAIEDCRHLSARLERDLLSAGQRVVRVPPKLMAQTRASARTRGKSDPIDALAVARGFLREPDLPIASHDDVSRELKLLVDRREVLVAQRTATINRLLWRVHELDPEQAPKARSLHLAKHRRILGDWLAPVPGLVAELARDELADIIRLTEAINALATRIEQRVRDVAPALLALPGCGELTAAKLVGETAGVGRFKSAAAFARHAGVAPVPVWSGNTAGRVRMTRSGNRQLNAALHRIAVTQIRLDGLGRAYYRRLLADGKSKPEALRCLKRRLARVVFQHLHTDHNTRQQPCQLAAA

SEQ ID NO: 107009 - protein, 339 aa, unidentified
MTKATTIGLDIAKQVFQVHGADKAGRAVLRRKLRRSEVSRFFSEQPPCLVGIEASGSAHYWARVLGGLGHSVRLMAPQFVKPYVKSQKNDANDAEAICEAVTRPTMRFVPQKSIEQQDLQCLHRVRSRLVANRTQLINQIRGLLAEYGIVLPQHPGQVRRGLPAVLEDAESQLTGFGRELFQNLYEELAQLDEKIGDADARIQTAFQSTPDCRRIAAVEGVGPLIATAIVAAISNGHAFENGRQFSAWLGLVPRQNSSGGKSRLLGISKRGDPYLRTLLIHGARSVVYRAKAKTDKRSLWINDKQQRLGTSKACVAVANKNARIIWSLIAREQEYQRAA

SEQ ID NO: 107010 - protein, 315 aa, unidentified
MEPVYVGIDISKDRLDVAALPSGEVWSHPHDGAGIAALLERLRSLAPELVITEATGGLERTLVSELATSSVPVVIVNPRQVRDFARATGQWAKTDAIDAMILALFGQRVRPEVRPLADEETQKLEALLVRRRQLLEMMVAEGNRLPLASAATAKSLKAHIRFLEKQIESHESDLEHAIKSSSLWRVRDKLLQSVPGVGPNLSRTLLGELPELGQLTNRQIAKLVGVAPLNRDSGRWRGQRRIWGGRASVRSALYMAAFSAIRWNPVIRPYDERLRSKGKLHKVALVACMRKLLTILNAMIRNGISWSPTLVHTVQ

SEQ ID NO: 107011 - protein, 452 aa, unidentified
MEKPQEVEDEEYERVWERVAAVDVAKASGVACTRVPDEDRPGRRRTHVWTVTATVSAVTELADHLRCQGIQIVTLESTSDYWRIWWVVLEAAGLKVQLVNARAVRNVPGRAKTDKKDAVWLAKLTERGMLRPSFVPPPEIRRLRDFTRLRAELVHERTRYWARLEKLLERALIKISSVASTLDTDSTRAMIEALIAGQRNPKALAELAIGKMRPKRAQLAEALDGKFEPHHGELARIILDQIDALTARIDQLSDRVTELIDQIPAAQGVDADGTTGPGAGTGPGAPVLPAVARLDEITGCGVIAAQAVIAEIGLDMTVFGTAGRLVSWAKRCPQTRQSGKKTTSGKAGKGNPYLNGILGEVAASASRTDTFLGERYRRLARRRGKRKALAAIARSILVIIFHLLADPEARFHDLGPDFYDNRISRERKIRNHVRQLEALGLTVTLAPKEEAA

SEQ ID NO: 107012 - protein, 338 aa, unidentified
MSLYAAIDLHSSNSVLAVMDGDGKAVLRCRRPNDLPRLLNDLAPYRDELVGVAVESTYNWYWLVDGLMDHGYAVHLVNTTAIPQYDGLKHGDDDSDALHLAQLMRLGLLPEGYIYPREQRGTRDLLRRRFSLVRQAVRLMLSIQSSFSRSTGKQLSANALRRLTPSQLVDLFPELSIRYGVLIQFKLWLTLQDQITALEQWIRKDLARPDLLARLQSVPGIGPILGMTILLESGAIERFDSVGDYASYCRMVESVRLSNGKRKGAGNRKCGNRYLCWAFMEAANYAVRYDPLIRRWYERKRARKHRVVAIKAVAHKLARACYHMLHEGTPFDPTRAFG

SEQ ID NO: 107013 - protein, 336 aa, unidentified
MTDKDGNILCEKTISNTSQQVRQLCHEHRGALFAIEVGTHSPWISRLIEASDCTCLVANARKLRAIYQNDRKCDEYDARMLAKLARVDPELLSPIQHGSEARQLHRLSITLRDSLVRQRVNIISTIRFSLKSLGVRIPGCSTPYFAGRCRDALGGTAMLETVEACLDALEGLNTQIKALNKQIAETAAKHYPETKLLEQIGGVGPITSLSFVLAVGQPERFKKTRDVGAYFGLVPRRDQSGQSDKQLPISKAGNRTLRRLLVQCAQYIMGSFGPDCDLRNYGLNLAAKGGRSAKRKAVIAVARKLAVLMLQLWKTGEPYDPLRNAPKPKSPNAKVA

SEQ ID NO: 107014 - protein, 342 aa, unidentified
MGYFAGLDVSLEETAICIVDDVGKIVREARAASEPDALIAFFGACGMRMERVGLEACSLTAWLHAGLTEAGIPATCIETRQAKAAMGAMPNKTDRNDARGLAQIMRTGWYRAVHVKSPCCRSWRALLTARRMVLNKRRDVENGIRALLRESGLKVGTPSRRDFAARVRELTADDPVLASLAESLLSVVETMTQEVGRLTKRALDEVKVEPTCRRLMTVPGVGPLTALAFRATIDQPDRFRKSRDVGAHLGLTPRRYQSGETDVQGHISRCGDELARTALYEAAHSLLIRSTKWSALRAWGMTIAKRRGMARARVAVARKLAVILHRMWADGSEFRWGKQAAA

SEQ ID NO: 107015 - protein, 337 aa, unidentified
MEVTPTYAGIDWSWQHHALCIVDAAGRRAEEITVAHSKPGLAKVTTLLHRHGVERVGIERGDGPVVEHLIRDGLEVVVISARQVKSLRARYGSAGNKDDRFDAFVLADALRTDPYRWAVVRPDSDATVALRGLVRARQDLVGHRIAVHNQLLATLQHHFPGAIGLFHQLDIPISLAFLRRFPCEAKAAWLSPTRLAHWLHANGYCGRATAEELFTHLHQAATGHLSGATSEAGELIVLSLVDLLTSIRQRQSELETRIKEALLAHPDGPIMQSLPRSGVVRAATLLAEIGDCRARFPDAQSLAAAAGVAPSTRQSGKHCNVTYRRGCNKQLRAALID

SEQ ID NO: 107016 - protein, 342 aa, unidentified
MPCYVGLDVSKQLTSICAMDAKGGVLREGRVESSPKSIVDFLRGDRVRYARVGIEACGLAAWLYQGLARAGLPVLCIEARHAHGVLSARCQQKTDRSDARGIADLMRTGTFRVVHIKTRASQEARAILTARKILRAKAMDLENAIRGLLLGFGIKFEPARGLRFDRRVKPLIAKDAFAARLVLPLLDLRERLLAQAAGFEAQLRELAAQDSVCANLMTAPGVGPLTALTFRTAIDEPGRFASSRSVGAHFGLVPKLSQSGDVERRGRITKHGDRDVRAMLYLAALSAFRTGGRKSWLSAWGEQVAARRGRKRAVVAVARRLAVVLHRMWLSGSPFRWETLPA

SEQ ID NO: 107017 - protein, 344 aa, unidentified
MDHFAGLDVSVKETSICIVDDRGRIVKEAKVASEPAALLKVLGNPTYRFKRIGLEAGPLSQWLFSALAEAELPVVCVETRHMQAVLKAQINKTDRNDARGIAQMIRVGLYRPVHVKTLRSQKLRMLLTHRRLLQSKAIAIENDLRGTLRNFGLKVGMVGKVRFEARIQELVENIPDLALLVEPLLIVRRVLREQIVILHRRLLAIVREDEVCRRLMTTPGVGPVVALTYRATVDVPARFRKSKSVGAVFGLTCSRYQSGEIDWSGKISRCGDEMMRTMLYEAAQSMIHSKKWSWLKAWAMQIAKRRGMKKAIVALARRLAVIMHRIWIDGTEFRWTREQAAAAA

SEQ ID NO: 107018 - protein, 340 aa, unidentified
MTIVMGIDQHRAQITTEWLDSVTGEIGRARIAPAHREGVRRFLGRFAGQELEVALEATTGWRFVVEELRRVAAEVHLAEPAQTSALRGNKKRPKSDRADARHLRELLMIGRLPESWIPPEHLLDLRSKVRLRHTLVDQRGEWQQRIRAVLYHHGLPHRRELDLLSNEGRAWLEQVELPDAAREQITTAITMTEALNAQIAPLDRQLRLYARRQAGCKALMGHYGIGELTSVAILAELGDCRRFSSSRQAVRYAGMDITVYQSDQRRSPGHLSRQGPPALRWALYEAAQVARRAGSPDCRYYQQAAERLGSNRACLAVARKLLMRAYHTLRELGEEALQPA

SEQ ID NO: 107019 - protein, 312 aa, unidentified
MEKLSYGGIDVSKDRLEVVVLPEGWFFSVSNDTAGWTELVARLRPLAVCAIGLEPSGGYERGIIRALLAARLSVRRINPNKLRQFARARGVLAKNDRLDARLMAEYVAIMPTRAVQRDDAVDRLAEVVTMRRQLCDEHVTVENQTAHLEDAMLRRLSKRRLVRLEADIRLLDKRLAEMVATNAAFARLYELLTSMPGVGPVLAFTLIALLPELGKMGRKQIAALVGLAPYDFDSGKLRGHRSIYGGRMPIRNVLYMAALSASRYNPALKTFSNRLAHANKKSKVIIVAVMRKMITTLNAMLRDNAVWQPQSN

SEQ ID NO: 107020 - protein, 343 aa, unidentified
MEYYIGLDVSLKQTSICVVDQSGVIVREGVVESDPEPIASFVRSKAPGTVRIGIETGPTTTWLWTELKRLGLPVICIDARHAKAVLKMQINKSDRNDAAGIARIMQTGWFKEVRVKDLDSHAVKALLASRALLVKIKRDLENQVRGLLKNLGLVIGRAKFDVFAVRAEGLVENHPELAAVIRPLLEARKAIEQQVDNMDRKVLKLARHDVQVRRFMTVPGVGPITALCFKATIDDPARFRRSRSVGAYIGLTTRRHASGEIDWSGRISKCGDAMMRMYLFEAAGVLLTRVPKWSGLKAWGAKLAKRNGLRKAKVAVARKLAVILHRMWIDGTEFNWSTKKAAA

SEQ ID NO: 107021 - protein, 349 aa, unidentified
MTIVEDRPVITGGVDTHADLHVAAALDPIGGLLGVQEFPATAAGYAGLLGWLGGFGDIALVGVEGTGSYGAGLARHLAAAGIRVVEADRADRQDRHRAGKSDPLDAVSAARAAQSGRASGAPKGRDGTVEAIRALMVAKRSARAERTQAINQARALIVTGPEELRARFAGHRPAQLVEAIASLRPRPGDVPGYATRVALRELGRRAQFLDAQLDRLDELIGPLVTARAPGLLALHGVGPDTAALLLIAAGDHPERLRSESSWAHLCGAAPIPASSGKVSRHRLNRGGDRQASHALWRIVITRLGSRPGHPATRAYVERRTKEGLSKKEIIRCLKRYVAREVYHQLRAGA

SEQ ID NO: 107022 - protein, 438 aa, unidentified
MSNKVIFNLDDLFISVGIDVGADFSWMSIALPNQQFVGKPYKILHNSIDSLTTAVSKIKEAEELYSLESRIFLESTGIYHYPLFCYLRDKGFNCSVINPIITKNSTNINIRKVHNDRFDSKKAALVGLKPDLKVSLMPSDLALNCRNLCREYYDLMDNRSAYVNKLQGELRMAFPQYLGIFSKVTINTSLTLLETYTSPSAFLKADKQEIIDIIKSTARFGLTYAQNKYNAIIQAATDANQFGYIIDSNIKRIRLYISFIRKYDEEINNILESLHELVDANEDADFVKQIHLIETFKGAGFLSAVSIMGEIGDFSAFSKPKQLFAYFGLDPAVKQSGKFEGTKVQMSKRGSAIARRVIHTLTLQSISISRNGEAKNPVLREYYLKKCDSKPKLVAMGAVSHKVCNMIFAILRDNKPFKIIAPQEHIKQYNASKCDMAA

SEQ ID NO: 107023 - protein, 345 aa, unidentified
MTTMNYIGLDVHKKTISYCVKDVSGRIQQEGKIGSTRRELDCWMKTLPQPWTVAMEATIFSGWIYDHLLPHATQIKVAHPLMLRAIAAAKKKNDQIDASKLADCLRCDFLPECHMMPRAIRDRRRTLRYRHLLVRQMVQMKNRVSGLLMETGVEYNKQRLHKVSYFRELLSANGEVDPSIRPLLKLSRETIERCQKTEYALVSSLQRDPVLADRIKRLRTVPGVGPITALTWALEIGDVSRFGSIKKAISYCGLCGDERSSADKAMRMPLSKQRNKHIQRALVEAAKLAPRQNHEMAVIYDQERQKGNSNRATLAVARKMVAYLLAVDRQQRDFVPAEERRTSAA

SEQ ID NO: 107024 - protein, 344 aa, unidentified
MEVAIGVDPAKGSLAVAAVDPLGRVLDAREFSNDPGGHRALLGWVRERDRDRVIGIECSLSYGAALSRLLLHSGEDVREVPTTLTFRERRRRHSQGKSDLVDSVAIARIVASGEVLPSAHRVEVLTDLRALVDYRDQLVRARTQVANRAHADLVNVRPGYGREVPNLKAKVHRAKARSLVKGDRSVRAELVRRRLGELSRLEGEIAAMDRRIEAMVRQTGTSLIAIPGVGPFIAAKILGEVGDLSRVRSKAAFAVLSGTAPLPASSGQTRRHRLNRGGNRQLNWALHYMALVQSRITPDAQAYMVRQREAGKSHKEAMRCLKRHLSNVVYRHLVADARRTEQAA

SEQ ID NO: 107025 - protein, 454 aa, unidentified
MTRNKKKRANQEGTLPIVHRHAAGIDVGSTFHVVAVSQSADSDPVRSFRSFTGDLHHLADWLSEAGVTTVAMESTGIYWVPVFEILESRGFEVCLVNARDAKNVPGRKSDVKDAQWIQRLHEHGLLRASFRPAAAVVALRAYLRHRQRLIEYAASHVQHMQKALMQMNVQLHHVVSDITGVTGMTIIRAIADGVNDPEALAAFRDVRCKASVETIREALTGHYRAEHTFCLRQALQLYDAYQEQMCDCDAMIEKALHELSRSEQSPSEPLPKPRTKQRAKNEPRFDIRSSLYSLIGVDVTQIHGLGAYSALKLISECGTDMSRWRTAKHFTSWLSLAPGSKISGGKVLSSKTRRSANHAAGVLRMAALSVGRTTTALGAFYRRLAARAGKAKAVTATARKIAILFYNTLRYGTAYLDPGADQYERQYKQRAIKSLRRRAVALGYEIVETSPAGT

SEQ ID NO: 107026 - protein, 431 aa, unidentified
MRRTSKTENEAKNIAAYVGIDWADAEHEIRMKVVETGQVETYQLKQTAESLAEWVQSLRNRFQGQKVGIAVEQRRGALIYALMAYEFLILYPVNPATLAAFRKAFKLSGAKSDPKDSELLLDLILVHRDKLRAWVPEDPDTRLLQMLVEERRRLVDEVTGLTNRLKSTLKLYFPQALELAGDLDKEMALDFLTRWPMLSSVRRAGSTAVERFYREHGMRKQAKIEHLVKSIKEARELTSDRAVLIGSKTKSLVIVQQLRVLVKSVRQINEQIDELFQRHPDQKVFTSFPCAKKVLGPRLLAAFGADRTRYKAASELQCFSGIAPVTMSSGKSKSINKRLACPKFLRQSFHEYAAQSVKKAGWARIYYKGLRQQGMKHHAAVRSLAYKWIRIMYRCWQEQEPYNEFKYQQSLIRRGSPLASALESATNQIAV

SEQ ID NO: 107027 - protein, 431 aa, unidentified
MLKINPLSTLYVGIDVSSKSNYVCALDFYKNKYINSSFANNQPGAEELALKILECLKEHPYITTIVAALESTSVYSIHIANYLSSCEELMRFKPYVFVLNPKCTANYKKSYIGLGKSDPIDAFVIADYARAGNIESEPWRGSQFLALKRLTRHRLHLVECMTREKTYLVSNLYLKFSELQMLEGDDQPFCDIYGATSSSVLMEYFSPEEILDSSEEDLIAFLAKKSRNRIKDISKTADLLKKAARDSYRLDKALYEPLNVSIASSFNCIETFKREIKVIDNAIEKEIKGLNPNAFIILQSIDGIGPVFAGGIIAEIGDITAFHSSDALAKYAGLTWKSNQSGDFDGEDTPMIKAGNRYLRYYLGEAANSMRKHNVEYGTYYRKKYNEVPKHQHKRALALTSRKFVRLVYGLLARNQLYSGVSLDTSIKDSN

SEQ ID NO: 107028 - protein, 311 aa, unidentified
MDEIIIDKGCGLDVHKETVVACVMGSGIKKEIRTFSTKTNDLLRLKTWLSVLGITHVAMESTGPYWKPVFNVLEDGFTVILANARHIKNVPGRKTDVKDSEWMCRLLRCGLLSASFVPPQGIRELRDLTRYRRKLTQALSAEKNRIQKVLEDANIKISSVLSDTFGVSGSQMIEAIMEGKLSEAEMADLAKGKLKSKKEEIREALVGYFQEHHRFMIKASLEHIKYLEKLISDLDQETEKKLAQYQKEYELLQTIPGVKEQGAATIIAEIGADMDIFPSERHLSTWAGMSPGNNESAGKKKAERRPMAIRI

SEQ ID NO: 107029 - protein, 365 aa, unidentified
MTSVPSATELIHLGMDTSISEIVVAVLRPGEEIPVVDRIPSDEESVRRLISRFPDRRMLSSCYEAGPGGYELHRLLTSMGVACDVVAPSLIPKGSSERVKTDKRDSVRLALTHRAGLLTAIRVPSPAEEAVRDLVRARGDLLDDRKRMQQRLNAMLLRHGRVWRGAKWSYAHRTWVDSQVFDEPALAEAFALYRGGLEAREAELAAAEAGLAAWAGREPLAVPVARLGGYRGIAQLTGLTLAAEVVDWRRFASARAFMGFAGLIPTEYSSGSRSRRGHITKAGPEGVRTALIEAAWAYRYRPAIGAALRHRQAGLPPETLARSWKAQLRLHAKYKKMTARGKPPGVVVTAVARELAGFVWAEMTS

SEQ ID NO: 107030 - protein, 369 aa, unidentified
MAEITRAPMARVGVDLAKNVIQVHGVDAAGRKLVSKAIRRDAFLAWCAQLPSGCVVAMEACSGAHHWARQLRAMGLDARLIPAHFVSPYRLEGRSGKNDMTDAAAVCEAASRPNMRFVPIKTAEQQGVMTLHRVREGLKEERTACINRIRGVLAEFDLVFAKSPKVLRAVLVDVLEDAGNELTGLARLVVQRAFEHWRELDEHLRWCDQQIGAHVRASAPARRAAKITGIGEIGASALTASVGDFSQFKSGAQFGAWVGLVPRQNSSGGKTRLGRITKRGDDYLRTLLIQGAKSAVMSAAKRDDPTSRWLQALVERVGWQKACVAMANKNARILWAVMTREAGFDPSHVSEKPLAKCAKPPAVPEPCQA

SEQ ID NO: 107031 - protein, 341 aa, unidentified
MQKNRFFIGIDIACDDFVASIYQSPEKQVTTKEAIENNPDGFSVLVNWLKQHGIDNSNCIICMEATGVYSEACSHYLAANGFKVSVEPPLKVKRAFDPVGHKTDPVDSRQIAEYAYRYTDELRFWQPKQAIVEKIRQLLTARERFTKQSVITQNAMKAYEKHIIKMPFIEKANQEILKELRKHIAEIDKELDRLIRQNPRISQMSNHLKSIPGVGLLLASSLIAMTDSFNNISDYRPLAAFLGLCPYQHKSGKSIYRQPHIRIFGPSYARKLLILAARSVATHNELFKKYYLRKQAEGKAKQLVLNNIANKILKIACAMIKNDKPYIQNYRSINPLCLKLA

SEQ ID NO: 107032 - protein, 320 aa, unidentified
MESVDLYQSAMGIDVCGERLDWQRLPQHSSGSHPNTPDGIKALVADLKQSAVDIVVIEATGGLQRQAATALASAGMAVAVVNPRQVRDFARASGQLAKTDRIDALVLARFGLRMQPQPRCLPDEAALELADKLARRSQLIEMRVAEKNRRYRASTVMKRSIDRHLAFLDQAIKSLDQDLDDTLRGSPMWAEKVELLEAVTGVGPQTLRRLLIDLPELGKLDRHGIAKLVGVAPLNRDSGTFKGKRMIWGGRVNVRNTMYMAALSASRFNIPLKAFFQRLKAAGKPHKVALVAVARKLLTILNAMLRDRSVWNPQKAATRA

SEQ ID NO: 107033 - protein, 344 aa, unidentified
MGEVSTIGLDIGKSVFQVHGVDVVGAVVIRKRVSRARVLEFFGELPPCLIGIEACPSAHHWGRELQVLGHMVRLVPPSYVKAYLKRSKNDANDAAAICEAVTRPSMRFVPIKTKEQQTALMLHRTRQLLVRQRTMLSNALRGHLAELGIVSAKGRNGTAELLRIITNGADSRVSPAVRGILDVLARQYSAIGIEIASIDRSIMALHRGCEASRRLAEIPGIGPIAATALVAEIGDWKTFSSGRSLAAWIGLVPKQYTTGGKDRLGSITKQGNRYLRWLLIVGAMAVIRYARKHGTEKRPWLGRLMERRPTKVAAVALANKIARMAWAIMVRGERYKEPKLLLAA

SEQ ID NO: 107034 - protein, 343 aa, unidentified
MKVTTIGLDLAKNWFQVHGVAADGRVVIRRKLRRSEVIGFFKSLPPCVVGIEACATAHHWARELIALGHRVKLMPPAYVKAYVKRNKNDAADAEAICEAVTRPSMRFVPVKDTEQQSVLMLHRVRSLLVRQRTMLVNALRAHMAEFGIIAPQGLRNVEDLTKIIAHEGERLPGLARSILQALVDQLTDTMVRVREIEKRLAQWHRQSQVSQWLATVPGVGIMGASAIAATVTDPHLFKSGREFAAWLGMTPRQNSSGGKERLGSTSKRGDKYIRSLLIAGAIAVLRHARNRATRDGEWVRGLLARKPTKVAAVALANKTARIVWAVMARGNGYRAKAVLGRAA

SEQ ID NO: 107035 - protein, 408 aa, unidentified
MEVLYPRCAGLDVHAKTVVACVRLASGATVTYEHRTVSTTTRGLLELADWLTAHAVTHVAMEATGVYWKPVWHILEGHVELMLANAMHIRNIPGRKSDKNDATWISDLLALGLIRSSFVPPAPIQELRDLTRTRTQLVREITRHTQRIQKTLEDANVKLTEVISDILGTSGRAILAGLVAGETDPARLADLASGRLKATRAELVAAVHGRVTAHHRFILQLHLTQIAALDTAVADIEARVRDALVPFRPAVSLLTTIPGVSETAAAVIAAEIGTDMSRFPSAGHLRSWAGVCPRLDESAGKRRSTRTRQGAPWLKTTLVQSAWAASRKKQSYFHAQFLRLKSRRGAKKAILAVAASILTDVYHMLRDGVEFHDLGDQYFAQQDKARLTKRLLQRLHDLGVKVEVKNAA

SEQ ID NO: 107036 - protein, 349 aa, unidentified
MKILALDLGKIKSAVCVLDTAQMKEHYTTVRTTPFELSILLEGQQPDRVVFEVGTLAGWVYDLVIQHGCPVEVANPNHEGWRWRNVKRKTDRLDALKLARLSAAGQLPTVHMPAASVREHRALIQYRTQLVARRTRIKNTIRSMIARQGRKMAVGASAWTHKELASLQDWSRPWDQIERSEDLWRGQLQEELTALEQIEQQLLRLERNLDALGRRDQRIVRLQTIPCVGARTAEMLVAVLDDPHRFKSLKEVGSYVGLTPRQFQSGQMDRSGGISKQGHRQLRRMLVEVSWLALRYNPYLRSIYLHVCRGSPSRRKIAIVAVARKLLIIAWAMLRDGTAWRPRAACTAA

SEQ ID NO: 107037 - protein, 343 aa, unidentified
MNTTTKTVFGADTAKDVFQLHWVDPETGEIFRKQLKRAKFLEHFANLSPCLIGMEACGGSHHWARRLTALGHEVKLLPGKVVKAFVCGNKNDVGDARAIWQAVQQPGQRSVAIKSEEQQAVLSMHRIREQLVKSRTAKINSIRGILAEFGEVMKPGRAALNDHLLEALQRLADRHPAALIETIREEWNEVALLDSRVQRIEARLLAWMRQDQSCQTIAEIPGVGMLTATAAVATMGNAKAFKSGREFAAWLGLVPAQSGTGGRVKLLGISKRGDTYLRTLLIHGARSVLYSSKEKSVWLQEISKRRPSNVVIVARANKVARTIWALLAHCTKYDQQHVSSRPA

SEQ ID NO: 107038 - protein, 405 aa, unidentified
MFVGIDWASTEHAVCVLDQTGKTVRAFRIPHSAAGFGDLVARLRRLGAPAGLPVALERPDGRLVDRLLEAGHPVVPVRSNAIKAWREGEVVSGAKSDAGDAKVIAEYLRLRHHQLRTLTPFSDATRALRAVVRARGELVRQRVATINQLTATLDAFWPGAKAIFPDVEREIALAFLERYPTPESAAGLGEQRMAAFLTRHRYCGRTPAAELLARLRAAPAGLAGGAEATARRDAVLAFVSVLRALNQAIRDLDRSVIARLGEHPDSRIFASLPRSGQINAAQMLACWGDCRDAYDDPEAVAALAGIVPVTRQSGKHAAVSFRWACNKRFRNAMTTFAHNSRLASPWAAKVYADAIARGHDHPHATRVLARAWVRVIWRCWIDQVPYDPVKHRAAQRLAEEAAAAA

SEQ ID NO: 107039 - protein, 442 aa, unidentified
MQTLPLLDPKAAGIDVGSETLHVSLAGDTPKVFGTTTGQLHALRDWLQANGVASVAMEATGVYWLCAYEVLERAGLRVLVVNGKHVKNLPGRKTDLKDCQWIATLHAHGLLRSGFVPPEHIRRLQDYLRLRADHVTLAASHVQHLQKALERMNVKLHDVISSVVGVSGLRVIRAILEGQRDPAVLLGLCDAQIQKHKAAAVQEALRGTWKAEHLFALKQALALWEVYQEKIAECDREIEGVLRELAGPEATQGTPKPGKPGGRNSPQIEHLHQMLVRLCGDQDVTVLPGLADHTLLSLVGEVGTDLKRWPTEKHFTAWCGLPPGSKQSGKRRGHTARQRNRAGRLFCLMARSVGRTVDKALGGFYRRLKARRGGLVANQALARKLAALFWRLLVHGKTYVEEGLKKYESRVVETETRWLRKLARKHGLALLPNPTPQPQVHG

SEQ ID NO: 107040 - protein, 435 aa, unidentified
MEKIRKNVAGIDIGAKKVFTAVEGQPVVSHLTFTEDFLLLRDYLLVHKVKTAAMEATGVYWVILYEILEEAGIDVWLVDGRQTKQVPGRKTDVKDCQWIQELHSFGLLNRCLVVGADIKELRSYLRLREDHINSSAMHINHMQKALTLMNIRLKEVLSQIHGVSGIAIIEAILNGERNKNVLVNLCHQSLLKNKKELILRALEGRYTETGLFALKQAYDAYKFYLTQINECDKRIDIVINRIGQSGKGQELKKKRKVIRHHKPVVEKLSSNLLNIFGGKDATVISGITDYTWMQLLSETGHDLTKWPSEKHFTSWLGLSPGQNNSGKKRRNAKKKGRPVAGQIFRTIAQGLINSKNIAIGSFGRRLRGRKGPGIAIKAMARKVAILYWRVMVKGLNFAEQGINNYEEQIIASKLRSLNKLAKELNYKITENVQVA

SEQ ID NO: 107041 - protein, 371 aa, unidentified
MNRNTGMNAGQIIGTMNGQQVVGLDIAKQVFQMHTVNMGTGEIVNVQIKRAKVLEHFANLTPCLVAIEACGGAHHWARELGKLGHTVRLLHAKIVRPFVTGNKTDATDARAIWLAVQQPGVKFVGVKSTSQQATLTLHRQRELLMKMRIMQTNALRSLLYEFGATFAKGKKALFKEIEATLEGLADTLPQMVRDSLREQVARIKAIEVDMKSIEVRLQLQLKLDPQMQRIAQIPGVGLLTATAAIATMGEAGAFKSGREFCAWLGLVPKQTGSGGKVKLLGISKRGDGYLRTLLIHGARRGKSTCQRAGAMAAADQGSPPLQRGVCSAGGQDGQNDLGRNRQGAGLPDRLQERQATSGVTPKSIRKDKATQ

SEQ ID NO: 107042 - protein, 358 aa, unidentified
MVAKFYSGLDVGSSLCELVAFDESDQQVAAIQFSTSGTKLVTAIRKFRKSHPGEWWMAVEEGELAQWVADLVRPEIARVVVCDPKRNAWIARDPTKRDRVDAAKLAKLLKGGFLTEVFHSDQVDRVEFKRVVQHYHELTRTQAGVKCQIKSRLRTHGIIARGEGTFGTKARESILRQLPTPTAQDLVRQLYELLDQAGKTQEKARRLMLGLGRAFAEVARMQEVPGIGPVWACTFSAYVQTPHRFRSKRQLWRYCRLGITNRQSNGEPLGRQRLDGAGVGILKSLSYHAFCSAQRGDNEFSRHFEESLARTQNRTHARLSTQRKILAVLWAMWRRNEPYRPGGGNAEQPDAMNRAVAR

SEQ ID NO: 107043 - protein, 416 aa, unidentified
MEVIVSRCAGLDVHKNTVMACVRVPGPNGGRTSTVRQFRTFTAGLRQLRDWLVAEQVSQVVMEATGVCWKPVWHVLDATPGLELMLVNAHAVKNMPGRKTDVADAVWLAELGECGLLRPSFVPPPVIAQLRDLTRYRKKLIEERARETQRIQKLLEDAGIKLDSVVSDILGVSARQMLEALIAGVRDVAALAELARTRMRPKIPQLRQALEGRFGAHHALMLRMHLEHVDQLSVSIDRLDSEVDRVIRPFSSALQRLITIPGVGRRTAEVIIAETGADMRRFRTAGHLASWAGMCPGNHESGGKHRSGRTCKGNAALRAALCEAAWAASHARSGYLPAQYRHLLRTFGKKGQTRAVFAVGHSILVIAWHLMAHDRDYADLGGDHFTRATDAEARQRYLVRQLEALGHKVTLEPAAA

SEQ ID NO: 107044 - protein, 427 aa, unidentified
MSGIETGGQEPEFAVFVGIDWADQKHVWCLQLRDSTKRESGELEHTPEAVEAWVAQLCQRFGNRPIAVALEQSRGSLVFMLAKYEPLHLFPVPSTMSASMRKALYPSGSKDDPRDADVLLGLLLQHRNKLRRLSPDTEATRRIQNLVEERRKLVDEKTEHTNRLASHLKIYFPQMLKWFEHLDTELVCALLERWPTLEELQKVPPAKLRTFFSKHHCRDQELIDWRILAIRQSIPAIRDRAVIEAKSAAVKVIVQLIRILLEGIADLDERIEEAAAAHPDFFIFKSLPGAGPALAPRLLAAFGSQRERYRNAGEVQTYSGIAPVMEKSGKKQWIHFRWACPKFLRQSFHEWAGHSIGYSVWARAYYRQQRGKGVDHHGAVRALAFKWIRIVFRCWKERVAYDESKYLAALTRRASPLVAVVAVAKAL

SEQ ID NO: 107045 - protein, 511 aa, unidentified
MHKRAEQPAPARGRELVNNCAAGENFVGGRPASARSQSQSPHPKRVIGRPLAEPEALAPTSNRKRPQEGRNISRMEGKAKRRKNLKQDKSSMSDPEQWWQQHRVFGAVDWASEKHSVIVVNQAGKIIEEFEIEHSALGWKKFREKLQAYGSIPFAIETSRGAAVEQLLEAGMIVYPLNPKSAQAYRERKAPSGAKDDWLDAWSFADALRVDGHGWKALRPEQALIKELRLLCRDEVSLIQQRTAFIEQLRHALAEYYPAALEAFEDWTSVSAWMFLERFPTPHELAKAGKRKWQNFLHSRRLWGSNEGTRRMEIFARAIEFAGSLPTVKAKSLLALSLVQMLFAIEKQLAIYRQRIEELFARHPDHELFGSLPGAGPKIAPRLLSEIGDDRQRFDDVQALQCLAGTAPVTKRSGKKRKYCHVHQRWACNKHLRHVLHLLADKSLSRCVWAETYYQFHRQKNQSPASALRRLANRWLKIIYKMWLDRTPYEPELHHHNQLKHGSWILQLKQP

SEQ ID NO: 107046 - protein, 312 aa, unidentified
MTQIICGVDVSKTRLDASLAPDPAGASFDNDAAGIAALAAFCRRHGVELVVMEASGGYERSPFLLLWQDGIACALVNPRRVRSYAQAMGILEKTDRIDAAVIARFARAKGLRPAPPPSPGQQRLKALVARLRQVTGDITVQKQRRATAADAETRQSLDEVIALLKRQSRTLEGEIASMIDDDPLWSRLAEAFRTIKGVAGRTVARLMADLPEIGTYSNKAIAKLAGLAPLADDSGSRQGKRHIGGGRATVRSILFLVAEIARRFDKSLADFHRKLSQAGKPKMVVRIALARKLLVRLNAKARDARAACPNAT

SEQ ID NO: 107047 - protein, 459 aa, unidentified
MAKPVGKKQARDKVDELEGLPPLNRNAAGIDVGSAAHYVAVPPGRDPEPVQEFGSFTADLHRMAQWLKACKVDTVVMQATGVYWTALYDVLESHGFAVNVVNARHTKTLPGRKTDVLECQWLQKLHTFGLLNNSFRPAEEIRVLRSYMRQRENLVAAAGTAIQHMQKALTEMNIQLANVISDISGTTGMKILRDIVKGERDPQKLAMHKHGRIQASRAEIARSLEGTWRPELLFVLEQSLELYDAYLEKITDCDRRIDEHLKTMEAKVDPMPPTPEVRRMRSPRKHESRFDLHGQLYRITGVDLTQIDGVDVQTAQTVVSEVGVDMGRWKSEKQFASWLGLCPDNRISGGKVLKRGTRQVVNRASTALRLAAWGLLRSQSALGAKFRRLRSRLGAPKAITAMAHLLARLIYRMLKFGHEYVDKGMEYYETKYRQQQMQWLAKQAAALNMQLVPMTEVGG

SEQ ID NO: 107048 - protein, 357 aa, unidentified
MAYIGVDLHSDKFTAAFRDKMNKDTLKSYYIDENEIDNFKRSLKKDDYIFLEASTPTFAFTDLLQDTVKKTIVIDPFKFRAIADSRKKTDKIDARQLARMGKYHVETDKNFLPEVYVVEKRIRKLRSLFTTYRLLNKEITMIKNRIHSLFKQNLKPYSKTHIFNEIMTGLEPIDLDEEYKIQVEILFEVLSKLQEKKAEIREKILLTGEPFIADIDILVSISGISVFVALGLISDYATIERFKNAKQFSKYLRSTPRSEESNKKVKTGKTQKNGRKLSIELMLQSINHFRRESLFIDKFYRRLKKGKGGCKARIAVVRKMFVAIYFMLKEKEYYRYMNKKLHDKKMHEYKRFLAKNK

SEQ ID NO: 107049 - protein, 344 aa, unidentified
MTYYAGLDVSLRTVNICVIDDLGERVAETKLASDVQDIVAYLDDLKVEIESVGLEAGTLTQYLTDGLQAAGFEVLCMEARQVKAALSAMCNKTDKHDARGIAQLLRNGWYSRVHVKSMQSHHIRMRLVSRKAVLSKCIDLENEVRGLFKVFGIKLPPKLGHGAFDVRVRGTIEAEPALAQALLPLLDARLVLYRTFRELDNRTRKLAHRDKVCQRLMSAPGVGFITALTFKAGVDDPTRFKRSRTVAAHFGLTPRRFQSGERDNPGHISRAGDPTVRATLYTAANAMMTRSSKWSSLKVWGMQLAKTRGHRRAVVAVARKLAVILHRMWLDDTQFRWGTEGTTS

SEQ ID NO: 107050 - protein, 307 aa, unidentified
MKEHVVYCGIDVAKGQLDGALLGKRWQVPNTKAGIRRLIKMLRQRNTCPQVICEASGGYEQDLVELLHQAAVPVTLVQPQRVHQFARASGILAKTDKIDAQVLVCFGQALAPAPNAAPGAQTLLLRELDRQRAHLSGLLVAEQNRRAQLRDPSLRQLSAQLIKQIQGHIVRIDARTQAIIAADQELKAKAKILTSFSGVGLRTATMLLAQMPELGQLNRREAAALAGLAPFNRDSGTWRGQRRVCGGRSLVRRGLYMAALTAARRNHILAPFYQRLRAAGKPPKVALIAVMRKLLIALNSALSPTPA

SEQ ID NO: 107051 - protein, 343 aa, unidentified
MSEISMIGLDLAKNVFQVHGIDASGTVVVKRQLRRGQVEKFFAQLPACMVGMEACGSAHHWARVISGYGHQVRLMPPLYVKPYVKRNKNDSRDAEAICEAVGRPTMRFVPVKSVEQQAMLSVHSTRSLLVRQRTMIANALRAGLSEIGIVAKQGVEGLRELTRRLKAPSEAIPEMMRAALLVLAEQWQKLDAAERSLEGQIKRAAKADADARRLMEVPSVGPIIASVALAKVPDAKVFASGRDFAAWVGLTGRDHGTGGKHRPGRISKRGDRMLRSMLITGASAHLRQQIARGVKDPWLRDLLARRPYKVVMVAFAAKTARIIWAMLVKGEQYRARASVPAAG

SEQ ID NO: 107052 - protein, 408 aa, unidentified
MNTLYVGIDVSSKSNVVYLMLPNGDKHSNFSVANSHEGSTLLVKKIYSALTSHSLDTVLIGLEATSVYGDNLVYFLREDATLAPFNRKIHVLNPKQVKKFHDTYNDLPKNDYVDSFVIADCLRFGRINKEVYMGDYRYKALQNLTRARFFAVQNLVKEKQRFMNVLFKKYSTMTQEKVFSDAFSTTALAVYDEFESAEALANMDLHELTDFIIEKGKNRFPDPDAVAKAIQKAARSSYRLPKTVNDSVNQVLSISITSMKALESQIKEFDKAIKALMELLPNVLISIPGIGPVYSAGIMAEIGDINRFDNQASLAKYAGLAWKQHQSGGFEAEVTRLIPSGNRFLKYYLCEAAFSLVRCNKKYSDFYHLKYKEVNRCQHKRALALTARKFVRLVFRLLKDNRLYCPAK

SEQ ID NO: 107053 - protein, 372 aa, unidentified
MKKKTTNYALELALAAGATTNKDQNRPKAKRICVGIDTALKTYQAARKVDNSAIGPVANLYSEQGLLFYLEKQCEQAEEVVAVYEAGPFGYVLYRKLRARGIKCLVCVPDSSKQQRKRRKNNQIDARTLTSNLSNYLNGNEEALQLVRVPTEEQEQARLFSRQHDQLVKDRKRMAAEGNSLLMSQGLGSYSNWWRPKAFSRLQQSLPGWIVEMLQVWVDVLRKLDEKIQTAKAALAKRWSGPRPKGAGANSLVQLGAELLDWSLYTNRRKIACLSGMVPSEWSTGRGQRLGSITKVGVPAIRRIATEMVWRIIKFQPQYRPVQKWQPVLQGSNRALKKKAVVAIGRQLMVDLWRWQTGRATAQELNLVMVGG

SEQ ID NO: 107054 - protein, 338 aa, unidentified
MYYTGIDLHKFSSYLTTIDSDGCIVKQATIKNVDYNFLQYFSDLGAEHQTTVESTCTWYWLNDLLTSLNIPLTLAHAKYVKAIAYAKVKTDKVDSHILAQLLRLNFIPQAHKISNENRILRDALRARLKIVQRHTSVTNSIALLLAKYNLTEPDQLTCIAKLQYDQLSAHASLLKEQMLTLEKSLYPYLIPNDDIQRLLWIPGIGKMNAFTILLEADDINRFADVKNFFSYCRLVPSARNSAGKSKQRSSKDGNRYLKIVFTDAAIHAVQYYPVIRKYHNSLLRKKNKQIAKTIIAKEIAEIVFHVLKNKTNFNNKFKGVELQHKKSLQWPRVVNPYA

SEQ ID NO: 107055 - protein, 405 aa, unidentified
MTSPRRVVIGADTHLDTIHIAAITDTGQLLSDAEFRTNPTGYWAAICWARSFGEVVSVGVEGTSSYGAGLTQALQANDIHVVEVNRPDRSARRRQGKSDPLDAYSAARAVLAGHGLAVPKDPSTGALKALLIARRGAIKARTAAIQQIKDLLITAPAELRERYRRYTTNLRLVEALARCQPTAQEDPISVAVLIAAKALAQRIVFLERQDRELTAQIDTLTTALNPALRAAYGVGPDTAAQLLITAGTNAHRLRSEAAFAMLAGAAPIPASSGKTTRHRLSRGGDRAANNALHRIALVRWSHDPRTRDYVTRQLAAGRSKKDILRLLKRAIAREMFTHLTKPCPIDDYSDLRPARQARNITLTAVANHFGVWPTQISRLERGLTRDDTLAANYRTWLNVQLIDAA

SEQ ID NO: 107056 - protein, 347 aa, unidentified
MIFRSEDACVITGGADTHADTHVAVAPDPLGGLLGVREFPATAAGYAGLLSWLGGFGTVAMVGVEGAGSYGAGLARHLAAAGIRVVEVDRADRQDRRRAGKSDPLDAVSAARAVQSGRASGAPKGRDGAVEAIRSLMVARRSTRNERTQVINQARSLILTGPDELRARFAGHCAAALAEGIAALRPRPGDAAGHAVRVALRELGRRAEFLDGQLERLDELIVPLVTARAPGLLSLYGVGPDTAALLLVAAGDHPERLRSEAAWAHLCGTAPIPASSGKVRRHRLNPGGNREANHALWRIVITRMSAHPATRAYVDRRTKEGLSKKEIIRCLKRYVAREVYHHLRGGG

SEQ ID NO: 107057 - protein, 346 aa, unidentified
MPIVEAPRPVTGGIDTHLDAHVAAVVDVNGGVLGVESFPATTAGFAELADWLVGFGEMERVGVEGTGAYGAGLARHLRGCGLEVIEVDRPNRQARRRVGKSDPADAIEAARAVLAGRATGIAKSGDGPIEAMRSLLIAKRSGREARITCLNQLRHLGFCGPDDLREAFRGVPRKALAARAAGLRPRAGSDEVTYATKLAMRTLGRRVLAIEADNTELDTLLADLVETTAAGLLAVHGVGVDTAAILLVAAGDNPERIRSEAAWAHLCGVAPLPASSGKLTRHRLNRGGNRQANHALWRIVFTRLASDPRTHVYVKRRLNEGRSKPEITRVLKRYVAREVYRHLPRA

SEQ ID NO: 107058 - protein, 455 aa, unidentified
MTKKGKKSTPSPENMPILHPHAAGIDVGAEEHWVGVPADRDAQPVQKLSAFTCDLHRLADWLTACRITTVVMESTGVYWIPLLQILEARGFEVALVNARHVKNVPGRPKTDRFDCRWLQKLHTYGLLAPSLRPPEDICQLRSLLRHRDHLLRMTVKHIQHMPKSLDQMHLHLPHGMSDVTGVTGMRILRAIVAGERDPQTFAQYRDYRMQSNEETIAKALEGDDRAEHVFTLTQSLALSDFTQQHIAACDQDIERVLATFDSLVDPEEHPLPPPTTAHRRPQRNEPAFDLRTHLYRSTGVDLTQVPGLQAPTIHIVLAEVGLNRHTWPTDKHLASWLGLCPDHQISGGKVLSTGSRRVQNRASRALRMAAQSLRTSPSYLGAFFRRMRSTLGPAKATTATAHKLAKIIYHMLKEKAPYRARSAEDYLPKDHERQLRQLRKQAQYLGFDVVPQTNH

SEQ ID NO: 107059 - protein, 422 aa, unidentified
MARKRRKTEEVDEIVYERCCGLDVHKEDVKACLNIGGKKEVRTYSTMTDGLLEMAKWLKENCVEMVAMESTGSYWKPVFNILECEEIPAMLVNPQHIKNLSQAKTDVRDSKWISNLLRHGLLKASFVPKRDMRELRELTKYRGSLCDDSTRTYNRIDKVLQGANLKLSTVISKTGTKTELAMIEALANGEADVAYLSQMAKGTLRNKIPQLKRALNGLIGDHQRLLLKSMIGHLKQIHAEISFIEAEIDRRMAKDAEVIGRLMEIPGVGKISAQAIVAEIGTDMGQFPSEEHLAAWAGVAPNQNESAGKRQSGKTKKGNSTIKRTLVLCANSASRAKDSYLSAQYNRIKARRGAKKAKVAVAHTIIKICYFMIRDGTNYKDLGSDYFDKRNKDAIVSRSIKRIEAILEGYEVKISPKKEKAA

SEQ ID NO: 107060 - protein, 422 aa, unidentified
MKRRAYRRTAINQFEPKVIREKTESARLILAIDVAKDDMVAALTTERADVLTTLAWKHLDETPELLLKLEELGRLGFSVEAVMESTGTYGDVLRHQLKAAGIVVYQVNGKRVHDAKVVYDGVASLHDSKSSAIIAKLHIDGRSSVWQDKADGERELKATVTTMDLHQGQYLRLIHQLESWLARHWPEVTRLVELTSATLLAVLARIGGPIDVAADPDAARKLMTTMSRRLMTAEKIELVVESAAQTVGLSLLPEERTALMTIASEAHRSLRAYKEAKQKVIEIAEGGVSEVIAPAVGKTTAAVLVTEVGDPRRFPNARAYLKAYGLNLKEKSSGKYQGRLRITKSGSGRARQYLWLAVSRWRKKDAVVQAWYAAKVKRDGGSKARAVVALMRKLVKALFHVARGEPMNTERLFDVSRLRLTT

SEQ ID NO: 107061 - protein, 360 aa, unidentified
MKRSITPIGTPVGIDVHKRRCKVVEFRRGEIKVRKPMGNTREEWLELLTELPPEAESGLEVSTAGYFAMSVLEAAGGRERAHWVHTAGIDSNRRQKNDRLDAERLARKLAAHHVDPLPEAWFPPPEIRALRLRARQRCWLALLRTQAKNHVQSLLEMHGLQIPGSDPFGAAGRRWLAEQKLPAPLAESIPQTLRLLALREEEIHTSEQYLQAADAQFPELPLLRTIPSIGPILAPVIGSEIGTIERFRSAKALANGTGLVSSFYDSGEVKTTGPITHQGSRWLRWALLTAANVAIQGRNPFARRYHRLRRSKKANVAKAAIAHSLARCVYGVLKHGCPYREDRWGRKVGALEPETRAGAR

SEQ ID NO: 107062 - protein, 338 aa, unidentified
METYAGIDLHSSNNYIGVIDSQDRRLYTKRHDNRIECILKALKPFKQTLVGVVVESTYNWYWLVDGLQENGYTVHLANPAAIKQYEGLKYTDDQWDSIWLAHMLRLNILPEGFIYPKQDRAARDLLRRRLMFVGQRTAQILSLQSMITRNRGLNYSGSSIKTFRDCFVDKLFASPHLRFTAKKNLATIRFLDGAIKDIEAEVKSYAKLKNEFEMLLTMTGVGDILGLTIMMEVGDITRFKRVGNYSSYCRCVESRRLSNGKVKGKNNMKNGNRYLAWAYIEAANFARRFCPLANRFYQRKLAKSNKVLATKALANKLSKASYYMMRDQVPYDPKKLFK

SEQ ID NO: 107063 - protein, 386 aa, unidentified
MKGETFVPREYDVFAGLDVDKKSIAATFSSQQGFIRSLHMPYSVDYLLNHVRKHFGDQKVAFVYEAGPTGYGLYDGLVAQGFRCLIAAPSMIPRAPGQRVKTNRLDSRGLSESLRGGQLKSIHVPSPIYRELRHLTQLRDTVVREAAAHKQRIKALLLLEGIGFPPATAGRQWTLRVKAQLRKLRCSRTVRFKLDQLLDSLEFCEKQVVSSTKEIRRFCKEDAELFQSIEYLMSIPGIGWIVASQLLARIGDWREIDNVRQLGSFLGLVPTENSTGDSVDRGSITRAGDGRLRSKMIQAAWSAIRQDGELREFYRSVCQRNPRGKGARIAIVAVARKLSTRIYAVLKNQRPYIVREQVHSAPLTQEETSPQGTTRRCAEPGETDNS

SEQ ID NO: 107064 - protein, 311 aa, unidentified
MTLPRDVLGVDVAKDWIDVFTLSTGGRQRIATTKAALARFAETAVGAFVVFEASGGYERPLAAALARAGVAFARVNPRQARDFARATGRLAKTDRVDAEVLARMGQALDLAPTSPEEPDRARLADLIARRDDLGGMIRAEKNRAATARDPWIAREIVRIVRVLERHLAALGAEIAALLAACQRLDAEARRLRSVPGVGPLVSATLVARLPELGRLDHRQIVALAGLAPHACDSGLSRGKRHVWGGRAEVRRALYLAAFVASSRDPRFKAFRQRLQAAGKPLKVAITACARKLLIILNAMVRSGQDYRRPEA

SEQ ID NO: 107065 - protein, 362 aa, unidentified
MSKSTTIIAFDHHAATTVAAVLLPGQRTPALHTLTSDNATILRFVDRLKRQGPVTCCYEAGPCGFELQRALTTHQVPCEVIAPALIPRRPGDRVKTDRRDAGQLAVLHRAAALTAIHIPTEQEEAARDLLRCREDIRADLLRARHRLSKFLLRHGRRFTATKKTWTKRHDAWLQAQRWPLPALEQTHRAYVRAVDEAGARLQAVDTELRDLLSLEPLKARVARLRCFRGIDDLTALTIAAELGDPRRFPSAPSLMGFVGLVPSEHSSGTKQARGAITKTGNAHLRRVLVESAWHYRHHPFAGRSLTLRQRGAPATVVQHAWTAQHRLHRRYRRLAARGKPKQLIATAIARELTGFLWAALTQ

SEQ ID NO: 107066 - protein, 394 aa, unidentified
MKLVGIDVGKNSHHFCVMDKENGEFNVTPTSFSNNKEGFDFLINSLKPYSKKSILLGMEDTGHYHVALLKFLLSNGYTVALINPKTTDLTRKMEGGITKNDKLDTITICDVLDTPERKKQYRITKVDRFDFYEQRQLTRHHHDLKEELNVYCNRLQKSIDLVFPEFNTLFSSKYGVVYMNLLKTFGNAEIIASTDIRTIRKCFEIKGRGNRISLTPEKLKECAKNSIGISSEVETIQIKHLVSQIMLIKEQIAEIDKKIEEFSITNNSPILSIPGISHFSGTSILAELGDIGNYSKPSQIIKFAGVAPYHYESSQYNAQHTGITKKGSKYLRKTLYQIILPVIKYNPVFKKYYLLKISQGKGHRCAQGHCIRKLLRIIYHLLETGQSFDPALLR

SEQ ID NO: 107067 - protein, 397 aa, unidentified
MYIVGIDIAKRKHEAAVIDGEGAVIIKPFSFANNCSGYNRLLAMLTKAKLPLDEVSFAMEATGHYWLALFTRLQKEGFRVQVINPVQTNSIRSFYIRQAKTDPRDALLIAEVIRFGHFSESTLHPENIYELRELCRGRHAIVSMQADVKRKVVALLDQVFPEYETAFTNLFSDTSMAILQTCPTPKELSEMPLEELCHLIEVSSRKRFRMVKAQELQELARNSFGFAMAGDVFSTMIRLYAKHLVFLKQQVQEMDRKIAEIMDTLDTPITTITGIGPTLGAYILSEIGDISRFSSAAKLAAYAGIDPTMRQSGEYNGVRNRMSKRGSPYLRHAIWLAASSAVLHDPALKLYFQKKRDEGKPYMASVGHACRKMVSIIYAVMRDNKAYTPYIPNEISA

SEQ ID NO: 107068 - protein, 414 aa, unidentified
MIDERRWYAGVDWASESHHVFLTDENGRRIGEKIFRHSGEGLAEMAVWLSSTSGGVPAQIHIAIEVPHGPVVETLIERGFKVHAINPKQMDRFRDRFMLAGAKDDSRDAEVMASALRTDLRCFRPLAVADPVVIELREWSRIADDLGAERNRLTNRMREQLWRYFPAMLDLESDLGAEWLLDLWEIAPTPHKAIRVREATVAKVLKRNRIRRFDAAHVLDVLRKLPVQVAAGTTEAAAAHIKTLTARIRLVNHQLGEAHRQLDALTARLIPSEETGPGQRKQHDVEILASLPGVGRIVLATLLAEAFDALQRRDYAALRSLTGVAPVTKRSGKSCIVVRRQACHDRLANAMYHWARVAVQRDPRSRSKYAALRSRGHSHGRALRSIADRLLNVACAMLKTGTTFNPSLATEKSP

SEQ ID NO: 107069 - protein, 422 aa, unidentified
MNPSGLQIDYAAYVGLDWGSEKHSVAIKANGSCEIERYVLKQTPEELHGWVIRLRDRFGGLPVAVAIEQTKGAVIHALLGYDFLHIFRINPKSLADYRKAFSPGGAKDDPTDAEYLLEWVELHRNRIKPWVPDDAQTRALQKLVEFRRELVDQRVAFTNQLTQLLKEYFPQALDWGGEIDRVMMCDFLSKWPTLEQVKKAKPDTIRTFYRQHGCRSRERIEERLEAIRGAKALTGDPAVIKTSVCMVQAIVRTLYPVIENIPRLDKEIEALFHSHPDMAVFDSLPGAGPVLAPRLLAAMGSDRSRFDSAGEIQKYSGIAPVTERSGKHEWIHRRFACPKFLRQTFHEFAGQSIKFCPWARTYYDMRKCAGLGHHAAVRALAYKWIRIIFRCWQDRVRYNEAIYVRTLHKKGSAIVTLMGQVA

SEQ ID NO: 107070 - protein, 348 aa, unidentified
MKKIVKQVVGIDVAQKELVVSLGRMYDDWSPEVYANKSFANTQKGFMTLVAWVKKWSDPGCSVRFVMESTGVYHESLAYFLDEKGYELTVVLPNKISNYFRTLDVKTITDKTAAGAITMFGLEKKLESWKRPKKIFKDLRQLTRERDQIVQERTMVKNQLHAEQAEANPNPSSVQRIKKRIEFLNKQEREIKTEIATVVKADQEVSSAIKITSSLTGVGLLTSVTVLAETNGFELIRNKRQLSSYAGYDIREKQSGTSVKGKPRISKRGNKYLRKAMHLPALTAIRHDERFRATYARLVSKHGIKMKAAVAVQRKLLEMIYIIYKTNVPYDKNYLKKHNVANADAAAE

SEQ ID NO: 107071 - protein, 416 aa, unidentified
MDVLFKHCAGLDVHKRMIVACVLLASSEGVHRFVKKFATTMADLEALDAWLTSLEVTHVAMESTGVYWKPVFNVLSATFDVWIVNARELKQVPGRKTDINDAEWICQLMSIGLLKRSYIPEVAQRDLRDLTRYRKRLIEERTAASNRLEKILEDSNIKLAAVVSHIQGVSARAMIEALIQGETDTTAVAALAKGSLRKKLPELEAALVGKIREHHRFMWRELLYHLDELNLRLAAINERIGELVAPHEAVIERLDAIPGINRWTAEVILAEIGPDVSAFPSAQHLASWACLCPGNDISANMRRSGRTRHGQNWLRPALVEAAWATAHSETYFGSQFHRLRARRGDKRAAVAVAHSILVVVYHLLANPEASYTELGADYFVQRNKEQEQRRAVRKLEKLGFAVVLTPASPAVTPAPS

SEQ ID NO: 107072 - protein, 341 aa, unidentified
MTIGIDLGDVWSHYCTLNQDGEVVDRGRFRTTPKAIEKWFTDVPSARVAMEAGTHSIWISEQLQELGHEVIVANVRELRAISHSDRKSDQVDAEKLARYARLDPNILRPIAHRTVGQQEALTLIRARALLVRLRTAAVNAVRGLTKSCGYRMPASATTCFAQRCLAVMPPGLAQALGPVLQQIAEITVKIKQYDRQIQQLGQTEYPETQALLKVHGVGHLTALTFVLTLGSKERFGRSRDVGCYLGLRPRRSQSGDHDPQLGITHAGNAYLRSLLIECSNHILRPHGRDSALRQWGLHLAGRGGKQAKSKAVVAVARKLAVLLHHLWSTQEPYVPFYEQAA

SEQ ID NO: 107073 - protein, 360 aa, unidentified
MRCERTFVGLDVHAWSVTGHGLDAVTGEVWQRKLTPDPVDVERWLRTLPQPVAVTYEAGPTGFGLARYLRDAGIRCPVAAPSKLSRPWGDRVKTDTRDAELLARLLKLDEVVEVVVPSVAQEAARDLVRAREDVRGDLMRARHRLSKLLLRQGMVWTGGKAWTGRHDVWLQSQRFDQPSRQLAFDAAYETMLLTVQRRDRLDQAITAMAEDSEYTDLVRRLGCLRGISTLTGFGLAVEIGDWTRFSGNSIGAFLGLVPTEYSSGQSRSQGSITKTGNRHARRLLIEAAWHHRKTYRNPGLIMRTRWELAPPAARARGHAGNRRLHQRWQSFTVRRKRPVVANVAIARELAGWIWSLAVLE

SEQ ID NO: 107074 - protein, 366 aa, unidentified
MLYLGIDQHARQITISLRDENGDVLQARQVSTQPEKINTFFQQLTDGRLYADASFIAVLEVCGFNDWLIRMLRDYRCHKVILIQPDERKKCKTDRRDAASLSELLWVNRDRLLQGKPVRGLRQIDIASNTDQENRRLTTLRKEVGQARTRLVNKIRHLLRRHNLQWQMPTKRLPTLAAIAWLKQVALPEIDRLEMDQLLSDLEHVRQRLKELERVIAQRCGVSAEAVLLSSMPGVSYFTATSLACRVGRIERFPRSQSLANYWGLTPGCRNSGENTQRLGNITKAGSGMARWLLAQVTHKVLRKDARLREWFKRIKRRRGPTIARVAVMRKLATIIWHMLSKRKTYAECRALAEVGMKQSEQQPCG

SEQ ID NO: 107075 - protein, 354 aa, unidentified
MYGLKHQKEKRSMDYFAGLDVSVKETSVCIVDDTGKIVREVRVASEPEALLKVLTNPAYHFKRIGLEAGPLSQWLFSVLAEAGLPAICVETRQMRAALKAQINKTDRNDARGIAQMMRAGLYRPVHVKTLRSQKLRMLLTHRKLLQSKAIAIENDLRATLRNFGLKVGVVATRRFEARIKELVENIPDLATLVEPLLIVRQALREQIVILHRRLLAIVRDDEVCRRLMTTPGVGPVVALTYRATVDVPARFRKSKAVGAVFGLTCCKYQSGEVDYSGRISRCGDEMMRVMLYEAAQSMLRSKKWSWLKAWAMQIARRRGMKKAIVALARRLAVIMHRIWVDGTEFRWTKEVAVA

SEQ ID NO: 107076 - protein, 425 aa, unidentified
MSDDVMIAVDPHKASNTAAVLDPVTKTVIEVARFANSVDGYSRLAGFAARWEQRRWAVEGCHGAGRFLAQRLVADGELVLDVPAKLAARVRVYSRGHGRKTDRHDAVSVGLAALDGTGITMVTGDDALVSLRLLCDRREELAAQRTQAVCRLHRLLAELTPGGMRRELSANKAQALLSRIRPANDVGRVRVHIARDHLADIRALDARLKFIAAQIAALVTASGTGLTGLYGIGPVIAGRILAEVGDVARFATKDAFASYNGTAPIDVSSGDQIRHRLSRAGNRRINHALHMMAVTQIRNPDTPGRLYYERKRLEGKTGNEALRCLKRRLSDLVYYQLIADRHGTIGTCGSPTTPPPTRSTSISPATRSREAGPPSRPPHRPAPKGSSRSTGKTTASSESRSSTPAPASTTTSSKRPKSIVKTAAS

SEQ ID NO: 107077 - protein, 491 aa, unidentified
MARRVSTAAKMAHQRQAFQRRKARGQARASAQRAAEARRVEVLPITHPHAAGIDIGSRSHWVCVGFDQEHAIAEFPAYTDGLRQILAYLREHGVTTVALESTGIYWIPLYELLEANGFTVLLVDPRYTKQLKGRPKTDRLDCQWIYRLHSVGLLAAAFRPDDRTCQLRSYLRQRANLIRYGGQHIQHMEKALEQMNLKLTEILSDITGVTGQAILQAILRGVRDPHKLAQLRDRRCKANEAAIAQALDGSYRAEHLFALRQAYEAWQFYQKQIGKVEEQIEQQLERMKQDRALPPLKPASRPRRRTPNQPRFDVRRALYYVVGFDLTEIEGIAELTALTVISEIGPEVSRFATMKQFCSWLGLCPQFNKTGGRVKSSRTRPGVNRAAIAFRLAANSLYASKGALGAFLRRQKARLGAPQAVTATAHKLARIVYLALKHGLAYVRQSQEEYEAKLRHQQVKSLKRRARQLGLEVIETRPSLSTATASALVPN

SEQ ID NO: 107078 - protein, 460 aa, unidentified
MKQKRSKLKINRTMPTVHPNAAAIDVGATMHMAAVRADRAPEPVRSFGTFTTDLHRLVDWFTECGVETVVMESTSVYWIPIFELLDARGFAVFLVNARDAKHVPGRKTDVSDAQWLQRLHSYGLLRASFRPKGQIAELRAYVRQRERLLEYAASHIQHMQKALTEMNLQLHHVVADITGATGLRIVRAILAGEHDPKVLARLRDYRCHASAETIEKALTGSYRAEHLFALEQALALYDTYHEKVSACDVRIEAVLKELSIGRGRSPGSNPLPSPRRPRTDQANAMAFDVHTALFALLGKDITKIDGLGPYLSLKLIAECGDDLSAWPSTKHFTSWLCLAPSNKISGGKVLSSRTRRSGSRAAALLRLAAVTVGRTDTALGAFYRRLSARIGKSKAVTATARKIAVLFYNAVRHGMDYVDPGASFYETRYRARVIDNLHRRAKAFGFALQPIEPIPGIAVS

SEQ ID NO: 107079 - protein, 430 aa, unidentified
MKSNTQNAKIEAITEKTLVLGIDVGSETHYARAFDYRGIEYSKKPFKFSNTEAGFVTFKEWILDIKVRHEKDKVVPGMEPTGHYWFNLGKFLQDNEMKPVLVNPHHVKKSKELDDNNPTKNDRKDPKVIAGLVREGRYMIPYLPDGVYADLRTASNIRFQLQAELTRIQNRISRWFNIYFPEYKTVYGKPDAKSGMLILKAAPLPEDILTLGIDGVNQIWRDAKLRAVGKARAKTLIEAAEHSVGSKEGAVAARMEIRMLLEDYESRSIRLQEVMTLIEGLVKQIPMAEKLLEIKGVGIRTVSGFLAEVGDISRFNNPKELQKLAGLALVENSSGKHKGETTISRRGRKRLRYLLFEVAMSLVAKNPEFRELHNYYTTRRLNPLKKMQSLMAIAAKLIRVFYAMLTKGVDYDPKKMVSDIRRPAAYLQAA

SEQ ID NO: 107080 - protein, 460 aa, unidentified
MMNRNRSKSRVARTMPLVNPNAAAIDIGATMHMAAVGADRATEPVRSFGTFTADLYRLVDWFTECGVETVVMESTSVYWIPIFELLDARGFTVFLVNARDAKHVPGRKTDVSDAQWLQRLHSFGLLRASFRPKGQIAELRSYVRQRERLLEYAASHIQHMQKALTEMNVQLHHVVADITGATGLRIIRAILAGERAPEVLASLRDFRCQASAETIAKALTGNYRSEHLFALEQALALYDTYHEKTSACDVRIEAVLKELSIHRGRGHGAVPPPRRRHRTDQANALAFDVRAALFALLGRDITVINGLGAYLSLKLIAECGDELSSWPSAKHFTSWLGLAPSNKISGGKMLSSRTRRSGGRAAALLRLAAVTVGRTDTALGAFYRRLSSRIGKAKAVTATARKVAVLFYNAVRHGMEYLDPGASSYETRYRTRVVNNLHRRAKAFGFVLQPMEPKAGAAVS

SEQ ID NO: 107081 - protein, 391 aa, unidentified
MIFVGIDVAKDTHYAAVSDDSGAVLVKPFAFQNNAEGFCLLLKKLSEFDRSKLLIGLESTGIYSENLICFLYESGFRLAVINPIQTATLRKTAIRKTKTDKVDTMLIIKSLMVNSYRLYSQRDADSLKLKTLCRFRQNLKKSKARLKIQLAGYVNLVFPEFGKFFKSGIHIAASYALLKKYSSPKEIAALRTSTLCTLLSKASHGRFGKDTAEALKSLALSSVGVKNPYISIQIAQTIAQIELLEQQINDLNSAIEEAMESLNSVLMTVPGIGAVNAACILGEIGDIKRFSKPCKLLAYAGLDPTVRQSGQFTAKSTRMSKRGSALLRFALINSAWQLTLNDTTFKAYYDLKRSQGLNHYGALGHVAHKLTRVIFKLLTSDTPFIPAKLVA

SEQ ID NO: 107082 - protein, 423 aa, unidentified
MKFKAQERQNQLIEKITAEHLVVGIDIAQQIHVARAVNFRGIVIGNPLSFSNDEEGFQTLLQWVHSLQAAHKLNAAIVGMEPTGHYWLNVSKWLSEHQFEVVLVNPHLVKKNKENRDNTSSKSDKKDALVIADMVKNGYYSLRRSTPEAFEELRVFLSNRDSVVTRLVSAKNQIHRWVDVVFPELRQVFKNLMCKGSLATLRLFPTPEELRKLELHDVVRGWKSQMKRQPGDKNAQSLIALARKSVGSTQALGAYKLHLKQLLAEYDLACEQLQVVEAEIVAVLDRIPFAKSMLAVKGINVISLAGILGEAGDLSGFTHGNALLRHAGLNLTEASSGKWTGQIRISKRGRSRLRRFIFMMTMSLVGNNPEFKAMHAYNTQVKKIKKMRSIMKLCGKLARVIVGMARSNEAYNPQKTMSFQAAA

SEQ ID NO: 107083 - protein, 356 aa, unidentified
MTQAKKLDFTGQKIFCGIDVHKKSWAVCIRSEHLQLKTFAQGRPSVAGLLQYLRTNYPSAEYKLVYEAGFCGFGYQRAFTKEGVDCIVVNPADVPTSDKDKQQKTDAVDCRKLSRLLSDHLLEGIYIPSVEQQDDRSIVRAYQQMVQDQTRCKNRIKSLLDFQGIATPEEQEYKHWSGKFITWLKELPMTPSARVGLHIQIQHYEQTRSMVLLATRQMRALAREERHKDSIRRLRTIPGIGSIGALLLATEIGDINRFERLDQLCGYVGLMPSVHSSGDRESVKGLTHRGNQQLREMLIEASWVAVRKDPALTLAFEEYATKMKKNKAIIKIARKLLNRIRYVMKNETDYVTGVVE

SEQ ID NO: 107084 - protein, 443 aa, unidentified
MKPLPVLDPQAAAIDVGSEKLHVSIAGDTPRVFGTFTGELEALRDWFKEQAVRTVAMEATGVYWLYVYEVLEAAGLAVVVVNGRHVRNVPGRKTDMSDCQWLATLHAHGLLRGGFVPPAEIRRLQDYQRLRADHIIGAASQVQKMQQALERMNVKFHDVISDLTGVNGLKVVRAILGGEREPVRLLALCDPQIQKKKSVAVKESLRGCWKDEQLFALRQALELWEVFQQKIGDCDRELEKLLHQLAGSKSAPGGGGAGELKLAPAKPPGKNAPAIERFQELLARLCGGRDMTQIPGLSMYLVLQLISEVGTDMSRWASEKHFTSWLGLAGGRKQSGKRKGSVKAHRNRAGRMFCAAARALAQSVDKALGGFYRRLRGRVGGLAANVALARKLAEMFYRLLRYGMQYVEKGLKDYEAKVLITEARLLRKLAKRQGFDLIPSAAN

SEQ ID NO: 107085 - protein, 390 aa, unidentified
MMLPNGDKHSNFSVASSHEGSIQLVKRIYSALTSHSLDTVLIGLEATSVYGDNLVYFLREDATLAPFNSRIHVSNPKQVKRFHDAYNDLPKNDYVDSFVIADCLRFGRINKEVYSGDYRYQALRNLTRARFFTVQNLIKEKQRFMNVLFKKYSTMTQEKVFSNTFSATALAVYEEFDSAEALANMDLHELTDFIIEKGKNRFQNPDAVAKAIQKAARSSYRLPKTVNDSVNQVFSISITSMKALESQIKEFDKAIKAQTELLPNVLISIPGICPVYSAGIMAEIGDINRFDNQAALAKYAGLAWKQYQSGGFEAEVTRLIPSGNRFLKYYLCEAAFSLVRCDKEYSDFYHLKYKEVNRCQHKRALALTARKFVCLVFRLLKDNRLYCPAK

SEQ ID NO: 107086 - protein, 354 aa, unidentified
MAIVGGFDVHRGQITFDYLDTETGEVTTGQVRPATRQTLRSWLGRFAGLTDVAFAVEGCTGWRFVVEELVRAGVEAHLAEPAETATLRGRKKRAKTDRTDARLMRELLRQQRLPESWIPPAAVLEVRTQARLDVALLAERRAWRQRIHAQLFHQGAPAIAKLLTAEGQAALAQAALSPAGREVVDTALAAIAALTALLDPLRARLQATGARQPGCRALTAHDGIGPLCGTIIWAELGDCRRFARADQAVRFAGLDVTVRSSDSRRAPGRLARQGAPALRWALDEAAKSASHATAPDHPYYLAARDRLDGKLATLSVARKLARRCYHTLRDLGDDAWPTTANQAAPASTAESAAA

SEQ ID NO: 107087 - protein, 409 aa, unidentified
MEILYPRCAGLDVHRDSIVACVRLAERGIERHVETFGTTTTELERLSAWLASHQVTHVAMEATGVYWKPVWAVLVEDFELLLANARHVKTVPGRTTDVNDAVWLADLLAHGLIRPSFVPPPAVQALRDLTRTRKQLTRERAAHVQRIDKVLQGANLKLGSVLSNIMGQSGRAILDALAAGESTPETLAGLLRANVRASRAQVIEALHGRLAEHQRLLLRVHLGQIDAIEAAIVALDRELSERLEPFREAVTRLSATPGLAALSVASILAEIGLDMSPFPSEAHLISWAGLCPRNDESAGKRRSTRLRPGAPWLKTLLVQAAWCAVRTKGSYFRVLFLRLKARRGPKKAIVAVARAILTAVYVMLKRGVAYHDLGPDHFQRTERIRLATRLARRLDELGFDVTLTERAAA

SEQ ID NO: 107088 - protein, 369 aa, unidentified
MNRLFVGMDVHKEKIVLFGFPKDGHTPVVRETFPGEATRVVKRLVKLSREWKIEACYEAGPSGYGLARDLVEAGLDCRLVAPSLTPRRPGNRVKTDNRDALELALALRAGTLQFVRIPSREEEEVRGLVRCREDIARQARVLKMTISHWVFTRGHRLTTGLKRWTPRHWSWLRSLPLSALERETLDHYLDMLFLQEERRKQLEHRICELGDRPEYRERVKRLMALKGFSCLAAMRVIAEVMEFRRFKNASSFMKFTGLVPSEYSSGERIRRGKITKAGNSHLRHVLVEAVQRAHSSVRPGRGLLKRLQGVSGPLRQIALRCLARLHHKFWALTRRGVTAGRVRVAMARELAGFVWALMVFPAGETNTAG

SEQ ID NO: 107089 - protein, 382 aa, unidentified
MLDQACSKQTPVATQNEMYAAIELSGVSWLVAIHVPHADKISRHQIESGNGTALIDLLDAIRERSERVLGREIAIYSCYEAGFDGFWLHRQLVTAGINNAVIDPASIQVNRRARRAKTDSLDVEALLRALMAWRRGEKRVCAMVRVPTVKEEDDRRISREREALIKERIRHVNRIKGLLATQGVRRYEPLRSRRQERLDALRTGDGRPLPPRLYAEISRSLRRLELVLEILREIEIVRDEEAAVSARTNGVVGRLMMLRSIGPEVATILHGEALHRTFDNRRQVAAYAGLTPSPWSSGTLQKEQGISKAGNPRLRRTMVELAWLWLRYQPGSRLSAWFRERVGDGKGRIKRIAIVALARKLLVALWRYIETGLVPEGCLMKV

SEQ ID NO: 107090 - protein, 322 aa, unidentified
MSESILGVDIAKKKYDVALLVDGKLKHKVFKNNREGFGELSLWLHKHGIDHVYACMEASSTYGDELATHLYDQGHTVSVVNPARIKGFAQSELLRTKNDKVDAGLIARFCLAMHPEPWTPALPEMKHLQALVRRIDALIVMRTQEMNRIDVCHEDIKSSVRDHIAYLDQEIGNLKKQVASHITNDPNLKIKRDLLKSIPGIGEATIAAILSELNMFDKCDRVQKIVAFIGLAPKEMISGSSIKGKPRICKTGNSRMRKVLYMPALVSIQCNPIIIAMYERLKKSGKKGKVIVCAVMRKLVHIIFGVLKSGRPFDPNFKPNCA

SEQ ID NO: 107091 - protein, 467 aa, unidentified
MKHPQRRRPWKKPASSGPSLLERLNPNAAGIDCGSEAHYVAVPADRDATPVRAFTTFTADLHRLADWLTACGVTTVAMESTGVYWIPLYEILEARGLDVVLVNARHVKNVPGRKTDVVDCQWLQELHSVGLLRGSFRPTAAIAALRAYLRHRETLVQGAATHVQRMQKALVQMNLQLSIVISDITGVTGLRIVRDIIAGQTDPRALAQHRDYRCQASEADIIAALTGHYRPEHVFVLQQNLELFDAYQRQLAACDAAIEAHVDALAAQAPAPAGPLPDPRTRKKPRDNEPRFDIRTPLHQLTGVDLTQIDAIGSYSALRLLAEIGTDMSRWPTEKHFTSWLTLAPHNKITGGRLLSSSTLPSANRAAAILRMAAMSLGRTETALGAFYRRLAYRVGKAKAITATARKLAILVYRTLKDGLVYRDPGAAAYDAQHRQRVIRRLRQRAANLGLALINRETGELLEGAVS

SEQ ID NO: 107092 - protein, 306 aa, unidentified
MKKIAIGIDFSKKTFDATIKRRVEDDYIEVAYSKFDNDEKGFKSFVSWVRKSVKHFPEGKGRESWIFCGENTGVCSAALSDYLAEKGFDMWLESALRIKNCSGIVRTKDDKADSNRIAEYALLYFSSKVRLHEPDTKILKRLRALFTLHNMLTKDKVAKINQIKSGILEAAPQALKLAKEHLEMIEQQLKDVDRQIEKMLKDNDEFSENYRIITSIKGVGVITACCIIIKTHNFKYMDDARTFGNFAGVVPSQTEKSGTSVNIPRRVSKFHDRETNMVLSQAVNSAWSGILPYVSTMTDWLLEGCI

SEQ ID NO: 107093 - protein, 361 aa, unidentified
MTIANSASGFEELISRLQSLDHNVYVGLEATGHYWLALFEMLSNQGYKIVVLNPLQIAAYRRSGIRKVKNDRKDAWWIADYLRIANLPPTDRQLPVLLQLRELTRFRYAQMDQVGDLKRKVLSILDRVFPEYETIFTDIFIKSSRALLKEAVSAQEFANFDLSELTAILKSSSRGRFGLEKANHIQDLARQSIGIGFLTDAIYLEMQCLLEQLDLVLNHIQELENAIDEIMDQIPQFITSIPGVGKVTGSAILAEIGDVNRFESSEKLVAFAGIDPTVYETGQFIAKQTRMSKRGSPHLRYALWQAASMAIKYDPELKAYYQAKRAEGKHHGTALGAVCNKLVSRIFIILKEQRPYIIREV

SEQ ID NO: 107094 - protein, 344 aa, unidentified
MTSMNFIGLDIHKKTISYCVKDAAGEVLAEGTISSTRQSLDDWMRTLRGPWTVAMEATMFTGWIYDYLLPHAAAVKVAHPLMLRAIAAAKKKNDRIDASKIADCLRCNFLPECYMASTEIRERRRTLRYRKLLVRQNVQLRNKVSQMLMESGVVYNKQKLHKVGYFKELMTTNPDIREGLRPLLTICRETIVRIGKTEGALVRSLARDPLLSDRVQRLMTIPAVGPITALTWVLEVDDVARFGSVKQAISYCGLCGAERSSADMVKRMPISKQRNKHLQSVLVEAAKLGPRLSPDLALVYDTEKQKGHANRATLAVARKLVAYLLAVDRSGREFVVAGERREAA

SEQ ID NO: 107095 - protein, 361 aa, unidentified
MRIIGCDLHARQQTLAMLDTTTGEVATMTLKHEGNNVREFYSKLPRPVRVGIEATGSMQWFVNLLEELGMECQVGHPATIRAAEPRKQKHDRRDADLILKLLVENRFPRIWLPSKELQDLRALLRHRHQWVRIRTRIQNALQAIALANGLRRGPSLWSQDGQSKIASLPLAPHTAYRRSELQAMYAKFEAEIEKLNQRVEEQALERPGARLLMTHPGVGPITALATEVFLGDAARFADSKALASYVGMIPSEYSSGGRQRLGGVSKQGNPLLRFLWGEAAAHAVRRDPELQRFYRRKLVQKGLGKSRVAVARKLGIRLWIMLRDEIDYNEFCRRGQKQQKSSEACAGMPETGHGAKQSPAD

SEQ ID NO: 107096 - protein, 394 aa, unidentified
MRFVGIDIAAETHVVAVVDESSALVVKPTPFGEDAAGYATLRALLGAPEDLLVAMEATGHYWQNLFAVLVAEGFAVALLNPMRTRRFAGEDLARAKTDAIDAVGIARFAAQKRPAVTRLPAAATQELRELVRLRDRLRQEFGDRTRQLHRLVDLGFPEFTRVIPDLKGRLATGLLAAYPTAAAFRGVSVLRLAALRADGTHRVGAALARALLEAARESVGQHHGPAYQLQVRYLCEDLELLRRRIEALEQDVATTLQTHEVGMLLTTITGIGVQTAARLVGELGDPARFRSAAALAAYVGVVPGTRESGKRRLTHARLAPTGHARLRAALWMPTLVAVRTNPWLRAYYARLRARGKLPKVALIAALHKLLFAVYSVAKHRRPFVPHLTVQGVEA

SEQ ID NO: 107097 - protein, 416 aa, unidentified
MNAVGIDVSSRKSTVAVLRPLGEVVCLPFDVTHDIAGLASLVEKLKALDGETRVVMEHTGRYYEAVEKALHEAGLFVCAVNPLLIKEYGANSLRRVKTDKADAVKIARYALDNWADLRDFTPMDAIRYDLKTLNRQFQLASKQRTASANNLIALLEQSFPGIRKCFDSPVRSDGTQKWVDFAHSFWHVDCVRKQPFAAFCERYRKWCKRHAYLFKLSNAEEVYALAKRAVVLTPKSKVVKVLVQEAANQLISISRSVEVYRAEMDRLAAMLPEYPVVMAMYGVGKSYGPQLMAEIGDVRRFERKQALVAFAGIDPMPNQSGDKNVRSNKSSKRGSPYLRKTLFNVIRTYLQCAPQDEPVFQFLNRKRAEGKPFYVYMLAAANKFLRRYYAKLRDYFASLDTLQPVDPIPTILKATL

SEQ ID NO: 107098 - protein, 340 aa, unidentified
MQITTIGLDIAKHVFQVHGIDVAEKVVLRKQLRRGQVLKFFASLPPCLVGMEACATAHYWARELTKLGHEVRLMPAKDVKAYVKRNKNDAADAEAICEAVRRPTMRFVRAKSAEQQSQLMQHRARDLLLRQQTQVINALRAHMAELGIVAAQGREGLKQLLTIVADEKDVRLPIDARASLIVLAAQLQALHTMIGSIDRRILVQHRANEASKRLQNIHGIGIIGASAIAATVTDPKAFRSGRDFAAWIGLVPRQDSTGGKQKLGPISKQGDRYLRRILVVGAHSVLRRAKVNPERYPWLTQLLARRPFKVVAVALANKMARIAWALLCNGTHYRPQLATT

SEQ ID NO: 107099 - protein, 427 aa, unidentified
MDRDTVNWNERTAFVGFDWASDHHDVIIVDERGTIVEDFRFDDTSEGWQLFHRKLGSYPNPAVAIETSSGATVERLLEAGCAVYPINPKAAKRYRERKAPSGTKNDRFDAWSLADALRLDGHTWRALKPDDPLTVELRLLCRDEIGLIRQRTALVCQLRAALGEYYPVALEAFDDWTSPSSWAFVEAFPTPEALHQARKRRWEKFLHVHKLYRPETYEKRLALFAQARAFCGSKPAAQAKSLLALALTAQLRALQNHLDKYRERIQELFAQHPDHELFGSLPGAGEKLAPRLLAELGDDRERFDSPQALQCHAGTAPVSYQSGQINKARFRIACQKLLRHTVHLWANLSREKCPWAEAYYRTKRAEGQSHACALRCLGQRWLKILWTMWQTRTPYDAELHQRNQLKHGSWVLNLMTPKTTGLAAGEA

SEQ ID NO: 107100 - protein, 346 aa, unidentified
MMIIGCDYHPSWQQISWMDTLTGETEERKLDHASGEAEKFYRGLPGPVLIGMESTGNCQWFVEMASTAGHEVWIGDAAKIRASEVRQQKTDRRDAALLLKLLLEGRFPRIWTPWGEDKDLRQLLIHRHKLVRIRAQVKNELQHLAMNPGVTRKNKLWSKAGEKVLRGLPLKPWASRRREDLFKVREMLNGQVDLLDRAVVEVAEKNEKARLLMTQPGVGPITSMAFVLTMGDLSRFPRGKQVASYLGLIPREYSSGGHQRLGSISKQGNGFMRMLLVEAAQVAVRCDPQMRQEYLHRCHKKAKGVAKVAAARKLAIRLYWMLRTNRGYPEVVRVESSSRVPLVSAS

SEQ ID NO: 107101 - protein, 371 aa, unidentified
MKSIIYIGMDVHKKTYSLCALLKETGEIIGETKIPADVSLIIKFIENAKKSVDSDDVQIKTGYEAGCLGYSLYWQLAEKGIECDILAPSTMHRSAKNKVVKNDRRDAKNIAANLANGTYKSVYVPTDEDVEIKEYIRMMHDFKIELKKVKQHINAFLLRFGHQYPGKSKWVPAHIKWLKELELSDMHREILDEYLSQLEILSEKIERFKHRLEELSQKETYNEKIGQLRCIKGIDTTAAMTMHAETSDFDRFPTANAFASYCGLTPGEDSSGESYHRLGITKQGNSMIRTTLVEAAQVLVRGTIGKKGKKVKSKQKDQDVKVIDYADKAVVRLQKKYHRMIFRGVKRNIAITAVARELACFVWGIETGHIS

SEQ ID NO: 107102 - protein, 365 aa, unidentified
MSVFYVGLDVHSKMTEYAVEDGAGTLISQGRVPTTLEGLSLLVTQHGVALGTRVGLETGTMARYVAGHLRGLGLEPQVIDAHEVRLKAHRPRQKSDRRDAFEICEGVRRDIYRSIVHLPPEPVQHLRTTLAQRRHFVRVQSAEMSAAKHVLRSSGLRALSRQLQRESAWQRLIMQIGDPRLTSRLEVHHAVWRVAGEQIALLDGSLFEQSRCFEADFLRLQTVPGVGPIVALTAIAAFSDATRFPSAKHAASYAGLVPSTDQSGDRDWHGHITKQGPAELRSMLCEAAHHAGRKNHPLNPYFKSLCARRGYKMAITAIAHRLCRMLYAMLRDQTDFDVHQLGIEIGPFEKKIVMPYRLRRPTTKV

SEQ ID NO: 107103 - protein, 346 aa, unidentified
MMIIGCDFHPSWQQVSWVDSETGDCGERKLVHVTGDAQQFYQQLVAPVLIGMEATGNSQWFIELVEDLGHAIWIGDAAQIRASYVRKQKTDKRDAAHILKLMMENRFPRLWTPDREQRDLRQLVLHRHKLVILRARVKNELQHLSLNKGVQRKHRLWSQAGQKMLRELPLKPWAACRREDLLGLLSMLNQQIGKLDGAVQTAAEENPQAKLLMTQPGVGPNTALAYVLTIGEVSRFQRGKQVASYLGLIPREESSGGRQKLGSITKQGNRMLRSLLVEAAQVAVQHDPGLRQQYLHRCHQKPKGVAKVATARKLAVRLYWMLRTQVAYPEIVRIESSSGLPLVGAS

SEQ ID NO: 107104 - protein, 452 aa, unidentified
MPPRLERKGPWSTTTHILQPNAAGVDIGATEIYIAVPPDRDSKPVRSFRTFTAELKAAAEWLKQCRIESVAMESTGVYWVPFFQILEAAGFKVFLVNARHVKNVPGRKSDVADCQWLQYLHSVGLLRASFRPQQAVCAVRSILRHRESLVQIGTIHVQHMQKALDQMNLQLHHVISDITGVSGIAIIKAILNGERDPVVLSQMCDKRVKASRQTIAAALVGDYRREHLFTLQQSLHAYRQCQDLIGACDREIEQHLAAFDSKVDLHATPLPKPKDRHKPRRNQMKFDLRAHMYRVYGVDLTAVPGIDAHTAHVLFAEIGPDLSQFANAAAFVSWLGLCPDNRISGGKLLSVKTRVVRSRVAKALRMAAQSLHRSQSYLGSYYRRMRTRLGTPKAITAAAHKLARVIHHLLTTRQSYEESVFARCEALHQQRLENRIRRQARDLGFDLVRPAT

SEQ ID NO: 107105 - protein, 348 aa, unidentified
MLIIGCDYHPSWQQICWMDTETGETEERKLEHASGEAEKFYRDLPTPALIGMESTGNCQWFVEMAAAAGHDVWVGDAAKIRASDPRQQKHDRRDAALLLKLLLEGRFPRIWIPSSEEKDLRQLLIHRYKLVRMRAQVKTELQHLAMNQGVVKKRRLWSKAGEQVLRDLPLRPWAGRRREDLFKIKEMLNGQIDLLDHAVKEAADKNERARLLMSQPGVGPITSMAFVLTMGDVSRFQRGKQVASYLGLIPREYSSGGKQRLGSISKQGNRFMRMLLVEAAQIAVRCDPQMRNEYLHRCRSKAKGVANVAAARKLAIRLYWMLRTNTGYPGVVRVESSSRVPVVVRHGG

SEQ ID NO: 107106 - protein, 405 aa, unidentified
MEIIVDRGCGIDVHKATVVACIMGTGIKKEIRTYTTMTNDLLRLKDWLKDNRITHVAMESTGVYWKPVFNILEDSFEVILVNARHVKNVPGRETDVKDAEWLCKLLRSGLVRGSFIPPKEVRELRDLTRYKRKLIQTITSEKQRVEKVLEDANIKLSSVASDTFGASGKRIIEELMKGELKPEAMADLSKGRLRNRKAELKEALVGNMEDHHRFMIQAHITHIAMMEGLLATVEQKIQEKIEIHFKEEYELLKTIPPVKDSASIIIAEIGVNMDLFPSEMHLSSWSGMSPGNNESAGKKKPGATTHGNKHLKTILTEFGWIASKMKGTYLWSKYHSLVGRRGKKKALVAVGHKILIMCYHILKYKVPYKELGPRYLDERRKDRIAKSYIKRLTSLRYAVTVKQAA

SEQ ID NO: 107107 - protein, 310 aa, unidentified
MDANSIFVGIDISKLMLDVDIYPTSEPRRFLNDEGGCEKLCEWLKTRTPTLIVMEATGGLEIPVAGLLAAAGLPVAVINPRQARDFAKAIGVLAKTDAVDAIVLARFAQAVRPAVRALKSEEAQELEAVLTRRRQIVEMITAERNRQIKAQVRIAKQIKGHIAWLEERLDEANDDLDRLIRKSPIWQHKSELLTSVPGVGRVVATTLLAELPELGSLNRREIGALVGVCPFNRDSGGRRGKRLIWGGRSSVRAALYMATLCATRFNPIIKAFYRRLVDAGKHKKVAIVACMRKLLVTMNVMIRTDTSWRY

SEQ ID NO: 107108 - protein, 326 aa, unidentified
MEHELHYIGIDTAKEKLDVDVLRPDGRHRTKKLANTTKGHDELVSWLKGHKIDHAHICIEATGTYMEPVAECLYDAGYIVSVINPALGKAFAQSEGLRNKTDTVDARMLAEFCRQKRPATWEAPHPLERALRALVVRHQALTDMHTQELNRTETAREVQRPSIDAHLLWLEAELKRLEKQIKDLTDDDPDMKHRRKLLESIPGIGEKTSAVLLAYIGLKDRFAHARQFAAFAGLTPRRYESGSSVIGASRLSKAGHVSLRRALYMPAMVATSKTEWGRAFRDRLAANGKKGKVILGAMMRKLAQVAYGVLKSGVPFDVSRHNPVAA

SEQ ID NO: 107109 - protein, 325 aa, unidentified
MQIHFVTEDGEITDRQVKRAEFLDFFRNRSKCLIGMEACGASQDWARKLEAMGHEVHLMSPKAVKPFVSGQKNDHNDAIGIYKAMFNGVRRVPVKSTEIRDLQTLRRIRSQVAKDRIKEINHVRGLLAEYGIVMGRSVAAFNKGISSALVNLKERGGVSPLVAEELRTTVESIKTKTERQKRLDREIEQLARGCKNYENFLKTPGVGPFTAAMLCVLLCDPDIFANGRQFAAYIGLAPRSRGSGGKNVVIGIPSKFNCDSESRAVFVECAQALTRYKNKSPWIEGILRRKPKKVAVIAIANKLARQVWAMANKGESFKQMTILTA

SEQ ID NO: 107110 - protein, 346 aa, unidentified
MLYAGLDLSRQRLDVHVLDEDGQTVEVTAVRPDADALRTLAAHVLRHGQEVSAAIESMTGARFVHDTLELCGWDVAIADAAKVKGIAPLAAKTDKIDARVLAELSRRDLVPEIWLPTPEVRAERERARFRLHLVRHRTALKNRIHATLMTFGHPVSVADLFGVAGRELLAGLALPEPWTGTLSTSLRMVDQLGAEIDACERDLRRLGADHPSIPLLLTVPGVGWVLAYTIASEIGGIGRFASPKKLTGYTGLCPLVRQSGNRDVRGPLAKNGPKYLRWALIEAATHAARDAHYRERYERTKQRLGRQRGAKVARVDIARKLAEAIWHILTRNEPFAPAGPAIVLVA

SEQ ID NO: 107111 - protein, 395 aa, unidentified
MRNVALDLGVREISFCEVAQGKVVQRRTVRSLDALDDLLGPDSPPAKVAVEACREAWVVHDKLRAWGHEVLLVDTTRSRQLGIGQHGRKTDRIDAEHMARAVERGGIPLAHVLSPHRRAIREQMAVRRALVETRAQYVVTIRGLLRARGERVKTCAIDDFLVALDKATMSAESRTLVAPLATMLSGLNFQIAQCDVALEKLCAEEPAIERLMTAPGVGMLVAAAFVSVVDEAKRFRNAHQVASYVGLVPFEDTSGGREKRRLGSITKHGNAYLRALLVQAAHTILRCGPSDDPMRAWGRAVVERRDYRIGVVAVARRLAGVLWAMWRDGTVYDGKGAATASSKRRRVATQSSEVAQEARKRVAHKMRARERSIRKGLGVAANPRGRDQEKRDAMN

SEQ ID NO: 107112 - protein, 384 aa, unidentified
MIYVGIDVAKDKHDCFIVNSDGEVLFKVFTIANNLNGFNNIYQKIESVMKDITKVKVGLEATRHYSYNLLGYLIDKGLTTFVINPLHTNLYRKSLSLRQTKTDKVDARTIASMLMSDVNLKSYSDISYHNEELKSLTRYRFDKVKERAKLKSSLSRLVCILFPELEKLVPKLHMVSVYAMLSEFPGAKHVAGAHLTRLTNLLSESSRGRYGKENAIAFRDAARTSIGSNMPAKSLELKHTIKLTQELTTEIDEIENEIKIIMDEINSPILSIPGINYRMGAMIIAEIGDFNRFDSPDKILAYAGFSPSTYQSGQLDGAYSHMKKRGSRYLRYALYNAAKYVCHWNPTFAEYLSKKRAEGKHYNVAVSHAVKKLVRVIYHLEKTN

SEQ ID NO: 107113 - protein, 377 aa, unidentified
MHSENIAAYIGLDVHKETLAVAIAAPERLGEVRYYGTINNEAQAVRRLFQKLQGLYGNILSCYEAGPCGFGLYHQLTAMNIKCQVIAPSRIPKSPTDRIKNDHREAISLARLLRAGELPPVWIPDLTHEAMRDLIRARAAAKRDSRVARQRILSMLLRTDKRYAGKHWTGKHRTWLANQSFSQPSQQIAFQHYCQSLEQIEDRILQLDQEISRLLPEWSLCNLVCQLQALKGVGQLIAITLVAELGDFSRFSNPKQLMAFLGLVPGEYSSGNSIRPRGITKVGNSELRRLLYEAAWSYRTPAKVGAWLIYYRPDSVTQYSKDIAWKAQQRLCSRYRTLTAKGKKSQVAITAVARELTGFMWDIALAAQSSFSQQKQN

SEQ ID NO: 107114 - protein, 342 aa, unidentified
MSISYVGVDLGSSKFHQVAINHRGAHPLNREFVTSEANLVKAFSDLGGEIHVHLEAGELAPWASEIIRPLVTRVVCSHPQTNAWIARDRDKCDRIDAYKLASLLRLNEFKEVHYPREPLRRDFKALVQHYDELTQQQARLKTKLKARLRMQGIIVRGEEVFSARGRQAVLAQVKSQVVCTAIKQLYAVLDQSIASQTEAQLLMLRAAQALPEIRIMRTAPGVGPIGACRFSAYIHTPQRFSSTRKLWKYCRLSVSHRSSNGKPLRRPRLDRSGCGRLKDVSRKAFEAALRRRDNNGFKRAYQRALETTHDATHARLTVQRKIVSTLRAMWINQTPYCDELMR

SEQ ID NO: 107115 - protein, 339 aa, unidentified
MSSIKILGIDLGKSCFHLIGRDSHDQIIFHKKLSRPKLLEHLAQLEPCIVAFEACGGAHWLGRICQSHGHDVRLIPPQYVKPFVKGNKNDFIDAQAIIEAALRPDMRTVPVKPVESQSQAVIHRLREGFVAERTACMSRIGAILLEFGLSLPKGHCTMKRLYSWLANQKVKLCPAIIEELQVIHDHYLYLNERVAKQDVKVTRHVNLDSRFQLLKTVPGIGVITASQTVIEMGNASQFKNGREASAWLGLVPRQFSTGGKSKLLGISKRGNKRLRCLFVHCARSVLSRLDKYQGKLYDWLRKLRLTKSFNTVCIALANKLVRIAYAVLSKHEPYLAQEV

SEQ ID NO: 107116 - protein, 341 aa, unidentified
MNKVTIIGIDLAKRVFHAHGAAADGSVVFRKRLTRAQVLPFLAGRPRCVVAMEACASAHEWGRAIQELGHDVRLIPPTYVKPYVKRQKNDMADAEAIAEAGSRPTMRFVAVKTEEQQARSMVFRTRDLLVRQRTQSINALRGHLAEHGVVAPQGPAHLKTLAAAMDGAGRSLPQLVRDVGGIYLEQIEQLNRRIADLEKVLRREAQFGTETRRLQTMPGIGPITAMAVAFAPPMATFKRGRDFAAWLGLVPVQHSTGGKQRLGRTSKMGQRDIRRLLIIGAMAVIQWASRREAEAGSWLHRMMERKPLMLVAVALANKMARSIWAMLTKKEDYRNPGNAAA

SEQ ID NO: 107117 - protein, 321 aa, unidentified
MNVIALDISKDTADCHLSGNGKEDTIKIDNSISGSLQLLGWIKQHKIRKCVISMEATGIYYETLANHLSQYHQVYVINPLKIKNYSKAFFNRTKTDKADARLIAEYTKRHLDKLDGYHAPEADQYRLHKLIAAQEQIMLQSRQAKNRLHAAGSDEFVKTIYQTIVRQLAEHQEHIEAEIKALVTADEELAEQCGNLATIAGIGEKSAVIILHHLNGRTFATANKFTAYAGLSPKIEQSGISVNKRQVLSNFGNRRLKAVFFLPALNAYRMNIFPQLVRNLEAAKKPKMVIIVAIMRKLAKICYYMHKSGKPFDVRRYQSAP

SEQ ID NO: 107118 - protein, 376 aa, unidentified
MEHNSEAFIGIDTSKLKNAIAIAESGRDGEVRYLGEIETTDAATRKLVAKLATKYRKVTFCYEAGPTGYGLYRLITSLGHECSVVAPSLVPKKPGDRVKTNRRDAVGLAKNLRAGELTAVWVPDTRHEAMRDLSRARETAVDDLKSKRQQISSLLLRLGLHYPGEKTWGKSHRNWLASLKLDQREQRIVLEELFGAERQAQERVDRLASAIIDAVPEWSLAKIVTALMAVRGIDLVAAVTIMAELGDLSRFASPRELMAFLGLVPSESSTGDSVKRGGITKAGNRRARRILVESAWSYRYPPRISRDKLAKVAAAPEPVRAIAWKAQTRLSSRYRALIKRGKRPTIVATAIARELCGFIWAIHRAVTAPGGRQLAS

SEQ ID NO: 107119 - protein, 285 aa, unidentified
MLSFCGIDVSKDRLDVMVLPEEQCCSVPNDARGWAALVERLRNFSIAAIGLEASGGYERGVARALLAAGISVRQVNPFKLRQFARASGVLAKNDPLDARMIASFVGIMPTRPAQRPTPAAEQLAEMLAVRRQLSAEKVAAENASRLLEDAMLQRLSRRRIRRLAADIELLAERLVEIVTSEVALAHRYRLLTSMPGVGPVLACTLIALLPELGGMTRKQVAALVGVAPYAFESGALKGRRCIWGGRANVRQALYMAAMSASNWNTNNLKPSHARHASQVFRVLAC

SEQ ID NO: 107120 - protein, 348 aa, unidentified
MRFYTKQHKYYCGIDLHARSMYICIVDEQGKTVFHRNRKASAEALLKAIEPFREDVVVAVECMFAWYWLADVCAKEKIPFVLGHALYMKAIHGGKSKNDKIDSKKIATLLRGGNIPMAYVYPRKMRSTRDLLRRRNHLMRKRSELLAHIQNTNSQYNLAEFGKKLAYKANREGVAEHFPDPSVSKSIEVDLQLLDFYDQLLNDLELYIVKKAKVDDAYSWYRLRSIPGVGKILGLILLYEIHDIRRFPRVQDFVSYCRLVKCPRESAGKKFGTKNSKIGNAHLKWAFSEAACLFLRGNEQAQHYHARLVSKYGKGKALSILAHKIGRAAYFMLKRKEPFSMKVFFNET

SEQ ID NO: 107121 - protein, 325 aa, unidentified
MILGIDVSKDKVDVALFDGKQAVGSGTFTNTTAGFKKLSKWLSNKGAGQSWVCLEATGRYGEKLAEYFFKADHQVSVVNPARIRKYAQSQLRRNKNDQLDAVVIADFCRTQEPVLWRPPTPQKRDLQEMSRRLDGLIEQRTRETNRLKSGQACEVVLESLQDSLAFLDEQIAKLEARIRDHIDQHPDLKQEYHLLTSITGIGDKTAGKLMAELPDINRFDRVGQVVAYAGLSPQQHTSGSSVHKKSRLTKIGKQSLKTAMYFPALSAIRFNPIVKALAARLAGRDKDKMVIVGAAMRKLLQIVYGVLKSGKPFDPNYATLSQVTA

SEQ ID NO: 107122 - protein, 420 aa, unidentified
MKQPLTNDYVAFIGIDWADRKHDIALYDCTTQTWQDCVISSSPKAIAEWVTQLRQQYGQAKILVGLEQKRGPLLYALCQYDNLVLMPINPRTVATYRKAFQPSRAKSDPIDARIIVDLMRKHADKLDVWVPGCPKHRALRQWVESRRRLVGEKVRLTNRITASLKSYFPQVLDWFEDKDTLVFCDFIEQFPEVKTAQAATPEALTQFFRDHQVIRKTAIQRRIQQIQDAGPPLTQDEAITVPAQALTAALVALLKVILSQLTEFELQIAQLFESLPDAELFQALPGAGPHLAPRLLAAFGEDRTRFPSAQAFMSYIGIAPVKEASGKKSWVHWRWSCPIFLRQTFVEWVDQARRHSAWSQAFYKQQRATGKSHPKAIRALAYKWGRILWRCWQDKEPYDEEKYLTALKRKKSPLIALLAA

SEQ ID NO: 107123 - protein, 342 aa, unidentified
MQISTIGLDIAKNVFQVHGIDAAEKVVVRKRLRRRQVLEFFKALPRCLIGMEACATAHYWARELTKLGHEVRLMPAKDVKAYVKRNKNDAADAEAICEAVRRPTMRFVRIKSAEQQGQLMQHRTRDVLIRQRTQIINALRGHLAELGVVAAQGNAGVNELRAIVTDEQDTRLPIDARASVIVLAAQLEALESVIGAIEKRIKMQHRSSEASQRVEAIPGIGVIGASAIVATVADPTIFRSGRDFAAWIGLVPRQDSTGGKQKLGPISKQGDRYLRRILVVGAIAVLRRAQENPGKYPWLTQLLARRPFKVVAVALANKMARMAWALLAHGGTYRAPELAEAA

SEQ ID NO: 107124 - protein, 346 aa, unidentified
MIVLGVDAHKRSHTVVAADGCGKRLGELTVPATGEGHLRLLQWAAQFGSRCWAVEDCRALSRRLEGDLLGAGERVVRVPPRLMADARRGARQLGKSDPIDALAVARLALREEDLPQACLEGESRVLRLLVDYREALVRERTRAQNRLRWRLHELEPGWDPPASSLSSPLNLRKLQDTLGGYQGVVADLAREEANHIAELTRRALELERRITRLVTPLTPTLLRIPGCGPLTAAKLVAETAGIARFGTPDKYAAWAGVAPIPVWSGNQERHRLNRGGNRQVNAALHRIAITQLRCHPAAQEYASRRTTAGNTKSEAIRALKRHLANITYRALHHDTATTQQPQQAAA

SEQ ID NO: 107125 - protein, 373 aa, unidentified
MDEDRAVCVGLDTHKARIAVAVAEPGRSGDVRFQGEIANQPEAVRRLIERLADKHGKLRVCYEAGPCGYGLHRQITALGHDCTVVAPSLVPVRAGNRVKTNRRDAVTLARLHRAGELTAVWIPDPTHEAMRDLVRARTAAMEAVRRARQQLQGFLLRHDRVFTGRTTWSPAHRRWLAGLRFEHPAQQVVLQEQLDAVAEAERRRDRLDAQIRELAPTWSLAPVVAALQAMRGIAFLSAVVLAAEVGDFRRFANPRQLMAWLGLVPSEHSSGPRVERGGITKAGNGRARRVLVEGAWSYRFPARVTGPIQARLEGVPDAVRTIAWKAQLRLCARYRRLVAAGKNANLVTAAIAREMAAFAWAIARQVQPAEAAA

SEQ ID NO: 107126 - protein, 417 aa, unidentified
MALKIVYPVCCGIDVHKSFVVACIVATDGKGVTTYKQRRFSTFTGDLRLLAQWLVDNQCRDVCMESTGKYWIPVYNMLESTCKVVLAHPKYVKAIRGKKTDSRDAKSIADIFKHDLISGSFIPPFAIRQLRDLMRYRVKLTSFAVGEKNRAQNCLTVSNIKLDDVFTDVFGKSASAITDQILLHPDGNFDVMPFVDRRCKASTEKIQAAVDGLLCSEQAEKLKIIRSHMDSLELCRTNLESVILSLAEQFRLQMELVMTVPGVQLFSAISIIAEIGVDMSVFPTAKHLCSWAGLVPQNDESAGKKKSTRIARAGAYIKPLLVQCALTVCNSDKHPEIKNRYLALKKRRGHKKAIIAICRMLLTAVYAILKKSEAYNPDLYRKVVSLPANRAFTVEQAVAFVQRHGFIVVDSDGVIAS

SEQ ID NO: 107127 - protein, 342 aa, unidentified
MQSTTIAVDVAKEVLEVAVSVHPGQVREQRRLSRTAFMKFCTDQLPATFLLEACGSSHYWGRRLQALGHRVLLLPPHATRPYVFRNKTDRADTRGLLEAHRNEDIHPVPVKSVPQQALTALHRLRSTWLAARTARINTVRGLLREFGLIIPVGAHHVLPQAWSCLEDPDSGLPDALRPALAEACTEIRQLEDRLRLVEKQLEALADQTPAVARLRSIPGVGLITATALVAFVGDVQRFPSGRHFASYLGLTPRERSSGLVRRLGSISKRGDVYLRMLLTHGARAVLWKAAARPDPGRLRAWALQVQRLRGHNKAAIALANKLARIVWAVWKHNIDFHEDTAA

SEQ ID NO: 107128 - protein, 315 aa, unidentified
MNNTVEIFVGIDVSKATLDVALWQPEQAWQVRNDIEGIGKLLERLQELRPNLVVIEATGGYEKLIVAELVLAKVPVSVVNPKRVRDFARSVGQLAKTDKIDARILAQFAQAVRPAPRPLRTEEEGRLSALISRRRQIIDMLTAERNRLVTAHLATRKRMEKHIEWLQQELADIEADIDQFIQGTPLWKQKDELLRSVPGVGEVTAYTLLADLPELGTLDRQGIAALVGVAPLNKDSGIKRGKRRVFGGRETVRNVLYMAALSAARFNPTIKTFYDRLIKAGKEKKVAIVACMRKLLVILNSILRHQRPWQPNFHA

SEQ ID NO: 107129 - protein, 343 aa, unidentified
METTRHIGIDRHRNNFTGCVRLENGRNYRSPWKREALPQFVKKLRPSDEVAVEVTGNTRLFYEAVVPQVARVVAVDPHQFRVISHAVQKTDPNDARNLALYRAKGLLPEVRRKEKTQAQIASLTQTRDTRVKLRTALKNKVNNILSAHGIHLEKEALSSEKKLREVLAMRFDPMIRIERRVMVDPIRSWNESIAELEKTITDEGQKLPGQKNLTSIQGIGPWSGSILLSVIGNIHDFPEEGKRAAYFGIAPRVSNSNKTERSGRISKRGSKLGRTALVQCALIAERYRPYLKKFYEKTKARRGAGQAIIALARKLLGIVCRTLKNNGVFEDFPNFVLAEEVTV

SEQ ID NO: 107130 - protein, 349 aa, unidentified
MRFYTNQHRYYCGIDLHARTMYVCVLDQAGAVIIHRNLPTTREAFEGVIGPFRGEVVVCVECIFSWYWIADLCSDLKIAFVLGHALYMKAIHGGKTKNDKIDSQKIAGLLRGGMLPMAHAYPQRQRATRDLLRRRMYLMHQQSELLAHIQNTNIQYNLPAIEKRIGSPSNRTTLAEHFEEPMVRTSMEADIAMLERLHEVLLKIERTVLAQAREADPVALQLLQSVPGVGKIISLVILYEIEDVDRFPKVGNFISYARLVKCSRESAGKKSGARNSKIGNAHLKWAFSEAAVLFLKDHQAAKDWHDKLVGQYGKAKALSIMAQKLGRTVYFMLKRKEPFDSKRFFAQEV

SEQ ID NO: 107131 - protein, 355 aa, unidentified
MTSTKYIGLDVHKESISIVVMNSVGKVVMECVIETKASTILQFIDGLRGDVRVTLEEGTWAAWLYDLLKPRVTEVVVCNPRKAALLKDGSKGDRIDAHKLAELLYMNKIKSVYHGEHGLRTMKELARSYLTINKDLTRVMNRLQALYRSWAIPCGSKEVYAQRYRAEWLGKISEVGVRRRAEHYYQQLDVMHLLRQKVRKDLLAESRKHKAWKLLRQIPGIGPIRAAVLIAVMQTPHRFRTKRQLWKYSGLGLETHDSAQYHAVEGELRRSKRPATVRGLNKDHNHDLKDIFKGAAMRASTAAGPLHDFYENLLAKGRKPTMARLTLARKIAAITLIVWKKEVRFDANYLKQQAA

SEQ ID NO: 107132 - protein, 350 aa, unidentified
MEQYAGLDVSLESTSVCIVDASGRVVRETKVASEPEVLVSLFQAHGVAMARIGLEAGPLSQWLYAGMKAEGLPVELIETRHVRSAFKAMTVKTDRTDARGIAQLMRLGWFRQVHCKSLPAQEVRVLLTARKLLQAKRHDVEMSVRGILRGFGLKVGPTTPKNYAIRVRELVAGHPVLSGVAEALLAAREVLLREFRTIEKRLLSQARADVRVRNLMTTPGVGAIVALTFASAVDDPARFRSSRMVGAHFGLVPTKYQSGETDVTGRISKVGDAAVRTALYEAANVMLTRTVKSSALKDWALGVARRAGPKKAKVALARKLSVVLHQMMRSGETFSLTGRPFMGMVAGGKQ

SEQ ID NO: 107133 - protein, 317 aa, unidentified
MAEPAVWVGIDVAQAELVVAVRPQEGTWTVVNDEAGVATLRRQLQRRTPTLIVLEATGGLERLVASTLATAGLPVAVVNARQVRDFAKATGQLAKTDALDAQVLAHFAAAVRPAPRPLPDVQTEELAELLARRRQLLKIRVAEQNRLQRAATLRVRRRIQAHLRWLTRELARVDDDLDQALRDSPLWQAQEDLLRSVPGVGPGLTRALLADLPELGTLSRQQIATLVGVAPLNRDSGTWRGRRSTWGGRRTVRAALYMSALTATRYNPLLRTFYRRLCAAGKAKKVALTACMRKLLTILNAILRDQTPWQPPAVATP

SEQ ID NO: 107134 - protein, 365 aa, unidentified
MSKRSIQVQETRYCGIDVSAKSLTVAIQRVHQQVEQRSFPNDPIGHKALIVWLRKAKSPVRVSLEATGIYSLDLAFALDAAQGIEVAVLNPKVANRFAQTIRRSKTDAADAEVLAEYARRMPFAAWVAPSPGSIRLRSIVRHVESLSVQSAQNQNRLHAAHGSTSTPGCIVQDLKRSVASLELRIHKLRREAMTLVRQDDLLRKRFELLVSIPGIAQVSAMQLLAELSTSPPDLTVREWVAHSGLDPAHEISGSSVRKASRISRAGNRHLRRALYMPALVASRCDPHAKAFFESLFARNKARLQALIAVARKLLHAIYGIFRSGLKYEGQSCFQGSRCPDPVSCRSASFRQLIQIRLICGHNPGG

SEQ ID NO: 107135 - protein, 401 aa, unidentified
MKYVLVLDVAKSKSMFMLSSDVGEVLLEPTEYIHNKSDFERIDSYISKLNIKDNLTIIMEATSIYHKAPERFFKENNYHVIVFNPLIGKEITNTIRKTKTDKQDCIKLTNLFWKGSIPDRNYTEDEIYTKLNELSRQYYHLDEGLTRHKNRYKELLHLCFPEFELCFKDGKIYDLTALNFIKEFPHAYIIKDKRVDALAYNMANTNDRHLNYYKRKANIIKEYAINSYPGVSENSKDVDNLKQLANIIIEIAKQKEIIKEQMIELAKQTKNFECINSLFGIGELSASLIIAELKDITRFNNIKQINASCGLDPTIVQSGKSIDYHGPISKRGNRYARKILFNCSRNIVTLSAKCDKENPIYVYYQKKKQEGKHYYACLTACSTKLIRIIYALCMNNSTQQN

SEQ ID NO: 107136 - protein, 517 aa, unidentified
MATRSRKPSRKYLIQKPNGQVTQRVQAVGPEHFGVLCFDCAKARSKFTLANFYGSVVIPPQTVAHTRGHLQAVVDQVRQACAQHQLHDLIVAIERTGEYHRPVQRACKQANFDTRLVHPLTSKQFRVPADPGNKTDDTDLAAIFRAAVNGFGLVEPVWPEDYQQLQLLVRHRRDLVQKMTILCCQIREQLHALMPGYAECFSNLWDSGLALPLARVTGSAEAIRQGGGQGLLRLLVQHQLSTRRDSCAKILAWAEQAPAAHPQHALLLQILCALDDDRRRKIQEITALEQRCAHYLARTPYVLLLVIPGINVVSAAEVASELGPITFYPHANAITGRAGLMPSRYQSDRVDRPNGPLRRRANRRLRTALVQVADNLIACNHYFGAKAMHWKSQGKDERWQRVKVTKIFSRLLYAMVAGRQLFPHPCRQEGHYILHKLMEFHRNCDTQMSQVLADLDAATQQLPRSAHAAEAKPLAERLKEVQHRKGPQPLADIIPIVLARLGARSVQSEVSEAPGPN

SEQ ID NO: 107137 - protein, 412 aa, unidentified
MNAVGIDVSKGKSTVTIRRPGDVVVMSPRDIPHTQSAINDLIGLIRGLDGETKACMEHTGRYYEPVATWLSDAGIFVSAVNPVLIKDFGDDSLRTPKTDKADSQKIARYTLDRWAKLKQYGIMDKARNQLKTMNRQFGFYMNQKTAMKNNLIALLDQTYPGANDFFGSPARSNGSQKWVDFVHTYWHVDCVRSRSLDAFTEHYQNWCRRKGYNFSASKAEDIYRLSSDIIAVFPKDDSTKLLIRQAVAMLNSASETVESLRLKMDEAASTLPEYPVVMAMNGVGPTLGPQLMAEIGDVTRFTHRGALTAFAGVDPGKDESGQHIRKSVPTTKKGSPYLRKTLFQIMDSLIKRSPVDDPVYAFMDKKRAQGKPYYVYMTAGANKFLRIYYGRVREYLSAPPKTSDGEAGNDGI

SEQ ID NO: 107138 - protein, 320 aa, unidentified
MLSFCGIDVSKDRLDVMVLPDEYSSSVPNDPAGWAILVEQLRGFSITAIGIEASGGYERGAVRSLQAAGMPVRQVNPFKLRQFAKASGVLAKNDPLDARMIASFVGIMPTRPAQRTTPAAEQLVEMLAVRRQLSAEKTAAENASRLLEDLMLQRLSRRRIARQATDIELLDKRLVESVATDATLAHRYRLLTSMPGVGPVLACTLIALLPELGGMSRKQVAALVGVAPYAFESGTLKGRRCIWGGRANVRQVLYMAAMSASNWNPVLKLFHDRLKGAGKLPKVVIVAVMRKMITTLNAMVRDDIAWADRLSGRHSVTTAR

SEQ ID NO: 107139 - protein, 378 aa, unidentified
MNKSILYVGLDVHATSITAAVAEGGRHGEIRLHGKIAANLREVDKLLARLGHPGRKLEICYEAGPCGYVLARHLRKKGISCTVVAPSRTPKGSGDKIKTDRRDAQALARLHRAGELTAVTVPGEDDEAIRDLCRARTDAVDAMRCARSQMNAFLLRHGHHSAGKAEWGDSAKLTLRKLSLRHPAMGVVLEDYLCAIDEAFARIARLEKAMEEHLEHWGQKPAVRALMGLRGFRTVAAMISVSEFGSIHRFASARQCMAWVGLVPGESSSGESRRVGAITKTGNAHLRWLLNECAQHYRLPPKIGEALAGRQRAIAPAHRAAVKEISWKCQQRLYHKYRRLGARRKMKQKVQIALARELCGFVWAVLKAVQPQGPPAAS

SEQ ID NO: 107140 - protein, 387 aa, unidentified
MSPTIAARRPAAVDYERTLILSIEVSNQNWVLAAQVPGLPHTKAKRTVDPEAEALMAAIAGYRSRAAAMGRSIERVIAVYEAGWSGFWLARWLTRHKVEVYVIQPSSVPVDRRMRRAKSDGIDAELLLRTLLAWLRGEPRVCSMVPVPDEADEDARRCIRERTELISERVGLTNRIGAVLATLGVTDYNPLLRNRHYRLAELRTGLGEPLPPNAHAKIARLLARLELVLAQIAELERERDAVVETETPDHASKMIQQLISLRGIGVQSATVLVREAFVRRFANGKALGSYAGLTSSPYSSGGIDREQGIGKGGNRRLRTVMVELAWLWTRYQPAAAQVCWFRERVGSTGRRVRKIMVVALARKLLIALWRFVIDGVVPEGAVLKPAA

SEQ ID NO: 107141 - protein, 465 aa, unidentified
MKQRNAIGIDPDSRGFVCAYVKYSDTKVAHKGYLATEADLKSFLRWVKGEKDVVVAVEGSNGLSKPIETALRDAGIVFYSFKPADTERFRKAVLGQNKNNEKDAESVARYAMALEAQGKLENYRRVWFADMELQLLTRRYGSLAKQLTAEGNRLWKLLRYACPDLYLALAGKNPEVDCGPKMVKSQGILHLLITMPDVGQWKSLSEEQMLEAMGGGNYKGRRELVRELRKVVDSFRPISDSMALLLSRGAHQIRRLKEEQLHIVRMLEKVTAGNAAVQALRQMRGIGPITAATMIAEIIDIRRFAREDSLACYCGFGMREYSTGQTTSMRATELFNHRLKDSFMKAARNVVFYNPDSHLAGYQRNLMKAGMSQVQAMKRVARALVRGLYRKLSALPVAAETEAQTEDEKERGEGAMASGATRSGQGHVSDIALPSPPKYKAKTIRRVKMKVSRPKQTAQGRDDCP

SEQ ID NO: 107142 - protein, 389 aa, unidentified
MSDVESPSAAPEWMVRKMADKKRRKVKGCKMNSIVAGIDLGDRESLTTVLSPIGDVTDRFTFPMNEEGYAYFANRVPKEARVAFESTIMAYPIMRALRSHGYTDITVAHPKELAWIVRSKKKNDRADSLKIAKLHMAGMLPESHLLPRDQQIVMDLLVQRAKLGVEIGRLKNSVIGYLKREGIYDSLPRSRDSFSLKRSQAIHSLRFNDNRDLVLRTMMDRLEFLENQCVPLEDRVKENARLSDDVKLLMTITGVDFYLASLISSFMGDVNRFPSDDHLASFFGIVPASRDSANVKRRGKMTKDGSSTARWALSVMVDTVTQHNQPIKDYYQSVKKRTGSGKLAHVSTMRKLTRMLYHMLKTREHWKWEDTLLTERKLSRLQLGGGVVS

SEQ ID NO: 107143 - protein, 436 aa, unidentified
MVQRNRSVPFKPGKSRTALTITHPNAAGIDIGSASHYVAVPPDRDDEPVREFPSFTVDLNALADWLNACGVDTVAMESTGVYWIPLFELLESRGFTVLLVNARHVKNVSGRKSDVLDCQWLQQLMTYGLLSGAFRPTDAVCALRSLWRQRGMLLKAQGRHVQHMQKALTQMNIQIANVISDVVGETGQKILRAIVAGERDGLVLAEMKNARIRASRDEIAKSLQGNWRGEHLFALKQALAMFDFIGTQLSECDREIEQQLQSLQAHEGEPVKGKKRGRTRNAPKFDLRTQLFRMCGVDLTRIDGIDVTTALAVISETGTDMSRFATVGHFTSWLGLCPGTKITGGKVMSGKTKRVANRAAQALRLAAAALRSSQSALGAYFRRMCARMDKPKAVTAAAHKLARLIYTMLTKGEEYTDQGQDYYEERYRERVLRQLA

SEQ ID NO: 107144 - protein, 320 aa, unidentified
MSTDAKKTTFVGIDVSKTTLDVAILPSGKHWNYGNDAGSIGTLVRRLGRYRPTLVVVEATGGLETGLVAVLAREGHGVAVVNPRQVRDFAKATGKLAKTDQIDAAVLALFAERVRPQCRELPTEDVQALNVLLSRRRQLIGMLTAEKNRLGSARAPVRKTIVQHIGWLEEQLREIDRNLDQMIESSPLWRLKENLLRSVPGVGPILSRTLVGELPELGTLNRKQIAALVGVAPLNRDSGSLRGRRKVWGGRASVRTALYMAALVASRHNPVLHDYYRRLRGAGKPPKVALTACMRKLLTILNAILRTSTAWYQSLDARNA

SEQ ID NO: 107145 - protein, 349 aa, unidentified
MWYSGIDQHKRDSVIATYGPDGPRVKQVRVANTPLALAQYFADFPAPHKAVVESTGGWYWLADVLAPLGVELVLAHATRVKAISAAKVKTDQVDADVLALLLRADLIPVAHMIRPEQRGPRDLMRARLRLVEKCVSAQNSLDRLLEKFNVEAVTQLAPLYQLQAACHQAQIDLLGEQITTLERALHPHLIPNPDVQRLLWIPGIGKVNAFTLYTEIDGITRFPSVRQFFSYSRLVPGADNSGGRMRHRSGSKAGNRYLKLAFSHAGIRAVQYYPEIRAFFKAKARRKPIRIARTLVAVELARIVYQVLAKQEAFNGQFKHRPLSRGKHAQWPRRASPPASLTPSRGSCA

SEQ ID NO: 107146 - protein, 410 aa, unidentified
MEVLYSHCAGLDVHKDSVVACVRHMAGGKVTSAVKTFKTTTAELMLLSDWLSAEGVTHIVMEATGVYWKPVWHILSDGEFELVLANAAHVKNVPGRKTDVNDAMWLADLIAHGLIRASFVPDEPTQQMRDLLRTRKQMVRERSSHIQRIQKTLEDANIKLDSVVTDILGLSGRRIIEALIAGQTMPQALATLAHRRIHASVDELEAALRGRVTKHHRFLLKLHLDQIDAFDAAIAAIDQEVNVNVEPFRAAIELLSSIPGIGNLAATVIVSEMGIDMSRFETAGHLISWAGLCPRNDESAGKRRSTKMKKGAPWLKTTLLQCAWAASRTKGSYLQAQYHRLRSRRGSKKAICAVAASMLTAAYHMLKNGTFYEDLGADHFDNRAKGKHVLRLVNRLQSLGYVVQITPQAA

SEQ ID NO: 107147 - protein, 353 aa, unidentified
MTNGKKRSNLIAIDVHSTFCEGGWVDHHGNEKAEFQVSTTIPDLLAEVERVPRPRKLVMEEGPLADWLSRHLREAMDELVVCDPYRNALIAKDGDKSDAIDWRKLAELCRGGNLRLVHHPAELERSLFKQHVQLYHDRVKHRVSEGLKVIWRVRRMGVMIKEKDLIDSERREAMIAKLPASELLAEDLKVMLSGYDRAAEQVTLLRRRLVQLVKKDPAIHRLCKLPGVGPVRAATIHAFVDTPFRFRTKQKLWKYMGIGLEKKQSGTGRVILRSPRRFSRVLKSAILGAAKSAAASRDNPFADQYQRWLEDGCSSRIAKRNLARSLAVVIWGMWKSGSEYDPIQAGRVLAPTR

SEQ ID NO: 107148 - protein, 411 aa, unidentified
MMEAIHRCVAGFDVHSATVAVCLRRVEDGKVSKEIRTFGTMTRDLLALSDWLRAERATHVAMESTGVFWKPIYNILEGQFEILLANARHIKNVPGRKTDVKDCEWIAQLLQCGLLRASFIPPKPQRELRDLTRMRTQLSGEMATVANRVHKVLEDANVKLGLVATDALGVSGRKMIAALIEGETDTAKMAELACGRLRDKIPQLEQALLGKVTDHHRFLLKALIDHLTYLEGQIDRFNQRIEEAARPFEKAITALIPMPGYDRLSAQSVIAEIGPDMNQFPTDAHLCSWAKVCPGNNESAGKRKSGTTGHGNRWLQSTLVQVAWAASRKKRSYFQAQFRRLSGRRGKKRAIVAVAHSILTDTYHILREGVSYRELGGDHFDRLHHDRIRRYHVKRLQDLGYPVVLGERNAA

SEQ ID NO: 107149 - protein, 433 aa, unidentified
MGLIVPTTIHPEREDQPLPYEWFVGIDWGSQQHQVCILDRDRRLVGERTVDHDGASLAQRAAWLWTVSAGHPQRVAVALEVPRGAIVEGLVERGFHVFAINPKQLDRFRDRHSVAGAKDDRRDAFVLADSVRTDRPSFRRLQLDAPHLLLLRELSRVEETLLEEFRRSANRLREQLHRFYPQMLQLCSAADEPWLWDLLHLAPTPAHAMLLSEEQVQRVLKAHRLRRLKAPAVLACLQAPALPVAPGTAEAAQAHCGFLLPCLRVLAEQLQACGQQVSALLSTLAEASGEGESPSDVAIVLSLPGVGRKITAWLFAEAAQPLAERDYQVLRTHGGVAPVTKQSGKRRQVVMRHGCNPRLRHALYHMARVAMQRDAHFSSVYAALRAKGQRHGQALRNIGDRLLRILMAMLRHRTCYDASRIRCAPVAQMGQKM

SEQ ID NO: 107150 - protein, 337 aa, unidentified
MKSWSVTVLSETSVLKKFSQHPSPEALYGFLTRSYPGAEYHSVYEAGFCGFWIHERLTALGIDNIVVNPADVPTKSSEKLRKTDTVDSGKLARSLRANELKGIYTPDSVSLEMRSLIRLKNSITKDTTRQKNRLKSQLRYLGIEIPQEFLTPFSNWSKRFFAWLKEIETLTPSGRQALDIHIRHLEELRRQKLEMTRALRTLAKTDRFREPLRLIMSIPGFGQATGMAFLSEICDITRFRNAEQLAAYIGMIPMCHSSGEKDGTGDITIRKHAVMRCNLIEAAWVAVRQDPAMNLFYTEQCKRMPKSKAIVKVARKLVNRLFFVLKHQTEYVNSIVS

SEQ ID NO: 107151 - protein, 356 aa, unidentified
MAKNINLKDIEVAAIGLDLADQYSDWAGIEGAGEIRVRQRVRTTEPELRRVFGSLRATVIAMEVGTHSAWVSRVLSSCGHKVIVANARKVALIHRNKRKNNRIDAEILARLARSDEKLLFPIRHRDEKSQADLAVLRSRDLMVGARTKLINHVRGSSKVFGTKLPKCSAPAFVNRCASEVPALIQGAIKPILEHIEKMTEEITSYEDQIEKMITRHPEAKQLQQIVGVGTLTALTFVLTIEDPHRIVRSRSAGPYFGLVPGSDDSGETHTPKRITKEGDHYCRRLLVLAAHYILGRFGPDTDLRRHGLEIAARGGKNAKKRAVVAVARKLAVVMHHLWISGDTYVPLFNSELKTAA

SEQ ID NO: 107152 - protein, 399 aa, unidentified
MSHHGAQGTEWTLVAPNELARLASLQRPGTSGRYRVDAPRRHRGAKVVVLTATLREASVTEVSTIGLDLAKNVFQAHAASASGAILFRKKLRREQVLAFFAAQPRCLVAMEACASAHYWAREIAKLGHEVRLIAPTYVKPFVKRQKNNAADAEAICEAAQRPTMRFVAVKSEAKQASAVVFRTRDLLVGQRTQIINAIRGHLAEYGLIAPQGPSHVDQLIAQIEDPSSGIPDPARSCLAVLVETLRALQGKIAALDTEIAARAKRDDGARRLMSIPGIGPLIATAIEALAPPVETFRSGRDFAAWVGLTPLQRSTGAQERLGKISRMGERTLRRLLIIGASGVVRWARRKGVPAGSWLARMLARKPPMLVIVALANKMARIAWALIAKGGSYRAPAVAA

SEQ ID NO: 107153 - protein, 407 aa, unidentified
MSKTCGIDWSERHHDVAIVDHQARVVGRGRVSDDAAGFTRLLELLAEHRDGEDGPVEIAIETDKGLFVAGLVAAGFTVFAINPRAVARYRERYGQAGGKSDPGDAGVLANILRTDRHVHRPLPADSDLVRAVKACARQHQEAVWARQQAMSRLRSLLRDYYPQALQAFPNLAHRAAANVLRAVPTPQAAQRLTPARVVALLKKAGRRNDPGLAEAISTTLRAPALRQPAPVEHALGVAAVGLIEVITAMSDAIAALEAELATVFDEHQQAAVITSQPGLGPVLGARVLGELGDDPRRFADTAGLRSFAGTAPITRASGRSLIVTSRRICNRRLGDACHWWAFAAITKSPGARAHYDRRRAAGDTHNAALRNLANKLLAKLWHCLQTGTLYNEATAWPASPTPKQAAA

SEQ ID NO: 107154 - protein, 425 aa, unidentified
MDFKQNQKINQVTEKTLVVGIDIAKLTHYACFVDDRGRVLQKSFSVTQSGGGFELFYQRVLAAMRENGKTEVLIGIEPTGHYWLNIAYFLEERGIPLAMVNPMHVRRSKELDDNLPTKHDRKDALVIARLLKDGRFSYPRILKGLEAELRVGSTFRSKLTDELGAVKNMIIRWLDRYFPEFVQVFPTFGKMAMAVLEYTPFPSDLHEKQPDEILTLYRKAEGLKSPQRPKALRLMEVAANSIGITEGREMARIEIATLVRRFHQLEKDIENITQHLVELVKTTVEYEWLSTVPGLGDTTIVDLLAEIGSFSHYEDPRQLIKLAGLTLRENSSGLHKGQKRISKRGRRKLRALLFRVMMPMIRHNEAFKKLHEYYTNRQVNPLRKKQSIVVLCGKLLKVLHGISTKHKAFDAKRMMRDIPSLAEAA

SEQ ID NO: 107155 - protein, 403 aa, unidentified
MNAVGIDVSKGKSTVIALAPGGKLLARPFEVLHTKSGIKELISFAHTLGGDTRIVMEHTGRYYEPLLQWLAASDLFVTAINPKLIKDFGNNTLRKVKTDKADAKKIARYALDNWCDLRQHTGMDTTRTQLKTLNRQFAFCMKQKTACKNNLIALIDQVYPGANTYFESPARADGSQKWVDYVLTFWHVDYVCSMRLSTFTERYRKWCHRHGYNFQPDKPRLLMEKAKDLIAMLPMDKTTKMLVQTSIAQLNVLSKTVEALRTQMIALAEQLPEYPVVIDMNGVGPTLASQLIAEIGDITRFPRRGSLTAFAGVDPGAKQSGTMQLKSNKTSKAGSPHLRRALFQIVSGLLMRSPDDAVYNFMDKKRSEGKPYYVYMTAGANKFLRIYYGRVNEYLANLSKEQE

SEQ ID NO: 107156 - protein, 446 aa, unidentified
MTRFVGLDVSQKMTAICVVDNAGRRLWRGQCPSVPEQINVLVRQYAGDDARIGIETGAMTPWLVHELRNLGLDVVCLDARHARAALKMQINKTDQNDAEGLAQIVRTGWYRAVHVKSFESHRARALLGARAQLVGMTTRLSNHIRGVLKTFGLLPGAMRGLPFDRKVEALLIDRSDVGLIVRPMLVAWRQLREQIVAFDKAIRVLVRSNSTCRLLMSVPGIGVLSALTYVSTVEDPARFVRSRSVGAHLGLTPRQYQSGEVDRSGRISKCGDTLARTLLYEAAVVVLTRLKRASSLKDWAHAIASDRAPAKHGWRWPESSPLSCIVCGVRDSRSVGPSTQAPLDSVFRKIHPREIADVKVARRARVRVAATVGLERRHCTPARCGHCSACASDQMLRRIIPTAERTVTRGGDKKPLTRETRLENGPLTRCPCCQTMHHQTAVHIRS

SEQ ID NO: 107157 - protein, 430 aa, unidentified
MYERVAGIDVHKKMIKVAIRSPGAKPWTRKTEILEYRTFYGVLQEMARELRRRGVTHVVMEASGVYTEPVYYALCEQDFTEVAVINPVHAKALKGHKTDAKDCARLAELFECGLLRGSCIPSAEQKEVRDLTRYRIKTVQARTSEIQRLGKALESAGIKLGSVASEITGKAATAMIEALIDGERRGGVLADLAIGRMRSAGKLADLSMALTGRFTGHHATLCRLHLDRINVFDDAVDGLDDRIAAGAARWQREAGLLKSVPGFGDVVSCAWLAEIGPAPHKWFSRHEKLASWVTLCPGNNISAKKRKHGRTGDAGIYIKPMLIQAAWSAIRVRGRLQARYNRLVRRFGGDKNPAAKKKAITAIAHTLLKIAYQVLKSGTPYQDLGADFYTRRNSPEEQQKYLERQLQKLHPGCTITITISPPEAALPPGA

SEQ ID NO: 107158 - protein, 359 aa, unidentified
MREQRNEISFRGQKIYVGIDVHLKSWSVTVLSETSVLKKFSQHPSPEALYGFLTRSYPGAEYHSVYEAGFCGFWIHERLTALGIDNIVVNPADVPTKSSEKLRKTDTVDSGKLARSLRANELKGIYTPDSVSLEMRSLIRLKNSITKDTTRQKNRIKSQLRYLGIGIPQEFLEPFSNWSKRFFAWLKEVETLTPSGRQALDIQIRHLEELRRQKLEMTRALRTLAKTDRFREPLRLIMSIPGFGQATGMAFLSEICDITRFRNAEQLAAYIGMIPMCHSSGEKDGTGDITLRKHAVMRCNLIEAAWVAVRQDPAMNLFFTEQCKRMPKSKAIVKVARKLVNRLYFVLKHQTEYVNSVVS

SEQ ID NO: 107159 - protein, 344 aa, unidentified
MSNAESCGIEVSAKELLVKVRRRDEGVRERSFPNTPEGHQGIVGYLPRAGRVVRVCLESSGLYGLDLALALSAAEGIELMVANPRAVRHFAHALMKRSKSDPIDAGVLEEFAARMPFQRWVRPSPAALALHALARRLRELVEMQTAEKNRQHAAGLTQAIPAAVRRDLARSLRAQERAIERLTRAARQLIAQDPQLSERFELLDSVPGIGETSAVQLLGELGVLAPELTARQWVAYAGLDPREYTSGSSLHKKPRISKSGNAHLRHALYMPALVAVQHDPHLRGFYEHLLAAGKLKMQALVAVMRKLLHALHALFRTHQRYDGSKLFRLKTTPAQEVNRAPVLA

SEQ ID NO: 107160 - protein, 337 aa, unidentified
MKYCGIDLHSNNSVVIVSDEEDRIVFSKRLANDLGQIGAALEPHRDELAGVVVESTYNWYWLVDGLMDAGHRLHLAHPSAIKKYEGLKYSGDFADARYLAQLLRLGLLAEGYIYPREERGARDLARKRMQLVRYRTAQILSVENIMTRQTGTTLKGEAVKRLTAEQVDDFAFAPDVALALEANRAVSQVLGQQIEAIEKRLNESVGLRPEYRLLKTMPGVGQTLATMIMLETGYIGRFAQVGNFSSYCRCVDSLRESNGRKKGEGNSRNGNKYLAWAFVEAANFAIRYCPQAKSFYERKKRKANRVLAIKALAHKLARACYHMLREQRPFDVGRCFG

SEQ ID NO: 107161 - protein, 312 aa, unidentified
MYYIGIDVSKKDLSVFDGKKDLKFINKEGLKSFKKYLKKKVNFSDLVIIFEPTGVYSLYLKEFCAENSIKAYIVNPKKSHNFTRALGKRSKTDKIDARILYQFHKLIEAKDIKIPRIDQQAKALASYLTSYEFALKQRVALSNHLESLRDKELIALIKKDLKRAKKLEDKIFNDILEYVSKNQNLKEDYQRLSTISGVGDKTAIALLTLFKTYQGTNRAQITALAGLDPVRRESGTSVKGKVKISKNGKGIYRKIFYLPTVCATVHNQKIRVFYQRLLAHHKIKKLAVIASMRKILLIAHAIYRDKTEYVAV

SEQ ID NO: 107162 - protein, 320 aa, unidentified
MKKHATSMIVFVGVDVSKDFLDVYRPDTDELIKIDNSETAVADFCQQLQKKKRSLMVVMEATGGYETLLVNQLALHDLKAAVVNPRRVRDFAKGVGMDAKTDPIDAKIISKYGEVVSPKPMAVKSEHEQKHGALVARRNQLLELISQENNRLKQSWDDDAKQSIRDVLEVLKKQLKRINSQLAKMLKEDAKNQRTIEILQSVKGVGPVMISTLIAELPELGRLNRAEVAKLVGVAPINRDSGKKSGKRFIGGGRSQVRRVLYMATIVAIRHNEKIKAFYQHLKSKGKESKVAIVACMRKFITILNLLVKTDQLWENKTSV

SEQ ID NO: 107163 - protein, 403 aa, unidentified
MNSVGIDISKGRSTVAVMRPFGEVVISPFEVRHTGSELSELARQLKSLDGETRVVMEATGNYHAPVAKLLHDAGLYVSVVNAKLVHGYGNNDLRRVKTDRKDAVKLANYGLDRWLTLPRYVPEEDTRLLLKNCYRQYRQYSKVQTVLKNNLISLLDTVFPNANRLFSSPIRGDGSEKWVDFVAEFWHCKCVCERSERAFINKYQRWCRKHGYNFSETKAQTIHAVASGHIGVMPKSETTKLLVEQAVSQLRATSAALAALKHEMQALASMLPEYPVVMDLFDVGPTLGPQLIAEIGDVRRFYSKKALVAYAGLDAPPNDSGDMTGRHKSMSKVGASSLRRTLFLVMSVYLQNAPLAEPVYQFMDKKRAEGKPYRVYMMASANKFLRIYYATVKAYLESLEHTA

SEQ ID NO: 107164 - protein, 422 aa, unidentified
MLTESHDEEQIIARVAALDIGKTELVCCVRVPGGAEAKKRLQEVTTHSTMTRALSELANHLVDLGIERVVMEATSDYWKPVFYLLEAHGLDPWLVNARDVKHLPGRPKTDKLDAVWLCKVAERQMLRPSFVPVKPIRQLRDLTRYRIDLIGARTAEKNRVEKLLEDACIKLSVVASDIFGVSGRAMMAALIAGERDPKVLAQLARARMRAKIGLLEEAFNGHFDNHHAFLLTTMLGRIDAIGADIAAVDAQIEAQLAPFAAAAARLDDIPGVGPAAAATIVAEVGVDMSRFPTAAHLCSWAKFSPGIRSSAGKPKGNASSGHGNRYLARVLGESAVVAGRTDTFLGERYRRIAKRRGNKRAIVAVGRSILVIVWHLLSDEQAKFNDLGADHFTRHVNSETKKRNHIRQLEALGYSVTLTPAA

SEQ ID NO: 107165 - protein, 342 aa, unidentified
MDIIRIGLDIAKHIFYLHGVDASGKTTLRKKLPRHELLAFFAQRSPCLIAMEACSGSHYWGRELRKLGHEVRLISPQFVVAYRKNQKNDYNDAEAICEAASREHMRFVAIKSEEQQATLMVHRIREQCIADRTSKANQIHGHLHEFGIVLPQGVTKITALLPPLLEDNHLPGLLKSLLQDLLEDIHQLNKRIASLDKQIREFVKSNDTATRLMTIKGIGPITASALVATVGNAHLFKNSRQFSAWLGLVPKQFSSGGKTKLGGITKAGDGYLRKLLIQGARAVLFKCTSDEDHRSKWIMQLRMRKPDNVVATALAAKLARTAWAIMTSDETYQENYTGLTAA

SEQ ID NO: 107166 - protein, 383 aa, unidentified
MENTITYVAMDTHKKQHKVALHYPCQEEIVEFTIHNRVRDIKKMVNKVKKQAPGEVEFCYEAGVCGFTLKRRIEQFDCRCIVIAPSLVPRKPGERVKTDRRDAKKLLMMHKAGLLTEVHAPNEHQEAARELTRLRETAKDNLKRIRHQLLKLLSRHGYVYRDGHHWTQKHIAWLRAIEFTEPMLTSVFENYFNEMIYCIGRLEALDKEVGLLADSEEYKEIVGLLRCFHGIETLTAITILTEIFEFGRFESPRHLMSYLGLTPSEDSSGDKQKKGSITKTGNKRVRRLLNETAWHYRHRYVPSKALKQRRRGQPQWAVDIADAAGRRLSKRHRHLTNNGKMPCKANIAVARELAGFIWFVVTQYHARNNTKDAACNQTIAISA

SEQ ID NO: 107167 - protein, 343 aa, unidentified
MQTITTIGLDIAKSVFQVHGVDAAGQVVIRRQLKRRYVLAFFQKLPPCLIGIEACASSHYWSRELQALGHTVRLMPPAYVKPYVKRQKNDATDAEAICGAVARANMRFVPTKTPEQQSCLMLHRTRHLFIRQQTAVINSIRAHLAEFGIVAPVGRKGVTELLHIVADPSDKRVPEVARACLAALGNQLLSLKEQIVEFDRMIMVWHRSNETSKRLHYIPGVGPLLATALVASVADPRTFRSGRNFSAWIGLVPTQHSSGGKNRLGSISKQGDRYLRSLFVAGALAVIRYAKIHGTKHRPWLTALLTRRPTKVAAIALANKLARMAWAMMATGARYNYPPALKV

SEQ ID NO: 107168 - protein, 483 aa, unidentified
MKPKQLEKNKKVSCRPTQNNWHKMNRKQRREMTRKIQSEDLSLEVVHSDAAGIDIGNEFHYVAVPPTRDSPAVRRFGCTTSELKEMAVWLKQCAIRTIALQSTGVYWIAVYDILEEAGFEVYLVNARETKNLPGRKSDVQESQWLMKLHTYGLLRNSFRPSQEIRTMRTYWRQRNDLVRAAGRHIQRMQKALTQMNIQLANVLSDVCGMTGQAIVKAILAGERDPYQLAALRNWRVKSSQEEIARSLEGNWQEDLLFVLQQEQDGYEFCQKQMAECDQRLQQYLQQQEDRSHGASLPQEKRKERLRKKKKGNAPQFDLRAELFRMTGTDLTQIDGIDVTTTMTILSEAGWDMSKWKTEHHFVSWLRLCPDNRISGDKIIGKGRLPTNNRVTNALRMAASTLRLSNTYLGAQFRRLRTKLGAPVAIKAMAAKLARLVYRMLRYGMQFIDRGAEFYDAQHRKLQINYLKRKAANLGFQIIEAPAA

SEQ ID NO: 107169 - protein, 413 aa, unidentified
METGQKGRIQTRKENIIYVGIDLHKETHTAVMLDCWNQKLGEITFENKPSEFHKLTRKVSRFVTEEKTAVYGLENAYGYGRALAVWLLEKSHAVKDVNTALSYAQRKSVPMYQKSDSYDAEAVALVLINMLDKLPDAVPDDAYWTLSQLVNRRNNICSHQQRLKNQLHEQLCVAYPSYKQFFGDISRRTALYFWLRYPSPEHLKGKTAEELAAELRPVSHNNCSIKRAEKILELVRMDGQTTREHQEGRDAITRSIEGDLDHYREQLEIVETAIETMLPSFNCTLMTMPGVDVTTAANMLAEIGDINRFPNANKLAKFAGICPINFSSAGKGKDMCPKQGNRRLQAIFYFLAIQMIQVSTNGTPRNKVFREYYLRRVAEGKNKQQALICIARRLVNIVYGMLKNHTKYREPEQ

SEQ ID NO: 107170 - protein, 346 aa, unidentified
MVETTTIGFDIAKQIFQVHGVSADNKVTVKRRLRRSEVLGFFRKLARCIVGLEACGGSHYWAREISALGHDVRLIPPSYVKPYVKRGKTDAVDAEAICEAVSRPTMRFVPIKTEECQAAVMALKTRDLLVRQRTQAINALRGHLTELGIVAARGVAKVEALIEIIRDENDSRLPPAGRTALKTLADQIEALTERVDSLEREIVAEVRRNATMRRLATIPGVGPITAATIQALVPDPGVFTSGRHFAAWIGLTPKMQASGGKERLGKISKMGNPTLRSLLVVGATAVLRHARRGATLSPWLTALLARRPAKVAAIALANKMARIVWALLTKGGTFIRKNVVAEHPAA

SEQ ID NO: 107171 - protein, 436 aa, unidentified
MLDSIPFLSVGLDVGADFSWMSIALPNGTFLGKPFKIIHSDPLSRDLAVTKIKEAQELYSLKSRCFLESTGIYHIPLLCFLRDKGLDCFVINPIITKNSTNINIRKLHNDKFDSKKAALVGLNTSVKTSIIPDDSVVDLRNLVRDYYYFKDQQSAFVLKLEAELKVSFPAFLHAFSKVTTQSSLKLLSKYPLPTDMLAAPKEEIVEIIRKTARFGEKYALAKYDAVLAAAKDSQLFGRTLKSNAVRIRLYIETYQQYQTHLEAILQELHKAVDQLQGMPVYNQIALIQSLRGVGFLSAVGLIAEMGSFELFSSPKKLYAYFGLDPAVKQSGKFNGDKIHMSKRGSSLARRILHMIALNNLKVDKSTKAPVNPVIHDYYIRKCAGKKKNVAVGAVMHKICNIIFAMLRDNKPFEIITPQEHCQRYATEHPTHLSEVA

SEQ ID NO: 107172 - protein, 343 aa, unidentified
MQAVKTIGLDIAESVFQVHGVDADGQVVIRRKLKRRLLASLFEKLPACLVGIEACATSHHWSRQLQALGHRVRLMPPAYVKPYVKRQKNDVADAEAICEAVTRANMRFVETKTVEQQSCLMLHRTRHLFIREQTAVINVIRAHLAEFGIVAPVGRKGVEELLRVIADPADRRIPEIARACLAALGTQLQRLKEQLLEFDRMIMAWHRSDETSRRLDEAPGIGPMLATAVVASVADAKAFRSGRNFSAWVGLVPKQHSSGGQDRLGHISKQGDRYLRGLFVAGALAVIRYAKIYGTRHRPWLTALLARRPTKVAAIALANKIARMTWAMMVKGERYKEPVALAA

SEQ ID NO: 107173 - protein, 351 aa, unidentified
MWIIGVDYHPSVQQIAWVDTETGEIEEQRLKHSGGEAERFYRDLKEKGFSVRVGMEATGHARWFERLLRELGLELWVGDAARIRAKQVKKQKNDRQDAQHLLKLLLKDDFPRIWVPTPENRDRRQLLLHRHRLVQMRTRVMNQLQAVAMNEGIRRKRGLWTRQGRAELESLWLPTWTSRRRQELLELVDQLDPSIDQLSQAIEQEAEQQPEVQRLMTHPGVGPITALAFVLVLGTPQRFSCGKQVASYLGLVPSEDSSGNRRRLGHITKQGNTLLRHLLGQAAQSVANSDEEWRRQYAQLAMRRNRSIAKVAMARKLAVRLYWMWRQGYDYQQWASSVRTWGKLEIAHGVK

SEQ ID NO: 107174 - protein, 387 aa, unidentified
MPKPNDLSRSLVALEQDSTLIAVIEMSQSSWLVAGIVPGLERQPLKKLPADEAALLRCLQGWRDEAAKAGRMILRIAVAYEAGRDGFWLARWLQGRGVEAHVIHPTSIPVTREHRRAKTDRLDTGLLKRAFLGWLRGEPGHCSMAAIPTLAEEDARRPNRERENLVGERSRIVNRMKAALARLGIRGFNPKLRKAAERLARLRLPEGAALPENTLAELRRDMARLRLVREQIDAIEAARAARLAQAPATAPHAMVQLLAQIIGVGLETADMLVNEVLLRNLRDRRAVARYAGLTGAPDESGARRREKGLARAGNPRVRRGMVQLAWRFLRFQKDSALVRWYQTRTAEAARGGRKTMIVALARKLLIALWRLATAGEIPEGLAMRPAA

SEQ ID NO: 107175 - protein, 430 aa, unidentified
MKSNTQNAKIEAITEKTLVLGIDVGSETHYARAFDYRGIEYSKKPFKFSNTEAGFVTFKEWILDLKERHEKDKVVPGMEPTGHYWFNLGKFLQDNEMKPVLVNPHHVKKSKELDDNNPTKNDRKDPKVIAGLVREGRYMIPYLPDGVYADLRTASNIRFQLQAELTRIQNRISRWFNIYFPEYKTVYGKPDAKSGMLILKAAPLPEDILTLGIDGVNQIWRDAKLRAVGKARAKTLIEAAEHSVGSKEGAVAARMEIRMLLEDYESRSIRLQEVMTLIEGLVKQIPMAEKLLEIKGVGIRTVSGFLAEVGDISRFNNPKELQKLAGLALVENSSGKHKGETTISRRGRKRLRYLLFEVAMSLVTKNPEFRELHNYYTTRRLNPLKKMQSLMAIAAKLIRVFYVMLTKGVNYDPKKMVNDIKRPAVYLQTA

SEQ ID NO: 107176 - protein, 341 aa, unidentified
MQITTIGLDLAKNVFQVHGIDAAENVVVRKQLRRRQMLEFFKALPPCLIGMEACATSHYWARELTKLGHEVRLMPAKDVKAYIKRNKNDAADAEAICEAVRRPTMRFVQIKSAEQQGQLMQHRARDLLMRQRTQVINAMRAHLAELGIPARQGREGLKELVAIVADDDDTRVPVNARASLMVLAAQLQALQTLIGSIEKRIIKQHRVNEASQRLESIPGIGVIGATAIAATVADPKVFRSGRDFAAWIGLVPREASTGGKHKLGPISKQGDRYLRRILVVGACAVLKLARQKPEKYPWLTQLLARRPFKVVAVALANKMARMAWALLANGGTYRAPRIAAA

SEQ ID NO: 107177 - protein, 341 aa, unidentified
MKDITTIGLDLAKNVFQVHGIDEGGDVVVRKQLRRAQVFGFFSGLSPCLIGLEACATAHYWARELRALGHDVRLMPPNYVRAYVKRNKNDAADAEAICEAVRRPAMRFVPVKTADQQATLMMHRARDLLVRQRTMLVNALRGHLAEFGVVGAKGLHKVEGLIAIVRTRSEERIPVVAYQVMILIAGQIEDIDEKIATLEAQIIAWHKSNSTSRRLATIPGIGPMIATAIAAAVPDPNVFRSGREFAAWLGLVPRQNSTGGKARLGGISKQGDSYLRRLLVNGAHAALFWSKVAKTDPWLISLRARKHRLVATVALANKMARIAWAVMSKGETYRTVAAAAQ

SEQ ID NO: 107178 - protein, 338 aa, unidentified
MNHVAIDLGGRESQICVRAPDGTILEEKRYATRLLGKLMRGWTTSRVIVETSAEAFRVADAAKEAGHDVRVVPATLVKTLGVGARGIKTDQRDARTLSEVSCRIDLPSVHVPSEESRELKAMCGNRENLVECRTKLVNNVRGWLRTQLWRTRSGSTSTMPTRIRESAKTNRRELPIHIEETLELIAETTTRIRAADKRLREFAKKHSVCVRLMTVPGVGPVTAVRFLAALDDAARFRNAHAVQSYLGLTPGEHSSSDSQHRTSITKAGPAPLRRVLVQAAWTVLRTHPSDPMVLWAKKIESRKHKFIAVVAPARKIAGILFALWRDGTSYEPRRGAAM

SEQ ID NO: 107179 - protein, 272 aa, unidentified
MQIKSIGIDLGKTTFHLVALGAHSQVVIRKKFSRQQLLTYAANLPSCLMGMEAGVGSHFLGRALREQGHEVRLIPAQFVRPFVKSNKNDYRDAEAIAEAVERENMRFVPIKTEDQLDLQALHRVRDRLVARRTSVINQIRAFLLERGISFRKGPASLRRQMPEILETVDAKLSPGMRRLLDFLWQEWKGLQAQIESLNTDLEQIASSDPSCVRLQQIPGVGPLVSTAVVSAIGNGAAFKRGREFAAWLGLVPRQWSTGGKTKLLGISKRGNP

SEQ ID NO: 107180 - protein, 408 aa, unidentified
MQVLYTRCAGLDVHKDTIVACVRCVSPPMHQEVRSFGTTTTQLLELADWLGEHGCTHVAMEATGVYWKPVWHVLEDEFELVLANAAHIRNVPGRKTDVNDAMWIADLLAHGLIRSSFVPPHAIQQLRDLTRTRKQLVREVSQHSLRIQKVLEDANLKLGSVLSDVLGKSGRAMLDAIVAGETDPARLAALAQGTARNKTAELREALRGRITEHHRTMLRLHLQVIDALHRTLGELDTAVGKALAPIQQRTRLLTTMPGVSDLTASVMVAEIGVDMSRFPSAGHLISWAGLCPRSDESAGKRRSTRVRKSGTWIKTTLVTAAWAAVRVKTSYLRAQFLRIKARRGAKKAILAVAASMLTAAFHMLRDGTEYNDLGSEHLDRQDRSKTIRRLLKRLQDLGCEVPQMAHET

SEQ ID NO: 107181 - protein, 370 aa, unidentified
MSVRRILAKTIDTDLEYEAIGIDLAKNCVSAALLTTDGEVVCIDRLDYSELEKSAQALSSTTFAMEPCTEMNYLVQKLEAWGHRCLVIGGKNVQNYVENHYSGQKTDLNDAQALAFLAQDTQLRTIKAKDVEQQKYASLTTLREQYIKQYRQTIVSLKGICQAWGLNISKGISGKARLKDLIENHAAFPEELKESLVDMVTHAQTAQKALNKITKTLEELAKSDKVCQLIQTIPGLGSICSCRLRATVGDIKRFKSPKDFPAYYGLVPRSIATGHNERKGKITHRGDRTMRSLMVQAAGSLVNMATKGKLKSKQLTKWILKKQKEKMPWGKLVCAVAAKLLRIVRAVLISNKPYNSKIAGVAKCSLSKGS

SEQ ID NO: 107182 - protein, 370 aa, unidentified
MAQSTPLFVGLDVHKDSIAVAHAQGQSADPPVFVGAIGTRQADLDKLIRRLQAKTPTLVFAYEAGPCGYTLYRDLTGQGFACHVVAPSLIPKKPGDKVKTDRRDAVELARLLRSGDLTRVYVPTVEDEALRDLCRARDAARLTLKNAKLRLKSFLLRLGLHYIGRADWNAAHRRYLAKVVCPTPAQQIVFQETLGAVDEQVDRLGRLETELQEFGATWRLYPVVQALQALRGVQWLVAITVVAELGDLTRFDSPRQLAAFVGLIPSEYSSGPARRQGGITKAGNGRARRALIEAAWAYRHPAKVSQHIQTRIDALPKPIQAIGWKAQVRLCKRFRRLTARGKHPNVAVTAIARELIAFMWAIAKEVTVTA

SEQ ID NO: 107183 - protein, 393 aa, unidentified
MLYYLGIDVGKFSHSLCLLTEAGKKTIFQINNNREGFEKLRIKLSELNCDKNILVGMEATGHYFLNLYDWLLQCGFDSEQIALLNPLQVKSFRNTNLRGAKSDNVDSERIAVLLKFGEFKRCNVATDEMMNLRELTRLRADLVANIGDLKRKIISVMDRVFPEFMTVFSNRFGKTVMSLLNSYTPEEMAELSLEKLTDVIKNLSGRGRGISQKKIQALHEASRNSIGITFGRQAFKIELDILSTRLKVFKEQVEKLENEIQLIAEKFDSKIFTIPGIGATTGAAILSEIGNIQNFSLAVKLIAFAGLDPKLKESGKYQGRTPISKRGSKYLRNAIWYSAMVACRVDDKFKKFYQDRRNKGKSHRYSVTAAANKLTKVIYHVLKNKCEYDSKLV

SEQ ID NO: 107184 - protein, 408 aa, unidentified
MGSTQLYVGIDVHKRVQVSTILSLPVLKNKSNEWKKVKPILIKNNIKDYESLHKAIHRQAKDASSVSIAVDRTGSYSLPIVHFLVSKEYKVYFLTSQSVKAAKERLLKEENKTDRLDSAILAYLMYLRDFHGLSLNISATQPDLESHASLLRSLVLQRAQYVRLEVQATNRLHQYLLVVFPEGEMNYFSQLLKIAPYYPTPRDILYNGLTGIEKITKKDRKSIIALAQDTIGVPGEPYRWIISDLCEQRLDAHQKVLLISRQIKKEVDAHPYGTILRSFPFVGDVIAATLIGIVKDISYWPNDKTLKKVLGVYGREYISGASPPVRRPGKSGNREGKVALFQACIGCIRKTSTNNDFKDYYERQISHNKIWIQAMANTSGKMAEIMYHCLKTDAKYQYQGKYKGHRTF

SEQ ID NO: 107185 - protein, 317 aa, unidentified
MKEQIPNETCWGVDVASEHLDIARHGSQQVQRIGNDPKAIAKWLRSAPANSRLGLESTGSYHLQLARLAHERGITVYVLNPRDIKRYAQGLGQRGKTDRLDARVIARFIEREHEHLRAWQPPTQQQQELDDLLRERAALQKTYAALKQSVAKRPKPAAMLAKLLHEMKAALQDFERAIAQAVRELPQGDTAFGVITSIPGIGLLTGAALLRLFTRAPDASTDAIVALTGLDPRPMDSGTRRGVRRLSKRGDANTRRLLYNAGMAGAKTDTWRPIYERERAKGLSSTAALLVLARRLVRIAYSLFKSGQQFDRARVMT

SEQ ID NO: 107186 - protein, 325 aa, unidentified
MDILGVDVSKSKFDVALLRDNEYVLATFHNDSVGFVRLRKWLKKRKVNELHACLEATGRYGDDLALYLHEAGYRVSIANPARIHAYAVSQLKRNKTDREDAKLIAHFCATQDPELWTPPAQAQQELQAMVRHLESLQTMRQQESNRLQAGVPSMAVRETLEAHIAFLDEQINQLTQRIRDHIDHHPDLKQQKDLLTSIPGIADVTATKLLAEIPSLERFQGASQLAAYAGLTPRQHQSGSSVFRRGRMAKTGNAHLRRALYMPALVALRWNPIIRVFADRLRERGKHKMVIIGAVMRKLLHIVYGVLNSGMPFDPSYAVNFQDSA

SEQ ID NO: 107187 - protein, 453 aa, unidentified
MCLEERPILEPNAAGIDVGAREMFVAVPPGRDENPVRVFATFTEDLERLTDWLEQCGVTTVALESTGVYWIPLFEILEQRGIRPCLVNARHMKNVPGRRTDWHECQWLQFLHSVGLLRPAFRPGQDICAVRTLLRHRNELVSAASQHVQHMHKALTQMNLQIHHVISDITGLTGLAIVDAILAGERDGAELAKLKDPHIKADTETIRKSLEGNWRPEHLFTLGQSRALYRIYQQQIVSCDLEIERMLGEFEPRVDPTQKLLPPDGKRNRAGRKRRRKNGHPHPEFDLRTEVYKLFGVDVTQIPGLEENALPLFSEVGGDMSRWPSAAHFVSWLALCPDNDISGGKLLWRGARRVKNRAGHLFRLAAFSLHHSPTPLGNYLRRMKTKLGPKGATMATAHKIAVIFYVMVKKQVEYDQSIWATRDAQREKRLETKLKRQAKQLGYELVPIQPKAA

SEQ ID NO: 107188 - protein, 333 aa, unidentified
MKEQKFSQFIGIDLSKNTFDVAIFLPDDKQSSSYVFENSKKGIKAFFTLLKNNDFQLENCFICMEHTGVYGRLLIAKLVEKDACFTVEMSLKIIRSMGLLRGKNDKIDAIRIAHYAHKNHESLELYQAPPIVLEKIRVLMSLRDKVVQFNADLQKHPNELNKFDPELAKLANKSIKTLLKQLKEQVKRLEDKITVLISEDEKLSRTIALTTSVPGVGKITALQIAISTNLFTKCENPKQLACYSGVVPFEQSSGTSLNKRPRVHHMANKTIKKLLHMAAMSAITYDEEIRHYYLRKVEEGKSKMLVINNVRNKLIHRVYAVIKRNEPYVKKPV

SEQ ID NO: 107189 - protein, 391 aa, unidentified
MIFVGIDVAKDKHDCFILNSEGTVLADVFTIANNRIGFETLLSRIQSCSQGESKIKVGLEATGHYSYNLLGFLLDSGLATYVINPLHTNLYRKSLSLRRTKTDRIDARTIAMMLMSDVDLKSYSNTAYHNEELKSLTRYRFDKVKERAKLKSSVARLVNILFPELEKLVSSLHIAVVYALLSNYPGASYIANANTEELAETLCTASKGRYTKSKTAEIQVAAGVSIGSKMPAKSMELKHTIALIRELDKEISEVESAIDKITSQMDSPIFTIPGIGRHMGAMILAEVGDFSNFASADKLLAYAGLSPSTYQSGQLQNCYAHMEKRGSRYLRYALFNAAKYVCLWCPTFSAYLEKKRSEGKHYNVAISHAAKKLVRLIFAMQRSGKAFLANY

SEQ ID NO: 107190 - protein, 318 aa, unidentified
MANQIAVGIDISKKTMDVAMGHEQPTAIFSNDGAGHQALIEELKNHQVSLIVMEATGQYQLACACALQAAGFAVVVINPRQARDFAKAMGRLVKTDSVDARMLAELAQVLNLRPDRDRFIKPMPDQAQQYLHALVLRRRQLVRLLVSERQRKHMAHAEVVQDIVELMDVLSRQLEALDRRIAEHLAYHQPDLAALLKSVKGVGPATAATLMSELPELGRLKDRQISALVGVAPMNRDSGQARGKRFICGGRAAVRSALYMAAIVAMRHNAVIRRCYERLLAAGKPKKVAIVACMRKLLIILNAMVKSGRPWNDQLAQA

SEQ ID NO: 107191 - protein, 357 aa, unidentified
MEYGAIDLHKKESQIRIVTASGQVIDHRITTTRERLAHVFWGRPRMRILVEASTESEWVAQHLEGMGHEVIVADPNYGPMYGHRSRRIKTDRRDVAALADACQQGTYRRAHRRSARQHEVQCRLNVRQELTQARTRAISLARGVTRAAGLRIRSGRTETFLERLLALELPASMKATLSPLRSVIEVVNDELADADAQFEALVESDPMVKRLTTLPGIGPITASAFVAALDVVSRFERAGQVTSYLGLVPQEYSSGEKQRRGRIVRSAHPHLQSLLVQAAWRVWRASDPRTEAFRTWAQDLARRRGKKVAIVALARRLARTLFAMWRNEADYQPRRIRTRGAQPVADATAETGVSAPV

SEQ ID NO: 107192 - protein, 403 aa, unidentified
MNNVAGIDVSKGKSMVSVLRPFGEVVAKPFSIGHTGSELKELADYLKSLDGETRVVMEHTGRYYEPVARFLHDEGVFVSAVNPKLIKDYGNNTLRKVKTDKADARKIARYGLDNWVELRQHTPMDTIRMQLKTLNRQQSLYTKTKTMMKNNLIALLDQTYPGVNALFDSPVREDGSQKWVDFATTFWHVDCVRNMSLTAFAERYRKWCKRHGYNFSQSKAVEVHAGAQDLIAMLPRDALTKTMVRQAIDALNAISASMERLKAEMQALAAQLPEYPVVMAMHGVGDSLGPQLMAELGDVTRFTHRNAITAFAGVDPGADQSGTHEAKSTRVSKSGAPELRRALFLVMDCLLKTQPQDDPVYRFMDKKRAEGKPYLVYMTAGANKFLRIYYGRVKEYLASLEGN

SEQ ID NO: 107193 - protein, 323 aa, unidentified
MSCVTLSSVSILPSCVDVASLGNSKYKHKIFANDEHGFAAFIVWLVMLFPNDKPLICMEATRAYSIPLAEFMVNQGYPVSVVNPAKIKAFGKSELSHAKTDKADAKLIARYAFTLRPPLWTPPPHNIRELHALLRRVEHLLEMSQMEQNRLETADISVVDSINTVLTTLETELVATRKAIQEHINKDPELKRRRDLLITIPGIGEASAAQLLVALSEHHGFSNAKQVVAFTGLAPSLRQSGKWSKTKLAKSGDSLLRKALYFPALSAWQHNPLIREGCERLKANGKNGKAIVCAAMRKLVHLAFGILKSGLPFDPTIRLHKSI

SEQ ID NO: 107194 - protein, 345 aa, unidentified
MEIHTIGIDLGKTVFHLVGLDARGEVVVRKKCSRDQLLRFTANLRVWLIGMEACGGAHFLGRALREQGHDARLIPAKYVKPYVKTNKNDYIDAEAIAEAVGRARMRFVPIKTDDQLNLQSLHRVRERWVSARTAVINQIRGLLLERGITIRKGRSHIEESLPGILEDADNKLTGALRALLSQLRLEMQYLQKQIDECDKLILRIANELEDCRRILAVPGIGPMTATATIAAIGNGSAFKKGRGFAAWLGVVPGEHSTGGKQTLTGTGRRGNRYLRKLFIQGAHAVLQQRMKQSNGLNTWLAQLTSRKRIQVAAVAMANKMARMVWAVLSKGEAYRPPLLARTVEV

SEQ ID NO: 107195 - protein, 452 aa, unidentified
MMEQEMATSKARVARVGRSKLEVMHPDAAGIDVGGSMHCVAVPNHAADETVRQFGCYTVELNALADWLSECGVKIVAMESTGVYWIPLYELLERRGFEVMLVDARHVKGVHGRKSDVLDCQWLQQLLSYGLLRAAFRPHDQFCALRELNRIRGRTLRDQGRSVQHMQKAMTLMNIQLGQAISDVAGVTGQKIVRAIVAGERDPQELAAYRDRRIKASEEEIAASLEGTWRAEHLFALKQALATFDFCAAQLQDCEGEIEQVMQQLHKYSGEPAKGKRRGRAKNAPKFDVREQLFKMCGVDVTQVDGIDVSTALSIISETGTDMSRFASDKHFTSWLGLCPGTRISGGKVLGSGTKHSVNRATQAFKQAAAALRTSQSALGAYFRRLCARMDKAKAVTAAAHKLARLFYALLTKGQEYVDQGQLYYEERYRQRVIHNLQRKASKLGMSLVPSA

SEQ ID NO: 107196 - protein, 357 aa, unidentified
MKQVSTIGLDLAKHIIQVNGAGGDGSPVFNRRLRRSEVLHFFSKQPACLVGIGACGSAHYWAREIATLGHEVRLIPPAYVKPFVKRGKTDAADAEAISEAVTRKTTRFVPIKTAEQKAAMMFLKSRAPLVKQQTQTINALRSHLAELGIIAGAGRTKVEALVAIVRDVADIRLPTAARVALTAVADQIEAQADEIDKLERAIVAAAKTDKDMRRLTTIPGIGAITAATIKALVPDPGGFKSSRHFAAWLRLTPRRHSSGGQGADGTHLEDGKPRTSEPPRSWGDIRPANCPEGRSNAAMVEGAARQTSVQGGSGRAGQQDSANCLGALEQGRDLSASGDASDDYGCRSMNTAVVKEI

SEQ ID NO: 107197 - protein, 389 aa, unidentified
MEAQRKALSFKGQNIYIGIDVHLKSWSVTLMSEATQLKRFSQSPDPDALYAHLVRNYPEAEYHSVYEAGFCGFWIHYRLVGLGIHNIVVNPADVPTTTSEKLRKTDAVDSAKLARSLRAGELKGIYVPGSESLETRSLIRLRDSITKDQTRLKNRIKSHLRYLGIEIPEEFSGPGRCWNRRFVVWLKGAETGTAYGRQTLDFLVRQYEALRGQRLEMLRAVRALSRTERFEKPLENLMTVPGIGQLTGMSLLSEIDDIRRFKSADQLAAFIGMIPMCHSSGEREGVGDMTVRRSARLRSVLVEASWVAVRQDPALSMAYGNYCKRMAPGHLERTASSSMPSAAAIRQTLSSTRPWPASISDEVSVTPPHWNAYLTASRRDGWLSLTARK

SEQ ID NO: 107198 - protein, 357 aa, unidentified
MISIGIDVHKKKCTATLKRDSKRIVEQTSFCNNNYGINEFIQHIKGCYKEDAIAVCESTGNYWIRLHDTLEDNGINTLLANSLKTKIIAQAKLKDDKIDSNVLVDLLRADLVYESFVPDKEYRELRQLVRTRLNLVTERTVLKNKVHALLAKYEYQCPVSHIFSNKGTEWLKTIDLSWIDRMAVDAYLDALEAIQKQIGKFTAKIAFVSKEDQRVKLLMTIPGIDYFTALTIVSEIVDIKRFSTPWKLVGYAGLAPSKRDSGDAHRYGGHITRQGSKWLRYAIVEAANTSTRCDDRIGRFYKRIAQRRGPQKARVAAAKEMLVIIWHMLIKNEPYRTMNREMVERKYKKMERESNMV

SEQ ID NO: 107199 - protein, 317 aa, unidentified
MAEVTFPQLIQRACGIDVHLKVVVATIDGVGIQRDTRSFKTFTSSLNELKEWLLSNGVTHVAMESTGVYWKPVYKVLEDSIPNVWIVNARHIKNVPGHKTDKMDSEWICKLLLAGLLKPSYIPPKEQRQLRDLTRYRNKLIQQIASEKNRMMRILEDCNIKLSSVVSNTSGTTATSLIDMLCEGKVLTLDDIKSVYHGKLSASPEELLEACTGFVEDHHIYLLQMIRKDIDQTQALVDDLSERIKRLLSKYDNVLELLREIPGFSTKVVEDLVSEIGLDMSHFPSEKHLSSWAGLSPGNNESAGKKKAHESLTETNR

SEQ ID NO: 107200 - protein, 400 aa, unidentified
MYDIDDVGVFLGLDVGKSAHHGHGLTPAGKKVFDKQLPNSEPKLRAVFDKLAAKFGTVLVIVDQPASIGALPLTVARDAGCKVAYLPGLAMRRIADLYPGEAKTDAKDAAVIADAARTMPHTLRSLELTDEITAELTVLVGFDQDLAAEATRTSNRIRGLLTQFHPSLERVLGPRLDHPAVTWLLERYGSPAALRKAGRRKLVEVTRPRAPRMAERLIDEVFDALDEQTVVVPGTGTLDIVIPSLARSLAAVHEQRRALEAQIGQLLEAHPLSPVLTSMPGVAVRTAATLLVTVGDATSFPTAAHLASYAGLAPTTKSSGTSIHGEHAPRGGNRQLKRAMFLSAFAALHDPASRSYYDRCRARGKTHTQALLRLARQRISVLFAMLRDGTFYEPRTPRLA

SEQ ID NO: 107201 - protein, 451 aa, unidentified
MQEPQEIQDEEHEQPVARVAAIDVAKASGMVCTRVPHASGQGRRVTKVWEVEATTGAIIELGGHLAGLGIEQVTVESTSDYWRVFFYLLEAAGLRVQLVNARDVKNVPGRPKTDKLDSMWLAKLTERGMLRPSFVPPAEIRQLRDYTRLRLDLTRDRSRHVQRIEKLLEDALIKLSTVATDIMGKSGRAMLEALIAGQRDPKALADLARGRLRVKHAALVQALTGRFDDHHAELARMLLDQYDALTAQIDRLTARIEALIAAIPAAQGVDADGTTGPDAGTGPDAAVLPAIWRLDEVPGIARHTAQVLLAELGLDMGVFPSPAHLVSWAKLCPRTIQSGAKHRPGTTGRGNPYLRGILGEAAAAAAKTDTFLGERYRRLVKRRGKLKALVAVARSILVIVWHLLADPTARYHDLGAGYHASRIDKAKKTRNHVRQLEALGFTVTLTSAPAA

SEQ ID NO: 107202 - protein, 349 aa, unidentified
MEQNEVILGVDTHLDTHVGAVISDIGKLLGTRSVSTDTAGYLDLLTWANSFGHLRRAGVEGTGTYGAGLARVLRDHEIEVLEVNRPDRAMRRSKGKSDPTDAENAARAVLSGRATAIPKEQSGAAEAMRAVSVARRSAVKAKTQAINQLRALLVSAPQEIRDRLLKAKTAECVESCARVRSLGKTPMLQTLTATLRLLAKRWLTLAEELKALDTMLDDLTSQHAKRLRERFGVGPQTAAVLVAVAGDNPERLKSEAALAALCGTSPLQASSGKTVRHRLNRGGDRSANNALWTIAMVRMRSDPRTRAYVERRTKEGMSNKEIHRCLKRYIVRELYPLILADLADSTASA

SEQ ID NO: 107203 - protein, 374 aa, unidentified
MSIVMGVDQHRAQITAEWIDLDTGEISRARVSPADRDGVRRFLARFAGKQLEVALEATTGWRFFVEELRAVGAGVHLAEPAQTAALRGRKQRAKTDRADARHHRELLMAGRLPESWIPPDHILDLRARVRLRHTLIEAHSEWQQRIQAVLYHHGCPARRKLMVGDGPDWLSAQPLPDAAREQVTVARAMIDALERQIAPLDAQLRPYARRQTGCKALIDAHYGVGELVAVTVLAELGDCRRFSNSRDAVRYGGMDITVYQSDRHRAPGHLSRQGPPALRWALYEAAQAARRPSSPDREYYLQAAEQLGGNRACLALARKLLKRCYHTLRELGEDALTPPADEPSGSGSARRASSGSPAPTNRPATPQRADPLAA

SEQ ID NO: 107204 - protein, 343 aa, unidentified
MEYYVGLDVSLKQTSICVVDQTGAVVREGVADSDPEAISVYVRSKAPDAVRIGLETGPTSTWLWTELKRLGLPVICIDARHAKAVLKMQINKSDRNDAIGIARIMQTGWFKEVHVKDIDSHSVRALLASRALLVKIKRDLENHVRGLLKNLGLIIGRAKFNVFAVRAEELIEGRPELIAAIRPLLEARNAVGQQVSELDRKVMKLARHDAQVRRFMTVPGVGPITALAFKATIDDPARFARSRSVGAYIGLTSRRHASGEVDWTGRISKCGDAMLRSYLFEAAGVLLTRVPKWSAVKAWGVRLAKRNGLRKAKVAVARKLAVILHRMWIDGTEFSWSKKEIAA

SEQ ID NO: 107205 - protein, 350 aa, unidentified
MKRIVKQVAGIDVSQKELVVSLGRMYDDLSTEMYACKTFPNQSKGFMALLSWSNQLTEQSLATGYVMEATGVYHESLAYFLAEKEHEVSIVLPNKISNYFRTLEVKTITDKTSSEAIARFGLERKLDSWKKPGGIYKKLRQLTRERDQLIEHRTMTKNHLHAEQAEAEPNKSSVIRFKKQIEFFNKQEKEIKAELETLIKHDEQLRASVKLICSLSGIGTLTATTVLAETNGFELVRNKRQLVSYAGLDVREKQSGTSVKGKARISKKGNKYLRKAMHLPALAAIRHDERFKAIFARLVAKHGIKMKAVVAVQRKLLEMIFIIYKTNIAYDKEYLKKLESSITLLPKQAG

SEQ ID NO: 107206 - protein, 408 aa, unidentified
MDIKMYNAVGIDVSKGKSTVTVLQPGGTVIRKPFDVSHTSQNLNELAAYLDSLDGDTRIVMECTGRYHEPILKALSEAGLFVSVVNPHLIKNFGSNSLRKVKSDPADARKIARYTLDNWAELRQYSGMDNTRTQLKTLNSQFSFFMKQKVAVKANLIALLDNTYPGVNKLFDSPVREDGSEKWVDYAYSFWHVDCVRGIGLKAFTERYQAFCKRHHYIFQADKPEKLFNASKELAAVFPKEKTYKLLIQQSIQQLNLASGHVERLRREMNELASTLPEYSTVMGIYGVGRTYGPQLIAEIGDVSRFTHREALTAFAGVDPGVDESGQHKSKSNRASKVGSARLRKTLFQIMTTLLQNAPEDDPVYRFLDKKRSQGKPYYVYMTAGANKFLRIYYGKVKECLRNLEQES

SEQ ID NO: 107207 - protein, 402 aa, unidentified
MGYFAGLDWGSTRHAACVVDEHGKLVDRLEVRHDAEGLDWLIARLRRLGPAGTLPIAIERPSGIVVAALAAAGHPVVPIHPNAVKATRPRYRAALLKSDAGDAYILADLLRTDGHRFRPLAASSDALKALRALVRGRDDLVAERVALANQLRGVLESFWPGAAAIFADIDSPIALAFLRRYPTPESAARLGERRLAGFLAQESYCGRRSAAELLARLRAAAPGRAGAAEAEIKGELVRALAGVLAELVARLAKLTARLEHLVADLPDGRILMSFPRAGRVCAAQMLAEIGDARERFPTEAQLAAEAGLCPVTKASGKSHAVTFRWACNKRLRSAVTCFADNSRHASRWAADIYARARARGCDHPHAIRILGRAWIRVLWRAWYDGLPYDPTRHRGAQAQATA

SEQ ID NO: 107208 - protein, 348 aa, unidentified
MSCYLGVDLHRNCFTVCTLKEDGQSELRKWSIHALGEFAQTVQATDAVAVEATGNTRYFCQSLKDRGCRLVVVNPQQFQVISRSVKKTDTHDAKTLAQFLARDLLPEVRQKDALLAEIASILQTRDKLVKLRTTLKNKINNLLAGRGILIRRESLSSDKGLEQVLQASVIGLERVELEVLIGQIRHLNGSIQKLEAAIKKQGPKLPGYQNLKSIKGLGDIGSSTLLSTIGDINDFASEGKLAAYFGIVPRATNSNATARSGRITKRGNKLGRTTLVQCALIARRYSPYLAHYYARIKAARGTGKAIIALARKFLGIIYRTLKNGWVFEDFPRFVIAPAEGKTSLLKQG

SEQ ID NO: 107209 - protein, 476 aa, unidentified
MFQGMRLLDTNIERESLDDHRFSFDPISAPLLANEYSGHAYRLLAIFLSKSVESIPILNEQELVMTAINQFAAHVGLDWADKKHDVCIQYESGERRFQIIKHTPEALDAWLTELHKQVKGKIAVALELKKGPIVYALQKYPFVTVFPVHALSLARYRQAFWPSGVKDDPLDAELALDLMLRYPKKIKAIEPSNSDIRLLQQLVEQRRLLVEDKRRFVNRIINTLKQYYPQPLEWFSHRDSELFCDLIIRWPSLQQLKRARAHTVRLFLNAKGGTAVAHTEQRIELIVNAVPLTTDVSIIQANALMAVALAKQIKLVAENIKAYDERIEALFDTLPDADLFKSLPSMGPCMGPRMLAALGDDRNRFNSAEEIQNYAGIAPVTERSGQKSWVHWRWQCAKFVRQTFVEWAAKTVYSSYWAGLYYQQQREKGKSHQSAVRALAFKWIRIIYRCWKTRTRYDEAKYLKALRERQSPLLMA

SEQ ID NO: 107210 - protein, 335 aa, unidentified
MQIYGIDLAKEKFDVSFFDLTSKKVSNQPSHKVVTNNLKGIGKFFKGLPSDAVLVAEHTGVYGDTLLKCCMDSNVKIAFVGGYVIHRYRTTPDRAKTDVLDCALLRDFGERYPDKLKYKTFPEEALYELRQLARHREMLVEQRKQLITADKSEDCRPIRSLAVKRSMDRIKEMLDTEIAETEKEMLKVINGHESIHHNYELVKSVDGVGLITAVELLVKTENFTKITTARQYAAYAGTAPYEKSSGKMDKGAHISKIGNRRSKTLLYICAESARLHNKEIKLYYERRTLIDKKPRHYVLNAIANKLLRIIFTLVEKGEVYDVNYIRQDPRLVKHN

SEQ ID NO: 107211 - protein, 452 aa, unidentified
MAKKKNKTRTLRVHHPDAAGIDIGSNEHWVAVPADRAEKSVMPFRTFTSELQRLADWLKECGIRTVAMESTGVYWIPIYELLEERGFEVLLVNAAHARNVPGRKSDVLDCQWLQELHSFGLLRASFRPGPRIAELRAYTRHRQTLVEEGARQIQRMQKALDQMNVQLHHVIADITGKTGMAVVRHIVAGNHDPEMLAQYRDPRCRAAKEVVVEALRGHYKTEHLFTLQQALSLYDIFATHIKECDDRIETVLREVAAEFPETDAPRKSAKFRARGNQVAIDVRNPLQRILGGVDVQSLVGIGPLTALNLLSETGHDMTRWPTDKHFTSWLNFAPGTKISGGRRLSSKRRPGRNRAGLILRQAASSVGRTQTALGAFYRRLAARRGKGVAIVATARKLACAYYRLLRHGRQYVERGADAAEREYQQRRIISMKRQAKLLGFDLTPMQPVTQVT

SEQ ID NO: 107212 - protein, 349 aa, unidentified
MSHKLNSAIAVIGIDIGKNSFHVVGQDRRGAIMLRQKWSRGQLETRLANLPPCLIGMEACVGAHHLSRKLRMLGHDARLMPAKYVRPYSKGQKNDFRDAEAIAEAVQRPTMKFVATKTAEQLDLQALHRVRERLVSQRTGIINQIRAFLLERGVAVRQGLRFLRAELPRILATPGDLLSPRMVRVIEDLAGDWRRLDERIEGLSSEIEVLARRDVGCERLMSVPGIGPIISSAMVAAIGNGDAFTKGRDFAAWLGLVPKQISTGDRTILGKISKRGNRYLRVLFVQAAWVVLIKPKSWQRHCLKPWLEAAKKRLHHNVLAIALANKLARIAWSVLAHGRTFEASKIQAA

SEQ ID NO: 107213 - protein, 381 aa, unidentified
MKSQDSNYVGIDCGKKSLEVVRIHSEGSYERQQFSTTEIGISKLINWLNPNDVVGLVFLACKEPLAKLRCSLAISLFMNRSIGSQSFRIAKSILNKGIQVIVLNPGDLATIYQSLKKTDKEDSLKIARLIQRFPIEELPVVPVPTDEEEDNRRLCSEQENWTRQLTQGKNRLHSLFTQAGLTHITKKHLRTKANRETSVALLPSRYHKEAERILKVLDLVEQNLKLIEEEIKEALRKNQTYTQTIMSMPGIGMITSLAILSYMGDCKRFSSAKQAAYYVGLVPRVDISGDSVYYGRIVNRGCHSIRRVIVQAAWSLVRCQHGGKLKEFYERLYSKKGAKKSIIAVSRKMIEVLYSMIRTGTLFDSMPEEVLYRKLAQYGLM

SEQ ID NO: 107214 - protein, 414 aa, unidentified
MLKIVYRVCCGMDVHKSFVVACIASTTEYGVTTYKSKRFSTFTGDLRRCAAWLAENSCKDVCMESTGKYWIPIYNILEPTCNIVLAHPKYVKAIRGKKTDKRDAKWIADIFKHDLVAGSFIPPADIRQLRDLVRYRWKLTNFTTGEKNRAQNCLTVSNIKLDDVFSDVFGKTASAITTRILENPAEKITDVSGFRTKGMKATNEQVLAAVDGEMCEEQAEKLRIIRSHMDSLELCKLNLESLILSTAEKYLPQLELVMTVPGIQSFAAIGIISEIGVDMSVFPTSKHLCSWAGLTPQNNESAGKKKTTRISRAGAYIKPLLVQCALNAVRAKKFPEVRNRYLALKKRRGHKKAIIAIARMLLTAIYNILKKNESYNPELYRQTDRPPAHREVSVAEAIFILQRQGYLVAAPPTP

SEQ ID NO: 107215 - protein, 343 aa, unidentified
MKLSRVGIDLAKNVYQLHGVDRSGQTIWKRRLKRHQWFKALLDNTEPGCVIGMEACASAHHWGRQLQSRGYTVKLIPPQFVKPYVKSNKNDARDAEAICEAMSRPNMRFVTVKTVQQQDIQATHRIREELKVRRTAKANQIRGLVAEYGLVAPKRLSSLRAAIPCWLEDAENGLTHYFRSLLQGLWDDLLILDDRMCEMDKTIKRLAKNNEDCVRLQQLRGFGPMISTAMVATVGDARQYHKSRQMAAGIGLTPRQHSSGDKHRLLGISKRGDVYLRMLMVHGARAVVTRAKHKDDPLSRWVTEIATRRHPNVAAVALANKNARMAWAILRNKTDYDPDFAIS

SEQ ID NO: 107216 - protein, 387 aa, unidentified
MTQVDDLSRSVDAFDQDTSLTVVVEMSEASWLVTGMVPGVDRRPLKKLKPDPDALLRLVERWRSEAEKTGRTIERVALAYEAGRDGFWLARWLRVRGIEVHVIHSTSVAVSREHRRAKTDRLDTAMLMRVFLGWLRGERGHCGMVAIPTLEEEDAKRPSRERESLVGEHTRIVNRMKSALARLGIRGFKPKLRKAPERLAALRTPEGSAIPANMLDEFRRDMARLAVVREQIEEIEQARLERLEQAPAARPNAMVHLLARIIGVGIETADMLVREVLSRNLRDRRAVARYAGLTGSPDESGSKRREKGLARAGNARVRRGLIQLAWRLLMFQKDSALARWYRARTEGPKGARKTTMIVALARKLLIALWRMVTTGVVPEGFVLRQIA

SEQ ID NO: 107217 - protein, 415 aa, unidentified
MEPIHQRVAGIDVHRMKHVVTILIGQEDGAVSSETREFGGFKRDMRALVAWLRTHRIQQVVMESTGIYWKSVFAHLEAAGIPALVVNAFHVKNVPGRKTDVGDSEWLAQLARFGLLRGSFIPPKDLRELRIVSRYRRKLTGMLAGEKNRLHKLLDDAGIKLGGVVADIDGVCASKMVEGLIAGGKPDELAALGRGKVRATTDILEAAMDGELSARHRLVLDIAHDHLRYLEGKLAALDRYLIAAMQPYAWAWRLIQTIPGIDAISAAMILIEIGDDPHRFGSPARLASWSALCPGNNESAGKRKSGKTRHGNPIVRYLLCEAANAARRTQTVFRAKYESLVIRRGHKKTIIALAHKLVRTIYFVLVRRKPYRDSTVDYEAASVAKNAPRWIRALKKYGYWPQVAVPNSPIDMTAT

SEQ ID NO: 107218 - protein, 426 aa, unidentified
MKKQEVPIVAWIGLDWADQEHYICLQAEGCERVQSRVLKHQPEAIQQWVQQLRRLFPQGRVALALEQSRGPLIYALMHYEFLILYPVPPKMLAKYREAFSSSGAKDDPSDAALLLEILRYHRSRLRPWKPDDEQTRFLQRLVEYRRKTVDQSTALTNELTSLLKEYFPQVLHWAGSLKKRRALDFLTRWPTLQVLQRTPPEQIREFYRTHRCRGQAVLKERLQEIRQALPLTQDRVVLEASQIRVRILVQQLECLRLALEELEEKIAECFQQHPDRCLYEALPGAGEALAPRLLVAFGSDRSRYPSAQELQQFSGIAPVTTRSGRSCWVHWRLACPKFLRQSFHEFATHSIARSLWARAYYQLQRERGKGHHAAVRALAYKWIRILFRCWQSRQPYDENIYLRALQHRQSPLWARIVQQSSMRVVA

SEQ ID NO: 107219 - protein, 412 aa, unidentified
MTTSAPTRFVALDVHRQYLVVGAVNASQQVVLSPRRFGFESFQDWAPAHLTPLDTVVLEATSNAWLLYDQLKPLVADVIVAHPQAVKLIAAARVKTDSRDTIKLASLLAANLIPAVWIPPQQVRELRALVAHRKRLVQQRTQAGNRLHAVLHRHNLVLPAGKPFAAHQREWWLSLDLPTSEKLRSQQDLSLHQALEELVKEVEAELGRLSTCDPWVKQVPFLVHLPGLGVLSAMRVLAAIGEIARFPSAKHLVGYAGLGASVHDSGETHRGGHITKEGRSDLRGIMVEAAWVAVEHHPHWKTQFERLSARIGKQKAIVAIARKLLVTIWHVLSHQQADSNVQIEAVTRKLLNWIAHTGATPGKKRDRLLLLYEQLDRLGLSGEVEQVDYYGSTYRLSTRQQLLRVAQQRKAT

SEQ ID NO: 107220 - protein, 362 aa, unidentified
MSYGSRGRTERTVGLDLGDKYSYFFVLDNESGKMIEEGRLRTTPDNLRRRFDSEEQMKIAIEVGTHSTWVSRILHDCGHEVLIANPRKTRLIYSDKRKTDKLDAKKLARLARVDPELLYPIEHRGEESQAHLALIHSREVLVRSRTQLINHVRGVVKSFGARLPKCSAESFHRRIRHQLPQELEEALVDVVETIGSLTERIRDYERRIERVCKEGYPQETELLRQVAGVGVLTSLTFVLTLEDPDRFKKSRTVGAYLGLVPGKDQSGEQDPGKRISKEGDEMLRRLLVGSAHYILGPFGPDSDLRRYGEKIAGRGAKNAKKRAVVAVARKLSVLLHRLWITGEVYEPLHNARLSGALGEEVA

SEQ ID NO: 107221 - protein, 308 aa, unidentified
MNTIHAGLDIAKPSLQLHLAGKLHDLPNTPAGHRRLCRLLAGHPGVRVICEATGGYERKVVAALHAAAIPVSVLNPARVRHFARATGQRAKTDRIDAALLAAYGQALQPQPTLPRSAQEQQLSELVRRRAQILELLVRQRQQAERLELPALRRQAQSLVRRLEADLAKVEVFLQRLRDQSRTLDERVQKLEAITGVGALTALAVLAELPELGTLNRGQAGALAGLAPHPRQSGQWDGRRTIGGGRPAVRRALYMAALVAARCNRPLKAFYERLRLAGKPAKVALTAVMRKLLILMNHTLKNPNFILQN

SEQ ID NO: 107222 - protein, 420 aa, unidentified
MFKIFRKNCCGLDVHKTWIYACIGITDANGRTDYKQARFSSFSKGLRELAGWLAKYGCKEVCMESAGKYWIPVFNILEKTCLVTLAHPKYTKPQKGNKTDRKDAKWICDLFMCDMIKPSFIPPPDIRHLRDLVRYRFKLTNCLTGEKNRAQNCLTVSNLKLDDVFSDVFGKSARSITNHILEHPGEPFDVAPFVDKRCKRPIEEIQAAVDGSISHEQAIKLREILRHMDEIKAHKLSIEAEILRLAAPYKSLRELLYTVPGFSADPMTAVAVLSEIGADMSVFPTAKNLSSWAGCCPRNDQSGGKRKSTRISRAGVYLKPLLVQVANAVVTSGKYPECKERYRRIKARRGHKKAIIAICRMLLTAIWNILSKLEPYSSKGYLADRQTNPSMVITKEQGLHLLRSRGYLFKDDIQPSAPPV

SEQ ID NO: 107223 - protein, 410 aa, unidentified
MEVVHAHCAGLDVHKDTVVACVRHMTDGKITTTVRTFKTTTAELLALSDWLSVEVVTHIAMEATGVYWKPVWNILSDGEFELVLGNAAHIKNVPGRKTDVKDAAWLADLMAHGLVSSSFVPDQTTQEMRDLLRTRKQLVRERTSHTQRIQKTLECANIKLDSVISNVVGVSGRRMLEALIAGQTEPKELAAMAHGRLQATPAELEAALRGRVTAHHRFMLRLHLDQVDSFDEAIARIDKQVSDNDQHFRAAVELLKSVPGIGSLAAEVIVSEIGIEMDRFATAGNLVSWAGLCPKNDESAGKRKSNRLKAGAPWLKTTLVQCAWGASRSKGTYLHAQYLRIRARRGNKKAICAVAASILTTAYHMLKDGTFYEDPGPDYFDKRNKDQQANKLVNRLQNLGFHVILQPVSA

SEQ ID NO: 107224 - protein, 430 aa, unidentified
MGLLVPSTMDVEQHDQPLPYEWFVGIDWGSQHHQVCVLDRGRHRVGERTIAHDGASLAQLSAWLWTVAAGQPQRVAVAIEVPRGAIVEGLVERGFHVFAVNPKQLDRFRDRHSVAGAKDDRRDAFVLADSLRTDQPSFRRLHLDAPQLILLRELSRTEETLLEDFRRSANRLRDQLHRFYPQMLQLCAAADKPWLWDLLELAPTPAHAALLSEEQVQRVLKTHRLRRVTAHEVLTSLQAPALPVAPGAAEAAQTHCRFFLPCLRVLAEQLQACSQHVSALLKTLAETPGEGEGPSDVAIVLSLPGVGRKITAWLFAEAPQPLAARDYQILRTHSGVAPVTKQSGKRRVVVMRHGCNPRLRHALYHMARVAMKSEAHFHQVYTALRAKGQRHGQALRTLGDRLLRILMAMLRQRTCYDANRMRGEPLVQMG

SEQ ID NO: 107225 - protein, 436 aa, unidentified
MFVGHRFRTDPDELDTLWARLPKDAERIEVVREPTRNAWVALAAWFRRHGATVVMVPPEQSADLRDYYNKHTKTDRLDSKVLARLPLLHPEGLHREDSLGPGDELKRAVKIRSGLVHRRTACMARLDALLEILGPAWIAALGWDMTLTALRFLARYANPVQVKRLGKARLAAFFRRSSRQAWADERADALIEAAATTLRLWAADGGELDFDALAADIAAQARLALTLTDEINGFDKRIGALYDKADPAGIVRSVPGAGRVCAPQILRRLGDPTRFANLAAVRSFAGLVPAADSSGQADGHRGPTKAGDCCLREALFIAADHARKVDPTLAVHYQRLMLAGKHHDSAVCTLAAVLLTRIAACLRAGTHYLLRDTDGRIITEAQGRAIVAERYTVPPEVRAARRKVTPHRHPRRNERNERAKTGVATRSKASPVPQPA

SEQ ID NO: 107226 - protein, 342 aa, unidentified
MGEVSTIGLDIAKSIFQIHGVDADGAVVMRKRIRRAKLMEFFAALPACLVGIEACPTAHYWSRRLQALGHTVKLMPPSYVKAYLKRSKNDANDAAAICEAVTRPSMRFVATKSEQQQSGVMLHRSRQLLVCQRTMLSNAIRGHMAELGLICAKGRNGTAELLKIIADEHDDRIPAAARFSLGVLARQYAAIREEIVAIEKRIHAWHRSCEESRRLEEIPGVGPIVATALVAEVGDWKEFTSGRSLAAWIGLVPRQHSTGGKERLGRISKQGNRHLRWLLVAGAMAVIRYARQHGTKRPWLARLMDRRPIKVAAVALANKIARMAWAMMVRGERFKEPKLLPA

SEQ ID NO: 107227 - protein, 335 aa, unidentified
MWYAGADLSRRSVMVAMVDDKSRRVRPRRLECREPERIVKLMLDHRPFKVVIEASGSYRWLYDLLAPHGEVVLAHPLRLKAIWSGRAKTDKLDAKVLADLLRGDLIPESYVPPERYQTLRDITRARSRLVCARTDAGNSIHAILARANIEPRYKTCLGPRGREWISSLEFGRVTAFVRDELVERLAHFNAAIKRTDSLLDEIAADYPEIEAIIDIRGIGLYSALLIVAEIGEPDRFTNPEQVSASTGLTPRVRQSGQCDFHGPVSKQGSRWFRWILVEAAMKVIKGDRKLNNFYLRVKRRAGFARARVAVARKLSEICWKRLRDWHVANQTDEAK

SEQ ID NO: 107228 - protein, 353 aa, unidentified
MKKYIGCDAHARYSIFAVLREDGRWEAPVRVEHQESEMERYLKQLSPGTPVALESSGNWYWLVRAMEEAGLEPRLAHALEAKKRMPGRNKTDHLDAKGLALMLRTGSLPEVWIPPASLLDLRDLMRTRLATRQQGSELKCRILSALRRYGVRGYEDGNDLFAESRRAKLAVAIGRLPQECRIAVTEQWQLLEELEAHIGAMEERIRLRIASLGWVRLLKTLPGVGTILGSTIYLEIGDVARFPSPEHLASYAGLVPTVHASGGKSWHGPTPRAANHFLKWAFVEAANVTTTRRKGWADKHVVKLYERLRATKCHGKAATAVARHLAESSWWILSKKQPYRDPALGTRSSSKNG

SEQ ID NO: 107229 - protein, 416 aa, unidentified
MEPQRNKVCGIDVHKRFLVATILSRDGKKETKRFSVTLEDLLKFRDWVIDNGCEQVAIESTGIYWHPIHAVLEGKVDLIVANAYKIKHTPGRKTDVSDSEWIAELCLNGMIEPSRIFPKDDRELRRLTRAREGYVKQMTQEKNKIHHSLDSACIKLASVISDIFGKSGMYLLNCILDGRDIDEIIEGIPSSRLKKKADQIKEAIKSHLEVSQIILIRGSLSLIRSIQERIDELDREISARIERRKNDLTIAMSIPGTGFISAAAILAEIGNYTDFKNPEQLAAWCGLVPSLYQSAEKVVLGGITKQGSKHIRRMLIQVAYAISRTKDSKLRRFFLRIQAKKGSKVAAVALARKVLCILHHLLMNQEIYLEDKARKNMRQKPLVSPSPIEMPIQEMIDCIVRAGYVVMKSDCRGGPG

SEQ ID NO: 107230 - protein, 418 aa, unidentified
MKKHSKSSQRSEPSLKRTKARGPVQRDAKEVLAEVLGKLTGKLDAPAVSTSAKRNRRGNTVGPNRDRLTVGVDLGDRWSQYCILGLAGETLAEGQLRTTQEDVREFFQAMTVARVVIEVGTHSAWVQDVITEWGHEVLVANPRLMEGSKRRKRKSDRIDANKLARLGRVDPQSLYPIRHRSREVRQDLVVLRARDALVSVRTELINTARGLVKSMGTRLPRCSSPSFAEKVKDAIPAEVREALLPLVQLVETVKDCIARYDQKIEQLGRKKYGHTTLLRQVKGVGPITSLAYVLTLEDPQRFSSSREVGPYLGLVPKQEDSGDSQPQLGISKAGDRMLRRLLVGSSQYMLGAFGPDTDLRRYGLRLCERGGKNAKKRAVVAVARKLAVLLHHLWVTGDEYEPLHHTGAETRTAQATAA

SEQ ID NO: 107231 - protein, 377 aa, unidentified
MESIIYVGIDVHKDTYSLCSFDMQKDIFFSQHTMKASTVNVVSYLKKISESNGNAITICGYEAGPTGYRLCLDLQQQGFNCVIMAPTSIAKTAKDKILKTDRADAQMLARPLAYHSYKQVVLPTENILAIKEVVRLRASVLKSCKKAKQNLLSFLLYHGISYPGGGRESYWTVKFFTWLKTITFASDYLTYCFEEYVGEVSRQIQRLDRLNAKLKELESDKEISEGVKKLKCISGIDTVTAVSLIAETGEFNRFKSAKEFASYTGLIPGRHDSGLSVGNSVGITKQGNQNLRHLLVESAKSIKRATALSHGQKSRRLLTRQGGMDSEIINYADRAALRIKSRMRKLEIRGLNYNKAAVACTRELACFAWGMMTNHIQ

SEQ ID NO: 107232 - protein, 339 aa, unidentified
MEITTLGIDLAKSVFQLHGTDAGGKVVLRKRLRRNQVLEFMASLPRCLVGIEACGTSHYWAREIQALGHDVRLIPPAYVKPYVKRQKNDMADAAAICEAVTRPSMHFVPVKTAEQQGVLVLHRTRKLLSRQRTMMLNAFRSHLAEFGIIAPKGAYHVAQLANALRGEEHDLPEVARLALLGLADQLAALSTEIKSLDAQLVAWHRQSALSQRLQTIPGVGVLTATAMAASIPDATLFRSGRQFAAFLGLVPKQNSSGGKERLGRISKMGDPYLRTLLVNGATSVVRRIAQAEGPTAIWIRRLLEKKPTRLATVAIANKTARIVWAVMARGEEYRRPAMG

SEQ ID NO: 107233 - protein, 356 aa, unidentified
MEYGAIDLHKKESQVRIITEAGEVVDRRIPTARDRFNAVFWGRPRMRILLEASTESEWVAQHLEDLGHEVIVADPNYAPMYGQRSRRVKTDRRDVAALTEACQRGIYRVVHRRSAQRQTVQSQLNVRQELVQARTRAISLVRAITRAAGFRVCSGRTESFLTRLDALSLPASMKATLLPLRSLLEVLDEELARADDHFAAIVAADAAVKRLTTLPSIGPITASAFVAALDDSRRFRGAGQVTSYLGLVPQEYSSGEQQRRGRILRSAHPHVQSLLVQAAWRLSRSSSPDTAALRAWAQAITRRRGKKIAMVALARRLARILFAMWRDETEYRATRVRTTYRHSGVVVPDGETRAGG

SEQ ID NO: 107234 - protein, 344 aa, unidentified
MQVSVLGIDLGKNVCSIVGLDVSGAVVLRRRVKRETLIGLTRKLPLCIVAMEACCGAHHLGRLFAGQGHEVRLMSPEYVRPYIKAQKNDDRDAEGIAEAATRPTMRFVELKTQEQLDMQTLHRSRDRLIGERTALINQARAVLLERGIVAPQGKRRLAEYLNTLMSDPKAGGLSSRMRVLIADIQLQWQELDRRIEIFDAEFVAFAKENDDARRLVTIPGVGVTIASALIAAVGKAETFDHGRDLAAWLGLVPRQSTTGGKPTLLGISKRGNKYIRRLLIHGARSILRFIAERDTALGLWVKELLLRVHHNVAVVALANKLARIAWAVLRRGDRYAAWGTPVSA

SEQ ID NO: 107235 - protein, 338 aa, unidentified
MPRYIGVDLHTNCFTTCVVDTAAKQTFRDYKLSEVAEFAASLRETDQVAVEATGNTRYFYEQVAAKVKRVAVVNPRAFEIVKRSANKTDKRDAANLALFLSKELLPEARMKSRDQAEVASLVQTRDKLVKQRTALINKLHALSVAHGRRESKEAFASEAGLERVLQQAWSVVEQVEVEVIVAQVRSLNAGIKRLEGEMSEQGTKLDGHACLTSIKGIGTKSATILLSVIGNIADFASADKLASYFGIVPSVRQSNETQRTGRITKGGSKLGRTTLVQCTLVAIRYSPYLKKYYERLKERRGAGKAIIATARKFLGIIYQTLKHQWVFADFPNFVLAES

SEQ ID NO: 107236 - protein, 416 aa, unidentified
MNAVGIDVSSRKSTVAVLRPLGEVVCLPFDVTHDIAVLASLAEKLKAIDGETRVVMEHTGRYYEAVAKALHEAGFFVCAVNPLLIKEYGANSLRRVKTDKADAIKIARYALDNWADLRDFTPMDAIRYDLKTLNRQFQLASKQRTASANNLIALLEQSFPGIRKCFDSPVRSDGTQKWVDFAHSFWHVDCVRKQPFPAFCERYRKWCKRHAYLFKLSNAEEVYALAKRAVVLTPKSKVVKVLVQEAANQLSSISRSVEVYRAEMDRLAAMLPEYPVVMAMYGVGKSYGPQLMAEIGDVRRFERKQALVTFAGIDPMPNQSGDKNVRSNKSSKRGSPYLRKTLFNVIRTYLQCAPQDEPVFQFLNRKRAEGKPFYVYMLAAANKFLRRYYAKLRDYFASLDTLQPAAPIPTILKATL

SEQ ID NO: 107237 - protein, 334 aa, unidentified
MALNTLAIDIGKHSFHLFGIDDDGVIVSRKVSRLKLVATVDRLDPKIIAMEACGSAHHWGRMFQEAGRMVRLISPYFVRPFVRGSKNDATDAQAIFEAAGRPTMRFVPVKSLECQDLQSLHRIRDRLVHNRTSLINHTRGLLAEYGIVLPQGAKRFTLQVRQAVVEAELSDLARELFEELLDQLGDLDRRIAHIDKHLIAICRDKAACRRLVGIPGIGPVVATALLAAVDDGRQFGSGRDLAAWIGLVPRQYTTGGKPRLGGIGRRANHYLRRQIVHGARAVMSQAGRRSDPRAEWMKAVAARRGFNRAVIAVANKMARAAWAILVRGEAYAAA

SEQ ID NO: 107238 - protein, 319 aa, unidentified
MTYYTGLDVSLRSVSICIIDDNGDIRHEAKVAAEVDQVVACLRTFSQDITAVGFEAGALAQYFSYGLQAAGFEAICLEARQVAAALSAMRNKTDRNDARGIAQILRTGWYSRVHVKSLESHHVRILLSSRRAVLAKCVDLENELRGLLKIFGVRLASKVPHGAYDDTLRPLVSTDPLRARALLPVLDARLVLYKTYLKLDNEVKAAVRVDPVCQRLMTVPGVGAVTALTFRAAVDDPNRFKSSRTVAAHFGLTPRRFQSGETDNPGRRTIRGASRSLAMRKYAVSCMWRRMCWSPAARRGVRSRRGASGWREHEVTAGP

SEQ ID NO: 107239 - protein, 418 aa, unidentified
MGGIREVAKVACGLDVHRSEVVACLITSGTRKRPKVEIRRFRTLLAELLQLRTWLVEAGCEVVGMEATGPYWKPIYAALEGHVQLVVGNPLQMKGLKGRKTDQKDAEWIADLTRLGMIKPSFVPPPEFRALRDLTRERRNVIHARTMLRNQILKLLEGTGIKLASFISNVFGVTGMGLLRSLSQGQDVRALLPLLVKGTLRRKLTDLNLALEQPLPEHLRELLAIQLLRHDDLDRVVSHIEAMIETRMEPYHAERNLLLQVYGLGITAVNIILAEIGVDMNVFPTPAHLAAWAGVCPGNRETGGKRISGTTRKGNTYLTTILVECALATVRAKGSYFRSKYHHLRARIGHKRALMAIAHKLIRLIHRLLSRKEPFKDLGEAFLDKREKTVKVDKLSRRLQALGYRVTLEPLPDSGLIA

SEQ ID NO: 107240 - protein, 347 aa, unidentified
MMYVGLDVHKRVCYGTVMDEKGKVVKQAKFTNTPEGLEEFMEDIDLATVAMEAGYCWQPLYDRLEETGYDVRLAHPLKVKAIAQAKVKTDKIDSETLAHLLRADLLPESYVPPRDIRELRDRVRRRAFLVGMRTMLKNRVQAELAKRGIKPGVSLWTREGRALLDGLDLEAVDQVLPVMDVLDRQIAKISWGMRRMCGEDPRARLLTTIPGVGYYLALLLVSEIGDVNRFPDSEKLCSYAGLVPRVRRSGGSTHHGGITREGSRWLRWGLSQAVHVHIRSETNLTRFYRRLAGKKPRQVAIMATARKMLKVVYWMLRNNEPYHPGPGVVDPVPGRGRLYSETDVTPT

SEQ ID NO: 107241 - protein, 317 aa, unidentified
MDSKTQPDRFVGIDVAKGHVTVHVRPDAIAFSCKTDAQGLANLLGRLQPLTPKLIVLEATGGYEAVVAAALAEADLPVAVVNPRQTRKFAGALGRLAKSDTIDAADIAHFAEAIRPEPRPMPDEQTVQLRALLARRHQLVVMAGTEQQRHDRAETSLARRSCAAMLRSLTAETTRIERAIDKLITASPIFCAKQDLLKTIPGVGDVVARTFIAELPELGTVDRHKIAALVGLAPMNRDSGKMRGERHISGGRPQIRSPLFAACLSVIQHNPPLRGFYQRLLKAGKPKRLAIVAVMRKLVCIANAMLRNQQPWAHAQS

SEQ ID NO: 107242 - protein, 341 aa, unidentified
MKLTTNGIDLAKNVFQIHGADERGKAVLKKQLKRDQVVPFFANLVPCKIGMEACGSAHYWARKLQALGHSVQLIAPQYVKPFVKRNKNDAADAEAICEAVTRPNMPAVPIKNASQQAILSVHRARQGFVKARTAQANQIRGLLAEFGIIIPQGISHIAKRVPEIIEDGENELPGSFRLLIQRLVDHLKVLDQQVGELEREIQAWHRENEASKKLAKIPGIGPMTASALVASVGNARSFRNGRQLAAWLGIVPKQHSTGGKATLLGISKRGDTYLRTLLIHGARAVIRVAERKPQPDAWLGKLLTRRNKNVAAVALANKNARTIWALLAHDRAYESDYRMAA

SEQ ID NO: 107243 - protein, 344 aa, unidentified
MDHFAGLDVSVKETSVCIVDDTGRIVREVKVASEPEALLAVLVNPAYRFKRIGLEAGPLSQWLYSALAEAELPVVCVETRHMQALLKAQINKTDRNDARGIAQMMRVGLYRPVHVKTLRSQKLRMLLTHRKLLQSKAIAIENDLRGTLRNFGLKVGMVGTARFEARIKELVEKLPDLAELVEPLLIVRRALREQLVILHRRLLAIVRDDEVCRRLMTVPGVGPVVALTYRATVDVAARFRKSKAVGAVFGLTCSKYQSGEIDRSGRISRCGDEMMRVMLYEAAQSMLRSKKWSWLKAWAMQIARRRGMKKAIVALARRLAVIMHRIWVDGTAFRWTREQAVAAA

SEQ ID NO: 107244 - protein, 310 aa, unidentified
MDAIYVGIDVSQARLDVHVLPSGEAFAVARDGKGLEELIERLRAFSPQLIAVEATGGFETIVAAAVAGAGLPLVVVNPAQIRHFAQALGKRAKTDPIDAAVIAHFVEAVKPELRALPDEAQRLLAELVGRRRQIIEMMVAERQREKRAANIRVRKSILRHIRVLEKELPEIDEDIGTLVRGSTVWREKEDLLVSFPGIGNTLARTLLAELPELGALTRRQIASLVGVAPFTRQSGHWKGKSMIGGGRAAARTALYLAALVASRHNPILKTFYARLLAAGKPKMVALIAVARKILTTLNAMLRDKRKWQPA

SEQ ID NO: 107245 - protein, 351 aa, unidentified
MIIIGVDYHPSDQYIAFVDTETGEGDERRLNHSDGAAEKFYRELAAPGVTIRVGMEATGYSRWFERLLAELSIELWIGDAAEIKTRRVREQKTERNDAQLLLKLLLDNNFPRIWIPSPENPDLRQLLWHRHRLVQMRTRIMNQLQALAMNEGQRRKKKLWNEQGRAQLEKLPLAVWASRRRKDLLELLDRMNPTIGELTRAAEQEAKKRPAVLRLMTHPGVGPLTALTFVLIIGTAERFQCGKQIGSYVGLIPAEDSSAGHQRLGHITRQGSSLLRFLLVEAAQAAARCDAEWRRRYMHLAMRRQRNIAKVAMARRLGVRLYWMWRNGWEYAQWVKLSSHAGQLGTGHGVN

SEQ ID NO: 107246 - protein, 343 aa, unidentified
MTKISTIGLDLAKNVFQVHGVDEFGAVVVKRQLRRAAVEKFFAQLPPCLVGMEACGSAHHWARVISRYGHEVRLMPPAYVKPYVKRNKNDGRDAEGVCEAVTRPTMRFVPVKSIAQQATLAVHSARALLVRQRTMVANALRAALSELGIVAAQGYEGLRELMAKLEEPSEEIPENMRGALLMLAKHWQALDADERVLERQIAKAARCDRDAKRLMDVPSVGPMIASTVLAKVPDAKVFRSGRDFTAWIGLTGKDHGTGGKHRPGRISKQGDRVLRALLISGASAHLRQQKARGVTDPWLRDLLARRPYKVAMVAFAAKTARIIWAMLVKGEAYRDRASAPAAA

SEQ ID NO: 107247 - protein, 362 aa, unidentified
MMRHIFVGIDLGDKNSVARIAVDRDKSERFGFVNDVRGRARLFEKVKVKSEEAEGAKIIMAYEASSCGFILRDEAEARGNQCCVLAPTKMEKSVEQRKHKNDDRDAVDVLEKIRAHVLAGNRLPTVWVPDPQMRDDRELVRARVELVEKRTRLKSQVQMLVKRQGLEKPSGCGSGWSLQHRRWLEALTKSDALGSGARTALTSLLRQLQFIEEEIERIEKPLLELASQARHQPIIEELTLEPGVGVMTAMVYRTEIGYAGRFRRSRQVGKFVGLTPTSHESGQQNDRKGHISRQGPARLRKMLCQASWVHVNHDADAKRIYQQLVSRNPKKKKIAIVAVMRRLAVRLWHRMLRVELQMTQAG

SEQ ID NO: 107248 - protein, 371 aa, unidentified
MNGFCISLDVSKGSSFYQWFKGFDEPITKSKKIEHNLEGFKELLKLKETIRKEYIEDYVVVFESTGIYHRSLQTYLDEHNFKYTIINQLLSAKVSKSDIRGTKTDAKDCASIAKVFFLKELRIYSKIDEIYDDLKEKSRYYDFLMDEMKRWKIEFRRLFDIIYPGFDRVYDDLYGDFIQTFLLEYSHPEIIRKRRLDTIAKFLEKHTCHKEAYCIRQAQTLKEYVENCASGCSSKSYLVRQFDTVIHNLNAQIKHLEIVLEEIVELAKTLPNYDSIRSIPGIGNNLAGRILAEIGDVNRFNNASQLVAYAGIDPQIYQSGQISGLHLKISKKGNKKLRCLLYLVVTCMIKTSRNTVIVDFYKKEKGRWISV

SEQ ID NO: 107249 - protein, 382 aa, unidentified
MNRIIKIGMDVHSTNYTLCAMEPVLDGEDRIFTNIQVTPDYENVIQFIDNLKERLGSSDSYSIECGYEAGCLGYSLYHQLTKAGVKCTILAPTTMLTQQGKRVKTDKRDAVMIAQCLSYGGYHAVHVPTDQDASVKEYLRMRDDHKLALKKIKQQINAFCLRYGYIYGGHKWTIKHLEWLKKLDLSELNRETLNEYMTSYEEQTAKIERFDKRIEELAADSDYHENVRKLSCLLGIQTYTALSLIVETGDFKRFRKGNTYAAFLGLAPGESSSGEKISRTGITKAGNSRLRTLLIEAATGICKGQVGHKSKALCARQTGNPAEVIAYADRGNIRMRSKYKRMIRHEKKRNVAVAAIARELACYVWGIMTNHIEPREEGKKAA

SEQ ID NO: 107250 - protein, 353 aa, unidentified
MKKIAIGIDFSKKTFDVTIMRRDGDIYTELSYSKFNNDAKGFKALEKLVKASLKGTPEAKDKSSWIFCGEHTGTCSIPLCDYLAKKQYFMWLESALVIHRKCGIVREKNDKVDSRRIAEYALRNFSTDVKAYELDSKDLKKLKSLYAAHSMLTRDKIAKINQLKSGTLDASVSARHEIDRQLTSIRKSLKDIDDEIKRMLAESEEFSHNFTILNTFKGIGFLTIACLIIKTRNFRDMKDARELGCYIGVVPHIQQSGTSIDKPSRTSKYRDKDANALLSTCVQSALRYGNPIIRQYYDRLVKRGVNHYKALNNCKFKIINVLLAMLRNDTEFSMDIHGKSKAQWESHRVSAAS

SEQ ID NO: 107251 - protein, 391 aa, unidentified
MNDFNAHLDSGRGRESIDYAGYVGLDVHKDTIAVAVALPGREAAYDHGEIANKPKAVRKLVERLSKQFDGQLLLFAYEAGPCGYDLYWQLTALGHDCQVVAPGLIPKKPGERIKTDRRDARKLATHARSGELTPVWVPDEEQEAMRDLTRARDDFKGQQRKARQQLNAFLLRHGKVWPTGKSRWTQTHWRWLEGLRFEHDWQQIVLQSYIDAVREATARVADISAQMERALPQWSLAPVVHSLVALRGVDKLTAMVLMAELGDISRFDSPRQLMGFLGLVPSEHSSGPRQRRGAITKTGNRHARRVLVESAWCYRFPPRQTAHLRRKAANASDEAQSIAWKAQKRLCCRYHDLSQAGKNTKVVTVAVARELVGFVWDIARLEMPKVHAARQ

SEQ ID NO: 107252 - protein, 482 aa, unidentified
MKAKQKEPTEKSSGQSSQLHWRQMNRKQRRDLERKIQSADLTLQLVHPDAAGIDIGNESHYVAVPPDRDSQPVQHFGCTTAELRAMADWLKQCRIRTVAMQSTSVYWIAVYDVLEQAGLEVYLVNARETKNLPGRKSDVQESQWLMKLHTYGLLRNSFRPPQEIRTMRTYWRQRNDLVRSAARHIQRIQKTLTQMNMQLANVLSDVSGVTGQAIIKAILAGERDPQKLAAFRDPRVKASENDIARSLEGNWQEDLLFVLKQEQAAFEFCRKQMAECDRQLEQYLQKMEDRSQGATLTEEKRKDRLQKKKGNQPQFDLQQQLFRMTGTDLTQIDGIDVMTATTILSEAGWDMIKWKDEHHFVSWLRLAPDNRISGDRIIGKGRLPTSNRVTVALKLAASNLRTSQSYLGAQFRRLRARLDTPVAIKAMAAKLARLIYRMLRYGTKYVDNGSRYYELQQRTREIRRLKLKAATLGFHLVQSTAA

SEQ ID NO: 107253 - protein, 338 aa, unidentified
MKLYGGIDLHSNNSVVALLDESDKPIYRRRLPNDLGVILSELAPYQGAIQGLVVESTYNWYWLVDGLMEAGYRVHLANTAAIVQYEGLKYTNDDSDACWLGKLLRLGLLPEGYIYPKEERAVRDLLRKRSQLVRQRTANLLSVQNLLARNLGQSMGANAVKRLSSEAVDGLLPEIHVALAVKSNLAIMQALDGQIRELESVSKARAQPRPEFQLLLSVSGIGEILGLTILLETGQIRRFKQVGDYASYCRCVGSEKLSNGKRKGRGNTKNGNRYLAWAFVEAANFAVRYNPQIKRYYQRKCARSNGIVAIKTVAHKLARACYYILRDRVPFDVNKAFA

SEQ ID NO: 107254 - protein, 342 aa, unidentified
MSEDYDGRQYVGMDLHRRRSVLVRMTEAGQPLETVRIVNDCEQLAAVMARAGEDPEVVLEATYGWYWAVDALAELGGCVHLAHPLGVKGFSYRRVKNDERDAADLADLLRMRRLPEAWIAPPATRELRELVRHRAKLVHLRTSLRCQIHAVLANHGIRVPVSDLFGVEGTKLLEHAALPPAARSRVDSLLRLIDAFDGEIGAAAKATAARLADHSGYTAVQTLPGIGPILAAVFIAEIGDITRFPAPAKLASWSGLTPKHYESDTTVRRGRISKQGSRLVRWAAVEAVQRVGKHTHIGGYRDRVAARRGRNIGNVAAARELIECVYYALRDGTCRRALTTTA

SEQ ID NO: 107255 - protein, 316 aa, unidentified
MQSPLNIGVDVAKDELVVACDTNSFTPHTIVNRRAALCTWLKSLPNGSRIGVESTSTYHELVADLAFKNGFTVFVLNPRDVHHYAKGVGARAKTDRVDAQVIARYLAREYSELHPYQPPTPDQRRIDELLRRRAKLTATRGMLHQSLRTLPACRDEAKALFGKFDVLIKKIDLMLARLNAACAERLQTQQRLQTIVGIGPTCGISLSNLFHRVPLRNADAAVAFVGYDTRADDSGERRGRRRVSKRGPSELRRLLFNAAMAASKSKTWNPIYRHYRQTGLSSTAVLCIIARKILRTAWSIYAHKTTFDPNRLTCQA

SEQ ID NO: 107256 - protein, 320 aa, unidentified
MAKKKPKSFIGIDVSKQQLEVAAHESDYQFRCSNKASAFGELIAELINLRPALIVLEATAGLEIPLVGALHAAGLPVVVVNPRQVRDFAKALGQLAKTDRLDARVLAHFAAAVKPPLRPIKSKEEQELDALTGRRSQLIEMLTDEKNRRASAATDTVRDKIKEHIDWLEECIAELDEQLKALLQSSARWQAKDEILQSVPGIGPVVSFSMIADLPELGTLNRQKIGKLVGVAPLNRDSGQQRGTRHIYGGRARLRRVLYMATLTALRWNPVIKEFYERLCANQKPFKVAITACMHKLLNIINVMVRDSTCWKFKEEPVSA

SEQ ID NO: 107257 - protein, 374 aa, unidentified
MEQLIRIGMDTSKSVFQLHGVDASERPVLVRKLQRRAVIPFFAKLAPTRIGLEACGGSHHWGRTLQALGHEVVLMAPQHVKPYVRRGKHDAADAEANCEVMSRPRTRFVPIKSVEQQASQMLFGTREQLVRRRTQLSNMIRGHAAEFGLVTPQGLAWIGPLLLRIAGEASVPALAKELFEMLGEEYRAVCMRLAMIEKKLAAAFRQDKTARRLAALPGVGPIGAMLLGVKVTDANAFKSGRDFAAWLGLTPKNHSTAGKTRLGVITKAGDETLRQVLVVGATAHIQQVRGGRTKASPWLTGVIARKPPKLAAVALANKTARIAWKMMVTGEPYRGDQAGSIAPASPPSRPLRAADGGGLRPALTAARRGAARPE

SEQ ID NO: 107258 - protein, 340 aa, unidentified
MKKFLFIGIDFSKSKFDVTVLKSIDQQDFAQAIFLNERKGFTDFLKWVSKQSNVPKQDWLFCGEHTGLYSRELTDFLIKKNLFVWLENPLQIKCSWGIKRAKTDKIDSLEIARYALRFEDKAVACKSANKDIESLRLLFAYRGRLVKNKVSLEVSAKETRRVISRDVTSRFIFENSQHDIDRIKKEIEVIETKMHNIIVSGELKENYLLVVTIKGVAMITAIALIIHTNNFEAFKTARQLACYCGVVPFEKSSGTSINKGNHISQLANKEIKTLLTQCARCAVQYDKELAAYYNRKIAQGKKDRIVINNVRNKLIHRIFAVVNNRIPYRENYLNPFADCA

SEQ ID NO: 107259 - protein, 406 aa, unidentified
MSQEVYVGVDLAKDFHQVMAVGSDHQVLAPTFRIGRGRGGVKEMIERLRFLVRQESDLVFTIEATSDYWWELAWELDDRGCVVYLAHPKKAHDLRKFYALHTKTDVTDAEALARMPLVDTGLRSLWRPSVAVQSLQRMCRLRWKSRCRIADLKRRLSHLSDVVVPGVGKVMPIRYSKSARVFLRRYLAPERARRLGKKRLGMVLKKAAWGKFSDKKLDQLWECVQNAPRLGLQPEDLLLEVGLQLDEIEALEKQIVQLDGRIAELYGEVDPAQCLLAVSGLGEFLAAAITGVVGDVRRFPSAKHLISFSGLAPRVKSSGGHSKARQGITKQGNPYLRAWAFLAAENARQYDPELKAYYQRMRANGKHYLTAMCATSARLLERVYDILSAQAGETEKESQAQSVGTG

SEQ ID NO: 107260 - protein, 270 aa, unidentified
MTQTNTTTAGIDTSKLKLDIAVHGRTERWQFANALPGWRTLANSLAKAGVTRVGIEATGGYERGVVEHLRAAGFIVLVLQPIQVKAFGRVHLRRAKNDALDAELIAACTAAIDDPRIAPDPRLAEMAQNLTFLEQLEEDIARFKTRLEHIEEPGLRRLVNSDIVRLKARKAAQICSLAKRLRAHSDLAKRFDLVLSIPGIGERTALALIIRMPELGLISREEAAALAGLAPFDDDSGKHRANVTLPAAADACAGPCSQQRFRRPSAGTRL

SEQ ID NO: 107261 - protein, 346 aa, unidentified
MMIIGCDFHPSWQQVNWLDTETGETGEQKLVHASGDAKQFYQQLAGPVLIGMEATGNSQWFVELAEDLGHEVWIGDAAQIRASYVRKQKTDKRDAAHILKLVVEGRFPRLWTPDREQRDVRQLVLHRHKLVEIRSRVKNELQHLSLNKGVQCKRKLWSQAGQKLLRELPLKPWAACRREDLLGLLAMLDQQIGKLDEAVQKAAEENPQAKLLMTQPGVGPNTALGFVLTIGDVSRFARGKQVASYLGLIPREESSGGRQKLGAITKQGNRMLRSRLVEAAQIAVRFDPEMKKQYLHRCHQKPKGVAKVAAARKLAVRLYWMLRTQVGYPEIVRIESSPRVPLVGAS

SEQ ID NO: 107262 - protein, 436 aa, unidentified
MRGCRCSMIMGFTKPIEHFNLLRKKVITMNTLYVGIDVSSKSNVIYLMLPNGDKHSNFSVANSHEGSTQLVKRIHSALTSHSLDTVLIGLEATSVYGDNLVYFLREDATLAPFNRKIHVLNPKQVKKFHDTYNDLPKNDYVDSFVIADCLRFGRINKEVYMGDYRYKALQNLTRARFFAVQNLVKEKQRFMNVLFKKYSTMTQEKVFSDTFSTTALAVYDEFESAEALANMDLHELTDFIMKKGKNRFPDPNAVAKAIQKAARSSYRLPKTVNDSVNQVLSISITSMKALESQIKEFDKAIKAQMELLPNVLISIPGIGPVYSAGIMAEIGDINRFNSQAALAKYAGLAWKQHQSGGFEAEVTRLIPSGNRFLKYYLCEAAFSLVRCDKEYSDFYHLKYKEVNRCQHKRALALTARKFVRLVFRLLKDNRLYCPAK

SEQ ID NO: 107263 - protein, 388 aa, unidentified
MNRIIKIGMDVHSTNYTLCAMEPTIGAEDRVFGEIQVAPDYKEILLFIESLKMKLGFLDDYSIECGYEAGCLGYTLYHQLTNAGIKCVILAPTTMLSTKGKRIKTDKRDAHLIAQCLCYGGYHPVYIPTKEDDAVKEYIRMRDDHKQILKSLKQQINAFALRHGHQYNGTKWTIKHIIWLRKLELDPMYRETLDEYMASYEEQEAKIERYDKRIEEIAAEERYQKNARKLGCFLGISTHTALSLIVETGDFIRFAKGNIYAAYLGLTPGEHSSSTSVNRLGLSKAGNTHLRCLLVEAARSICKGAVGHKSKSLRARQIGQSAEVIAYADKANTRLRSKYYRMIRHGKAKNVAVAAVARELACFIWGMMSGNISTVSGADTSVPAVSQG

SEQ ID NO: 107264 - protein, 352 aa, unidentified
MKYVGLDWAYRTAQWCALDPGGEIAGEGRFAADRDGLARLVLELGDEVTACLEMMSGALWVRDQLVACGWQVEVADARKVKTVAPLAAKTDKVDARLLAELSRRQLVPALWLPSLDERALRERLRRRMHLVRLRTSAKGRIFGLQTQWGVRVSLRRLRRADAMTLLERAGMPAVWRHSISECLALIDFLDARLVPLDAELRPFAHADPRAVLLDTIPGVAELLALTIAAEVGEIGRFAGPEKLVSYGRLAPRVRQSGEGRPHTGPLNKSGSRLLGWAAVEAAQHAWRESNPWHQLYLDVSRRSRNHNSAKAAVARKILIAAWHMLSRNEPFKPAPRTGATSVPASSRLALAA

SEQ ID NO: 107265 - protein, 339 aa, unidentified
MNCVGIDISKGKSMIAVMRPFGEVVVSPFEVLHTDSELSKLARLLKSLDGETRVVMESTGNYHAPVAWLLHDAGLYVSVVNAMLVHDYGNNSLRRAKTDKKDAVKLANYGLDHWLTLPRYVPEEDTRLMLKSCYRQYQQYSKVRTMLKNNLISLLDTAFPDANRLFTSPPRADGSEKWVDFVAAFWHCECVCGLSEKAFTAKYQKWCKKHGYNFSEDKALDIYASACGHFGVMPKTDTAKLLVEQAISQLRATSAALAALKQEMQSLAASLPEYPVVMEMFGVGPALGPQLMAEIGDVRRFHSKKALVAFAGIDAPPYQSGQMDVRSRSISCQSPYPYG

SEQ ID NO: 107266 - protein, 392 aa, unidentified
MYIVGIDIGKNHHEASIVSPEGKQIGRSLRFATTHKGADSLMSFIFKNIGNSPCVFGMEATGHYWYPIYSFLKAKGYTICVINPIQSDSLRKMYIRQTKNDSIDSFLIAEVIRFGQFGTTSMADENILAMRQLCRYRDSVISSRTEIKLRIGTIMEQIFPEYEKQFSSLWMSTSMGILEKYLTPENIENAPIDELFEIIKDKSHNRLTKAKAISIKEAAADTFGIKIAQDAFSFQLKQLIDRMNFLDKQIEALDCQILEYYEKFDCYLHTIPGIGMIAAAAILAEIGDINRFKSSSALVAFAGIDPTVRQSGEFSSTHNHMSKRGSPYLRHAIFLAATTCSFHNSPLNAYYKKKREQGKHHLTATGAVARKLTTVIYAVLRDGKPYEPKKFC

SEQ ID NO: 107267 - protein, 342 aa, unidentified
MQESLYVGLDLGSSFCYQSVVERDGSLRFSRVVRTNERELRDSFAGLEGDVRVHMEAGELADWVGSVIAPVVSRVVVSHPRSLAWIGKDSTKDDRVDARKLAELLRLNSVHEVYRGQDAERRTFRHLVTHHEQTSREQARRKSKIKARLRCLGVIRKDARLFSADGQADLLDAIESVEIKAMIAQSFAVLDRMLECEGEAKRAMLEYSRRFPEVRLLQTAPGVGAITACRFVGYLQTPLRFSNKRKLWRYCRLGITRRESNGKRLSHPRLDNAGVGSLKDVSRKVFEAARRCKGDNSFKRVYEQSLENTKNAVHARLATQRKILATMRAMWLANRPYHNIGG

SEQ ID NO: 107268 - protein, 344 aa, unidentified
MEYGAIDLHLRRSQFRIVREDGSVVQEGRIDTTRVAFAGVFGHRARMCVLIESSTESEWVAQYLETLGHDLIVADPNYALMYGARSRKVKTDRRDVAALAEACRTGIYRRAHRVSAARRAERQRLRMRRRLVQMRSGSLSLLRAVLRQEGYRLAHGSAEAVERRLARLELPTGLAEILLPMRTWLEALNALLADADRALETRAAADAVAQRLMTTPGVGPVVALTFQAVLDDPARFGGDAARASAFCGLVPSEDSSAERRHKGHITKAGPGELRGLLVQASWVIWRGRSAAGARLRKWAHALADRRGRRIAIVALARRLSRILFALWRDGVEFSVDYRRSVVAA

SEQ ID NO: 107269 - protein, 361 aa, unidentified
MSATMTWVGFDVHARSTHGAAIDALTGELSRVRFGPGIDGPLAWLAELPGPVRACYEAGPTGFGLYRAAVAAGIAMQVIAPGKTPRGPSDRVKTDRKDAELLARLLLAGSLTRVVVPPPQVEAAREMTRAHEACRRDLMNARHRVSKMLLRHGRVYAKSTTWTAEHRRWLSRQQFDEPASSMVFADLLAAVDGLTSRKAAIALRLSELATDERWWATVARLRAFRGIDTLTAFSIHLELGADWQRFLSAPALAAWLGLTPSLSQSGESSRQGAITKTGSMLARRLLVESAWHYGRPPRLGATLANRQAGQPDHILAISNRAQQRLHHVNRTMRSRGKPHNVTVVACARQLACFLWAAATAD

SEQ ID NO: 107270 - protein, 370 aa, unidentified
MSEPSTLFVGLDVHKESIAVAYAEADRADPPHYVGPIGTRQVDIDKLVRRLHSKSSNLVFAYEAGPCGYVLHRYLTGQGLECQVVAPSLIPKRPGDKVKTDRRDAVELARLLRSGDLTRVYVPSVEDEAVRDLCRARDAALVTLKAAKLRLKSFLLRLGLHYTGRADWNAAHRRYLAKVVCPTAPQQIVFQESLKAVDEQVERLARMEKELADVIPKWRLYPLVENFQALRGVQWTVATIVASELGDITRFDNPRQLAAFVGLIPSEYSSGESRRQGGITKTGNGRARRALIEASWAYRHIPKVSVQIQKRLESLPKPIQDIGWKAQLRLCKRFRRLSARGKHSNIAVTAVARELIAFMWAIAKEVPQTS

SEQ ID NO: 107271 - protein, 314 aa, unidentified
MNTQNQSEISIGVDVGKANLDIAIYPLDRYFRIPNTREAIQKFLPLLKELDVKRIVVEATGRHEHPFVFACDQAKLPICVVNPIKVRRFAQALGIHAKTDKIDANLLAKFAATMKPESKAIPDKQSRLIKDLLVRRAQLVEMRTMEKNRLQIMPKELHSSIKSMLKILDKQLDSLSERIEQLISENQEWRMKTEILTSVPGVGKILAYTLLCELPELGSLNSREIAALVGLAPFNKESGRMNGKRSIRGGRPRIRTIMFMAMMSSIQCNPVFKQKYEHLKAAGKLPKVALIACMRKLIVILNTMVKNQQQWQLN

SEQ ID NO: 107272 - protein, 442 aa, unidentified
MAMRTRSELTVQHPDAAGIDIGGKSHFVAVPPGRADTPVREFGCFTEDLHAMAAWLLALGITIVALESTGVYWVPVFEVLESYGIAVVLVNAHSVKNVSGRKSDVLDCQWLQQLMSYGLLAAAFRPPADVCALRAVSRQRDTLLREQARCVQRMQKALTLMNVQLANALTDIAGQTGLAILRAIVAGERDPQALARLRNYRVKASEADIAKSLEGTWKDEHLFCLRQALSLYDTYRGLIGEADAKLEALIAPLRRAQAPAAGVKSKKRGGKNAPGFDVREALREWAGVDLTQIGGIDVSTALKVLVELGPDLSKFKSAKHFCSWLGLCPGTRISGGKRLSGASKRIPNRVARALKLAAQGLHHSQCGLGAYYRRMAARLGKGKAITATAHKLARLVYAMLTGGEEYVEQSQAQYEEKFKARTLNYLQQKAKTLGFDLVPAAV

SEQ ID NO: 107273 - protein, 364 aa, unidentified
MHATTKPASVGSSAVSLAIDLAKDVFELAFADASGRIVERKRLKREPFARCLENRPPLRIVMEACGSAHAWARRFARLGHEVTLLPAQHVRPYVRRNKTDRADAAGLLEAARCGDIRPVPVKTPEQQGTQGLHRIREHHKAQRTAAINAVRGLLREFGIAIPAGADKVRPATLAALEDGDNDIPMALRHALAGLLDQIAACQEAMAAIEKQLADIAKLDTRCQRLMAASGVGLITATALSAGIGDFARFPSGRHFASALGLTPREYSSGGTRKLGRITKQADVFLRTLLIHGARSALIVAATARKRGQPLDRTQQWALALAERKGHNKAAVALANKVARRLWASEHHGTSFDPEHISRREPRAA

SEQ ID NO: 107274 - protein, 321 aa, unidentified
MIEEAICVGVDVAKSTLDVAASDSGETRQFANDDEGISQAVRYIASVKTAGVILEATGNLEMPLAAALQANRLPVIIVNPRQVRDFARATGVLAKTDTIDARIIALFGARVKPEIRPLPDQKAREMRNLLTRRRQLIEMLTAEHNRLSQVGDDIHPSIEVHIKWLEEALSDINDDLDRRIRLSPSWLEKDNLLKSVPGVGKVVSSSLLIELPELGRLNRRKIAALVGVAPLNRDSGTMRGRRTVWGGRAKLRAVLYMAALVASRRNPIIAAFYQRLLDAGKVKKVALVACMRKLLTILNAMMRTMTVWQPEIILRHVSTEV

SEQ ID NO: 107275 - protein, 326 aa, unidentified
MEPMTTAQLYAGVDVSKDRLDVCLRWSEHERRDGDVFFVTHDDAGIDTPISGLLEEHPVLVILEATGGFERAVVGALAAEGLPVAVVNPRQVRDFARATGQLAKTDTLDARVLARFAEAVRPAPKPLPDEEIRALQEILARRRQLLGMLTAENNRLHSASKPVAKRIAAHVGWLEKELERTNRDLDGAIKGSPTLRENEALLRSVPGVGPVLARTLLAEVPELGTLTHKRLAALVGVAPLNRDSGALRGRRSVWGGRAEVRAALYMGALVAARRNPAINWEFYERLLAAGKPKKVALVACMRKLLSILNAVLKHRTPWRSPHYIPS

SEQ ID NO: 107276 - protein, 352 aa, unidentified
MGRYVEKELEGRGIFVGIDIHLRQWHVTIMRKDVELFSGNIPGHWEDLKKLLSRYDGEELCAVYEAGFSGFWLRDSLVKWGVNCIVTPPSLLLRESGNLVKTDKRDSRKLARLLSRGMLKGVWIPSEEERFNRQVIRRRRQLVWDRIRVQNRIKMELYFHGIEIPRPQGRWSEVYVRNLWRLELGNRYGLASFRRLLEEYEFLCGQISQQTKLLKELSMTERYRDQVAILSSVYGIGLISAMEILLELGDVARFSRGEQLAAYVGLTPSQYSSGDKVRMGRITRVGRGSLRGNLIEVAWALIKKDAGMRERYLRIRNNSGSKRAIVAIARRLLLCLRRMLLEGRPYRMEAAA

SEQ ID NO: 107277 - protein, 339 aa, unidentified
MELYAGLDLHSRNTYIGIMDKAFNRVFKKRVPNHLEHILQTLDPFRDQIKGFVVESTYNWYWLVDGLMDAGYSSAHLANPSAIKQYEGLKHSDDQHDAFFLAQLLILGILPQGYIYPKKDRPVRDLARKRMFLVQHKTAHILSLQSLIQRHCAMKVRANDLRHWTVKELEAWLKEEYLVLSAQASLDSINFLKQNIQRLEKAIRKKVKLKKAFHYLKTVPGIGDILALTIMLEIGDINRFTKVGDFTSYCRCVPSHRLSDGKSKGHGNRKNGNRYLSWAFTEAAQLGRRHNERFRAYYNRKVAQANTSLATKALSNKLARICYYIMRDQVPFREDLFCH

SEQ ID NO: 107278 - protein, 346 aa, unidentified
MDYFAGLDVSLEETAICIVDDIGHIVREALVASEPDALAAFFRECGMVMARIGLEACSLSAWLQQGLSEEGLLAVCIETRQAKAAMGAMPNKTDRNDARGIAQIMRTGWYRMVHVKSPACRAWRALLTARRMMLNKRRDVENGVRALLREAGFKVGTPSRKDFPSRVRELAADDPVLASLAESLLSVIEVMSREVERLTKRVLDVVRVEPTCRRLMTVPGVGPLTALAFRATIDRPDRFRRSRDVGAHLGLTPRRYQSGETDVQGRISRCGDELARTALYEAAHSLLIRATKWSALRAWGMNVAKRRGMARARVAVARKLAVILHRMWADGSAFRWGKQAAAATTA

SEQ ID NO: 107279 - protein, 449 aa, unidentified
MDQGWETINPHAAGIDIGSREHFVCVPPGSAQTTVRSFGTCTADLEALADWLKQCAVTSVAMEATGVYWVPVFQILEARGFEVLLVNPRQTKNVAGRKTDVQDCQWIQRLHTYGLLQGSFRPADPYCVLRTYTRYRDELVGARTTQCQHMQKALQQMNIQLAQVLSDVTGVSGLAIIGAILQGERDPVKLAKLADCRVRATPAAIQKALVGDYRKEHLFVLAQAFALYHTYEEKIDACQQQMVLEIAKLPDRVDLSLQPLPPRKAGRKPFQDRMAGQDLREGLYKKFGADLTAIEGIGVTTSLVLLTEVGPEVSRFASEKRFCSWLGLCPDNRISGGKVLSSRTRRVVNRAADALRMAAVTLETSQSALGAFYRRMKARLGAAEGVTATAHKLARIVYRLLKYGGAYVRQGMEDYEKRFRQRKLLALKRAARTMGFELVESQTVPSGVS

SEQ ID NO: 107280 - protein, 370 aa, unidentified
MSQSSTLFIGMDVHKETIAVAYVAQDHGAEVTSLGTIGTRQCDIDHLVRKMQSKATHLIFVYEAGPCGYWLYRYLRKKGYDCWVVAPSLIPKKPGDRVKTDRRDAIQLARLARSGDLTTVYVPKVEDEAIRDLTRAREDAISDLKDAKLRLKAFLLRHDIRYVGRANWGPAHLRWLSEVVCPTPAQQIVFQEYVRAVQEHTERLQRLEQELHEHVKAWRLSPVIDALQALRGVQFTVAVTLVAEMGDLTRFDSPRELMKYLGLIPSEHSSGAQRRQGSITKAGNTHARRVLVEGAWAYRYPAKVSRHLQLRLEKQPKVIQDISWKAQVRLCKRYRRLVARGKHANVVTVAIARELIGFMWAIAQEVPSVA

SEQ ID NO: 107281 - protein, 427 aa, unidentified
MPYQIAGIDVHKKMLAVAVADIEVGSDFHFERLKVGTSPVQLRALAEWLVEREVEEVVMESTAQYWRPVWEALERYWKPTRRTRPDANPLSGTLHLAQAQSNRGAGGRKRDFPDAERLVKRLVAQELTLSFVPDTEQRLWRTVMRRKYQITRSRVQLHNRLESLLEEAHIKISSVVSDLLGTSARRMLNAVGDGETDPAMLAALADSRLRATPDQLRDAFGACADLHPVYRRLVKLTLDELRVIEDHLAQLDQQMAQLLAHHHDAVQRLAEVPGLGVDSAQQIIAEVGASAAAFPSEKQLASWMGACPGNEESAGVNYSHRCPKGNRQMRRVLNQAANAAVKAKGTIFAIVYRRLVPRLGHAQAIGAIAHRLCRLIWKILHQGVRYEEHGPAVSEEAKKVRARKMIRELRSLGYHIELLPAPSSKPA

SEQ ID NO: 107282 - protein, 414 aa, unidentified
MLKIVYRICCGMDVHKSFVVACIASTNEQGVTTYKSKRFSTFTGDLRRCAAWLAENNCKDVCMESTGKYWIPIYNILERTCNIVLAHPKYVKAIRGKKTDKRDAKWIADIFKHDLVAGSFIPPADIRQLRDLVRYRWKLTNFTTGEKNRAQNCLTVSNFKLDDVFSDVFGKAASAITTRILENPAEKITDVSSFRTKRMKATDEEILAAVDGEMCEEQAEKLRIIRSHMDSLELCKLNLESLILSTAEKYLPQLNLVMTAPGIQSFAAIGIISEIGVDMSVFPTSKHLCSWAGLTPQNNESAGKKKTTRISRAGAYIKPLLIQCALNAIRAKQFPEVRNRYLALKKRRGHKKAIIAIARMLLTAIYNMLKKNEPYNSELYHKSDRPPAHREVSVEEAIFILQRQGYLVTAPSTS

SEQ ID NO: 107283 - protein, 405 aa, unidentified
MAKVFVGHDWAEAHHDVYVEDEGGRRLAAARLVEGLEGVRRFHELVAVHAEEPQEVTVATETDRGLFVGSLVAAGYRVLAVNPMSTSRYRERHSTSGAKSDPGDAKVLAELARIDGHNHRPMAGDSELAEAVKVLARAHHSMIWSRQRQQNQLRSTLREFYPAALEAFDDLASGDALAVLTVAPTPSVGRTLSRSKIAAALRRGGRQRRVDERAAEIHTALRSEQLAAPPMVADAMGATVAALVGVITELVAQTENLERELADRFEQHPDAKIIRSLPGLGMILGARALGELGDDPNRYADAKSRKNYAGTSPITRASGKQRVVLARYARNRHLADTCRMWAFAALSTSPGARAFYDQRRAAGDTHNRALRALANRLVGILHGCLRHRTHYDEHAAWAHRVNIAA

SEQ ID NO: 107284 - protein, 358 aa, unidentified
MKIIGCDLHARQQTIAMLDSDTGELEEKTLEHQGETVRKFYSALSGSILVGIEATGSMQWFLELMEELGIECRVGHPAKIRKAETRKQKHDRRDARLLLTLLAENRFPTIWMPSSEQGDLRMLLRHRHQWVRLRSRVQHTLQSMALNHGLRRGRSLWSQAGQGELRALPLAPHASERRKALMTLYPRLQESIAELDRQVSEQTQQRTDARRLMTHPGVGPVTALATEVFLGDPKRFSDGKALASYIGMIPSEHSSGRRQRLGAMSKQGNALLRYLWCEAAMHAVERDPELKRFYRRKLVQKGLGKARVAAARKLGIRLWIMMRDEIDYQEFCRRGKARQESGSVRAGMPDRNSGPAEQ

SEQ ID NO: 107285 - protein, 336 aa, unidentified
MRELLFVYIGVDVSKETLCVDAGDAFRGVVPNTPDGIRKMLAVVKRKLGRGRASHVCLEATGPYGEALLAVCRGGGFPCSVLNPAKVRHYAKAMSESAKTDPIDARVIREFAEAKHPAADRVPGSAETLLRRLMTAREALTKSAVQLEGVLDSMTCASARKAVTQAVGCIKRKIRALEDGMATALKADRRLEGLAAELAGIDGVGALSAAKIVALVPEPGSLGRRDAASIAGLAPFRRDSGKFSGKAFISGGRASVRRALYMPALVAVKHNPTLKAFYQRLVGQGKPFKVAITAVMRKLFIHMDGVAHKWLAAHGGTGEGNAPQPFPLLPSFPRTP

SEQ ID NO: 107286 - protein, 312 aa, unidentified
MDMIMQNYVGCDISKQWLDFFDEASGRYQHIDNQADAIAAYVAGLHPGRDFVVMEATGVHDRLLRHALAKAGVAFSRHNPAHTHHYAKSTARRAKTDRLDARMLSGYGRRYHPEAEPAPREEGEHLQSLARHRDHLVEIRARLKKHLGEAFDEDVVADLEDVIAGFDTRIKALESRIGKAIHEAKDAADDYALMVSAPGVSTVTALSLLAHMPELGQRSPKSIAALAGLAPFDDKSGKLNRRSQIQGGRSRVRRALYMAALGAIRANDRLKAFYKALAARSGSKKLAIIAVARKLLVSLNAMIRDRKPYAQQ

SEQ ID NO: 107287 - protein, 350 aa, unidentified
MNVTHYIGFDVHKKSVSYCVKTADGQMVEEGRLPATRAVLRQWARRRAEPWRGAMEATLFSGWIYDTLRPFAVELQMGHPALMKAIGASKKKNDKLDARKIADLVRCNLLPACYVAPVEMRELRRLLRYRNLVVAQATRMKNKMSGLLMEVGAPYNKQRLHGKKYFDELLDSLEEVPASVKDLLRLSRGALEMFEATQQQLLGRLRQEPRLAQRVILLKSIRGVGEVTALTWALEVGEPQRFSSVGRAVSYCGLTSALDSSADKQQRRPISKQRNAHLQSVLIEAAKLAPRWNPQLAALHARELERGNRNRATLAVARKLVAYLLAVDRSGQPFQIRGPEAAESEKEEAA

SEQ ID NO: 107288 - protein, 353 aa, unidentified
MKEALESKESEIFQKKLYVGIDVSKLTLDICVIDDNEEKYLVTQISNNQDGYERLIKSLKRVQEKHGFNGSFDYHFCLEATGIYSNGIVSFLLSKKRLVSVLNPYVSSSFLKARLCRTKTDKVDAEGLAFYALKMKPVAFKQAPEMIRVLQKEVRFLQSLIQKKTQFVREKESLSSEHKAIHDELIIVMNSKIKTQRVLIQSFIKKHPKLSEYAKCLQSIPGIGAQTAWVILSEIVYDSESELPIEAKKQVAHAGLAPIERSSGSSVYSAPRISKTGNRNLRKALFFPALTAIRRCDSLAKTYRHLVNKGKRKKVALVACMRKLLALAVTLLQKQTVFIPHYISQRSLPTPII

SEQ ID NO: 107289 - protein, 434 aa, unidentified
MEDSSTEYAAVIGLDWADREHAWSLQVVGRRERERGVVAHTPEAIEEWACGLAKSFPGAQIAVALEQSRGAVLFALTKYRHLTLYPIHPARIAHYRRSFRPSGAKDDPGDADLLLDYISRYRDQVRPLQADREDTRALQFLVEARRRTVDEKTRVKNRLTSVLKQYFPQIVGWFSDVECAVVLDLLERWPTLEQLQRTRRSTLDRFLTQHRCGGAENVEQRWRDIQAAVAATTDAVVVRCFSLNAICLVRQLRELKNSVETYDQAIHELTQKHPDFDLFKSFPGAGDALVPRLIAAFGSQRDRWSDASELQCYSGIAPVLERSGKQQWIHIRWACPKFVRQTFHEWALHSLNKCAWAKSHYEDQLKRGKGRHAAIRSVAFKWLRIAFRCWKDRCKYDSELYEKHSSKRASSGPGLLHVEWKSCGSFSQVVTVRT

SEQ ID NO: 107290 - protein, 370 aa, unidentified
MREDSVVYVGVEAAKAKHAIAIAEGGRSGEVRYVGEIEATPAAVERFVRKLERKDPRLHFCYEAGPTGYGLSRHIVALGHRCEVVAPSLVPRRPGDHVKTNRRDAITLARLLRAGELSGIWVPDAVHEAVRDLVRVRSAAGEDLRKKRQQWLSFLLRHGRVFTGRRSWGPAHTRWLAAQKFDHPALQIVFQDQVDAITDAWRRLERLDAQLAELVPTWSMAPVVSADQALRGVSFLVAVTFASEVGDGRRFDSPRQLMAFMGLVPSERSTGDTVRRGGLTLAGNRRARRVLVEGAWSYRHPARVTETMRVRLEGLPKVVREIAWKGQTRLCTRSRPMVCTGKKAPIVVAAIAREMVAFLWAMGRQVAPAP

SEQ ID NO: 107291 - protein, 396 aa, unidentified
MAKLWIGVDIGKTHHHVAAVDGEGRLVYSCRVANDETSLLTVMAEVSTHGRPVCWAVDVTTGLSALLLTLLWRRQVQVRYVSGTVAFHMAAAFAGENKTDARDALVIAQTIRMRPDIPILEPSDRLLAELTVLTGYRADLVGQRVATLFRLQELLTGISPALERAVELNRKAPMMVLACWQTPAAIRHAGVDRITALLRRGHVKNAAQVAEAMVAAARQQTVTLPGQRAAAVVVGQMATEILALEQRIAAVDDRIAEHLDQHPLAPIIGSLPGMGPLLTAELLVHTAGMTEYDSPAKLAAHAGLAPVSHDSGTVSGNHRQPRRYHRRLRHILWMAAFTAARECPTSRAYYEKKRAEGKNHRQAILALARRRVDVLWALIRDRKTFARPTPTVRAAA

SEQ ID NO: 107292 - protein, 461 aa, unidentified
MQMTLGVDVACRAAHQASLADERGNLVWIGRRFRTRTHDLNRLWAALPADTVLTVVLEPTRNAWVPLAAWFKRRGARVILVPPEQAADLRDYYSKHVKSDRLDSRMLARLPLLHPEGLRAAEGLGPAEPIRRVTKLRANLVKRRSMVLARLDAYLELLGPGWHASFGADLGNNTPLRFLAAGYADPHTLRRLGRARLIKFIWRHSRGAWGEQHADQLLDAANETIELWAGELDYGELADDIAVEARLALQLSAEIHELEQRITVLLHDLDPTGIMTSVPGVATINGAQILARLGDPNRFRSLAGVRAFSGLVPSLNASGVNGHHGPPTKSGDAPLREALFMAADHARRIDPSLAARYHRLMSESGKHHNSALCHISTTLLTRIVACWRTGTHYEIRDVDGTSITAAQGRAIVTQRYTVSTELRRQRRTTTRTRGRTGELRSRQALRQPAHPPQTIGTPTTT

SEQ ID NO: 107293 - protein, 450 aa, unidentified
MEQSTRFVGMDVHKETIVVAVTASGEVGKATAYGTFPNTAAALEKLVKRLRQAGDGPIKFCYEAGPCGYGVHRTLTKMGEDCMVVAPSMIPRKSGDRQKTDKRDAASLAVLHRGGLLTAVWVPDAAHEAMRDLIRARLAAVRAVRAARQQLSAFLLRHERVYPGNRTPWTKAHRGWLADQTFAQPAQRIVLEESIEAVRLGEQRRDRVDGYLRAQIPTWSLFPLVRNLCALRGLDMIASAGLAAAIGDPSRFASAPHFMAYLGMVPSEHTSGPKRRIGAITKAGDIHARTMLIEAAHSYRYPARIARHKLAAVDAVPEAVRAIAWKAQTRLCQRFRQMTAKGKPNQVVVTAIARELAGFVWSIACITSDPAGSDNAVTEAYDEVTALKDEVMMASEEAAQQVQQITPDRPPRRAASPAAGRHDAPRGPTRVNRRRICGREPDGMISHHTG

SEQ ID NO: 107294 - protein, 462 aa, unidentified
MPGREERETSEKSRRQLEGLPVIRRGVAGIDLGSEQHWVCAPTLDRSGREVARFGATTAELIRMGEWLKARQVESVAMESTGVYWIAPHEVLEGQGLQVLLVDTRQLAQVPGRDKKSDPTDCEWIQRLHSCGLLRGSFRPEEAVCMLRTLVRDKANLVAESGDWLRRMQKSLDQMNVRVHRAVSDIDGVTGMAILRAIAQGERDAQKLASLRDRRCSKTQQEIAEQLSGHWREDHLFSLQQALKMYDAVQERIAAYEQEILGKLGEMEREEPHEATAPPLQNASKARTIKKRGQEAKRQALYRMSGVDVTQIDAIGVETVEVVLSEYGSDLSRFPTEKQFVSHATLAPRVPKSGGKPVRKKKRNSASTRVAAALRMAALSLRHSQTALGAYYRRIAQRRGGDIAVFATARKLATLIYRLLRWGQPYVDEGAAAFENRYRQHRIGRLAATAKELGYQLTPVPA

SEQ ID NO: 107295 - protein, 392 aa, unidentified
MFFVGIDIGKNNHVASMMDESSKVIFKAFSFPNTLDGGNALFSKLTSYSSNIDDFDIGMEATGHYWLSVYSFLFEKKFLLHVINPIQTDGWRRGTEIRKRKNDIIDSVLIADLIRYGQFVETRLADEDLFSLRTLTRFRTYLVESISNLKRKVVCVLDQVFPEYQSIFSDIFGKTSKEILLQFSSPIDFESVSSQTLAELLAKLSRKQVGPAKAAQLKAAASCSFGVTFAKSSFTFQLKALIEQISFIEKQVKETETEIAGIMKKLDSPITTITGIGSVTGAAIISEIGDISKFDSPRKLVAFAGLDATVTQSGEFEAAHNVMSKRGSPYLRKAIFQAALVAAFKDPVLSAYYQKKRAEGKHHLTCIGAVARKMCNIIYAVVKNNQPYVPKA

SEQ ID NO: 107296 - protein, 354 aa, unidentified
MPRKTTSLEAVATIGIDIGKNSFHLIGLDKVGAIVLRQKLSRSQVDTRLANMPPCLIGMEACVGAHHLSRQLKALGHDARLMPAQYVRPYSKGQKNDFRDAEAIAEAVLRPTMKFVAIKTVEQLDLQGLHRVRERLVCQRTSVINQIRAFLLERGIAVRQGLRALRTAMPNVLAMTDKLSPRMIHMIEDLCTDWRYLDARIATVSNEIETLSEQDDGAKRLMTVPGIGPIISTATVAAIGSGDVFSKGRDFGAWLGLVPRQMSTGGRTVLGPISKRGNRYLRMLFVQAARAVLLRPQSWEKHGLKSWIEAAARRLNRFKLAIALANKIARIAWGVLHGGRNFEVRSMRTAPQAG

SEQ ID NO: 107297 - protein, 349 aa, unidentified
MKRIAVDLAKSVYQVAESVRSGQVVQRKRLNREAFRRYIQEQAEPVEWVMEACGTAHYWGRVAQSLGHQVRLLHPRYVRPYRRRNKTDRNDCDAMLEAARCKDIYPVPVKTHEQQLLQQLHGLRETWKKSRTQRINLLRGILREAGIEAPASGAAFIRAAHELVDRPELVPLSALLHIVLTEINLYEQCMAECEQHLKRWHADDDVVSKLDEISGIGVLTASALTAAVGKPERFANGRQLSAWLGMTPREFSSGDRRKLGHISRQGNVYVRTLFIHGSRAALLAAQRCQTRTPEKLTQLQRWAVETAARIGHNKAAVALALANKLVRICWAVWCHERRFSGNWQSTKPA

SEQ ID NO: 107298 - protein, 351 aa, unidentified
MVIIGCDFHPGFQQVAVLDTGSGEVRDLRLGHKEEARQFYAGLRGQEVLVGIEASGYSQWFEQMLEGMGYGYRIGDAAAIRASYVRKQKTDRRDAGHILRLLVEGRFPALWVPSAAERDARQLIVHRHKRVQMRTRVKNQLHALAMNQGLRLRWQLWTAKGLEQLRALPLLPYAAARRADLLRQLEEMDAEIARLDQAVRKEAEARAAAVRLMSHPGVGPVTALGFVLTIGEVRRFAKARQVASYLGLIPSERSSGGKQRLGHISKQGNPLVRFLLVEAGHTAVRGDAELRRCYQRLQHRHSTGVAKVAVARKLALRLYWMLRNEIDYAQLRGPYAGQPVSFCGRKTRPAA

SEQ ID NO: 107299 - protein, 367 aa, unidentified
MKHTLYVGLDTDSRHIDVAVADGLPHGEVRYWGQIANEPAAVDRLIKRLRKDGRALVVCYEAGPCGYGLYRQLAGKPGVSCQVVAPAMIPRRPGDRVKTNRRDCLALAKLLRAEELTAIWVPDTAHEAMRDVVRQRSAARADVTRCRQRIASFLLRQGIRYATGKPWTKRHRLWLGRLEWAAPAHQLMFAELLDALDRTQAHHDRLVDHLRELVPQWSLAWLVAAVQAMRGYRLVNAATLVAEIGDPRRFSSPRPLMAFLGAVPSEHSTGDTIRRGAITKAGNTRARTALIEAAWTYTRPGKAPPSAHHAPAVRAIAEKARHRLSGRYRRLIARGKPPNVAVTAIARESLGFIWAIAHAAADAAPRR

SEQ ID NO: 107300 - protein, 346 aa, unidentified
MSHYVGLDVSVKSVSICVVDAAGSVLARGETTSDPDEIAAFIAQHALDLERVVHESGILAIWLTRELEKRGLPIICIDARLAHKALSGRINKSDPGDAEGLAHLARTGWFTPVHIRSEASERVRVLIGTRERLIRMRKDLEAHVRGVLKVFGICIGTVGQAHLRQRFRDHLTEAGQTDLAISVMADMFIPIHKALCAATQAMDDELRAIARESDLTRRLMTVPGVGPVVALSFAATLDDVARFRRAKDVGAFLGLTPRRHQSGETDWSGRISKCGDRDLRRLLYSAATTLITQVRKPSRLRSWALRLQERKGFKKAAVAASRKLAIVMTCIWRDGTVFNSTQEAIA

SEQ ID NO: 107301 - protein, 430 aa, unidentified
MKYNTQNAKIASITEETLVLGIDVGSETHYARAFDWRNYEYSKTPLAFSNDEAGFLTFKAWVEDLKEKHGKTAVIPGMEPTGHYWFNLGKFLQDSGMRPVHVNPHHVKKSKEMDDNNPNKNDRKDPKTIAALVNEGRFSYPYIPTGIYAEIRNLSNLRFQTQEEITRIRNRIARWISIYFPEYKDVYGKLDAVSGLMVLKEAPLPAKIRELGAEGINQIWRNAKLRGAGMKRAKALLSAAEHSIGSQEAPEAATLEIESLLEDYEKYNERMADLMGRMEEKIKEVPYVDKLLAIHGIGLKTVCGFLAEVGDLSRFDNPKQVQKLAGYAIVKNDSGKHAGESHISYRGRKRLRYVLYEVAISVIGKNAEFREIHQYYQTRDRNPLKKMQSVIAVACKVLRVFYTILKKGVDYNGEKLLQDIRRPGINIQAA

SEQ ID NO: 107302 - protein, 392 aa, unidentified
MLYVGIDVAKSKHDCFIIDSDGVVHTDNLTIPNDRNGFDKLLETILNALDDDPIQNAKVGLEHTGHYSINIKRFLESQGFVVTSFNPLETNAFRKASTLRKTKTDKCDAKTIATMLFSDDSVPTLNPSYQIQELKSLTRHRFRLISYRGKLKVSFTRIIDIVFPEFPAFVWSVNQKSSHELLLELPTPNAIAGCHLTRLTNLIRKGSHGRYGREKALALRELAASSIGLSDDAYAFELQQTIRMIQSVQAEIDVLDRRIKSIVKELDTPLLSIPGISYTLAAIILAEIGDINNFPTPSKLQAFAGLDPSTYQSGKYTASHSTMVKRGSTYLRWAMFQAARLVAMRDKTFKDYLAKKRSEGKHFNVAISHVSKKLLRTIFYMLKHNESFVPQS

SEQ ID NO: 107303 - protein, 336 aa, unidentified
MPGIPGSRTVDWVNQARIVQGREKKEKMSDVYAGIDVSKEYLDMAVLPTGEMKRYRNDETGIEKLVLKLKKLSVRLVVMEPTGGLEAPLAGALTVEGINVAVVNARQVRDYARAAGKLAKTDKIDAAIMAEFASVMKPEVRKLRDEETEEIKANVSRRRQLLGMLKAENNRLAIARKHLKPHILSHIEYLKKEIADIDRDLRERIEGSPLWRVKDNLLQSIPGVGKVLSATILAELPELGKLNRRQIAALVGVAPFNRDSGAMRGKRSVWGGRAPVRSVLYMATLVSTRFNPVIRDFYQKLLAKGKAKKVAIVACMRRLLAIMNAILRTQKTWQYA

SEQ ID NO: 107304 - protein, 387 aa, unidentified
MPQVNDLSRSLAAFDPISTLVVVVEMSKTSWLVSGVVPGVERQPLKKLEPDATALLRLIERWRIEAVRAGRPIRRIALAYEAGRDGFWLARWLIARGIEAHVIHSASVAVSRERRRAKTDRLDAAMLTRVFLGWLRGERGHCGMVAIPTMEEEDARRPNRERESLVNERSRIVNRMRSALARLGIRGFKPHLRKAPERLAGLRTAEGTGLPANIIEEFRRDMARLALVREQISSIEKTRAERLERAPDTGPHAMVRLLARVIGIGIETADMLVREILSRNLRDRRALARYAGLTGSPDESGLKSREKGLAKAGNARVRRGLIQLAWRFLMFQKDSALARWYRTRTEGPSGARKTTMIVALARKLLIALWRLVTTGEVPDGVELRPAA

SEQ ID NO: 107305 - protein, 402 aa, unidentified
MNCVGIDVSKGKSMIAVMRPFGEVVISPFEVLHTANELSELAGLLKSLDGETRVVMESTGNYHAPVAWLLHGAGLYVSVVNAMLVHDYGNNSLRRAKTDKKDAVKLANYGLDHWLTLPRYVPEENTRLMLKSCYRQYQQYSKVQTMLKNNLISLLDTAFPDANRLFTSPPRADGSEKWVDFVAAFWHCECVCGLSEKAFTAKYQKWCRKHGYNFSKDKALDIYASACGHFGVMPKTDTAKLLVDQAISQLQTTSAALAALKQEMQSLAASLPEYPVVMEMFGVGPTLGPQLIAEIGDVRRFHSKKALVAFAGIDSPPYQSGQMDVHSRSISKRGSASLRRTLFLVMGVLLQCAPMDEPVYQFMNKKRSEGKPYRVYMMASANKFLRIYYASVKTYLDSLEHD

SEQ ID NO: 107306 - protein, 442 aa, unidentified
MTNLSSSETPTEWAAFVAIDWADEKHSWALTQTASGKIERGELNATPEAVEAWAAGLNVRFSGRPIAVCLEQKRGALVYMLAQYAHRVIFPVHPKTAAQYRETFCPSGAQSDPADAAWLLDLLLRHRHQLRELRPDTPETRLLQHLTEYRRRLVDEATRQKNRLTSGLKIYFPQLLGWFDDIGSPVAGALRERWPTLPELQRAHPGTVRRFFHEHNCRSEERIQERIISIAAAVPAIRDQAVVEAESLRARSLVALLTTLRSQIALFDERIQELVAKHPEQALFASFPSAGPVLVPRLIAAFGTQRDRYGAASDVQCLSGIAPVTERSGKQQWVHFRWACSHFLRQTFHEYAAHSIVKSTWARAYYESQIKAKKSHHAAVRALAFKWIRIMFRCWKDGKPYEEQAYMAALQKRNSPVAALFRATGIGWESSAGFQRLSANPS

SEQ ID NO: 107307 - protein, 358 aa, unidentified
MDGSSEQPQMTAGLDLGDKYSYLCLIDQQSGEIMEEGRLRTTPEALRRRFSSELQPLRVAIEAGTHSPWVSRVLEECGHEVLVANPRKVRLIYTNKRKTDEIDAENLARLARVDPKLLYPLKHRGEDSQAHLALIRSREALVGCRTQLVNHVRGAVKSFGHRLPKCPARSFHKKVVEHIPEALWVALGPILEQIGSLTERIRDYDRKLEVISKEHYLETDLLRQVEGVGTLTALTFVLTLEDPYRFQRSRSVGAYLGLVPARDHSGDRDPQKRISKEGDEMLRRLLVGSAHYILGPFGSDSDLRRHGQKIASRGGKNAKKRAAVAVARKLAVLLHSLWLSAELYEPLRNTQRSGGQAA

SEQ ID NO: 107308 - protein, 444 aa, unidentified
MVCSGMILIREVADAPVIMGISKPADLKSPCGEVKIVNPLFVGIDVSNRSNVAYLMKPDGSKHSSFSVQNNLGGAKLLSERIVSALSSMRLSDVVIGLEATSIYGNNLVYTLREDGSLGQFQRKIHVLNPKQVKKFKEAYPDLPKNDFVDAFVIADHLRFGRIAKEVYMDDYRYQALRTLTRARLDVIQNLTREKQRFANYLFLKCSGIAQEKDIQNTSATTIALMEHFETVDDLANSDLDELTAFIAETGRGRFVDPNAVAKVIQAAAKGSYRLPKTVNDTVNQAMSVSIASMRALKEQVKVLDKAIEQQFEIIPNTLTSIPGIGKVYSAGIIAEIGDIHRFASQASVAKFAGLVWTQHQSGEFEAEHSRMIKSGNRYLRYYLLEAANSVRRCDSEFRRYYDLKFKEVNKYQHKRALALTARKLVRLVFRLLKDNRLYIPPEG

SEQ ID NO: 107309 - protein, 348 aa, unidentified
MNTRYERSRQYVGIDLHRRRSVIVRLDGEGEVLDCVQIENSVPALVGEVGKAGVGAPVAVEATYGWYWAVDALRAAGFVVTLAHPRGVASMQGRRAKTDKLDAKELADLLRLDRLATAWTAPPEVRELRELVRYWHTLVGQRSATKASIHAVLGKCGVIPPIADVFGPVGTTMLDALVLPEPYAARVASQRRIMSLLSTEIVALEVETARRLKDNPEHRALLTIGGVGPVMAAIFVAEIGDVHRFATADQLACWAGLTTRVDSSDRRTRYGHVSRQGSRLLRWAAVEGCQRAHEPYLAGKRRDLIARRGTRATHIATVATARHMMKVVYYTMRDGHARCLDAPLPATG

SEQ ID NO: 107310 - protein, 403 aa, unidentified
MAGVGQQEQRVVIGMDPHKRSVTIEVMTGDETILGGGRYATDDAGFAAMRGDVRGFPHRVWAIEGCRGIGRHVAHRLLAAGEEVVDVPPKLSAEVRVYATGQGRKTDATDAHSIALAGTRVAGLRPVVADADLDVLRMLADRRRQLGEEHTRKVSQLHALLLELIPGGAKKNLTAAQAKQLLARVRPRDTAGKTRRRLAAELIGDLERIHDRKKDADKELRGLVAATGTGLLDLHGIGPSGAARLLVEVGDITRFPDRNHFASWTGTAPVDASSGDHVRHRLSRGGNRQINRALHMMATVQLRNATDGRAYYDRKKNSGKSTREAMRCLKRRLSDTVYRTMLADLAPHHTADHTADQVTGPGGQRANDSCSSATGSQPPHRHFGQASPGPVKDQPKPALPKVS

SEQ ID NO: 107311 - protein, 396 aa, unidentified
MTTAATHHEQENTTEATLFVAFELSEKTWKLGFTTGHGQKPRERTVTARQQECVLDEIAQAKRRLGLPETAPVVSCYEAGREGFWLHRFLQGHGITNQVVDSSAIEVNRRRRRAKSDGLDVRKLLSMLIRYHHGERQVWQVVKVPAVEAEDQRHLHRDLETLKQERASTTTRIEGLLSSQGLRVTSLTKLPEQLDALRLWDGSPLPPGLRRRVLRVYAQYTFLSEQIAEVEAARRAQVQTSSEASIDKVRQLMQLKGIGSNGAWLLVMEFFGWRAFTNRREVGALAGFTPTPYHSGESAREQGMTKSGNRHVRWMTTELAWSWGRFQPGSALSGWLRERFGGGGKRLRRIGIVAVARKLLMALWRFLATGVLPAGAVLKEGYALCRCGVTPRSGCW

SEQ ID NO: 107312 - protein, 406 aa, unidentified
MIRYHIGIDVGKSKHHACVHDTMEDRYTKVFPFTVDRQDFERFLLFLRRQGPVEEVLVGVEASGPYALTIGRFLLEHGYAVVELNPFQASQFRKAQGKKAKTDRVDARSLAAFLAVGSYKPLTLGDPLWENLRELTRFRADLVKDRTCQVNRLQETLAIAFPELGAHMASLDSPTALALLVVYPGPQALAEAGTQAVSACLIEASHHRLGSTQAQAIVSAAGTTIGLLQRQRALALKLEVLAQGILSVNMQLQRVEAAIEELFRQLHYDKSDFPVGSVQSLASILAEIEDVNRFPTLKQFLSHFGWCPQTFQTGGFHQEHPRMSHAGNRYVRRMVWMLAIMAIKTVPAYRDYMQRRTAAGKKKMHTIVAVGRKILSVIYAVLKTGRPYTPEGGASHSSPCPALTSL

SEQ ID NO: 107313 - protein, 408 aa, unidentified
MNAVGIDVSKGKSMVAALRPMGEVALLPQEFLHTEVGLEQMAYAIIALGEDTRVVMEATGRYHEPVAAALHEYGIYVCVLNPLFIKQSGGGSIRKVKTDKADAMKIAKYGLDNWVDLREYTPMDTIRQQLKLCSRQYNLYMKTVVSLQNNLISLADKTFPGANELFSSPERADGHQKWVDFVMTFWHCDCICRVSEKAFTERYQKWCKRKGYHFSAEKALDLYASSCGHFTTLPKNDNTRLLITTAAQQLLAGKMTLAALRAEMTRLAQQLPEYDTVRTMYGVGETTAAQLMAEIGDVRRFPRRSSIVGFAGVDPAVDQSGKHDAKSTPTTKRGSPHLRKTLYQIVCTYLRKAPEDEPVYQFLDKKRAEGKPYFVYMTAAQNKFLRIYYARVKECLEAFDAQQNSTQS

SEQ ID NO: 107314 - protein, 409 aa, unidentified
MNQLFVGIDVSSKNNVAYLMKPDGSKHSSFSVQNNLGGARVLSERVVSALATMQLSDVVIGLEATSIYGDSLVYALREDGRLGQFHRKIHVLNPKQVKKFKDSYSDLPKNDLVDAFVIADHLRFGRIASEVYMDDYRYKALQTLTRARFYAVQNLTREKQRFTNYLFLKCSGLAQEKILSQNTSATTIALMEQFESVDELAYTDLDELTDFITKSGRGRFADPEATAKAVRAAARGSYRLPKTVNDSVNQAMSVSVTGMRAMETQIMTLDKAIEQQFEIISNTLTSIPGIGKVYSAGIIAEIGDIHRFQSHASIAKFAGLVWSQHQSGDFEAQHTHLVKSGNRFLRYYLLEAANSVRRCDSEFRRYYDLKFKEVNKFQHKRALALTARKLVRLIFRLLKDNRLYIPPED

SEQ ID NO: 107315 - protein, 372 aa, unidentified
MKENIIHIGLDVDDTQYHGTAFNKETGELVDFKSRPTLKGLLQQLERMARHFKGCKIKLCYEASYIGYCLQRDLVSKGVHCDIVSPSSIPSPRGKAVKTDRIDAGYLAQFYANDLLTIVQPPDEEQEQDRDLLRSRQKVMQQRNQLRKHLQAVLRRNGLHYKAETGNKSHWTKHHYCWLARTIDGSSGSLKVNLGLLLRQLKTLNEVLMEYGQQIDMLANSPCYQSAVQSLTCYKGIKNVFALTIITEIGDIKRFSHPRKLVSWIGMDIRGYSSGGKYNRFGITKHGNRYVRTAFVEANQRGYRTAKIGQDLKSRRRHIAPELVNIADRCLRRLNKKGNRLLLAGKHPNKVKVACAREMVGFVWESLNKAAA

SEQ ID NO: 107316 - protein, 465 aa, unidentified
MKPHRRPHEKEPTSRPSRLERLSPNAAGVDCGSAAHSVAVPPDRDASPVRSFTTFTTDLHRLADWLTACGVTTVAMESTGVYWIPLYEILEARGLDVVLVNARHVKNVPGRKTDVVDCQWIQELHSVGLLRGSFRPTAAIAALRAYLRHRETLVQSAATHAQRMQKALVQMNLQLPVVISDITGVTGLRIVRDIVAGHTDPHALAQHRDHRCQASAAEITAALTGHYRPEHVFVLQQNLELFDAYQRQLAACDAAIEAHVQTLAAQAPAPAGALPAPRTKKKPRDNEPRFDIRTPLHQLTGIDLTQLAAIGPYSALRLLAEIGTDLSRWPTQQHFTSWLTLAPHNKISGGRLLSSKTPPSANRAAGILRMAAMSLGRTATALGAFYRRLAYRVGKAKAITATARKLAILVYRMLKDGLVYQDPGAAAYDAQHRTRVIRRLRQRAANLGFTLVDHETGEVLEGAVS

SEQ ID NO: 107317 - protein, 334 aa, unidentified
MWHVGIDLHRQTLVIAAVDDAGACWAPRRIDCRDREGIIQAMRSLDPFRAVIEATGTYRWLYDLLAPLGTVLLANPLRLRAMVQRRSKTDKLDSQLLANLLRINQIPLAYIPPQHYQQLRDVTRHRARLSRQAATTKTQLRSLLAVHNLGPLPFTAVGVRACAWFAQQEFGATGNWVRDELLLRLDHYRRQLSLLDQRLEDLREQVPEVQAILDIPGVGLYTALLIIGELGEVHRFRSARQVGSYAGLTSRVHQSGDYCYRGNITRQGSPWLRWILVEAAIKAARNDPRLKNFYVRIRKRSGVKIARVAVARKLAEICWKRLIHWHGRPVASVV

SEQ ID NO: 107318 - protein, 388 aa, unidentified
MIYVGIDIAKLNHFASAISSDGEELIKPFKFTNDNDGFQLLISKLDPLDKDSLIIGLESTAHYGDNLVRYLVAKNYKVCVLNPIKTSTMRKNNIRKTKTDKVDTYIICKTLMMQESLRFVTFYDLDLMDLKALGRFRQKTIKQRTRLKIQLTSYVDEIFPELQYFFKSGLHQKSVYALLKEAPTPEAIASMHMTHLAHLLKVNSHGRFDKEMAQQLRVLAQKSVGASDSSLSIQVTHTIQQIELLDSQLERVEAEMTEIMKFNDSVIMTIPGIGYINGGMILGEIGDIHRFSSPNKLLAYAGLDPSVYQSGNFQAKKTRMSKRGSKVLRYALVNAAHNVVKNNTTFKAYYDAKIAEGRTHYNALGHCAGKLVRIIWKMMTDNLEFNLD

SEQ ID NO: 107319 - protein, 325 aa, unidentified
MTDLPPLGIDVSKLKFNACLLRHGGKLRHKSFPNTPAGFSQLSDWLEGLGAGRAHACMEATGTYYEALASYLHERGHAVSVVNPASVRDYARSRLSRTKTDRVDASLIAGFCAERRPPAWRPPAPELRELQALVRRLDSLREMRTMEENRLSSGVRVAAVRASLEDSIAHLSEQIRKTEALIADHIGRHPGLRRQRELLDTIPGIGAATAAVLLGEMPDLKEYRSARAVAALAGLVPRERQSGSSVRGRVRLSKIGNSRLRKALYFPAVTALRCSPFFQQWAAGLRQRGKSKMAVIGAAMRKLIHLAYGVLKTGKPFDPEWAKTT

SEQ ID NO: 107320 - protein, 314 aa, unidentified
MAMPASRPEIGIDAAKDNLVIHHQGLNQTLTIDNTPQAIRQWLATLPEGCDIAIEATSTYHMDLTERAHAKGHRVYVVDGYRLSHYRKGVGGRAKTDLADAQLLARHLHKEKDELRPWSPPPKAYRMLQSLLRRRAALVKARTALRQSLSGEPELKAPLRALIAKMDRIDSLIQKRLKSAVSAAGLQTQVQRCDAIDGVGEITATALVMAFLRGDFKNSDAFVAFLGLDVRVRDSGKLTGKRKLTKQGDTEVRRLLHCAAMSASRHPVWRAFYQHYRDRGLHTTQALVILARKIARTAFALMKQQQEYCPAKLF

SEQ ID NO: 107321 - protein, 358 aa, unidentified
MTRCIPTDAATITLGVDTHKDAHVGVALDGLGRRQGTLSVPATPEGYKKLVDWASEFGPLEHVGVEGTGSFGAGLARFLKGRGIRVSEVIRPRRRDQYRSGKSDSRDAESAARSVLAGTAIGQPKDADGEVEMIRALRITRRSAVKARAQAANQIQALLITAPEGLKSELCGLSTARLVVRTARFRPGTNPSDVEAATKFALRSLARRYQHLSEEIGELDEQLNRLVAEVAPELVAVEGIGTDTAASLLIAAGDNPERLRNKAAFAHLCGAAPIPASSGKTVRHRLNRHGNRDANRALYVIAVCRMSRDKRTRAYVAKRTAEGKSKKEIIRCLKRYIAREIYRILASPSLHSPSISEP

SEQ ID NO: 107322 - protein, 372 aa, unidentified
MTKRSSSRQNPKPVMKAKRARQSVTIGMDLGDKTSRYCLLSDEGEILREGQVGTTKAGMTETFGRIGRARIAIEVGTHSPWVSRLLRGFGHELVVANPRQVKLITESSRKDDRLDAQTLARLARIDPQLLRPIQHRSEKAQTALMVIRVRAALIAVRTSLVNTARGLTKAVGERLPKCDADQMGVIQTESLPPKLRQVLEPLLKEVESLTEKIKDSDREIEQIARTDYPETALLQQVGGVGPLIALTFVLTVEDKDRFQKSRDIGCYVGLRPRRSDSGQSQPQLRITKEGDPYLRTMLVQGAHYIISRRAPDTDLKRWGLHLAEHGGKRGKKKAVVAVARKLGILLHRLWVSGEVYEPLRNQNLRAVGKRAA

SEQ ID NO: 107323 - protein, 330 aa, unidentified
MTVLDADGQVWESRKLATEKWELLEFFGKVEKPAAVAVEATFNGYYFLNVVEPLGLELHRVHPWKRRAIASGRIKHDKLDSRVLAELLRTGFLAEAWIAPRAVREQRQLLRYRVHTVQGATRAKNCIQAILNRNGIRTPLRSPFGPQGREFLTAVELPGTDRWEVDGQLARLDLLGQQRAALDREIRRRGRTSPVAQALERIPGSGPFIALLLVAEIGDIQRFPTAKHLASYTGLVPSLYASGEHRWGGAITKQGSTVLRWALVQAAHRAAQSARFSTYYQQQRERLGSAKAIVALARKLAVISFYRWRAVQSSGVHLGWRMVRRPTLRI

SEQ ID NO: 107324 - protein, 412 aa, unidentified
MIKREKIELVKGSDIYAGIDVASDIHRVRFIDNLGQEVIKGISFSNDREGFKELEEHMKKFGIDHNIIFGLEPTGDYWKPIGYYLRSKGYKVVLVNPYHIKRTKEIIDNSQQKDDRKDSYLIADLVKQGKYFFPIIPEGIYGEMRELSISWNRTKQQITRLKCYLSNFLAKYFPEYKSIFSDILGKSSFYILSHYPLPEDIKRIGKKRLTKIIKRISKGKIREEKIDRLYERARDTVGIKEGREAAKMFLKEVLKELERLMGRRKKIKEKMKELLKISGYGDYLLSIKGVGVVSACLFLGDIGDPRRYKRASQIEKLAGYNLVEESSGKKKGEKQISKRGRKTLRYVGYLVANVAIAKNKEIRELYRYKVDVLKKNRIKVMVGIAAKMLRIMFAVCKNKEYYNSEKVRANFI

SEQ ID NO: 107325 - protein, 349 aa, unidentified
MIVIGIDPHMQTHTAVALDAATGRVLAELTVKARSHGFERLVAWARRLDDERLFAVEDGRHVSGSLERHLIPRGEEIVRVPPRLMGVSRRADRIRGKSDPIDAEAVARAALAHPDLPRATLAGPERAIGLLGAHRETLVNERTAIENRLRWLLHDLDPDLAPGPRTLDRICHLDRLQAALEGLDQTVQVRICLELVSRCRQITRRANELEREIAELVKACAPALLQIPGCGALTAAKIVAETAQVGRFPTEGHFARYAGAAPVPASSGATHRQRLNRRGNRQLNAALHRIAVTQLRIHEPAKDYVAKKRAEGKTKTEAIRCLKRQLSRVVFTTLKTTTQPADGLTAVAA

SEQ ID NO: 107326 - protein, 411 aa, unidentified
MQVVHPRCCGLDVHKKVLVACLMILGAGGRLTKEIRSFGTMTDDIRALTDWLLGAGCTHVAMESTGSYWKPVWNILEGKFELLLVNAQHIKAVPGRKTDVRDCEWIAELLSHGLLRGSFVPDREQREMRELTRYRTSLIGERAAEVNRVQKTLEGANIKLASVASDVMGKSGREILASLVAGSNDAEAMAELAQGKLRSKLPELRQALAGRMGTHQRFMLAEQLAHIDELDERIARLDAEIEERMRPFEEVITRLDAIPGVGRRTAEVIVAEVGTDLSRFPTAGHLASWAGMCPGNNESAGKRRSGKTRKGDSALRVALVEAANAAGRKRNSYLRAQYQRLVTRRGKKRAAVAVGHTILVIAYHLMTNQESFYQDLGAHYFDERDRQHVERRLVRRLEALGYAVSLQPAAA

SEQ ID NO: 107327 - protein, 349 aa, unidentified
MRFYNQQHRFYGGVDLHARTLSLCVLDAAGHAVLQQTLPANPTAFLNAIAPFREGLAVACECMFAWYWLADLCEQEKIPFVLGHALYMKAIHGGKAKTDKIDAHKIAVLLRGGMLPQAYVYPKGMRETRDLLRRRTFLVRRRAEALVHLTNTNSQYNLPPFPKKLAYAANRAELNLLERFTDPSVQKNVALDLSLIATYDEQIGAVELYLTRTAKIDDPQAFHRLRSVPGIGKVLALILLYEIHDIRRFPEVGQFLSYARLVRCTHESAGKKQGTGGNKIGNAHLKWAFSEAACLFLRESEQAKKWLARREKKHGKARALGALAARLGRTVYHLLRKQEVFDRQRFFAS

SEQ ID NO: 107328 - protein, 367 aa, unidentified
MKERGLRSSWVTERFSEYSLFTTKEAPVNAEYDGRQIVGIDLHRRRSVIVQMSPEGERLGKTRIENDPFALAEQVAVWGEAPEVVLEATYGWYWAVDVLQEAGARVHLAHPLGVKGFAYRRVKNDERDAADLADLLRMGRLPEAWIAPPATRELRELVRHRAKLVALRSGLKASVHAVLAKCGVSVPMSDLFGVSGQKLLDELALPAAYAGRVASLRRLIDAFDFEIDIYTRMLTARLDGHAGYTAVQAIDGVGPTFAAVFVAEIGDVHRFGAAPQLCSWAGLTPRHRESDTKVHRGRITKQGSTLVRCAAIESVQRVRRGPIGHARARIGEHRGANIGKVAAARKLLTLVYYGLRDGHIRCLARPA

SEQ ID NO: 107329 - protein, 341 aa, unidentified
MTVIIGIDPHKAIHAACAIDETEVELAQLQVRAGRRQLEQLMSWAQHYDKRMWAIESAGGLGYLLGQQLVAAGEEVVDVPATLSSRVRLLGSGRSNKNDPNDARAVAIAALRTPALAAVRREDHMSVLRMLAKAHLDVSRAKNRSCGRLHAVVAELVAGGIGKEVVVSQAETLLAGIRPESMVQHQRLELAYEILAEVRRLDTQLKVSKRRVAAAVDASATTVTDVYGVGPILAAIIIGYSGDPRRFATAGHYASYNGTAPIELSSGGRTVHRLSRRGNRVLNHAMHMAAVTQIRNPRSDGRGYYDAKIAAGKTRREALRALKRRVSDRVYQRLIADARSH

SEQ ID NO: 107330 - protein, 346 aa, unidentified
MLHVGLDLSRKRVDVCLISDPGELVDRFAATLDRDGLHGLARRVAVYGEPVRGVVESMNGARFVHDELIAHGWEVLVADAQKVKGLAPLACKTDKIDARVLAELSFRDLVPAIWLPTFELRSEREISRWRLHLVKHRSTLKNRVHSTLITFGHQRHMSDLFGVAGRKLLKELEMPEPWRSHVDASLVLIDDLEARITAIAKELRRSGADHRYIPALMTAPGFGWITSFTVACELGDINRFSTPMKLVGYTGLCPRVKQSGQMDQRGPLSKHGPKYLRWGLMEAAIAASSHPLYRERYQRTKRRLGRQRGPKVAQIDLARQLSEAIWYMLTRNQPFAPAGAIYRLAA

SEQ ID NO: 107331 - protein, 462 aa, unidentified
MTISKNKGNRTNETPVPTSLPAIRPRVAGLDVGSSEHWVCGPARDDGKPNVRVFGTTTDQLNELAGWLSAQGVESVAMESTYVYWIPIYELLEARGIEVVLVNARQLHNVPGRKTDFSDCQWLQLLHSCGLLRGSFRPGEAITRLRALQRQLANLVAERTRYVQWMQKSLDQMNVQVHRAVTDLTGLTGMAIVRAIVGGERDPARLAMHRDRRCRKSADEIARYLTGNWRDEHLFNLASALRLFDTLDTEIAAYEAQLLTEIASLQPPDRQAEPVPPHPNPAKEKAIKARGEQPARTTLWRFAGVDLTRLDGISAGAAQVVLTEVGPNLAAFPSEDHFVSWLRLCPRTPISGGKPLKKRRNGLGANRIAGVLRMAATSLERSKTALGASFRRIARRKGGAVAVFATARQLARLIYRMLRYGHDYVDIGEKAYDRQFQIRRLTALTETAKNLGYTLVPNVPAG

SEQ ID NO: 107332 - protein, 366 aa, unidentified
MKKTSTVRVNGNMIFKGHKLTIGLDLGDRWSFYCVLDEAGEVLLEQKVPTTPEAMKQTFSRIPQSRIALETGTHSPWVSRLLTELGHEVIVAHAQKVQLITKSNRKDDRHDARTLARLARIDPELLGPVRHRSVQAQIHLTVIRARAELVSARTALVNAARGLVKSYGQRLPKCGTQQVSRELAAELSTELREVLEPLLQEVESLNERIKEYDERMEKIAKQVYPEVSLLKQVKGVGTQIALTYVLTLEDPHRFPKSREVGCFLGLRPGRRNSGESEPEKRISKEGDRYLRTMMVQGAHYILGPFGQDSDLRRWGLKLAERGGKNAKKRAVVAVARKLAVLLHRLWVSGEVYEPLRNSHKAMRAAA

SEQ ID NO: 107333 - protein, 410 aa, unidentified
MEVVHARCAGLDILKNDAKVCVRVAGAARRKTVQTVTTWSSMTSQILALREHLIAERITCAVMEASSDYRKPFYYLLEDAGFAVLLVTSRHVRNLPGRKSVADATWLAQLGAHGLVRASFVPPEPIRQLRDLTRTRTAITRERSREVQRLEKLLEDAGIKLSAVASDIVGVSGRAMLESLIAGNSDPAALADLAKRRLRSKIPALTEALSGRFTDHHAFLARVHLDLIDQHTAAIDEITIRIEQLIAPFHGFRDLICTIPGISTLTADVIIAETGADMTRFPTAAQLASWAGTTPGNNASAGKVKSSRTRPGNPYLQGALGAAAMSCAQNPRTYLGARYRRIASRRGPQKANVAIQHSILIAIWHMGTNGCLYDDPGADYFNRLHPDRAKKRAINQLEAMGYQVTLTHAS

SEQ ID NO: 107334 - protein, 342 aa, unidentified
MGKVSIIGLDLAKRSFQAHGALADGGVGFRKKLSREKVLGFFAEQPRCVVAMEACGSAHHWGRAIGDLGHEVRLIPPVYVKPFVKRQKNDATDAEAIAEAASRPTMRFVAVKSEGQQARAMLFRTRDLLVRQRTQLINALRGHLSEHGVVAAQGPANVKVLEEAVEDQTTSLPLLVVELARVFLDQIEGLSKNISKLEKVTAHEATCGETTKRLKTMPGVGPITALAIETFAPPMDVFKRGRDFAAWLGLVPRQQSTGGKQVLGKISKMGQRDIRRLLIIGAMAVVRSTLRKGAPEGSWLQRMLARKPKMLVAIALANKMARSVWAMLAKGEDFRVPTVAAI

SEQ ID NO: 107335 - protein, 360 aa, unidentified
MTIVADLYDLIIGVDTHAASHTLAVVTGGPGAVLAKATFPTTPAGLSRAVGWVRRRTADRSVLLVVEGIGSYGAILTGRLHAAGFLVAEAPTIPSVLRRGKGKTDQVDAVLIARATAGLTTGELRWPRTEDGTRVALEVLLGARDQMNNERTRHINTLTALVRTRDLGVDARRRLTTTQITTIAAWRSREEEPWVAVCRREAVRLATRIRALDAELAANYRDLTQLTTTHTPELLALPGVGPVVAAAVLIAWSHPGRVRSEAAFAALAGTSPIPASSGNTTRHRLNRGGDRHLNRAMHTIVLSRMRADPTTRAYVTRRTAEGKTSREIRRILKRYATRQLYRTLTAAHPATALPIVPAAA

SEQ ID NO: 107336 - protein, 403 aa, unidentified
MEGPLISLDVSKGKSNYRFFENGTDRKGKKGVIRHDIRGFDSIRDEAEKMEERLRIKPSVIFESTGVYSDVVEKYFTDKGFDVYVISPLLSASMRKEGVRPAKNDSLDTLSIAKVFYSKDDLRKCSENDKKAERLREMSYELDMMNRRIRPMKCQFLRLLDKVWPCLDEVSDYSSRFMLDFIIAFGHPENIKTVKGVLSVIRKSEMGTAGRKDKIAQDLFDYCHTHLSAVSKDSSYVELLKRMAIELKAMAKKKSELIDRMAEEARSKDEFVRLLTIPAVAKTTALKIMARVGDISRFRNAEALVAYCGLDPRVYQSGKMTGEHRTITKKGDCILRSTLFLAVKLMVMLYPDTKVARFVAAKAKNGLSYKQAVVAGSAKLARIIYSMLTHHENYVEFNADIVA

SEQ ID NO: 107337 - protein, 480 aa, unidentified
MPVPEAGTESCRLLYGEPCKDLRQYRVSRLATYLTEILSALQFKIVIMSKLTKIKKNAAGIDLGSNEFFVSVDGETIESFETFTTSTIELINYLKDHSIETVAMESTGILWLPLYDMLEKEGFEVFLVNASHAKNVPGQKSDPADCRWLQTLHSYGLLRASFVPKDEIRKLRTFVRLREDHIEMGTAHVQHMQKAMELMNLKLKNVISQLHGASGIRIVEAILSGVRDPYKLAELCETSILKHKKEKVIESLKGNYKEEYLFVLRQAYNAWLFYQNQILECDKQIEEILSNITKDITETDTGSPKPSRHNRPKIDKLHEKIVMLNHGRNATQLPGISDTTMLKLTAELGIDFTKWPTEKHFTSWLGLSPKKHQSGKTKKRKRNNANTKAGQIFKESAMSIANSKHIALKGFYHRIKTKHGPRAANKATARKLAGLYYRFMTKGMEYVEIGLKEYENRYKETMIRNLKRKANDLGYQIVAA

SEQ ID NO: 107338 - protein, 343 aa, unidentified
MAHYVGLDVSLKQTSICVVSDTGSVVREGVVDSDPEAIAAFVRSRAPDTVRVGLESGPTATWLWTELRRLGVPVICIDARHAKAVLKMQINKSDRNDAIGIARIMQTGWFKEVRVKDLDCHVVKALLTSRALLVKIKRDLENQIRGLLKNLGRVIGRAKFNGFAARAAELIEDRPELIAVVAPLLKAREAIEKQIDDLDRKVLKLARHDAQIRRFMTVPGIGPITALCFKATIDDPARFKRSRSVGAYIGLTTRRHASGEIDWSGRISKCGDAMLRSYLFEAAGVLLTRVPKWSALKAWGMRLAKRNGLRKAKVAVARKLAVILHRMWVDRTEFTWSNREAAA

SEQ ID NO: 107339 - protein, 520 aa, unidentified
MATAHARKRSSRRPSAVNLGKPRGVLHPRVQQVGPEHFAIVCCDCHKDSSKLLLADFYGNVLIPPTVVAHNRPDLDAAVAHIHAAFATHNIRDSLVAIERTGRYHRLVQRTFAAAGFETRILHPFVTKQYRQPVDPANKTDDTDLAAIHRATVTGCALLEATRDEAWTTLQLVIRQRRDRVRKGAALQCQIRDHLEAALPGFAACFDKLWESALPWHLLRHFPSAAQLCDAGLTTLCHSLQHAGIRFHKRSIDKLLAWAEQAAPGDVAASQHLRFALALYDDHQHKTQEIQALEREIAGRLVQTPYVLLLSIPGLNVVSAADFAGEMGPIEHYANAKAITGRSGLRPARYQSNKIDKGDGPLVRNCNRALRAAILTIADKLIACNHHFRALAAAWTAQGKDPRHSRVKVALRFCRIAFQMVAGRQVFRHPCIQGRHYILDKLTAFHRDHDTPMPEVLADLQAAVGQVPPREHAAEAKPLHEELTKIQEGRRRGPQPLADILPVVLARLGVGVVQSAQSGE

SEQ ID NO: 107340 - protein, 324 aa, unidentified
MIDGRLGIDVSKNMLDASMSSCNKVRARSFANSSDGWRHLLDWLISQKVQRVHACLESTGRYSLGIACALYEAGHVVSIVNPAQIRDFARTKLGRNKTDGVDASHIREYCELFKPQPWAPPSEAHRRLGELQTIRAGVIAGLTEWKNRKNSGIVDAVAQSLADVTISHFNNQLKAVDEAIAQTIDNDSGLRRKRDLLLSISGVGEILAGVVLAELPGPDVLRSSAAVVAYAGLNPRQHQSGTSIDRVTRISKIGNAVLRAALYMPAMSAMRFNPAIVALVTRLKSRGRLNPKQIVVAAMRKLLVLCFGVLKTGKPFDPAIAMGC

SEQ ID NO: 107341 - protein, 394 aa, unidentified
MSIVMGVDQHRAQITAEWIDLDTGEISRARVSPADRDGVRRFLARFAGKQLEVALEATTGWRFFVEELRAVGAGVHLAEPAQTAALRGRKQRAKTDRADARHHRELLMAGRLPESWIPPDHILDLRAQVRLRHTLIEAHSEWQQRIQAVLYHHGAPQRRKLMVGDGPDWLSAQPLPDAAREQVTVARAMIDALERQIAPLDRELRPYARRQTGCKALIDAHYGVGELVAVTVLAELGDCRRFSNSRDAVRYGGMDITVYQSDRHRAPGHLSRQGPPALRWALYEAAQAARRPTSPDREYYLQAAEQLGGNRACLALARKLLKRCYHTLRELGEDALTPPADEPSGSGSARRASSGSPAPTNRPATPSARGCSGRLTRASAPLSGNERRPGPAHP

SEQ ID NO: 107342 - protein, 344 aa, unidentified
MSTVYLGIDVGKTFCMIVVIDEQGRTLVPARRVPALDVARWRTLLAELQKFGELRAGFEVGPHYEWMYDLLMDFCASVEVINAADFALINQSHKKTDKVDALRLAEGLRRGDLPTVFVPPKAIREHRRLVSTIHFNSQSLVAIKSRLRGLLLTMGLECRSSDILGKQALAWLEEKKASFGACDRLTLEQLIEQGQLLQTQRAKLDQLVKEALTQYADAKLLRSIPGFGSLTTLAVLCAVVKIARFDSADKLASYVGACGKVMQSGQTLRLGAMTKRGNVHVRWLLSQALMHLHRKDPRARKRYQKLRRKKASGVARGAQVRWLATVLWHVWSKKSEYRIGGKTA

SEQ ID NO: 107343 - protein, 326 aa, unidentified
MQGKVPSQRSAAAPVYIGIDVCKARLDVHIHPLGESLVLPNDAGGLKRLKKILARYDVVLVVMEATGKFHRPAHRSLHASGFKVAIVNPLRSRRFAEAIGTLAKTDRVDARMLALMGESLKPGALEPTPELMETLQELARGRESAVDSKTAIGNQIQTSNSKVLLRELKRQLSAVETAIENLEAELQRQIDADPVLARRFEILTSIPGIGLVAAVALIVELNEIGRLSSKQVAMIVGLAPIARDSGQKTGTREIRGGRKHLRTALYMPANSAKQHNPDLKIFHDRLIKAGKLAKVAITAVMRKLLVLANALVREDRLWQPKHVIAR

SEQ ID NO: 107344 - protein, 343 aa, unidentified
MNVSIIGLDIAKNNFHVVCFDERFKELRKRMLRRNQVFLFFANMPVCLIGMEACASSHYWGRKLRELGHEVKLIPPQHVKAYLRGNKNDYNDARAIAEAATRPGISGVAVKTVEEQDMQAVHRIRSQCLRDRTALVNSTRGLLSEYGIIFPKGIASLRNRIPELLEDADNGLSMLFRQLLSRRYDQLVELDNHIEFYTNELKRIGQEDEACQRLQTIPGFGPIVASAFRSAIGDGSAYSKGRDAAASLGLVPRQHSTGGKNNLLGISKRGDRYLRSLLVHGARAVVTQAARKNDKLSSWLNRIVKERGWNKAVVAMANKMARMGWAILRHSTSYQSLSATPAN

SEQ ID NO: 107345 - protein, 390 aa, unidentified
MQVMHPVCCGIDVHQKSIVCCILDGPLTSNEPKKYQTTFGTTTKELKAALDWLLEHQVTHVFFESTGQYWIPLFNIFSDSDLELVLANPQHIKNVPGRKTDVKDAEWIAQLGRCGLINQSYIPSQEVLQLRYLTRYRLSIKQRLTQIKNHIHVILQRGNIKITSYLSDIFCKTGQALLTLFINGEVINEDNVQSCIHGRIKASTRQLIEAMDGKLSTIDRFLIKECMEEYQLQKKISDELNKEIKEYILEHFLKEYQLLLTIPGISDNCCATILAEIGPNVDSFKTDKKLASWAGMCPGSNESAGIKKSSHTTQGNKYLKQALVMSVLSVQRTKEETFSLFYQRISSRGSKMKAIIACGHKMLRIIYKILQSHKPYDSQKALGLRQQTNA

SEQ ID NO: 107346 - protein, 343 aa, unidentified
MLHAGLDLSRKKIDVCLLSAAGEVVDEWASPPDADGLRGLAARAGMWGSPVRGVIESMNGARFVHDRLEEHGWEVLIADATKVKGLAPLACKTDKIDARVLATLSARDLVPEIWLPDPSVRRERELARFRLHLVRHRTTLKNRIHAALIAFGHPCPVSDLFGHAGRELLDRLEIPDPWRSNIDVSLELIDDLDLQIATLTVQLKRQGADHRYIPLLVTAPGIGWVNAYTIASEIGDIGRFASPAKLCGYTGLCPRVMQSGATDARGPISKHGPKYLRWALFEAALNACKHPYYAERYQQTKRRLGRQRGPKVAQIDLSRRLTEAIWHMLTRNEPFAPAGAPVV

SEQ ID NO: 107347 - protein, 350 aa, unidentified
MTIIGCDYHPGFQQIAFVDTETGDYGEQRLGHSEGAEKFYRELAAQGKKVRVGMEASGHARWFERLLAELNFELWIGDATEIARKRERKQKTDRQDAQHILQLLMENRFPKIWVPSGENRDLRQLLWHRHRMVQTRTRIMNQLQAVALNEGLRCKKKLWREKGRQQLEAFRLAPWASRRREDLLQLLDRLNPTISDLTQAIEQEVEKCPEARRLRTHPGVGALTALAFVLIIGRAERFQCGKQIAAYLGLVPLEDSSGNRRRLGHITKQGSSILRFLLVEAAQVTARSIPEWRNKYVHLTMRRGRKIAKVAMARRLAIALYWMWRKGWDYEQLRKFGSHAGQPGNRDGVK

SEQ ID NO: 107348 - protein, 429 aa, unidentified
MNFRPIAGIDVGKFFSEMAILSPSNELVARMKIKHDSYSDIERAFELLKKVEKDFDSRPFIVMESTGHYHKILFHSFYRFGYEVSIINPIQSDCIKNIGIRKVKNDKVDAKKIALLYRFQELKATNIPNEDIECLRSLCRQYYKLNDELTAYKNRLIGVVDQLMLNFKEVFSDICSKTAIAVLEECPTPSLMIKADRDKLISVIKKNSRKSHEWATKKYDLLILKAKEFEPLSIDNPANIAMLEIYISMIKTLQENLKKVLKTIEQLIANDLSKDMPVMWLTLELLQSIPGVGLITAATILAEIGDFSAFSKPKKLVAYFGIDPSVVQSGEFTGTRNKMSKRGSKYLRRVLFTIAIANVRTKRNGQPTNPVLLEFYNKKLQSKPKKVALGAVMHKLIFIIFAVLRDKKPFELRTPEEHAKRLKTKHIAA

SEQ ID NO: 107349 - protein, 319 aa, unidentified
MFVGVDVAKAELVVAVRPGGARWTVTNDERGVRTLVERLREVPPTLIVLEATGGYELLGVAALAAAELPVVVVNPRQVRDFAKATGQLAKTDCLDADILARFAEKVRPALRPIATAETQELDALLTRRRQLLEMLGAERNRLGQVFGKGKRPVKKSLKTHISFLERELGIADSGLDDAVRRSPVWREQDDLMQSVPGVGPVLSHSLLADLPELGRLSRRAIAKLVGVAPLSRDSGTFRGRRFVQGGRAPLRGVLYMGALVAARWNPVIRAFYLRLVAAGKPKKLALVACMRKLLTILNVMVRTQTRWSMQAAVPTLVGT

SEQ ID NO: 107350 - protein, 369 aa, unidentified
MPHVTSIGLDVHARSVAAAAFNPFTGEVVHRDFGTDAAEIAEWALGFEEPRACYESGPTGFHMARELRALGLDCAVAAVSRMQRPAADARRKNDRRDAEFIARMLATHNIVEVPLPDVAVEAARDLDRALDDATRELRRSRQRLNMFLIRLGHVWDERNADGARKKAWTRAHWRWVSEIRLEGPQRDALEYYVTAARCAESDRRQLERRVVALAGTDRWRATVEALSCIKGVDTLTAFRLAAEAGSFSRFRSAPAFASWCGLTPSEHSSGESERRGGITKAGNALARTALIESAWHYSTCSPRPKAPAPGTDVPPAIRSRADDCTARLHRRREALAAAGKSACKANAAVARELACWVWEIGCRSEGTVL

SEQ ID NO: 107351 - protein, 356 aa, unidentified
MSHEVKYIGMDVHKEAIVIAVLNGSGKLVMETIVETKASSILQFLHGLRGELHVTWEEGTWAAWLYDLLQPQVQEVVVCNPRRNALLKEGSKSDKVDARKLADLLRTGMLRPVYHGENGLRTLRELGRSYQTISKDLTRVMNRLKALYRGWGIPCAGTQVYAPRYREEWLSKIVQAGVRRRAELLYQQLDGLQGLRRNLRPEFLAESRKHKAAKLLRQIPCIGPIRAARLIALMQTPHRFRSKRQLWTYSGLGIETHDSAQFRFVRGQLQRSKKPQQLRGLNRNHNHEMKEIFKSTATRASCGTGPFHEFYAALLAKGMKPEMARLTLARKIAAITLTLWKRGERFDAEQLKTQAA

SEQ ID NO: 107352 - protein, 402 aa, unidentified
MGVDWADESHQVWVGDDQGKKVAEMKVVQTPEAMSDFGRWLHERRAEGIELWAAIEKPHGRFVDFLLDRAVVVYPVNPKALDRVRDRFRMSRSKSDCFDAYVLAEFVRTDHAHLRPLEPNSTAAQELKMLTRDHYRLVRQKTRLLNQIRVTLKEYYLRPLEVFGDLETNIALDFLTRYPTPRALLRLSRREWNRFARDHHLGGERSEELWHKLTQPQLSIPEHVVRVKARLLSVLIAQLKTVMPAVESYGEKIEDFFASMPAAKLVKTLPGGKSGTIIPALWAELGDAKSRWQSFHHLQAEGGAVPVTKASGKSQYVEFRFSCNKLMRYAAYWLAFNSLNRSEWAKAYYRSQRAKGHSHAEALRALSAKWLKIIYVMWRDHKPYDENYHLANIARQKMRQAA

SEQ ID NO: 107353 - protein, 348 aa, unidentified
MSYFAGLDVSLEETAICIVDDVGCIVREARVASEPEALVAFFNACGMKLERVGLEACSLTAWLHAGLTEAGFPAICIEARQAKAAMGAMPNKTDRNDARGIAQIMRTGWYRAVHVKSPSCRSWRALLTARRMVLNKRRDVENGVRALLREVGLKVGTPSRKDFPARVRELAADEPMLMSLAESLLSVIEVMTRAVETLTKRVLDEVRVEPTCRRLMTVPGVGPLTALAFRATIDQPDRFRKSRDVGAHLGLTPRRYQSGETDVQGRISRCGDELARTALYEAAHSLLIRTTKWSALRAWGMNIAKRRGMARARVAVARKLAVILHRMWADGSEFRWGKQAAAPVMAAA

SEQ ID NO: 107354 - protein, 402 aa, unidentified
MNAVGIDVSKGKSMVAIMRPFGEIVSTPFEIKHTTSDIHSLVELINSVEGESRIVMEHTGRYYEVLAHQLSEANLFVSTINPKLIKDFDNDSLRKVKSDKADAVKIARYALDKWQNLKQYSVMDELRNQLKTMNRQFGFYMKHKTAMKNNLISILDQTYPGVNTYFDSPARSDGSQKWVDFASTYWHVDCVRKISLNAFIDHYQNWCKRKKYNFSQSKAEEIYGKAKELVPVLPKDAITKLIIKQAVDQLNSASTTVESLRTLMNETASKLPEYPVVMAMKGVGTSLGPQLMAEIGDVSRFTHKSAITAFAGVDPGVNESGTYEQKSVPTSKRGSADLRKTLFQVMDVLIKMMPQDDPVYQFLDKKRSQGKPYYVYMTAGANKFIRIYYGRVKEYLASLPES

SEQ ID NO: 107355 - protein, 367 aa, unidentified
MREITTTFVGLDAHKVSISVAMLIPGEGKPVEWQCTNDRASVRRMVKKVLRQAPAGVRFCYEAGPCGYALQRWIREEGAACVVVAPSLIPRKRGERIKTDRRDARKLAELDRAGLLTEVHPPTEEDEAARDLCRAREAAHGDTVRSRHRVSKLLLRRGWQWMGGKRAWSQGYRLWLRSLRFEHRADQWMFEDYLLALDQVETRLKALEAQILEVSHDPRYAEAVGALRCFRGIDTITAMSLVAELHDVMRFESPRQLMAYLGLVPSEHSSGEKERRGEITKAGNGHVRRLLIESAWHYRLRPGVAALAKRREGQPIRVIAIADRAMHRLHRRFNRMVERGKPRPKVVVAVARELSGFVWAALRKDLA

SEQ ID NO: 107356 - protein, 448 aa, unidentified
MVVRDPALGVPSIKSKGGDTVKKRLKFDHLSTLCVGLDIGSRGNFITALNFDSDRLINMRPVPNTASGVETMELMILAVLVGNPQFKYLLIALESTSFYGVHVANYLSTSDQLKPYDVKVFCLNPKTIANYRKSFTGLGKNDGIDSFLVADYVRAGRIEIDPWRGSQYLALQRLTRQRRHISEAIAREKNYVLNNVFLKFSEFALLSGEDSPVSNKFSATAEAILTEFKTTEDIANAPLEELIDFISASGHGRFSDPDQVASLLQKAARNSYRLDKALYEPITTSIACSFNCIRAFEKEQKALDKAISATVAGLNPTEYLILKSIPGIGPVYAAGILAEIGSVRCFNTNNALAKYSGIIWRDNQSGEFDSEDTPMMKAGNRYLRYYLIQAAGSVVRYCPEYEDYYNKKFAEVPKHQHKRALALTARKLIRLIFGLLDKNQLYSPAKSR

SEQ ID NO: 107357 - protein, 405 aa, unidentified
MAAVMIGVDPHKGSHTAVAIGAAGEPLGEVRVRACPAQAGRLVTWAAAWPERTWAVEGAAGLGHLLARQLVAAGERVVDGQPRLAARVRLLEAGDTNKNDPSDALSVAIAALGPGARRQVRADGHAAVLKVWSTRHRDLGRARNQVACRLHAVLCELVPGGVAREITAAHAARILERAEPSGAVAQARHELAAEFPGDLRRLDTQLRDTTKKLAAAVRASGTTLPQIFGAGPVVTGTITGAVAEVSRFGSRDHFAAWNGTAPVEVSSGNRKVYRLSLRGNRRVNHAIHMAAITQVRHRHSAGRACYDRKLAEGKTHKKALRCLKRRISDAIYARLRADARQAAAASTKDPGGQPGNDTGASAAGSHPEHRLFGQATPESRTILRPVTQSDRTVAKRNSKKSRKTP

SEQ ID NO: 107358 - protein, 339 aa, unidentified
MNVIYLGIDLAKNVFQLCGLNQAGKPVYKKRTDRKTLLQTVANIPACLIGVEASTGPFYWQREFEKLGHKVKVISPQYVKPFVRGQKNDGNDAQAIAIALMQPTMQFVPPKSPEQQDIQALHRARQRIVNHRTATVCQIRGLLLDRGITIGAAVSRVRRAVPLILEDAENGLSVRMRRTIAELYDLFNDLGRRISFFDKEIDAVFRQSEACQRIAKVKGIGPKTATAVVAAIGKGTEFKNGRHFAAWLGLVPRQHSSGDRQVLMNMTKKGDKHLRTLFIHGARAVVRVAANNNEGYLNQWVNQLKERRGFNKTTVAVANKNARIIWSILHNETEYRPAV

SEQ ID NO: 107359 - protein, 481 aa, unidentified
MKIIHFNAAGIDIGAKKVFVAVENQKVVSFFTFTEDFEKLRDYLLKHKIDTVAMEATGVYWVILHDILKEGGIDVWIVDGRQTKQVPGRKTDVKDCQWIQQLHSYGMLSKSYVAEADIKTIRSYTRLREDHIRSASMHINHMQKALTLMNIRLKEVISSTLTHLRKLPKSTRFALDPKGNGLIFRLSPFRVGAKKGEKSILCLICQSRFSQIHGKSGMKIISAILAGERNRDVLVEMCHINIKKEKRDEVYKSLKGKYTEEGLFALKQGYDAYHFYQNQIKECDEKINEVLNKMGNYGKGQPKTKRKPIRHNKPQIKNFGTNMNNIFDSKDATLISGITDYSWLQLLSECGTDLSRWPTEKHYTSWLGLAPGQNNSGSKRKNAKRKGKPSAGQIFRGIAQSIINSKKIALGSFGRRIRARKGPKVANKAVARKLAELYWRVMVKGLEYTEYGIEKYQEQLEQQKIRSFRRLALELNAQVSV

SEQ ID NO: 107360 - protein, 373 aa, unidentified
MNNIITYVGMDTHKKDHKIALHYPGDEQIVQFVVKNTAAEIKKMVKKIKKKASGQVEFCYKAGVCGFTLKRRIEAQDCRCMVIAPSLTPIKPGDHIKTDRRDALKLLAMFKAGLLTEVHAPDTDQEAARELTRCRQTAQENLKRIRHQLLKLIVRHGYVYTDGNHWTQKHLSWLRGLEFDQTLLSNVFDSYFTEMQHCLQRLASLDREVETLAQSDRYKEVVGFLRCFHGIDTLTAMTIIAEIFDFGRFSSPRELMSYLGLAPSESSSGEKQKKGSITKAGNKRVRRLLVETAWHYRHRYNVSKALKQRRAGQPQWAIDIADRAHHRLGKRYWYLVNNGKMPCKATVAIARELSGFIWSVFKEYQARSNKKVA

SEQ ID NO: 107361 - protein, 419 aa, unidentified
MMMSGSSSSPMPDPDAIVTTHVVGIDIGMESCTMSCLTMEKRQLIKPTPFANTVQGFDWLFARLEGLGVAPKQILVGLEATSRYGENLLQALLKRGYQVCLLHPAQMHAFAQQRGLRAKTDQLDATTIARALLSGEARFGYVPSEQVATYRELMRLQHQLSDDVVRYKNEIHALLVVLFPEFTQVFVDPTRSTALAVLKRYPSAQAIAQTDVETLSTFLHELAPHHYGRPTAQELVRLAKASISSGVAVAARASSLRILCDQLEHTQKNLEHLLREIDQLLSQDPKAKGMLGVPEFGPTTVAVLRAELGDLNRFTRIDQVVAYVGLDLQVKQSGKWKGQTKLSKHGSGRVRRILYLAALRSIHLQTSPFGAYYHRLVARGMKKGMAVVAVMRKLLIVAVHLIQTEEDYDPGKVGVQAVS

SEQ ID NO: 107362 - protein, 345 aa, unidentified
MPIVGGLDIHRKQITFDYLDTATGEVRRGQIAPADRVHLRAWLARFAGRDDVAFALEGCTGWRYVAEELAAAGVTAHVAEPADTAFARGRKRHAKTDRTDSRHLRVLLEQGRLPECWIPPAQILECRALLEAYHDLRREHTAWIERIHAVFFHQGAPRLGEGALRTEPGLAALREAAAIHLSPAGQLQVATALDMLAAVEARMDTLRQQLLDAARHLAGARALQARLYGVGPLAGLAMTCWLGGAGRFSSARKAVRFAGLDVTVYSSDGRRSPGHLSRQGPEILRWVAYEAGKTHGRASAPGHDYYAAVKDRTDGKIAALSQARRLIRQACHILAELGDDALTAA

SEQ ID NO: 107363 - protein, 527 aa, unidentified
MGAVARLDHGGSVASEKRHRSDSRESATSHGTRNNVMHERRLVGIDLGVASAHTAQVLRADGTKVCRRSCWPRLDSLQELERAALAGASDSTRLEVVMEATGPAWRPIAVYFVRRGHLVYRVSSAKAHDLRRFLSRHAKSNSIDALTLAMLPIVGPQGLLPLELGSHEQAALDRRVRVCDRLTRLCTVHKTRLKDLVRQLLPLSPLAGDLTNADLAVLLETGADPHHLARLGKARLTRLITRASRGHLGAVRAQHWLDAAGDAIRLFQDHPAVAIQELAEEVKTEARLLKATETELALHAKDRANAYAAADPKGLARSLPGIGEVGAPNLVAAIGRPGRFSHGKQVRSFCGLTPKSSASGQTDRKGQPLTKAGPSRLRTTLVLAADIARKQDPQLARIYYLQMTERGSSHTKALCVVAANLAERAWVVMQRGEPYQIRDTDGRPVSVDEAKAIIADRWTVPEDVRRRRRGLQARAGKAPQQVVARHAKPSAERAATRRPSPEPMVPEAPTPIKDVLPAIAERLGIPS

SEQ ID NO: 107364 - protein, 412 aa, unidentified
MQTLVEVGCGLDVHQTTVVACLLRVRRDWRVDKQLRTFGTTTRELVQLRSWLVAEGCTHVAMESTGVYWKPVYAVLEGDELEIIVANAQQVKKVPGRKTDVKDAEWIADLLCHGLLRPSFVPPLPIRELRDLTRYRRKLVESRSAERNRSLKLLESANIKLASVATDVFGLSGRLMLEALIADKTSLSEMAGLAKGKLRRKIPQLELALEGKLQEHHRFLLRLQCSRLEAVEKDLAILEQRIQQKLEPYAAQLALLQEIPGIDLTLASVIIAELGVDMSTFQSVSQLASWAGVCPGNNESAGKRKSSRVPKGNVYLKTALVEAANAAARVKGTYLRDKFYRLKARRGYKRAAVAIAHKILVSIYHMLSQNVSYNDLGDLYLDKLNTHHVTRNLVRRLERLGTVTLSPQPTAA

SEQ ID NO: 107365 - protein, 429 aa, unidentified
MSSIENSNPNPLPAWQAAPAPEAWIGLDWGHKQHAFALQDRSGHSERGPLVHTSENLHQWLRQIGRRYGGRPVALAIEASRGAVIHALLNYAWLTIYPINPITSARYRVAFTPSGAKDDQPDADVLLELVRDHAAKLRPLEVQDPQTVKLTELVQVRRDIVDRRTQVLNQTTSLLKTYYPQALELAGDLNTDMALDFLSRWPDLISLKAAKPATLKRFYYQHNVRSTEVVAQRLEFIQKAMALTSEECRISVAVLQVRYLVDQLRAFRKHIALFDEEIKTAFRAHPEAGLYRDLPGAGPQLAPRLCVAFGTLRTTYPDPASLQKNAGVAPVRVKSGNQLWTHWRWQAPKFLRQTFVEWAGQTVVYCPWAAHYYERMKKKGKKHAAILRALAFKWIRILWKCWKDRKPYDQAAYLKQLNHRKSPNAVAAT

SEQ ID NO: 107366 - protein, 313 aa, unidentified
MSQPNPLCVGIAASSDVAQFTVSNDSDGFNAIITGLRRHSVALVLMEATGGLEVAVACSLQAEGFEVAVVNPRQARDFARAMGYLAKTDRIDARVLTQMAEVINRHPERKRFIRALPDAERQALAAMVVRRRQLIAMLVAERNRLHPFHPQNKKSINTIIKALEDELVRLEKEMDSHIRNHFKEIAERLSSIKGVGTMTVSAMLAEIPELGTLSRREISALIGVAPVNRDSGTMRGRRTIFGGRAGVRSALYMAALVATRFNPVIKTFYVRLLAAGKAKKVALVACMRKLLTILNAMLRKNEEWDESYHHVAP

SEQ ID NO: 107367 - protein, 410 aa, unidentified
MEVLYPRCAGLDVHKKTVVACVRIQQGATVEREVRTFETTTSGLLALSAWLSEKGCTLVAMEATGVYWKPVWHVLADGEFELLLANAAHVKNVPGRKTDVNDATWLSELAAHGLIRGSFVPDRPTQELRSLLRTRKQLVRERSSHTQRLHKTLEDANIKLDSVISDVLGVSGRRMIEAMIAGQTDPAALASLADRRIKATPQELREALRGRLTPHHRFMLQLHLEQVDALDRAIARIDQEVEADLDSFREATQIVRTIPGFDDLSAQSVLSEIGIDMSRYPSDGHLLSWACMCPRNDESAGKRRSTRMRKGSRWLKATLFSCAWAAARTKGCYFQAQFHRIKARRGAKKAIGAVAASLLRTIYHMLKDGTLYQDLGPDHFDRRHKAASTRRLVQRLQNLGFAVQLTPATA

SEQ ID NO: 107368 - protein, 387 aa, unidentified
MPQSKRPAPTSTTLNYDSTIIGALETSEKKWVLAVQLPGVKRHTRHVLEPTGKELVLLIERLKSRCAAAGHPVGRVILTYEAGREAFWLARFLVRRGIEVHVMQPSSLPVDRRARRAKTDVIDVEMLLRTLMAWLRGEPRVCSMVPIPNEADEEARRAHREREDLTRERVSIVNKIDAILATLGVKGYRALMTNRRQQLAALRQPDGNPVPQAARARIERLLDRLELVLRQIKEVEVARDAVLKKPAPANEPERMIRSLVNLRSIGSEFATILVREAFVRPFANRRALGSYVGLAGTPFSSGNSEREQGISKDGNRRVRKAMIELAWLWLRWQPDSALSAWFRERVGKAGGRIRKIMIVALARKLLVALWRYVRDGVIPERAKMKTA

SEQ ID NO: 107369 - protein, 371 aa, unidentified
MADYREAFVGIDVAKLKNAIAVAESGREGEVRYFGEVDASYASMRRIIQRIAAKFDRVHFCYEAGPTGYGLHRLIQSLGHECMVVAPSLIPRKPGDRVKTNRRDALALARLLRAGELTEVWVPDEGHEAMRDLVRARAAAVETPRVHRQQISAFMLKHGRIYPRKKGWTMRYLCWLQEQQFDHPAHQIALQEMVEAVRVSKERVERLEKVIEEFVPNWSLAPVVRSLQTLRGVDLIVAVTFATEVGDVSRFESPRQLMGYLGLVPGERSTGETVRRGAITKAGNGRVRHMLVESAWTYRHPPKVGARKLYRLEQAPPKVREIAWKAQSRLTARYRMLTGRGKRTTVVCTAIARELTGFMWAVAREAQAIRL

SEQ ID NO: 107370 - protein, 413 aa, unidentified
MERLLERCGALDVHQASVSACVRVPGEGDQRREFSERFGTTTPDLLALCDWLRGHGVTHVAMEGTGVYWKPVYYALEGDFELLLVNAAHVKQVPGRKTDTKDAAWLCQLLECGLLRASFVPPRPIRELRDLTRYRKTLIADRAAEANRLHKVLEDAGVKLSSIASNVLGVSGRLMLEALCQGSNDPVALAELARGRLRSKLPALRRALESRFREHHAFLVTQILAHLDYLDEAIAACSARIEEQIAPFAPALTLLQSIPGVGRRNAEVFVAEIGVEMSVFPSSRHLASWAKLAPGNNESAGKRKSGSTGRGSPWLRSALVESALAATRTRGYLRAKYWRIRQRRGHQRAVIAVAHAILEIGYQMLSTGELYRELGDDFFERRDNQRATQRHLRALERLGYRVSVEPAPEPEAA

SEQ ID NO: 107371 - protein, 376 aa, unidentified
MKHVRFVGLDVHAETIAVAVAEPAGEVRSLGVIPNRSEAIRKLVKKLGPAEELRVCYEAGPTGYVVYWELTRLGVKCEVVAPTLVPVKAGDRVKTDRRDALKLARSYRAGDLTAVWVPDAAHEALRDLVRAREAAKKDQLRARHRLGKFLLRHGRRPATTMNAWTQRHLTWVKTVHFAHAAQDVTLLDYLNEVEHMADRLARLERAIDDAVTAAPEPMRAVIEALQALRGIAQVSAVTIVAEVGTLSRFARPRQLMGYSGAVASEDTSGERTRRGGITKTGNAHLRRIVIEAAWAYQHRPSIGRALRQRQTTVTPEVKELAWKAQHRLHARYRHLTAKGKCRQEVVTAVSRELLGFIWAIGVKVETQTRRQPSAAA

SEQ ID NO: 107372 - protein, 366 aa, unidentified
MKKLTTTTMQRIHKQSEGLTIGLDLGDRSSFYCVLDEKGDVLLEGKVSTTPKAMRETFGAMPLSRIALETGTHSPWVSRLLSELGHEAIVAHARNVRLIGESRRKDDRLDAMTLARLVRVDPQLLRPVKHRSAEAQADLTVIRARAALVRTRTLLVNAARGLTKAYGERLRGCNARGMKPKAAQDLSPELKSALNPLMREIESLSERISEYDQMLQSMAVNRYPEAERLKQIKGVGTLIALTYMLTLEDPHRFRKSRDAACYVGLQPGRRNSGQSEPQMHLSKEGDPYLRTLMVQAAHHILGPWGVDSDLRRWGLQLAEHGGKRGKKRATVAVARKLAVLLHRLWVSGDEYVPLRQNRSTTQLIAA

SEQ ID NO: 107373 - protein, 478 aa, unidentified
MQDRRLVGIDLGITSAHTVRVLAGDGGLVCRRKAVPTVESLGEVEQAALAGAAAGTRLEVVVEPTGPAWLPIAVFFAARGHTVYRVSSAKAHDLRRFLRRHAKSNGIDADTLARLPLVDPAGLHPLQLPDAARAALDRRVRACDRLTRQAADHKRRIKGLVRQLLPASPLVGELGQADLAVLERWADPQALVAVGRARLQQVLASASAGQQGAQRAEQWLAAAHAALELYGDHPAIAWQDLAAEVHSEVRLLRATQAELAAHAREREACYRRVDPAALARSLPGLATIGGPALVATMGKASRFATAGKFRCFTGLAPKASETGQTDRKGQPISKAGNRLLRTTLVRAADHARRQDPQLARIYWTQMVQRGKDHLGAVCVVAAHLAERAWTVMDRATPYVICDTDATPVTPAQAKQIIAERWTVPEEVRRRRRHKKGKAPQQVLQGHVHGAQGATRRPSPSSATLGQPPSRVKPTQPQP

SEQ ID NO: 107374 - protein, 419 aa, unidentified
MSFKILKFNCCGLDVHKTWIYACIGITDSNNRTEYKQARFSSFTKGLNELCDWLDKYNCKDVCMESTGKYWIPVFNILEQRSFWVTLSHPKYTKPMKGNKTDRKDAKWICDLYMCGMVKPSFIPPADIRELRDLVRYRFKLTCMITGEKNRAQNCLTVSNLKLDDVFSDVFGKSSRSITEQILQHPGEIFDVAPFIHGRCKTPIEEIQAAVDGAISKEQAVKLRQCLDHIDELNKHISEVEQEILCLSDKYEAALNLIRTVPGFNKNPMTAIQVLSEIGCDMSVFPTDKHLVSWAGCCPRNDKSDRKIKSTRISRAGSYFKPVLVQVANALIKSKKYPEFITRYKRIKARRGHKKAIIAICRMILTAIWHILSDLKPYTPEGFLESRPVKEEKILTTSQALNLLKLRGYVIKDDPLPTS

SEQ ID NO: 107375 - protein, 327 aa, unidentified
MYVCILDQAGTILVHKNVPATPEAFLRVIAPYRDDVVVAVECMFTWYWLADLCAQEGIAFVLGHALYMKAIHGGKAKNDKIDAHKIAVLLRGGMLPRAYVYPPEMRATRDLLRRRCHLMRKRAELLAHIQNTNSQYNLPEFGKKLAYKANREGVEEHFPDPSVRKTIEIDVALIDHYDKLLREVELYITRTAKGHDAQSFSRLQSVPGIGQILALVILYEIQDITRFPRVQDFLSYGRLVKCMKESAGKRLGPSGKKIGNPQLKWAFSEAAVLFLRQNKLGQDYFAKLERKHGKGKALTVLAQKLARAVYFMLTRHQAFDLTRFVTA

SEQ ID NO: 107376 - protein, 333 aa, unidentified
MSLNVGIDVGSKELVVVVRKKAKPSKPQTFENSAKGHQALCRQLHGRRPVQVCLEATGVYHLDAAVALSLVPNVQLMVVNPKAAKRFAEATMTRTKTDAVDAGVLAEFAERMEFVPWQPPAADILALRACSRRLIALTEQRAKAKNQLHALQVTSSTPAFVVEDAKLSVQQLETQIEGMKQHTLDLISEAPFLKETMDLLLSVKGIGETSAIQLMGELLVLPNDMTNRQWVAMAGLDPRHFSSGTSVNKQTRISKVGNRFLRMALYMPALSAANHSIHVRAYYQHLINDNGLKKPQALCAVMRKLLHAIHGMLATRSPFDATRFYDLRSQTAS

SEQ ID NO: 107377 - protein, 344 aa, unidentified
MSKHAVRGGDVSRLLERFLQLREKARARTGKVFPLIVIQEAGLDGFWIDRVLQNEGIESHVVDPASIATSRRRRRAKTDKIDGETLVRSLLAYKRGEPRVCSMVKAPTPEEEDQRRLCRERKVLTAERVLHVNRIKGLLFCQGICGYEPLRRDRRDRLEELQTGDGRPLPPHLKAQVERELDRLELLLKQIKTVEGERDALLAVAITSMPAPAAMLLDIKGIGPEFAAVLWSEGLFRHFDNRRQVAAYAGLAPTPWQSGAIDREQGVSKAGNPRLRTTLIQLAWLWLRNQPQSALTIWFHERVLRNGGRLRKTTIVALARKLLVALWKYVTTGVVIEGATMKAA

SEQ ID NO: 107378 - protein, 321 aa, unidentified
MMDAVLGIDIGKAKFHVTLRFGDGTRRRKACANSPAGCAELLTWMARHGAGRVHACLEATGAYGELLATTLVDAGHQVSILNPAIIHHYAKSRLSRAKTDPVDADLIADYAATEHPPLWTPLAPELRELQALVRRLDALIGMQTDERNRAQAGALTPAVQQSIAAVLGYLEAQIDTVRQQIRQHMDTHPGLRAQRDLLTTIPGIGEATAALLLAELFNKTFASARQAAAFAGVVPRPHDSGLHEGRRVMCKLGPGRLRKGLYFPAIAAIRFNPSLQPLARRLRGAGKPPMLIIGAAMRKLIHLAFGVLKSRRAYDPDLAKA

SEQ ID NO: 107379 - protein, 346 aa, unidentified
MTHHRRRRSPKPRTSPQALERLHPHAAGIDCGSAEHFVAVPPDRDPIAVRSFPTFTADLHRLADWLTACRVTHVAMEATGVYWKPVWHVLEELFTLVLANAMHIRNVPGRKSDMNDATWIADLLAHGLIRASFVPPQPIQELSDLTLVQHTQRIQAVLEEANVKLSSVITDVLGVSGRRILQAIVAGETDPEKLSELGGTRLAATCAVLADALRGRIRSHHRFLIGQHLKTIEQLEETIETFDARIEAALEPFRDAIERLKEVPGLSGISAQILIAEIGTDMRQFPTAGHLLSWAGLIPRLDESAGKRRSTRVRKGAPWLKPVLVSVPGPRLARTTTATLRPSFCG

SEQ ID NO: 107380 - protein, 366 aa, unidentified
MEKTSTVRVNGNMIFKGHKLTIGVDLGDRWSNYCVLDEAGEILLEQKVATTPEAMQQIFEKIPRGLIAMETGTHSPWVSRLLRELEHQVLVAHAQKVQLITKSKRKDDRHDARTLARLARIDPELLGPVRHRSAKAQIHLTVIRARAELVSARTALVNAARGLAKSYGERLRKCGTEQVSRELAAELSAELREVLEPLLKEIESLNERIKEYDARMDKIARESYPQVALLKQVKGVGTQIALTYVLTLDDPHRFPKSREVGCFLGLRPGRRDSGESQPQMHISKEGDPYLRTMLVQGAHYILGPFGEDSDLRRWGLRLAERGGKNAKKRAVVAVARKLAVLLHRLWVSGEVYEPLRNSHKAMRAAA

SEQ ID NO: 107381 - protein, 337 aa, unidentified
MRIIRIGLDTAKHVFQVHGVDETETAVLRAQLRRGAVAKFFAKLPPSRIGLEACGASHHWARLLRGLGHEVVLLPPQYIKPYIKRGKNDAIDAAAICEAMSRPGMRFVPIKSAESQAALMLLRVRDLLIKQRTMLSNAMRGHAAEFGVVAAKGPLGVAELLQHAHSEAAGVPALAQELLALLADQLEAIAVRLKALEAQLLAWHRQDPVSRCLATQPGIGPIAAVSFTLKVPDPKMFRSGRHFAAWLGLTPKENSTGGRRRAGRISCQGDQSLRKLLVLGATAVIQFAKPGRGSPWLINLLARRPKKLAAVALANKMARVLWAMMASGEVYRRPQPA

SEQ ID NO: 107382 - protein, 407 aa, unidentified
MRLFAGDDWAEDHHDVEVMDEAGKVRLPEGVAGIAQLHELIGRHLGEDADAAEVIVGIETDHGPWVTALIAAGYTVFPVNPLQASRYRERHGVSGAKSDGADAHMLADMVRTDSRQLRPAAGDSAEAEGVKVLARTHKTLIWERTRAVQRLRHQLREYFPAALEAFEDLDAGDTLELLGKAPDPARAAKLTRAQVSAALKRARRRNIPDRATAILAAMHGGQLGQPPALTAAYAATARALIAGIVTLNEQVKGLQGQVEENFGRHPDAEIYRSQPGMVAILGARVLGEFGDAPHRYADGKARRNYAATSPITRASGKKKVVAARFIHNDRLVDALNAQAFASLNASPGARALYDGLRARGIEHNDALRRVANRLVGILHGCLKTRTLYDEATAWSHRENLPQSSVAA

SEQ ID NO: 107383 - protein, 344 aa, unidentified
MTYYAALDVSLRSVCLCIVNAEGNYCFEGKLPSEVEDIARCLEGFDGEIELVGFEAGMLSQYLSYGLTAAGFNVVCLESHHVKQSLKAMRNKTDRNDARGISQLLRTGWYQPVHVKSVESHHVRAMLSSRRVILRKCIDLENELRGLLRIFGIKLPSKVSHGAFDEVVRKPIEANPALTRALIPMLDLRGTLYGAYMKLDKEVRAMAHEDAVCRRFMTVPGVGAITALTFKAGVDDPTRFKNSRLVGAHFGLTPKRHQSGEVDYDGRISRAGDAEVRCALYVAAHVLVTRHSEWSSLKAWGVRLTRTKGHRKATIAVARKLAVILHRMWIDDTDFRWHAENRAA

SEQ ID NO: 107384 - protein, 391 aa, unidentified
MFAGIDVASETHTLARLDAAGAPIGRPIPITEDRAGYDALLAALGTPPVLVVIEATGHYWKNLFAALTAAGHEVALVNPLVARRFQQAGLERTKTDAIDATGLARLAYEKRPAPTRLHDEVAEALRELVRHRDRLRQDFDDRVRQLHRLVDLGFPEFTRYVRTLDSMLATCLLAEYPTAQAFARATPRRLAKLRYDGRHLVGPELATQLIEAAKRSIGQHHGPAYALQARHICQDLDLWRRRLADIERDIEGLLDTHEVGRLLTTIDGIGPQTAARIIAEVGNPARFHSPGALAAHLGVVPALRQSGKRNPARAATTHFGNARLRTALWMPTLTAVRRNPWLRAFYEHLRAAGKPPKLALIAAMRKLAIAVYVTAKNRRPFVSTAEQARAA

SEQ ID NO: 107385 - protein, 388 aa, unidentified
MRPISQTTTQKLSHCRRHDATLYASLELSQATWLVTSLSPGSEKMSKHSTLGGDRAALLGLLRRLQLRAERLAGGPVAIVVIQEAGLDGFWVHRLLSANGIESYVVDPASIAVPRRRRRAKTDAIDGETLLRTLLAWQRGEPRVCAMVIPPTPEQEDRRRTSRERAVLLQERVRHVNRVKGLLASQGITHYEPLHKDRRTHLAALETGDGQPLPLRLKAELLREIELIELLIRQIAEVEVERDTAVELDAEGTQSPIVLLARLKAIGPQIAAVLYLEGLYRSFANRREVAAYAGLVPTPWRSGTIDREQGISKAGNRRLRHIMIELAWLWVRHQPDSALSRWFRARVGTERGRIRRIAIVALARKLLIALWRYVTHGEVPEGAVLKAA

SEQ ID NO: 107386 - protein, 390 aa, unidentified
MGCYVGVDVAKHFHVAAIVDEAGQVLHTLHFDNNLTGFQRFDQILSSEMLVALEATGHYGNALRDWLLSCGFEVHVFNPLKTNRFRDFNIQWRKNDERDAIAIAHLLRLGERQLYHPFPPKSRALRQLVRHRALLVQARARAKNQLRAMLDEVFPEYQACALFSDVFGSTSLALLSHYPSPAHLIGLSEAQLASFLSQHSQGRVKAQRAQLILEAARQSIGSPAAGEAYAPILPAFVAGYQALTAQIDQSTTQIEAQLAQVDQTLTTIPGIGPVLAATILSEIGHIDRFPSADHLVSFCGLALSESQSGQSRTFRFLSRRGSARLRSAFFQAALVAVKYDPHLKSYYQRQLDRGRTKRCAVLSAARKLVRICYALLKSGQPYLAPGAAAD

SEQ ID NO: 107387 - protein, 351 aa, unidentified
MDTATRTPPPPADTDVAAAPAAAAPAVPSLAVGIDVSKDTLDLARSDSSHVATFANDPAGVAAVVDLLAAADAPAPAVIVVEATGGLERPLVDALLDAGLPVARVHPGRVRHLARGLGVLAKTDAAADARVLARFGQLAAPRLAERHSRAADDLRALVVCRRQLTVTRTQQSNRLGATAGSKPARRAIEAVIKTLDRRVGRLDKQIRDLIDADDELARLDGLLQTVPGVGPTLSATLAAELTELGTADRRQVAALAGVAPVNADSGKTSGTRSIRGGRAAVRCTPYMAAVAASRFNPVIRAFSDRLRAAGKPNKVRIVACMRKLLTLLNAMARENLTWDQLDVVKKLATNP

SEQ ID NO: 107388 - protein, 419 aa, unidentified
MRVKAFRLGEALDWAAGQARVKGFTAVTVACEPTGPRWLQVQRLCAERGLPMVCVQPLVSHIARQQQDFTSHKTDEADCVMIARLAAELHCYVPEELDEVWADLRHLGRRRVALITSGTASVQRVRDFLSVAWPVAAEACAQPFNSVTWLAAMQVVTSRCGGEPENLAALGLEAFTALVRSAVPGWGGQRVCGPVCRAVFTALTSTEGVVRAHRRGLLRRIAAELGDLQRARAQQRETEAAMVACLAGLGLARLGEIPGLTAAGAAAILAETGDPNRYDTSSSLVKHAGLSPSDNASGAFDGEAHISRRGRPGLRLTVWRAVWPMLIHNPVMAAKYAAMTQAADQAAAEAQAGGTGRAGHATSAAEAARRRRAKARVACAAALLRWIYSLVVHGTCWDPAVAAGRKDAQAAPSYQPEAA

SEQ ID NO: 107389 - protein, 348 aa, unidentified
MLYSGIDLHKRTLAIHTVDAAGALVRKADLPTHRGSITASFATLPGPHQAVVECTGMWYWLRDLLVPQGIDLRLGHAKSLKAISYAKVKTDAVDAATLAQLLRVQLIPEAHMISDAHREIRDVLRTRLLLVSRTLRCRRSVGALLEKYNVATPAELPELPRLQAELHAAQRALLVTRVRRLEHQLRDRVLATPDAQRLVWVPGIGKMVAYTLLLEIDDIRRFPTVRHFHSYCRLVPGANDSGGKARHQRSRDGNRYLKLAFHHAAVRAIQYFTEVRTEFQRLQRRKGKPIARALIAKELATIVYAMLSQEEPFNGKFYGHILTRTKRCTWPRLASLPRLPDASKASHP

SEQ ID NO: 107390 - protein, 416 aa, unidentified
MKKGQNTRGYQRYMALDIHREYILVGAQNAEQDWVLTPRRVSVEKFAEWAKKNIRAGDIVVLETTTNVWTIYDVVAPLASRVLVANAAEVGEIANARVKTDKEDVKRLLKLLIGGIVPEVWVPPLHVRELRAFTSYRGRLVKTGVMIRNRLQSLLHKHNLMLSEAGLLDQAWWEAQKNISPLEKMQIRQELVLLQEVEKLKVAVDEELQRQSTSSTWAKQALQIMQLPGVGYIVAMTVLAAIGDISRFENAKQLVGYAGIGAGVHDSGKTHKEKKITKKGRRELRWAMVEAAWRAVRMSPFWKEEFEKHLKRMRKPNQAIVVIARKLLVALWHVLSKEETDIHASEEDLAYKMLLLSWSLSEDVRLGLTYKQFAKYALMKLGVENDITRFVRRNVPRRLAPREEVLARMTELDIAA

SEQ ID NO: 107391 - protein, 344 aa, unidentified
MKCKLIAIDLAKSVFQVCGVNKHLTPLFNDKLSRRTFLKFMAKQPATRVFMEACYSSNYWARELVKLGHDVNLIPAQHVKPFVRGNKNDRNDAFAIAEASQRPYIRFVPIKTTHQQEIGCLHRIRERLIKQKTAISNQTRGLLSEFGVIFMPGKAEFLAGLKWFVADEKHSERLRTMMSNMLDEYQTILKRILVLEKELHQFIDLCPNGKILLSIPGIGFINASAILAAIDKGQAFHSPREFAVWLGLTPQQYASGNNSRMGGITKRGDRYLRKQLIHGARTVVCHAQKKTDRLNVWATQLRERKSFNQTVVAMAHRLARLIWILLQRQELYTPQQAPQLAEGC

SEQ ID NO: 107392 - protein, 389 aa, unidentified
MFFLGIDIGKNSHVASLIDDKKKVIFKAFSFSNSTEGASSLIKKLEPFCDSLDIAMEATGHYWINLFSFLLQKNFSVHLINPIQTDGWRNSTEIRKRKNDTIDSILIADLLRYGDFIESSLSNEDYLSLKNLTRFRSYLISSTGDLKRKTIALLDQVFPEYEKCFSNVFGKTSKEILLSFTTPQEFENISSSKLSKVLENITMKKFAKKKIEELSEKAKTTIGVKFCLDSFSLQIKMLIEQISFIETQVESIEEEISTIMTKLNSPITTIPGIGPVIGATILGELGDISRFSNASKIVAYAGLDSVVSQSGNYEAKSMSISKRGSSYLRKVLFQAALIAEFCDPVFSDYYQKKIAQGKHHLVATNAVARKLCYTIFAVLTKNEAYKIQQ

SEQ ID NO: 107393 - protein, 314 aa, unidentified
MEQGKSNTKIAGVDVGKAFLDVAIHGSADSQRVANAPEGLSELVSWLQAREVGRVGLEATGGYERAARSALEAAGFEVVVHQPIEVRLFAKLKRLKAKNDRIDAALIAAATAQVDALRAAQDPRLASLAERLTAYEQISDKAAELKTFMEHVTLKDVAQSFRAQIKALERLKLKLIKSVLDQIRAHADLAERLKLLLSLPGVGPVVASSLVVRMPELGSMSRGQAASLIGVAPFDRDSGQFKGMRFIGGGRSRPRRLLYLAALSAKRHDPGFKAFAERLQSRAKPPKVIVVAVMRKLIEAANLVLGRGQPWTRE

SEQ ID NO: 107394 - protein, 357 aa, unidentified
MLAELIDAVVGVDTHRDTHQVEIAYPTGAPIATTAISNDSTGYAELLAWIFDHSPGPRLAVSIEGTRSYGVGLARAVAAAGLLVIECEQPNRKARRGRGKSDPIDAHLAVLTALRCDTERLPTPRADGDREALRILLAARHDLTNANTAQTNRLRALLLGGDDTDRQTARGALTDTVLATLIRRRSPRDGNRAQAVRHGEVRRLAIAVRDNGRELQANRAQLQATVDDLAPGLTDRRGIGPVSAAQAIVSFSHPGRCRSDAAFAALAGTSPLEASSGQTVRHRLNRGGDRNLNHAVHTIALTRMRCCQRTRTYVARRTAEGKTTREIRRCLKRYITRELFRTLTTTMTATDEPCTTS

SEQ ID NO: 107395 - protein, 351 aa, unidentified
MKIVFPTCCGVDVHKSFLVATIIKTPQNSLQQSYQKKRFSTFNSDLNHFADWLRENDCLDVCMESTGKYWVPVFNILEKHGIRVVIANPKWVKAVKGNKDDTKDSKWIGDLFRIGLVKSSFIPNKEICILRELTRYRYKLISMKSSEKNRFQNAFTVCNVALDSVVSDMFGKSATAITDYLTSDVEFDAQHCISLLQRSLKKKAPAVLAAVEGHEIAPEQKTRIGIVRDHLHYIDKLVERVDDCVEGMVQKYEGAITLLRTIPGVDRSSAITILSEIGIDMAQFGSSKRLCCWAGLTPGNNESAGKKKSVRISRAGVYLKPALVQAAHAAVKDKSSTYYAVKYNRLSSTVR

SEQ ID NO: 107396 - protein, 362 aa, unidentified
MMKLKYSICCGLDVHKNVIVATIVTTNKDGISEYKQKSFSTINSDIQKFHNWLIENNCYHVCMESTGKYWIPIFNYLENDIDVCLTHPKYVKAIKGKKTDKKDSKWIADLYKFNLVRCSFIPPKDFRQLRELSRYRFKLVCMKSSEKNRIQNCMTVSNVGIASVLSDPFGKTATEIISYLLEHTADSMDEKAVRKLIKKGAKSKSDEIIEAIKGYTIETDQAKKLELARGHLEYLDDMITQTEVELYVRIKPYYEFVEFVSTMPGMTELSSTIVLAETGVDMDIFDDAKHLCSWCGLSPANNESAGKKKSVRIAKAGDYLKPMMVQCALAAIKSKKSLILQSNMVESKSDVDTKRQSLPLQE

SEQ ID NO: 107397 - protein, 390 aa, unidentified
MQALYPRPDEHAAVRTDLKAIFVSLELSRSTWVITSLSPGGGEKMSKHAVPSGDIPALLARLSQLKEKARARTGQVFPIIVIQEAGLDGFWIHRVLQQEGIESHVVDPASIATSRRRRRAKTDKIDGEALVRALLAYKRGEPRVCAMVQAPTPHEEDRRRISRERETLTAERVQHVNRIKGLLFAQGISDYEPLHRNRRERLEELITGDGRPLPEGLKAQIRRELDRLELLIEQVKAVEAERDALLAQAQASSGVPAPAAQLLTLRGIGPEAAATLWTEGLFRTFNNRKQVAAYAGLAPTPWQSGSVHRDQGVSKAGNPRLRTTMIQIAWLWLRHQPQSALAVWYRERIKRKGGRLGKTTIVALARKLLVALWKYATAGVLIEGAVLKQA

SEQ ID NO: 107398 - protein, 367 aa, unidentified
MSSVASQAGLIHLGMDTSKNTIVVATLLPGEDSPATDRIANEEAAIRRLVGRFADRSVLRAWYEAGPGGYELWRLLASMGVACQVVAPSLIPKGGSDKVKTDKRDSRRLARLGRAGELTPVRVPSPAEEAVRDLARARDAMLADRKRAQQRLTAVLMRHGRIWRGATYWTAAHRAWIAAQRFGEPALAAAIGYYRATLAVREAELAALEAELMPWAAREPLAGPVARLGCYRGIAELGALTLAAEVAGWRRFPAARAFMSYTGLVPAEYSSGERTRRGHITKAGSEPVRTALTEAAWSYRHAPAIGAGLRRRQAGAAPDTLARSWTAQRRLHDRYVHLVHHGGKAAPEAAVAVARELAGFVWAEMTA

SEQ ID NO: 107399 - protein, 310 aa, unidentified
MEQVFIGIDVAKDRLDVHVRPAGEAFTVARDGEGVAGLAERLRALAPALIVSEATGGFEQVVAGALAGAGLPVVVVNPRQIRDFARALGRLAKTDRIDAETIALFAERVRPEVRPLADGQARLLGELVARRRQVIEMIAAEGNRARQVEARRVRKRIERHRAVLQEELSEIEAELDDTIRGSSIWREKDDLLQSVPGVGNALARTLIAELPELGTLNRKKIAALVGVAPFNRDSGTLRGRRTVWGGRAAIRATLYMAALVASRHNPVIAAFYKRLLAAGKAKKLALTACMRKLLTILNAMLRDKKPWALA

SEQ ID NO: 107400 - protein, 455 aa, unidentified
MSSYEDFTIRTAWIKAQRVSLSYLRRQLTMKREENSKTDEPIELAAYIGLDWADKQQAISLRAAGSKKVERLKLANKPEAIMEWITELRTRFKGAKVGIALEQSKGSVISALMSHEFIVLYPVNPSTLAKYRAAFRPSGAKDDPSDADYLEELVELHRNKLTAWLPEDEEIRLLKMLTEGRRKFVDQKTKLTNQLIALLKQYYPQAIELAGDLDTVRGCAFLGKWTTLDDLKKAGSEDLTRFYEEQGFRGKDKIQERVQRVMRAVPLTTDRAIVEASAIFVKVIVGQLQPLIAMIHEIDRRIDEAFKKNPDREIFISFPGAGKVLAPRLSAVVGSDRDKFESALELQSLSGIAPVTESSGDSLWVHKRWACNHFVRQTFHEFAGRSLSQSRWARAFYSELRKRGKAHHAAVRALAYKWIRIIYRCWKNKAPYSEEKYIESLKRRGSPLVALLAVA

SEQ ID NO: 107401 - protein, 438 aa, unidentified
MKVMYERVAGIDVHKDMIKVAVRSPGDKPWTRKTEILTFRTFYGVLRAMARELRRRGVTHVVMEASGVYTEPVYYALCEEDFTEVAVVNPAHAKALKGHKTDAKDCARLAELFECGLLQGSYIPAAGLKEMRDLSRYRMKTVQARTSEIQRLAKALESAGIKLGSVASEITGKGPVAMIEALISGERRGAVMADLAKGRARTAGKLADLSMALEGRFTDHHALMCRLHLDRITALDAAVADLEARIAATAADWQREIGLLKTIPGFGDIVAWAWIAEIGPAPHQWFASHHKLASWVSLTPGNNVSAGKRKYGRTGDAGTYIKPMLIQAAWAAIQVRGRLQARYNRLVRRLGGPKNPAAKKKAIVAIAHTLLKIACTVLKTGTGYQEPGADFYTRRESPGHRQAWLERQIQKLHPGCTVTITISPSPDPAPEAALPPGA

SEQ ID NO: 107402 - protein, 394 aa, unidentified
MRFVGIDVAAERHVVAMVDETEAVQLKPTAFTEDAEGYQKLLSLLGPPADTLVAMEATGHYWKNLFAALVAADFAVALLNPLRTRRFAGEELQRTQTDAIDALGIARFAAQKRPAPSRLPERATEELRELVRFRDRLVQDFGDRVRQLHRLVDLGFPEFTRYVRDLGSELATALLRDYPTAAAFQGISPRRLAGLRYDGRHRVGDALATALRAAAARSVGHHHGEAYQIQARYTCEDLGVLRRRLRTLERDIDRLLDHHEVGRLLTTIEGIGPQTSARLVATFGDFTGFRSGAALAAYVGVIPALRQSGKRTSPRASLTPLGAAGLRAKLWMPVLTAVRKNPWLRAYYERLIARGKLPKVALVASMRKLLHAVYSVAIHRRPFVANLPTAEAHP

SEQ ID NO: 107403 - protein, 414 aa, unidentified
MEQIHDRVAGLDVHRDVVVACARVPGARGGTVTEKERFQTTTGALARLAGWLADRYVTLVAMEATGVYWKPVYYALEDSFEVWLCNAHHVKNVPGRKTDMSDAEWLADVAAHGMIRPSFVPPPAIRELRELTRYRKTQTDARVAEIQRLEKVLQDAGVKLTSVASKVLTQSGRLMVEALIDGQRDPAELANLAKGKLRPKIPELTEALNAHFGAHHAVAAARILAHVDFLDATIKALTEQIDVRTKPYQAARELLMPVPGFDRLTIDTVIAETGADMSKFPGPGHLAKWAGVCPGNHESAGKRRRVGVTPGNPWLRRALVEAARAAARTKGSYFGAQYRQIAKRRGPNKAAVAVAHSLTDLIWHMLSTGEVFHDLGDDYFQRRRDPQRETRRLVAQLEQLGFQVALTTLQDPAA

SEQ ID NO: 107404 - protein, 364 aa, unidentified
MFTERTSVGLDVHARSVAAAAIDGVTGELFQTRLTPSYAHIRSWVEGLPGPVAVAYEAGPTGFGLYRSLSEAGIRCEVAAPSKLQRPAGDRVKTDAKDALHLTRLLRLDEITPVAIPTVDQEAARDLVRAREAARGDLMRARHRLSKLLLRHGMVYDGGRAWTNAHDLWLRREALPALTSPATRLAFDSNYETVLAVKARRDRLDDAIEAMAADSEFTPVVRRLGCLRGVGTLTGLALAVEIGDWHRLTGASIASYVGLTPAEHSSGASRSQGPITKTGNGHVRRLLVEAAWHHRPRYHIGPTMRARWDLAPAAARARGDEGNRRLHHRWVGFLDRRKRATVANVAIARELAGWCWSLAVLEDG

SEQ ID NO: 107405 - protein, 344 aa, unidentified
MQITTIGLDLAKHVFQVHGVDATGAVGVRKALRRAQVLPFFAKLPPCLVGIEACGTSHYWARELIRLGHEVRLMPPAYVKPYVKRGKTDAADAEAICEAVTRPTMRFVAVKSREQQAALSMHRARNLLVKQRTQLVNMIRGLLAEFGIDIQEGLERALLMARQVVEGATPDVPEAAVKIVGMLSQQALDTHAQLREIDRALFALQRTDDMARRLATIPGIGPVGATALAASITAPGQFRSGRQFAAWLGLTPLQNSSGGKEKLGRITKMGDKYLRKLLVVGATSLVRRARQKPETMDPRFVALLARKPVRVATVAMANKMARIAWAVMTRGEVYKTSHVPALAA

SEQ ID NO: 107406 - protein, 523 aa, unidentified
MNTTHYIGFDVHKKTISFCVKTAAGEIVEEGSVPAQRSVLRQWASARPQPWRGALEATLFSGWIYDTLKPYGEQLEMAHPAKMKAISAGKKKSDRIDARTIADLLRCNLLPACYVAPPRIRELRRLLRYRSLVVSEAVRMKNKMAGLLMETGALYVKEKLHRKKYFASLLEELEEVPESVIDLLRLSRGALEMFESTQQRLVRELLADSELAQRVQRLMSIPAVGEITALTWALEVGDPQRFRSGSDAMSYCGLTAALKSSAGKQQRGPISKQRNHWLQTTLIEAAKLAPRWNPQLAALHARELERGHRNRATLAVTRKLVAYLLAVDKSGQSFQLRALLPQGQGGGGANAENQNRLRRKNFATTGDRPAVPRQLGDWAEEFPLPMLLTVCIEAGRTTLTHTSWTGIAHGSRKWMSGQAAALAANNDRRLWSNLTVVSPLQEPTLASARRPPSPVDFYLSWMSLHFVQVSSVERAPPPAAFDFARVGTDAFVRPPLTLLLILLLILISILSGKGTTFRGCGKT

SEQ ID NO: 107407 - protein, 402 aa, unidentified
MNCVGIDVSKGKSMIAVMRPFGEVVVSPFEVLHTDSELSELARLLKSLDGETRVVMESTGNYHAPVAWLLHGAGLYVSVVNAMLVHDYGNNSLRRGKTDKKDAVKLANYGLDHWLTLPRYVPEEDARLMLKTCYRQYQQYSKVQTMLKNNLISLLDTAFPDANRLFTSPPRADGSEKWVDFVAAFWHCECVCGLSKKAFTTKYQKWCRKHSYNFSEDKALDIYVSACGRFGVMPKTKTAKLLVEQAISQLQATSAALAALKQEMQSLAASLPEYPVVMGMFGVGPTLGPQLIAEIGDVRRFHSKKALVAFAGIDAPPYQSGQIDVRSRSISKRGSASLRRTLFLVMGVLLQCAPMDEPVYQFMNKKRSEGKPYRVYMMASANKFLRIYYASVKAYLDSLEHN

SEQ ID NO: 107408 - protein, 347 aa, unidentified
MKEVTTIGLDLAKNVFQVHGVDGSGRTMIRRQLRRGQVLPFFKKLPPCLVGMEACATSHHWGREIRVLGHEVRMMPARYVKPYVKRNKNDMADAEAICEAVTRPTMRFVPIKTPEQQSILVLHRTRDLFVRQRTMLINALRAHLAEFGIVAGVGRNGLEKLLEVIENGRDERVPPEARDCLLALRDQLALVKQQILGADRRILAWHRASEVSRRLDDIPGVGPLIATALVSSIPDPHAFRSGRDLAAWIGLVPRQNSTGGKERLGKISKAGNRYLRRLLVVGALSVIRRAKQLGYTRRPWLSRLLERRSTKVAAIALANKMARTAWAMMAHGTCYQEPKGEPVAQAA

SEQ ID NO: 107409 - protein, 317 aa, unidentified
MSYTSRFVGIDISKSSFDICILPDSRSASFANTAAGVARFLAFVAPLKGIERFLLEPTGGYERRVLDALLSARMPVARVNARQVRQFAGACGQLSKTDRIDAFILADYGRRMETELVLPASPAQMNMVSLVARYRQLSHMIVQEKNRREKLASRADDKTRVWIEESLQFLLDQRQAVVEAMTACLEADKALSGKAAVMMSLKGIGLRTACFLLAGLPELGSLDKGQIAKLIGVAPLNRDSGQMRGKRMIAGGRKPVRDALYIAALPAIRFDPDIRAFFEKLKSKGKPGKVALVAVMRKMIIILNARMREHHANAIDT

SEQ ID NO: 107410 - protein, 467 aa, unidentified
MSRVGEESKDVLLLSLTGLESQNSEEDVVVQGNGLSRGDKRRNAKLGVLRELVPAGNAILGIDLAAEKQVLVLADHDSRVLARKRVQAKAWDLGPVLDWACRVADKHGFAGVTVGCEPTGHRRRVLNELAAQRDMTLMCVNPMLVGRAREAEDYTRDKSDDKDAILIARLVAQLHCYVPERADETWARLRQLGVRRERLITEATACVGQLRDLLECAWPGVLAAAGKPFESTNWCAALAVPERLAPGGLARFEAAVRRELPRWGGSRRRRAIIEAVFIALVDPTGVMTQRRGAFERARWVLADWRSATARLAEVQARMVDVLDELGLTGYVTSIPGVSAVGAAAILAETGDPTRFDSPRTLVKHAGLCPRENSSGTFTGRSQISRRGRPRLRLAAWRAVWGASAHNPVMAARYRHLTGRQHNRLTDGQARAAIAAALLRWIHVIVTGRVRWDAAIAGADVGALPTAA

SEQ ID NO: 107411 - protein, 350 aa, unidentified
METPRYYVGIDIASLNFYAAAGLSVNNEWQLSVQPKPFDNDYDSLPKFLHWLQQHQIKPDNAIICMEATGVYNEVLAHFLVANGYSVAIQPPLEVKRAFKPVGHKTDPVDSQQIAEYAYRFFDELRLWTPREQILEQIKTLLATREQFCMQKTAHMNALKALQRKYVRTPLAEKLHEDTIARLKADIKAIEQEIERLIDQDPTYRQLIGLMMTIPGVGLLLASHLLVTFQSSPQPYNPKSLAAFIGICPYQKQSGTSVRGTATSRHYGPPGLRRLLYLAAMSVRTHHPYFRHYFIRKVQQGKSKKLVINNIANKLLRIICAVLRTQTPFIFGYRSVHPQLLNLKQPLTIS

SEQ ID NO: 107412 - protein, 366 aa, unidentified
MTMIGNENYCNESSGTVAEVVLGVDTHLDVHLAVALDHLGRRLSSFSVPTTKNGYESLLAWAEGFGPVRCAGVEGTSSYGAGLARHLRAMGIAVEIERPKRRHLRRKGKSDPIDAEAAARAVLAGEATGVPKSADGRVEMIRTLRSARHSAVKARSQAANQLQGFVVTAPEELRHRLRELTTKKLVSVAARMRPGKDLDDVEAATKFALRSVARRYQALSEEISELDAQLDSLVAEAAPELISLQAIGTDHAATLLLTVGDNPERLGSEASFASLCGVSPVEASSGKVVRHRLNRGGNRDANRALHLICVVRMRIDERTRRYVARRTAEGKSRREIMRCLKRYIAREVYRVLVSAASPPPIGVSTT

SEQ ID NO: 107413 - protein, 402 aa, unidentified
MNAVGIDVSKGKSMVCVMRPFGEIVISPFEVRHTASELSKLAGLLKSLDGETRVVMESTGNYHAPVAWLLHDAGLYVSVVNAMLVHDYGNNSLRRAKTDKKDAVKLANYGLDHWLTLPRYIPEEDTRLMLKICYRQYQQYSKVQTMLKNNLISLLDTTFPDANRLFTSPPRADGSEKWVDFVATFWHCECVCGRSEKAFTTQYQKWCRKHGYNFSEDKALDIYASACRHFGVIPKTDTAKLLVEQAIFQLRATSAALAALKQEMQSLAASLPEYPVVMEMFGVGPTLGPQLLAEIGDVRRFHSKKALVAFAGIDAPPYQSGQIDVRSRSISKRGSASLRRTLFLVMSVILQCAPIDEPVYQFMDKKRSEGKPYRVYMMASANKFLRIYYASVKAYLESLEHD

SEQ ID NO: 107414 - protein, 404 aa, unidentified
MIYLGIDWAEDHHDLCLLDDAGERLAAARVPDGVEGLRRLHELVALHAENADVIVVGIETDRGLLVQGLVASGYTVYAINPYAVSRYRDRHTTSGGKSDRGDAKILADLVRTDRHNHRQIAGDSDLAEAVKVLARAHQNLLWARQRHINQLRSALREFYPAMLEAFGTDLASRDALVVLGLAPTPQEGLRLTRARIRTALARAGRQRNVDATAIAIHTALASQQLLPPARLSAAYGLTVRASVALLRQFNVEIDELEAELVASFEGHPDAEILCSLPGLGSVLGARVLAEFGDDPTRYKDARSRRCYAGTAPITRASGTRTVVLARTARNKRMAQACYLWAFSALRPSPGARGFYDRQRAKGKTHHQALRALANRLVGVLHGCLIRGQRYDEQVAWPTNTEVAA

SEQ ID NO: 107415 - protein, 342 aa, unidentified
MYYIGLDVHKKTISYCVKDAAGCMYREGRIGSTRCELDAWIRTLPQPRTIAMEATIFTGWIYDHLLPHAQAVKVAHPLMLRAIALARKKNDKIDAGKIADCLRCDFLPECHMASTEIRDRRRVLRYRHLLVRQMVQTRNRVSGLLMETGVEHNKSRLHKVGYFRRLMTTNSEIDDSIRPLLRISRENIERCQKTDYALVSSLERDPLLKERIRRLRTVPGVGPITALNWALEMGDISRFRSIKEAVSYCGLCGDERSSADKVMRMPLSKQRNKHIQHVLVEAAKLAPRQSAELALIHQKAMEKGNRNRATLAVARKMVAWLLAVDRESREFIPAEQRETRAA

SEQ ID NO: 107416 - protein, 348 aa, unidentified
MASKLDSEIAVIGIDIGKNSFHIVGLDRRGAIVLRQKWSRGQVETRLANLPPCLIGMEACVGAHHLSRKLISLGHDARLMPAKYVRPYSRGQKNDFRDAEAIAEAVQRPTMKFVATKTAEQLDLQALHRVRERLVSQRTGIINQIRAFLLERGIAVRQGLRFLRAELPRILATPRDVLSPRMVHVIEDLAGDWRRLDERIEGLSSEIEALARRDVSCERLMSVPGIGPIISSAMVAAIGAGDAFSKGRDFAAWLGLVPKQISTGDRTILGKISKRGNRYLRVLFVQAAWVVLIKPKSWDRHGLKPWLEAAKKRLHHNVAIALANKLARIAWSVLAHGRAFEAIRIQAS

SEQ ID NO: 107417 - protein, 422 aa, unidentified
MNINTDSKRRQVPDDYLVAGIDPHKKSHTMVLMTREEKVLTSLKFDNSKTGFEHAVKRVDDQISKSGSKGVVFAMEAGGHYWRNLAYFLNKRGMWFCLVNPFTAKRLREGKDINRAKSDMRDARVMAELVISNGVPQTNLPQGIYAELRAVYNAYQRLIKERSRIKSRMKSLLDQLFPEFCMVFSNVCSKTAMQVLGCCLAPTDIARMQEAQFIARIREGFTGRALKIHSLQELYQLGKTSIGAEAGARGLALELNLMTQQLLLLSEQIEKTKHILQGLLLSIPESRCILSIQGVGHIAAAGILAETGPLQAYRNSGQLIKLAGANPISWESAGKRHSITHMSKKGRPKLRSCLWIAAIALLRSNPDFKEWARVRRERELHMHPLKPRETVGAVANRLLRIVYALVKNGSMYCLPKANEALV

SEQ ID NO: 107418 - protein, 427 aa, unidentified
MSTPQPFAAWVGIDWADEQHAVCLLAEGSPRAEHRQVAQQAEALDAWAAELHQRFDGRPLAVCLEQSRGALIYALMKYEFLVLFPLNPKQLAKYRQAFSPSGAKDDPQDAELLCRFVREHHGQLRAWRADDACTRQLRLLCEDRRRWVAQRTALGNQLLQRLKETFPWALKFQGREVHGQAFLRWLAKFPTHSELRRASPKQLERYLPKRRRVPDDPDTFAPWVAEIRAALPLVTDEAVLAAARLAIVSLVRGLEQLNAIIAQYDQQIAQVMAQHPDAALFHSLPGAGAALAPRLAAALGTDRGRFRSAADLQQFSGIAPITVRSGKSCQVRRRRACPHFLRQTFHEFARCSLMASPWAAAYCRMLRAKGHAFHAAVRSLAYKWLRIIFRCWQDRKPYDEQRYLNQLQQKSSPLLAYLPPNPSLTEP

SEQ ID NO: 107419 - protein, 343 aa, unidentified
MTRFVGVDVSQKLTWICVVDDVGRRHWRGQCATDPGHIAEVVRRHAGDDARIGIETGPMTPWLVHELRAQGLDITCLDARHASAALKMQMNKTDQNDAEGLAQIMRTGWYRSVHVKSLDAHRARSLLGTRAQLVGMTPRLSNHIRGLLKTFGLLPGAMRGLPFDRRVEALLADRDDLASIARPMLVAWRHLREQIAAFDKEVRALAKNDPTCRRLMSVPGIGVVSVLAYVSTVQDPTRFRRSRTVGAHMGLTPRQYQSGEVDRSGRISRCGDTLARTLMYEAAVVILTRVKRASSLKDWALGIAKRSGIGKARVALARKLSVILHSIWRSGEVFRWSEQPVRS

SEQ ID NO: 107420 - protein, 335 aa, unidentified
MSYFVGLDVSMEETAYCARNAEGRILGRGKTVTDPDAIAAALARFGRPTRVVLETGRMANWLHRQLIARDLPAVCVDARQAHAVLSQMPNKTDANDAAMLAELARTGFYRAVRVKSEAAQGMRALLKARELVLRQRMDLDNTIRGLLTSMGVRLPKGPRRWADRVELALEANEALALALKPLLRLREDLARSLAELTRRLLTEARGSDLCRRLMGVPGVGAITAYAFLATIDDPTRFAHSRSVGAYVGLTSKRYQSGEVDYTGRITRRGDGMLRTLLFEAASSLITRAGGGGALREWGLRLRARVGHKKASVALARKLGVILHRMWVDGTEFRAA

SEQ ID NO: 107421 - protein, 354 aa, unidentified
MSQTPSTAIAVIGIDIGKNSFHVVGHDTRGTIVLRQKWSRGQVEARLANMPPCLIGMEACVGAHHLSRKLASLGHDARLMPAKYVRPYSKGPKNDFNDAEAIAEAVQRPTMKFVATKTAEQLDLQALHRVRERLVSQRTGIINQIRAFMLERGIAVRQGIGFLRTELPTILATRTDALSPRMLRVIEELTGDWRQLDQRIDSLSGEIEALARQDQACSRLMTVPGIGPIISSAMVAAIGTGDVFSKGRDFGAWLGLVPKQISTGDRTILGKISRRGNRYLRVLFVQAAWVVLVRIKNWERYGLRSWIEAAKKRLHHNVLAIALANKLARIAWAVLAKGRAFELTRTNDAGVRPA

SEQ ID NO: 107422 - protein, 392 aa, unidentified
MKTNAIKEGTVEGAEQGRKTHQLIKLGVDVHWHEYVVVRQIDGSSPQSAQRFSPEGFVAWAARQTQQAEQVWCCYEAGPFGFVLHKQLERLGVRNVVVRPRNWDEYGAKVKTDRRDALALCSSLDRYLAGNTQALAVVRVPTDEQERSRSQTRQREQLVSERKRLGAQGLCAARYYGYDLPDQWWRPRRFAAMQSQTPDFLLELLARWQRLLLAIDEQLDSLGGLIESAQQQMLPTGLGALTAQILDREIGEWNRFKNRRQIASYTGLVPSEHSSGQTQVRGPITKHGNPRVRHILIEAGWRLRQFQPEYRAVKQRQAAFDSAKQKGNSPARKRLGVALSRQFIVDWWRIKTGRTTPAQLGLQMSWPTCPHLPSKPKPPSETSAQPNTQPID

SEQ ID NO: 107423 - protein, 509 aa, unidentified
MNVSTKSSKNQPNEKKTEKISRAEIRRKQKIDAKQVKSKAKKTITGSVSKTHDPEFILQQADDILKNLKAHTWRDLETAGKFSKNDKLSFISDDMLIVGCDIGSETHYIRAIDTRGRELSKKHLAFSNNEEGFQMAKEWAVDLAARNEKKQIVLGLEPTGHYWFVLAAWMISNGISVVQVNPYAVKQTKELEDNSQLKDDTKDPKLIANLVKDGNYGMPYLPEGLYADLRRLSMFRDQLTEDRIRNINRLHREMKIYFPEYKDAFGKLDGAFSLELLKKAPFPKDILELGVDGIRAIWHEAKLRGRGYSKAAEIVRLAKESVGLKDGTEVSKEVVKWFAEKIIELSKQLFVIENRLHEKCLGIPHAKNIIEIPGIGETILAGILADMGDIDRFDDVKEIQKLSGMGLVACSSGKHNGKTKISHRGRKRLRYWLFQAAKSAVSHAEEFKKLHAYYTTRLSNPLKKMQSLIVIACKILRVIYTILKRGTQYDPEKMLKDIVFPKNQQVAAA

SEQ ID NO: 107424 - protein, 322 aa, unidentified
MRYIGIDVSKATFVVAYSSDKGGEIRTFNNTTAGIRQFIGTLPKDGSIHCVMEATGNYSALLLYMLNVAGITVSMENPLKVKNFAKAMLSTIKTDKSDARLITLYGEKMNPRPFKVQGEAILRLRQKRTVIRQLTKQITAMSNLRGSLACLPVPDKGATHTVDETIKFLEKKRDRLQSELTDLVEVEFSRQLALLTTIKGIGITLATALIITTGGFTYFQNAKQVSRYLGICPTYEQSGTSVNIKGHINRNGDAYTRGLLYIAAWPASRFNAQCKETYTRLRQNGKSGKLAMITVANKLVRQAFAVVAHDKEYVDGFVSNRP

SEQ ID NO: 107425 - protein, 340 aa, unidentified
MRQLYAGIDLHGNSNLIGVIDGEGKRIFKRRLSNDLELVGDTLKPFQEEVVGIAVESTYNWYWLVDGLMEKGYKVHLANPSAIQQYSGLKHSDDQHDAFWLAEMLRLGILPEGYIYPKGERPLRDLLRKRGHLVRLRTSLIISLQNILSRNLGKAMNVNDMKAIKEDRVSLLLESNEDLALAGRVSKEVIDHLTRQIHKIEWVVHKRVVLKEPYRYLLTLPGVGKILSLTIMLETGPISRFETVGDYVSYCRKVPSQWMSNGKWKGAGNRKNGNRYLAWAYSEASEFARQLYSEPRAYYHRKMQKTNAAVAHSALANKLSRAGYYVMRDQVPFRPEKLFG

SEQ ID NO: 107426 - protein, 343 aa, unidentified
MKVTIVGLDIAKNIFHVVCFDERFKELRKRILRRNQVLLFFANLPVCCIGMEACASSHYWGRELRKLGHDVKLIPPQHVKAYLRGNKNDYNDARAIAEAATRPGISGVAVKTVEEQDMQAVHRIRSQCLRDRTALVNSTRGLLSEYGIIVPKGIASLRHRIPELLEDADNGLSMLFRQLLARRYDQLVELDNHFEFYADELEKIGQEDEACQRLQTIPGFGPIVASAFRSAIGNGSAYSKGRDAAASLGLVPRQHSTGGKNNLLGISKRGDRYLRSLLVHGARAVVTQAARKNDKLSSWLNRIVKERGWNKAVVAMANKMARMGWAILRHSTSYRSLPATPAS

SEQ ID NO: 107427 - protein, 411 aa, unidentified
MDQVVERVAGLDVHKDTVVATVRVPGEGGRRHEETHTFGTTLPSLMTLVDWLVSHQVTLVGMEATGVYWKPVYYVLEDAVECWLLNARHLKAVPGRKTDVADSAWIAQLVEHGLVRPSFVPPKPIRDLRDLTRYRKAQIQERSREAQRLDKVLQDAGIKLSSVASHILGRSARDMLDAMVAGTTDPEVLAELARGRMRQKLPALREALQGRFRAHHALIVGEILGKLDYLDEIIGRLSEEIGRLIDPFAPAVELLRTIPGVDHRTAEMIIGEIGADMSRFASSAHLASWAGMCPGNNESGGKHRSGRTRKGSKWLREALIESAKSAARTRETYLADQYHRLKGRRGHGKATVAVGHSILVIAYHLLTRREPYTDLGATHYVERHGGERYKRRLVANLERLGYNVTLEPAAA

SEQ ID NO: 107428 - protein, 405 aa, unidentified
MEVVYERCCGVDVHKRTITACLKVGKERELRAFGTQTGDLREMAKWLLDAGCEMVAMESTGAYWKPVYNILEVLGLEAMVVNAQHMRAVPGRKTDMKDAEWIADLLQHGLLKASYIPNKEQRELREISRYRKSLVEERSREINRLEKTLEGANFKLSSVVSELTGRSSRSLISAFVTQGITDANIDSMLFGSLQGKREELLKACDGAISKVQKRLVLAILNHIDDMTRRIQEMDELIEEEMQRYEEARKRIDDIPGIGINSAQTILAEIGLTMEQFPSAAHLASWSGLSPGNNESAGKRKNGRTCPGNKTLKTTMVQCAKSASRTKGSFFKAQYDRLVVRRGANRATVAVAHSMLIAIYHMLKNNTPFHDRGEDFYNHFNKERKIAGYLKKLDALGWSPSHQVMT

SEQ ID NO: 107429 - protein, 457 aa, unidentified
MTGKKRGKQSTRPLSTVHPNAAGLDVGATFHVVAIPPDRAEESVRTFRSFTGDLHRLADWLKEVGVETIAMESTGVYWIPVFELLEERGFEVILVNARDVKNVPGRKTDVNDAQWLQQLHEHGLLRGSFRPHDRVVPLRALLRHRERLIDQAASHIQHMQKALMQMNVQLHHVVADITGVTGMKIVRAIVKGVHDPAVLAQHRDVRCKESPETIREALTGNYRPEHVFALRHALELYDFLQGKVTECDVEIEGVLRNLNSDRRPPDAPIPSVRHAAGRNEPDFDVRGALYTLLGADLSQVHGLGAYTVLRLVAECGDDMRKWPTSKHFTSWLTLAPGNKISGGRVLSSKTRRSSNRAAALLRIAAVSVGRTQTALGAFYRRLAARVGKAKAVTATARKLAVLFYNALRWGLAYSDPGVEYYERRYRQRVLHNLQQRARQLGYTLVEGTAASPAVGVS

SEQ ID NO: 107430 - protein, 412 aa, unidentified
MNTPTRPAGRFVALDVPKSYLVVAAVDTAQQIVLHPKRVLLAEFAAWCRQHLRPTDQLVLEATLNTWQLYDQLVLLVATVTVANPLQVKLIASSRVKTDNRDTLVLARLLAAGLIPAVWVPPLPVRELRTLVAQRERLIRQRTQVRNRLHAILLAHGLVPPPGDLFAPAQRAWWTGLELNVTERLAVRQDFTLLTSLTPLIAELAAELVHVSQQAPWAAQVPYLLQLPGFQVHNAMVLLGAIGDITRFPSARQLVGYSGLGASVHRSGQVAYTGRITKQGRREMRRVLVEAAWTAVGCHPYWKAQFARLRGRLGENKAIVAIARKLLVVVWHVLTRQESDKHADAALVARKLLRRAWQLKAAGRQGQSAGAWVRDELDRLNLGQELTGITIGKVVHRLPAPTTSAAASSAGK

SEQ ID NO: 107431 - protein, 323 aa, unidentified
MPSKTNKKRRTFIGIDVSKKLLEVAVHQSDYHFSCPNEPQKLPLLLSELISLRPARILLEATGGLERPLLHALQAIGLPVVVVNPRQVRDFAKALGLLAKTDRLDARVLAHFAAAIQPPLRPLKTQDDTELDALMGRRNQLSDMLTAEKNRRGSAATNITRHDIEEHIEWLEERLKELDEKLKQQLQCSTVWQQKDKVLQSVKGVGFVTSMSLLADCPELGQLNRHQIAKLAGVAPLNRDSGQQRGARHIWGGRAQLRCKLYMATLAAIRFNPVIKSFYQRLINRNKLKKVAIVACMRKLLTILNVMVRENKLWNVKAHPVSA

SEQ ID NO: 107432 - protein, 365 aa, unidentified
MNAIHYIGFDVHKKTISFCVKTAAGQIVEEGILQAERTVLRRWADGRKRPWRGAMEATLFSAWIYDTLKPYAQQLFMGQPAKMKAISAGKNKSDRIDARTIADLLRCNLLPTCYVLPPQLRDLRRLLRYRNLVVQESVRMQNRMAGLLMESGTVFNKQKLHQKKYFSDLMKSLEEVPESVKDLLRMSRGSMEMFQSTQKQLVERLLLEPALEKRIERLMSIRAVGPITALTWALEIADPHRFASIADAVSYCGLTAAFRSSAGKQQRGPISKQRNAWLQTALIEAAKLAPRWNPQLAALHAHSLQRGHANRATLQVARKLVAYLLAVDKSGQPFQIHTPPPPANTKTRKKATTKPKKRVALAPAA

SEQ ID NO: 107433 - protein, 344 aa, unidentified
MHIASVGIDLGKNTFHLVALGERSKILLRKKFSRAQLLAYTANLPSSLIGLEAGAGAHGLASVLREQGHQVRLMPAQFVKPYRKSNKNDFLDAEAIAEAVTKENMRFVPIKTEEQLDVQAMHRVRDRLVQRRTALINEIRGFLLERGITFAVRPIHLRKNLLAVIEDAEQNLSSRLRWLLERLWQEWKQLESDIQAISDGIERISKENALCRRLCQIPGFGPLVSTATVAAIGNGAAFRRGRDFAAWVGVVPRQYSTGGKQKLLGIGKRGYIYLRRMLIHGARAVLFRVKYDTGGFGQWVHRLMQRAPRNKVVVAIANKLARMAWAVLTSGKDYQHQGLQMNAA

SEQ ID NO: 107434 - protein, 370 aa, unidentified
MHEAITSYVGLDIHKDSVAIAIAPAGRGAPQFIGTTASNLAQVGKVLTRQKCVRSTTLVVYEAGPCGYGWARYLNAQGWHCEVISPAHIARSAASKAIKTDRRDALLLARESRAGNLTQVVLPDSRDESIRDLSRTREDALAARLRARQQLKSMMLRHGRSYPSNTWTPAHERELAKVRFDHPAQQIAFDEYRQMVTEAHERLERITQALREQCAEWRMRPVVEALMCLRGFDFVAAITIVAELGDLTRFAHPRALMAYLGLVPSEHSSGNTRRQGAITRTGNRHARRILVESAWTYRYAAHVGREQQVRQQRQPKLVRDIAWKAQLRLTRRFRKLNLGRKMKMTKVCVAIARELCGFIWDLARHVPVHA

SEQ ID NO: 107435 - protein, 407 aa, unidentified
MEVLYPRCAGLDVHAGSITACMRVATGATVTYEQRKTPTTTRGLLQLAEWLTEHGCTHVAMESTGVYWKPVWHVLEEHFTLILANAMHIRNVPGRKSDMNDARWIADLLAHGLIRSSFVPPAPIQELRDLTRTRRQLVHEAARHVLRIQKTLEDANLKLTQVMSDITGVSGRAILNALIAGETDPDTLADLTRGRLKATRAELVDALHGRVTDHHRFMIKLHLSQLDALDAAIASLEARIGAALGPFRPAVSLLTTMPGLSETTAHVLVAEIGIDMTRFPTVGHLISWAGLCPRLDESAGNRRSTRTRQSAPWLKPTLVNAAWAASRKKDSYLRAQFLRIKSRRGAKKAILAVASSMLTAAYFMLRNGVEYQDLGPRYFADRDKTRLTKRLLQRLQDLGVTVEVKAA

SEQ ID NO: 107436 - protein, 347 aa, unidentified
MKEQNNRSEFTIGLDLGERRHRFCALNGKGEVVEEGTLGNDRVSLGRLSARYRGALAVMEAGAHSPWISRYLERLGWEVIVSNPRKVRAIYQQERKSDRRDALMLARIGRMDRALLYPVRHGSEEAQQDLLRIKLRDSLVRARVALINSVRFSLKSLGYAVSNPSSERFHKVAMETLPEVVREMITPSVQALAELSARIAVLEREISLLARTKYPQTLWLQQVPGVGAITALYFVLKIEDPKRFKNVRDVGAYTGLCPRRDQSGASDPQLRISKRGDAYLRRLLVSAAQYILGPFGPQSALREYGLRLAADGTTRAKKRAVVAVARKLCVLLLSLWKNQTPYQPYPA

SEQ ID NO: 107437 - protein, 310 aa, unidentified
MSTLPPSVLSIDISKDTLDTDAWPRPWRHRLGNDAQGIATILAEAKRRKAFVVFEATSVYDRALMAGLDTAGVAYHRANSRKARDFARSSGFLAKTDRLDTAMLAQYGRSVVLRPSEPVAPERQALRALIDRREQLVSMRKQERTRRHQIAEALIREEVSENIAHLSRQIAGYERRIKAHLKAYPELFKSVQLLSSAPGVALITAASLVAFLPELGRRSAKAISALVGVAPLARDSGRMRGQRRIWGGRRAVRSLLFLAARHAERNAAFEPFAQRLKDKGKPTKKVRIAVARKLLIVLNTMIQQQRPFYA

SEQ ID NO: 107438 - protein, 402 aa, unidentified
MNCVGIDVSKGKSMIAVMRPFGEVVVSPFEVRHTASELSELARLLKNLDGETRVVMESTGNYHAPVAWLLHGTGFYVSVVNAMLVHDYGNNSLRRGKTDKKDAVKLANYGLDHWLTLPRYVPEEDTRLMLKTCYRQHQQYSKVQTMLKNNLISLLDTAFPDANRLFTSPPRADGSEKWVDFVATFWHCECVCGLSKKAFTAKYQKWCRKHGYNFSQDKALDIYASACGRFGVMPKTNTAKLLVEQAISQLQTTSAALAALKQEMQSLAASLPEYPVVMEMFGVGPTLGPQLIAEIGDVRRFHSKKALVAFAGIDAPPYQSGQIDVRSRSISKRGSASLRRTLFLVMGVLLQCAPMDEPVYQFMNKKRSEGKPYRVYMMASANKFLRIYYASVKAYLDSLEHD

SEQ ID NO: 107439 - protein, 356 aa, unidentified
MTSSTKYIGMDVHKESISITVRNAAGKIVMESVIQTKASMILEFIDGLRGEVHVTFEEGTWSAWLYDLLKPHVTKLVVCDPRRNALLQEGNKNDRVDARKLAELLQNNQLRPVYHGDHGLRALKELVRSYLTINKDLSRVMTRVKAIYRSWGIPCSGTQVYSSSHRAEWLEKIREPGVRRRAEHYYQQLDALRLLRLEVRKDLLAESKKHHVWKRLRGVPSIGPIRAAVLLGIMQTAHRFRTKRQLWTYSGFGIEGRGSANHQVVNGQLQRKKKFIEIRGLNKNFNHHLKNLFNGAAVTASTKPGPFQEFYAALVAKGMRPEMARLTLARKIATIVLIVWKRGVCFDASHLKSQTA

SEQ ID NO: 107440 - protein, 380 aa, unidentified
MPEAVIGLDVGKSSHWACVATRDGEILLSAPVANREGDLDSLFGRFPDALVVVDQSRNIGALALARAKAAGMSAAYLPGLAAHGAARLFAGDAKTDERDAMVIAKTALGIPDALLPVGDPGPTVAAARALAAQRNFLTCENTRSKNRLRSILLESCPAFEALVDLSDGPQLRLMASLGGAWSVADAGPRRAAALTRGAARGKIEALVRSTASSTRPDAAAIAAEDRAVRLLARRISENSAEIEAITAEISALLEGDDTYRCLLTVPGIGPKTASELAISIDIEDFPSHDRLASYCGLAPRNRQSGTSISSVTASRQGNKRLKNLLIFSCNCLTRTEGRWGDYYTRCRERGMPHGKALKALARKRLKVIYAIMRDRVPYAA

SEQ ID NO: 107441 - protein, 343 aa, unidentified
MPHYVGLDVSQKTTAICVVDAQGKRLWRGVCATDPGPISARISQHAGVDAKVGIETGSMTPWLVHGLRAAGLDVACLDARRVKAALQMQLNKTDENDAEGLAQIMRTGWYRAVHVKSLDAHRARALLGARAQLVGMTTRLSNMIRGVLKTFGLLPGAGRGLRFDRKVEALLESAPEIALVVRPLLATWRQLREQIAVFDKAVLQQVRADPICRLLMTVPGIGALSSLMYVSTVENPSRFSRSRAVGAHLGLTPRRYQSGETDRSGHISRCGDGLARTLMYEAAIVILHRVKRPLHLKDWAEAIERRSGSGKARVALARKLSVILHSVWRSGEPFRWSAPVMAA

SEQ ID NO: 107442 - protein, 347 aa, unidentified
MEKVIRIGMDTSKSVFQLHGVNAAEEVVLRKQLRHRKVLEFFARLAPTKVGMEACGGAHYWARELRALGHEVFLLPPQYVKAYVKRGKNDRADAEAICEAMSRPTMRFVPVKSAEEQAALMLAGLRDQMVRRRTQLTNAIRGYAGEFGLVAARGLSKIEPLLVRIAEDESVPELAKDIFAAYGQEYAELERRIAKVETRLMAWFRQSEPSQRLTQVPGIGPIIASMLVMKVPDPGAFHSARHFAAWLGLTPTDHSTAGKHRLGVITRAGDEDLRRLLVGGAMSVIQQAERGRGSPSPWLLGLLKRKKLKLVAVALANKMARIAWKLLVSGENYDPRRSKVRALDKAA

SEQ ID NO: 107443 - protein, 346 aa, unidentified
MLIIGCDYHPSWQQICWMDTETGETEERKLEHASGEAERFYRGHTAPALIGMESTGNCQWFVDLLTQLGHELWVGDAAKIRASEVRRQKHDRRDAALLLKLLLEGRFPRIWTPSGEEKDLRQLLIHRHKLVRIRAEVKNELQHLAMNQGVMRKSKLWSKAGEKVLLGLPLRPWASRRREDLMKVKEMLNGQIALLDQAVMEAADKSQKARLLMTQPGVGPITSMAFVLTMGDVSRFPRGKQVASYLGLIPREYSSGGKQRLGSISKQGNRFMRMLLVEAAQVAVRCDPEMRSEYLHRCHTKAKGVAKVAAARKLAIRLYWMLRTNTAYPEVVRVESSSRVPLVSAS

SEQ ID NO: 107444 - protein, 394 aa, unidentified
MATIGIDIGAYEHAVAVCHDGQTEAERQVLKISADRAGFTKLDELITRHDPIERAVMESSGHYWFGVASHLARRGVPVAVVSPVASKYFAKRRSQRAKSDPADARTLAALGMVDRPRTRAPLAGQELREAARFAMTLVQEQARCCQRMLRLVDIGFPELREAYEDPGCASAIALLRVAPTAKAAASRRAVTLAKATTAGGRRVGPKKAGLIHAAARESVAAPELSAQVGFEMELLIGQHDFLEQQIALADARLADLADSDVVRRLRTIPGVGASTAAALVAEIGDIFRFDDFDQLVAFAGVHAAERSSGKKGADPETSWHMAKTGNAYLRAALYRMALVGTVHNPVIREHYRRKRAAGKSKMNALGHCMKKALAIVWGVWRSGHDFVAPEGLPS

SEQ ID NO: 107445 - protein, 406 aa, unidentified
MNGPVITVDVSKGSCHFQPYIENGKPMCKPKVLKDTIEGFDNLAKTMNKLKERSSNSTVPVVFEATGVYHRCLQKYLDDNKIPYYIISPLMSAAYRKTNINSNKTDDLDCGHIAKCFYGEQDLRVYKKQTNIYEELRHTNRYYESELNFLRQRKTSFRALLDIIYPLIDKCFKGHSSLYDEVPMTVLKLYPHPKLLLRHKEETIVNRVTSKVNHDKKFVEKIVSLMYEGASRCYSGCDEDDKEVDRLKETIMSLKEQVAKCDEILKELIEQARKVPYFKYVVSITGVGLNLASRLVAEIGDITRFENRKAITAYAGLNPKIRQSGDIDGTHLAISKKGNRHLRCLLYLGATCNYRLKKHDSLYEFNQKKRQQSTNPLKKKAANIATAHKLLVIIYALSKNNQEYNS

SEQ ID NO: 107446 - protein, 424 aa, unidentified
MNNTLNKKIEQVTNKTLIVGVDIGSEIHYARAILVRGYEVSRRPYRFENTDEGFSGFITWAYNLAAENKLTKIMIAVEPTGHYWFNFAEYLKKYDVQLVLVAPQHVKHSKEMDDNTQEKNDRKDPLVIAKLVPEGRYLIPYIPEGIYADLRTAFNRRCELVDAQVRNSNRMNRWFDVYFPEYKTVYDRTDAISGLAVLKRAPLPADILTLKEDGIYQIWREEHIRSVGINRARKIIAAAENSVGVKGGAAARWEFWQLMEEHDLIVRQLHDIMLLIEEYLRQIPGADRLLKVPGAGIVTVAGFLAEVGDIKRFTDPKQIQKLAGLAVVENSSGKRKGMPGISRRGRGRLRWILFQLARTMVKFNKEMRTYHLYYTTRKENPLKKMQSIMAIAARIARIFFGILKNGTEYDPAIVMKDFNKAVAA

SEQ ID NO: 107447 - protein, 363 aa, unidentified
MSQTKWLIAATVPGFERNPLKKLDADPDSVFRLLRRWRSEAIQAGREVRRIVVAYEAGRDGFWLARWLQARAVEAYVIHPSSVAVSREHRRAKTDRLDTELLMRAFLGWLRGEKRHCSMAAIPTINEEEARRPNRERDNLVRERTRIVNRIKAILARFGIRAFKPNLRKAAEKLEALHTAEGMPLPERSRAELRRNLGRLHLLREQIHEIEQERLRQLSVVPDTEKGPLAMVRLLARIIGVGIETADMLVNEILSRGLRDRRAVARYAGLTGAPDESGQRRREKGLARAGNARVRYGMILLAWRFLQFQKDSALAHWFCARTADGRGGTRKTMIVALARKLLIAFWRLVTTGEIPTGVALRPV

SEQ ID NO: 107448 - protein, 347 aa, unidentified
MRLYTQQHQFYCGIDVHARTMYLCILNRDGEILVHRNMPAGPAPFLKASAPYREDVVVCVACLFTWYWLADLCAREGLPFVLGHALSMKAIHGGTATNDKIDAQKIAVLRRGGMRPQAYVYPAAMRATRDLLRRRTHLMRKRAELLAHVQNTNSQYNLPEIGKKIAYKANREGVAERFADAAVQKTIEVDLALLTYYDELLRDLELSILTTAKQHDANTLYLLQTVPGIGKILSLVLLYEIHDIDRFPRVQDFASYCRLVKCAKESAGKHLGTSGKKIGNAHLKWAFSEAAVLFLRNNPQGQKYLARLEKKHDKGKALTILAHKLARAVYYMLKRKTAFDIDVFLRA

SEQ ID NO: 107449 - protein, 343 aa, unidentified
MDYFAGLDVSVKDTSVCIVDGTGKIVREVKVASEPQALLVVLRNATYCFKRIGLEAGPLSQWLYGALAEAGLPVICVETRHMQAALKAQINKTDRNDARGMAQMMRVGLYRPVHVKTLRSQKLRMLLTHRKLVQSKAIALDNDLRGTLRNFGLKVGVVGTVKFEARVRELVENLPDVAELVEPLLIVRRVLREQLGILHRRLLAIVRDDDVCRRLMTIPGVGPVVALTYRATVDVPVRFRKSKSVGAVFGLTCAKYQSGEIDRTGAISRCGDEMVRTTLYEAAQILLVRTTKWSWLKAWAMQIARRRGMKRAIVALARRLAVIMHRIWVDDTEFRWTRNAAAA

SEQ ID NO: 107450 - protein, 402 aa, unidentified
MNSVGIDISKGRSTIAVMRPFGEVVISPFEVRHTDSELSKLARRLKSLNGETRVVMEATGNYHAPVAKLLHDAGLYVSVVNAKLVHGYGNNDLRRVKTDRKDAVKLANYGLDRWLTLPRYIPEENTRLLLKNCYRQYRQYSKVQTILKNNLISLLDTVFPNVNRLFSSPARADGSEKWVDFVAEFWHCRCVSEKSEKVFTNKYQRWCRKHGYNFSEEKAHTIYVEASGHIGVMPKSETTKLLVEQAVAQLRATSAALAALKHEMQSLASMLPEYPVVMDMFGVGPTLGPQLIAEIGDVRRFYSKKALVAYAGLDAPPNDSGDVTGRHKSMSKVGASSLRRTLFLVMSVYLQNAPLDEPVYQFMDKKRAEGKPYRVYMMASANKFLRIYYATVKAYWEALDQT

SEQ ID NO: 107451 - protein, 344 aa, unidentified
MYFIGVDHHKQWSVMSVLGDVGPEIKFGKVDNRGEAVRRFLGDYQPFRAVIEAGYSSYVMADLLRELGGEVTMANPGELKAMAHARIKTDKRDARTLAELLRGGLIPEVTQRAPENRRAQRVMRLRAFRVEKRTELKNKIRVLLAQQREAIRLELERREEGLFSEKGLEFLGRLELPQPDQMILEDYLESYREGQEHLRKTDGLVEKLYAELEEARRIDTVPGFATTLSVLVAVEIGDINRFVSAAHLHSYAGVIPTTHASGGRTYHGPITKTGNRWLRWAALEAVFPATKASVEIRGLYSRLVRRKNPNVAKVAVARRLLTIIYHVLKEKRDYIVGMNNPSAA

SEQ ID NO: 107452 - protein, 452 aa, unidentified
MAKQKTQLIEAVNIGAAAVDIGSREHMAAVNPDVTDSPVRAFGTFTHDLHNLADWFKSHGVTSVAMESTGVYWIPAYEILEQHGFEVILVNARYAKNVPGRKTDVSDASWLRQLHSYGLLRGSFRPSSEIATLRAYLRQRERLVEYAAAHIQHMQKALMEMNLQLHHVVSDITGITGMKIIRAIVAGERDLDVLAGYRDVRCKASTETIKAALNGNDRPEHIFGLTQSLELYDFYQAKMLECDHHLEATLAALGADTEHDPSRLPRPRTKTKQVSTPSFDVRAALFGVLGVDLTEIHGMGPSLSLKLVGECGTDLRAWPSAKHFTSWLCLAPGNKISGGKVLSSRTRRSSSRAAALLRLAAVTIGRSDTALGAFYRRLAARAGKAKAVTATARKIAVLFYNTLRHGMTYKDPGASHYEERYRNRVLGNLKRRAKSFGYDLQELPPEADMAVS

SEQ ID NO: 107453 - protein, 313 aa, unidentified
MSSPLVYVGMDIAKATLDLYAPLGPRPQSRQFTNNSVGHRALVRWLQKLGSVHIVCEATGGYERAVVTALQQATIAVSVVNPRRARDFARAQGRLAKTDRLDAQVLAEFGQRLQPAATPVPSAAQRQLAELVSRRQQLQQLRVAENNRLEHTTHPAVRRQLQRHLVGLDRQLDQLDAWISALVAAEPWLAHKVARLCTVVGVGQITAVVLLATMPELGTLNRRQAAALAGVAPFNRDSGPRRGHRLIGGGRAVARRALYMAALVGAFANPRFQVFYQRLIAAGKAPKVALVAVMRKLIILLNQLLKNPEFQPT

SEQ ID NO: 107454 - protein, 305 aa, unidentified
MYYVGIDVSKNKLDICLLYDGVKGKRKTKSLLNNEHSACMLIEWLAKYIPALQQVNIVMEATGFYHERLAYSLHQAGGKIAIANPLRVRDFAKGILTKTDKMDAYILACYGALKQPDVWQPPPIEIRELKALLCRRDALLEDIQRERNRYEKSGSTHTPKRVIESLEAMMHHMKNELTELEALIAEHINQYPNLKKDFELLTSIKGVGTQMGLNMLIILRTNTFTSATQVAAYLGVIPIAKQSGTSVHGRVRLSKTGPAKIRAKLFMSALTAIRFNPHINDLYNRLVNKGKAKMLALGAAIAKSI

SEQ ID NO: 107455 - protein, 421 aa, unidentified
MKVTYKTCCGVDVHKSFLVATIITTTGGIEPSYQKKRYSTFNNSILEFKQWLLDNDCHELCMESTGKYWIPVFNLLEDEINVTIANPKWVKAVKGNKDDTKDSKWIGDLFRLGLVKGSYIPCKKIRISREFTRYRYKIVSCRSSEKNRYQNALTVCNVALDSVVSDIFGKSSTSIIDYLLEQSGNSINHEEIASKLLKSLKSKEDAVIESIEGYQMTDSQKYRMHLVRAHMDYITAEINDVDREIEKLISSDPDFENAIQFLMTIPGVKRDSAITVISEIGIDMTQFSSSKRLCCWAGLTPGSNESGGKKKSVRVTRAGVYLKPALVQCAHAAVKSEKSPYYKKKYESLMKRRGKKRAIVAIARMILTAIYQMLSTGESWNPSDLYKIDIPEALLEKQKAKAIKQAMKLLQREGLYPPPDQ

SEQ ID NO: 107456 - protein, 354 aa, unidentified
MLIIGCDFHTRYQQIAMAREETGELLVERRLDHQSGEAQAFYRSLQSLQEPVRVGIEATGPIHWFERLLTELGHELWIGDSAKIRASEVRKQKTDERDARLILDLLLSRRFPKIWVPTAGERDLRQLLWHRHKLVSLRTMLGNQLHFLAMSQGLCRKQKLFSKKGRGELTNLALGPWASRRRQELLKLLDQLNPAITELDRAVLEEAKRREDAVLLMTHPGIGPITSLAFVLAIGPISRFQRSKKIASYLGLNPSEESSGGRRRLGAISKQGNTMVRWLLIETVHQAVKQDPELRQDYQRLKFRRGHAVAKVAIARKLAVRMYWMLRSGADYAQLVRRQGSPGATLVDVSPSLG

SEQ ID NO: 107457 - protein, 340 aa, unidentified
MTIVMGFDQHRAQITTEWLDSMTGEIGRARIAPAHREGVRRFLGRFAGQDLEVALEATTGWRFVVEELRRVGAGVHLAEPAQTSALRGNKKRPKNDRADARHLRELLMIGRLPESWIPPDHLLDLRSEVRLRHTLVDQRGEWQQRIRAVLYHHGLANRRELDLLSGEGRAWLEEVELPAAAREQITVAIAMSDALNVQIAPLDRQLRLYARCQAGCKALMGHYGIGELTSVAILAELGDCRRFSSSRQAVRYAGMDITVYESDKRRSPGHLSRQGPPALRWALYEAAQVARRAGSPDRGYYDQAAERLGSNRACVAVARKLLMRAYHTLRELGEEALQPA

SEQ ID NO: 107458 - protein, 350 aa, unidentified
MRFYKNQDHQFYCGVDLHARSMYVCVLDQADDIVVHKNLRADPKLFLQTIKPYREGLVVAAECMFAWYWLADLCEDHHIPFVLGHALYMKAIHGGKTKNDKIDSHKIATLLRGGTLAQAYVYPRGMRETRDLLRRRCFLVRHRALLIAHIQNEASQYNLPAFPKKLTYAGNREELDVADHFSHPSVKRSIQTDLALIDAYDTQIGELELYLHRHAKIDDGDTYHRLLSIPGVGKILALILLYEIHDIARFPDVGNFLSYARLVRGSHESAGKKKGSPGKKIGNAHLKWAFGEAACLLVRHSERGKAWMTRYEKKHGKAKALATLAAKLGRTVYHLWHKRVVFDEARLFAS

SEQ ID NO: 107459 - protein, 416 aa, unidentified
MNAVGIDVSSRKSTVAVLRPLGEVVCLPFDVTHDIAGLASLVEKLKALDGETRVVMEHTGRYYEAVEKALHEAGFFVCAVNPLLIKEYGANSLRRVKTDKADAVKIARYALDNWADLRDFTPMDAIRYDLKTLNRQFQLASKQRTASANNLIALLEQSFPGIRKCFDSPVRSDGTQKWVDFAHSFWHVDCVRKQPFPAFCERYRKWCKRHAYLFKLSNAEEVYALAKRAVVLTPKSKVVKVLVQEAANQLSSISRSVEVYRAEMDRLAAMLPEYPVVMAMYGVGKSYGPQLMAEIGDVRRFERKQALVAFAGIDPMPNQSGDKNVRSNKSSKRGSPYLRKTLFNVIRTYLQCAPQDEPVFQFLNRKRAEGKPFYVYMLAAANKFLRRYYAKLRDYFASLDTLQPVAPIPTILKATL

SEQ ID NO: 107460 - protein, 316 aa, unidentified
MTSPQPFVGIDVSAKSLDIAVLPNETHFTVPHTEEGIASLVRRLQELGPHIVVLEATGGYEIQVAYAMSEAGLPVVIMNPKVLRHFAKSTGKLAKTDKLDAQVLAHYAQAIQPPVRPLKAPEQVELATLMSRRRQLRDMIVVEQNRRRTSTPKVQGNIDQHLASLRQLLQDLDRDIHDAIRRSPLWHEKSEILQSFNGVGPKVSASLIADLAELGTARNSQISALAGLAPMNRDSGQWRGKRTIQGGRPAVRQALYMAALVASRRNPVIREFYQRLRQAGKPAKVALTACMRKILVILNAMLKNHTYFNPQLHLAA

SEQ ID NO: 107461 - protein, 406 aa, unidentified
MLLDHPADLTAIRTQFGAIFVSLELSRSKWLVTSLSPGNGEKMSKRSLDADDMAGLMCLFADLKRKAAIRTGQTYPIIVIQEAGLDGFWIHRVLQDQGIESHVVDAASIAVPRRKRRAKTDKVDGEKLLRVLLAYKRGEPRVCAMVVTPSPEEEDSRRIYRERQVLIAERIAHVNRIKGLLFSQGICDYEPVGRKRLARLAELRTGDDRTLPVHLKAQISRELDRLELLLEQIKALEAERDAMLEAAKQTRRKDKPHPVAMMFALKGIGADFASGIWSEGLCRHFANRRQVGAYAGLAGTPWQSGSIEREQGISKAGNPRLRTLTVQLAWLWLRHQPQSALARWFHAQGLRGRKTWRKRAIVALARKLLVALWKYVTHGVVIEGAVMKSTANKRRAKNSAVVAMAA

SEQ ID NO: 107462 - protein, 341 aa, unidentified
MWHLGIDLHRKSLTVAAVHDAGEIRPPIRLECLDTEGIVAAVSAVTPFRAVVEATSHYRWLVNLLAPHGTLVLAHPQRLRAMVQRRSKTDRLDSQLLAQLLRLNQIPLAYIPAERFQRLRDMTRQRGRMTHGQTQAKIGLRLLLGRHNRAAPYKCPFGPRGLYWFSRQDFGPVDNFGRDELLERFAHYGKQIAALDVRLEDLRPDYPEVEAVIGLPGIGLYTALMVIGEFGDVTRFRRAKQAAAYTGLTTRVFQSGDRCRHGHISRQGSGWLRWILLQAAMKFVRKDVPLANFYDRIRKRSSAKIARVAAARKLAEICWKRLLRWHREHPEESTTTANRTT

SEQ ID NO: 107463 - protein, 346 aa, unidentified
MAYYVGLDVSVKETSICIMDDKGGVIARTDVSTDPDLIAGFIFKYAPDVERVVHESGILAIWLTRELEKRGVPIICIDARLAHKALSGRINKSDQGDTEGLAQLARTGWFTQVHIRSEASERVRVLIGARERLIRMRKDLEGHVRGVLKVFGVCMTSVGTGKLRRGFRDQLAAAADTDPAIAMLSETFIPLHKTLCIARDALDEEVRMMARKSDLARRLMTVPGVGPIVALAYIATVDDEKRFRKSIDVGAFLGLTPKRHQSGEVDWSGKISKCGDCDMRRLLYSAASTLISCTRKPSRLKEWATKLAERKGHKKAAVATSRKIAVILHCLWRNETVFEPGMEGAS

SEQ ID NO: 107464 - protein, 323 aa, unidentified
MNKYKETFGVDISKDVFDVHGSASGHLQFKNDEKGFASFLKILPEDSLVAMEATGYYHYRLAQFLYQNNVIVSVVNPLSIKRFIQMKLAKVKTDKSDAKAICEYALYNDVPLYSALTGVQAECLQLFRLMDSYLKKRTATKNKMHGEETLGIPSKFVCRSLKRNKKYLDKELAGIEERLLELVKQEQQHQLTLLQTVPGIGIKTALFLIVVTDGFSKFETGAQLCSYVGITPTIRESGSSVRGRSRISKVGNKKLRNLLFLCAFNACKHNKACRELYERIVNKGKSKKLALIAVANKLLKQCFAIAKSGLPYDPEFVSVLAVK

SEQ ID NO: 107465 - protein, 357 aa, unidentified
MITIGVDAHKRVHVALALDEAGREIGQWQGENSRAGWDDLQRWALSVGTARQWGIENAWGYGRGLAQHLVASGEAVYDVNPRWTALRRRSARRPEKTDRLDARAVALFVRQESPSLPQVQADDETAVLDLLTAERNSALIEATRLRNQIHALLLQLDPQYKARVPTLKSCAGLAVLESYTCPDNTSLSIARAAAVRRLAQRLRLALGQAAELAVQIKEAAARFSSLTELCGINLLTAGAIAGILGPGRRFETDAQLAYYAGAAPLEASSAGIVRHRLNRGGNRRLNAILYRIALTQAHHSEEARTYLDRKTSEGKSKREAMRALKRYIARAIWRLWQGCLHGRVHASGCPRRLTSCT

SEQ ID NO: 107466 - protein, 396 aa, unidentified
MAHIWAGTDIGKTHHHCVVLDTEGRKLLSRRVLNDEPELLALLADVLALDEDVLWAVDVADGMAALLINVLLNHGQQLVYIPGLAVNRASAGYRGMGKTDAKDAVVIADQARMRRDLAVIRPDDEHAVELRILTERRSDLTADRTRRINRLRGQITGIFPALERVLDMGNVGPLVLLTGYQTPAALRRTGRSRLETWLRNRKVRSADTLAQAALEAAERQHTTVPGEKIAAQVIHTLAKEVMGLNEQITEIDKLIAAQFRDHDLAEVIASMPGIGPLLGAEFLAATAGDMSRFASADRLASFAGVAPVPRDSGNVSGNLHRPRRYHRGLQRVFYTSALISIRSCEESRRFYERKRAEGKRHTQAVLALARRRVNVLWALIRDGQCFQHGLRVITAA

SEQ ID NO: 107467 - protein, 487 aa, unidentified
MTSSRLRDCLTCFNTLRAVHPPFNLNERNSMSAPNKVKKKAISKANTQLPTLHPHAAGIDIGATEIQVAVPCDADPDPVRTFTTFTDDLLALRDWLLQCGVKTIAMESTSVYWIPVFQILEAAGLEVCLVNARHCKNLPGRKTDISDCQWIQYLHSVGLLRASFRPPEQICAVRSLLRHRATLGRYAGSHVQHLQKALTQMNLQLHNVISDLTGLTGLAILDAILAGERDPQKLAALKDHRIKASHDTLARSLHGDWRDEHLFVIQQALDTWRHYQKLIGQCDEHVQQQMAQFDSKIDLNQHPLAANRRGNKKPQRNEPKFDARTELYRLCGVDLTAVPGIQVSTALVLFTELGPDFVTRFPTAKCFSSWLGLCPDNRITGGKIISVKSRDVKSRSAMALRLAAQSLWQSKDYLGDCFRRWKARLGTPKAITAMAHKLARIIWHLIKFSAPYDPAVWQQAEAKLKQKKIKRLQQNAAALGFQLLCTS

SEQ ID NO: 107468 - protein, 400 aa, unidentified
MKTVLSVDVAKNKSMIMLINSEGEILIDTKEIKHNLVNFEKVKEEITEINPENLTVFMESTGTYHLPVERYFKENGFNTLVINSLTTKNNYDTIRKTKTDKKDCYRLAKLFFVNEVEYHELSKKDLYANLKAMTRQYFYLTQINISYKNRYKRLINICFPELEKIFKSSRIYEETALNFVKAFPHAYIVKEKRIDALYNNLYKTNSRHDYYYKRLAHEIKEIASNSYPGIDKDHSDVQNLSNIAEMLQNNIKNINELKERMIETAKQSPYFKIINSFYGIGEVLTAELLGELGDITRFDNHKQLIAFCGLDPTIVQSGKSINVHGAISKRGNKYARWILFNISQMVVKLGHQCPNHPVYKYYLMKKAEGKHYYESLTACSTKILRMLYSMCKNNKRFLEK

SEQ ID NO: 107469 - protein, 429 aa, unidentified
MNYTQNEKIEQVTDSTMVVGVDIGSQIHYARAFDNRGRELTKRIFSFHNDLEGFNSFNLWAETLKTENKKTAVLIGCEPTGHYWFAFAKYVNDHQKRLVMVNPFSVKKIKELDDNSPKKTDSKDPKTIAKLVVDGRYSIPYMPEGIYAEIRDLVYSRDGIMKQHNISANRIQRWLAIHFPEYLGLYTRFDAISGLAVLEKAPLPKDVIALGVNGIRKIWHDKKMRGRGVTEDRAKTLVEAAHNSVGLDGGIGTKSELYMLLEEHRLWTSQLEAVNKVLEEMILKVPHVEKLLAIKGVGSITIAGFIAEVGDIRRFDSPKQIQKYAGLELVENSSGKHKGRTRISKRGRRKLRKILYQVMVPLLARNKEFRGIYDYYVTRVKNPLKRRQAMVAVSCKLIRVFYAVLTKGVEYDRFKMMSDIHRKSDIIAA

SEQ ID NO: 107470 - protein, 406 aa, unidentified
MFQRENKKACVSLDVSKGSSHVQAFYSVGQKATDVCVIKHTKSGFEKLKEIIVTLENSTGEKCVVVFECTGVYSKPVENYLQKIGKKYFLIPPLLSAKVRKSDIRPTKTDSKDCETIANVYFLKKLRPAKPFEKLHDKLKSFCSYYLFLINRTSCMKTKYRHYLDNVFPRIDEFFNVYSPFFMDLIIKNPNPQKLKKKTDEFLYKFITSYDYFGNGKATVFINSFHRYFEDAAIDINEDDAAIDVLSSSAKKLKEDMKSLDDLLEEIILLGMKTEEYKYLITIPGMTKNTASRIAAEVSGIDRFPTASKFIAYAGIDPTVKESGKMTGEHLPITHKGNQRLRCLFYLVASGTSKSKSEGNPVRDFIIKKKSDGLSAKAAIIAGCNKLARIIYAVCSKREPFSLQNQ

SEQ ID NO: 107471 - protein, 339 aa, unidentified
MDHVAIDLGSRKSQICVRNSEGEILEEKRWETLELKRYLEGRPKSRVIVETCAEAFGVAEAARELGHETRVVPATLVRTLGVGARRTKTDQRDARVLSEVSCRIDLPSVHIPKAQSRERKTVCGMRDALVGARTKVINTVRGWLRGQGRRLGKGSRVTFTARVRTACGPELPDYVERQLRVVEALTVEIDEADKVVETQAEADDTCRRLMTVPGVGPLTAVRFVAALDEVGRFSNAHQVESYLGLVPGESSSSERQQRLSITKAGPPELRWVLVQAAWALRTRCRQPAAVPLQLWAHRIELRRGKRTATVALARKLAGILYAIWRDGTEYDGARGAQMI

SEQ ID NO: 107472 - protein, 358 aa, unidentified
MRIIGCDLHARQQTIAMLDTDTGELEEKTLEHEGETVREFYSALRGPILVGIEATGSMQWFLELMEELGIECRVGHPAKIRKAETRKQKHDRRDARLLLTLLAENRFPTIWMPSSEQRDLRTLLRHRHQWVRLRSRVQHTLQSMALNHGLRRGHALWNQEGQQALRALPLAPYASERRAALLTLYPRLQGSIEELDKEVCEEVQQHPQARRLMTHPGVGPITALATEVFLGDPLRFSDGKELASYIGMIPSEHTSGRRQRLGAMSKQGNALLRYLWCEAAMHAVKGDPELKRFYRRKLVQKGLGKARVAAARKLGIRLWIMMRDQIDYQEFCRRGKARQESGSVRAGMPDLNSGPAPQ

SEQ ID NO: 107473 - protein, 424 aa, unidentified
MTQNQSYAAFIGLDKSDKKINVSLQQCAKNKMERSIVKGGAEALHAWVAALCARFPGQAVAICLEQPASGLIHALMSYDFIVRFPINPMTLARYREAFTPSRAKDDPTDADFLCELVALHREQLKAWQPDDVCTRKLRHLTLSRRRSVNMRTRFSNQLKALLKTYFPQALELCGDDLTTPMACALLQKWPSLQQLKKSRAETIRRFYYAQNARRGDVIEKRLALIAQAVALTNDPALIESSIITVQALTLGLRAAHTAISCYDREIARTFAQHPDASLFAALPGSGTAYSARLLAAFGSRRELFESAEAMLNFSGVAPVLKRSGQATITHRRYARPLFVHQSFIEYANESIRHSLWARAFYQMHKAAQKSHWVIIRALAYKWIRILFRCWQQRMPYDEIHYLKSLQKSHSPLLPYLAQPVIQTA

SEQ ID NO: 107474 - protein, 462 aa, unidentified
MMNVQEQREMVEKANRILSEMKSFTWRDLETQGKFSKNDKLSFISDDMLILGCDIGSETHYVRAIDTRGRELSRKALAFDNNAEGFQKAHDWAVQMVAANDKNQIVLGLEPTGHYWFCLAAWMVSNGISVVQVNPYAAKQTKELEDNSQKKDDRKDPKLIANLVKDGNYGMPYLPEKVYAELRRLSMFREQLTEDRNRSMNRLHREMKIYFPEYKDAFGKIDGAFCMAVLKEAPFPEDILKLGGEGIREIWHQAKLRGRGYSRAAEIVKYAETSIGLKDGTAAGREAVRWFAEKIMELDEELAEVENKLNEKCREIPHAENVLEIPGIGGKILSGILAEMGDISRFDDAKELQKLSGLGLVSCSSGKHKGETRISHRGRKRLRYWLFQAARSAVAHGEEYKWIHAHYTTRAGNALQKMQSLIVIACKLLRVIYTMLKTGKPYDPEKLLKDIRYPENVQTAAA

SEQ ID NO: 107475 - protein, 392 aa, unidentified
MWDYRKQLKGGLPMNRIIKIGMDVHTTNYTLCIFEPSFEHDGTVHYVTQVKPEVKNIIRVIETFKKKHEDDELNIVCGYEAGCLGYSLYHELKDKGIECVILAPTTMKTEKGGRKLKNDYRDAKMIAECLAYGGYSAVHVPTELDNSVKEFIRMRDDIHENLKRIKQQIIAFMTRNGKQFDGKSYWTKKHLDWIKATSFNDEVLLQDTLKEYMIEYNRLCDRVEELDKQIEEISVKEEYVEKVQQLQCLIGIKTHTALSLIVETSDFNRFKKGNMYSAYLGLIPGDDSSGDKENRLGITKAGNSHLRRLLVEAAQGYTRGSIGFKSKDLKARQSKCGSEVVAYADRANERLRRKYYRMISRGKKYNVAKAAIARELACFIWGIMTEHIDLCS

SEQ ID NO: 107476 - protein, 316 aa, unidentified
MESQKVSFPQIVEVGCGIDVHQAVIVATIRNSDQRYETRTFEAYTSSLKELRDWCKQKGVTHIAMESTGVYWKPVYNILEEFFEVILVNARHVKNIPGHKTDKKDSAWLSKLLLGGLLKGSFIPPVEIRDLRDLVRYKRKQVQQISSESNRLYRILEDANIKLSTVMKADSVSGKQVIKALISGERDPVVLTKLVHGKTKADKAEILKALEGNLRDHHRFMLQTIQHSIEKKEQLVEEIEKQIDLMAEKYKVEVDLLTTIDGVGRDSAIAIISEIGTDMSRFPNEHHLSSLGGMSPGNNESAGKKKVLKLSKETNI

SEQ ID NO: 107477 - protein, 369 aa, unidentified
MKKHITFVGLDVHKNSINVALADEGRNGEVRYYGAIGGTLDDLDRVVKKLSSSSRELRFVYEAGPCGYDIFRSLTDKGYDCAVTSPAHIGKKPSERIKTDHRDAMMLARLHRAGELTYVFVPRAEDEAMRDLTRAREDALKAQRVGRQQLGGMLLRLGFRYQGRTAWTPAHFRWLADQKMPTPSQQVVFQEYINAIEETTKRVERLTQQIEILVPSWRMAPVVKALHALRGVSRIVAATMIAELGDLTRFEHPGKLMAFLGLVPSEHSSGQKRRLGAITKCGNGHARRVLVEAGQAYSYQARISPHLLKRQEGVSKEVKDISWKCQVRLCARFRRLTAAGKNRNTVVTAIARELAAFMWSISKQVPISA

SEQ ID NO: 107478 - protein, 407 aa, unidentified
MDLLKTVFGIDVSSRKSNVCIMVNGQKVNDYAISNDMVGFNQLLGDLKQVTKPQIIFEATGVYSRRLQAFLDMHELRYVMMNPLEAKRKTKDDLHQNKTDKLDALYLAKLQSEHPQRLAYVQSKEYQELMANNRIYEQASHDLITNKNRLHKAVQLTFPEIEHLLANPRGKNYWSIALRFPHPDIVLETKETDIIDFLKGLSGIGKKRANDITQSLIRLAKVACPAVKKNSAHVRGLKMAINNILSAEEECQTALQEMAKLAPKRDLEILTSIPGIGENTALRIISELGDIRRFNNPSQLNAFVGVDPQVYESGNLTAHLSISKRGTAIGRKVLYLAINQIQSAKKAGNPCHIADYYEKRKRSSETASHKKAAIASIHKLLRTIFALIKNDQLYSYDVAKHNQRLLS

SEQ ID NO: 107479 - protein, 386 aa, unidentified
MFKTEKGAIAIHTNLGAIFVSLELSRSTWLITSLSPGNGERMSKHSLRAGDVAGLFGLLSKLRERCRAKTRNDYPIVTIQEAGLDGFWIHRVLEKAGIESHVVDAASIATSRRHRRVKTDRIDGEALLRVLMAYKRGEPRVCSMARAPSPDEEDRRRIGRERKALTAERVAHVNRIKGLLFSQGITNYEPMNTDRRQQLEDLQTGDGRALPTHMRAQIGRELDRLELLLEQIRTVEDERDALIAAQTAETMPSPVTMLLEIKGIGTEFANILWVEGLFRHFDNRRQVAAYAGLAPTPWQSGAIDREQGVSKAGNPRLRVTLIQLSWLWLRHQPNSVLSQWFNARVHRNGGRMKKSTIVALARKLLVAIWKYVASGVVIEGAIMKRA

SEQ ID NO: 107480 - protein, 345 aa, unidentified
MNITTAGLDLAKNVFQVHGIDERGNAKLCKQLKRAQVLGFFANLPPCLIGMEACASAHFWARKLSAFGHTVKLIAPQFVKPYVKSNKHDAADAEAICEAVARPNMRFVPVKNPEQQALLGLHRARQGFVAARTAQANQIRGLLAEFGIVFAKGIGCVTRKMPEVLEDAENGLPGMSRELFSRLFGHFRELDRQVKELEGQIQAWHREDTASLRLQAIPGIGPLTASALVASIADARMFKNGRQMAAWLGLVPRQSSTGGKAQLLGISKRGDKYLRMLLIHGARSALWHQKSQSTPTQGWLKGLLTRRHRNIAAVALANKNARIVWALLAHGREYQSGYIPAQAAA

SEQ ID NO: 107481 - protein, 419 aa, unidentified
MADETVSWFAGVDWGSERHQVCLLDAAGQVVGERAFRHGGAGLAALCDWLVSVAGEPERVAVAIEVPHGPVVDALLDRGFAVHAINPKQLERLRDRVSLAGAKDDRRDARVAAGGLRTDPHLFRPVEAGDPAVIALREWSRLAEELQHERVRLGNRIRQQLWRYYPQLLAVSDDVTAEWVLDLWTLAPTPAKAARLRETTLARLLQEHRIRRLDAERALGILRQPAIAVAEGVTEAAVLHLRSLVARLRLANREFYQAERKLDELCTNLRDNTSTPKSGGPCDAAVLSSLPGIGPVTLAILLTEAAGPIKRRDYAALRTLSGVAPGTKRSGKSCLVTMRYAAQIRLRNAVFHWARVAVLNDPTCGRRYAALRARGHSYGRALRGVADRLLGVACVLLQRQALFDPAHDKRAASQPRATS

SEQ ID NO: 107482 - protein, 345 aa, unidentified
MKITTVGIDLAKNVFQVHAVDERGRAVLRRQLRRDQLAAFFVNLPPCLIGMEACASAHHWARTLQKFGHTVRLMAPQFVKPYVKTNKNDVADAEAICEAVGRPNMRFVPIKSVEQQAVLSLHRVRQGFVRARTAQGNQIRGLLGELGLIIPKGIVNVTKRVPTVLEAAGEEVPAAFRQLIERLTKHLKELDRQVDELEAQIKAWHRGSELSCKLEKIPGIGPLGASALVASIADANSFDNGRQLSAWLGLVPRQDSSGGKPKLLGISKRGDVYLRTLLIHGARSAILAAQRKSVNTNVWLAKLLDRRHPNIAAVALANKNARTVWALLAHGREFRADYAPEVSAA

SEQ ID NO: 107483 - protein, 362 aa, unidentified
MQIIGCDLHARQQTLAMLDTGTGEVVNRTLTHEGNSVREFYSALPGPVRVGIEATGSMKWFLHLMEELGIDCQVGHPATIRAAEPRRQKHDQRDAELLLKLLVEKRFPSIWQPSKELLDLRGLLLHRHQWVRLRTRIQNALQAIALANGLRRGSSLWSESGQRDIASLPLATHTAQRRSELQAMYARFEAEIEQLNQRVLEQAGQRPSAGLLMTHPGVGPITALATDVFLGDPRRFTDGKAVASYIGIIPRENSSGGRQRLGGLSKQGNPLLRFLWCEAAVHAVRRDPELRRFYRRKLVQKGLGKARVAAARKLGIRLWIMLRDHIDYQEFCRRGQMQQRSGDACAGMPGMRYGAKSHRLID

SEQ ID NO: 107484 - protein, 309 aa, unidentified
MEIVVGIDVSKERLDVAILPQEEVFAVGNDHAGIDELAERLKGIGVDAIALEATGGFEMLAVAGLSAAGLTVLVVNPAQVRAYAHAIGRRAKTDPIDAAVIAAFVLATKPEIRPLRDAETQALSELVARRRQIVQMTVAEENRLRMALAKQAQKSIKRLLTALRRELESLDADLDSHIRKSPVWRVREALLTSVPGVGPTTARTLLAELPELGSLDRRQIASLAGLAPWTRQSGKWKGKSFIGGGRSKVRAVLFMAALVASRYNPDLKAFRDRLVAAGKPKIVATVATMRKLLTILNAIIRDGRPWQNA

SEQ ID NO: 107485 - protein, 341 aa, unidentified
MRKTLYCGVDLHSNNAMYVVTDEQDKQLLRQRLPNELPAVLKTLAPYRARLKVVAVESTYNWYWLVDGLQEKQYPVVLAHPSEMDQYDGIKDADDLTDAAFLARLARLNILPTGYIYPKADRPVRDLLRRRMLVVQHRTGVILSLENMAQRQTGQKIGWRTLRKLSVEERAALLGEHDCLAFVAAEQIELIGLLTKTIRRFEQKILEHAQLRPAYECLQTLPGVGTILALTIMLETGDIGRFATVGDYTSYCRCVRAIHSSNGKKKAHNNGKNGNPYLAWAFVEAVHHALRVCPSAKSFYDTKKTKRNGALATKALAAKWSKAAYYMMKRQENFDLTRVFG

SEQ ID NO: 107486 - protein, 318 aa, unidentified
MIQENCFVGIDAAKLRFDGYVHPSGERLVGGSSPREIEELTRRIRALAPRAVGLEASGGYERRLADSLHAAGLEVYILPPARVRGFARALGQLAKTDAIDAVMIAGYLAATHTRLRPYAPDPARSRLSALAAHRRRLVAEKSGLTSQCDTIDEPLVRDMIAQRLDMIARHVATLDKAMRQLLATTPHLGQRHKRLQRVAGVGPVLATALLADLPELGQVSPKVAAALLGVAPHARQSGAFTRPGRCSGGRKHLRDIAYMGALSAIKARDPVLHPFYQRLRSSGKPFKLAMIATVRKLISILNAIARDDPAFQTPSTVA

SEQ ID NO: 107487 - protein, 378 aa, unidentified
MPKTFDLSRSLAALEQDSTLIVVIEMSQSSWLVGGMVPGVERQPLKKISAEATGLLALVHRWRGEAERAGRPIRRIAVAYEAGRDGFWLARWLHARGIEAYVIHPNSVAVSREHRRAKTDRIDTALLMRSFLGWLRGEPRHCQMVAIPTAEEEDARRPNREREGLVGERTRLVNRMKAALIRFGIRTFKPTLRKAQERLAGLRTAEETPLPPETLAELGRDMARLRLVREQIKAIETARLRRLEQARSQSEGPHAMVRLLARVLGIGIETADMLVSEVLSRDLRDRRAVARYAGLTGSPDESGQRRREKGLARAGNARVRRGMIQLAWRFLIFQKDSALAQWYRARTADGLARKLLIALWRMVTTGEIPQGLKLRPAA

SEQ ID NO: 107488 - protein, 347 aa, unidentified
MTIVGCDLHTRKQQVAVLHTDTGEVEEHELLHSDNAVEQFYSALPRPVTVGIESTGYALWFHELMQRLGHTLLVGEAAKIRAMVVRKTKTDRRDAQHLLDLLKHERFPTVWIPDPATRDLRALVTHRVRLVRMRTMVKNGLQAIALNRRLALGSKLWSQRGRAQLAALDLAPHTALRRGDSLELLTWLETHIAGLDARIADAAYAHPGARLLLTHPGVGALTALTTVLVLGPTARFPGSKHVVSYVGLAPAVSASADTCHLGQITKQGSALLRWVLGQAAPLAARADDDLHRLYRTLLHRRGRPKARVAVARKLLVRLFIMVRDQIDYAEFRRRGRIPRSDLHPSPA

SEQ ID NO: 107489 - protein, 331 aa, unidentified
MNLNSQGRVTKNVAPNAGVDVSKEHLDLAWLEQQLHVSNDAMGWCQAIEQLRLAQVDLVVLEATGGLERGFIAALQEAGLEVARVNPRQARDFAKSMGQLAKTDRVDARVLRDLADVLARHAKRATFLAPPSDSEREQLRALMVRRRQLVDMRVAEANRLSIANRRTTRSIMSVLKLLDKQIDAIDSDIDGHLEHHFKGLRDLLQGAKGVGQVTAGALLSGLPELGQLDRRAICKLVGVAPLASDSGKHRGARRIWGGRADVRTALYMAALSAKRYNPVIKQFWERLIAAGKPKKVALVACMRKLLIILNAMVRDNARWDVNRTPAHAPTP

SEQ ID NO: 107490 - protein, 342 aa, unidentified
MNNSVISIDLAKNVFQVCVFDEHRKPIFNKKVTRAKLLETVMNQKPNRIVMEACYSANYWGREFLKLNRSVGLIPAYQVKPFVVGNKNDSNDAIAIGEASYRPKMVFVPVKTIAQQDLQSLHRIRDRLVKARTAVANQMRGLLSEYGIVIAKKIAVLRQEVPWVLEDPDQPLSEVARSFVADLYDELSVFDHKIKNKTLALEALLKNNDDYQRLQEIPGIGPIVGSALISAVGNAKQFKNGRNMSAWLGLTPKQYASGDNTRMGGMSKRGNRMLRKLFIDGARAVVIWVENKTHGFSLWIQALLIRRPRHKVLVAVANKIARMAWAVLSKNEPYKAPGLVSV

SEQ ID NO: 107491 - protein, 362 aa, unidentified
MNRNTGMNEGQIIGTMGGKQVVGLDIAKHVFQLHAVDMSTGEIANVQIKRAKVLEHFVNKPKSLIAVEACGGAHHWARELTALGHTVRLLHAKIVRPFVSGNKTDATDARAIWLAVQQLGVKFVGIKSTAQQATLTLHRQRELLMKMRTMQTNALRGLLYEFGATFAQGRKAMFKDVEQTLEDLSAQLPQMVRDSLREQVARIKAMSDDILTIEKRLGLQLKADPHMQRIAQIPGVGLLTATAAIATMGEASAFKSGREFCAWLGLVPKQTGTGGKVRLGGISKRGDTYLRTLLIHGARSVLAHAKEPGPWLAQIQARRPANVVIVAQAAKMARTIWAVTAKEQSYQRGFQSVRPNVSVQAA

SEQ ID NO: 107492 - protein, 349 aa, unidentified
MLADEVDYVVGVDTHRDQHVLAVVVASSGGVIAQRSVRSNAHGYTEAIGFARDYAPGARIWAVEGAGHYGAGFARYLSSRGETVHEVSSTARGERRLQGKDDLLDATRVARSALASTARALPRSGERQEALRLLLLARRSAVDVRRVAIVQLRSVIVTAPESLRDELRRLPLGELLRRCSRFRRSSSRTPDQLATILVLRSLAQRIQAATREASELEREILTHVRALVPELLDEPGVGPIVAAQLIVTWSHHGRVTSEAAFARLAGVAPLPASSGLTTRHRLSRGGDRQLNRALHTVILHRRQHDPATRDYIARRITEGKTPRDATRILKRYLARHLYRVMQNTTPLTT

SEQ ID NO: 107493 - protein, 344 aa, unidentified
MKVTTLGIDLAKNVFQLHGVNEYGKTVIKKQIRRDQMAEFFANLPACLIGMEACGSAHHWARKLEGFGHTVKLMAPQFVKPYVKTNKNDAADAEAICEAVARPNMRFVSIKNIEQQAVLALHRVRQGFVKARTAQANQIRGLLSEFGLIVPQGIGYIASRVPELIEDAGNELPGSFRMLIERLLDHLRALDHQVVELETQIVRWHCQSAASSKLAQVPGIGPITASALVASLGDAKNFDGGRQVAAWLGLVPKQHASGGKQKLLGISKRGNTYLRTLLIHGARSVIYRAQNKPESCRWINGVVSRRNKNVAAVALANKNARIVWALLANEREFRPDYTTAKAAT

SEQ ID NO: 107494 - protein, 353 aa, unidentified
MSHNSKDCKVTVGLDLGDKTSRVYAVGAEGERVSETTVSTTPVGLKRFFETGTSWRVVMEVGTHSPWASRQLEQLGHEVIVANPSAMYGRRRRRKRNDRMDAEFLARQGRADVRLLHPIQHRSATAQQHLELIRARDQVVRARTKLINHVRGAVKAQGTRIRKCSAEAFAKRAQAELPPAMAPSVTPLLEIITELTRRIAAYDAAVRTMVRTTYPVAQRLQQPAGVGSLTALAFVLLVEDPTRFSRSRDAGAYFGLVPRLDDSSESRPQLRISKAGDELGRRLLVGAAQYILGPFGPECDLRRYGEAIAQRGGKNAKKRAAVAVARKLAVLLHRLWVSERDYEPDHLLKQRAA

SEQ ID NO: 107495 - protein, 347 aa, unidentified
MGQIIRIGMDTSKYIFQVHGVDGSEQPVLRKRLARKQMLDFFAKLPPTVIGMEACGTSHHWARELKQLGHEVKLIAPQHVKPYVKRNKNDGRDAEGLCEAMSRPTMRFVAMKTAEQQAALMLAGLREQMIARRTQISNTIRGYAAELGITVAQGLNQIEPLLARLAQDDSVPELARDLFALQGRDYAQLQMELKTIEARLMAWHRANADSRRLAKIPGIGPIGGATAVMKMPDPHAYASGRHFAAWIGLTPKDHSTAGKTRHGKITRAGDERLRSILVAGATAVIQQAKHGHGHPSPWLIALLKRKPPKLAAVALANKNARIIWKLMVTGESYDGARMPKASVAAAA

SEQ ID NO: 107496 - protein, 343 aa, unidentified
MQIRSVGIDLGKTTFHLVALGDNGKVLLKKKFTQKQLIAFTANMQTCLIGMEACSGSHLLGRALREQGHDVKLIPAQFVKPFVKSNKNDFIDAEAIAEAVDRENMRFVPIKTDDQLDLQALHRVRDRLMARRTSLINQIRAFLLERGIVFAKSPIRLREALPEVLENVNENLTPRMRNLVAMLWSEWKDLELQIVEMNDEVERIASSDTACRRLRQIPGIGPLVATAIVASIGNGAAFRKGREFAAWMGLLPKQHSTGGKARLYGISKRGNSYLRKILIHGARAVVLRSKRDRIAMGAWMTSLETRAPRNVLIVATAHKLARIAWAVLSTGQDYRAVPEALTV

SEQ ID NO: 107497 - protein, 340 aa, unidentified
MSLYGGIDLHANNSVVVLLNDQDQVIYEKRLPNHLPAILEPLRRHQGEIEGVVVESTYNWYWLVDGLMEAGYQVHLANPAAMQQYSGLKYTDDHADARWLAHLLRLGVLPEGYIYPKAARAVRDVLRKRAHVVRQHTANVLSVQNIMARNTGARFSGKQMQELTKQELTTVLADETQVLAVTSSLVVLDCLRHQINMLEQTVHKHLHHTPSYGQLLTVPGIGPILAQTITLETGAISRFPSVGHYASYCRCVDSTKLSNGKRKETGNVKNGNPYLAWASMEAAQFALRFQPEAQRFYQRKLAKSRNNVVLARKAVAHKLSRACYYMMRDLVPYEATKAFG

SEQ ID NO: 107498 - protein, 338 aa, unidentified
MSVYAAIDLHSNNSVLAVLDENDRVLRQRRLPNDLPAILRELEPFHDELAGVVVESTYNWYWLVDGLMTHGHRVHLAHCSAVPQYAGLKHGDDESDARHLAHLLRLGILPEGYIYPRAQRGVRDLLRRRFSLVRTATRLLLSVQSIWARHTGQGLSANGFRQLDATAIEAALPDPIVRLSVLAQIKVWQGIQEQIEQMENWVSDAAECRRELIALRSIPGVGLILSMTIALETGEITRFAEVGDYASYCRMVKSERLSNGKKKGAGNRKSGNKYLAWAYIEAATFAVRFSPQIKRWYTSKCGKRHKVSALKAVGHKLARAGFYLMRDGGRFDVHRAFG

SEQ ID NO: 107499 - protein, 375 aa, unidentified
MKEKLRFLGLDVHAETIAVAIAELDGEVRSLGTIPNRSESIRKLIRKLGPAENLRACYEAGPTGYIVYWQLTELGIQCEVVAPTLVPVKAGDRVKTDRRDAEKLARCYRSGDLTAVWVPDEGSEALRDLVRAREAAKQDQMRARHRLSKFLLRSGQRPPSGVRPWTRPYLIWVAQLRFTQIAQESTRQDYLHEVEHMRGRVARLEQAITEAVKLASPALQQVINDLQALRGIADISAVTIAAELGQVSRFDSARQLMGYCGAVPSEDSSGRRTRRGGITKTGNAHLRRIVVEAAWSYRRPPCIWYGLRRRQESISEEAKEIAWKAQHRLHKRYMKLGAAGKDQRKIVTAVARELLGFIWAIGIRAEAISKQRIAA

SEQ ID NO: 107500 - protein, 342 aa, unidentified
MNVMTIGLDIAKNVFQLHGVDANGKTVLRKQLKRNQVLAFFANLSACRVGLEACSGAHYWARELIKLGHDARLISPQFVKPYVKGNKNDANDAEAICEAVGRSNMRFVPIKSIEQQDLQMLHRVRSGLVKERTALANRIRGLLSEYGIIVALGIAKLRQQLPDILEEAENGLTMAARQIFADLQEQLIELDKQVAAYGDKIQSVHRASEVSQRLGDVPGIGSITATALLAALGDGKAFTSARQVAAWLGLVPRQDSSGGKPRLLGISKRGDVYLRTLLIHGARAVVKAAAQKDDSQSRWINDLVKRRNANIAAVAVANKNARIVWALLTKSESYDVSARASV

SEQ ID NO: 107501 - protein, 348 aa, unidentified
MIKLGVDVHAACYVVVAQHDHALPRAPRRFGPAEFVPWVATLLAAGHTVHVVYEACGFGFGLQRQLTALGAHGLVVAPQKLDERRTGVKTDARDAATLCQRLSRYVDGNTRELAVVRVPTEEEERRRHLHRQRGQLVRHRCKLEAAGRGLLVNHGQAAPSHWHRPQTWSRLQKLLPDWLRPLLETYRPILLALEEQIAALTAQIVAAAPQEIPRGIGQLSSVILTREVCDWHRFKNRRQVSSYTGLCPGEHSSGQKRAQGSVTKCGNPRLRTCLVELSWRLVRFQPDYPPVKKRLGVLGKGARATSAQRKKAITAVARRAAVDLWRLHTGQCTAEQLGFTIHRSTPLA

SEQ ID NO: 107502 - protein, 344 aa, unidentified
MDQIIRIGMDTSKHIFQLHGVDAAERPVLRRRLRRNEVLAFFAKLPPTVIGMEACGAAHYWARELRKLGHEVKLMAPQHVKAYVKRNKNDGRDAEGLCEAMSRPTMQFVPVKTEEQQAALMLAGVRQQLIARRTQLSNAIRGYAAEFGLTAAKGLDKIEPLLARIAQDETVPESARELFAFQGRDYARLQIELKAIKVKLRAWHRANADSRRLAQIPGVGPIGATTLVMKTPDPRAFASGRHFAAWLGLTPKDHSSGGKTRLGKITRAGDEVLRRLLVAGATAVIQQVRRGRGHPSPWLLALLKRKPPKLAAVALANKIARIAWKLMTTGESYDGARMPGAPVA

SEQ ID NO: 107503 - protein, 415 aa, unidentified
MALKIVYKICCGIDVHKTFVVACIASTNDKGVTSYESHRFSTYTSGLKTLLQWLLDRNCKDICMESTGKYWIPVYNILEKECSIVLAHPKYVKAIRGKKTDKKDAKWIADLFKHDLVAGSFMPPADIRQLRDLMRYRFKLTCFKSSEKNRLQNCLTVSNIQLGNVVSDTFGKSAQAILDKLLENPADTSFDLEPLVYKSLKKKLPELRDAIDGFITPEQAGKLKIIKDHYDNLESRKAELEELILALAAPYQQELTILQTAPGINSEFTAIGIISEIGTNMEAFPSAKHLCSWAGLTPTSNESAGKKKSVRVSKAGCYIKPLLVQCANAVVKSTKHPEMRNRYLRLKKRRGHKKAIIAIARMLLTALYHMLKDGENYNSELYRKTDLPPVDREITIEQALMLIRNQGYKIKSATT

SEQ ID NO: 107504 - protein, 336 aa, unidentified
MIVIGVDVHKQSLTAVAVDEAGRMLDERTVVGADDGLLTWASQVSSERLWAIEDCRQLTRALERELIAAGEELVRVPPKLMAPQRRAGRLRGKSDPIDALAVARAALREPRLGRPRPDEQPFRELKLLVDHRDDLVDERRRIQQRLRWHLHQLDPTFVIVAKGLDRPVHLDRVGRWLNRRPKEVQVRVARELVARCRSLTKTIVELDHELEQHTARLAPALLELPGCGAITAAKLLAEIGPIGRFDTDAQLARHSGVAPLEASSGRVQRHRLDRGGNRQLNAALYRIAITQARSHPAARAYLERKQPRGRADEKPSAASNAPSPASSSTPSKRAPP

SEQ ID NO: 107505 - protein, 341 aa, unidentified
MVEYVGLDVSKEETSICVKDAKGKLLACGKALSDPNSLFEWLREHCICPELIVMETGTMSGWLTRGLRAKGLRVECIDAVRAHAVMKLKRNKTDANDADLLAELARTGFFEAVTVKSLPAHHVRSLLKARDQLVRQRKDLDNTLRGLLRSFGIKLARGRRFPERVAAAIADHPQFELFVMPLLSAREGCADALKRMDRQVRRLAGKSDICRLLMTAPGVGPVTSLCFSATIDDPKRFAKSRSVGAYVGMTAKRYQSGEMDYIGRISKQGDNMLRAYLFEAANAMMNLVKRDHPLREWAFRLQDKSGSKKARVALARKLAVILHAMWMSGEAFHWPDAETTA

SEQ ID NO: 107506 - protein, 350 aa, unidentified
MIIIGADYHPGFQQIAFVDTDTGEFQERQLQHREEAEKFYRELAAQGQKVRVGMEASGHARWFERLLAELNFELWIGDAAEIQTKRVRKAKTDREDARLLLRLLLEDRFPRIWVPSWENRDLRQLLWHRHRMVQARTRIMNQLQAVARNEGLRSKKRLWREPGREQLQSFRLAPWASRRRQDLLELLDRLNPTIAELSQAIEQEVHNCPAAQRLMTHPGVGALTALAFVLIIGQAERFQCGKQIASYLGLVPLEDSSGNRRRLGHITKQGNSLLRFLLVEAAQVTARSLPEWRSKYVHLTMRRGRKIAKVAMARKLAVRLYWMMRKEWNYEQMKKFGSHAGQPGNRYGVK

SEQ ID NO: 107507 - protein, 337 aa, unidentified
MEYFAGLDVSMDETHICVVDRDGVVVLETKTATSPAAIASGLAKAPECKRIVFETGRMAPTLYHGLNALGLPVVCIETRQAYQALKSLGTHKTDRNDARGLAHLGRTGFFKPVHVKSLAAHAIRALIIARKKLVGQRVTLENQIRGLAVVFGVRLPRGLNPKFAEQAIRSSESIAGLAGVMRGLLAARNAVLKAITAINGDLKRLVRSSEACQRLMTIPGVGQLTALAFVAAIDEPERFRRSRDVGAYFGLVPRRYQSGEIDYTGSISKCGDRRLRTLLYEAANVMLTRYKPPLKLKDWALAIAKRTTMRKARIALARRLAIIMHAMLRHGTEFQAV

SEQ ID NO: 107508 - protein, 364 aa, unidentified
MVDSTLVDKEAPTESTMRLYIGVDYHPYQQTVAYCDHSTGELKIRSLKHSDKEQLRRFYVQFTAPAVIGVEATGGLEWFEKMLTEIGHELVVGNPRLIRRMALTRQKTDSRDAETILDLLHNGTFPEVMRRSKRSREILDLLHYRHFLTRKRTAVANQMQAAARRLGLPKFRTRSSHAKELMESALETEAQRYLLRSRLAVYDSLTAEIAEIERSLRSEAISDPRAVLLQTHSGIGSLTALAIIHTLGDVHRFPRKEHVTGFVGLDPLERSSAEKQRIGRISKHGSKLLRFLLVQAAQASRDERLKGFYSRVSRRRGKPKAKIAAARKLLGNCFIMLRDEINYAEFCRRGEVGLCGKPLKLRGQ

SEQ ID NO: 107509 - protein, 348 aa, unidentified
MSYRIAGIDVHKKMLAVVVSDVEVKGEYQFERRRYGSNPEHLRLLAEWLIGQQVEEVVMESTAQYWLPVWGALERYWKPICQKREGAGPMSGMLHLAQAQSNRGRRGRKKDFPDAERLVKRLVANELILSFVPDAEQRLWRTVTRRKYQLTRNSSLVSDLLGVSARRMLKALAEGETDPAVLAAMAHKQLRATQAQLCDALGACAELKPIYRRLLKMFLEELQLLDQQISQLDQEMATLLSRHQDAVERLALVPGLGADSAQQIIAEVGAQAATFPSAKQLASWVGACPGDEESAGVSKTHRSPKANRHMRRILNQAANAAAKSKGTIFEIIYRRLVSRLATLRRKNE

SEQ ID NO: 107510 - protein, 369 aa, unidentified
MRSEYTKFIGRDVHKESIAIAIAEHGREAPRFIGTTGPLIEDVLKVLSPLGASDRILATYEAGPCGFGLARQLSKRGYDCQIAAVTKIPRRTGDRIKTDRRDALMLASFLRAGELTPIVIPDERDEAIRDLCRAREDAVSARLKARHRLKAMLLRHGYRYPGKGGWTATYDRFLARVSFGHPAQDIAFAEYRNAVVESFKQVDRLTDALRDQISTWRWQPVVSALMTMRGIDFIAAATLVSEIGDMSRFDRPKRLMSFLGLVPSEYSTGETRFQGRITKCGNAHVRRILIEAAWNYRYPARMSRGITERQVGQPSNIRETAWRAQLRLCGRYRRMRLRGVNANKICVAVARELSGFIWDVARQVPAPSK

SEQ ID NO: 107511 - protein, 354 aa, unidentified
MTDLSMPDPDRLVTLGVDTHLDSHVAAALDERGVLLDSISLPSTPSGYQALLAWAAELGTIDRVGIEGTGSYGAGLARCLTETGLVVLEVDRPDRRQRRQRGKSDPLDAEAAARAVQSGRAGGLPKARGGVVEAIRALRIARGSAMEARSRVANQLHALRVTAPDALRDELRTLSLGGLVQRAAGFRRTALADEPVAATRLALRSLARRSQALSAEIAALDGQLRRLVGAAAPQLVARQGIGIETAGQFLVTAGGNPARLRNDGAFGMLTGTSPVPASSGKTVRHRLNRGGDRQANRALHMVVLSRMAHDSRTRAYVQRRTAEGKSTSEIMRCLKRYVAREVYGLLLQSPGLTT

SEQ ID NO: 107512 - protein, 348 aa, unidentified
MPNYNQPHQFYAGVDLHARSMFVHVLSAKGKTVFERDLPAEPDAFLDAVKPFRKNLVVGCECMFAWYWLADLCEDQRIPFVLGHALAMKHIHGGKAKSDKIDASKLANMLRGGMFPLAYVYPRAKRQTRDLLRRRSFFVRQRAQLITHIVNTNSQFNLPPFAKKLSYAANRSEEIAERFPDPSTRLMIGADLRLIDAYDAQIATLERHLLHSAKVDDPVTFGFLRTIPGIGPILGLILLYEIDRISRFPEAGNFLSYSRLVRCAHESAGKVKGFGGKKIGNAHLKWAFSEAACLMLRTCLPVKSWMQRQEQKRGKRKALSVLEAKIGRTVYHLWNKQQAFDAKKFLHA

SEQ ID NO: 107513 - protein, 416 aa, unidentified
MVPDGERGVVFGLDISKDTITYRAHRPEASSRAFVVGQDMAGFRKITAALEEFKSKGYEVWVGYEPTGSYSCCIFEYLVEQGWRVVQINPKHTSRYNEIMDNLPGKSDPRDPRGIAGLVWQGCYRIPLHLVGTYAELRSASVEWAMLSVEGTRLRNQLHSLVQLWCPELGIVFKDVLCKSARGIMRKYSSVDAIANAGVARVRSVLRKASRGRTTSRAEALLEAVGQSKALKSGQKTRYTSILHLLARLDLLEEHKSQLKAEMAQMLSLLPESGRLLSVRGIGVVTSAILLGECGDIGEYEPRQLEKLVGLNLHEFSSGQHAGKRKISKCGRANVRYSLCVAATRMAGKNGIYHDVAQKMRANGKKFGEIRIAVARKLLRLLHALVHEDQDFDLRQFVVRRGTGDDLLAHQDRQAA

SEQ ID NO: 107514 - protein, 409 aa, unidentified
MEVVHARCAGLDVHKKSVYGCVICWEANGEKRQEKRSFGTVTADLLRLADWLREHGVTHVVMEATGVYWRPVWAMLEGQFELLLVNPHHVKAIPGRKTDAKDCEWIAELLQHGLVRGSFVPPTEIQDLRDLTRYRVELTQSQARMANRIQKLLEQANIKLSSVASDTLGVSGLKMIEAIIAGEQDPEQLADLAQKRLREKIPELRLALEGRVRDHHRFLLKEFLEQWRALGARIRRMEEEIDRRMVPFEDAVRLWQSIPGMERLTAYNLVAEIGVNMAQFPSAQHLASWAGLCPGNNQSAGKRMSGTTRDGNKWLRRTLCQGAWAVTRKKDCYLASQFRRVAARRGMKRAVMAVAHSMLIIAYTMLKTDRTYHELGGNYLERINADQLQRYYVKRLQKLGLTVTVAPAA

SEQ ID NO: 107515 - protein, 335 aa, unidentified
MKKIYVGIDISKEKCNLCFRSGLEIVREEECSNDVKALKKALKAVLKALGASLEEVLVCAEYTGRYIYPLTVACQELDIFLWMDDPTRIKNSMGLTRGKNDAIDAARIAEYAFRYSDKAVRYSIPDAALASMKNLLADREFLLIDKKRYQSQLSDQKRYMAPGDFKHKNSRWKKVIKSIDEQIAAIDAEIESLIAADPVLTRQKELLVSIDGIGDRIAINMIAITGGFTRFQNARQFCSFAGLTPYKYDSGTSVRSKAKISKRANQTMKALLHMSAVNVATRMKSGEYKDYYERKLKEGKHVMCILNVLRAKLVHRMFSVIKRDTEYTKEYKPAC

SEQ ID NO: 107516 - protein, 327 aa, unidentified
MSEVIIIGLDIAKYVFHVHGADERGRAIFSKRISRGKLLDFFAAHPRCRVALEACGGAHHWARQLAQLGHEVRLIPPAYVKPFVKRQKNDAIDAEAICEAAQRPSMRFVAVKSEQQQAAGLVFRTRDLLVRQRTQIINAIRGHLTEYGWIAPKGPSHVTMLADLLEEEEMANSLPEAARAMCRLMLDLLAGLNGKIAALDKEIARRAREDEVSRRLMTVPGIGPISATAIAALAPPAETFAKGRDFAAWLGLTPLQRSTGGKQKLGATSKMGERTLRRLLIIGSSTVVLQASKRGAPKGSWLEQMLTRKPRMLVVIIMGLVSSAVGN

SEQ ID NO: 107517 - protein, 348 aa, unidentified
MEHYAGIDVSLELSSVCVVDAKGKVIKEAKVGSDPDSLVAFFRRLGFAIDRIGLEAGPLSQWLHAGLTQAGLETALLETRHVKAALSAMTVKTDRKDARGIAQLMRMGWFRPVHCKSVGSQEIRALLVGRKLLLGKLLDVEFSIRGILRGFGLKMGMVTRKSFEARVRELCAGQPMLEQIGAAMLAARAALLTEYAKLHKAMLSIVRKDEVCRRLMTTPGVGPLVAITFKTGVDDPSRIGKSKAVGALFGLTPKKYQSGETDVTGGISRVGDEMVRTALYEAANVLLSRVTRFSALKRWGMDVARRRGMKRAKVALARKIGVILHRMWVDGTNFRWTKEASAPRLAQA

SEQ ID NO: 107518 - protein, 261 aa, unidentified
MVDTETGEFSEKTLAHEGSIVRDFYAALEGPVVVGIEATGAMQWFLELLEELGIECRVGHPAKIRAAETRKQKHDRRDARLELKLLVEDRFPTIWMPSTEQRDLRTLLRDRHQWVKMRSRLQHTLQAIALNHALRQGRALWSPAGQKALRALPLAPYTSQRRNQLLSLYNQLQKRVQELDRQVEEQAQQRPQALRLLTHPGIGPVTALATEVFLGDPSRFADGKAVASYIGMIPCEHSSGKRQRLGKLTCGRRRNGSYRST

SEQ ID NO: 107519 - protein, 347 aa, unidentified
MDHIGMDAGMVSSHICELTEAGEVVERQIRTERRRLHEVFGSRRKARILIEASTESEWIACCIEDCGHEVIVADPNYAPMYAQRSRRIKTDRRDAHALADACRLGAYRPAHRTSQPQRDVRAVVGIRELLVRTRTRWIVHIRTLLRRDGLRLAPGRAELFGARVNDVAVSPRLAAQIAPVLTLLAPLNVQIAELDSQVSNGAREDDRTRRLMTMPGVGPLTAVVFVATIDQVARFRNAHQLESYLGLVPREWSSSETQRKGSITKAGNTRMRWLLVEAAWCILRRKKKPETALLRDWADRIALRRGSHVAAVALARRLAGILYAMWRDQTEYDPNQIGRRGHMQQVA

SEQ ID NO: 107520 - protein, 364 aa, unidentified
MVYVGVDLHRKSSYVAVLADDGELLASRRIASQPDEFLRVFGELEAEPTGVAFEATYGWGWFADLLSDIGIPAHMAHPLATKAISSARVKNDRVDAKTLAHLLRTNLLPEAWAAPPEVRDARKLARTRVSLARISSRLKCQTHALLADQAIEVPVTDLFGLAGRAFLEEVLLRPVPQARLQANLRLIDLLAPEVAQADRELRELFHGDPRIERLTPIPGIGFTTAALIVAEVWDVSRFPSPQHLCSWAGLTPTERSSADHTRRGHISKQGSRWLRWAMVESASRPYLKDPTLRRFRDGIARRRGAKIAKVALARRLLTLCYYALRDEDGCRAFPVPPTRTNRPNRGRARSPQVMASSGTAAVSD

SEQ ID NO: 107521 - protein, 416 aa, unidentified
MDVIVARCAGLDVHKNTVMACVRAPGPDGGRISTVRRFGTFTDALRQLRAWLVAEGVTQVAMEATGVYWKPVWHVLEAVPEFELLLANAHAVKNMPGRKTDVADAEWLALLCECGLLRPSFVPPPVIAELRDLTRYRKKLIEERSRETQRIQKLLEDAGIKLDSVVSDILGVSARQMLEALIAGVRDVEALAELAQTRMRPKIPQLRRALEGRFGAHHALMLQMHLDHVDQLSAAITRLDVEVDRVIRPFSAQLQRLITIPGVGRRTAEVIIAEVGVDMRRFATAGHLASWAGMCPGNHESGGKRRSGRARKGNQALRAALCEAAWAAAHGKTGYLPAQYRHLMRTFGKKGQTRAVFAVGHSILVIAWHLLANDCDYTDLGAKHFTRNADPEARKHYLIRQLEALGHKVTVEPAAA

SEQ ID NO: 107522 - protein, 342 aa, unidentified
MNLPVRIGMDTSKSVFQLHGVDENEVVVVRRQFRRAEMIRYFERLPPVLVAIESCGSSHHWGRLLRSFGHEVKLIPPQYVKAYVKRGKNDAADAEALCEAVTRPSMRFVPVKSKERQAACMLMTVRERLVSVKSQLSNAFRSYAAEFGIVGPAGRQNVAQLIKRVLEDDSLPEMAKDLFRLQAEEYAAVEARLAKIEAKLMRWHRDDDVSRRIATIPGVGPIGSSMLSMKAPPPETFRSGRDFAAWLGLTPKDHSTGGRQRYGGITKAGDSMLRSTLIVGATALLRHIRKGRHKPTPWLASLLERKPPKLVAVALANKFARIAWRLMISGGVYNRPVAAMPA

SEQ ID NO: 107523 - protein, 438 aa, unidentified
MSNKVIFNLDELFISVGIDVGADFSWMSIALPNQQFVGKPYKILHNSIDSLTTAVSKIKEAEELYSLESRIFLESTGIYHYPLFCYLRDKGFNCSVINPIITKNSTNINIRKVHNDRFDSKKAALVGLKPDLKVSLMPSDLALNCRNLCREYYDLMDNRSAYVNKLQGELRMAFPQYLGIFSKVTINTSLTLLETYTSPSAFLKADKQEIIDIIKSTARFGLTYAQNKYNAIIQAATDANQFGYIIDSNIKRIRLYISFIRKYDEEINSILESLHELVDANEDSDFVKQIHLIETFKGAGFLSAVSIMGEIGDFSAFSKPKQLFAYFGLDPAVRQSVKFEGTKVQMSKRGSAIARRVIHTLTLQSISISRNREAKNPVLREYYLKKCDSKPKLVAMGAVSHKVCNMIFAILRDNKPFKIIAPQEHIKQYNSAKCDIAA

SEQ ID NO: 107524 - protein, 430 aa, unidentified
MRDNYNMKSEKFGKINDKTLVGGIDVAKDIHEVKWVNWRGEQIGKGLRFNNNRQDFEKLIRQAKQVQEKIGAEKIIMAMEPTGVYGFALEEYLQQIGIDVLIVNGRDVKRTSEVLGNDSSKNDARDARIIGHLVSLGCYSESTRHKEGPYCELDILLRRRASEKEDLIRFTNRLHKELAMLFPEYGVFKNTGLSMGVLTLFKEFGNLEAIIQAGEEGIYACWRKHRTNGYGKGEAKQMHQMAKNSIGIRQTSQAVTYTMRAYIDDYLRSLKNLEAINQLIEQQLAEIPQAKRLMAIDGIGSIITAEILAGIGDIHNFTSPKQILKLAGLAPVTNESGKHKGKDKLSKMGRKRLKTAFYQVGLCLIANNDAFKQIYHYYTQERANPLIKMKGVIVIANKFIRVIYAMLKNGTAYDEQRMLADIQRDDQTAA

SEQ ID NO: 107525 - protein, 404 aa, unidentified
MWYVGLDWADTHHDVEVLDEAGKRVGTRRFAHSHQGLNELIQFLLSIAAQPEQLACIVETNHGLLITFLLEAGIPVYPVNPKTANQLRKSAGAKTDQIDAHLLAKIGRLDLAELRRLEPDSDTVQELKTLTRDQDALIQTQTRLVNQLTACLKDYYPAALNLFAKLQQRSTLVFLQTYPTLQAAQTASLEEITATLRLGKHTNPTRLAPKIVEELHRPQLVANAAMIRAKSRLMLSLVKQLLVVLEDIASYDEAIAPLFLSHDDAELWSSLPRAGKRLAPRLLAEWGDDRARYVDASSVQALAGTAPVPFQSGNYAKAHKRFACLKPLRNALHQFAWQSTLQEEWAREYYQRKRAEGKTHSMAVRSLANVWVRIIYRMWVSKTAYQTATFEAAKLTHAPRQRVA

SEQ ID NO: 107526 - protein, 408 aa, unidentified
MEIIHKRCAGLDVHKETVVGCVRVRERGDVRHEVRHFVTTTAGLLALGEWLRAAGCTHVAMEATGVYWKPVWHILEGEFELILANPLHIRTVPGGKTDVNDATWIADLLAHGLIRSSMVPPGHIQELRDLTRTRRQLIREVVQHKQRIQKVLEDANVKLASVVSDMFGQSGRQMLKALIAGQTDAQKLAALGSERLSASRATLAGALHGKVTAHHRFLLKQHLQMIEQLEQPVSEFEAQIEAALQPFRVAVERLITIPGVSATAASVIIAEIGVDMSRFATVAHLRSWAGLCPQLKESAGKVMSRRLRHGAPWLKTVLVQCAWAAIRNKSNYLHAQFLRLRARRGPKKAILAVAASILTAAYYVLRCQVPYRDLGVLYFARLDQDRTAQRLARPIKELGYEVEIRKAA

SEQ ID NO: 107527 - protein, 342 aa, unidentified
MKRKIYIGVDVSKNWLDLAYYDGVEIDWKSGHIRVDNNKSGYRRISLWMKKLQIAKESALFCMEYTGLYCYNFRVWLESEGIIYGMINPRKMHRFEPDLGEGEPALDRIKTDEMDSFRIAMYCEKHSRKIKSSPSKLPGSAFFNLKRLLAERRQYVKHSVLYKQQLHDISAYDTEESCKRKQAGLKSLSVLRRQTDIEMRKIIKSDEAIYKNYKLLCSVIGVGLVIAVETIVLTENFTAITNPRKYACYVGIAPGRKESGISIRGGDHVSKKGFKQAKANLSLVALQAIRHDSNIRSYWLRRKADGKHTGVVLNAIKFKMILRMFAVIKRQKPYVEMDAYMK

SEQ ID NO: 107528 - protein, 412 aa, unidentified
MKSDSITAVGVDVSKGKSVVAIRRPGGEVVRMPFEVQHDIPGLRELVRILKQTDGNIRIVMEHTGVYWYPIARALNEAGFFVSIVNAILIHDFSDNSLRKVKTDRADAMKIANYGLSFWNSLRRFVPDDEIRTMLKAQSRLYERTSHVSIVMRNGLVTLTEQTFPGINKLLPSTTRTASGHFKWVDFCKRFWHRDCVAGVSLKAFAETYYTWCRREGYNYSDADAAKIHRAAREVTAILPKCESTKRLVVQSVDMLNAAYDSLQAIRTEMNRLASMLPEYNTVMSIDGVGPITGPWLIAEIGDVRRFKNKSALVAFAGFDAPPFQSGTFELKSRHISKRGSPHLRKVAFLTCSAILRNGNLEDPIFAFMDKKRNEGKHYYVYMVAGAAKLLRIYFARVNECFLKEEALTEVP

SEQ ID NO: 107529 - protein, 392 aa, unidentified
MKPQIRVGIDVGSKNHRVGIASPEGVLLEEFSIPHCRQGFERFFERVEHHRRGLPVAVAMEGYGGHARPLDKEILRRGYELLNVNNLKLARFREVFPGPAKTDELDTRLILDLFCLDEHLPLSKGTLARVHETPEENGRLMRLSRRRRELVEEKVRVLNRMQSDLMSVCPELLAITGSADNLWFLRFLTCRDDLAQLARLRHESLLKIPGVGKKYAERIRSWQARAPFSPEASYVGPMIISDARRILELLAQIASLEKAMRELVPSSGIARRLGSIPGFGDVTVAELAGEIGTEERFSGEASLALYLGMCPLDNQSGDYHGSKVPKQVNKRARKAMMNALSHHVRQVPQSRTFYEKKRAQGKSHNQALRAVGRHLVRVIWCMLRDGRDYEIR

SEQ ID NO: 107530 - protein, 430 aa, unidentified
MGLVVPTAMQLEQEDQPLLYDWFVGIDWGSQQHQVCVLDRDRRRVGERVVDHDGASLARLADWLWTVSAGHPQRVAVAIEVPRGAIVEGLLERGFHVFAINPKQLDRFRDRHSVAGAKDDRRDAFVLADSVRTDPPSFRRLQLDGPQLLRLRELSRAEETLLEEFRRSANRLRDQLHRFYPQMLELCSAADEPWLWELIDLAPTPAHAALLSEEQVQRVLKAHRIRRVKAQEVLTCLQAVALPVAPGAAEVAQAHCEFLLPCLRVLAEQLQACSQQVSALLRTLAAEPGEGEGPSDVAIVLSLPGVGRKITAWLFAEAAQPLAERDDQMLRSHSGVAPVTKQSGKRRLVVIRRGCNPRLRQALYHMARVAMQRDAHFNRVYAALRAKGQRHGRALRRIGDRLLRILMAMLRDRTCYDASRIRCEPVVQMG

SEQ ID NO: 107531 - protein, 467 aa, unidentified
MTPHKDFFLDSGPSVPTPLLPPSPVLSDALQVYHPHAAGIDIGEAEHWVAVPPGCDPQPVRRFGTFTADLDTLADWLIDCGVTTVAMESTGVYWIPLFELLEARGLQVLLIDPRQAKRVPGRPKTDRLDCKWLQRLHTYGLLAGAFRPEAHVCVLRSYLRHRQMLLTYAAHHIQHMHKALEQMNLKLTQVVSEITGVTGMAILKAILAGERDPQRLAKLRNPHCHHDEEDIAKALQGTWRAEHLFALRQAVELYAFYHQQITQCDEQIKAHLKTFGDKSAGQPLPPKAHRHKKTNEPRFDARTPLYRLAGVDLTTIEGIEEGTALVILSEIGTDMHRWPSVKHFCSWLGLCPQHKISGGKVLSRRVRPGAHRVTVALRLAARSLHHSHSALGAFFRRMKARLGTPKAITATAHKLARLVYSLLQHGSAYVQQGLDAYEAQYRERKVTVMAKQAKALGYTLVPLAAQG

SEQ ID NO: 107532 - protein, 405 aa, unidentified
MTDIEQHDSVEVFVGVDVGKGTHHAVALDRKGKRLLDSALPNDETKLRTLIGKLKEYGKILLVVDQPATVGALPVAVAGAEGVLVAYLPGLAMRRIADLHAGEAKTDARDAYIIAEAARSMPHTLRSLKIADSQVAELTMLCGFDEDLAAQITATSNRIRGLLTQIHPALERVVGPHLDHPAMLDLLERYPSPAQLSSLSQKQLATRLLKLAPRMGKTWATEIVQALAEQTVVVAGTQAASIVLPRLALQLAALRKQREEVAKEVERLVLAHPLHPVLTSMPGVGVRTAARLLVDVATRAFASAAHLAAYAGLAPVTRRSGSSIRGELPSRRGNKQLKRAMFLSAFAALRDPISRAYYTRKITQGKRHNQALIALARRRCDVLFAMLRDGTLYSPPRPQILLTTT

SEQ ID NO: 107533 - protein, 315 aa, unidentified
MDEPRRVTTCVGIDVSKDRLDVHVLPTGEAFAVARDGKGLERLVERLRALDVSLIVLEATGGFETTVAAALASAGLPLAVVNPRQIRSFAKALGKLAKTDAIDAEVIALFADKIRPQVRPVATSDARALGELVARRRQVVEMIGMEANRRRHATDQRLIKTIDRHLAFLEKELAAIDADIDTDIRASPAWREAEDLLSSVPGVGPVTARTLIAELPELGSLDRRKLAALVGVAPFNRDSGAWRGHRMIAGGRTSVRNVLYMAALSAIRHNPVVRAAYQRLVNRGRPKKVAIIACLRQLLTILNAIARTKSPWKIA

SEQ ID NO: 107534 - protein, 407 aa, unidentified
MRYYIGVDWADAEDAVWVANEAGDKVLSRRIAHTVAARSEWARWLRERQAEGVELWAAIERPHGRIVDFLLDHGVVVYAINPKSLDRARDRFRVGGSISDPFDAKVLALFLRSDHAQLRPLRPSSEAAQELKGLTRDYRRQVHLQTRLRNQLIATLKEYYPRALELCDDLTAQWAQAFLAHYPTPAAAATLTEAAWQAFAKTHRLGTARTAALWQTLQQPQLPLPAHVVRTKARLLQALLRQLAPTLATVAEYRQAIDDFFATMPTVDIARSLPVGKSGTTVPTIWAELGDHVDRWNSFRQLQGYAGTVPETQRSGNGLLIKFRYACNPVLRDVMHQFAFLSLSHSLWARTYYDRYRARNHTHHEALRALGAKWLKIIFVMWKRNVPYSETHHLATMACQHLRQPAA

SEQ ID NO: 107535 - protein, 437 aa, unidentified
MSQNKNHAKKSVCLQSLPLIHPHAAGIDVGAKEHVVAVPADRDPRPVRSFKAFTPDLYELAEWLQQCGVETVALESTGIYWITLYEILEERGFEVRVVNARHVKNVPGRTKTDVLDCQWIQKLHSFGLLSGSFRPDQQIRTLRSLMRLRDNLVVQSTQSVHHMQKALFEMNVQLSNVISDIVGESGMRILEAILAGEHDPARLATLCSPRIKAARETVAKSLHGNWREELLFSLRVALDSFRFAQGKIAECDARITEHLAQFADRAVLETPPSSLKSELHRVCGVDLTKIPGIKEQAAQIIISEVGLDMTRWNTEKQFSSFLGLCPNNSISGGKVLRRSTRKVYNRAADALRLCSQSLTHSKTALGAKYRRLKGRLGAPKAIVAMAHHLARLVYRMLRYGRQYVEKGIAEYEIKFRLQRLKWLKHEAKSLDMQLLPA

SEQ ID NO: 107536 - protein, 457 aa, unidentified
MLPVSGLPSEFEQINLNAAGIDIGAQKHYVAVAKGRDPEGRDIRHFDTFTVDLHALADWLKQCGIDTVAMESTGIYWIPLFEILEQNGFDVRLVNPRSIKHAPGRKSDVVDCQWIQQLHAYGLLTSAFHPDDQISVLRAYHRQRTMLVNHAGTHIQHMQKALEQMNLKLTNVISDITGTTGMKIIRSLLAGERDPKKLSKHRDPHCKKSEKEIAKSLNGNWRDEHLFALQQAVALYDFYQTQIMDCDKQIQAQLCRFEDRSDTGELPPAASKSSGSGKKLTFDAREHLYRMAGVDLTQIVGLNTPTVLTVLSEVGLDMSRWPTAKHFASWLGLCPGSKISGGKNFSSKSKPSANRAAHAFRMAAYSLHRSQSAIGAFLRRKKAQLGAPKAITATAHKIARIFYEMLKTRTEYKDLGVDYHQNRYKERMLRNLKHKAKEFGLELVNPNQDQLVMANSE

SEQ ID NO: 107537 - protein, 386 aa, unidentified
MQKLNDPSRSLTPLKPDGTLIAVIEMSLSSWLVAGIVPGIERQPLKKLEVDESTLLKLLNRWREEAQKSGHRIERIAVAFEAGRDGFWLARWLRARDIEAHIIHASSVAVSREHRRAKTDRLDTELLKRAFLGWLRGERDHCKMVAIPTIKDEDAKRPNRERESLVGEQSRIVNRMKAALVRLGIRGFNPKLKKAVERLDGLRTPEGEPIPPNTLAELRRDMARRRLVSDQIRQIEDTRLERLEQAPGDGPHAMVRLLARVIGVGIETADMLVQEVLSRNMRDRRAIARYAGLTGSPDESGRKRREKGLARSGNARVRRGMIQLAWRFLMFQKDSTLAQWFRARTENARSTRKTMIVALARKLLIGLWRLVREGVVPDGVVLRPVS

SEQ ID NO: 107538 - protein, 356 aa, unidentified
MSEKSNCAIAVIGIDIGKNSFHIVGHDQRGAIVLRQKWSRGQVEARLANLPPCLIGMEACVGAHHLSRKLQLFGHNARLMPAKYVRPYNKGQKNDFRDAEAIAEAVQRPTMKFVVTKSSDQLDLQALHRVRERLVSQRTGIINQIRAFLLERGVAVRQGPRFLRAELPGILATRTDVLSPRMLRVIEELAGDWRHLDARIEGLTSEIEAFARQDQHCERLMTVPGIGPIISSAMVAAIGTGDVFSKGRDFGAWLGLVPKQISTGDRTILGGISRRGNRYLRVLFVQAAWVVLVKLGPKQWERYGLKSWIEAAKKRLHHNVLAVALANKLARIAWAVLNKGRAFACDKTDAMASRAA

SEQ ID NO: 107539 - protein, 421 aa, unidentified
MIFVGDDWSEAHHDVYVCDPDGVRLAARRLDEGLAGIAAFHALVADHAADPGEVVIGIETDRGLWVTALVAAGYTVYAVNPKAASRYRDRHSLSGAKSDAGDAKLLAELVRTDRHNHRMVAGDSDLADGVKVLARAHQNLIWDRTRATNRLRNALREYYPAALAAFPDLADRDTLAVLGRAPTPAAGAALTRAQVRAALKAGGRRRNLATRAQQITDGLGVAALTAPDPVVAAFAATTMSAVAVIAELNTQIAALEQQLADHFEQHPDADIYRSQPGLGVILGARVLSEFGDDPNRYADAKCRRNYAGTSPITRASGNRSVALARFVRNRRLADAIDQWAFCSLQASPGARAYYDLHRANGDSHHKALRALGNRLVGILHGCLRTHTRYDEHTAWAHRPENNLTKQPPHDPASEETLRDAA

SEQ ID NO: 107540 - protein, 402 aa, unidentified
MLHDHLKHPTAIRVQFGAIFVSLELSRKTWLITSLSPGKGEKMSKHSVTAGDIAGLLARFSELQRKAAVRTGKSFHLIVIQEAGLDGFWIHRVLQQEGIESHVVDPASIAVPRRRRRAKTDKIDGEALLRALLAYKRGEPRVCSMVVAPSPEDEDRRRLCRERDTLTAERVRHVNRIKGLLFAQGIADYAPLLRNRRTRLDELCTGDGRPLPQYVKAQISRELDRLELVLEQIKVVEKERDRILLSPAPVVLNTGPEAACDQPRGASGVRMLTALRGFAADGATKLWSEGLSRHFSNRRQIAAYAGLAPTPWQSGGIAHEQGMSKAGNPRLRTTMVQIAWLWLRHQPQSALARWYFASVGVGATKARKKVAITALARKLLVALWKYVTAGELIEGAIMKPVA

SEQ ID NO: 107541 - protein, 341 aa, unidentified
MKNKSFIGIDISKNVIDVSIFCEETPIKDFSHDVFDNSRKGFGEMCTWLKKNHVVLSNCLFGMEFTGSYSMELEKFLNARNYQFCMLSTHVVKHYPMGPKDKSDKIDSAKIADFLYRYNGTECVKPYNMPDKTMQRLKALMNERKFLVEQRTCFMNRRQLCITKEDAQLYDGYIKKLSRDIENIELEEQKLLATDDSLLSTYKNLLTIPGIGFVNAINVIVITRNFTAFETARQYASYVGVAPHFRTSGTSVKWRPRPSARCDGQAKADLSMAATVVVQYDAELQSFYNRKLGGKQDSDTKRKALNAVKFKLVLRMFAIGKQNRKWEPLDSKSSNEKLAIS

SEQ ID NO: 107542 - protein, 424 aa, unidentified
MKYKMQDKQNQLIERITHEHLVVGVDIAQQFHVARAVNYRGIVVGDPLTFENNEDGFASLLEWINHLISKANFKTAIVGMEPTGHYWLNLSKWLYNHKIDVVTVNPHLVKKNKENRDNTQSKSDIKDALVIADMVKNGYYAFIRPTSESFEQLRVLMSNRDVIVKRLVSSINQINRWIDVVFPEFRQVFKDVKGKGAIATLRLFPTPSDLQSLEPQDVIDGWRTVMPRHAGIHKAHILIELAKHSVGSIQATAAYKLHLEQLLEEFDLATAQLARIEKEVTIALKQITFTDKLLAIKGISEISLAGILGEAGDLSGFAHGNSLLRHAGLHLAEASSGKWKGQIVLSKRGRSRLRRFLYLATISLIVNNPEFKALHTHNVQVKKIKKMKSIMKLIGKLARLLVGMAKRNEAYCPKKLQTFSPIAA

SEQ ID NO: 107543 - protein, 342 aa, unidentified
MSIVYVGLDLGSSAFQQVAIKTDGSIKVNRSFTTSEANLRAAFADQQGEIQVHLEAGELAPWAASIIAPLVTRVVCSHPQSNAWIAKDADKCDRIDAYKLAELLRLNRFKEVHYPPDQRRRNFKQLVQHYDELTSQQARLKTKLKARLRMQGVIVGGERVFSSSGRKPVLAEVKSAEVRTAIKQLYAVLDQSVMSQTEARLLMLHAAQAFAEIRIFRTAPGVGPIGACRFSAYIHTPNRFSSKRKLWKYCRLSVSHRSSNGKPLRRPRLDRCGCGRLKDVSRKAFEAAMRERKDNGFKRAYQRALETTQDATHARLTVQRKIVSTLRAMWLTMTPYCDELMR

SEQ ID NO: 107544 - protein, 458 aa, unidentified
MPRKSSNKAKSQRRRERALLQKVHLNAAGIDIGANAHWVAVPEDRDASPVRSFGVFTRDLVALCDWLKSCQVETIAMESTGVYWIPLYQMLERKGFEVRLVNAHHVKNVPGRKTDVKDCQWLQQLHTFGMLAGSFRPEAQMCVVRSYLRLRDTLSKDCNSLVQRMQKALTEMNVQIHRVISDITGVTGMSILRAILAGERDCLKLAKLKHPQIKSSAQDIAKALDGDYCQEHLFALGTALEFYDSYQLKIMACDRHVQDALSAFELKGKAPAPDVSRMRCAEKRLEALRRHHLEEMTGADLTKLPGLDLLAVERILSEIGLDMSRWPSEKHFCAWLNVAPNNRVSGGKILSSKPRKNANRAAAALRLAAQSAMQSKSAIGAFIRRIKSRLGAPTAINAGAHKLARLVYRMLKFGKAYVEIGQEAYEKFFKERILRNLQRKAHLLGFQVTPITVTVPVS

SEQ ID NO: 107545 - protein, 344 aa, unidentified
MEKHTVAAVDVAKAVFDVALSDEPGRVRMTRRLPRSGFLPFFAQLPAAIVVMEACGSAHYWARRLQELGHQVVLLPPHQVRPYVTRNKTDRTDAKGILEAYRNADIRPVPVKSVPQQVLVTLHRFRSGWLGARTAHLNTLRGLLRELGIVIPVGAEKVLPQVRTLIADADADIPDALRPVLAAACEEIEVLTERIKMAQRQIEAIAEQTPVVDLLWSIPGIGLLIATALVAFVGDIHRFPSGRHFASYLGLTPREYSSGMKRRLGRISKRGDAYIRMLLIHGARSILCHAKKSKEHDRLRTWALELERRVGHNKAAVALANKLARIAWATWKNGRPFESLPKAA

SEQ ID NO: 107546 - protein, 355 aa, unidentified
MDSKKYIGMDVHKESISIAVLNFAGKVVMECFIETKASTILQFIHGLRGDLQVTFEEGTWAGWLYDLLKPHVTELVVCNPRKIALLKDGSKSDRIDAHKLADLLYMNKIKPVYHGEHGLRMLKELSRSYLTITKDLGRVMNRLKALYRSWAIPCAGTQVYAPRFRSEWLSKITEAGVRRRAELYYQQLDALRLVRQQARKELLAEARKRRATKLLRQIPGIGPLRAAHLVALMQTPHRFRTKRQLWTYSGLGLETHDSAQYRVVEQQLQRSKKPVTLRGLNTNHNHDLKDIFKGAAMRASTAAGPLHDFYEALLAKGRKPTMARLTLARKIAAITLIVWKKEVRFDANYLKQQAA

SEQ ID NO: 107547 - protein, 344 aa, unidentified
MENYAGIDVSLELSSVCVVDAHGKILKEAKVASEPDAFVEFFEKLGFAVKRIGLEAGPLSQWLHARLKRAGFETVLLETRHVKAALSAMTVKTDRKDARGIAQLIRMGWFRPVHAKSIGAQEIRALLVARKQLLGRLIDVELSIRLILRGFGLKVGPVTRKNFEARIRELVAGQATLERIATSMLLARSALKAEYGRLHKAVLAIVRDDAVCRRLMTVPGVGPLVAITYKSAIDDPHRIVKSKAAGALFGLTPKKYQSGEKDVTGGITLAGDEIVRTALYEAANVLLSRITRFSKLKRWGMDVAKRRGSKRAKVALARKLAVILHRIWVDGTTYRWAEAGSIAA

SEQ ID NO: 107548 - protein, 398 aa, unidentified
MTESSDCESVQVFIGVDVGKDTHHAVAINRSGKRLFDKALPNDENKLRSLISDLKQHGQILLVVDQPATIGALPVAVARSEGVLVGYLPGLAMRRIADLHAGEAKTDARDAAIIAEAARTLPHALRTLKLADEQIAELSMLCGFDDDLAAQTTQASNRIRGLLTQIHPAPERVLGPRLVHPALLDLLQRYPSPEKLASLGEKKLAAQLCKLAPRLGKRLAADIAQALAEQTVVVPGTNAAAVVLPRLALQLITLRKQRDEVALEVEQRVLAHPLYPVLTSMPGVGVRTAARLLTEVACRAFASAAHLAAYAGLAPVTRRSGSSIRGEHPSRRGNKALKRALFLSAFTALRDPLSRAYYTRKMSQGKRHNQVLIALARRRCDVLFAMMRDGTFYTPQGS

SEQ ID NO: 107549 - protein, 375 aa, unidentified
METIYIGVDFHARQQTICYLTTETGEFVTHELKHQDKDEVRTFYAQFGGRVIIGLEASGYSPWFEQLLEALGHKVWLGDATEIRRRARWRQKNDRRDAELILDLLIHDEFPRLHRPSLESREILRMLRYRHKLVKMRTIIKNSLQALALQSGLSRRTKLFTKIGQQELRAAPMSPVMKQQQEQWLELLLVLNQRLVETTLWLKQQSLNDARIRLLRTHPGIGLLTSLGLVHTLDPISRFRNQRKVTAYAGLEPMERSSAERKRFLGISKAGSRLLRFLVIEAAHTAVKKDADLKHFYRRLQERRGRPKAKVAVAGNLLVRSFIMLRDQIDYAEFQRRAVAARLARQSSRPSVPDRLIGQPASSESQERVLSAAKK

SEQ ID NO: 107550 - protein, 401 aa, unidentified
MNAIGIDVSKGRSTVAILRPLGEVVRKPFDVMHTSSELAELVELILSLNGESRVIMENTGKYSDPVVKVLCDAGIFVCAVNAKLIHDYGGDTIRRAKTDKIDSLKIAAYCLDKWARLTRHNPPNQLRKMLKTYNRQLCEYSNLKTMLKNNLISLSDQVFPEVNSLFTSPARKKDGHEKWIDFFAYFWHCECISTSSANVFIERYKKWCRKNGYIFSEQRASEIYDISVQLVPTLPKNNLTKSLICQSISQLNSLCETIATLKNQMTELAKMLPEYETVAAMHGVGASLAPQLMAEIGDINMFPKRSSLASFAGIEPPENQSGIYNKHSRRISKQGSPHLRKALFQVMCCVLINKNPNEATFQFLDRKRAEGKPYKVYMIAGANKFLRIYYARVKECINAIA

SEQ ID NO: 107551 - protein, 308 aa, unidentified
MSLWIGIDVAKASLAVCVLPTKQSFSLANTPQGHAQLLARLEGHVIGNILLEATGGYEQVLMAALAHAGYPVTRINPRRARAFAKAMGTLAKTDPIDAALLARMAELVRAPESPRPPQGEALRALVQRREQLVEQRDGERRRLQQATLPAVRDDLREHIDQLQQRIRALDQAMVQSLGDLDAPLAQRLRAIPGIGPVTAASLVAYLPELGCLNRRQIAALAGLAPYNVDSGQHRGQRCIAGGRALIRRVLYMACLTVIRQQADFQQRYERLRARGKCAKVAITACMRVLLVRLNAMVRDQTEWRMASA

SEQ ID NO: 107552 - protein, 467 aa, unidentified
MPRVRPHPHRRSPAVTLPPELHQVNLNAAGIDIGAAHHYVAVPPGRDPDGRDVRTFGAFTADLIALADWLTRCGIETVAMESTGVYWIPLFEQLTERGFEVKLVDPRQLKHVPGRKTDVLDCQWLQQLHTFGLLAAAFRPVDQICVLRSYLRQRGMLVRYAAHHIQHMQKALEQMNCKLTHVVSDIAGLTGLAIIRAILAGERDPHVLAQLRDRRCKADEATIARALEGTWRREHLFELRQAVELFDFYRAQIAACEAEIEAQLGQFADQSGGQPLGDAPRGRPAGRGALSFDARQHLQRLTGVDLTRIDGIDAPTALKLVAEIGLDMTRWPTEKHFASWLGLAPGCKVTGGKQFSGRTKPSANRAATALRLAAHSLHHSRSALGAFYRRLEGRLGAPKAITATAHKLARLIYRMLRFGTEYVDSGQDYYEQRYQSRVVAHLMRRAQQLGYQLIKNELVSVATTSPA

SEQ ID NO: 107553 - protein, 331 aa, unidentified
MNLPILGIDVLKESLDVCLIIENQSNDAVFDNNHTGHKRLISWLDQHANQVHACMEATETYAFPVAEVLYTAHHRVSIVNPARIIAYSTSLLTRNKTDRLDAAIIADFCRTQSLPEWHPPREELRDRQALVRLLEDLAATRQADVNRLKSGVRSPDVALVLEDHIGYLDNQIKRVEQLIRSLIDRDNDLSRNKHLLLSIPGIGEKTAHTILGELLFLDSFENARQVAAYAGLNPRQRLSGKFKGHSSISKTGNAHLRKALYFPAIVAKGCNPVIQDFCARLRDNGLLPMEVIVAAMRKLLHIAFGVLKNDTPFDPLYEKRFQYPLSIPISS

SEQ ID NO: 107554 - protein, 415 aa, unidentified
MKVVFPTCCGVDVHKTFVVATIITTPTDSLQPNYQKKRFSTFNSDLNRFADWLLEHNCLDVCMESTGKYWVPVFNVLEKRGIRVVIANPKWVKAVKGNKDDTKDSKWIGDLFRIGLVKSSFIPDLNIRILREFTRYRYKLVSMKSSEKNRFQNAFTVCNVALDSVVSDMFGKSATAITDYLTSDESFDPEHCVSLLQRSLKKKAEQVLESIEGFSIADEQKARIKIIREHYDFLEKMIAKVDTCVSEMVEKYEGEINLLCTIPGIDRRSAITIISEIGTDMSQFSSSKRLCCWAGLTPGNNESAGKKKSVRISRAGVYLKPALVQVAHAAVKDNDHPYYKLKYERIAKRRGKKRAIIAIARMILTAVYSMFCTGEVWNPVDLFKIDMPEHLKEQQLAKAIKQATRFLEKQGLTVA

SEQ ID NO: 107555 - protein, 273 aa, unidentified
MADRITYVGLDVHKDSIVVAVAAGGLRGEVREYGRIANTPTALDRLLRKLGGDGMTLRFCYEAGPCGYGIQRRLSTGGHECVVVAPSLIPKRAGDRVKTDRRDAASLAKLHRAGELTAVWVPDARHEAKRDLVRARLDAVRSLRRARQQLSGFLLRHGCHYGRPAWTRLHRRWLAGLKFAQAVHHIVLEDYIAAVEAAEARRNRLTAQIEAMLSDWTLAPVVAALQTMRGMALVNAASLIAELGDLSRFANPRQLMAYLGLVPSEHSSGGSPR

SEQ ID NO: 107556 - protein, 343 aa, unidentified
MQTITTIGLDIAKSVFQAHGIDAEGKVVLRRQLKRRYMLAFFEKLPPCLIGMEACASSHHWSRELQALGHTVRLMPPAYVKPYVKRHKNDATDAEAICEAVTRPNMRFVATKTPEQQSCLTLHRTRHLFIRQQTSVINVIRAHLAEFGIVAPVGRNGVEQLLEVAADASDKRLPDVARACVAALGAQLRMLRAQILQFDRMIMAWHRSSEASRRLDNIPGVGPVLATALVASVADPKMFRSGRDFSAWIGLVPKQNSSGGKDRLGHISKRGDRYLRSLFTTGALAVIRYAKIHGTRHRLWLTALLARRPTKVAAIALANKIARMAWAIMARGERYREPVALAA

SEQ ID NO: 107557 - protein, 359 aa, unidentified
MRKSISKFETVTTVGLDLAKNVMQVHAVDAAGNVVVNKPIRRGKLIAFFAALPKCLVGMEACSSAHHWGRQIAELGHDARLMPPAYVKAYVRRGKNDKVDAAACCEAVGRPSMRFVPLRSVENQAELMRHRAREMLSSQRVALLNALRGHLAEIGVIAPQGAQNAYYLKKLAETGHDENGEVLVPDGVRQSLAPLARQIDAIDAEIAAIDKILVKQAKSDPTARRLATIPGIGPVGATAFTATVLNVKAFANGREFSASLGLPPRQHSSGGKQRLGAISKMGDRYLRKLLVVGATAVLRHADGHNDALRGWAKELLARKNGPYKKKIAAVALANKLARIVYAILSSGGTYDDRPVRARA

SEQ ID NO: 107558 - protein, 335 aa, unidentified
MQSYGIDLAKEKFDVSFFDLTSKKVSNQPSHKVVKNNLKSIGRFLETLPSDAVLVAEHTGVYGDTLLKCCMDSNVKIAFVGGYVIHRYRATPDRAKTDVLDCALLRDFGERYPDKLKYKTFPEEALYELRQLARHREMLVEQRKQLITADRSEDCRPIRSLAVKRSMDRIKEMLDTEIAETEKEMLKVINGHDSIHHNYELVKSVDGVGLITAVELLVKTENFTKITTARQYSAYAGTAPYEKSSGKMDKGAHISKIGNRRSKTLLYICAESARLHNKEIKLYYERRTLIDKKPRHYVLNAIANKLLRIIFTLVEKGEYYDANFIRQDPRVVKYN

SEQ ID NO: 107559 - protein, 346 aa, unidentified
MSAKLNSAIAVIGIDIGKNSFHVVGLDRRGAIVVRQKWSRSQVETRLANLPPCLIGMEACVGAHHLSRKLTSLGHDARLMPAKYVRPYSRGQKNDFRDAEAIAEAVQRPTMKFVATKTAEQLDLQALHRVRERLVSQRTGIVNQIRAFRGVAVRRGLRFLRAELPRILGTSCDVLSSRMVRVIEDLADDWRRLDERIEGVSSEIEVLARRDAGCERLMSVPGIGPIISSAIVAAIGAGDAFSKGRDFAAWLGLVPKQISTGDRTILGKISKRGNRYLRVLFVQAAWVVLIKPKSWDRHGLKHWLEAAKKRLHHNVLAIALANKLARIAWSVLAHGRAFEASKLQAA

SEQ ID NO: 107560 - protein, 341 aa, unidentified
MKTFIRIGVDLAKNFFQIHGIEHEGAPPLTRKLSRAKFLEFFSGIAPCRVGMEACGSAHYWARELRAVGHEVVLMAPAYTKPYVKRGKNDAVDAAAICEAMSRADMRFVAVKSADQQAVLMLHKARDLLVKQRTMSVNALRGHLSEFGLIAAKGIHRVKDLLAQAFADPDLPEQARQAVQILASHGEALDAKIDELEKKIAKASANNPISRLLDEVPAIGPLIASAMAASVPDPSVFKSGSDFSASLGLTPSQHSSGGKEKLGAITKKGNRYLRKMLVVGCTSVLRVAHKYKGALAEWIAALRARKPERVAAVALANKLARICWAIMSTGESFREEIFARA

SEQ ID NO: 107561 - protein, 426 aa, unidentified
MDIVHPRVAGIDVHKKIIWVAVRLPGERPGERTVTVRRFATFWRPLQQMAGWLAGLGVTDVAMESTGVYWWPVYHALAGAGIEVCVCNAAHMRNVPGRKTDLRDCQWIAELHEHGLLRPSFIPAAEVAALRQRTRYRKKMIEARTSELQRLAKVLEDGGVKIDSVASKLTTASARDMIEAMIAGQRDPVVLAALARGVMRRKIPELEMACDGRFTASHGQMCRLHLDAYDHLGVQVAELDRLVDEAAAPFQPLISRLVTIPGIGPRTAQVIVAETGGDMARFATPARLAAWAGLAPGDNESAGKRKRASTRKGNQHLRAALTESAWTTARTATRPGARFRRLARRFGRGNEKKAATAVAHTLLCIAWAVMKYDADYAEAGAGYYDQRDARNHEHLVRHHQQALARLGYQVTLIPPGDNSPPPAQAA

SEQ ID NO: 107562 - protein, 466 aa, unidentified
MTPPKDYCLEAPCPPTPLLPPLPVLSDALHVCNPHAAGIDIGEAEHWVAVPPGRDPQPGRRFGTFTVDLDALADWLIDCGVITVAMASTGVYWMPLFELLEARGVQVLLIDPRQAKRAPGRPKTDRLDCQWLQRLHAYGLRAGAFRPDDQVCVLRAYLRHRQRLLTYAAHHIQHMHKALQQMNLKLTQVVSDLTGVTGMAIIKAILAGERNPQHLAKLRNPHCHHDADDIAKALQGTWRAEHLFALRQAVELYEVSHQQMAQCDQQITRHLETFADKSDGQPLPPKARRHKKTNEPRFDARTPLSRLAGVDLTTIEGIEENTALILLSEIGTDMHRWPSVKHFCRWLGLCPQHKISGGKVLSRRVRPGAHRVTVALRLAARRLHHSQSALGAFFRRMKVRLGTPKAITATAHKLARLVSSLWQHGSAYVQQGLDAYEAQYRERKVTTMAKQAKALGYTLVLLAAQG

SEQ ID NO: 107563 - protein, 352 aa, unidentified
MEQFIGCDAHKKFSVFVAVNEKGQAGEALRVAHDRQLYREFLARLPAHSAIAVEASGSYSWLVDEMERSGHHPRLCNPLEAKRRMGLTNKTDKLDARGLAILLRNGTLPEVWIPPSELRDQRELLRLRIFLVRLRTRVKNRIHGTLARYNVQVPGADLFGVAARLELGTRLPELPLHSREAVEQELATLDFLETQIESAEQRLEAIMKVSVEADLLKTLPCVGRILSMVLMLEIGRVDRFPTAAHLASYAGLVPRVHSSGGHTRMGQVCGNVNRNLKWAFVEIGNLVVVNQRRLAGTHVVRLYQRIRRAKNHQKAVVAVGRHLAEAAWWVLTKLEVYREPQGAQQALSSTHG

SEQ ID NO: 107564 - protein, 345 aa, unidentified
MEQQFVGLDVSQAETAVCVVDAAGVLLWQGKCLSTSEAIAATLKRRAPHAARIALETGPMSAWHWRCLTALGLPVVCIDARHAKAALAMQVNKTDANDAFGLAQIVRTGWFREVRVKSDRSHRTRSLLAARAKLVDMRKEVANQLRGLLKVFGHVIGTIGNQGFDARARELAAGDAALSATADALLTARTVLAEQVARLDKLLLAQTRKDPACRRLMTVPGVGAITAAAFVATIDEPGRFRHSSSVGAYLGLTPRRYQSGTMDISGHISKTGDSLLRCYLYEAATTLLTRVQHWSALKAWGVRLGKRVGQKKARVAVARKLAVILHRMWADQTEFRWTAAEASMA

SEQ ID NO: 107565 - protein, 351 aa, unidentified
MKRIAVDLAKSVYQVAESVQVGRVDRRKRLDSGAFARYVQEQIEPVEWVMEACGTAHHWGRLMQENGHRVVLLHPRYVRPYRRRNKTDRNDCDAILEAARCQEIRPVPVKSVQQQQVQQLHKLREGWKKSRVQRINLLRGILREAGVEAPAGIKPFLRQACELIERPEVCALRGVLQVVLAEISLYEQSMRECEEQLARWHADDEIVHKLDEVSGIGLLTASALKTAVGRPERFASGRHLSAWLGMTPNEYSSGERRRLGRISCKGNVYVRTLFIHGARAALLAAKRCKARTPEKLTQLQRWALDTAERIGHNKAAVALANKLVRICWAVWCHERRFSGNWQSTKPTWRRG

SEQ ID NO: 107566 - protein, 341 aa, unidentified
MQITTIGLDIAKNVFQVHGIDAAERVVVRKQLRRGQVMKFFEALPPCLIGIEACASAHYWARELTRLGHEVRLMPARDVKAYVKRHKNDAADAEAICEAVGRPRMRFVRPKSAEQQGRLMQHRARDLLLRPQTQVINALRSHMAELGIAAAQGREGLKQLLAVIADKKDARLPIDARASLIVLAAQLQALHTMIGSLEKRLIVQHRTNEASKRLQNIHGIGIIGASAIAATVPDPKAFRSGRDFAAWIGLVPRQDSTGGKQKLGPISKQGDRYLRRILVVGAHSVLRRAKLNPEKYPWLTQLLARRPFKVVAIALANKMARIAWALLASGGHYRPRLGTAA

SEQ ID NO: 107567 - protein, 449 aa, unidentified
MEGETVIAGVDTHKDVHVLCLLDGLGRKIWSGSFGADPEGYDRLAEAIGDPGSCMVVGVEGTASYGAGLTRRLVELGYNVVEVLRPKRDKVRPGEGKSDPLDAERAARKAASGKGCSVPKSQDGWVEAVRQLYVARRLAVATSTSCVACAKSMLTTAPSALRERFRGRERPKDLMPLLARGRKAGDALEESVLASLRSVAAVWKEARSQVESLDERIRALLEANAPALLGVEGCGTTTAAALVVAAGDNPGRLRGEAAFSMMCGASPIPASSGKTDRHRLNRGGNRQANWALYEIAIKRMAYDERTRRYVARRTSEGKSRREAVRCLKRYIAREVYHVLMDPNPRRRRAGRPRAREDAQGDAGDSEESRRGARPVRSHTRALGTGETAVDETGEEVLRAPVRIGESAPANCLLTTYRSVGFVTKNRVVLGGFRFFPTLPENEALYHVFL

SEQ ID NO: 107568 - protein, 383 aa, unidentified
MPQQRKPNDLGRSLISLAMDTTLIAVVELSLSSWLVAGIVPGVERQPLKKLKTDENALLALLNRWRDEAVRSGHKISRIAVAFEAGRDGFWLARWLKARDIEAHVIHASSIAVSREHRRAKTDRLDTELMKRAFVGWLRGERDHCKTASVPSLWEEDAKRPSRERESLVGEQSRLINRMKATLIRLGIRGFNPKLRHAEQRLETLRTPEGEPIPPNTLAELKRDMQRRRFICDQIQSIEQDRLERLERTPHTEPHAMVRLLARITGIGIETADLLVHELLLRNMRDRRAVARYGGLTGSPDRNGGTMARSGNARVRRGMIQLAWRFLLFQKNSALAQWYRRRTEHAPKARKTMIVGLARKLLIALWRLVREGVVPEGVAMRPA

SEQ ID NO: 107569 - protein, 332 aa, unidentified
MSTAPIIFLGIDISKATFDVALLSGGKRNGKSSKHAKFDNTPSGFEQLSHWLQGNALGAIHACLEATNIYGHDLATYLHEQGHQVSIVNPARIKGYAKSQLSRTKNDAADAALIARFCRDIQPSLWHPTPAAIAQLQSLTRRLKALEQMLTQEKNRLELCRDSELRTDIEAHIEFLEKQAKALKERCQQHIQGEESLAEPCRLLTSITGIAEHSASIILAEIGSIKVFGSAAQLAAFAGLTPQEHQSGSSINGKARLCKIGNAHLREALFFPALSLMRHCPEVRAFRQRLLDNGKHKMAVVGAVMHKLIRVIYAVLSSGQEFDPKKLAPQQS

SEQ ID NO: 107570 - protein, 347 aa, unidentified
MDYYAGIDVSLEASSVCVVDGAGKVIREAKVVSEPEVLIGWFAALGVNLTRIGLEAGPLSQWLYAAMQQVGLAVELLETRHVRTALQTMPVKTDRNDARGIAQLMRLGWFRPVHCKSLAAQETRALLTARKLVQSKLYDMEMSLRGILRGFGLKVGPTTSKRFARRIEELVVGHATLAVIAKALLAAHAALLREFDMFEKRVRSMARQDKRVRLIMSAPGVGAIVALTYVSAIDDPSRFSSSKRVGPHFGLTPRKYQSGETDVTGRITKIGDAGVRTALYEAANVILTRPVKGAGLKSWAMKLAKRAGMKKAKVALARKLAVVLHRMWVDGTTFDARKAALTVVAAA

SEQ ID NO: 107571 - protein, 342 aa, unidentified
MDIKVLGIDLGKTVCSLAGLDEAGAVVFRKRLQRHRLLDFLATLPPCVVAMEACGGAHHIGRFCLQKGHEPRLMSPLYVRPYVKVHKNDDRDAEAIAEAATRPTMPFVAIKSEEQLDLQALHRARERLVSDRTRLINQGRGFLMERGIRVGTGRHVFQKELARLAVEGAADLSPRMLLLVADMASELDVINDRVAAIDTEIKALARTDADMQRLMEIPGIGPTIATALVAAVGTGSSFGKGRDLAAWLGLVPRQVTTGGKAKLIGISKHGNRYLRKLFIHGARTVLHLVRDRTSPITAWADALKGRAHVNVAAVAIANKMARLAWAVLTKGERYRPNAMSGL

SEQ ID NO: 107572 - protein, 458 aa, unidentified
MEEPQEVPADEEHERVWERVAAVDIAKASGVVCTRVPDEDRPGRRKTHVWTVQATSKAVIELGDYLRARQIQVVTLESTSDYWRIWFVVLEAAGLKVQLVNARAVKNAPGRAKTDKKDAVWLAKLTEKGLLQPSFIPPYEIRRLRELTRLRTSLVHDKSRYWARLEKLLERAHIKISAVLSTLDTDTARAMIEALIAGQRNPRVLADLAIGKARAKRAELTLALEGRWEDHHSIQARILLDNIDALNRQIEQLTTQISELISQIPAAWGIDADGTTGPHAGTSTDSPVLPAVAQLDAITGCGIISAQAVIAEIGLDMAVFGTPGRLVSWAKRCPQTRQSGKKTSGGKAGKGNPWLNGILGEIAASAARTDTFLGERYRRIARRRGKRKAIVAISRSILVIIFHLLSDRSARFCDLGPGFYDTQINRDRKIRNHIRQLQALGVDPEDLAALLTKNPPAA

SEQ ID NO: 107573 - protein, 384 aa, unidentified
MRSVCGLDVHKDSVYLCILSEDGELIEKVFGVLTFQLHQMRDLLLAHHVETVSMESTSVYWIPIWRILAPHFHLQLVNPYFIKQLPGHKSDVADAQWIAECTMKNLISSSFVPPEDIQQLRQYDRRIFDLDEEIVRKLSKLDAVMQRCNIRLSNYVSNVDCKSYKDVVRKISEGVTDPEILIEEIHGRIIKHHGRETILASLTGIISQAEIDVLRQLREELDLAEEHKQENLERMLKICQERYPDELRRLQTIPGVKERTATSLIAEIGTDMSKFETANHLAAWSGLRPRNDESNRKFKSRRITHGNVYLRKNIIQCAWAASRTKDCFFSKFSYHQTQVRKKNKMKVIVAVARKLLVAAWHVIHDKTDYVDFQKQDRQSPASNG

SEQ ID NO: 107574 - protein, 311 aa, unidentified
MDRILDRCSGLDVHKEILVATIRGTDLPKETRSFGATLTDISELGAWLVDNQITDIAMESTGVYWKPVYTVLEEIGIKVTLVNAKHIKNVPGKKTDVKDSEWLCDLLMHGLLKGSFIPPADIRDLRDLVRHRKKLIQEKTQEKNRVHKYLENSGVKIGSVLTDIFGKTGMTILLELIKERPNINKLMCGLKYCDPKKRKELEKAIHTGLNEHFKFMIKVCLDHIKFIENTIATLDMQAQSIIEDYREEVELITTVPGIKEDAAKSIVAEIGTDMSRFSSSAHLASWAGVCPGNNESAGKKKADESGKATKT

SEQ ID NO: 107575 - protein, 409 aa, unidentified
MDVLFERCCGLDIHKRTVMACLVVPGPTGAPTKEVKSFGTMTDDLVQLADWLLAASCTHVAMESTGVYWKPVWNLLEDQFALLLVNARHVKAVPGRKTDAKDCEWLADLLRHGLLRGSFVPDRGQRELRELTRYRTSLVQERSAEINRLQKTLEGANIKLGDVATDIMGLSSRQMLAALADGQTNAAAMAQLAQGRLRDKLPALERALAGSIGTHQRFLLARQLTHIDFLDAAITEVSVEIAERLRSVADALERLTSIPGIGRRTAEVLIAEVGTDMDRFPTGAHLASWAGMCPGNDESAGKRRSGKTRKGSPWLRSALIEAARAAGRSKGTYLAAQYHRLAARRGTKRAAVAVGHTILLIVYRLLSEGDIYRDLGERYFDERDRHAVERRLVARLVGLGYKVSLDPAA

SEQ ID NO: 107576 - protein, 441 aa, unidentified
MKKLRANAAGIDIGAKNIFLAVEGEPVRSFETFTEDFCQARDYLLSVGIETVAMEATGVYWVILYEILEESGLDVWLVDGRQTKQVPGRKTDVKDCQWVQQLHSYGLLNRCFVPDEQVKEIRTYQRMREDHIRTGAMHVNHMHKSLTEMNIRIKEVISQIHGASGIAIINAILEGERTPEKLLSLCHKSIIEKKSHQMLKALKGHYTESGLFALGQSYQAYLFYQQRIIECDKKIQQAMERTNNYHEDKNIRSDIESVKARKPVRHNKPQVDNLGGHLLKIFTGKDATNLPGITDYTWLQLYAETGSNLLKWCTEKHFTSWLGLAPGQHESGKKKSTRSKRYRPKAGQIFRQIAQSLIESKKIALGAFGRKLKAKRGPGIAVKATARKLAVLYWRLMVKGLDYTEKGIKDYEQKVNLQKERWLSKAAKEMGYQLVANQHVE

SEQ ID NO: 107577 - protein, 341 aa, unidentified
MNTTLIAVDLAKDVFELACANQASRIVDRKRLNRKQFHRFCAQHPPVTVVMEACGTAHYWARELDTMGHTVRLLPAQYVRAYRRRSKTDRNDAAALVEAARNPEILPVPVKTVEQQCIQTLHRCRSQWLATRTARINVLRGLLRELGHPLPLGARAAITGARACREVVPTVLQPAIDALLDEIATLETRMADIEAALARHARDSEPVQQLLSVPGIGLLTATALAASAGSPGYFRNGRHLAGWLGLTPKEYSSGSRRLLGSISKRGDGYVRMLLIHGARAVLNRAKQLHRAGQSLSRPQQWVVRLEQRVGHNKAAVALANKLARIAWAVWLRSTPYQATPI

SEQ ID NO: 107578 - protein, 373 aa, unidentified
MFHFTTLFIGMDVHKESFSLCYYDMMTNQFKHSTKVGPNVSYIVNYVNELRRLYGQYAEVLCGYEAGCLGFTLYHQLQAHGLPCILMAPTTVMKEGSKRVKTDKKDAAQLAKALAFRSYRPVHIPTVEDEQVKEYIRMRTDHKVALKKIKQQILAFCLRHDFRYTEGSSNWTQKHVRWLHSLNLDGLYAEILTEYLLTYEKLVDQIERYDARIEQLGQSDSYQEKVSQLSCFIGVKTLTALSIVTEIGDFNRFATAQHFASYLGLTPSENSSGDKERRGAITKAGNSHVRRLLIEAAQSLAKGTVGYKSKELKRRQSGNRVEVIAYADKANERLRRRYRTLVLGKNKKQNVAKAAIARELSGFIWGMVTGRIA

SEQ ID NO: 107579 - protein, 315 aa, unidentified
MQPALNIGVDVAKDDVMVACAEHTFVTRKLPNKRGELLAWLKTLPIGSRIGMEATGTYHELLATLAQRVGLVVYVLNPKDVYHYAKATGQRGKTDRVDAALIARYVAKEHKELHAWFPASALQRQLQSLTRRRGKLTRARASLQSSLRGLPALAGQLRTMLGQLDALIAKLDAQARKLIQADAQRQRSFQRLDAIPAVGCAVGIGLLGALERWALPRADCFVAFIGLDPRANDSGHKSGRRRLSKRGDPELRRLLYNAAMSASRTAVWRPVYQRALANGLTRVEALVVLARQIARTAWSIYTHQTEFDPARVHAT

SEQ ID NO: 107580 - protein, 352 aa, unidentified
METYLGCDAHKKYSLFVGMNEAGHVGPPVRVEHDRLLFRSFLRGLPEGTPIAVETVGNWYWMIEEMEKAGHRPLLAHARKAKLMMGEINKTDKLDARGLALLLRNGTLPSVWIPPGELRDQRELPRMRMVLRKMRTTLKNRIHATFAKYAIQFPEVSDLFGVQGRKRLAERFGELPPETRRSVEVQLEVLDRIEDQIGGTEEQIRKIIEETPAMKLVMTLPGVGPILAIVIVLEIGQVDRFADASHLASYAGCVPRVHSSGGRAFSGKVRPDVNRYLKWALVEAANAIVVNQQRMAGRHVVQLYRRIQKRKGHAKAVVAVARHLAEATYWVLKKQEPYREPAGPKPISSTQK

SEQ ID NO: 107581 - protein, 354 aa, unidentified
MQYIAFDSHKRYTYAVVEEKEKGRVMEKRIEHRRGEIGAFLSQCEVGSPVALETIGSWYWIVAEIEAAGMLPRLVNARKAKMMIASSKKTDRLDAKGLNTLQRTGTLPTVWIPSSELRDIRELYRTRMVLTQMVIRLKNRILSCFSKYGISFDETSDAFNIKGRASLEAALEILPTQTCFAVKELLRQLDLLQEAVKEFEARMLQVQSNDPEIKLLQTIPGVGPILSYVIAYETGDIHRFPSASCFASYAGTTPSVHASGGKVRYGHTASDVNHYLHWAFIEAANVISMRHEVLRFRHTARLYERLRQAKGHGIAVGAVARHLAEATYWILTTKTAYREPNQNKQVVVVSSKEG

SEQ ID NO: 107582 - protein, 338 aa, unidentified
MVLIGVDPHKASHTAVVIDHDERELARFTVRAARGQVGELLAFAASFTDRRWAIESAGGLGFLLAQQLVRAGEDVVDVPATLSAKVRLLGSGRGSKNDPNDALSTAVAALRDQRLRTVGLEDPVMVLRLLADRHQDLTSLRTQAVCRLHALLAALTPGGVQRRLSATAAAAFLAKVHPDTMVTTTRRAMATDLVADVRRLDKAIADVKARTAAAVAASGTTVTEVYGVGPVIAALLVGHTGDVTRFPSSGHYASYNGTAPIEASSGPKVRHRLNPRGNRQLNHALHMVAVTQIRGDNPGRDYYRKKIAEGKTTREARRALKRKISDAVYRQLLADTRT

SEQ ID NO: 107583 - protein, 365 aa, unidentified
MKPNFEPGKWFMQCVGIDIAKSTFTACLCMYEFDQGCSTPSVVFSNNRTGFNQFVKWSRKEALKGYPLRYVMEPTGVYYEQLASHLNKLGLYVCVVLPNKAREFAKYEGILTKTDDMDAYTLGMLGCLDKRLKPWTPPSPIYRELRQMTRFVADINKVKTELRNHLEALAHSETAEKSIVKHYNKLIDEIDKQLVSNQKAIREKIKHEPGLSERIDRITTINGIGFMTAVTVVAETKGFALITNCKQLARYAGLDVPAHQSGPVDPKRHISKQGNVHIRTALYFPAIVSTQCNPQMKDFYGRLCARNTQSKMIGVTATMRKLLLLIYSLWKSGEEYDPTRDRQKKEAETTEGQPHGIDVGTLAEE

SEQ ID NO: 107584 - protein, 331 aa, unidentified
MKNKQIIGIDVSKCTLDAFVFKSNHLFQVANNPTGFVGLLQESIQISGLSKDSLLFCFENTGCYSKSLSVFLQDAGIAFYAIDALDLKRSMGLSRGKSDKKDAKAIAMYAWRRRDELVCSKLPGPVFDQLSALLSHREMLIKQRTALKNANKGHYNSYSENEFKFLKESQMRMIKQLSEEIKITESEIIFIINHNVELKSSYDLLLSIKGIGKILAFYLITLTHNFTKFTDPRKFACYAGIAPFEYSSGTSVKGRTKVHPCANKQIKSLLNMAAMSSIQLPGEYQIYYLRRTADGKNKMSTLNIIRNKLIFRAFAVIKRGSIYVDLHKFAA

SEQ ID NO: 107585 - protein, 408 aa, unidentified
MNLFVGIDVSSEKLDTCFLTSEDQILLEVSLPNNVVGASKIKEKIIHFFDLTHYERIIVGMEATSVYSFHPSTFLAEDSELKSLGVEVVVMNPKAIHRFKGLFEEDKTDKIDAYRIADFLRFDRFNTSLIKEEQYMALQRLTRSRYQLIGQQTEMKQHFLENLYYKCNTLSKEIDTSVFGATMMDLLTDSMSLEEIANMSLENLAAVLQEKGRGRFSNPEKLAKSLSKAIRDSYRLGKVMQNSVDVVLASYAMMIKTLKKQIKELDKAIQELFEILPESKSLLSVPGIGPVYAAGIIAEIGQIQRFENEAKIAKYAGLYWKRKQSGNFESERTTMTKTGNHYLRYYLIEAANSVMRNEPVYRDYYLKKYREVPKHQHKRALVLTARKFVRMVDVLLRNHQLYAPERSV

SEQ ID NO: 107586 - protein, 407 aa, unidentified
MSKLYCGIDWSERHHDVAIIDQDGGLISKQRIPDTAEGFTQLLALLAAAGDRADQLIPVAIETPRGLMVAAIRATGRPLYPINPMAVARYRDRHAVSRGKSDHGDALVLANILRTDEHVHRVVPDDSELARQIAVLARAHQDATWRRARASNELRSVLREFYPNFLDAFAGHQDFLISADARAVLAIAPTPAAATKLTHARVAAALRRGGRQRHIDERAGHYLAVLRRNQLRQQPLVEAAYGDHILALLATLNAEDTNVDRLGRTCAQAFAQHPDYEIITSFPGLGDQAGARILAEVGDDRHRFADARALRAYAGSAPITRASGRSLSITHRRIKNDRLAAVGFMWAFSASSRAGGAKDHYRRRRDTHGDHHAAATRHLFNRLLGCLYHCLQTRELFDPDKAFTTTT

SEQ ID NO: 107587 - protein, 348 aa, unidentified
MRLATLNKKYYCGIDLHAKNICVCVKTKTGKILLHQEIPSKMDALVNLLKRYLKDIAIACESTFNWYWLADGCRKHKIPFYLGHALYMKHIHGGKTKNDWIDSQKIADLLRSNMLPLAYDYPEKMRTTRDLLRRRRRLVALRTSLYHHVKMYMYQQGINDFPPKATHEKKKRRELILRLKNPDAFMNLHTDLELVDRLDRLIMDIENQVKKQAKHHDRKALALLQTIDGVGDILSLTILYEMHTINRFKKAQHFSSYSRVVIIDWSSAGKSYRGKNNKIGNPHLRWTFGEIASLSLKYYDEIKKYHEKLKKKFGKKKALSRLAHKFCVAIYYMLRNNEPFDVNKFVVS

SEQ ID NO: 107588 - protein, 325 aa, unidentified
MACFVGVDVSKAKFDCALLLPNSKFKSKVFSNDEAGFAALLQWVGSHVPAGELLHLCMESTGSYHEALAGYAHDRGLSVSIVNPMLVKRFAELNRVRNKTDAGDAKCLALYCRDQAPEPWQAPSLPVRALQALVARLDTLLAMRQAEANRLEVAHPSVADSIRKIMAELDAAIAQVKAQIAQTIDDDPDLKRRAELLETIPGLGERTIPQLLAYIGNPNRFKSAKALIAYASLAPLIRQSGTSLDKRRGTHGMGHKDFKRLLYFPAMVAGRYNPAIAAFWKRLKAQNKPGKVIVVACMHKLLNIVYAVLRSGKPFDPMHAGTAGA

SEQ ID NO: 107589 - protein, 454 aa, unidentified
MAQRKRRRKRLAVADLPEHLQHVNLNAAGIDIGSDRHVAAVPAGLDEVSVREFGAFTTDLNALADWLTKCGITSVAMESTGVYWIPLFELLEQRGFEVKLVDARQVKNVSGRKSDVLDCQWLQQLHTYGLLAGAFRPPDQVCVLRGYMRQREMLVQASSMHIQHMQKALQQMNLLLHNVVSDITGVTGMKIIKAIITGERDPKVLARHRDQRCHSSAATIAKSLLGNYREEHLFALTQAVSLYETYQAKIVECETAIACYLKQQPNRTDEEPPPTDKSVRNRDRQRGGVDVRSQLYKMTGVDLFNLPGLAADTLLTLAGEVGFDMTPWPSEKHFTSWLALCPGTRKSNGKVLSRKTKRSANRAAAAFRIAAASLTRSKTALGAFYRRIRVRVGPAEAITATARKLAVLYYSLLKHGSAYVEIGQTVYEEKYQQRRLNSIQKQALAMGYQLIPTA

SEQ ID NO: 107590 - protein, 359 aa, unidentified
MQTQRKELNFEGQSVFVGLDVHLKSWTVSIFTEKLHHKTFSQPPKADILSDYLKLNFPNASYFSTYEAGFCGFWAHFRLEELGIRNIVVNPVDVPTTQKDQMRKSDPVDSNKLGRSLRSNELKGIYIPRQETLDDRTLIRVRFTIVKDMVRLKQRIKSFLNLYGIEYPDEFQNTNTHWSKRFINWLKTIQLQYSTGTEALNLLIKEAEQLRLILLEATQKIRALSKTERFSKNIELITSIPGIGLITGIMLLAEIEDIKRFENSDKLAGLIGIVPDCHSSGPSEKKGEMTKRGQYFMRKGIIECSWVAATRDPALSLAYYEYCKRMEPNKAITRIARKLINRIFSVLKNEKKYEFGIVK

SEQ ID NO: 107591 - protein, 338 aa, unidentified
MKYTVFGMDIAKQIIQLHTVHPETGEVERHKLKRSQVLEFFVRREPALIAIEACGGAHWWARKLVQQGHEVRLLHPKSVRPFVLRNKTDAADARAIWTAVQQPEAPEVAIKTEVQQSVLALHRMRAQLMKFRIMQTNALRGLLYEFGVVLPEGHTALLKALPDTLAALDTQLPAILLDSLHEQWARVQQMQVEIDRIERRLASVLRDTPQCQQIAEIPGVGLLTATAAVAAMGEASSFKSGREFAAWAGLVPRQRGTGGHVRQLGLSKRGDVYLRTLLMHGARSIVIRHRNVPWIAALLARRPYNVAVAAVANKLARTIWAVLAKGRPYDPAAFSAVA

SEQ ID NO: 107592 - protein, 410 aa, unidentified
MEVLHPHGAGLDVHKETVVACVRHMVDGKVTTGVKTFKTTTQELMALSDWLSAEGVTHIAMEATGVYWKPVWHILSDGEFTLVLANAAHVKNVPGRKTDVNDATWLADLMAHGLIRASFVPDEPTQQMRDLLRTRKQFVRERSRHTQRIQKTLEDANIKLDSVISNILGASGRRMIDALIAGEIAPEALAKLADERLHATRAELEASLRGRVTAHHRFMLQLHLEQVDALDAAMARINQEVGANVEPFRVAIEMLSTIPGLSSVSAEVIVSEIGIDMSRFPTEAQLISWAGLCPKNDESAGKRRSNRIKKGAPWLKTTLVQCAWAASRKKGSYLRAQFLRLRSRRGSQKAIVAVAASILTAAYHMLKDGTLYQDLGANHFDQRAKGKHVLRLVNRLQNLGFAVQITPMAA

SEQ ID NO: 107593 - protein, 334 aa, unidentified
MDHLAIDLGGRESQICVRRADGAVLEERRCRTAALAAYLASRPHSRVIVETCSEAFRIADAALAAGHEVRVVPATLVRTLGVGARGIKTDRRDAQVLSEVSCQIDLPSVHIPCAETRARKTLCGMREGLVQARTQLINTVRGWLRAEGRLPRSGDTATFPARVRAQASPCPAYVERQLRAIDALTTEIAAADRELAALTRRDPLLQRCLTVPGVGPVTAVRFVAALDDRARFPGAHAVESYLGLTPGEDSSAGRRRRTSITKAGPAAVRWCLVQAAWAARRTRRKDPIHRWVDALVQRRGVRIAILALARKLAGILYAIWRDGTVYEPRRASLA

SEQ ID NO: 107594 - protein, 424 aa, unidentified
MNTNTKLEAITDRVLIVGVDVAKKSHVARVIDDRGVELCRTMRFENSREGFTSFSGCLSELKNLHDKESVIIGLEPTGVYGHALIAYLQDEGYHVAYILGMQVKRVKELEDNSPSKNDPKDAKVIATLVKDGYYRKIRSHADDIVELKDATRHAYQITKKLTRVKCQIDTFLSQYFPEFNDAFRDIEKKTALATLKLFPLPDQIRALSAEQITRAWRASGVIKGIGIKKAHQLKHLAETTIGLRATESARIHFDDLMSEYDVLGCQEKGIWKKIKALLEPNADYQAIMRIPNMTLKMTAYLMAEVGDFRDFSHPQQLVRLAGFNLQESSSGKNRGTSEITKRGRPMLRRVLYFIVLEQLKRAAPGWHQLHKRYTTRKDKPLKKMQSVIALCCKFLRVVWGMIKNNAPYDPGLLLQKKGAILNAA

SEQ ID NO: 107595 - protein, 451 aa, unidentified
MTLPVRHGVGDRLVRCRATERYPLGRRTRLELDEVAVKRHEEVTLSITCGIDWAEAHQDVALIDEHGVVVARSRIDTGVAGFSALLALIAEHGGGVDDTPVAVETDKNLIVVGLVEAGFTVYPINPRGVARYRERYGQAGGKSDPGDATVLAHILRTDRHLHRQLPTNTNQAGAIKVLARQHQEAIWALHQTVSRLRAVLLEFYPQALQAFPNLQHHAATTVLAAVPTPAAAGKLTRTRVATLLRRSGRGNQAALAERILTELRVPSLRQPSCVEEAYGHTVQGLVGAVEAMRTAADALEKALACEFDQHPQSDLLRSVPGLGPVLAARVLAEIGDDPARFDNPQSLRAYAGTAPVTIASGRSRYVKARKVRNKRLADACHWWAFTTLTKSGGARAHYDRRRAAGDHHNAALRNLANKLIGRLWWCLANNQPWDEDDAWPNIARTEKATAA

SEQ ID NO: 107596 - protein, 460 aa, unidentified
MSEPIPAAEPDYAAFIAIDWADRQHAWVLQVSGSTQRETGQLEHTPEAIEDWAMQLATRFAGRPVAVALEQARGALLYSLSRFEHLVLYPIHPSTSYNYRKAMFPSGSKDDPKDAAILLDLLTLHRDRLRLLRADTTQTRKLQILVEKRRQLVDERTAQTNRITDQLKMYFPQVLKWFDSLHAPIVAAFLQRWPTLPRLQKEAPEAVRKFFYEHGSRSGERIEKRLQEAAKAQALIHDAAVIEPGVLVVKALLAMVAALNEGIRALEKAIEDVTAAHPDYSIFYSFPGAGPAMAPRLLAAFGTQRERYASASELQSFSGIAPVMEASGRQCWVHFRWACPHFLRQTFHEYAAASVQFCDWARVFYQEQRAKGKEHHAAIRALAYKWIRILFRCWQSRQPYQEQLYVAARQARALALPSRQQNLPAQTASHGKPTSRKTGKAQDFAMKTIGEILKSFMAEA

SEQ ID NO: 107597 - protein, 345 aa, unidentified
MDHPAVAYRLFVGVDIAADTFTAAWLAPDGSPSAPLTRDQTPPGIAALRQRLDATRIPPAATLVVMEATGNYWVGLAVALHEAGDVVSVINPLQAHHFAKAQLRRAKTDALDAQDLARLAARLRPAPWTPPPPVYREVRQRLVARDALLTMRQQARNQRHALRQWPVVVEGVRRHLDELIADFDARLATLEAEIAAALADSAWAGSLARLTSAPGLGLVTAAWLLVGTLNFALAVTPASATAYAGLAPMPRESGRTVRGRPAIGHAGNARLRTALYMATLSAARHDPAIKAFYDRLRAGGKPMKVARCAAARKLLHLAWALVTKQQYFDPTRQQQQHASRADHAA

SEQ ID NO: 107598 - protein, 344 aa, unidentified
MDHFAGLDVSVKETSVCVVDDTGRIVREVKVASEPEALLQVLGNPAYRFKRIGLEAGPLSQWLFSALAEASLPVICVETRHMRAVLQAQINKTDRNDARGIAQMMRAGLYRPVHVKTLRSQKLRMLLTHRKLLQSKAIAIENDLRGTLRNFGLKVGVAGTVKFEARIKELVENLPDLAVLVEPLLIVRQVLREQIGILHRRLLAIVRDDEVCRRLMTVPGVGPVVALTYRATVDVPARFRNSKAVGAVFGLTPSKYQSGEISRTGAISRCGDEMMRVMLYEAAQVMLTRTNKWSWLKAWGMQIARRRGMKKAIVALARRLAVIMHRIWVDGTEFRWTREEAEAA

SEQ ID NO: 107599 - protein, 389 aa, unidentified
MFYLGIDIGKNTHVASLVDDKKKVIFKAFSFSNSIDGAESLILKLEAFKNELEVGMEATGHYWLSLYSYLVEKNFTVRVINPIQTDGWRQGIEIRKRKTDIIDSLLIADLLRYGDFVETSLSNEDYLSLRNLSRFRSYLISSIGDLKRKTIALLDQVFPEYASSFSNIFGKTSKEILSNFSTPSDFEDINSDDLNTFLESVTRKNYASKKIDELSKKASSSFGINFCLDSFSLQIKMLIEQISFIQNQVSDVENEIEVLLEKLNSPITTIPGIGSVNAATILGEIGDIKRFSNPSKLVAYAGLDASVSQSGEYESTYNHMSKRGSPYLRRALFQSALRAEFCDPVFSDYYQKKISEGKHHLVATNAVARKLCHTIFAVLTKNEPYQVQS

SEQ ID NO: 107600 - protein, 408 aa, unidentified
MKTLHKRCAGLDVHKVEVVACLRLISKRKVEREVRRFPTTTQGLLALAEWLESAGCTHVAMEATGVYWKPVWHILEGRFALILANAAHVKNVPGRKSDVNDATWLADLMAHGLIQSSFVPPPAIQELRDLTRTRKQLTREIVQHVQRIQAVLEEANIKLCSVITDIMGASGRRMLKAMIAGETDAEKLAALGHERLGCTRAELVQVLTGCVREHHRFLLEQHLRTIEQLEDSIAAFDARIEAALLPFHDVVERLNEVPGLGATAVETVIAEIGIDMSQFPSAGHLLSWAGFVPRLDESAGKRRSTRIKKGAPWLKPVLLQSAWGAARKKNSYLQAQFLRLKARRGAKKAAIAVAASILTTVYHMLRDGTYYQDLGPEYFARRNPAKAAARLANRIRNLGYQVEIRAAA

SEQ ID NO: 107601 - protein, 345 aa, unidentified
MELHTIGIDLGKTVFHLVGVNLRGEVVVRKKFSRKQLLHFTANLQIELIGMEACGGAHFLGRALQGQGHEVRLMPAQYVKPYVKTNKSDYIDAEAIAEAVGRPNMRFVPIKSDAQLDLQSLHRVRERWVMRRTAVINQIRGLLLERGITLRKGRCYVDEALPGVLEDASAKLSGALRVLLAQLKLELDHLQMRIDEADAVIKEAVGENEACRRLVAIPGIGPITATAIIAAIGNGAAFKKGREFSAWLGIVPGEYTTGGKQKLLGISKRGNSYLRRLFVHGARAVLQQSAKQSSGLSSWLAQLTTRTHRNVAAVALANKLARMAWAVLAKNEPYRPPMLADATTA

SEQ ID NO: 107602 - protein, 480 aa, unidentified
MRPYRRLSLFKASGLDEAFIYSQVKTMAKKAKKIKTNKGLKLEIVNPNSAGIDVSSTEMQVCVPEDRDGENNRRFGTFTQDLHLISDWLKACGIETVAMESTGVYWVQLYMILESDGFDVLLVNAKAIKNISEKKTDRVDAETIMVLHSYGLLRASFQPQNHARRIRNVSRHRDGLLKASSREVLHMQKAMELMNIKLGNVISDILGKSGQEIIRAILAGERDALKLSALADPRCKSPKETIAKSLQANWDEDLLFMLKQSYELYVYYQNLMKDCDKQIEGILQEYLKDVKPEETSKPEQRAKKAKAQKNAVTIDIEKHAIRLWGVNAMRIPGVSEAALLRLAGELGHDFTDKFDSYKQFCCWCNLTPNNKISGGKLQSSKIPKRKNPVGQILRSSANSLKTSKTPLGYYFRRIQAKSGYLPAIIATANKLGRILYTMVKYKVEFDDSFTQTSETEILRRKLIKTQRTLEKLQNQIKECG

SEQ ID NO: 107603 - protein, 401 aa, unidentified
MNAVGIDVSKGKSTVSILRPFGEIVYSPFDVNHSSSDINALIQLINSVEGESRIVMEYTGRYYEVLAHQLSEANLFVSVVNPKLIKDFDNDSLRKVKSDNADSVKIARYALDKWHKLQQYGDMEELRNQLKTMNRQFGFYMKHKTAMKNNLIGILDQTYPGVNTYFDSPARSDGSQKWVDFASTYWHVDCVRKMSLNAFIEHYQKWCKRRKYNFSKTKAEEIYEKAKELVPVLPKDDITKMIIKQAVDQLNNTSATVEKLRSLMDETASKLPEYPVVMQMKGVGPSLGPQLIAEIGDITRFHKKSALTAFAGIDPGVNESGSYEQKSVPTTKRGSADLRKTLFQIMDVLIKTAPIDDPVYQFLDKKRSQGKPYYVYMTAGANKFLRVYYGRVIEYLSTLSD

SEQ ID NO: 107604 - protein, 417 aa, unidentified
MALVRWVGRAIGLDVHRDFCVVAICEDGQVRSAGRVPSTPEGLATLAESLLWTDRVALEVTGSCWEVARILEPHVDRVVVVSPDDTGISSARAKTDKLDARTLASLLWKGELEAVWVPDERCRVLRRRLARRQQLVWSRTRAKNEIHAVLQRRLQGKPPCSDLFGVKGRLWLTGLELPIEERESVDAGIRQIEFLDSEIAAVERLIARQALSWPEIRRLMTVPGVNLICAATFIAAVGNANRFLTSRKLVAYLGLDPKVRQSGEGPARSGRISKRGSASARWALVEAAWSAVLQPGPLHAFYERTKARRGHGKAIVATARKLAILFWCMLTRSEDYAHQQPSLTKKKLRRLEITAGAPKYSKAAAGIWHANDIVRDAERELAQQAEISYRRMVADQKAGGPARQRVGASATPERAEV

SEQ ID NO: 107605 - protein, 350 aa, unidentified
MVVVGADVHKRSHTFVAVDEAGRKLGQLTVKADAKGHDKAVRWAERTFGPDLKWGIEDCRHLSARLEMDLLDAGQRVVRVPPKMMAEQRRTARTHGKSDPIDALAVARAVLREPDLPEASHDEASRELKLLVDHRDDLVKQRTGDVNRFRWHLHRIDPTIDPGPKSLNRAVKRAELAEFLAGKDGIDARLARELLADIDALTGRINALEREITGLVAVQAPALLELPGCGALSAAKIVGETAGIDRFSHEAKFAMHAGAAPIPVWSGSTRGRVRLNKAGNRQLNAALHRIALTQIQRDGIGRAYYEKRLAMGDSKTEAMRCLKRRLARTVFNILKNNPSTLATTGLAAAA

SEQ ID NO: 107606 - protein, 388 aa, unidentified
MYHVGIDISKFKHNCFIATEAGVKVKEFIFDNNKSGFIELKDSLTSLGKPQEIKIGFESTGHYGTNLKSYLSNLGYTYVELNAYLTHLFSKALTLRKTKTDKVDAKVISSMLGSVDYETLHTKFYHMNDLKELVRQRNVYLGSRSKELIKLTNLLDKTFPEFKPFFKNRLGSGALFILKRFKSKTRIAKLRMSDFELIRSKTKGKMTYPKFNRLKQLAKDSIGVSSKVYDLLIQTSIEQFEHLTHILKIIDSEIIKLFKQTDSKLLTIPGLGIITAATIYAEVGDFKNFSNPAKLIAFAGFDVRIVQSGTQEHYGKLVKHGSSLLRNAIWSYALPAVRFIPTFNDYYHKKKAQGKHHKVILSHICRKLIRMIYYIEYHNVSFDHSMSR

SEQ ID NO: 107607 - protein, 346 aa, unidentified
MTVKCMAGIDLHSNNLFCAIVDLDGKRVFERKLPCELETVLRALQPFKRRLEKIAVESTYNWYWLVDGLQDHGYPVVLANPAAMEQYNGLKHADDKSDGFFLAEMARLNILPTGNICDRSIRPVRDLLRRRMGLVQKRTSLMLSLKSLHTRMTGRDLSTGRIKVLAPPDADKLFDHPADRLIARLDLQLVEQLGRSIQEIETRILAEAKRMSRYQVLQTMPGVGRILGLTIMLETVDPQRFAGPGDYASYCRCVDSRRLSNGKKKGENNSKCGNKYLAWAFVEAANFAQRHDAACRKFYDRKKAQVNGIVATKALACKLAKAAWHMMSNNTHYDGGRMFPKVKTSK

SEQ ID NO: 107608 - protein, 340 aa, unidentified
MAKYIGMDAHSSTCTFCVLDNDGVEISSTVIATNGKLLKEYIRSIQGVKKLALEECELSAWLHEILEPDVEELVVCDPVKNTVYKKNKTDKLDARNLAMLLRGGFLHPVYHQDSARYHLRSFMRGYQNIVDAGVGFKNRYSSLYRKNGQKKKGVDLYSDESLLKDLPRPDQRFVAQHLYSMIQNTETERQAYVKEIKKLPRTFKEIKLLCGIHGIGEIQAAKIVAQVVEPQRFKNKYKFFAYCGLVRYAHSSAGTERRGKLAHGNKTLKCVFKMATLSAIYGDNVFRRYYESLLKKGLNEKAARNAITRKIAAISLAMLKHNAKFDESKIKMTEESITSA

SEQ ID NO: 107609 - protein, 341 aa, unidentified
MSDYSYFCGIDLAKNHFSLHAVDQNGKVILHKSITRSKLLTTIANMPLMRIGVEACGGAHYWARTLNKLGHDTRIMAVKYVIPYRTKGKNDLNDAVAICEAVQRPLTRFVPVKSPEQQAILSVHRMREHWVRERTALMNRMRALLSEFGLIIPVGRSSLMKQVPLMLEDAENELPHLARTVIADAYHHLGELNQRIADTEQVFDSFAKVSDNVQRVMKVRGIGPQTATAILASIGNGAQFDKSRDFSAWLGLVPKQYSTGGKPRLGRITKHGDKYLRTLLVHGARTVIANLGDKQDKLSQWCRGVLERRGMNRAIVALAAKNARIIWSLLHNQTEYENYAA

SEQ ID NO: 107610 - protein, 416 aa, unidentified
MKIVRPICCGMDVHKNIIVATIGITNKKTRITEYIQETFSTLNPDLLNLKQWLINHKCFDACMESTGKYWIPIFNILEDEINIYLTHPKYVKAIKGKKTDKKDSKWICDLFKHDLIKFSFIPPKEIRALREISRYRYKLVGMRSSERNRYQNCMTVSNIGIGSVFSDPFGKSAQAIMKEVLESDIIEDEKILKCIHGSCKNKDKILDSIKHCNIETDQRFKMNESMTHMEELQVHINNCEIEMMKRAAPMFDRFMHITQLPGISTLSAILIISEIGVDMKQFESDKQLTCWAGLAPANNESANKKKSVRISKAGQYLKPLLVQCALGAIKDKDGYFGIKYSRIKKRRGHKKAIIAIARMMLVSIYHMILTGETFNPSDYESFRNPNPPIKQQVLTEESAIEFLKKSGFDVSKLTKP

SEQ ID NO: 107611 - protein, 451 aa, unidentified
MTKRSGLTRGDRRRNDRIEALRAVITPVRAILAIDLGEDKQVAALMDHDGRVLGRRKVMAKSHTLGGLLAWAGGQAVRHGFAGVVVGCEPTGHRWRAMMALADDAGMGFVCVQSLRVHLAREADDYTRDKTDHKDAVLIGKLISSLDCYLPERAEADWARLRHLGQRRSRLVTDVIACGQQILDLLSCCWPAAPACAAKPLESTTWLACLAATMDRCHGDPARLARVGRDGFFAAARRQLPRFGARRLSHKVAGRFFDALADRAGVPAQRHGALERVHFLIDDWRSALARMSDVEQRMVAALDAMGLTGLVTSIPGLSAVGAAVILAETGDLSRFASARSVVKHAGLNPAENTSATFRGVTRVSRRGRPELRLAAWRATWGALPHNRVLGAKFTHLTRRDRDRLTPGQARVACAATLLRWLYAIVTRRQPFNPDIAAGLARTHQPAPAVAA

SEQ ID NO: 107612 - protein, 340 aa, unidentified
MSLYAGMDLHGNSNYVAIMDSKGKRIVQKKLPNDRRLILETLQPHRAKISGIAVESTYNWYWVVDTLREAGYCVHLANPSAIQRYSGLKYTDDQHDAFWLAEMLRLGILPEGYIYPKEERPIRDLLRKRGHLVKLRTSLIISLQNIISRNCGLRLNVNKVKELKKNQVSPLLEANDDLALAGEVSKEAIDFLTRKIRKIEGVIVEKIEVKDSYRYLLTLPGVGKILALTIMLETGPISRFAKVGNYVSYCRKVSSQWISNEKAKGKGNKKNGNKYLAWAFSEAAEFARRYHEEARRYYNRKMQRTNFMVAHSALAHKLARAAYYIMKDQVPFRSEKLFAQ

SEQ ID NO: 107613 - protein, 326 aa, unidentified
MQGKEPSEQKTKVKSSAGIDVCKSWLDAHVLPEGCSLRVSNDAQGHRKLKRWLAKHGVEIIAIEATGKWHRPVHRSLHASGFKVAIVNPLRARLFAESIGLLAKTDRVDARMLAILAASLMPSASTPAPDFIEALKELVAARHSAVAEQTGLENQLASANTGFLRALLKRRIERLAKDISSLDAEIAKRIAADLGLARRYEILLSIPGLGPVTAATLVADLSELGACNAKQIAMLTGLAPLAKDSGAHQGQRVIRGGRAGVRRVLYLCALSARRCNAAMKALYERLTAAGKPHKVALIAVARKLVDLANTLINQNRLWHPNAPAHA

SEQ ID NO: 107614 - protein, 352 aa, unidentified
METAYDGRGMDLHRRRSVLVRMTEDGRRLGTAKITSSPAELRREIARAGKAPKVVLEATYGWYWAADTLAAAGAEVHLAHPLGVKAFSYRRVKNDERDSADLADLLRMGRLPEAWIAPHEVRELRELTRYRIRLVRLRTSCKDQVHGVLAKLGVTVTCTDIFGKAGPAWLDGLRLPQPYAGKVTSPRHLAGELTTEITMLGEVIASLLAGDRGYQVIQQLPGIDPVLAAVITAGIGDVTRFRNAGQLCSWAGLTPRHRESGTRVARGHVTRQGSRLLRWALIEAIQRIPRDSVTGAVKDAIIARRGKEARNIARVAAARQLLTLVFYGMRDGQIRCLTPPAAPAAAQTARAA

SEQ ID NO: 107615 - protein, 342 aa, unidentified
MGQVTTIGLDIAKSVFQVHGVDAAGEAILRRRLTRARVAPFFAKMARCLVGMEACATSHYWARELRKLGHEVRLMPPSYVKAYVKRQKNDTADAEAICEAVTRPTMRFVEVKSPEQQSIMVVHGTRTMLMRQRIQLSNAICGHMAEFGVVAPVGREGLLTLTDTLHDEADDRVPAEARHCLQMLAAQLRLVNDQILENDRRIRVSARATDVGRRLMGIPGVGPVLASAFVATVPDPHAFRSGRNLAAWIGLVPRQNSSGGKERLGGITKQGNRYLRQLLFVGAMAVIRYAERHGTRRPWLVRLLARRTTKVAAAALANKTARMVWAIMTSGQSYREPELRTA

SEQ ID NO: 107616 - protein, 421 aa, unidentified
MPRKFSFETCGGLPYPPKEAAIGMPSTGVRGMLRLIEGKRPDEHQMGWTAPGFLSHYPGRRNQRIGTARMNISMIGLDTAKSVFQVHGVDESGKAVLKRKLQRSEMVPFFEKLPPCTVVLEACGAAHFWARTLIGLGHDAKLIAPEAVRPFVKKRKKNDAADAEGLVTAGRQPGTRFVPVKDTEQQGILAIHTSRAILVKQQTMLSNSVRGQAAEFGHTAAKGNEKLAELVTEVEADELVPARARQAIVVLYDQHRALDEQIETLEAEIVAHAKNDEKARILDAIPGVGPITASLVVATVSDWSVFKTGRDFAAWAGLVPRQNGTGGKVRLGKITKAGNKQIRKLLVIGATSMVHRAEHWDSALGRWTASLLKQGRPVRLVTVALANKVARVMWALMAHNDVYRPQGAVKPSAAASAAVVA

SEQ ID NO: 107617 - protein, 310 aa, unidentified
MESITVGIDVSKDRLDVAVRPSGEAFAVERNAAGLEQLTIRLRELAPQVIALEATGGFETIAAAALAAARLPVVVVNPAQIRAFAKAIGQRAKTDPIDAAAIAHFAEATKPVPRPLPDDATRLLGDLVARRRQIIEMIGAERQREQRVTVPHLRQSITRLLKALEKELASLNTDIGDAVRGSPAWREKENLLVSVPGVGQVISSILIAELPELGQLGRREIAALAGLAPFTRQSGKWRGKSFIGGGRSAVRTALFMGAFVAKRHNPVLKAFFDRLVAAGKPKMVALIAVARKLLTILNAIIRDNRPWQTA

SEQ ID NO: 107618 - protein, 411 aa, unidentified
MQVLYPRCSGLDIHKATIAACVLVAEGQTKQKHLLRCRTMTRDLLALADWLAGFGVTHVAMESTGVYWKPIWNVLEGRFELLLINAQHFKAVPGRKTDIKDSEWLAELLQHGLLRGSFVPPTLVRDLRDLNRNRAILVQQRATVSNRIEKVLEDANIKLGTVASHVLGQSGRAMLHAMSTGEEDADKLAEMARAKLRNKIPELRVALTGTVRAHHRFALKQWLLQLQAVEKQIADFEAEIDQLNQPFQEAVERLITIPGVDRITACALIAEIGTNMAQFPTAQHLASWAGVCPGNQESAGKRLSGQTRKGNPWLRRVLCQAAWAASHTKNTYLSAQYHRLAARRGKKRAIIAVAHSILVIVYYLLSRGEEYRDKGSDYFDRINSEGLKRHLVKRLENLGHRVKLEPVLPQA

SEQ ID NO: 107619 - protein, 367 aa, unidentified
MKKVSIAATKQRKNISQRKLTIGLDLGDRNSWYCVVDEAGQIQLEQRVRTNAKALQEVFGTMPRSRIALEIGTHSPWVSRLFSELGHEVIVANARKVRLIGESRKKDDRMDAQTLARLARIDPQLLYPVKHRSAKAQADLTLIRARAGLVRARTALVNTARGLAKSYGERLRGCNVRNLNAEKAEGLSPELQRALEPLLACIESVSEQIREYNERIEDLAQESYPQTALLKQVKGVGTLIALTYLLTLEDPHRFQKSRDVGCYLGLQPGRRNSGKSEPQMHISKEGDPYLRTLLVQGAQHILGPFGIDCDLRRWGVRLAERGGKSGKKRAIVATARKLAVLLHHLWVSGEAYEPLHNSSKTTVAAAA

SEQ ID NO: 107620 - protein, 425 aa, unidentified
MTPEPNPEFAAFIGIDWADAKHDICLQAAGSRQREFAVLPHRPDAIDEWAAALRQRFHGQALAVCLEIARGPLVYALQKHDFFVLFPVNPATLAKYRQAFQPSHAKADPADAQIALEILLCHRDKLKALQPQSVGIRTLERLLEERREFVDEQTRITNRLTSALKEYFPLANAWFDEKASALFCDFLSHWPSLKQLQRARRTTLLTFFREHHCYQPRLIEERLAALQRATPLTDDAAVIKPKALMVEGLVDQLRVTLKAIARFDAEIESVAPTLPDYALFLALPGAGPNLAPRLLVAFGERRERFASAADVQMFVGVAPVTESSGKQHWVHWRLQCPTFLRQTFVEWAAQTITRSFWAGAYYRQQRAKGCAHQTAVRALAFKWIRILFRCWQLRTPYDESAYLNALQRRGSPLLASLALPSPATH

SEQ ID NO: 107621 - protein, 324 aa, unidentified
MFYLGIDVAKAKIDCCLILENSASKKKTKTFSNTPKGFEQLQTWLKQHAATSTQTIILMEATSIYHELLAKYLFDADYQVCVTNPARARYFAQSMSKLNKTDKVDSEVLARFAMTADLHFWQPLPQPIQFLNALLDRRAVLCEDLQREKNRLEKAESTFTMEPVLQSIHKSIRQLNKHIQGIDQQIDAHIDQNPDLRNDKELLSSIPAIADRTSLLMLSFLRSHTFESASQAAAFVGLVPIQKQSGSSIHGRSRLSKAGSSKIRAGLYMAAIVATRHNPHIRGMNERLLANGKTKMMAIGAAMRKLVHLCYGVLKHQQPYQADY

SEQ ID NO: 107622 - protein, 439 aa, unidentified
MHYQKVLKMPESIPYLSAGFDVGADFTWMSIMLPNGILTGKPFKIIHSDPQSRELAISKIKEAQEMYSLESRCFLESTGIYHIPLLCFLRDKGFDCAVINPIITKNSTNMNVRKLHNDKFDSKKAAKVGLDASLKASIVPDDAIIDLRNLVRDYYYFKDLQSAIVLKLHAELKVSFPAYLNVFSKVTTQTSLKLLEAYPLAADMLAAPKDELVEIIRSTARFGETYALARYDAICTAAKDAAVFGRALPSNALRIRLYIKMYREYQAHLDSILEELHQAVGKLKGTPDYDRISFIQTLRGVGFLSAVVLIAEMGAFDLFSSPKKLYAYFGLDPGVNDSGKFHGDRVHMSKRGSSLARRILHMVAINNLKVDKATKTPVNPVIYNYYTRKCASKKRALLSGPSCTKSATSFSLCSGIISLLSSLRRKNTVNVMQQSTRNL

SEQ ID NO: 107623 - protein, 447 aa, unidentified
MEVVNPQAAGIDVGSRSHWVAVGQSEQDVREYGVFNRDLFSMADWLKEMGVKTIAMESTGTYWQNLYAVLVSRGFEVVLCNGKFTKNIKGKKTDVQDCQWIQRLHAMGLLTGSFLPDGKTEELRTYCRHRSNLLNSAASASRKMQKYLRLLNLRLDVVVRDICGLTGLLIIRAVCTGETDPDKLASFRHGKCHKSAEEMALALQTNGRKDYLFTLRQELDTYEYLQRKIQECDVEIELLLDQIISSDDNKQQYHIESKPYKKINKNTPKNLDMNLKAYQMFEGTDLLAIEGVSYSTVLSLMSEVGLEGIKKFKTAKHFTSWLRLAPNNKVSGGKLLSSKVPKGSNRLKIALRNAANTIGNLKESTPLKDFFQRINFRKGRVSAVSATARKLAVIIWNMVTKGEAYSNPEGYLFLDQKRKLGLVKRIKKQIDKFGITQQDLDLKTMET

SEQ ID NO: 107624 - protein, 356 aa, unidentified
MVAVRLSLLIPYSCQGHGARIHKAGKKGELTSSLPQRRTKVKPSDSKTFIGIDVSKQHLDLAVLPTEQTWRTPNHPDQLPALVERLAALRPTRIVLEATGGLEIPVVTALAAEGLPVVVVNPRQVRDFARALSLLAKTDRLDSLVLARFAQDVRPQVKPIPDQEAILLKQLVSRHRQLTALLVIEHNHRNSALPALHKGIDRTICHLMKERTKLEEEMNHRIRQSPVWREKEKLLLTVPGVGPVVAKTLIAELPELGLISHKQIAALVGVAPLACDSGQFRGKRRIWGGRASVRQKLYMAALSASRYNPILRAFYQKLVHHGKPKKLALVACMRKLLVILNAMARNQQPWQLQLSA

SEQ ID NO: 107625 - protein, 368 aa, unidentified
MAFIAGVDTHRDSHAIVFISTSGEQVAELTIPTSTAGFAKAIKAAQKLGDVVWGVEGTGSYGRGFAEALVAQGYTVYEVPGLFTKRARKRGSRPGKSDILDARAIADVLLHESGRLPRFEESDQQEAIRLHYDRRDRYVRLRTEATNRLRAAALRLSLGSLPSNLSSEKALKTVETRLRSTIFTSYTAHALADEIRDACAEIRALNERIDAIARYLRPFVARLTPELLAIHGVSTVIAAGIVGHAGNLRNYRDAAAFAMRTGTAPIPCSSGRRTAVRVNPGGDRQLNRCLHTIALIQSHKSGHPGRAYYERKRAEGKDHLAALRSLKRQLATIAYYKLKEVHRRLQAASEALPTSSHRTRSAVAVRAA

SEQ ID NO: 107626 - protein, 352 aa, unidentified
MTLYIGVDFHPHQQTVAWCDTQTGETDTCTLQHNLSEVLKFYQSVSPSIVGIETSSRATWFEQLLEETNHQLLIGNPALIRARARSRHKSDNRDAQLILDLLVKDEFPAIWRRSQASSQIIDVLHLRRQLVNQRTQTYNRLQALAHSGGLPKGKMKTLGFQSLLKEVAMNESGQMQREHLFSLLEQLTKQIRELQSWLNRKASSDKQVQLLMTQRGVGYLTALATVHTLGDVSRFEKVSKQVIAFAGLDSLEKSSAGKTRFGRISKAGSPLLRGLLGQSANIVIRYDTRLKSFYKGLAKRKPKAVAKTATARKLLVKLAIMLRDSITAEEFDRRGIAVGNARFLTGSDVTAG

SEQ ID NO: 107627 - protein, 426 aa, unidentified
MAYRIAGIDVHKRMLAVVVADVEGEGEYQFERRQFGTTPDHLRLLSEWFVEQEVEEVVMESTAQYWKPVWGALEQYWKPTCQKREGAGPMSGALHLAQAQSNRGPQGRKKDFPDAERLVKRFVAQELTLSFVPDTEQRLWRTVMRRKYQLTCDRVQLQNRLESLLEETHIKLSSLVSDLLGLSARRMLQALADGETNPTSLAALADKKLRATPAQLCDALSACTELNPVYRRLLKMVLEELQFLEQQIVKLEQEMAGLLIQHQGAVQRLAEVPGLGVASAQQIIAEVGAKAATFASQKHLSSWVGACPGDDESAGVSTSHRSPKGNRQMRRILNQCANAAVRTKGSIFEIVYRRLVLRLGHNQTIGAIANRLCRLIWIILHRGVRYEERGQVVCERLKRTRTARMIRQLRSLGYRVEPLTVQVNPA

SEQ ID NO: 107628 - protein, 392 aa, unidentified
MVVSVGIDVSKDKHDCFILNSEGEVLADVFTIPNNMDGFTCLLQKIRDCTTSQDKIRVGLEATGHYSYNILGFLLDNGLATYVLNPLRTNLYRKSLSLRKTKTDRVDARTIAAMLLSDVGLKPYTDTAYHNEELKSLTRYRFDKVKERAKLKCSVSRLVCILFPELENLVPSLHGASVYALLEEFPGAVQIAGAHLTRLKSLLTDASRGRYGRDMALDIRDAARNSIGSRMPAKSLELQHTIRLIRELDAEIEEIETEIQAMMDELHSPITTIPGIGCRMGAMILAEVGDFSRFESPDKLLAYAGLSPSTYQSGQLKNCYPHMEKRGSRYLRYAIYNATKYVCLWDPAFASYLAKKRAEGKHYNVAISHAAKKLVRLIFALEKSRQPYRLVA

SEQ ID NO: 107629 - protein, 446 aa, unidentified
MKTRKTQLKENASPAPVQCTDGQPRFVGVDLHKKVATFHVLSQDGTSLESGSFDVGLDSIRGFADKHLRPTDQLAVEVTSNTWAFVRLVRPYVANVVVSNPLKTKAIAEANVKTDKVDARVLADLLRCNYLPSVWVPTPDVEDKRTIAARRTALVHERTSIRNRIHAVLARRLVAAPEGELFSGKGLIWLKQVELGPLDRALVDADLRLLDALARESVTIDMHIAQESYEDQDVQLLMTIPGVDCTIAYALKAALADVERFSDPDKAASYLGLVPSVRQSANKCYTGPITKAGASQVRWLLIQGAQHVGRHPGPLGAFFRKLAKRKNRNIAVVATARKMVTIAVHMLKNKEPYRYALPRATDEKLAALRVKATGEKRKHGLPKGVKPVSKIGGGKSRTTPALDEVYAREGLPSRRPRTRGEERMIRESGTERFVASLDKPKIVAKK

SEQ ID NO: 107630 - protein, 340 aa, unidentified
MENIHILGVDLAKRTFAICGADKNSYVVFRQKLTRPQFQKTLSNLPPCIIAMEACGSAHHWARVAQAAGHEVRLIPAQYVKAFVKRHKNDAIDAEAIVEAASRPSMQTVAVKDDNQQAQGMIFRTREMFVKQRTQLINAVRAHLTEYGIVLPQQRRNGRLFAKRCRSEFDTAPEIVTSLIEIYLKQIEAVDVEVAALDVKIKKGALKNAEARRLQTMPGVGPMSAMAIQAFCPPAQNFRKGRDFAAWLGLVPRQHSTGGKDRLGRITKMGQRDVRKLLIIGAMSVISASERKGHCEDPWLERMLTKRPRMVVAVALANRMARRLWAMMTKERDYEIQVVA

SEQ ID NO: 107631 - protein, 347 aa, unidentified
MTSHCQFYNYKKSGGSYLSFKILKFNCCGLDIHKTWIYACIGITDSNNRTEYKQARFSSFTKGLNELCNWLAKYNCMDVCMESTGKYWIPVFNILEQHNLWVTLSHPKYTKPMKGNKTDRKDAKWICDLYMCGMVKPSFIPPADIRELRDLVRYRYKLTCMITGEKNRAQNCLTVSNLKLDDVFSDVFGKSSRSITEQILQHPGKNFDVAPFVDGRCKTPVEEIQAAVDGAISKEQAVKLRQCLDHIDELNQHISEVEQEILRLSDKYEAALNLIRTVPGFDKNPLTSIQVLSEICGDMSVFPTAKHLVSWAGCCPRNDKSDRKIKSTRISRAGFYFNQFWCRLQML

SEQ ID NO: 107632 - protein, 346 aa, unidentified
MQHVAIDLGSRDSQVCIRRPDGTIVLEKKHPTRRLSELLRTTPHSRVIVETSAEAFRIADAAKAAGHEVRVVPATLSKKLGVGERGVKTDVRDARKLSEVSCQIDLPSVHIPSEQARQARSILRSREALIETRTKLINHVRGWMRTQLWKLRGRGPSTLPKRLREQATTETTRALPDHIEQVLTIIDAVSVQIRASDRQLKTLARSNPVCARLMTVPGVGPVTAVTFVAAVDDPTRFAHAYQVASYLGLTPGEDSSSERQRRTAITKAGPSSPRRTLIQGAWTALRTRPDDPMVRWTLQIAERRPKPVAVVALARKMSCILFALWRDGSTYAPQRGASQRGAQATS

SEQ ID NO: 107633 - protein, 388 aa, unidentified
MTQTPVPCPVPAAPDYDSTLVLAIELSNASWVLAAQVPGLPRVKAKRTIEPTADALLAAIQGYRERAKTAGRRVERVVATYEAGWSGFWLARWLATHGIETHVVQPSSVPVDRRARRAKSDGIDAELLLRTLLAWLRGEPRVCSMVPVPAEADEDARRCVREREELVAERVALVNRIGAVLATLGVGEYNPLLRNRRERLDALRTALGTSLPPHAHAKISRMLDRLDLVRAQITALEQERDAVLEDEVPDRAGKMIQQLATLRGIGVQSATVLVREAFVREFANGKALGSYAGLCATPYSSGGTEREQGISKAGNRRLRTVMVELAWLWQRYQPGSAEVTWFRARASGTGARMRKVMVVAMARKLLLALWRFATQGVVPEGAVTKPAT

SEQ ID NO: 107634 - protein, 340 aa, unidentified
MDVEYAGQRYVGIDLHRRRSVIVQMSPEGERLGVARIDNDPFELARQVASWGESPQVVLEATYGWYWAVDVLAEVGAVVHLAHPLGVKGFAYRRVKNDVRDSSDLADLLRMGRLPEAWVAPPPVRALREAVRHRAKLVALRSGLKAQVHAVLAKQGVSVPVSDLFGVGGQQLLDELRLDPAYNARVVSLRRLIDAFTFEIDVLAARTAADLRSHRGYQAIQAIPGVGPVLAAVFVAEIGDVTRFARPQRLCSWAGMTPRHRESDTKVHRGRITKQGNHLVRWAAVEAVQRLHGGPLGSTRARIAERRGANIAKVAAARKLLTLVYWGLRDGHIRCLARPA

SEQ ID NO: 107635 - protein, 398 aa, unidentified
MKTSGLDVHKDTIFCSIYDGKSYSTVKEFSTTTNSIRSMGEYLQSEKVKKVAMESTSTYWVPIWDILYEMGFEQTLVNPLHIKQMPGRKSDSKDAQWISELLYKNLLRGSLVPSPLIQELRTYTREYRTLTQEVTKVLTKIDRILVMCGIRLSSCISNMNSKSAIQIVDALIRGETNPDKLLTLVYGNRKNKESGKLKECLTGNMKEHHRIKLMTCKQQYDLFEQQITFYLSKMQEVCDEHFSEDIANLTTIPGVSTISAIIIIAETGGDMSAFDNSGKFTGWTGLRPRNDETAGKFKSTATTKGNKHLRAIIVQVGWGASRNKGSYFMDKFQKLAMRKPRKKALVAIGRKILVIIWHVLKEKTQYNPNLVHIYDPVKVEHKIKYHEREIEKAKKLIA

SEQ ID NO: 107636 - protein, 385 aa, unidentified
MTNQNDLSRSVVAFEQHNTIIVVIEMSLSSWLVAGMVPGIERHPLKKLNCDQEMLLKLLSRWRDEAVKAGHTITRIVVAFEAGRDGFWLARWLLARDIEAHVIHPTSVAVSREHRRAKTDRLDTESLKRAFLGWLRGERDHCSMAAIPNLQEEDAKRPTRERENLVGERTRIINRIKACMVRFGIRNFNPTLLRAIERLNALCTPEGVTLPPHTLAELRRDLARLRLVMDQINEIEAARLRRLEQAPAEGPHAMVRLLARVIGVGVETADMLVHEILSRKLRDRRAVARYAGLTGAPDESGNKRREKGLAKAGNARVRRGMIQLAWRFLLFQKNSALSQWYRARTESAGKKRKTMIVALARKLLIALWRLVTTGEVPAGVVLRAA

SEQ ID NO: 107637 - protein, 355 aa, unidentified
MPQPNDLSRSLVALDHNSTIIAVVEMSQSSWLVGGMLPGIERQPRKKLEPSPERLLALLHRWRDEAVKAGRTITRIALAFEAGRDGFWLARWLAARGIEAHVIHASSVAVSREHRRAKTDRLDTELLKRGFLGWLRGERGHCSMARVPTLAEEDAKRPNRERDCLVGERTRIVNRIKSTLVRLGIRNFKPTLRKAAERLATVHTPEGTPLPPNTLAELQRDMARLGFVISQIREIEEARQKRLEQQHETGAHDMVRQLARIVGVGVETADLLVHELLSRPMRDRRAVARYAGLTGSPDESGARRREQGLARAGNARVRRSMIQLAWRFLMFQKESALALCIAPAPPTAVVARARP

SEQ ID NO: 107638 - protein, 347 aa, unidentified
MKFYTQTHKYYCGIDLHARCLYVCILDQQGNPLVHKNINATPAALLKIIEPYRDDLVIGVECMFSWYWVADLCREQQITFILGHALYMRAIHGGKAKNDKIDSHKIAILIRGGTFPEAYVYPREMRGARDLMRRRIHLMRKRSELLAHIQNTNSQYNLPEIGKDLRRAINRDGVAERFADPSVQKSIELDLNLIGFYDQQLSKVEWFILKQARVYDQHSLLLLRSVPGIGPILSLVMLYEIHTIERFPTVQDFASYCRLVKCRKESAGKNYGTSGRKIGNAFLKWAFSEAAVLFLRQNPQAQAWLKKLSNKHNKARALTILAHKLGRAVYFMLQRKTVFDQQRFLNS

SEQ ID NO: 107639 - protein, 530 aa, unidentified
MASRTNKRANRRRGPVTGLGKSRGVIGPRVARVGGDRFGIVAVDCAKARSKWLLADFYGQVLVGPTPVEHTRGGLADAIGQVRGAIQEHRLADQIVAVEQTGRYHKPLARAFSSAALEVRLVHPLASRRYREAADPGIKTDDKDLGGIWAAATHGLALVEPKVDPFWASFRLLTRHRRDWVHKSSALCCQIKEHLEAAMPGYAGWFPTLWEHPAALSLALDWPMGKSASVAEGMQRAGASALAEHLRRKKIGFQRRTVQRAIEWSAGAATPDVGHRWHRRIAAELEADRTAKARRIQDLEREIAARLAATPYVLLLSIPGINVVSAGEYAAELGPIEHYAHGRRITGRAGLYPSRYQSDAVDRADGPLVRSGHRRLRYALLQIADNLMKCNLHFGALAAHWKRQGKDPRDNHVRIASRFARISFQMVAGRQVFRHPAIQGRDCVLAKLLRFHVAHQSAAEAMLADLRAAGGQLPTGERTAEAAPLVEQLARVRRRRRRGPRPLAEVLPLLLAELGWEPVQSSGSGAAGPA

SEQ ID NO: 107640 - protein, 399 aa, unidentified
MQQGVAVGIDVAKDFHWVQAVDRRDSAVVFSGRVDNTPPALAAFVEQLEGLRDRGPLRVGIDVVGGIASVLTAMLLEAGIEVVHVSGLAVNRAREGTTGGEHKSDPRDAAVIADQVRHRRDLRAIEPPGELDAEIRLLVGRRRELVGDQTRRVNRLRDLLASIHPGLERVVDPTTKAGQQLLSRYVTPAEIRRAGRRRLAEHILRAGRIPRRHAEQVADHALSAAGEQTIAVAGERVAADLVRELAVEAARTRTRLCALDRDLEAALARHPDAALIQSLPGMGVTLAAEFIAEAGSIERFPTPDKLAAAAGLAPVLKQSGKLRYLKRAHGGNKALKRVFFQSAFCSLSHPDSKAFYRRKRTERKTHHQAVLALARRRVDVLHAMLRNRTPYERRYAKAA

SEQ ID NO: 107641 - protein, 336 aa, unidentified
MNKDTVVAIDLAKSVFQVCVMCNGKQVTNKRLRRSELASFVIRQKADRVAMEACYSSHYWARVFQQQGLEVRLIPAQHVKPFRRGNKNDRNDALAIAEAMHRPGLRFVPVKTVAQQDVQSLHRLRERWLKARLALTNQTRGLLSEYGVVFAQGNKAFREGMLQVLDGDDVSALLKEVLRDIWREYTFLERRLQGISRRIQHCAEQDANSQLLASIPGIGPVIATAITSSIGNGSAFTSAREFAVWTGLTPRQSSSGHKSVMLGISKRGDHYLRKQLVHGARATMRWCRPRDDEFSRWVNRLIARRGYNKAAVAVAHRLARLAWIILHKQERYAVKG

SEQ ID NO: 107642 - protein, 388 aa, unidentified
MLITEDDGHVTEDIREFGAFTDELYLLKQWLLDAGCHVVAMESTGVYWKPVHNVLEDIAQVILVNARHVKHLPGRKTDVSDSRWLAGLLRHGLLRGSFIPDMHVRQWRDLSRLRRVFVDSLSDYKRRVHKLFECANIKIDSVASDLFGVTGKNLINLLISGKDITFEDVCDCTRGRLKGKEDEFFKSIRGFFTEHHRFQLVSILKLIDAVENQITIIHERLKCLLSDRKDKVDLLIQVPGINELSAHSILSEIGDTLEQFESPAAIASWCGLCPGNNESAGKRHSGRSHVKSNHMKTLMTEVAWGAIRKKGSYYREKYYSLRARKGSKKAIIAVAHRILKAVFHILKYSAPYHELGELYLINLNNDAKLKNIRKQAAKLGFELIPLKA

SEQ ID NO: 107643 - protein, 424 aa, unidentified
MDVVHQRCAGLDVSKSDAKVCIRVQGRGSRKTATQVTTWPARASSILELGQLLIRQKVTCVVMEATSDYWKPFFYLLAESGLPVMLVNPRQVHQIPGRKTDVADAAWLADLAAHGLVRASFVPEQQQRELKDLVRHRTQLGRMRGQEVQRLEKLLESAAIKLSSVISDLNGASGRRMLQALIEGERDPQILAGLGFRLKASKEELAEALTGRFTEHHGFLAGMHLKLIDDYATQITELDARIECYFTTPDPPEGHMGWGKARDLLSTIPGVSHTTAEQILAEIGIDMSIFPTPAHLASWAGLAPGLNESAGKHHPSKCRPGDRHLKGALGMAAISASNTKNTFLAARYRRVLHRGRQRAVVALARTILTICWHILSSGEPYRELGGDFYDKRRPGAAIRNALNHIRRAGLTITPTTEGILITQT

SEQ ID NO: 107644 - protein, 316 aa, unidentified
MTHSTTLTAGIDVAKARLDVAVPGAARTFALANAPEGWTDLIRTFAELGVGRVGLEASGGYERPVADALRAAGLDVRLLQPAQVRFCARLRLRRAKNDRLDAEIIARCADLVDAGDLPDDPDLRRLADRLTYVEQIEEDIARIKIRREHHREPHILDYDAHDIAELKARRRRELAAILADLRNRPDLARRLELLVSIPGIGERTALTLVVRMPELGRLDREQVAALAGLAPFDDQSGKRTGARHIAGGRARVRSALFRAAFPAAFRWNPALVELYRRLTARGKPFHLAIVACARKLLVFANAVIHRGTPWRDEPLV

SEQ ID NO: 107645 - protein, 373 aa, unidentified
MIQSVKADKLFIGMDLHKNTSTFVVKDKDGKLINSAKVLTDKNDVTRYINSIKRNSDGRDLSLAVEPVSQWYYYADLIENLGVDVHLAHPMEVKAIAHAHIKTDKIDAGVLADLLRTNFLPEAYFSPAEVRSWKEQCRFRASIINLRSQVKNKIHAILFKHSLKHNFSDLFGKGGRRWLASLELKEPFQGNLNKYLILIDQLTEQVVQAEEIITNTVINCPQAKLLISIPGISYCSALTIMAEIGEIDRFISVKHLQSYAGLIPSTYNSGDKQIHGRITKRGSKWLRWIMIESAYHQMNCKRIPGFGAYYNGIKIRKGTKTAAVATARKLLAVVWRLLKDNRPYEVIDPRCWKSRPIASKISSVSTVINTTED

SEQ ID NO: 107646 - protein, 414 aa, unidentified
MDLLHPRCAGLDVSKRDAKVCVRVASGTQVAARSTVTTWGSVTNQVLALREHLIAEQVTLVVMEATGDYWKPFYYLLEDAPFEVMLVNARHVKNLPGRKTDVSDAAWLAQLGAHGLVRGSFVPPEPIRQLRDLTRTRTTMVRERAKEIQRLEKLLEDTGIKLSSVASDISGVSGRLMLDALISGERDPAALADLAKRRLRSKIPELTEALTGRFTDHHAFLARVHLDLIDQRSHAIEALTTRIEVVIEPFRGARDLIVSIPGISVLVADVIIAETGADMSRFPTAGHLASWAGTCPGSNESAGRVKSTKTRPGNPYLKGALGVAALSAARSHDTYLAAKYRRIASRRGPVKAIVAVEHAMLTAIWNMITNGVFYDDLGGDYFTKLNPERTKQRALNHLRQMGYDVTLNPLQAVG

SEQ ID NO: 107647 - protein, 313 aa, unidentified
MMALQDVFVGIDVSKGRLDVHVRPLGVGFSVSNEAAGYAALIARLRPLRVKRIVLEATGGYERALWLALSEAGLVAAIVNPRQAREFARAAGRLAKTDRLDAAVIAHFAETFAPRIGKPDPVADRLGEHVLYRRSLQDEIVALEHQRRRLETPALRERAERRHAALRAEVKEIEAAMRAIVDSDPAKKALFACLTALKGVGLVLACTLIANMRELGSLTRHQAAALIGVAPLNHDSGARRGYRAIAGGRRRVRNVLYVATLSAVRCNGPIREFYRRLSAGGKPAKVALVACMRKMVVMLNGRVRDQLAATATP

SEQ ID NO: 107648 - protein, 322 aa, unidentified
MAKIICGVDVSSQFLDVFLNPRCQRFPNTVAGIADLLALCQQHHVDLVAVEASGGYERRMYRQLWAAAGLPVALCNARAVRDFAKSMGRLEKTDPIDAALIAEYAAANQKLVAHPPQSSAHDQLRALVTRLRQLTETRATQLQQRLLVTDPVVLETFTRLLAFLTSEIRQLQDRIAQLIDADPLWHHLDHAFRSIKGVADRTVACLMAELPEIGTLSHKAVSKLVGLAPLADESGRRHGRRSIRGGRATVRHLLFIVASVVRRYHPDFAAFSQRLAAAGKAKKVILVALAHKLLIRLNAKARDARRQLLPMASLPLTTTIPS

SEQ ID NO: 107649 - protein, 347 aa, unidentified
MRFYTGQHQHYCGVDLHARSMYVCVLDREGNTVLHRNLRTDPDLFLRTLRPFSDDLVVGAECMFTWYWLADLCRDAGIPFVLGHALYMKAIHGAKAKNDRIDSAKIAALLKGGTFPLAYVYPREWRSTRDLLRRRLHLVRKRGELVAHIQNTYHQYNLAAPSVKLRYRANRAGAADAFSDRSVQKNVAVDLALADRLDQVIRDLEGFLTQNVKIHDPDNFYRLRSIPGVGKILALTILYEIHDIDRFPRVQDFASYARLVKCAHTSAGKRSGTGGAKIGNAHLRWAFGEAVLLMLRECDELKKRRERLERKHGKGKSLAILAHKLGRTVYFMLKRKRAFQMERFLAD

SEQ ID NO: 107650 - protein, 343 aa, unidentified
MIIGCDFHPSWQMISWLDKESGEAGERKLMHGSGEARVFYEGLAGPVLVGLEATGNSHWFVDMLRDIGHEVWIGDAARIRAQQVRKQKTDRRDAAHILDLLLKNEFPRIWTATRRERDQRQLLIHRYKLVTLRARVKNELQHLALNQGLQKGCRLWSKAGQKLLLDLPLAPWAGTRRKHLLELLKQMDEQIVVLDQAVKKAAEENERARLLMTQPGVGPITSLAFVLTLGDVGRFQRGKQVASYLGLIPREYSSAGKQRLGGISKQGNRFLRMLLVEAAQCVVRYDPQFRREYLHRCHHKPKAVAKMAAARKLAVRLFWMLRTHTTYPEIVRIESSSRVPLDG

SEQ ID NO: 107651 - protein, 365 aa, unidentified
MKIMHWIGIDDHADKWTIAQFQGNEENPRKEFELTPNESGYRKLIAFAKALAGTVRIVYEAGPCGYELYRRLTKAGLQCEVAAPSLTPRKPGQRVKTNRRDAAKLAHYLRSNELTLIAVPDEQRESLRDLIRGRTAAQKDLVSIRHQITKLLLRYGHRYRDGRAWTDRFWAWFGKITFEAEHSQFVLEEMIATHGERVERVARYNDEIEAAAKNPKYKSYIAALSVLRAIDTLSAMTILSELGDLRRFPTAPQLMAAVGLVPAEQSTGEKATRLSITKTGNAHVRRVAVEAAWHYQGRIANGPTIQRRRKDQPQELLDMARRCDQRLNRKFFRMTSRGKRSVVAAVAVARDLMGFIWAIGQVVHP

SEQ ID NO: 107652 - protein, 318 aa, unidentified
MTNITYQFNIGIDIAKQKFDVSFSDQNVASFENNIAGFKQLLKEIKDKSQTRIVMEATGGYEKPLAQFLQGQGVAVSIVNAKRVRDYAKALGLLAKNDVIDAKVIRMFADAINPKLLSAASDTQQALDAQVHRREQLVKQRAMEKQHLETVSNKDTVRSIKRTIAFLDKEIERIEKAIKALIKTDSALTEKVDRLSGVKGIGDITALTLIADLPELGQLTNKEISALVGVAPFCHDSGTQKGKRTTWGGRTQVRSILYMAALSAVQYNPPLKAFYNRLLMKGKTKKVALVACMRKLLTVANSMLRNNTEWNPNHGKLA

SEQ ID NO: 107653 - protein, 411 aa, unidentified
MNAVGIDVSKGKSTVAIMRPNGEVVQPPFEVVHTSSELSALAKQLKKLHGETKVIMEYTGTYYHPIAYELYEAGIFVSILHAQLIHKFSNDSIRKIKTDPKDAIKIANYGLEKWYKLRGWVPEEDLRRQLKIFSRQYNKYSKLRSMLINNFIGLTDQTFPGVNELFSSTPRKSDGHQKWLDFVMEFWHCECVCGGTPAAFEKRYEKWCKKAGYNFSKEKAWDVYVSACGHCCVLPKDSTTKLLMQQAIRQVHVISETLAVIAREMKSIAEQLPEYPIVMSFYGVGEILGPQLIAEIGDVYRFPKKGSLVCFAGLEAPPHQSGKFEAKERKISKKGSPHLRKTLFLVMSAVLRNAPADDPIFQFLDRKRAEGKHFYCYMTAGCAKFLRIYYARVKELQDKLEDEFEASELSV

SEQ ID NO: 107654 - protein, 424 aa, unidentified
MKSTKLTPAVQLDQVLDICVDVSKSKLNVYFELGDQAIDDEWANTTRQIEKKLGACRRLARAHGFKSLRVICEPSGGYQDKLLRTARRLGHLTAYVNGEAVAKFRVVESNDAGKTDLKDPHIISTLARLNKVLRHRDLPEEYELLRKCGFLYERADRALMAVRGRMHRVLMELFCDFSFSKEFLYGNSGRALISKYRCNPYRIVRAGRTRFERAMRRRAPRIWQRSIERLWDDATSSARHQLTPAYVDLLEFELSQLWEEFLLYEQRKATLEKRLTSLLRRLRQKDPSLPAPTPGVISAKNLARLIGETGPLSDFTSWRMLMRYAGLNIQMRQSGQYRGQYRISKKGRPLLRKILGQVIFPLVRRTGLYGDYFRSKRLSMPGQKAMTAVMRHFLRKLHGWYRSGQAFNAERYFTSAASYERQAA

SEQ ID NO: 107655 - protein, 342 aa, unidentified
MEHVAIDLGGRESQICIRASDGKIVHETRCRTRDLPTFLAQRPTSRVVLETCAESFRIADAAKASGHEVRVVAATLVRALGVGSRKTKNDRRDAQVMSEVSCRIDLPSVHIASTTSRERKTMLSMHDALVGSRTMMVNAVRGWMRTQGVSCRSGQVETFPKRVRAALEEGELAPDTIERVLATIDELTAKIRDAEREIARTAKSDATCRLLMSVPGVGPITSVAFVSTLDQIDRFPDAHKVESYLGLVPGEDSSSDRQQRLSITKAGSSRTRWLLMQAAWSARRSASKDPMVLWSLNVEKRRGKRMAIVALARKMAGILFAMWRHGTVYDPTKGAKAVTRDE

SEQ ID NO: 107656 - protein, 414 aa, unidentified
MSQEMPRPKRFVGLDVHKHYLVAYAVDEELNLCFGPQRVPLAELEAWRQKRLTREDAVVLEMTTNAFQIHDDLLPHVHSVTVVHPPHVALITRARVMTDKIAARVLAQLHAKGILVGIWVPPQPVREQRALLAQRSKMVRLSTQAKNRLHAVLHRHYLPLPEGDLFQEANRAWWQKLPVDAIEQVRIQSDLDTLAFAHRQTTLLEDCLTKIAAQDERVPFLVQTTGISVISALTLLAAIGDITRFPAPKYLVGYAGLGTTVHDSGQTTRYGRISKQGRRDLRGCAVEIIQTAVNTDPYWKGELERLEPRLGRNKAIIALARKLLVVIWHTLHDRQADRHAEAERVARKLMQHAYKLGRANRRPGQTTAQYVREQLERLGIGQDLDAIPWGKKRIIPLPPSRLPALAAQPTGPLM

SEQ ID NO: 107657 - protein, 348 aa, unidentified
MRFYTQPHQYYCGIDLHTRTLSLCLLDAAGAIRLEATLPPDRDRLAAALAPFRDGLVIGCECLFAWYWLADWCAAEGIPFVLGHALYLRAVHGGKTKTDTVDARKLARLLRGGTFAEAYVYPKPMRATRDLLRRRTYLVRQRATLIAHLQTTFLQYNLPAPQKKLAYAANRAELDLSVFPDPSTRSMLAADLAVAAALDAQVKRLEAELVRTAKVHDPQTFARLRSVPGIGPVLALILLYEVQSIDRFEHEGQFLSYARLVGGVRESAGKSKGTGGRKIGNAHLKWAFGEAACLMLRESAKAKTWVARKERKVGKPRALGALACRIGRTVYHLWRKQESFDAAKFLAS

SEQ ID NO: 107658 - protein, 316 aa, unidentified
MDQTKPRIVGVDVSKHHLDVAVHDACEVARYANTAEGVSLLLEALGDVAPGLVVAEATGGYEIGLVRACQAGLIPVAVVNPRQIRAFARAKGTLAKTDGIDAHIIAEFGCVLRPRPLPQVATGRQAFGELVARRRQLVEMAIAEKNRLEHATSAVRLSIEEILCVFKSQLAGVDAAIALAIDADAELSHRRAILTSVPGVGELTAAVILAELPELGSIGSKQAAALTGVAPINHDSGTHRGQRHIGGGRPGVRCALYMATLSAIRCEPGLKAFYQRLRQAGKKPKVAIVAAMRKLVTLLNVLLQHNQLWRPQQHGC

SEQ ID NO: 107659 - protein, 409 aa, unidentified
MRRMKGKRSASSIVGCAPRCAEPHAETPEGVLPQAFRGGRPVSKTITSFVGLDVHKDSTAIGEAEAGRETPRFIGTVGPDLGQLLKALKSLGKPETMLVVYEAGPCGYGLARQLRSRGYACEVVAAGKIARRPRERIKTDRRDALTLARLARSGDLVQVMVPDERDEAMRDLSRGREDAVKARLKARQQLKALLLRHGHRYGGKSSWTLAHERYLAEVSFAHPAQDIAFVEYRQAVREGHERVERLTEALRTQTEHWRMQPLVAALSSLRGIDFVAAVTLAAEIGDFSRFAHPSELMGFLGLVPSEYSTGDHRRQGDITKTGNSHARRVLVEAAWNYRFPARISRGLQIRQEGQPKAVREIAWRAQLRLAHRYRRLSSRKLHPNKICVAIARELAGFLWDIARQAHMPA

SEQ ID NO: 107660 - protein, 304 aa, unidentified
MSGIGIDVSKRQLDVGTTDGEILQVSNSASGFAELDLWLRKHPASQIVLEATGGYERPVLDFLHAAGHSVVRANALRARRLAQGMGQMAKTDRLDAYALAQMAALVKLPAYQPLEPWQQKMREFVRARRQAMHALTIARQQLEMVGDRELRRLLQANITRLQTLVERLGKQIAEQVAQQPQLAVLKSMKGVGPGLQAVLASYLPELGKISGKAIASLVGVAPMSHDSGTMRGKRSIHGGRAEIRQVLYMASMSAMRHEPRLRDFYQSLRARGKEGKVAIVAVMRKMLVILNARVRDAESGLVPA

SEQ ID NO: 107661 - protein, 407 aa, unidentified
MEVIHERCCGLDVHKDTIVACLIVPEGKAIRTFGTTTDQLLALCDWLAEHGCTHVAMESTGVYWKPVFNILEASFEVIVVNAQHLKNVPGRKTDIQDAQWIAQLLQHGLLRPSFIPPAPQRQLRELTRYRTTLVRERARVVNRLHKVLQDANIKLSSVASDIVGVSSRAILEAILSGESSPEVLAELAKGKLRSKRPQLAKALEGLLQPHHRFLIEQLLCHVDFLDEAIERVSDEIRRRLSPFEGKIELLLSIPGVSRRIAEVILAEIGADMSRFPSSAHLASWAGICPGNNESGGKRKSGRTRKGSPWLRAALIQAAHAASRSKGTYLCSQYHRIASRRGKKRALVAVAHSILVAVYHILSRGETYRELGADYFDRLSPQTLQRRLVRRLENLGYKVSLEPLNKAA

SEQ ID NO: 107662 - protein, 408 aa, unidentified
MQRYYLGVDWADEFHQVWVSDTEGKKVAEITIEQSVKGLSEFGRWLHERKAEGIELWASIEKPHGRIVDFLLDHGVVVYPVNPKALDRARDRFRMSQSKSDSFDAYVLAEFLRTDHVHLRALQPDSEQAQELKMLTRDHHRLGRHKTRLLNQIEVTLKEYYPRPLEVFSDLESKIALDFLTQYPTPRALSELTRRKWNRFAKREHHLGEERCKELWEKLSQPQLKIPEHVVRAKAQLLLVLVIQLKSLAEAVKNYSDKVESFFASMPAAEFVKTLPGGKSGTTVPMLWAELGDAKNRWESFRHLQAEAGGVPVTKASGKSRVVQFRFACNKLLRYASYWFSFNSLNRCEWANKYYRDQRAKGHSHHQALRALGAKWLKIIFVMWRDHKPYDENFHLANIARQQMLQAA

SEQ ID NO: 107663 - protein, 375 aa, unidentified
MEETITFVALDTHKKEHCAAMQLAGENQIQQWKVPNREQDIRRMVKKIRKRAPGEIEFCYEAGPCGFALQRRLEALGVKCRVIAPSLIPRKSGERIKTDRRDACRLLEYQRAGLLTEVHPPTEPQEAIRDLCRCREAAQEDYHRAQHRLLKYVLRQGYRYEEGKRHWTQRHLRWLRSLKFENKVAEAVFSEYLSEVHRQATRLQNLEQELEEVAHQEPYREGVGLLRCFHGIDTVTAMVIVAELFGFERFNEPRQLMAYLGLIPAEHSSGESRRPGGITKTGNKRVRRVLIEAAWHYRLKPTEGRVLKARRKGQPAWAIERAQQARKRLYRRYWRLVEKGKSTNEAVVAVARELAGFIWSVLHVRVELAPGQSLD

SEQ ID NO: 107664 - protein, 350 aa, unidentified
MPAKIGCDAHKQFSVFVTIDGKGKTSPAVRVEHHRQQYIDFLHSLPPASEIALEATGHWYWMVDEMEKAGHRPHLANPTEAKKRMGKTNKTDALDAKGFAILLHNGTLPESWIPPGELRDRRELLRTRMALRDLRSALKHRIHAAIDRYGLQATGISDLFGVKGRVYIDTTLDKLPRDTAAMIRVQLTSLDQLEIQIEEIEHRIADALKPSPEVRLLRTIPGIGEILAPLVWLEIGEVERFPRAENLASYAGLVPRIIASGGRIRHGGTCRNVNQYLKWGFVEAATCAVRLRAYRDGHVGLLYHRLAPAKGHGRAIVAVARHLAEASYWVLRKQQPYKTPGPRPAASDAA

SEQ ID NO: 107665 - protein, 319 aa, unidentified
MFVGIDVAKAELVIAARPSGERWSVRNDERGVGTLVERLRALTPELIVLEATGGYELLAVAGLAAAALPVVVVNPRQVRDFARATGQLAKTDRIDADALALFAERVRPAVRPIADAEAQELDALLTRRRQLLDMLGAERNRLGQVFGTGKRPVRKSLKAHITYLERELRMADTDLGEMVRQSPAWRERDDLLQSVPSVGPVLSRTLLADLPELGRLSRREIAKLVGVAPLSRDSGTHRGRRFVQGGRASVRAVLYMAALVATRCNVVIRPFYQRLLAAGKPKKLALVACMRKLLTILNTMARTGTRWSADYAAPSLTTA

SEQ ID NO: 107666 - protein, 367 aa, unidentified
MSNYVTAIGLDVHARSISACAFDPMTGEVSRARFGYDPASVAEWALGFESPKAVYESGPTGFHLCRALRALGVDCAVGAVSKMHRPAADRGRKNDRRDAEWLARLLACRNVVEVWVPDERTEAARDLSRALEDARDDLQRARQRMSKFLLRHGLVFDETTPTGRRRSNWTEAYWRWARSIEFDEADDAAAYERYTDAVDRCGEAKRELERRVVEAASRPERAPTVDALCLVKGVDVAAAFLLAAEAGDFSRFPSAPSFAAWCGLAPSERSSGETDSRGGITRAGNSHVRRALVEASWHVPMSTRHPKKPRPGHGVAPAASRHAAKCNRRLQDRRDAMSQAGKRPCVANCATAREMACWVWAIALMVR

SEQ ID NO: 107667 - protein, 337 aa, unidentified
MYYVGHDGHKDISVFCITSASGNVKETFEVPATPKGMDVLIEKMKGKKFKVLAEASTYTIDLHDYLVSKGVESYLAHPHALKLITNSCRKTDRNDSKTLASYLRLWDKHELDISISFVVDGDNRSLRELCRLRESISEMKGSTMQQIKSHMRINGQYVEFEDLKTIKARKHIREHFCEDLCLMMLLDMYVVFEDKGKILDAEIERRFGDRREVQLLATIPGIGITTAAQLMSMIVDVSRFPTADKMRSYFGMAPTVRDSGGSLKHGHITRRGDPMMRKILSRVVAQLIKNAPGDNLAVYRESHRSAMRPGMLMVACMNRLLDIIYAVLVRGTPYIHM

SEQ ID NO: 107668 - protein, 412 aa, unidentified
MDVYCGIDWAEDHHDIALVDRDGQLLARRRTGDDAAGLAALLALLAEHGDSPDDPIPVAIETPRGLLVACLRATGRQVCPINPMAVARYRDRHSVAGKKSDHGDSVVLANVLRTDLHAHRPLPADTELTQAIAVLARAQQDAVWDRTTAHNKLRSHLREYYPGFLAAFVPVSGGIMRPEARTILAAAPTPADAAKLTLAQLRGLLKKAGRSRGIDTEAARLRDAFRVAQMRQLPLVEAAMGRQALALLGQLDAACAAAADLERAATESFNLHPDAGIITSFPGLGALTGARVLAEIGDDRSRFQDAKGLKAYAGAAPITRASGKTRSVTHRKIKNNRLNAAGYCWAFSALTASPGARAHYDRRRDDGDRHAAAQRNLFGRLLGCLWHCLITGQDYDETIAFPATTKKISQAA

SEQ ID NO: 107669 - protein, 392 aa, unidentified
MRISVGIDIAKEIHWVTAIDAGGVVQVDRKLLNTPAGIATLVDELTALRGTVRIGLDVIGGIAGLAEAMLADAGFALVHVPGIAVNRARQGTVGGENKSDPRDARTIAEQVRTRSDLRPIEPATELDLEIRLLVGRRSDIVQAQTQRLSRMRDLLVGIFPGLEACLDLKTKGPLHLLTKFVTPAELRDAGKKRLVRHLQAAGGVPKVEDLADRVLTVATEQRIAVPAERTTARLIRELAVEALASRTRLTELDRELEALLARHPDAALIRSLPGMGAVLTAELIAEAGNLARFRSADALASAAGMAPVLRQSGRSRFLRRPSGGNKGLKRVFYQSAFCSLAHDDSRAFYERKRREGKRHHQAVIALARRRVNVLWAVVHSRTPFQTGFKTAA

SEQ ID NO: 107670 - protein, 371 aa, unidentified
MLETTAFVGLDTDKAGIDIAVAEGEIGGEVRYLGRIAATAAGLSKAIKKVQERHPRLAIVYEAGPCGYGIYRRLNAMPGVVCQVAAPSLIPRRAGVRVKTNRRDAIALAKLHRAGELTAIWVPDAAHEAMRDLVRARGQAMADLTRHRQRIAGFLLRQEVGYVGKPWTKAHRLYLTGLTFAFPAQQRMWTELLTALDQAKARRERLDQLIGEQIPSWSLAWLVEALIVLRGFQRLSAAIVAAEIGDPRRFSSPTQLMGFLGLTASEDSTGEKRRQGGLTKTGNSRARKTLIEAAWTYARAAKPSEHQAAGQPALVAIADKARHRLSLRYRSLRIAGKRQTVAIAAVARELAGFVWAAAHAAGPKVADKTAA

SEQ ID NO: 107671 - protein, 359 aa, unidentified
MDSMDPQERPRRVVIGVDTHKCVHVAVALDELGTPIADTAMPADRAGYERLLQWATAQGKIIAFGIEGTGSYGAGFTSLVRRRGHKVIEVVRQDRRERRLNGKSDLLDAHNAARAVLAGKATGSPKSADGVVEMIRQIKVAKDTAVKGRTSAMITLKAMIVNVDPELRETLQPLSKMALIERCAGLRPGPVNTPVSASKHVLRSLARRWQDLHAEVRTHEALLEELVRELAPQLLETFGIATDTAAEMLIVAGDNPERIRTEAAWAKLCGVAPIPASSGTTTRHRLNRGGHRQANAALYRTVIVRMRFHEPTIAYVERRLAEGRTKAEIIRCLKRFLAREIWALMRPLREQRQEFHDAA

SEQ ID NO: 107672 - protein, 347 aa, unidentified
MNFYHSTHRHYCGIDLHARSLYVCILDQQGEVLLHKEIKARPEPLLALLEPFRDDLVVGVECMHCWYWISDLCEEHGIHFILGHALYMKAIHGGKTKNDRIDSFKIAMLIKGGNFPLAYVYPKEMRATRDLLRRRTRIVQHGAMLKAHVVNTTSQYNLPPNKVNLKNVGAREQVRATFVDRDVQHNIDLDLAIIECYHRELSRLEEHLERQAKQHDPASLSVLRTIPGVGRILALTMLYEIGDIQRFETVQKFASYARLIKCKAESAGKVYGTQGNKIGNAHLKWAFSEAAVLYLRGNDKAQRYLQKLQKRMNKSKALSALAHKLGRAAYFMLKHQRVFDEQRFLKG

SEQ ID NO: 107673 - protein, 347 aa, unidentified
MLHAGLDLSRRRVDVHVLNEAGKTLVVDAFPPDADGLAHLVRHVASFGEEVHAVIESMNGARFVHDTLELHGWGVEIADALRVKGLAPLACKTDKIDAKVLAELSRRDLVPAIWLPTPSVRAERERARFRLHLVHHRVALKNRIHATLLAFGHPCPVSDLFGESGRALLDRLAIPEPWAGTVSASLRLIDELDDQIDAAERELRRLGANHPYMSLLQTVPGVGWVLAYTIASEVGDIARFESPKKLVGYTGLCPRVYQSGGTDRRGRIAKNGPTYLRWALIEASIHACKNPLYKPAYDRTKARLGRDRGGKVARVELGRKLAEAMWHMLTKGERFAPARSQVVALVA

SEQ ID NO: 107674 - protein, 355 aa, unidentified
MEYFKDIKNFVASKHVFCGIDIHFGHWNLCFVCDGEVVEKTKIPNSYETLNMRLSKYSQARKISIVYEAGFSGFWLYRRLISDDYDCIVTPPSKIPKSENKVKTDKRDAQKLAFYLSAGLLKVVYVPPADIESDRRVVRRRAQLVKKQTRAKNHIKSFLHLHGLKTPENIKTNWSNLYLAWLEKLHFDHESDNFTLSQLIRNYRRIREDLAEVTRYLRMFSRSEKYQENYKRVTSARGVGLITAMTFLLEIFDFGRFAKEEDFSSYLGMTPSQFSSGDKVRLGHITRQGNSNLRRVLIESAWTVIKHDPHLREKYDRIKARGANGKKAIVAVARSLAVRLRRCILDETEYVIGVC

SEQ ID NO: 107675 - protein, 455 aa, unidentified
MKVKAVSALRSERGLRRVNGAEPQVVGLTPQTTMKRKANTMKTYILRQPETVESQKPARVPRRKIQPVTTINIVLGRPPAPTSGPVLFTGFDVHTDSIAVSLAPSDATEVRRYGIIGGTHDDVLKLLTKLQAAHPGTELRCCYEAGPHGFSLARCLHRHGYVCILVAPSKIPRQPGDRIKTNRRDADQLARLYRAGELTAIYVPDPADEAMRDLIRARAQVGDQQHRSRQQLKMFLLRHNLRYTGQTAWSPAHLRYLAKLKLPFPVQQIAFQEMLDGITEAADRLERYDVEVARAVPGWRWEPAVRALMALRGFALLHAATLIAELGDFNRFSHPAQLMNYLGLVPSENSTGDKRCQGGITKTGNAIARRALVEAAWQYRSPARLSPHLKKRQEGLPKAVTDIAWEAQRRLHHRYVHLTRTGKKKAQVAVTAVARELAGFVWAIARQVQPTAPQS

SEQ ID NO: 107676 - protein, 413 aa, unidentified
MEVLVDRCAGLDVHKQTVVACVRTPGSGRRKRDSEVRTFGTFEHQLIELREWLISRGVTEVAMEATGVFWKPVWHVLDEGQRFELLLVNPAHIKNVPGRKTDVNDATWIGQLLECGLLRGSFVPPVEIRELREVTRYRRQLTEERAREVQRLQKVLEDANVKLSSVVSQVLGVTGRMILNALCAGERDPEMLAAMAQGKLRLKTGDLRQCVPGRFNTHHARMVTELVAHVDYLDAAITRLDTTVEEMMIPFKPARHLLETIPGIQQRTAEIVLAEIGVDMTRFPTAAHLASWAGLCPGNNESAGKHRSTHTRAGNAWLQSALVEAAWANIRSKDSYLAVRFWRIAKRRGQQRALIAVAHTILIICWHMLTDGTTYTELGPDYLAHNDNPERRRRHLVNQLEHLGYHVELTPAA

SEQ ID NO: 107677 - protein, 355 aa, unidentified
MNSEKYIGLDVHQATISVAVMDSTGKLVMECILETKAATILEFFAGLRGTLSVTFEEGTWAAWLYDLLKPHVQKLVVCNPRKTALLKDGNKNDRIDARKLAELLRLNNLKPVYHGETGVRMLRELARSYLTLVKDLTRVMNRLKAMYRSWAIPCAGRDVYYTRHRAEWLSKIREAGVRRRAEHLYQQLDMLQHLRQQARRELLAESRKHSITAKLRQIPSLGPIRAALAVALIQTPHRFRTKRQLWAYSGLALETRTSGEHCYIQGQLRRSKKQVSIRGLNKDHNHDLKGLFKAAATRASVQPGPFQDFYQASLAKGIKPTMVRLTLARKIAAITLTLWKKGENFDAEKLKSQAA

SEQ ID NO: 107678 - protein, 419 aa, unidentified
MSKQPVEIAAFIGLDWADQQHAMCLQEAGTTRREALKLDQTPEALQAWIQQLRARFGGRPVAIAVEQSRGALIYALMHVDFLHLYPVNPQTLAKLRQAFYPSGAKDDPSDAQLLLELLLTHRHHLRVWVPDDVLTRSIQLLTEGRRKLVDERTALTNQLTAALKIYFPQALDWFGDLHTGRACAFLQRWPSLQQLQSATTSSVRKFYRRQGYRGEDKLEQLIKNIHRALPLTEDPAVVLASTMMVHALVKQIPSLTDSIAEYDRQIAALFKKHDDSTLFGSFPGAGPTLAPRLLAAFGSDRNRFEFAAEIQQLSGIAPVTEKSGKACWVHWRWSCSKFLRQSFQEFAAQSILKSVWARAYYQQQRHRGQSHHAALRALAYKWIRILFRCWKDRTPYDEATYFKSLQLRGSTLASALKTT

SEQ ID NO: 107679 - protein, 431 aa, unidentified
MDTQQFEVIRPKCAGLDVHKKSVVAAVCTSDPITLTASYKTKVFNTTNSDIAALRDWLIAQDCHEVCMESTGKYWIPIFNILEPHMHVILTHPKYVKAIKGKKTDKRDAKWIANLFRFDIVKASFIPPADIRALRELSRYRLKLSYMRTAEKNRYQNSMTISRIRIDCVLTDPFGLSASRIMDYLLSDEPFDEEKCRTLIDHRVKASKDEVMDAVHGYHILEEQKFKMTHAKAHMDFINKSIDEIEAELFLRSRQYDSQIKRIATVTGITELSALFILSEIGADMSVFESDRHLCSWAGLTPANNESASKKKSTRCSKAGQYLKPLLIQCALAAVKSKKDPYFQIKYQHLTKKRGKKKAIVAIARMMLTSIYHMLSKGVDFHPDDYEATVNPKKQKTVVLTIENTLQFLREQGVDPETIKLIQQQCAAQAG

SEQ ID NO: 107680 - protein, 404 aa, unidentified
MRVNVGVDLHKTQFTVCVKGLGEDQFAVYPTTKEGYEAFLKRVANWRECGMEVKAAVESTGNTRHFKNRLEEAGIGVTVINTLRFKVVNESVKKTDKHDAGTIAEFLEKDMLPQSHLCSQESEQMRRLLKARTTLVHAQVVMKNQIHALLTAEGFEDVKGSLQSKRGRKRTLDTLKQCENGLAAQTLMEIIDQLEKNVNLVEKELRELAKDDKVVELLMGIPGCGEVCAWTIRAYTDDVRRFASAKKYASYAGLAPWVQNSNETVHHGKITKRGPEQLRTALVQVVMGMRRMKEKTLRWRLMERHEMLKRNKGSGKAIIATARKIAVIIWNMLTEEADFEVGKMTDRNLAKTSESMKKSVRAVEELQVKEMIRNTENTKQVVNRNEKKVIKKTGVARKRNEKAG

SEQ ID NO: 107681 - protein, 341 aa, unidentified
MYYTGCDAHMRSCTLQHIDEDGALGLSMTVPTTSQGLDAYLDKLDAPTVMTFEASRSYWWLYQYFNQHPKVSRVVVVDPFRSRKIAEELSVQRGYGRAKNDRIDSEMLAEQTRLGLAPGIRVPTPEQLEMRTACRHRFELMHKKTISANMIHSTLSMHGYSIALKELIGNPESKQHLEEKLPDYIQHIITDFVTQIELFDKQISAVEKLLDKLLPESQPQIKLLMTAPGIGPVCSRIIYTEIFDIAYFKEPKYLISYSGLAPVAQESAGKKGKVKLNRHCNYYLKYAFLTAGHAARTHPRYRRKYEQDVKKHGKIQAKINLARRLAKAVYWMLNRQQPFKF

SEQ ID NO: 107682 - protein, 358 aa, unidentified
MSTQITTSPKVYIGLDIHKKTWTVSIQTDLFFHKTYSMPSKSCDLEQYVTNNFHNHEVYLVYEVGCCGFSVARYFLNLGWNVLVVNPADVKTGNKERYQKTDALDAKNLSNQLKSGTLKGINIPTEDEDQFTSLARHRTQVTKKLRTTKLHIKSLLLFHAIEIPVEYDNSNWSNGFIEWLEKVKFSTTCGDLALQGKIRMYKFVKTEYLEIANQMRAYCRKSHKEDYNLLKSIPGIGGYLASVIIAECGDLRRFNTEGQFASFVGIVPGIHNSGGSEKCLGITPRSRSQLRSYLIEAAWMAVRKDLEMQQYYRKHQGKNVKSIIVKVAHKMTRRILAVIKTQTPYKINKNIVLEKSIA

SEQ ID NO: 107683 - protein, 343 aa, unidentified
MDHSAGLDVSVKETSVCIVDDTGRIVREVKVASEPEALLSVLTNPGYHFKRIGLEAGPLSQWLYSALAEAGLPVICVETRHMRAVLKAQINKTDRNDARGMAQMMRVGLYRPVHVKTLRSQKLRMLLTHRKLLQSKAIAIDNDLRGTLRNFGLKVGMVGKVKFEARIKELVENLPDLAELVEPLLVVRRVLREQFVIQHRRLLAIVRADEVCRRLMTVPGVGPVVALTYRATVDVPARFRKSKAVGAVFGLTCSKYQSGESERSGRISRCGDEMMRVMLYEAAQSMLLHSKKWSWLKAWAMQIARRRGMKKAIVALARRLAVIMHRIWVDGTEFRWTREAAVA

SEQ ID NO: 107684 - protein, 293 aa, unidentified
MSGEKYIGLDVHQATISVAVMDSQGKLIMESILETKASTILEFLAGLRGTLSLTFEEGTWAAWLYDLLKPHVAHLIVCNPRKNALLKHGNKSDKIDARKLADRLRLNDLKPVYHGETGVRMLRELARSYLTVVKDLSRVMNRLKALYRSWAIPCAGRDVYYTRHRSQWLEKIPEAGTRRRAEQLYQQLDMLQHLRQQARRELLAESRNHTITAKLRQIPSLGPIRSALAVALIQTPHRFRSKRQLWTYSGLGLETRDSGEYHFVKGQVRRRKKQVWIRGLNDPATLCCTSITL

SEQ ID NO: 107685 - protein, 469 aa, unidentified
MKKSNKNSNHPKTKVHQKPSHPKVTLAQKLEMLNPNTAGIDIASGEHWICVPEDRADPNIRCFGAFTQNLYALAKWLKACGVTSVAMESTGVYWIPLFQVLEDRGFQVCLVNPKVLKNVSGRPKTDRLDCQWIQRLHSYGLLAASFRPDPQICQLRSLLRHRGNLIRQAARHTLHMQKALRLMNLLLDKVIEEITGVTGMKILQAILDGEHNPKKLASYRNYRVKSSEQQIAKALQGDYRPEHLLVLRQAFEAYQFAKQQIYQLDQTVEKLLQKFHQATPPPQAPLPPSTSHSKKPRRNETSFDARLYLYNILGVDVTQIPGFQSLTGLIIFSEIGRDMSKWNTDKHFTSWLGLSPNKKISGGKELANQTKKVQSRVARALRQAAVAAAKSKSYIGAFYRRLAARLGPHKAITATARKLAVIYYHMVKEGKTYRELGEDYYLKHHQARQLNKLKKQAQLLGFDLVAKPS

SEQ ID NO: 107686 - protein, 368 aa, unidentified
MREQQNNRQERTIIGLDLGDRWHRFCVLGESGQVVKEGSVANNRVALSELSSRYPGALVVMEAGCHSPWVSRHLEQAGCEVIVSNPRKTRAIYQHERKSDRRDALMLARIARMEPALLYPVRHGSEEAQQDLLRIKLRDSLVRARVGLINSLRFTLKSLGYTIANPSTERFHKVIQSALPESVVQMIAPSVQAIEELSLRIKLLDREIRTLAHTKYPETSWLEQIPGVGPITALYFVLKIGDPARFERVRDVGAFIGLCPRRDQSGENDPQLRISKRGDAYLRRLLVSSAQYILGPFAPPSALRQYGLALAAGATARAKKRAVVAVARKLAVLLLTLWKNKSSYQTFPQHSSREKMRTNDLERLRCIA

SEQ ID NO: 107687 - protein, 388 aa, unidentified
MLPSVHHANTEQTASDSPDLTFYASLELSRATWLVTCLLPERDRVSKYSTPGGDGGALLGLLERMRARAQQLTGRPVKIVVIQEAGLDGFWVHRLLEANGIESHVVDPASIAVPRRRRRAKTDAIDGETLLRTLLAWTRGEPRVCAMVVPPTPEEEDRRRVCRERAILLQERIRHTNRIKGLLAGQGITDFNPLHKDRRQLLDAARTGDGRPLPLQLKAEILREIELIELLLRQIADVEAAREVLAGPKTAKAPSPVVLLKQLKGIGPEIASVLYFEGLFRSFGNRRQLAAYAGLAPTPWRSGTVDQEQGISKAGNRRLRRTMIELAWLWQRHQPASALSRWFHTRVGNERGRIRRISIVALARKLLIAVWRYVTQGEVPEGAVLKAA

SEQ ID NO: 107688 - protein, 375 aa, unidentified
MEHCILVGCDLHDKSMMLKYAVGTGAMKKRLFGNTRASHAELIRWLHRLSAEAGDAKVYFAYEASGLGFVLYDRLRAAGIVCYVLAPTKMERSVKSRTTKCDERDAEAVLRPLRSHVLLGERLPAVTVPDAVGRDDREATRGRQAVGDRVSGLKTEVRTLLKRYGVEKPKGVGDSWGVGHRRWLESLVVAGGEVGTYGAVCLGSLLAQMAALEREVEHFDEHLKSLSNTERHGAAVKRMTAVKGVGTLTALTFLLELGDPKRFHNRREVGAYCGLVPTQSESGETTERKGHITHQGPPRIRRVLCQAAHVWVRWDPAAQATYERLVARNSKKRKKIALVAMMRRLAIRLWHLALGEGLPEDRPAARPSPGVPRQP

SEQ ID NO: 107689 - protein, 380 aa, unidentified
MSSASVAAPSIIYLGMDVHKDSITIAVLPLGAKAPTHLDRLPNDLAKLKRYLERLARQGELRACYEASGAGYVLHRVLREWGYACEVIAPSLIPKRPGVQRKHDKRDAAELARLYRAGELTPIRIPTEAEERVRDVVRCRETFQREILKSRHYILKFLARRGFVYRAGTNWCTPHLRWLEHLTSEQSPLAPADRLVFREYHALLAYKLQRRDELDRQIEQLALLPSLAPTVTRLQCFRGIGLRAAMVLATEIGDWRRFERPGQLAAYLGLVCREDSSGPRERKGSITKAGNSHCRHVLVQAAWCYHYRPHLSIEIRRRQQGQPPAVIAHAWKAQQRLHQRYEHLSARKLPQIAVVAVARELVGFLWAVMQEVPQPAATAA

SEQ ID NO: 107690 - protein, 368 aa, unidentified
MSRLRFVGLDVHKDTIVIAVADEGGSEATALATIPHDVPKLIKRLSGLVADKSELRVCYEAGPTGFGMSRRLKKAGIECQVIAPSLVPQQAGVRVKTDRRDARRLAQFLRSGDLVEVWVPDEKTEALRDLERCRDDAKNAERVSRHQLDKFLLRNERVYCEGRSWTKKHLAWLKQQKFDEPCKQCVMDDYRKTVEDATERVKRLSNDIALLIRGTALEPLIRAFMAFRGIQTLSAVVIAAEIGDLRRFPTARQFMSFIGLVPSEHSSGKSIKRGSLTRTGNAHVRRILVEAAQHYRHSPAVSAALRERQEGISQEVIDISWKAQRRLCKRLNYLIDQNKARNKVIIALARELAGFLWAVGQVPNLLAS

SEQ ID NO: 107691 - protein, 385 aa, unidentified
MQTPNDLSQSGIVLKQDSTLIAVIEMSLSSWLVAGMVPSVERQPLKKLAIDENALLKLLHRWREEAEKAGRKIERIAVAFEAGRDGFWLARWLRARGIEAHVIHASSVAVSREHRRAKTDRLDTELLKRAFLGWLRGERDHCKMVAIPTIEDEDAKRPNREREGLVGEQTRIINRMKAALSRLGIRGFNPKMKKAAQRLEDLRTPEDEPIPPNTLAELRRDMERRRLISEQIRQIENARLERIEHAPRHGPHAMMRVLARVIGVGIETADMLVQEALSRNMRDRRAVARYAGLTGSPDESGTRRREKGLARSGNARVRRGMIQLAWRFLMFQKDSALARWFRARTENARGARKTMIVALARKLLIALWRLVREGVVPDGVVLRPV

SEQ ID NO: 107692 - protein, 404 aa, unidentified
MDGNGRFAGVDWASRSHAVCVVDERGEPVERFEVEHSEPGLRTLGRRLTKAGVTRVAIERPDGPVIEALSTAGLKVVVIASRHVKALRTRYGTAGNKDDRGDAFILADVLRTDGHRLRSLRPDSPETVTLRATVRARKDLVQTRVRLTQQLRAQLELSFPGAVGLFWDLDSPIALRSLLRFPSTAKAAWLSPKRLAAWLRSGGCCGRTSADELHRRLETAPLGVTGPEAEARAAVTLAFARTLLAVRDQVGELEARIREQLELHPDGAIFRSLPRAGQVRAAGLLAEIGDVRERFPTPESLACLAGAAPSTRQSGQHLSVTFRCACDKKLRDALIDFAEDSRLANPWAAEVYRRAIERHKTHPHAGRILARAWVYVLWRCWQDRVPYDPARHRALQKVVLATAA

SEQ ID NO: 107693 - protein, 484 aa, unidentified
MAKRKMSTFERLSTGQMNRAQRRELGRRVAASDPGLTIVHSNAGGIDVGNESHFVAVPADRDANPVREFGCWTAALNEMAEWLKSCRIETVAMQATGVYWIALYDILEQHGIRVVLVNAQHTKNVPGRKTDVQECQWLMKLHTYGLMRDSFRLQQDMEYVRTIWRVRDRHVKDAGREVQHMQKALTKMNIQLANVISDISGASGQAIITAVLKGERDPYKLADLADYRVKASREEVARSLEGNWRADVLFELQQAVDSYHFSHRQMRECDDKLTLYLASLPARTLDIPARTEGAPETAVQKRKKARKPRDNEPRMDMKVELKRICGVDLTSIDGINVMTAFTIISEVGTDMTRFHDEDHFSSWMGLAPSKDISGGKTVGSGKKKVKNRVAVVLRTAATSLLASDTHLGARYRHLRRQLPTFKAAVKAMARYLAVLIFRLLTKGEAWVDRGAVQFERHRLERELASLTSKARAKGFALIPMTPVR

SEQ ID NO: 107694 - protein, 375 aa, unidentified
MNYNTVYVGMDVHKKSFSLCCYTNEKEQAEYPQKTAPHYSKVLNYLVAMRFHYGDDVLFMCGYEAGCLGYTLYHELMDHNVKCILLAPTTIPQPTSRKKVKTDKRDAALIARCLAHHDYSPVHIPSEKDEQVKEYIRMRNDHKIALKKVKQQISAFCLRHGYRYDATVNQWTQAHLKWLRALKPEGLYRDILMEYLSTYDQLTDKIERMDRRIEELAGEPQYREGVKKLSCFLGIKTQTALSTMVEVGDFKRFSSAQRFAAYLGLVPGERSSSESQNRLGITKAGNSHIRTLLVEAAQSYTRGRVGFKSKALKERQYGNPADVIAYADKANERFRRKYYTMVLTKGKKVNVVKTAIARELACFIWGMMVGNLTER

SEQ ID NO: 107695 - protein, 389 aa, unidentified
MWEFAATDAGATVEPDDGGRVVSKSVSFEEGAAGYRRLGELLGSPADCLIAMEATGHYWKNLFASLAAEGFQIVLLNPLRTRRFAEEELQRTKTDKVDAVSIARFAAQKRPTATTLHGPAIEELKQLVRLREQSVQHLGDRVRHLHKAIDLTFPEFTRHVRGLDTELATAILLRYPTAKALRTISVRKLAGLCYDGRRGIGDDLARALIEAAKISVGHFSSEPYQLQVRYACEDIVSLRTRVRGLETDIELRLNTHEVGKLLTTIPGVSTLTAARIIAETGDPARFRSAAAFASYIGAVPRLHQSGKKRYSGKPAIPLGNARLRRALWMPVLVGIRLNPWLRTYYLRLRAAGKRPKVAIIAAMHKLLIAIYSVAKHRTPFVLQLPATLT

SEQ ID NO: 107696 - protein, 308 aa, unidentified
MFIGIDVSKDRLDICVRPSGETFAVTRDHEGLEHLVERLRALAPVLVALEATGGYETVVASALAAAHLPLAVINPRQIRDFARSTGKLAKTDRLDAAAIAHFAEAIRPPARRVADGEAQALGELVARRRQVIEMIVAEKNRRRLAGQPRVLKAIDRHVDVLQAELSELDRDIDGAIRKSPAWQADADLLASVPGVGKATLRTLIAELPELGRLDRRKIASLVRVAPINRDSGALRGRKTIAGGRAPVRTALYMAALVASRSNPVIAAHYQKLRASGKAAKQALTACIRKLLVILNAILRDRKPWSIQA

SEQ ID NO: 107697 - protein, 363 aa, unidentified
MTSMTTNSTIVTGGVDTHGQTHHGAALDSVGRQLGDREFPTTPAGYRALVSWLQAFGHLERVGVEGTGAYGAGLTRQLRAAGVTVVEVNRPDREARRAQGKSDPLDAYSAARAALAGKATGVPKTRDGRVEAIRMLRVARSSAVKARSQATNQLKALLVTAPAELREQLRTLSTTKLIATCARLRPTGDIADTEHATKTALRRLARRHQYLSEEISAADTELRTLVTAAAPRLIALPGVGTEVAGQILITAGDNPDRLRSEAAFAHLCGVAPIPASSGKTHRHRLNRGGDRRANNALYIVVLGRLRYDSRTRAYATRRTTEGLSKPEIIRCLKRYVAREIFTILTARTAGDQPHTAHAMSTAA

SEQ ID NO: 107698 - protein, 401 aa, unidentified
MAAGQVWAGVDVGKEHHWVCVVDDSGKVVLSRRLVNDEQPIRELVAEIDELAERVLWAVDLTTVYAALLLTVLADAGKTVRYLAGRAVWQASATYRGGEAKTDAKDARVIADQSRMRGQDLPVLHPNDDLISELRMLTGHRADLVADRTRTINRLRQQLVAVCPALERAAQLSQDRGWVVLLARYQRPKAIRQSGVSRLTKVLTDAGVRNAASIAGAAVAAVKTQTVRLPGEEVAAGLVADLAREVIALDDRIKTTDADIEGRFRRHPLAEVITSMPGMGFRLGAELLAAVGDPALIGSADQLAAWAGLAPVSRDSGKRTGRLHTPKRYSRRLRRVMYMSALTAIRCDPDSKAYYQRKRDEGKRPIPATICLARRRTNVPYALIRDNRTWQPESPPNIAAA

SEQ ID NO: 107699 - protein, 428 aa, unidentified
MNYNKTEKLNQITDQTLIVGIDVSKDFHVARAQDFRSIEYGKSITFNNDHMGIYSFKAWTKDLMVKHEKSNLIIGLEPTGPYWINLSRVLKAAGVKVVTVNPMHVKKSKELDDNSQTKTDYKDAMIIAHLVKDARYSEPNLLTGEYEELRNAKKIREILNSDSIACKNQIHNWLSRFFPEYQKVFKSWESDSFISILRDYVFPCVIGETKAETIYEALPKKLRRGSGKNKIVKLVNVAKISIGTTEGHMFAAFEIRHLLNKYELIKHELETLSVQVEELCTTLPEVQRLLEIKGIGLNLASGIISELGDIRNYAHADQLIKMAGLSLIECSSGKKKGQTTISKRGRSDLRKFLYQAVFTMLSSNKGFQSLHKYYTERPKNQLKGRQSMMALARKFLRIIYTVVTQNIAYDENKMLSDIKRPDEFLRTA

SEQ ID NO: 107700 - protein, 356 aa, unidentified
MEQLTTVGIDLAKDVIAVCVLDVHGAAMERRVLRRDAFERWAEQLPASNVALEACGSAHHWGRWFAARGHKARLIAAEFVVPFRKGGKNDTADAEAVAIAARQPTMRFVPIKTVDQQAILAWHSVREGWKEERTGLLNRMRGLLAEYGVVIARSADRFLAALPKLSEDSRLPDSVRALLLEAREQFAALHARLARCDAQIAAHARNSPAAQRAGELLGVGPVTSSALVATVPDARVFRNGRQFGAWLGVTPRQHSSGGKTRLGRISLRGNVYLRTLLIQGARSTLQAAINTEPSRASRLQRWIIELYARKGYHKTLIAIANKHARILWAMLAKDQHYDASAWQRHPMTQPCASVRP

SEQ ID NO: 107701 - protein, 371 aa, unidentified
MGESSKTLFVGLDVHKDTIAVAYALEDRGAEVVSLGAIGTRQCDIDKLIRKLEAKGAPLVFVYEAGPCGYWLHRYLTRRGLSCSVVAPSLIPRKPGDRVKTDRRDAVTLARLMRSGDLTSIYVPTVADEAIRDLSRGREDAVGDLKRSKVRLKAFLLRQDIRYEGRANWNAAHLRWLARVVCPTPAQQIVFQEYVRAVSEQAERRQRLEGELHEAVKGWRLYPVVEAVQALRGLDLTGAVTLIAEVGDLTRFDTPRKLMSYLGLTPSEYSSGAHRRQGGITKAGNGHARRALVEGAWAYRYPAKVSRHLQLRLEKLPNEVQAIGWKAQLRLCKRYRQLSARGKHVNQVVVAIAREMAAFAWAIARTVPVAS

SEQ ID NO: 107702 - protein, 346 aa, unidentified
MEHYAGIDVSLELSSVCVVDAQGKIVREVKVASEPEVLVAFFASLDFAVKRIGLEAGPLSQWLHAGLKRAGFDTVLLETRHVKAALSAMMVKTDRKDARGLAQLIRMGWFRPVHAKSMGSQEVRALLVARKQLLGRLIDVELSIRGILRGFGLKVGVVTRKGFEGRIRELVSGHITLERIAGAMLSARATLKVEYEKLHKIVLAIVREDAVCRRLMTVPSVGPLVAITYKSAMDDPKRIAKSKAAGALFGLTPKKYQSGEKDVTGGITRAGDEMARTALYEAANVLLARITRFSKLKRWGMNVAKRRGSKRAKVALARKIAVILHRMWVDGTTYRWTDTQPVAVQV

SEQ ID NO: 107703 - protein, 388 aa, unidentified
MRFTGKVRKQNLARGQSDGSTLYVSLELSRSTWLVTSLSPGSDKMSKHTTIAGDASKLIALLARLRGRAEQLAGGSLDIAVIQEAGLDGFWVHRSLEAKGIESHVVDPASIAVSRRRRRAKTDVIDGETLLRTLLAWKRGEPRVCEMVVPPTPEQEDSRRLSRERAILLRERVQHVNRIKGLLASQGVTGYDPLRKDRRIRLDGLTTGDGRPLPRQLRAELLRELARIELLLLQIAELEAERDAAIETDAEGQLSPVALLVQLKAIGPQIGSVLYHEGLYRSFANRRDVAAYAGLVPTPWRSGSIDREQGISKAGNRRLRHVMIELAWLWVRHQPGSALSGWFRARVGNERGRIRRITIVALARKLLIALWRYVTQGEVPEGAVLKAA

SEQ ID NO: 107704 - protein, 452 aa, unidentified
MATKRRKREQELPVLHPDAAGIDVGASELFVAVPADRDPEPVRSFPTFTQDLYELVDWLQGCGIRSVAMESTSVYWIPVYQILEARGIEVFLVNAHYLKNVPGRKSDVSDCQWIQYLHSVGLLRASFRPPGAICAIRSLWRHRGSLIEMAAEHIQHIQKALDQMNLQIHRVLSDITGLSGLRILDATLEGNRDPVALARLCHKGVKSSQETVAKALAGDYREEHLFALKQSLASFRYYQQLIAEVDTEIASRLQALEKSPEAEGKPPVRTKKSPYSRKHYEPTSFDLRSELYRIFGVDLTDVPGISAVTAHTILCEIGADLSPFRNASAFASWLGLCPERQISGGKVLFTKSRRVRSRLALALRLGANSLHHADNYLGEFFRRIARRLGKPSAITATAHKLARIVFHLLTTKEAYRESVFMRCEEEAQKRAELRLKKHAAQLGFQLIPATNA

SEQ ID NO: 107705 - protein, 466 aa, unidentified
MTPPKDYCLEAPCPPTPLLPPLPVLSDALQVCNPHAAGIDIGEAEHWVAVPPGRDPQPVRRFGTFTVDLDALADWLIDCGVITVAMESTGVYWIPLFELLEARGVQVLLIDPRQAKRAPGRPKTDRLDCQWLQRLHAYGLLAGAFRPDDQVCVLRAYLRHRQMLLTYAAHHIQHMQKALQQMNLKLTQVVSDITGVTGMAIIKAILAGERQPLHLAKLRNPHCHHDADDIAKALQGTWRAEHLFALRQAVELYDVYHQQMAQCDQQIKRHLETFADKSDGQPLPPKARRHKKTNEPRFDARTPLYRLAGVDLTTIEGIEENTALIILSEIGTDMHRWPSVKHFCSWLGLCPQHKISGGKVLSRRVRPGAHRVTVALRLAARSLHHSQSALGAFFRRMKVRLGTPKAITATAHKLARLVYSLLQHGSAYVQQGLDAYEAQYRERKVTTMAKQAKALGYTLVPLAAQG

SEQ ID NO: 107706 - protein, 417 aa, unidentified
MDSDKEIVCGADIHKDFLIATMISRSGLKLQERFNMNQDGLLAFRSWIINHRCQRLAVESTGGFWYPIFTILEGHVEFILANAYQIRNIEHKKTDKLDSERIAIYCLNNLITPSRIYPKDYRDLRSITRARETLVNARSKIKNQIHQSLSTCCIKLSSVISDSFGKSGRYIIDRLLEGKTIDQIISGIPSKRIRKKEDELREAIKNGLDPVQVFLIKANLDVIDDISKKIKILEAEIAEKVKPFEDDLKIILSVPGVGFISAATIIAEMGDYRDFPSADKMAKYFGIVPSVYQSAGKLRTGKITKTGSKHMRRILVEVAKAISRTKKNSRLMRFFQRILARCGKKNIATVALARKVLCIIYHLLMNHENYQEPEVTKTKPKIPSSVSPIRMMDIDEMIKIISQAGYLVEKDLKEGCG

SEQ ID NO: 107707 - protein, 436 aa, unidentified
MVQSLSSSSTNNFIRRCAIKVVYPICCGVDVHKTFLVATIITTEGITPYYSKKRFSTFNNSILQFKHWLVDNHCFDVCMESTGKYWIPIYNLLENTIRITVANPKWVKAVKGNKDDSKDSKWIGDLFRLGLVPGSYIPDKPIRILREYTRYRSKLVACQSSEKNRFQNAFTVCNVALDAVVSDMFGKSASSITDYLLSSETFDPQHCASLLQKSLKKKAATVIESIEGYQMTREQKERMVMVRSHLEFVQQAITKLDAKLDKMMAPYENAITLLRTIPGVDRASAITIISEIGTDMSQFANSKRLCCWAGLTPGNNESAGKKKSVKISRAGVYLKPALVQVAHASVKSDSSPYYQNKYERLCQRRGKKRAIIAIARMILTAMYHMLVTGEVWNPSDLYKIDMPQEMLEKQKEKAIKQALKLLISNGVIKEAAISAA

SEQ ID NO: 107708 - protein, 396 aa, unidentified
MAAIWAGIDAGKTHHHCVAINESGQRLLSRRVANDEPELLELLADVLALSETVTWGIDLADGGAALAISILLNHDQQVHYISGRAIHRASESYRGEGKTDAKDAAVIADQIRIRRDLHPIRTGDETVIDLKILTGRRMDLVADRTRTVNRLRAQLTSIFPGLERVLDLTNKGPLTLLTGYQAPAAIRRLGAKRLETWLRNRKVLRADQLAATAVEAAERQHTSLPGEKLTAQMVHTLAKEVMALNEHVAELDKLIEARFRDHHHFEVITSMPGLGIILGAEFLAATGGDMAVFGTSDRLAGFGGVAPVPRDSGKISGNLRRPQRYNRRLQRVLYASALFSIRRSEESRRFYDRKRAEGKRHTQAVLALARRRVNVLWALLRDGRTYELTPPTALAA

SEQ ID NO: 107709 - protein, 407 aa, unidentified
MIFVGDDWAEAHHDVHVLNEAGDRLASRRLSEGLDGIRGFHELAAAHVDDPGEVVVGIETDRGLWVQALVAADYQVYAINPLAVSRYRDRHNVGGAKSDAGDAKVLADLVRTDRHNHRPIAGDSPQAEAIKVLARGHQHLIWARTRHTNQLRNALREYYPAALEAFSDLADRDTLAVLGRAPTPELGARSSINQIRSALQRGGRQRNLDQRATEIQIALRTEQLAAPTLVAQAFAATTKAAVGIIAELNRQITELETTLAGHFEQHPDADIYLSLPGLGDVLGARVLGEFGDDPDRYATTKSRRNYAGTSPLTVASGKKRAVLARHVRNRRLYDAIDKWAFSSLRPSPGCRSYYDQRRAAGDLHHQALRALGNRLVGILHGCLRHHTTYNEDTAWAHRHKANNPIAA

SEQ ID NO: 107710 - protein, 342 aa, unidentified
MNITTIGVDLAKSVFQVHGVDKNGKTVARKKLNRSKVLSYFVQLPPCLIGMEACSGAHYWARKLSEQGHEVKLMAPQFMKPYVKANKTDAADAEAICEAVTRPTMRFVPIKSVDQHAVLSLHRARAGFVKARTAQANQIRGLLGEYGIVLPQGIIHVAKRLPDIIENAENDLPIMFRDLLVSLRSYLLELNQQIQQLEDQITSWHKNSEVSQRVAKVPGIGVLTASALVASIGDARSFKNGRELAAWLGLVPKQHSSGGKTLLLGISKRGDTYLRTLMVHGSRAAVRVVENKKTPTDTWTNALGARRHVNVVCVARANKNARVVWALLAHKRDYSADYMQAA

SEQ ID NO: 107711 - protein, 428 aa, unidentified
MQKLQENLKRITPTTIIVGIDVAKEIHWARITDYRGIDLTKPFKVHNSADGFESLLSKVEKNREKHGCDQVMIGMEPSGHYWRALGWYLKLHESKPVLLGVNPYHTHQAKELDDNSQTKSDPKDALVIAHLIREGRYFDTYLPDGEYSELRQLNTERQRLMKQINRSNNVLVALLDEYFPEYSTVWGNVTCPTSLELLKKYAFPSDILSAQRGQLREDIFKASGGVEGDKLTEEMRRAASRSVGVKEGQKAVRLRILNLIDDLVHYEKQKACIEAALGSVMDRLELGKVLQSMRGVATIISAAFLGEVGDISRFDSWKQVRSLAGLNLVENSSGKHKGKTKISKRGRPYLRHMLYMAGESGYTHNPEMRAFCRYLQDRKKNPLNRYQALVATGLKIMRILFQLAKTGESYDPGKALGDVRLQQIASLG

SEQ ID NO: 107712 - protein, 248 aa, unidentified
MTSQNEAVCFGIDVSKHWLDIAEHPSARVTRIDNTAAAIRGWLRTLPRGAQRIACESTGTYHRTLVELLIGAGHQVFLIDGFKLSRYRDTVGQRAKTDRHDARLIARYLAHEGTDLRPFSLPAPAVTELRSLLRRRATVVCSLGRIRQSMEDLPGFGREVRVALARLTALIKQFEQRIASLINESGWTEPYRRILKIEGVGALTAAGLCAAFHRAPFSGADAFIAFLGMDVSVRDSGKKTGRRAEQEG

SEQ ID NO: 107713 - protein, 344 aa, unidentified
MKVTTVGVDLAKNVIQVHGVDERGKAVLKKQLKRDQMGSFFGNLPACLVGMEACGSAHHWARKLQSFGHTVKLMAPQFVKPYVKTNKNDVADAEAICEAVARPSMRFVPIKTAEQQSVLCLHRARQGFVKARTAQGNQIRGLLSEYGIVMPQGIGHITKRLPQILEDGQSELPGQFRALLWRLGENFKEMDRQVRELEREIKTWHRENEASRKLEKIPGIGALTASALVASVGNASCFADGRQMAAWLGLVPRQHSTGGKPTLLGISKRGDTYLRMLLIHGARAVVRVSERKPEPDTWLKRLLSRRNKNVAAVALANKNARIAWALLRHDREYALGYTSVLATK

SEQ ID NO: 107714 - protein, 317 aa, unidentified
MSDPAVFVGIDVAKATLDLALRPSGERWTVANEAAAIHALVQALRPRAPTLVVLEATGGFEHAVVAALAAVGLPVVVANPRQVRDFARATGQLAKTDAIDAQMLALFAERVRPEPRALPDEAAQALDGLLTRRRQLLEMLVAEKNRLGFARPPVRRGITQHIRWLERRLADVDHDLAEMIEASPVWRAKDDLLRSVPGVGPVLSRTLLGELPELGLLNRKQIAALVGVAPLARDSGTLRGKRLVWGGRAPIRTVLYMSALAGARHNPVLRAFYLRLRAAGKPAKVALTACMRKLLTILNAMVRSNTRWQLSALHTAV

SEQ ID NO: 107715 - protein, 347 aa, unidentified
MNHYAGLDVSLEETAICVVDSTGRIVKEARAASEPETLIAALREIDLPLERVGLEACSLTAWLHDELHSAGLPAVCIETRHANAAMKTMPNKTDRNDARALAQIMRTGWYRQVHVKSRQCRLWRSLLVARRTVLNEMRSIENVVRAVLREGGLKLGTPSRAAFAERVRDLMAEDASVKPLVDPLLTILVTMLDQFARLTKQVLDIVRREKVCRRLMSVPGVGPITALAFRATIDRPDRFRRSRDVGAHLGLTPARYQSGETDVSGRISRCGDELARTALYEAAHTLLVRSRKWSSLRAWGMKVARTRGMARARVAVARKLAVILHRMWSDETEFRFGRNPAAALAAA

SEQ ID NO: 107716 - protein, 402 aa, unidentified
MFFVGIDIGKRNHEAAIIDEKGKPVGKPIRFSNTKAGSEKLLQFINNHELLPDNSMIGLEATGHYWLSVFSFLIDLGFNVIPFNPIQSDTLRNFYIRKTKTDTIDAVLIAQVVRMDLPDQAHLPSEDIVRLKQLSRFRYSIVDQTSDLKRKVIASLDQVFPEYEKLFSDMFGKSSTQLLLQSPLPEDILEIDSKKLIELLNKASNGRLTIEKSTEKVQQLKELAKDSFGIRVATDVYKLQIQLLLQQILGLEEQLKTVEEEMAELVENQDQYLTTITGIGPVTAAVIISEVGDIQRFERPNQLLAFAGLDASVHQSGDFTGTRNKLSKRGSPYLRRAIWQAAFIASYRDPALSLYYQSLRKRGKHHGTAVGAVCRKLVNIIFAVWTKAKPYEIHINPDLIDD

SEQ ID NO: 107717 - protein, 343 aa, unidentified
MTSYAGLDVSQQETAICIVDETGLVRWCGKARSEPTALAAVLRRRAPDLERAVLESGALSGWLCGGLVEAGLPAVCIDARAAHGALKQRRSKTDRGDAEGLARLAQVGWFKVVRVKSRASFERHALLAARERLVRINRDLLNQIRGLVKPLGLVLPRTTPRRLVARLQAWLDEAPAMRPALTALLTARACVAEELERLDRLLVRRAGDDPVCRRLTTIPGVGAITATCFVGVVDDPERFARADQVAAYLGLTPRRWQSGEVDRQGGISRAGNGMARHLLFEAANSLLVRVKRPCALQSWALRLQERVGGKKARTALARKLAVLMHKLWRRQQDFDWGRAAQAA

SEQ ID NO: 107718 - protein, 404 aa, unidentified
MDSPTRYAGVDWASRAHAVCIVDDHGTATERFEVEHTEPGLRSLGRQLAKAGVTRVAIERPDGPVIDALFAADLEVVVVASRHVKALRTRYGTAGNKDDRADAYLLADVLRTDGQRLRALQPDSPETVTLRATVRARKDLVQTRTRLTQQLRAQLELTFPGAVGLFADLDSPIALRFLLRFPSATKAAWLSPKRMAGWLHAEGYPGRTSAEELCRRLETAPAGLTGPDAEARAAVTLAFVRALLAVREQIVELESRIREQLALHPDGAIFRSFPRAGEVRAAALLAEIGDVRERFPTPESLACLAGAAPSTRQSGQHRAVTFRFACDKKLRDALIDFAEDSRFANPWAAEVYRRAIERHKTHPHAGRILARAWVYVLWRCWQDRVPYDPARHRALQRVVLAEAA

SEQ ID NO: 107719 - protein, 344 aa, unidentified
MKNITTVGVDLAKEVIQVCVVTRGKVISNTEMTPQEFRCFLAKTKSCIIVFEACGTANYWKQVSLSEGHDARLISAKLVSQIRQNQKTDKNDALAIVQASQLTGVRFIQGKQFSQQELQSISRMRGLAIKQKVATSNQIGALLLEFNIRVSNRNGGLNGVVKATLEDATNDFSSEFREALYETWQGYLALVARIAKYDEHLNTSVEKTPACKKLMALEGVAIINAVNLYISLACSEDSVFSSAKDASASLGVTPIQYSSGGRIKLGGIGKRVKNALVRSNLISGAMAVVRQVSQREPRTTKEKWLKALIERRGNKCAAVALANKTVRTAFAMLRDGTEYHAQAL

SEQ ID NO: 107720 - protein, 342 aa, unidentified
MHSTTVAVDLAKDVIEVAVAGEGRRHERLGRTGFKHFLAQQAPSRIVMESCGGAHYWARRAQAEGHAVTILPALYVKAYRRRNKTDRADCLALLEAAKNPEIKPVAVKTPLQQAVQGLHRLRSRWVATRTGRINTLRGLLSEFGITMPRGAVTAVKQLPGCIDDPALPEALRPMLREVFSEILELARRLKDVERELERLTEHDPAVQCIRQVDGIGLLTSTALVASAVDAKHFRNGRHLASWIGLTPREYSSGSTRRIGKMSGRGDVYLRMLFIHGARSAMLVAARRQREGKTLNRLQRWVLDLKARTNHNKAAVGLANKMARIAWAVWFHQRQYSGDYAAA

SEQ ID NO: 107721 - protein, 418 aa, unidentified
MTATHSIAPTLLVAIDISKHRHEVLIGIPGKARRRRLTVMNTLEDFQRLSVALASYELPVRIGFEATGNYHRPLAHHLGQAGFDLKLVSSVGLARTREALHNSWDKNDPKDAQVILHMLEIGAVQFFHDPLVVGTADIQELSKTHEIVSRSKTELWHRILTHYLPLYFPEAERFHRSSRTDWFVAFLEKYPSPHMISAMGRDAFIADAWDVVGRKVSKERLLSDIYATAVDSVGLPVHPDSDAVRMFRLVLKEGRSLVRQRDEIEARAVELLLDLPDYQLLTTIPGIGPINAMTILAEAGDLRRFRHHRQFLKFCGMDLATVQSGMFRGQSRVSKYGNARLRRTLWMAGQTAVLKRTNSFRDKFERYISKDRHNAHLRRKAYTAIAAKMARTVHAVVNHGEPYRPFFEGVSPGGRTSL

SEQ ID NO: 107722 - protein, 419 aa, unidentified
MKTTKTKKVKIINEKTMIAALDIGKVAHYAYFRAPNSKDIKPFPFYNFRKGFNKFWMKVCQFKSEQKLDEIVIGFESTGPYAEPLFHYLRKKPVRLVQVNPMHSKRLKELTGNSPNKTDTKDPRVIADVISLGHALTLVVPEGPAAQLRRLTHARERALKRRTAAINQVQDLIFVIFPEFLAIMKDISTKTASYLIKAYPTPESIVALGVDFLATIIKEISRGKLGRQRAEELFNAAQRSVGVNEGKRSILLEIEYLISQISADKKFIANLEKKMEEYLEKIPYSYYLLSIKGIGIVTVAGLTGEVGDFKKFHTISEMMKLAGLDLFEVSSGKHRGKRRISKRGRSLMRKLLFFAAINVVKSNGIMHKRYQEMLERGMPKMKALVAISRKLLMLIFALARDNTVYVENYSNIHHFKLAA

SEQ ID NO: 107723 - protein, 338 aa, unidentified
MVYGAIDLHMRHSQIRIVDEPGAVLRDQRVPTSRERLVQAFDGLGPMRIVVEAGTESEWVAQALEGAGHTVIVVDPNYAPMYGDLQRRVKTDRRDVAALAEANRRGWYRAAHRTSAVQRETRQVLRVRRQIVRMRSGAVALVRALVKQDGDRLPRCSAERVPARLARLELPAARRAILAPLVEMIDTATEQIATLDRYLEARAAADPVVQHLRTVPGVGLVVALTFRAQIDDVERFHHAGQVSAAMGLVPREDSSAERRQRGHITKTGSSELRRLLVQAAWVCWRSKHSATLRAWAEQLAARRGRRIAVVALARRLSRVLYAIWRDGTTFEVKTLAAA

SEQ ID NO: 107724 - protein, 350 aa, unidentified
MVIIGCDYHPSFQQIAYVNTEGGELRERRLVHPEEAEQFYCELKQRNLAVRVGMEASGHARWFERVLRQLEFELWIGDAAEIRTKRVRKQKTDRQDAQLLLRLMMEDRFPRIWVPDAENRDLRQLLWHRHRLVQMRTRVMNQLHVVALNEGLQRKKALWRPAGRKELESLALAPWAHRRRQDLLELLDQLTPQIAKLTQALEAEVEKRVVARRLKTHPGVGPLTALAFELVIGTPDRFHCGKQIASYVGLVPEENSSGNRRRLGHISKQGNVLLRFLLVEAAQVTVRSQPQWRSKFFHLAMRRGRKIAKVAMARKLAVHLYWMWRQGCDYGQFKGFGSHAGAPGNRDGGK

SEQ ID NO: 107725 - protein, 429 aa, unidentified
MNSTQNKKIDQVKETTMIVGIDVGSEKHYFRAFNWRGIELTRKPVAFSNSMEGFNSFYNTIVELMQKSELEEALVGIEPTGHYWFDLGQSMGEKDIKFVMVNPHHVHKTKESDDSSPSKNDRKDPRVIAELVRDGRYFYSYMPTGVYAELRNASNRRFVLAKEQTRAKNRLQKWIAVYFPEYKGIYTHIDAKGGLLVLKQAPTPEEIVRLGVDGIIKIWKDAKLRGNGHKKAMLILNAAMKSIGLKAGLTEARMEIQDLIEDYELQTKRLERVNDLIKELCQQVRYADKLLEIKGIGITTVAGFIAEVGDITRFDSTKELQKLAGLELVADSSGKHNGKTKISKRGRKRLRYLLFEAAISVVGKNEEFKEIHSYYTTREKNPLKKMQSLIAVACKLIRVFHVILTKGISYDASKMLEGIRHPGEQLKAA

SEQ ID NO: 107726 - protein, 416 aa, unidentified
MNAVGIDVSSRKSTVAVLRPLGEVVCLPFDVTHDIAGLASLVEKLKALDGETRVVMEHTGRYYEAVAKALHEAGLFVCAVNPLLIKEYGANSLRRVKTDKADAVKIARYALDNWADLRDFTPMDAIRYDLKTLNRQFQLASKQRTASANNLIALLEQSFPGIRKCFDSPVRSDGTQKWVDFAHSFWHVDCVRKQPFAAFCERYRKWCKRHAYLFKLSNAEEVYALAKRAVVLTPKSKVVKVLVQEAANQLISISRSVEVYRAEMDRLAAMLPEYPVVMVMYGVGKSYGPQLMAEIGDVRRFERKQALVAFAGIDPMPNQSGDKNVRSNKSSKRGSPYLRKTLFNVIRTYLQCAPQDEPVFQFLNRKRAEGKPFYVYMLAAANKFLRRYYAKLRDYFASLDTLQPVAPIPTILKATL

SEQ ID NO: 107727 - protein, 412 aa, unidentified
MQVLYSRCCGLDVHQKTVVACVMITQPNGKVDKSIRTFATTTTTLLTLGDWLASLQVSHVAMESTGVFWRPIYNVLEDQFELILANAHEIKALPGRKTDVRDCEWIADLLRHGLIRPSFIPAKPVRVLRDLMRYRKSLVYQHTQQINRLHKVLETASIKLTSVVSDVWGKSGQSMIKAIIQGESDAQTLTELARGTLRGKLPQVQEALEGRIQPHHRMLLQQIFAQLQFLESSMQQVLKEIEAQMEPYQAVVELLMTHPGVQAVAAMGVVSEVGIDLSRFPSAKHFASWIGVCPGNHTSAGKRKHGKTTKGNAYLRALLAEIVWGISHTKDNYLSAKSHRLARRIGKTKAIVAVSHTVAVNFYHMITKRIPYRELGANYFDTVDRERLTKHTVKRLEALGYEVTLTPKEVSA

SEQ ID NO: 107728 - protein, 343 aa, unidentified
MAQYIGLDVSMKETAISIRQDGKRIWRGKCASDPQLLAAVIRKRAPHARRVVFETGPLSVWFYHALTAEGLPVICIDARHAKAALDMAANKTDANDADGLAHLAEVGFYREVRVKGFDSMLIRTLITARRQLLKMRLQISNQIRGLMKTFGLVVPKGAGSVFERNVRNLLQGEEKLARIVVPMLRAWSDIRHQTAELSKQLAAMARKDQHCRLLMSVPGVGTVTATAFVAAVEDPANFRNSRIVGAWVGLTPRRYQSGEVDYDGHISRRGDNQLRGLLYEAAAVILNRSSDTSALRTWALELKERLGFKRAAVALARKLAVIMHAMLRTGELFNPHGGTRAAA

SEQ ID NO: 107729 - protein, 347 aa, unidentified
MSNVPVFVGLDYHQDSIQVCVLNQQGDVLLNRPAGNDCDELFRLVHPLGRVQRVGIEACCGAADLGEELVDRLGWSVSLGHPAYIARMKSSPDKSDFSDGRLLADLTRVGYLPHVWLAPASIRELRQLVNHRQRLVDRGRALKLQVGAVLREQRVKIPKDRGSRWSKAWTASVRDNDQLSKHGQWIVNDLLDELVHNSGKIKAAEAKLREAAEGDRVIVKLMEQPGVGEVTAWVLRACIGEFSRFKTAKQLSRYCGLSPCNASSGNKVADAGLIDGCNKMLRMTIVQAAHRLIRTVQRWSKLAESLKKRGKPACVIVGAVGNRWMRNLHHAMKPESKTDPLAVTTQE

SEQ ID NO: 107730 - protein, 345 aa, unidentified
MGQITRVGVDIAKSVFHVHAVDRFGERQWKGKYCRTKWLDAIENKVPKGTEIAMEACGSSHYWGRELQKRGFKVKIIHAQFVKPYVKSNKNDAIDAEAICEAMSRPNMRFVSVKSSKQQDIQSIHRIRDKLMVQKASKANQIRGLVSEYGLVAPVGINKLREAIPLWLEDAENGLSALFRLLLRDLFDDLRQLQERVDTLDTLIEKEVKNDPVARSLLQLRGIGILCASALSCAIGDAKGYRKGRDFAASIGLTPRQHSTGGKPRLLGISKRGDGYLRKLLVHGARSVIRHAHRHDDNLSKWIEKLCAYKHVNTVTVALANKTARAAWAMVNTNESYDPELIASA

SEQ ID NO: 107731 - protein, 457 aa, unidentified
MNRKRSKPKIDRRMPMVHPNAAAIDVGATMHMAAVRAERTPEPVRSFGTFTTDLHRLVNWFKECGVETVVMESTSVYWIPIFELLDARGFTVFLVNARDAKHEPGRKTDVSDAQWLQRLHSYGLLRASFQPKGQIAELRAYVRQRERLLEYAASHIQHMQKALTQMNLQLHHVVADITGVTGVQIIRAILAGERDPKVLARLRHYNCHSSAETIEKALTGSYRAEHLFALEQALALYDAYHEKASACDVRIEAVLKELSIGRGCRSDSLPSSRRRTDQANGLAFDVRAALFALLGKDITQIDGLGPYLSLKLIAECGDDLSAWPSSKHFTSWLCLAPSNKISGGKVLSSRTRRCGSRASALLRLAAVTVGRTDTALGAFYRRLSARIGKAKAVTATARKIAVLFYNAVRHGMEYVDPGASFYETRYRKRVVDNLHRRAKAFGFVLQPMEPTPDVVVS

SEQ ID NO: 107732 - protein, 351 aa, unidentified
MMIIGVDYHPSFQAIAFFVEETAECGEQELNHSDGQAEKFYRDLQQRGISVRVGMEATGYSRWFERLLAELGFEVWIGDPAEIKAKRVKKLKYDRYDARLLRRLMLENNFPRIWVPDPENRDLRQLLWHRHRLVQMRTRIMNQLQALAMNEGYRWKKKLFSEQGRAQLEKLSLAPWASRRRQELLELLDRMNPTIEELTSAVEREARKRPEVLRLMTHPGVGPLTALAYVLIIGTPTRFARGKQIGTYVGMIPSEDSSARKQRLGHISKQGNSLLRFLLVEAAQAAARNHPDWRRRYIHLAMRRHKSIAKVAMGRRLAVRLYWMWRNGCEYSQSLEFSSYAGKLGTGHGAK

SEQ ID NO: 107733 - protein, 347 aa, unidentified
MRFYNRQHRHYCGIDLHVKTMYVCILDGTGQVLVHRNVPSTPEALLQVVAPYRDDLVVAAECMFTWYWLADVCAAERIAFVLGHALAMKAIHGGKAKNDKLDSFKIASLLRGGLLPQAYVYPAAMRATRDLIRRRLHLVRKRGQLLAHIQNTRAQYNLPAFGRRLAYPANREGVRERFADPSVRKSIDVDLTLVAQYDTLITDLELTIVREAKRHDADAFHRLRSVPGIGKVLALTILYEIHDITRFDRVQEFASYARLVKGQKQSGGKTLGTSGAKMGNVHLKWAFSEAAVLFLRHTKDGKKLLAAIEKKHGKGKALSILAHKIGRAVFYMLARGTVFSTDKFLAA

SEQ ID NO: 107734 - protein, 343 aa, unidentified
MSEQKITGIDLAKTNFYLFSINAHGKPAGKTKLSRNQLLNWLVQQPKMTVAMEACGASHYWAREIRKLNHDVILLPAQHVKAYQRRQKNDYNDAQAIAEACQHGTIRPVPIKTLEQQDVQTFLKMRRLVSMERTQLINHVRGLLAEYGIVFSKGATELHQKLPALLEDAEDELTDTMRTLLHRQYIRLITLDNELEWYDSEQKKYVRQDPVCKRLLAIPGFGPLVSQAIKSWMGDGKQFRRGRDASAALGLVPRQFSTGGKQVLLGITKCGDQYVRSMLIHGARAVLFRASEKTDSLSVWVNRIREKRGFNRAVVALANKLLRIAWVIIARNEMYLPATKQNQ

SEQ ID NO: 107735 - protein, 355 aa, unidentified
MSQEKYIGMDVHQATVSVAVMDSQGKLIMECILETKAATILEFMQGVHGTLVVTFEEGTCAAWLHDLLKPHVSRLVVCDPRKNALLKDGSKSDRIDARKLAELLRGNQLSPVYHGDHGVRTLKELGRSYLTITKDLTRVMSRIKALYRGWAIPCGGTTVYAARHRSEWLAKISEPGVRLRAERFYQQLDMLRALHQEARRDFVMESHKHPAVKLLRQIPSIGPIRAALLLALLQTPHRFRTKRQLWAYSGFAVETHDSGEYRYVRGKLLRNRERISVRGLRDNYNRDLKNVFKSTAISASTRPGPLRDFYEALLAKGMRPTMARLTLARKIAAITLTVWKKGVDFDAKQLDQQAA

SEQ ID NO: 107736 - protein, 372 aa, unidentified
MKNNSNSKKQPRGFEEWTSPKLAALQEAWRQKQGTEEKLTIGLDLGDRQSNYGVLDQSGEVIGRGQVVTQSQPLEVWLGQMPPSRVVIEVGTHSPWVSRLVKQTGHEVVVANARRVKLISESSRKNDRVDAEMLARLGRVDVELLSPIQHRSKQGQADLIGVRVRAELVELRTSAVNAVRGFVKSFGQRMPKCDAGVMNRSHAKEVDEAIRAEMELVLEVVEKLNEVIAKADGELKKVNAERYEKETAKLEQVTGVGTLTALTYVLTLEDAGRFRRSRDVGSYVGLRPKSSQSGERDPEMRISKEGDVYLRKLLVQCAQYILSKRGPDTDLKAMGIEDRQQREAEGQAASGGGGGAKAVGAAAPVVGKWRSV

SEQ ID NO: 107737 - protein, 336 aa, unidentified
MNIKRIGLDLAKNVFQIHAVDHREHVVLRKTLRRDRMAAFFTQLSPCLIGIEACGSAHYWARELTRMGHTVRIIPPRLVKPYLKGQKNDANDAEAICEAVSRPGMRFVAIRTERQQTLQAEHRVRARLIRARTALSNEIRGLLGEFGVVLAAGIAQLRKALPQQVQWDECFIRLLCELSEELQGLDERVARHDRRLQQSARDDIRIKRLLAIEGMGPVVASALVAAVGDGRQFRSGREMAAYLGLVPRQHSSGGKARLGHISKRGDRYVRTLIIHGARAVLNACQNKTDRRSQWLQGVSERRNRNIATVALANKNARIAWALLSREEDYHGIQVTG

SEQ ID NO: 107738 - protein, 331 aa, unidentified
MDNSLYFVGADIALKKFDVAIRLDGNRYKHKVFANTPEGFTAFHAWLQGFGSHFHILMEATNVYHEDLADYLLVQGLTVSVINPRCIPNFAKSTNMRSKTDKVDARLLADYAYCNSARLRKYAPLATNYRTLKRLMRQLTHLKKIIAKEQVRIQMMMDALCVEISQEIIAGTKALAKELEKKIKELVKEDKVLSRNAQLLQSIPAVGWMSAMYLLSHLGDGSRFRNSKAAATYMGLTPIVKQSGDSLHIVSGISKMGPRDIRDVLYAPAMSYAFGPWKERVYAPFVQRLTANGKAPKEVIVALMRKLVSIAQAVLQHQRPFDSAILVGKAA

SEQ ID NO: 107739 - protein, 342 aa, unidentified
MSMHYIGLDIHKKIIAYCIKAGDGTLLGNGVISATRPALEEWMEQLPRPWTVAMEATMFTGWIYDFIKPYADDIKVAHPEMLKAITAAKKKNDLSDAQKICDLLRVDLLPECYMAPSELRELRRILRYRNHIVRTATQTKNKISGLLMEVGAEYNKKKLHGKRYFWELMDTIEHVPSSVSEMLKLSRSNLEIFTNIQKKLVRVLKENPLIRERVTRLQTIGGVGEVTALTWVLEVGEVERFGAVRQAVSYCGLCAAQKESGGKESRGPISKKRNKHLQTVLVEAAKLAPHWNPQLAEIHERELRKGNKNRATLAVARKLVAYMLAVEKSKKDFEVTAPYQAA

SEQ ID NO: 107740 - protein, 348 aa, unidentified
MEFYAGLDVSLEATSVCVVNGEGKVVREGKLPSDPDAIELFLGEWGVHLKRVGLEAFSFSAWLYAALDDKGLPVTCIETRHTKAALNAMLNKTDKNDARGIAQLMRTGWFRAVHVKSREAQALRVLLAGRKALLGKVLDMENMIRGLIRPFGLKVGQVSTGRFEARVRELVAEFAELEQIAEPLLSARAAMRLQFARMHRMALAAAREDKAVRRMMTVPGVGAIVALTFRATVDDPARFKKSVTVGAHFGLTPRRYQSGETDWSGRISKCGDEMTRAMLYEAAIAILTRIPKNFKLRLWGLKLLKKKGLKKAATAVARALAVLLHKIWVDGSTFRYGVGLKGGRIARA

SEQ ID NO: 107741 - protein, 345 aa, unidentified
MLYVGVDAHKATSQVTVMDSGGNILRRKRIVSSPIAVRQALAGYDEPLKAVLEASYCWAPMYDWLDEVADEVVLAHPLKVRAIAEARIKTDKIDSEILAHLLRADLIPEAHASSQDVRARRRVLRQRMFLIRLQTMVKNRIRALLVQHISEQPKVSDLFGKCGRDWLRRVQLPDPDGRLLKEDLGLLEFLQQEISKTDRLIAELAQGDEAVQFLASIPGIGVFLSVLIRWEVDIIERFRQAKKFASYTGLVPSTYASGNRIVHGRLTKQGNKWLRWAFVEAVSPAVRSSAYLHSYYQRIKLRRGVKDARIATARKIAELAWTVWTERRGYQERLPKSLRTATEER

SEQ ID NO: 107742 - protein, 438 aa, unidentified
MSNKVIFNLDELFISVGIDVGADFSWMSIALPNQQFVGKPYKILHNSIDSLTTAVSKIKEAEELYSLESRIFLESTGIYHYPLFCYLRDKGFNCSVINPIITKNSTNINIRKVHNDRFDSKKAALVGLKPDLKVSLMPSDLALNCRNLCREYYDLMDNRSAYVNKLQGELRMAFPQYLGIFSKVTINTSLTLLETYTSPSAFLKADKQEIIDIIKSTARFGLTYAQNKYNAIIQAATDANQFGYIIDSNIKRIRLYISFIRKYDEEINSILESLHELVDANEDADFVKQIHLIETFKGAGFLSAVSIMGEIGDFSAFSKPKQLFAYFGLDPAVKQSGKFEGTKVQMSKRGSAIARRVIHTLTLQSISISRNGEAKNPVLREYYLKKCDSKPKLVAMGAVSHKVCNMIFAILRDNKPFKIIAPQEHIKQYNSAKCDIAA

SEQ ID NO: 107743 - protein, 319 aa, unidentified
MAQNSRVVVGIDVAKDKVDACIRSLSQRQAFPSGAKGRRKLVAWLRKHKVDRAVMEASGGYERDWAKALREACFAVRIVDPRRVRNFARSAGRLAKNDTIDADTIAWFAETFEDAPSQIHDAAREELAALVKARKAVIDLKTRLQSQNEHAVPGAVQKAHARVLKGLDAEIAKLEDAIVVTVKATPAFAARAEIIESVPGLAETASAVLIAGLPELGTVREEIAAALLGAAPYDDDSGKRRGERHIKGGRRWVRNALYMPCLGAATQNNPVLKAFYQRLIAKGKEPKVALIACMRKLIVILNTMIARGEKWDPSRYALR

SEQ ID NO: 107744 - protein, 325 aa, unidentified
MYVITDQEDQQLFQRRLPNQLPVVLESLEPYRPRRKVVVVESTYNWYWLVDGLLDRKYPVVLANPGAIDQYDGIKEADDLTDAAFLARLARLGILPTGYLYPKEDRPVRDLRRRRSLVVRQRTSMILSLQNMALRQTGQNFGWRALRRLSDQERAEVLGDHDCLAFVTTEQLDLIELLSEKIKRFEAKVLEHAQLRPAYECLLTLPGVGVILALTILLETGDIGRFATVGDYTSYRRCVRATHTSNGKSKGKNNGKNGNAYLAWAFVEAVHHALRTCPPARSFYDTKVAKRNGALATKALAAKWSKAAYYMIKRQEPFDLARVFG

SEQ ID NO: 107745 - protein, 372 aa, unidentified
MKRIRDKVAGLDVHRDTVVACTRVVLPDGEVEVTKASFGTTTAGLSELASFLSDAGVTTVAMEATGVYWKAPYYTLEGLFEELWLCNAQHVKNVPGRKSDLSDAEWLADVAAHGMVRPSFVPPPEIRELRELTRYRKTQVDVRAREIQRLEKVLQDAGIKITSVASHVWSASARGIIEAMIAGERDPKVLAQMAKGKLRPKIPQLEEALAGHFGAHHAVVCRQIIDHIVFLDASIEALTEEVGNRLAPFEAQVAILTSVPGISQITAEVIVAETGADMSRFPTPEQFCSWAGVAPGSHESAGKRRPVGTRHGGDWLRRAMIEASRSASRTKASYFRALYSRVARRRGPNKAAVAVAHSMLFTIWHLLRDGSL

SEQ ID NO: 107746 - protein, 336 aa, unidentified
MSVLYLGVDVAKRTLDAATWLTGAHEGIFWGQYPNTPSGLRKLARRVTRTQSKQAVDAVHLIVEPTGGYELALIAFAYDQGWSVSLPNPKTVRDWASGIGLRAKTDKQDALLLARYGAERRPSPQQPVPQVIQELETLLSRREDLKKLLRAERNRLDNLHHRPAVPEAVQDSVNRVISALEVELAEIEAAIEELIDKHPDLKDKVRKLRTVPGIGSVNVLPLLVLFIRWDIRTNGQGEAKALTAYVGLDPKPFESGHSIHKRATISRMGNRSIRSFLFMGAFGGIRGNSPLRTFYERLVDRGKAKRLALVAAARKILVWAWAVFSQDTVFDPLKAQ

SEQ ID NO: 107747 - protein, 405 aa, unidentified
MPYFGGLDWGGAGHAVCIVDGSGAVVLSLGVTHDASGLADLRKRLAKLAPASAIPIAIERPSGLIVDALLEAGHSVVPIHPNVVRACRPRYRAAGGKSDPGDAFMLADILRTDGHRFRPLTPCSDEIKALRALVRGRDDLVAERVCLANRLRSLLDSFWPGAAATFADIDSPIALAFVQRYSTPDSAARLGENRMKAFLASHAYCGRRSPAELLDRLRAAPTGRAGETEAEAKGEMVRALAAVLERLGGEIAKLTARIEHTIAELPDGQVVMSFPRAGRICAAQILAELGDVRDRFQTPDQLAAEAGVCPVTHASGRSRGVVFRWACNHRLRAAITCFADNSRHASPWAADVYKRARARGCDHPHAIRILARAWIRVLWRAWINRTPYSSALHSAAAACNQPRAA

SEQ ID NO: 107748 - protein, 344 aa, unidentified
MKIKLLGIDLAKNVFQLCALNQANKVLFNRTIRRARFHSTITKLEPTTIAMEACSSAHYWGRAFEAMGHRVLLVPAQHVTPFVRGGKSDARDALAICEAAQRPGLHPVPIKSIEQQDIQLLHRLRQRQVQHSTALANQIRSLGREYGVIFPAGIKSLIKRLPEALEDGSNELSPVARYALADQHRCLMDVRAAMTAFLQQIEQLAAQHPAYANLLPLPGIGPMIASAYIAAIGNGRQFKCGRQVSAWLGLVPRQYGTGGKIQLKGMTKNGDRYLRTLMIHGARAVITRGLKNRPELAQWVQPIIDRRGFNKAVVALANKLTRISWVIVTTGEPFDMKQAFKPAA

SEQ ID NO: 107749 - protein, 383 aa, unidentified
MGEREFAHGGAGLTALCEWVVSMAGDPGTVAVAIEVPHGPVVDAVLDRGFAVYAINPKQLDRLRDRISVAGAKDDRRDARVAAAGLRTDRPLFRRVLAGDPSVVELREWSRLAEELQQERVRLGHRVRQQLWRYYPQLLALSDDVTAEWVLALWTLAPTPAQAARLREATLARLLQQHRIRKLDAPAVRGILRQPAITVAPGVTEAAVLHLRSLVARLRLANQEFHQAARKLEALCTALSQTQPGAQDSGPRDAAILSSLPGVGPVTLAALLTEAAGPISRRDYTALRTLSGVAPVTKRSGKSCIVIMRYAAQLRLRNAVFHWARVAVLNDPKCRSRYAALRARGHSYGRALRSVADRLLGVACVLLQRQVLFDPNHGAPAQP

SEQ ID NO: 107750 - protein, 409 aa, unidentified
MQVVHEVCCGLDVHKKSVTACVLWASGRRRQTRAFGTFTRELLELGDWLRACGVTHVAMESTGVYWKPVWNLLEGLFEVLLVNAQHIKAVPGRKTDQKDSEWIADLLQQGLLRASFVPPTPIRELRDLTRYRASLAQEINRIANRIQKVLEDANIKLASVATDTLGASGRAMLEAMVKGEQDSQRLAEMAQGKLRNKIPELQEALQGRVSRHHRFLLRELLDHLYFVESKMQRIEQEVAERLGPFQSEVARLCTIPGVDRVTAWGLLAEIGLSMKQFPDAQHLASWAGLCPGSHESAGKRKSGKIRKGSLWLRRCLCQGAWAVSTKKNNYLSALYRRLAARRGSKRATIAVAHKLLVIAYHILRDGTCYSDLGADYFDRLNPEGLRRRLTKRLEGLGFKVTLEPLPQVA

SEQ ID NO: 107751 - protein, 359 aa, unidentified
MDTIVAHTHPFVIGVDTHARTHTYAVLTAAGQHLGTETFPNTAAGRSRAINWAGRRSGGVTDALWVIEGAGSYGAQLARNVADTGYRVVEAARMGRTGRRGIGKSDPLDARRIAAAVLSLPVNQLRTPRQDEGVRAAAQILLTARDGLAAERTRAVNALTALLRIIDLGIDARRPLGARKIAEVARWRTREEALAATTARTEAIRLAKRILELDTELGQNMTRISDLVAASPAAELLEKTGIGPVTAARTLVAWSHPGRVKSEAAFAAIAGVNPIPASSGNTTRHRLNRGGDRQLNRALNIIAMVRMVHDPGTHDYVERRRAEGKTDREIRRILKRYLARSIYRHLNTASGTKLGVDEI

SEQ ID NO: 107752 - protein, 341 aa, unidentified
MQITTIGLDIAKNVFQVHCIDAAEKVVVRKQLRRGQVMKFFESLPPCLVGMEACATAHYWARELTKLGHEVRLMPAKDVKAYVKRNKNDAADAEAICEAVRRPTMRFVKVKSAEQQGRLMQHRARDLLMRQRTQVINALRAHMAELGIVATQGREGLKGLLAIIADDGDERLPIDARASLIVLAAQLQALKTLVGSIEKRIIAQHRASEESKRVATIPGIGVLGASAIAATVTDPRAFRSGRDFAAWIGLVPRQDSTGGKQKLGPISKQGDRYLRRLLVVGAHAVLRRAKQSPQNYPWLAQLLARRPFKVVAIALANKMARVAWALLARGSTYRVPRLAAA

SEQ ID NO: 107753 - protein, 418 aa, unidentified
MKKHSNSRKKSEATTKRAKSRGPVQRDTKEVLAELVGKLKEKLDPKKAAAASAGDGHPRGELRPNLDRLTVGVDLGDQWSHYCILGLEGETLAEGQLRTTQEDFATFFQGLNAARVVVEVGTHSAWVQEVICGCGHEVLVANPRLMDGSKRRKRKNDRIDANKLARLGRVDPQSLYPIQHRSREVRQDLVMLRARDALVAARTEIINTTRGLVKSMGTRLPKCSSRSFAQKGEEAVAVEMREALLPLVRLAATLSADIKEYDKKIEELGREKYGHTALLRQVKGVGPITALAYVLTLENPKRFAKSRDVGPYLGLVPKQEDSGESQPQLGISKAGDTMVRKLLVGSAQYILGPFGPDTDLRRYGLRLCERGGKNAKKRAAVAVARKLAVLLHRLWVSGEVYEPLRPGMSATMTPAAAA

SEQ ID NO: 107754 - protein, 319 aa, unidentified
MAVVVDRYIGIDVSKDTLDVSVQWMGKPRERWQCANDSDGIAACVARCMSLKPKLIVLEATGGYQDLVTADLASAGLSVVVANPRFTRRHAESHGRLAKTDRVDADDLARYAEENHPEVRPLPDAQSRAFSALLTRRRQLVDMRTAEMNRRHHAQGEVKKGLLKHIKWLDAEVKRLDDELHDVIRNSPVWREKDDLLRSVKGVATVTSTTMLALLPELGTLNRAKIGVLVGVAPMNRDSGKRKGTRRCWGGRGTVRAVLYMATMAATRFNPIIRAFYQAKLAEGKLPKVALVAAAHKLLTILNAILKTGKPWEDRLKTA

SEQ ID NO: 107755 - protein, 323 aa, unidentified
MEQKLPTTPEAMKETFSRIPRCRIALETGTHSPWVSRLLTPLGHEVIVAHAQRVQLITKSSRKDDRHDAQTLARLARVDPELLGPVRHRSVQAQIHLTVIRARAELVSARTALVNAARGLVKSYGERLPQCGTYQVSGKLAEGLSAELREVLVPLLREIESLNERIKEYDERMEKIAKEVYPQVSLLKQVKGVGTQIALTYVLTIEDPYRFPKSREVGCFLGLRPGRRNSGKSAPQKHIRKEGDRYLRTMMVQGAHYILGPFGEDSDLPRWGLQLAERGGKNARKRAVVAVARKLAILLHRLWVSGEVYEPLRNSQKAMRAVA

SEQ ID NO: 107756 - protein, 361 aa, unidentified
MSSLPATVAETYRYIVGVDTHAATHSYAIVCAPNGALIDQASFPTTPAGLRRARDWIGRRTGGDLDGVLVAAEGTGSYGAVLGDVLEEAGYRVVEAPAPSRVRGQGKTDELDAVLAARSTLVLEMTKLRDRRAGQAHTALQVLTGARDHLNIERLRCINALTARVRGHDLGIDARRALTTEQISTIAGWRSREEDLGAATARAEAVRLAKRVLALDVELAQNRTEITGLVAAEASELLELPGIGAITAAVILTVWSHPGRIRSEAAFAKIAGTSPIPASSGNTVRHRLNRGGDRRLNRALNTIVLTRMRTAPATRAYIDRRLAEGKTAKEIRRCLKRYVARQIFRTLTAAHRTQDEVPATA

SEQ ID NO: 107757 - protein, 343 aa, unidentified
MDSYVGLDVSLREVSVCVVDEAGSIQCERTVAADPDVIAALLDAHAPTVRRVGLESGPTSVWLWRELAERGLPVICIDARHAKAALSMQINKSDRNDAAGIARIMQTGWYRQVQVKSPHSHAIRGLLNSRALLVKVQRDLENQVRGLLKSVGLIIGRAKDGVFGTCTRQLLAAHADLAAIALPLLEAREAIHLQLTRLERRVRQLAKEHKQTSAFMTVPGVGPMTALAFLATVDDPTRFRRARAVGAYAGLTPRRYASGEVDWTGRISKCGDTMLRTYLFEAAGVLLTRVQKWCALKAWGLRLAKRSGMKKARTAVARKLAVILLRMWRDGTQFHWTAAPAAT

SEQ ID NO: 107758 - protein, 456 aa, unidentified
MSKRRGKAKRVQKASNQEPENLPVLNRDAAAIDIGSEEHLVAVPPGRDTESVRSFAAFTIDLHAMAGWLKQCGIKSVVMESTGVYWIAPFQVLEQYGLEVLLIDARLAKNLPGRKSDVLDCQWHQQLHTFGLLRGCFLPVAEIVPLRSYLRLRDELVKANTQSIQHMQKVLFEMNLQLANVISDITGETGLAIIEAILAGERDGKKLAELKHRRIVASKETIAKSLEGNWRPELLFALQRALDRYKFYQQQLAQCDGQISQALAQLPTRELQVQTEPEKKTEPSARGQKLTPLEAELQRIAGVDLTSIDGIGQQIAQIILSELGPDLQKSFQSEKHFSSYLGLCPGTKISGGKVLKRKSRKVKHRVATALRLAARSLHSSDSALGANFRRLKARLGAPKAITAMANKLAKLVYRLLVYGKDYFDRGAQMYEQKFRLQQIRRLQKQAKMLNLKLIPA

SEQ ID NO: 107759 - protein, 369 aa, unidentified
MENSTTETIGCDLGDKMSDVCVMDTSGRTRRARVASTRKGITTFFSREPAHVVIEVGSHSRWVSELLEGLGHRVTIANARRVKLISASDNKTDEHDAELLARLGRADVHLLAPMKHRRAAVQADLAIAKARDTLVATRTKLVNHVRGTVKSFGERLPKCSARAFARHTRALIPAALETALAPVYETIAKLDEQIRAQDKLIEVKSEANPDVAVLEQVDGVGALTALVFMLTLEDKDRFTNSRMAGAFLGLRPRKKKSGDDDPQLRITKAGDPFVRRLLVLSANYILGPFGKDSDLRRWGLKLAERGGKNAKKRAKVAVARKLAVLLHRLWVTGEVYEPLGYQARRLEDATPHAVTPAPPPSTAGADAAA

SEQ ID NO: 107760 - protein, 475 aa, unidentified
MNIKGTKKKNQVVTVNIFEQQELLKKAEVIRENLTASTWRELETNGKFGKNEKLSFVSDDMLILGCDVGSDTHYVRAIDTRGRELSKSAFLFSNTLEGFQSLMDWATKIAASNDKKQIILGLEPTGHYWFCLATWLIGNGISVVQVNPYAVKQTKEVEDNSQLKDDRKDPKLIANLVKDGNFGMPYLPEKLYADIRRLSMLRDQINEDRIRDLNRLHREMKIYFPEYKDAFGKIDGTFCLEVLKVAPFPEELVTLGVEGIRQIWHEAKLRGRGYVNATSIFENAKKSIGIQDGAESGKLAVKWFVHRMMESNEQLAEIESRLHQMCMEIPYAENILEISGIGENTLSGILAEMGDISRFDDVKEIQKLSGLGLVACSSGKHKGETKISHRGRKRLRYWLFQAAKSAVAHANEFKELHAYYTTRKDNPLKKKQSLVVIACKILRVIFAILTKGTPYDPKKMLGDIVRPNEQSVQVA

SEQ ID NO: 107761 - protein, 393 aa, unidentified
MIYVGIDIASEKHDYFMLQQETGVVFSRSAITIPNSESGYKKLHSDISAFCGATGDSKVRIGLESTGIYHTNIIRFLLEQNYDVMMINPILTNMARKAAKVHSAKNDNLDAQTICKYMIDHSDKFSPYTLSLYHKEALKSLSRKRFFIVEDLKKAKLAINSLVQVIFPEFKTLFSNIYGDSAISILKTYGTPKALARAHVSKVASLLHGRCKCTAEQLIATARSSVGISEPHYAFQLMDAIEEMEHIARRIKNYDVQIRAYVDMLCPNLLSIPGVGYTTAGLIVGEIRDIDRFHSADSLISYSGIDVTVYESGKYKAKNCMPSKKGSKYLRYALFQVARIIWQHDPVFRDYYEKKQAEGKHYYVILGHIQKKVVRVIYSILKNNSTYSVISST

SEQ ID NO: 107762 - protein, 322 aa, unidentified
MARERFVGIDVAKGWVDVVELPGGAHTQVANDPDGWAALVERFVADPPALIVLEASGGYEIGVVTSLDLAGLTPVVANPLSTRRFAQSLGQRAKTDRVDAAMLAAYGERLRPTPRPIPDATARHLRELLARHRQLTKMLVEEKNRRQQATPLLRPAIAAHIAWLEGQRDEVDRLLQSVVASDPDWQARVELLDSVPGIGPLTATIVAVGMPELGACSGKAAAALLGAAPYAVESGLLRGQRHIGGGRRLVRHALYEAVTSTIRWEPTLRDHYARLRAARKPHKVAMIACERRLVGILNAMLRDGLTWQETEVGQGRFLHAVP

SEQ ID NO: 107763 - protein, 411 aa, unidentified
MENIFPCCAGLDVHKESVEACVRRIEPNGRWHQQTRHWGTMTRDLLAMADWMAAQGVTQVAMESTGVFWKPIYNILESRFTMLLVNARHLKQVPGRKSDVRDCQWIAQLLQYGLLKGSFIPPRSQRELRDLTRHRTQLVEEKTRTANRIHKVLQDTNIKLSSVATDVLGVSGRAMLEALITGEEDPVKLAHLAQRKLRSKIPELEKALEGHLTEHHRFMLQLLWKQLAQQEELIAELDRKIEEQTRPFAAEIDRLDAVPGVDRRVAEVVLAEVGADMKPFPAHENLASWAGMCPGNEESAGKRRRRRITPGNPWLKPTLAQAAWAASHTKNSYLASQYRRLAGRRGRKRALIAVGHSILVIFYHMLKAGTSYTDLGGDFFDRLQPERLTRYYVKRLERLGHKVTLESRAAA

SEQ ID NO: 107764 - protein, 314 aa, unidentified
MTSNAEFVGVDVSKATLDVASWRSNEYRRFQNDPTGIQELIDWLKILQPELIVLEATGGLELPFVAELAYEKMPVAVVNPRRIREFARSIGQLAKTDKLDAKVIAHFGAATHPEARKLPTNDEEKLTALITRRRQIIEMLTAEKNRLHSARFSMKERIELHLSWLESELRDLDNEITKFIHQSPIWKEKDKLLRSVPEVGPVTSATILAMLPELGTLNRKKIAALVGVAPVNKDSGRRQKKRRVYGGRANVRSVLYMAALSASKHNPRIKMFYDHLIRMGKEKKVALTACMRKLLVILNAIIRVNQNYTLTPNF

SEQ ID NO: 107765 - protein, 509 aa, unidentified
MNVNTKNTKNQAQERNSEKLTRAELRRRQKAEAKMEKSKEKKKITVKAPKTQEQEVLLQDAEAIFKNLKSYTWRDLETNGKFSKNDKLSFISDDMLIVGCDVGSETHYIRAIDTRGRELSRKAFAFDNNEEGFQKAKEWSVELAVRNGKDQIVLGLEPTGHYWFVLAAWMVANGVSVVQVNPYAVKQTKELEDNSQQKDDTKDPKLIANLVKDGNYGMPYLPEGVYADLRRLSMFRDQLTEDRIRNINRLHREMKIYFPEYREAFGKLDGAFSIRLLKKAPFPKDILELGEAGIRNIWKEARLRGRGYSKAGEIVRLAKESVGLNDGMEAGKAAVKWFAEKIEELTEQLSDIENRLHQKCREIPYAENILEISGIGENILAGILAEMGDIDRFDDVKEIQKLSGLGLVACSSGKHKGETRISHRGRKRLRYWLFQAAKSAVSHAGEFKMLHAYYTTRADNPLKKMQSLIVIACKILRVIYTILKKGIRYDPEKMLKDIRIPTSRQPVAA

SEQ ID NO: 107766 - protein, 500 aa, unidentified
MKTKRSKAKIRVGQKRRSAICSKPEQKLEVLRPDAAGIDCGAEEHYIAVPPDRVGAGEPTVRCFSAFTEGLDAAVDWLKDCRITTVAMESTGVYWIPLHQKLEAAGIEVYLVNARHVRHVPGRKTDVQDSQWLRQLHRFGLLNASFRPQDIVCRLRSLHRHRDNLVSSSGSEIQHMQKALQQMNLHLHHVVSDITGLTGLRIIDAILSGQRDPEQLVKLRDKRVYKSTPRQMQAALVGDYRAEHLFVLSQSLQAYRFYQARIEECDREIEPLLEKLALQVEAASAKLELGALKPASAKDGAMTPELSNESKAGYGLKAKRKRKPIANEPKIDLAGLLERICGIDLTKVVGLNVLNVLLIVSEIGVDMSKWRSAKAFCSWLGLCPGNKISGGKVLDSRTRQVVNRVADALRLAAQSVGRTETCLGIFYRRKLAHLGAPKATTATARKLACLIYHLLKYKQPYQEPDPAIYQLRLQKSALAKLQRQATALGYTLQPTSPLPA

SEQ ID NO: 107767 - protein, 342 aa, unidentified
MKQYVGLDVSQKETSVCVVNEAGRILFEGKAKSDPGALTALLRERAPHAERIGFETGAMASWLWHELRRVDLPVVCIDARHAHAALSVRMNKSDQNDARGLAELVRVGWYREVKVKSEESQKVRAILVARSRLVAIRRDIENQVRSLIKEYGLLFPRAIGLQFRNQVSELLGEDHQLIGVIAPLLSIHEHICEQQSKFDDEVRRLAKSDETTRRLMTVPGVGVVTALTFRHTIDDPSRFRSASTVGTYLGLTPRRNQSGETDTNGKISRWGDRLLRSYLFEAATVLLYRTKKWSSLKAWGMKLAKRIGVKKAKVAIARKIAVILHCIWVDGTSFDWGQAKPA

SEQ ID NO: 107768 - protein, 402 aa, unidentified
MYSSFVGIDIGKWNHQAAFLEVSGKETARSLAFQNTSEGFQSLSKSLAPFDKGQTVIGLEATGHYWLALFSFLVDNGWTVKVINPMQSDALRKMNIRKAKTDRKDCVVIADVLRFGRYTETVLPDEDLLQLRELSRCRVAHVELLGDLKRRVLGILDRVFPEFASCFSTVFGAAPTELLQECTDPEELADYDIDKLIKLLEKESRGRHSREKAEELKAKASRSVGTRFGRDALKFELKMLLEQLDFIKSQVKELDKFLKKLMKNHELIYTIPGISVTLGSAILGEIGDVKRFGTPQQLQAFAGMDPSVMQSGNFQGTQGKMSKRGSPYLRRAVYLAANAARRFDPVFKEFYDRMIARGKHPKQALAAVGTKLLRVIHAVMTSQKPYNPQKLLPPAAISQLIP

SEQ ID NO: 107769 - protein, 415 aa, unidentified
MQIYSLGGITILNAVGIDVSKGKSTIAVLRPAGEIVRKPFDVRHTPKELSILSSYIQHLEGDTRIVMECTGHYHEPILKVLSDSGFFVSAVNPHLIKEYDGDNSLRKVKSDSADAKKVAGYTLDKWHLLRQYSAMDNTRTQLKTLNTQFQFLMRQKTALKNNLISLLDLTYPGVNAFFDSPVRKNGSQKWLDYAYSFWHADCVRTIGLKTFTERYKKFCKRQGYIFQPDKPKSLFESSKELIAVVPKDHIYKDMVLSAIVQVNLISAQIESMRLKMDELASTLPEYEVVMNMFGVCHTFGPQLMAEIGDISRFNHRSALTAFAGVNPGVNQSGKMKIDSNRASKRGAPRLRKTLFQIMQTLMQNAPADNRVYLFMMKKKAEGKPYHVYMTAGANKFLRIYYGTVKAHLASQSQTE

SEQ ID NO: 107770 - protein, 322 aa, unidentified
MNKTKMKTHSTTAKPTYIGVDVAKAELVVDCQDAIHRFENNDKGIARLLKSVSKIPSTAHLVCEATAGYEQYLALTALSKGIRISIIPAQRPRSLAKSAGKFAKSDPADARLLSKYGSFHEPKPLMPKDRARLQLDALMRARGELMDSLQRELNRTEHHRCPVVMALFKELVATYRRQIKTLDTAIAKLVAEDEVLARSEAILRKVSGVGPQTSRALLAFMPELGHIGRRSAAALAGLAPYDRDSGKMRGKRHIQGGRSQVRRSLHMAAVVASRHNSELKKFYDRLIQAGKPFKVAIVAVTRKLLVYLNSQMAKFLENPVAV

SEQ ID NO: 107771 - protein, 346 aa, unidentified
MKIMRIGVDLAKNVYQVHGVDRKEKPVWRRQLSRGKWLAAIFEKVEAGGEIGMEACAGAHHWARELQARGYTVKLIAPQFVKPYVKSNKSDRNDAEAICEAMSRPTMRFVSVKSVEQQDIQAMHRIGEELVGARTAKSNQIRGLVAEYGVVAPQSLAKLRAAIAQWLEDAENGLTDRFRGLLAGVWADLVELDRRVKELDDEIGALAKSHPVAHRLQQLRGVGPITATALVATLGSGEQFTKGRDFSVSLGLTPKQHSTGGKERLLGISKRGDPYLRKLLVHGARAVISAAKAKDDRLSQCVMRLTGRRHMNVATVALANKTARMAWSMIRNDTDYEPERAASLLG

SEQ ID NO: 107772 - protein, 403 aa, unidentified
MGWSAPNEKSGALSREETIVMLTPETQRSTLSKTASKSQDRLNEECFTMHHTQYDPARVCVVGIDLAKDHCDAVGFNERRAPVFEWPRISYPELMNRLAQLPPAAVLMEACNGAHDKARRIADLGHDARLVNAADVKAVRNTRHKNDRRDARYIATLFFLPDIKYVQVKTSAQQDRQLLIREYKGYQRIRIELGNRIHSALEQYGIPTRQGMQRLACHLTEYLDERAEKITPILRETVLRLFESWKRALADEEAAMRRLEAQAARDADAKRLMTIPGIGAIIALYMQAHIGNPHRFKNSRQAAASIGLVPRQYSTGGRDTLLHISKRGPTALRSALIQGAGSVYIWSEKLKGALGAWVCKLKASGKKYGVIICAIASKLARICWRILRDRTVYQPNWQAAHSV

SEQ ID NO: 107773 - protein, 337 aa, unidentified
MYAAIDHHKAVFQAATLDPETGVAGDERFQGSRDGLGIWMERWQGRVTDVALEASTGWRWITQELEAHGFRVHLADPAEARAKRGRTKKAKTDKLDARWLVLLLCKQDLPEAWIPPEEIQQLRAKTRLRKALADDRTRWAQRLHAVLHHEGWPCRRSQLLTKKARQRVAALRLPGAAQQQVTAYQFLIETLEAQLQPLENELRHFAEGDPRCQALMKLFGVGPIIACHLLAEIGSALRFRRARQLVRLSGLDPIVEESGERRRRGKLAKQGPPLLRWAAVEAAQHGRRFNSPDRHLWAASSRRSGPNRATLTVARKLLRRSYHVLRRIELGEQEVAA

SEQ ID NO: 107774 - protein, 376 aa, unidentified
MIKTDVQYPTVHLAIELSRSVWLVAARLPGVEKPSLHRIGGGDTAALLALAETLRARAAAKLGAPVRVACCFEAGRDGFWLHRLLTAEGLAAHVLEPTSILVSRRARRAKTDRLDALGMLRVLAAYLGGDRQVCSMVRVPTPEEEDAKRPHREREDLVRERVRLENRIAALLATQGVRERPSLRNWERDLAALRTGDGRPLPPHLRAELDRLRRRLVLTLELTREVEAERDAALAAEPRDAVGRKIAALCRIRGVGPNFAAVLTREVFYRAFANRRQLAGYVGLTPVPHQGGEADRDRRISRAGNPRARTTPIQLAWLWLRYQPDSAPARWFRDRVGALRGRTRRIAIVAMARKLLIVLWRYAETGLVPEGVEVAA

SEQ ID NO: 107775 - protein, 418 aa, unidentified
MKSMEITAVGIDVSKSKSTVAIRRPGGVIVARPFDISHSNHDLEKLVSILKTTGGNIRVVMEHTSNYWKPIALTLKEAGFYVSVVNAMLIHDFSDNSIRKLKTDRADSLKIANYALTFWNELPPFNDEDETRLVLREQSRMYERLASTATSLRNGLIALADQTFPSIDQAFGHAIKNADGHEKWVDFFSIYWHRDCVLRLSIEKFTESYRKWCLRRNYKFRTNTAHKLYALAQDAVPTLPKNNGTKALVLQACKSLNAVCEAKQSTQEEMNRLASLLPEYEVVMQMEGTGPITGPALMAEIGDVRRFKNKKALVAFAGIDAPPFQSGNFESKSRHVSKRGSPHLRRAVFLVANIILTLSHKDNSVFCFMDKKRAEGKHYYVYTIAGSAKFLRIYYARVTEYLRTQEIPVAASCLDGNS

SEQ ID NO: 107776 - protein, 343 aa, unidentified
MKLTRVGVDLAKQVFQVHGVDRGERPVWCKRLKRSRWIADLEREAEPGAEIGMEACGGAHHWARVLQAKGYRVKLIAPQFVKPYVKTNKTDANDAEAICEAMSRPSMRFVAVKTVDQQDLQAVHRVRSSLIRERTAKANQLRGLVYEYGLVAPQQISSLRRAVPQWLEDAENGLTVRFRSLLAGLYRDLKQLDERVRELDKEVAAITREHEPVRRLMQINGVGPLIASALYALVGDARQYRNGRDLAVALGLTPRQHSSGGKEKLLGISKRGDKYMRTLLIHGARSALRTAPGRTDRISRWALALAERSHPNVAVTALANKTARVAWAMLRHGANYEPERLAA

SEQ ID NO: 107777 - protein, 339 aa, unidentified
MHVTTVGLDLAKNVFQVHGITRDGTVAFNRSLRRAQMFSFFERLEPCLIGMEACGSSHYWARELSKLGHEVRLIAPVYVKPYVKRGKSDAADAEAICEAVTRPTMRFVEVKSPEQQAILSLHRARDLTVRQRTQTINMLRSLLAEFGIVFAQGVGHAIRFAKRATQEQAPELPLAAQNVVIDLSEQLLIQHGRVNWYGRQMTLAAKSDPRIALLQTIPGVGPITASALVATIGSAKQFRCGRDLSAWLGLTPINRSTGGKERLGRISKMGDRYIRRLMVIGMTSRIKQIKSAPERFDPWFADLLERKPAKLASVAMANKTARIIWAVLTRNEPYRIRVI

SEQ ID NO: 107778 - protein, 375 aa, unidentified
MVKLTRAMQNTIVHYEGATSLEGAVGKVKLSSSLIKLGLDIHAKQYVVVAQYDQLLPKAARRFWPGEFVPWVEWLLRQGHIVHVVYEACGFGFGLHRQLRAAGAHCYVIAPRKLDEQRTGVKTDPRDATILCQRLSRYVEGNTRELAVIRVPSEEEEQARHVTRQREQLVHHRQKLEAQGRSLLISQALPAPAHWWKKQTWNRLGRYLPEWMILRLEFYRPGLLSLQAQIDSLTSQLEAAAPPNIPAGLGKLTTVMLTREICDWQRFNNRRAISSYTGLCPGERSSGSKRVPGSVTKRGNPRIRAALVECAWRMVRFQPQYPPVQKRLAVLAKGSRAIGAVRKKAIVAVARRLAVDLWRVHTGRLTAQQLGLIIK

SEQ ID NO: 107779 - protein, 391 aa, unidentified
MIYVGIDVAKDKHDCFISNSDGEVLFKSFTIPNSRDGFESLFQKVQSVSDDLTKVKVGLEATGHYSYNLLGFLLDKGLPTYVINPLHTNLYRKSLSLRKTKTDKVDAHTIVSMIMSDVNLKSYSDTSYHNEELKSLTRYRFDKVKERAKLKSSVSRLVCILFPELEKLVPTLHMASVYSLLSEFPSAHDVASAHLTRLTNLLSESSKGRYGRDTAICFRDAARCSIGSHMPAKSLELKHTIRLILELTSEIDEIEAEIKTIMDEINSPILTIPGISYKMGAMIIAEIGDFSRFDSPDKILAYAGMSPSIYQSGQLDNCYAHMEKRGSRYLRYALYNATKYVCHWDESFGTYLAKKRAEGKHYNVALSHATKKLVRTIYAMEKSRQAYTNAA

SEQ ID NO: 107780 - protein, 306 aa, unidentified
MKAVGIDVGKTALDVAVHGDCAVRRFANTTAGIRRLTKELTGLGDVRIVVEATGGYEDAVLNACAQHGLWIARVNPHQARSFAKALGQLAKTDALDAHVLAEMAHALHGRMRAYTAQAAWQVELRGWLRRRHQITEAIQRTRQQCAMTLPAIRALIQKTLAALRREQVLIDRALRELLQSHATPAMRSAKGLGPQFQASMLALLPELGQLTRRQIAKLVGIAPLNRDSGQSQGVRRIYGGRAEVRVALYMATLSAVRWEPMMKAHYQQLRTRGKVAKVALVACMRKLLTIVNARRRDEILNASTAT

SEQ ID NO: 107781 - protein, 317 aa, unidentified
MTKTNTGTAGIDTAKDKLDVAVHGREQRWRVANAAAGWRRLAVDLTEAGVTKVGIEATGGYERGVVRHLRAEGFVVLVLQPIQVKNFARLHLRRAKNDALDAVLIAACTALLEPRSIEADERLTDLADHLTFVEQIEEDIARLKTRLEHIDEPRRRRLVLGDIDRLKARRLAELARIAGQLRQHADLAQRLDLVLSVPGIGERTALALIIRMPELGQISREKAAALAGLAPFDDESGKHKGERHIGGGRARLRRSLFAAALPASFRWNKALCAFYAHHRARGHAHNYVLVACARKLLIYANTVVQRGSPWVENPIAL

SEQ ID NO: 107782 - protein, 347 aa, unidentified
MNFYNNTHPYYCGIDLHARSLYVCIIDQEGNTCLHKEITASPEKLQALLEPYMGNVVVGVECMHCWYWVSDFCEDLGVDFVLGHALYMKAIHGGKAKNDRIDSFKIANLIRGGNFPLAYVYPKQMRATRDLLRRRMKIVRHGANLKAHVGNTTSQYNLPPNKVNLKNVSAREQLKCTFPDPVVQRNIDLDMVVLECYAKELSKIEWFLEQQARQHNPVHLHILKSVSGIGRILALTIIYEIGDIHRFESVQKFASYARLVKCKAESAGKSYGTQGNKIGNAHLKWAFSEAAVLYLRGNKKAQKYLQTLQKRMTKAKALSVLAHKLGRCVYFMMKNEKVFDESQFLKS

SEQ ID NO: 107783 - protein, 411 aa, unidentified
MMEDAMGGAEDIFHPSSRFTPMEHPMQKFDDLSRSLTTLEPGGTLIAVIEMSLSSWLVAGIVPGVERQRLKKLAIDESALLKLLHRWREEAKKAGRRIERIAVAFEAGRDGFWLARWLKARGIEAYVIHASSIAVSREHRRAKTDRLDTELLKRSFLGWLRGERDHCKMVEIPTIKDEDAKRPNRERDNLIGERSRIINRMKAALVRLGIRGFNPKLKRAAARLDGLRTPEGEPIPPNTQAELRRDMERRRLVSDHIRQIEEARLERIEQAPSNGPHAIVRLLARVMGVGIETADMLVHEVLSRNMRDRRAVARYAGLTGSPDESGRKRREKGLARSGNARVRRGMIQLAWRFLLHQKDSALTKWFRSRTENARGTRKPMIVALARKLLIALWRLVREGVVPDGVVMRPAQ

SEQ ID NO: 107784 - protein, 474 aa, unidentified
MAKQKDQTAAGAELTSLAVQHPKAAGIDVGDASHWVCVDADGGDAAVREFPAHTPGLRQLVSWLRAHAVTTVALEATGAYGHVLFLTLLEAGFHVVTTAPTFTRQIKGRPKTDRRDCQWIQRLHRHGLLPSVFQPDEATQTLRDLVRQRANHVRLSGQHIQRMQKALELMNLKLTQVLGDVTGVTGLKIIRAIVAGERDPVVLAKLRDRRCQHTAGAIATALDGQYRLEHVTELKLNLAMWEQYQRVIAELDQVIAKQLHAMRKQTVLPPLPPKPRVRGRKPHDPRFNVRTALYYLVGIDLTTIEGIDELHALTLLSELGTDFTKGPSVKHFTSWLGLCPNWKKTGGKVQSSKTRKGKNRAASALRLAAWSLMRSHSYLGAYLRRQRARLGAPKAITATAHKLARILYNLMRHGMAYMRKEEAAYAEQVRERLEKQLRRRAKELGYELQRIVEMVTMPDGEVLTVTPDGEIVNA

SEQ ID NO: 107785 - protein, 412 aa, unidentified
MSNPLLVGVDVHRKSNTVCLMDCQGQEIGPRFTVDNNRPGTEALIQRVAQQVVAGHFDAIHIAAEATGWYWYHLFRTLDQDPCLNRWPLKLYPFNPRLTANFKRTYVDLDHCDPIDAFVAADRLRLGRDLPAPFHYEERYFPVRLLTRYRYHLVHNLAREKAYCLAILYLKASEYTRLGPFSDLFGAASRAVLQEFASLEEIAALPFDELVEYLDRQGKRRFPDPTANARKLQQVARDSYPLPKALQQPVNLVLGMSLATITALEQQEKRLNTAIAEGMAAIPHTLDTIPGFGPVFSAGIITEIAGVERFNYDQARVAKFAGLKWRHHQSADFQAEETRLTRSGNRYLRYYFCEAANAVRMRDPEYAAYYERKYHEVRQHQHKRALVLTARKLVRLVVRLLTTNQPYQPRRP

SEQ ID NO: 107786 - protein, 420 aa, unidentified
MKVVYQTCCGVDVHKSFLVATIIKTTSGIEPSYQKKRFSTFNNSILQFKNWLLQNQCHDVCMESTGKYWVPVFNLLEDDINVTIANPKWVKAVKGNKDDTKDSKWIGDLFRLGLVPGSYIPCKPIRILREFTRYRYKLTSCRSSEKNRYQNALTVCNVALDSVVSDIFGKSATSVIDYLIEQSGNSINHEEIASRLLRSLKKKSDSVIESIEGYQMTDSQKYRMRLIRAHLDYITSTINDIDTMLDSLIAPYENAVQLLCTIPGVDRNSAITVISEIGTDMTPFSNSKRLCCWAGLTPGNNESAGKKKSVRITRAGVYLKPALVQVAHAAVKSDKSPYYKQKYERIMKRRGKKRAIIAIARMILTAIYQMLSSGEVWNPTDLYKVDMPEPLKEKQKEKAIRQAKKLLISEGIISESQLAS

SEQ ID NO: 107787 - protein, 331 aa, unidentified
MFITGQYLRNPLGYPVFTRLVKNIHNNFFERVIMNRIIIGIDISKNKFDTAYMVVNKKWQRKIFNNSSEGFKIFIKWLEEKNIEKCHAVMEATGCYGEDLANFLYVSGHKVSIVNPAQIKYYGRSLLKRTKTDKIDSQLIAEFAQRHELPFWQPLLPSLQSLKDQVRCLQAFKRDATQASNRFGDAKNPVVKKMLEDRLEHIQRQVDHLILALQNLAKEDSLIAHQRALLTSIPGVGETTALHLLGELPDLSTFKCAKQLAAFAGLNPSIKTSGTSVKGKEKISKTGSKELRTLLFFPSMSVMRGSSPIKLFVERLRGKGKKGKVRKSKEK

SEQ ID NO: 107788 - protein, 459 aa, unidentified
MEKAIGIDPDSKGYVCCLVEGAEGRTVGKAYSTICRDLDGLIRWVKSKGEVIVAIEGSNGFSRPVEQALRAENIVFYSLRPSDVSKFRKVVLGRNKNNEKDAESVARYALALQSQGKLDQFRRVFFPDESLRLLTRSYERKSKELTAEINRMWKTLRLASPDLYLALGGMNPEVEIADNVLQQKGILSLLAQKPDLYEWRNLSTEEFRAAMGGGNYRGRPKLIEELKKLSDSFSPTESGVSFLIKSSAQTILQLKSHLSEMKKMMSEITAENPAVRILQQIRGISVITSSTLVAEIIDIRRFANDDHLASYSGLGRSEHSSGDRSKMIRNPQFNHRLKDIFMTAARNFVLFNPDAHLSGYFRSLVHKKGMKATEAYKRVARALVRIVFKMLGALVEEGSEEEERSESDMASGSDFRSDISHESNISLSAPIADDIEEKRKIKREKMKIKNEEILLVEKK

SEQ ID NO: 107789 - protein, 373 aa, unidentified
MLKINPLSTLYVGIDVSSKSNYVCALDFYKNKYINSSFANNQPGAEELALKILKCLKEHPDITTIVAALESTSVYSIHIANYLSSCEELMRFKPYVFVLNPKCTANYKKSYIGLGKSDPIDAFVIADYARAGNIESEPWRGSQFLALKRLTRHRLHLVECMTREKTYLVSNLYLKFSELQMLEGDDQPFCDIYGATSSSVLMEYFSPEEILDSSEEDLIAFLAKKSRNRIKDISKTADLLKKAARDSYRLDKALYEPLNVSIASSFNCIETFKREIKVIDNAIEKEIKGLNPNAFIILQSIDGIGPVFAGGIIAEIGDITAFHSSDALAKYAGLTWKSNQSGDFDGEDTPMIKAGNRYLRYYLGEAANSKSNR

SEQ ID NO: 107790 - protein, 357 aa, unidentified
MNATTVAVDLAKSVFQLAVADEHWKIIETQRLTRTQFERWFLNREVNLVIMEACGSAHHWARWLNSLGIEVRLLPAQYIRAYVKRNKTDAADAAALLEAARASDMRPVRVKSVEQQALQGMHRIRSLWMGTRTSRINALRGFCREFGIAIPVGARTGVEAISRVLADPNTAVPDLIRGTAKLLIEEIRLLEARIAQLERELAAIAKLSPACTTLLSIPGIGLLTATALVAATSGDVSHFKDARHFSSWFGLTPKEYSSGSSLHLGRISKKGDRYLRMLLTHGARSVLRASKVAQDAGREVCGVRRWGLDVQSRSNHNKAACALANKLARICYATLRDKEPFGEIDRPSWPTGFTPHR

SEQ ID NO: 107791 - protein, 409 aa, unidentified
MERVLARCCGLDVHKETVAAGLIVPGAAGERTETIRTFGTMTEDLLALRDWLAEHRCTHVAMESTGVFWKPVYYLLEDDFEVLLVNAAHIKNVPGRKTDIADCAWIAQLLEHGLLRPSFVPPPEIRELRDLTRYRKALILDRTREVNRVHKVLQDAGIKLSSVATDIMGVSGRAMLSCLIEGKQDPERLADLAKGKLRSKMDPLRKALRGRFGSHHAFLLAEILSHIDSFDLSIERCSEQITEKLRPFAEAVALLVTIPGVDKRTAETIVAETGADMSRFPSAGHLASWAGMCPGNNESAGKRKSGKTRKGNRWLSIGLTEAALAASRSKDCYLRAQYYRIRTRRGHKKAVRAVAHSILVITYHLLSKGISYKDLGGDYFARRDPQARIRYLVRQLEHLGQRVTVESAA

SEQ ID NO: 107792 - protein, 343 aa, unidentified
MEEAQDEPLFCERAAGIDIGKQSVMVTVRVPSETRRGGRAQETREFGTTRRQLLHLADWLRSWGVQRAGMESTSDYWKPVYFLLEQQGFGCVLYQASKVKAQPGRPKTDKLDSVWLAKVTERGSVAGSFVPPEDIRRLRTHTRYRRRLTQARTAEKQRAEKLLEDAHLKLSSVISDIHGVSGRDMLRALAAGERDPRVLAEMARGVMRRKLAALREALDCSFFTEQHAFVLSMMLDNTGHYSAQIAVLDEKIAALCEPYQRQIGQLDKVPGFGAKTAQDLIGETGTDMTVFPAAGHLCSWARVAPRVKESGGRRKGGSAAGKGNPYIGAALGEAAAAAGRTQT

SEQ ID NO: 107793 - protein, 344 aa, unidentified
MDHFAGLDVSVKETSICIVDDTGRIVREIKVASEPENLLAVLANSAYHFKRIGLEAGPLSQWLYSALAEASLPVICVETRHMRAVLKAQINKTDRNDARGMAQMMRAGLYRPVHVKTLRSQKLRMLLTHRKLLLSKAIAIDNDLRGTLRNFGLKVGMVGTVKFETRIKELVENLPDLAVLVEPMLVVRRVLREQIGILHRRLLAIVRDDEVCRRLMTVPGVGPVVALTYRATIDVPTRFHNSKAVGAVLGLTCSKHQSGESDWSGRISRYGDEMMRAMLYGAAQVMLTRTNKWSWLKAWAMQIARRRGMKKAIVALARRLAVIMHRIWVDGTEFRWTREETAAA

SEQ ID NO: 107794 - protein, 423 aa, unidentified
MMKLKYSICCGLDVHKNVIVATIVITNADGISEYKQKSFSTFNSDIRKFHSWLIENNCYHVCMESTGKYWIPIFNYLENDIEVCLTHPKYVKAIKGKKTDKKDSKWIADLYKFDLVRCSFIPPKDFRQLREIARYRFKLVCMKSSEKNRIQNCMTVSNVGIASVLSDPFGKTATEIMSYLLTHTSDSIDEKAVRRLIKKGAKAKSDEIIEAIRGYNIESDQAKKLELARSHLEYLDGMITQSEVELYVRMKPYYKFVELVSTMPGMTELSSTIVLAETGVDMSIFDDAKHLCSWCGLSPTNNESAGKKKSVRISKAGDYLKPMMVQCALAAIKSKKQTYFAIKYGRVKKRRGHKKAIIAIARMMIVCIYHIVSEEKPFNPIDYEELMSPKNHIERVILNENNVFAYLESLGYDSSKLVKRNDN

SEQ ID NO: 107795 - protein, 387 aa, unidentified
MVFVGIDWSEQQHEVELQAGSGKVLKRLRVSADIAGLSRLQEAITDAAEEPSQVVIGIESNHGLLVNALVASGYRVYPINPLTSARAREGEAPSRSKSDPGDAHVLANLVRTKRQDLRPLAGDSEQAQALQVRARSHLRAIRVQQRLRSQLRSALAKFFVGALPLLGDESEDLRDALAVLSLAVSPEQGRGLSQNKLRSSLARHGRQRNLEVKAAEIQAQLRAPQLELNAPKVVSAYADEVSHLVRSLLLARSEVAQLEAQLAADFREHPDAEILLSQPGLGLVLSARVLGESGDDPTRYVNAKARKNYAGNAPVTKRSGKWKMVSRRLARNRLLADAGFLWANSALSASPGARRYYDQLRARSKTHNQASRALANWDVLPAWGQCR

SEQ ID NO: 107796 - protein, 362 aa, unidentified
MASAGLIHLGMDVSMNTIVVGVLRPGEEMPVVDRVFNDEESIRRLIGRFADRRRLSACYEAGPGGYELYRLLTSMGVDCEVVAPSLIPKGSADRVKTDKRDAIRLARLHRAGELTAIRVPTPAEEAVRDLVRARADVLDDRKRMQQRLSAVLVRHGRIWRGGSKWTAVHRQWIAQQVFAEPALNRVVATYQGGLAAREAELAAVETELATWAAVPPLAATVTRLGAYRGIAALTGMTLAAEVVDWRRFATARAFMGFCGLIPSEYSSGDRSRRGHITKAGPVGVRTALIEAAWAYQHRPGIGLTLSRRQAGASAHTLARSWTAQQRLHAKYKKMTRRGKPPGMAVVAVARELAGFVWAEMTS

SEQ ID NO: 107797 - protein, 313 aa, unidentified
MSQNNTAILHVGLDIAKASLQFDLAGQSHALTNDAKGHAQLLKLLRAHPAAHLVCEATGGYEQPVVRVLHAAAVPVSVVEAGRVRHFARAKGQRAKTDPIDAAVLSEYGRAFQPAATAAPTAQQVRLAALSTRRLQLRQTRLAESNRAEHYVDKLCVRQARQLLKALDQQMAACDTAITELIAADEALQAKADRLDAIPGVGAVTAAAVLAELPELGGISDAAVAALAGVAPYNRDSGTVTGVRHIAGGRVTVRCALYMATLSAVRYDAILKAFYLKLRAAGKKPKVALVACMRKLVVLMNRLLRNPKLQLAN

SEQ ID NO: 107798 - protein, 434 aa, unidentified
MSSTVRYVGLDVHKDTVVIAVADDGARPAEVFAEVPHESARVLARLRKLGPLETLRVCYEAGPTGYGLHRYLTRAGVSCIVVAPSLVPIQGGNRVKTDRRDARRLAHFLRSGDLTPVWVPDEQTEALRDLERARDDAKGAEKTAKHQLSKFLLRQGRRYTEGKQWTQRHWRWVEQQTFTHEAHRRVLADSIHTVQQATERVQRLERDIGELVQHWVLEPLVRDLQSFRGVALLTAVGFAAEIGDFHRFSTAGQFMAFVGLVPSEHSSGGQRRQGGITKTGNRHVRRLLIEAAWQYYRWPLRISLALHKRRQGVPQAVVDIADKAILRLGRKAHRMREAGKTPARVVTALARELAGFIWSAARTSIPRETADRGPHESVVVAATNPRRPKHVARAAARYGVDSVPPGTRGRPRGPEVATGAGLPSRDSVNTIPRR

SEQ ID NO: 107799 - protein, 347 aa, unidentified
MLIIGCDFHPGFQQVAIFDNRTGEVQEKRLQHRGEAEQFYRSLSGQPVLVGMEACGHYPWFERLLAECGHQLWLGDAAQVRASVVRKQKTDRRDAEHLLTLLRQDRFPRIWVPSLEVRDVRQLLVHRHKQVQARTRTKNQLQAMALSCGVQKKRKLWTKAGREELEKLELLPYAAARRGQLLETLDQLEQEIAQLDRQVNEEVKRRAAAVLLMTHPGVGPVTALAMVLTLGPAERFASAKQVGSYFGLIPEEDSSGGKRRLGKISKQGSSFLRFLLVEAGQTAARLDPQLKRFYRRLAARKNRSIAKVAVARKLATRLYLMLREDWTYAQLCQAVMQASPSHSVAGE

SEQ ID NO: 107800 - protein, 319 aa, unidentified
MAKIVLGIDVSKLTLDVALIFDNRTLCRQFQNSTAGFKSLAAWLESLQIKQVHACLEATGIYGEAGALFLHECGHLVSVVNPLRIKGYAQSNMQRNKTDRLDARLIADFCQTQKPESWQPPSSEVKHLQSLVRRVEVLEEMRQAEENRLTNAAPQIKSSIERIITLIKEEIGELERQIKQHISQNSNLKEQSELLQTIPGIGARTANLLLSEIEFDRYDSARAIAAQAGVTPRKKQSGTSLKQTSLSKLGNARIRRALYFPAIVARQHNEIVKEFAKRLKKNGKTPMQIVCAAMRKLLHIAFGVLKHKRAFDASLAFTA

SEQ ID NO: 107801 - protein, 371 aa, unidentified
MKRILYVGMDVHKESYTVCSYSFDKDALEYRQELAPDYKMVLKYMEQLRKRTGDDIEFVCGYEAGCLGYTLYHQLTSRGVKCVILAPSTMGITNTGRIKNDKRDAGNIARCLAFHTYSEVHVPTADDEAVKEYIRMRDNQKKALKIVKQQILALVLRQGYRYDLGKNYWTQKHIAWLRLVKLVGVLQEALDEYLITFDYLRDKIERLDKRIEELADAERYQESVKKLSCLLGVKTHTALSVLVEVGDFKRFAKADRLAGYLGLVPGEDSSGSKQRHTGITKSGNSHVRRLLVEAAQSYTRGAIGHKSVALKKRQAGNSPDVIAYADKANERLRRKFYRMVLKNKTHRNVAATAIARELACFMWGMMTDNVA

SEQ ID NO: 107802 - protein, 401 aa, unidentified
MKRLSGGIDIGGDFHQMIILDEQQQVLYQKRIPQKLKEMKQIMKELTCLEKKEKAQLSFVLEGKNGYSNPLDRLLLAQGFTLYNVDNYKLKRFREAFAGERKDDNRDALMLSKMLNLKEHINTPTEKVFIEITKPSVITESLKLLSRHQQVLIEEKVRLTNRLGKKLLEVCPELLTLGKLNNQKIIAILARYPDFSRYSRITLKSLLKIRGIGEKQAPHLLAGLHDLTYMPGLTSIYKTIISSHAKRISQLQKEIKEIDKKMDQIGGQDKTIQHLKSLPAVGTKLASRFTGEIGDINRFPSEKNLAIYCGIACVNNSSGKTNKTKAVYKANKIAKQTLMMMAGGSIRVNPQCRDYYLKKRMEGKRHNHALRCLARQMIKVIYRMLTEDRDYQIKREAMKVA

SEQ ID NO: 107803 - protein, 319 aa, unidentified
MENISQWVGIDVSKATLDVYIRPMGKAFQFANTETEIANLVKQLQSNDLNLIVLEATGGLETELIIQLQAALLPVALINPRQGRDFAKATGKLAKTDAIDAQILAHFGEAMKPEVLAIESEMSRQLGELISRRRQLVEMSTAEKNRRDRARGKALTDIESHIDYLEQHLQQLNQEIETLTQNNQQWIDKVNLLKTTPGIGQVISTTLVSDLPELGQLTAKQISRLVGVAPINHDSGQHKGKRMINGGRAHVRAILYMGAVVAMRHNPVIKTFYERLVERGKPKKLAITACVHKMLVILNAMIRDHLPWSISQDSQPISA

SEQ ID NO: 107804 - protein, 345 aa, unidentified
MKTKHPIIIGIDTHKATHVAVAIDTQGARLAALSIPANTKGYLELERWSCGLGSVQAFGIEGTGSYGAGLSRSLLSQEHNVVEVTRPNGQLRYTHGKTDSLDAEGAARSVLAGQATSRPKTQTGSSEMIRHLKIARDTAVKSRSQAMVTLKTLIINAPADLREVLDQIKGKVALIRHIAAFRPGEIHNTLASAKAAMRALARRWLFLHEEILGHDKELERLVTKRAPDLLASHGIATMTVAEMLILVGDDPTRIRSEAAFAKLCGVCPIPASSGKTHRFRLNRGGNRQANAALYRVAIHEPTLAYVKKRTKDGKSKSEIIRCLKRYIAREIYNKLCVLKSMEIAT

SEQ ID NO: 107805 - protein, 356 aa, unidentified
MKKFLIGIDISKEKFDVTVIKSLGEGFECEQVHYDVYDNKVRGYSAMLKDMTTLGVRCGDSLFCMETTGAYELHLCDYLYGKGYDVWRESALQIKWSTGVAKSQNDKADSERIARYALRHQDAAVLYVPVNETLRTLKALSLYRERLVDERRAKEVSIKEIRATQKMNGDLQWIRTNSEQSVKRLKKDIMECEERIMAVIEGDEELKRTYGHITSIKGIGAVNAVAMIVSTGNFKTIPTARKAASYYSIAPFFAQSGSSVHHRKNVSNLSNRRLKGTLTQAAMCAKRFNEDMKAYYDRLLAAGKPRRVAVNDVRNKLVRIMYALVQNDCDYEPKHEVRRTERVLQTTERHIDKAVG

SEQ ID NO: 107806 - protein, 400 aa, unidentified
MLSIGIDVSKGKSTVCGMKPGGEIVYTPFEVQHTREGMSELLSLLRGSGEEVRAVLESTGSYHCPVVAALLENGIFVSVVNSLRMKRFCSQSIRRVKTDQIDAMQIALYGLAYWQELQPTRLPENTYRELQLLARQYYQMTSLLIKAKVDFNALCDQVLPGMQELMNDHAGRHKLSDFVLRYHHTTHILEMGETRFRKDYCKWAEKKGYRNCERMAALIFATAQNGIPVLPNAPSTQIVITEAIRVLHTVEASRDAILTQMQALAKTLPEYSLVREMPCIGDTLAPRLIAEIGDVRRFHSKRALIAYAGIDAPPYQSGKFCANNRHISKRGNRYLRKTGYEVMQSYVMHKPANDPIFTFIEKKRGEGKSGKLAMVAGLNKFLRVYYGKVTELYRSLPAIE

SEQ ID NO: 107807 - protein, 366 aa, unidentified
MKKISTVQTLRNEILKKQKLTIGMDLGDRWSCYCILDEAGTIILEQKVAMTPEAMKQTFSKIPRSLIAMETGTHSPWVSRLLAELGYKVIVAHAQKVQLITKSNRKDDRHDARTLARLARIDPELLGPVRHRSAQAQIHLTVIRARAELVRARTALVNAARGLVKSYGQRLPKCGTRQVSRELGAGLHAELREVLEPLLQEIESLNERIQGYDVRMEKIARESYPQVELLKQVKGVGTQIALTYVLTLEDPHRFPKSREVGCFLGLRPGRRDSGESQPQMHISKEGDRYLRTMLVQGAHYILGPFGEDSDLRRWGLKLAERGGKNAKKRAVVAVARKLAVLLHRLWVSGEVYEPLRNSQKAMSTAA

SEQ ID NO: 107808 - protein, 425 aa, unidentified
MKITQNLREIKPNQGLDVSVDVHKDTLNFFFSLEGKEYRDECPNHTRSIEKRLLKYHGIAQEQGIQRLRLICEPTSDYQNKLLRTARRQGHLTCLVNAESVYKFRVVETNDTGKTDTKDPKVIATLGRLNKVIRHRVLSDDYLVLRKLGRIYDELESEITSLRCRIDKLLIELFCDFSFTKDFLYGTSGNVLIDRFGCNPYRIIDTGYEAFASTMRQAVPRIRLESLQRLWQDAGSSVLNELPAGYRDVLEEQFRDLVAAFRNRETRMEQIVEQMKIVLQRIRDDDPRIPPPTAGVISEKNLARLLAETGPIGDFRNWRQLMRYGGLNIRMRQSGKYTGKNRISKKGSPLLRKVLNHIVLPLVRQNCLYGAYYHKKREVDKMPGTKAMTIVARHFLRKFYGWYKSGAVFDEKRFFASEREYLKAA

SEQ ID NO: 107809 - protein, 344 aa, unidentified
MDHIGIDVHKNQSQVCIFKGSGERIEQRILTDRVRFAEVFGGRPGARILLEASTESEWVARCLEELGHEVIVADPNFAPMYATRSRRVKTDRRDARALAEACQLGAYRPAHRTSDAQRLVRADLAIREALVRTRSRYISVVRSLLRREGLRGRGGEAKTFGRRVGELEVPRSLSSAIEPLLVVLEQVNQQIDHADRELARRVEGDPDLRRLTTLPGVGPVTATTFKATVDDVERFRGAGQVAAYLGLVPRERSSGERQQRGRITKAGNSRARSLLVEAAWLILRSKRSDTIALRTWAERVAARRGRRVAAVALARRLSRILYAMWRDDTGYAPEKIHRPAAQAA

SEQ ID NO: 107810 - protein, 341 aa, unidentified
MKIIGCDFHPSYQQIATVDTETGELWEGRLEHEQGEARRFYQALQGQVVRVGIEAVGNSQWFEQMLAEMGHELWIGDAAQIRRLVVRQQKTDRRDAQHILDLLMDGRFPRLWVPSQQMRDVRQLLRHRQKLVEIRTQVKNQLQHLALNQGVRRKRRLWSAQGRSLLEQLPLQGWTARRRSDLLAMLDRLQEQVGELDGAVRAEAEQRPEVRLLMTHPGVGPVVGLAYVLTIGPTTRFPRGKQVASYLGLIPKERSSGGRQSFGPISKQGNTMMRTLLVEAAQTAARFDEELRRAYGRLKAKKHSAPAKVMVARKLAVRMYWMLRENKSYAQLYAQRPVARM

SEQ ID NO: 107811 - protein, 411 aa, unidentified
MHNRQNYLYVGVDLHKEHHTAVMINCWQEKLGEIQFENKPSAFSKFLLEVETYVSDGLSVVFGLEDVGGYGRALAKYLVDHEQVVKEVNPALSFLERKSQVMIQKNDSWDAVCVARILINKLNQLPDAKPNDLFWSIQQLVSRRNALVKAQSALKNQLHIQLNHHYPSYKKFFSELDGKTALAFWEQYPSPSCLEGVNIKRLTAFLLDVSNNTCSVRKASEILRLVKEDGQTMKEYQEMRNFLVRSIVREIEFKKKEMKYIERELKQLVNLLDYQLETMPGIELVTASALIAEIGDVRRFPNANKLARFAGIAPVYFGSGGKGKTHKSKQGNRALHALFYNLAVQQVQVAKGSKLPRNPVFHAYYQKKLKEGKTKGQALVCIMRRLVNIVYGMMKYKIAYELPVVEEKEVV

SEQ ID NO: 107812 - protein, 339 aa, unidentified
MCKAGTKGEDQALFANIPERRRKMKPSESEVFIGIDVSKDHLDLAVLPSGQTWRTPNRPEELSALAGRLSALSPALIVLEATGGLELPALTALAAEGLPVVAVNPRQIRDFARALGHLAKTDRLDSLVLARFAQSVRPALRPIPDQEALLLKELVSRRRQIVDMIVAEKNRRASTLPPLHPMIDAHIRYLEAELKRLDQEMNQRIRQSPAWAAKEKLLTTVPGVGPVVARTLIAALPELGDLNRKEIAALVGVAPLACDSGQFKGKRRTWGGRAAVREKLYMAALVGIRVNQTLQAFYLRLLQHGKPKKLAIVACMRKLLTILNAMVRNQQPWQEHLAS

SEQ ID NO: 107813 - protein, 383 aa, unidentified
MKENTTAKSCQETLAKGQQKRVRQLAVKGKLTVGLDLGDRTIRYCILDEAAEVVSEEQVPTSKIGLDSLFAKMPASRIALEVGTHSPWVSRHLASMGHEVIVANSRNVKLITQSVRKNDRIDARQLARLARADPKLLSPIRHRGEAAQMDLAVIRARAELIAARTKLISSARGLVKPMGARLKKCDADQVTARLGASLSEGAQAVIGPMLKTVEGISEQIGKYDKQIEEIAKRYPEVKLLQQVYGVGPLIAVTYVLTLEDAERFAHSRDVGAYLGLTRKQRDSGESQPELGISKAGDRLLRSLLVQGAHCILRKGGPESDLRVWGLGKMGKGGKRAKKRAIVAVARKLAVLLHHLWATGEVYDPQYNRKAAEAKAKGKGEVAA

SEQ ID NO: 107814 - protein, 414 aa, unidentified
MEKNCRIAGIDVHKKMLAVVAAEGSSEGQLRFERAKFGTTESELLRMANWLKERNVGEVVMESTAQYWKPVWQQLEGQCQLYLAQAQSNRGPRGRKRDFVDGERLVRRQMAGELILSFVPDGEQRLWRIMSRTKYQLRRDRVRLHNQLEAFLEEVRIKLSSCVSDLLGISSRRILEALSEGESDLQKLAAMVDANLRATPEQLQDALQGAKQLSEPHRQVLGLFLARLKLIEEQIEALNSNLGQSLRQYNDAVVRLAEMPGLGVDSAQQVIAEVGPTAATFPSPQELCSWVGTCPGKEESAEVSKSNRSPKGNRMMRRLLNQAANAAVKTKGSIFQNLYRRWVPRLGHNKAIWAVANRLCRLVWKILHQGDRYIEYGNRPNPKTVKARAKRMIRELQALGYQVQIVPPAEPLLS

SEQ ID NO: 107815 - protein, 416 aa, unidentified
MEVVVARIAGLDVHKETVMACVRAPGVAGKRQQVVREFSTYTAELAQLRDWLAAEGVTQVVMEATGVYWRPVWHVLEDHGGWELMLVNARHVKNLPGRKTDVSDAAWLAQLGECGLLRGSFVPPPVIAQLRDLTRYRKKLVEDRAKEVQRVQKVLEDAGIKLESVVTDVMGKASRRMLDALIAGERDPDVLADMALTRMRPRIPELRHALLGRFDEHHALMISMHLAHVDHLSAGIDRLDAEVDRVVVPFSDQVRRLMTIPGVGKRTAEVVIAEIGADMGQFPTAAHLASWAGLCPGNHESAGKSSSGRARKGNGHLRVALCEAAWAGVRKNDSYLGAQFRRFQRRFGKRAEGKAIFACAHTLVVMIWHVLAEPDAVYEDLGTDWFSRRGDSAAHTRRLVRQLERLGHQVTLTPAA

SEQ ID NO: 107816 - protein, 352 aa, unidentified
MSEHSKESVVTVVGIDLAKRSFHVYGADGHGKQVFSKKLTRARLSLFMANLPACTVAMEACGSAHHWARTFRTYGHEVRLIAPQFVKPFVKSNKNDAADAEAICEAAQRPTMRFVAVKTVEQQDIQAIHRMRSLMVERRTAQINQIRGLLLEYGIEIAQSRAAVGRRLPEILEDADNGLSARFRAELHELAEELRHLDTRVSHYDEQIEEIARQDAQVQRLMTIPGLGAKGATALVAAVGEDPRLFQNGRGLAAWLGLVPRQHATGGRERLLGISKRGDVYLRQLLIHGARAVLRWVERKEDHTSRWATALKARRHTNIACVAMANKITRVAYAVLTTGKPYDPASGALAKG

SEQ ID NO: 107817 - protein, 322 aa, unidentified
MRYIGIDVSKATFVVAYSSDKGGEIRTFNNTTTGIKQFIGALPKDSSIHCVMEATGNYSALLLYMLNVAGITVSMENPLKVKNFAKAMLSTIKTDKSDARLITLYGEKMNPRPFKVQGEAILRLRQKRTVIRQLTKQITAMSNLRGSLACLPVPDKGATHTVDETIEFLEKRRDRLQSELTDLVEVEFSRQLALLTTIKGIGITLATALIITTGGFTYFQNAKQVSRYLGICPTYEQSGTSVNIRGHINRNGDAYTRGLLYVAAWTASRFNTKCGETYTRLRQNGKPGKLAMIAVANKLVRQAFAVVTHDKEYVDGFVSNRP

SEQ ID NO: 107818 - protein, 324 aa, unidentified
MKDRNCSSLKDCGEACFVGIDVSSEQLDVGVLPGDEFQQFKNDSRGIKRLVKFLGIRNVELIVMEATGGYEIDVAVALHEAGLPIVITNPRHVREFARSLGILAKTDKIDARVLSRFARDVRPEKRSFPSEKERFLRELLTRRSQLVGMHTAELNRLKQARSEDVKQSVQAIIDVIEKQLHAVEEEISQAMQTCSTYHDKNRILQSIPGIGPTVSQTLLIDLPELGVLNRREIAALVGVAPINRDSGQFRGKRTTWGGRSRVRSALYMAALVAARHNPTIKDFYQRLRDAGKPAKVALTACMRKLLTILNTMIANETSWKEVAV

SEQ ID NO: 107819 - protein, 456 aa, unidentified
MAQKTARKLISYKSTRFCRMASPCRFLRIFFWRNAMFKIFRKNCCGLDVHKTWIYACIGITDENGRTEYKQSRFTSFTKGLRELADWLALHECKEVCMESSGKYWIPVFNILEETCWVTLAHPKYTKPQRGNKTDRKDAMLICDLFMCDMIKPSFIPPPDIRHLRDLMRYRFKLTNILTGEKNRAQNCLTVSNLKIDDVFSDVFGKSALSITKYILDHPGEKFDVTPFVDSRCKTPIEEIQDAVDGSISREQAAKLREILKHIEELDIHKKNLEAEILRLAEPYQVALDFIRTVPGFSNNPMTAIAVLSEIGADMSVFPTAKNLSSWAGCCPRNDSSGGKRKSTRISRAGVYLKPLLVQVANAIVKSDKYPEFKERYRRLKARRGHKKAIIAICRMLLTAIWNILSKLEPYSAEGYFASLDRTASPSKTITTAQALNLMRLRGYVIKDDILSPAPA

SEQ ID NO: 107820 - protein, 426 aa, unidentified
MNEELIARLSRRYLALDIHKHYSVVAGVNFEGQVVLEPVRIEHADLENWLAKHIQPTDYVVIESTTNAWHIYDLLEPLAEKVLVANPIKVKQIAQARVKTDIRDTLILARMLAANMIPEVWVPPVHVRNLRYLLSQRRQLVGMHTQTVNRMHSMAHRHHLSHPRGKRFNEKNTRWQQDDELSDSEKFQLELDMSTKEHLAEQRDKVTKKLARMSQQKPWAESMMYLMQLPGFGVITGMTVLGAIGDITRFKDFKKLSSYSGLIPGVEQSGVKNRGKKRCPEPVEGITKEGRKDLRWAMVEVAQRAVKSDPLWKHRFNELQRRMHRNQAIVAIAHRLLELVWYVLSRRQPYRHFSHERIAYKYLTWSWQLSDKDRDGLTRQQFTRYYLMRLGIGHALEQIALNPRYRRRLASEAELLALRPELNQTE

SEQ ID NO: 107821 - protein, 368 aa, unidentified
MKVVYPVCCGVDVHKSFFIATIISTTSDIQPNYSRKRFSTFNNDIIRFADWLSLNNCNDVCMESTGKYWIPVFNILESKNINVTIANPKWVKAVKGNKDDKKDSKWIGDLFRLGLVPGSFIPSKPIRVLREFTRYRYKLVSMKSSEKNRFQNAFTVCNIGLESIEGYQITKEQKLRMNTVRSHLTYIENSIKYLDDTIDSMVTPYESLIALMCTIPGIERKSAITVISEIGNDVSLFGSSKRLCSWAGLTPGSNESAGKKKSVRISWAGVYLKPALVEIAHCAVKSTKSPYYKSKYEKLVKRRGKERAIIAIVRMILTAIYNMLSTGEVWNPCDLFKLDMPDKLKAKQEEKAVKQAVKFLEKRGYLVS

SEQ ID NO: 107822 - protein, 440 aa, unidentified
MNDLRVLDAHAAFVDVGSEQMFVSIAGGSPEVFGTVTSQLHALRDWLLTHQVRSVAMEATGVYWLPLYAVLEAAGLEVLMVNGRQMRNLPGRKTDMQDCQWGATLHAHGLLHAGFVPPAHIRRLQDYLRLRADHITSAAAHVQHMQKALERMNVKLHQVISSLTGTSGLAVVRAILRGERNPEQLLALCDTQIQRAKAQRVKESLRGTWAEEHLFALRQALASWEHYQNQIAECDRQIEALLPASADDHTPPNTAVHTRPRKRAGPNAPEIPQLSEILTQMCGGQDLTRLPAHTEYSVLQIVSEVGTDLTKWATEKHFTAWTGLAPGSHQSGKRKGSVKRQRNRAGRMFCVMARALARSKDIALGGFYRRMAARRGGLIANIALARKLAVLFWRVMVKGTDYVEHGLAQYEAKVLQTKQRALRRLARQLGQQLVPSPVPT

SEQ ID NO: 107823 - protein, 340 aa, unidentified
MELYAGMDLHSRNTLVGVIDSSLKRVFEKRVPNDLCLIVDKLEPFRSRLKGIVIESTYNWYWLVDGLMEAGYSDVRLANPSAIKQYEGLKHTDDRHDAFWLAHLFALGILPEGYIYPKEDRPVRDLLRKRSFLVKHRTAHILSLQSMLEREKAYKLKGNEIKSLKVDDVERIFCEEHLVLSAQANRASIEFFGHHIKRIEKAVRKRVKLCKSFEYLLTVPGIGDILAMTIMLEVGDIARFARVGNFSSYARCVSSQRLSDGKKKGQGNRKNGNRYLAWAFVEASHHARRYNDRLRSYYQRKLAKTKQAVATKAVCNKLARACYYIIRDQVAFREEALFCS

SEQ ID NO: 107824 - protein, 352 aa, unidentified
MTKITTIGLDLAKKVLQVHGVDVEGTVIVARQLRRKEVLAFFAKLSPCLVGMEACGGAHYWAREITKLGHTVKLMPPKYVKAYVKRGKTDAGDASAICEAVTRPSMTFVPVKSIEQQGLSMLHSVRSQLVSQRTQLVNAVRGHLSELGIVAERGVLGLAELAEIVRDKSDERLPVAARSALLVMVNQIETLGAEITRVDTALRKENKATDLGRRLETIPSVGPVIASAFRARVTKPELFKNGRHLAAWIGIVPENDSTGGKPKQKGLSKKGDRYLRALLVSGAMAVVRQARMHPDKHAWVASLLARMSAKQAAIALANKNARIAWVIMVRGGVYEAGHRAPAYRDAALSAVA

SEQ ID NO: 107825 - protein, 380 aa, unidentified
MLFSNNVMDARFPKRHQCAKVELLINHQRKGASEMKITTIGLDLAKNIFQLHGVDERGKPAARRAMKRDDMLPYFANLEPCLIGMEACGSAHHWARKLIALGHTVKLMAPQFVKPYVKSNKNDARDAEAICEAVTRPSMRFVPLKNVEQQAELSIHRARQGFVKARTAQGNQIRGLLSEFGIVIPKGIAHVYKRVPEILEDGENGLPGSMRHLICRLTDNLKVLDEQVVVLEKEIKQWHAGNESSRRLAEVNGIGPLTASAMVSTVGDAKNFDRGSQMAAWIGLVPKQHSSGGKTVLLGISKRGDTYLRTLLIHGARAVIRHAQNKPGYADSWLGKLIARRGKNVAAVALANKNVRIAWALLSQESKFRSDYATVQPTVA

SEQ ID NO: 107826 - protein, 343 aa, unidentified
MQSISTIGLDIAKSVFQVHGVDAVGQVVMRRQLRRRHVLTFFQKLPPCLVGIEACASSHYWSRELQTLGHTVRLMPPAYVRPYVKRHKNDATDAEAICEAVARPSMRFVPTKTVEQQSCLMLHRARHLFIRQQTAVINSIRAYLAEFGIIASVGRRGVEQLLEVVADKADYRLPEVARACLAALGSQLRAMKTQILEFDRRIIAWHRSNATSRRLDAIPGVGPALATALFASVADAKAFRSGRDFSAWVGLVPKQNSSGGKDKLGSISKQGDRYLRSLFTAGALAVIRYAKIHGTGHRPWLTALLARRPTKVAAIALANKLARMTWAMMAKNEDYKEPAALAA

SEQ ID NO: 107827 - protein, 354 aa, unidentified
MNTVKYIGIDVHQATSVFAIRDSRGNIIGESILKTEPTTIIDFLKGQRGTVRVTFEEGTYASWLYDVIKPYVSKVIVCDPRKNKLDENKTDRIDARKLAELLRLNALSAVYHGEQSNQTLKEYARSYLSLQQDSTRIMNRLKAIYRGRGIGCRGTAIYRPKNRKEWLDKLKDTGAQCRAERLLKQLESFGKLRLEAQRDLVRESRKQKDYKILKGIPGLGLIRIALIMAFVITPHRFRNKRQFWTYIGFSVVRRGSSEYEINEGELKRKKRKPLPRGLNNNYNHVLKDVFKGAALTAAYRGKFKKLFEQRVADGAAENLALLTMARKIASITLAIWKKGERFDIKRHQLSEQKT

SEQ ID NO: 107828 - protein, 461 aa, unidentified
MDETSKDSIEHDEVDGFPVLRTNVAGIDLGSESHWVCAPTVDGKGREVKEFGATTPELEKMAAWLEERKVVSVAMESTGVYWIPPQEVLERHGLEVVLVDARELARVPGRRKTDRLDCKWIQRLHSCGLLRGSFRPKEQINMLRTLVRDKGTLVAERADWIRRMQKSLDQMNVRVHRAVADIEGKTGMSIIRAIVAGERDADALAKLRDPRCRQSVEQIAEQLSGHWREDHLFSLTQALKMHDAIEERIQAYEKEILRKLAEMEREDCRQQEAPKLRNRNKAKLIQQRGEEPMRQALYRMSGVDLTGIDAIGVGAVQAVLSEYGPDLSCFPDENQFVSHLTLAPKRAITGGKPVKKKRKRGSASTRVAEALRMAATSMRHSQTALGAYYRQIARRIGADVAVFATARKLATLIFRMLRWGQPYVDEGAQAYEKRYREARLRRLTASAADLGYELILKPAHA

SEQ ID NO: 107829 - protein, 348 aa, unidentified
MDIVGALDVHRKQITFDYIEMDSGEVHRGKIRPANRQSLRSWLEHFSEQFPEHEAAIAVEATTGWRYVIEELQRAGVEPHLAEPAETKSLQGRKKRAKTDRLDAGHLRDLMVIDRLPESWIPPDHIQEIRTLMRLRHSLIEERTTHKQRIHAQLFHNGYPQQNNLDSIEGRAHLEEMELPAAARQVVALSLKMIDHINEELEPIEAQLRAYAGSQAGCQALMEHYGVGELTSVALLSELGDTRRFSSSKQAVRYAGMDVTVHSSDEKRAAGKLSRQGPPVLRWAAFEVAKRAWGKGSPDHDYYLKNKERIGANRAALSIARKLIRRAHHTLRELGEEAMSEPLPSSSA

SEQ ID NO: 107830 - protein, 422 aa, unidentified
MHADDKLAYARTFRVHVGVDTGKTFHMLVARGPDGRRTKAMTVPVSRAGFDAADAHLTTLFPNVPREGILVGIEFAGHHGQTFAADLHRRGYAVVTVLSAVTKRLKELEDNSPRKDDAKDASLICRLVSDGLFVSYALLELRAIALRAIATERQRLAVEETRLKNRLLSVLDVVWPEFTATFANVKHCTPIALLRLWPTPTELAAERPARVRALIRKVSQNHFTPERINTFLAAAASTIGVADDRGARRHEIRRLLARWTIVRLHIGAVEAQLAELAREIPAVGALTTVPGVSVVCASTLVAELGTPASYVSPRQVLKLAGMNLAGKESGTSVRSRIRQTKRGRPALRRQLFLLAGRCCRKGGLCHEQYVALVARNGGSKVSAICAIARKLVPMLLHLMQTAEPFDAARWQVLQRLSPYRAA

SEQ ID NO: 107831 - protein, 315 aa, unidentified
MNIVEPPAHPVHIGIDVAKATLQVDLQGKSRKLPNTPVGHQTLLGLLPESAFIIMESTGSYHIAALEFLQAAGIPVAIVNPVRVKQFGKARGTLAKTDPVDAVLLSAFGQAFLPSPTPPRNPERVLLGELVNLRDTLGAQVTMWNNLLEHQQSAVARKLSAAQARAAAKAQADVEARIAKLIQQSETMAPVAKVLQQCKGVGIVTSAVLVAQMPELGRINRRESAALAGVAPCANDSGLHAGKRMIRGGRPRIKRALYLAALSAVRYHPTLSPAYKALRMKGKPAKVALIAIARKLLVILNAKLKEYYATLAPAV

SEQ ID NO: 107832 - protein, 472 aa, unidentified
MSKKDKSRSPQTKRRVSNKPLPVQLMERINANAAGIDCGATHHYVAVPEDRDDEPVRHFKTFTDDLHALADWLLHCDVDSVAIESTGTYWIALYEILQARGLDVTLVNARHVKNVPGRKSDVSDCQWLQWLHTVGLLRASFRPDAQIVSLRVYLRHRQTLVEGASDHIRRMQKAMVQMNLHLHNVLSDITGVSGLRIIRDIVAGIHDPVQLAQHRDRRCRATIEEVQASLTGHYREEYLFALRQSLELYDIHQRQMQVCDEHIERLLQALAVSVPEPEPPSAPARRGRRKVSANAPTFDLRERLYQLTGGVDLTRIDAIGPYAALRLVSEIGTDMSRWPSEKHFTSWLTLAPQNKITGGRVLSSRTPRSANRAAAVLRMCVMSLIRSNTALGAFYRRVAYRTGKAKALTATARKLAILVYRALSGTLVYEDPGAEAYEQQHKARVLATLRKRAQRLGFALVLDDAPQSASVS

SEQ ID NO: 107833 - protein, 367 aa, unidentified
MEKSSTAYVGMDVHKESVDIAIADGREARLFGRVGGDAAALERAVRKIRSVHRDVMFVYEAGPCGFWLYRRLAAQGLRCMVVSPSMTPRRSGDRVKTDRRDALMLARLARAGELAPIYVPDAKDEAIRDLVRAREDAVCMQRQARQRLQALLLRNEIRYVGRSAWTQAHRRWIAHLKLPDPAQQIAFEEYVTAVEEGTRRLERLEGSISAQLAHWRWRPVIEALQALRGVSSIHAVRIVAELGDLSRFESPRKLMGYLGLTPSEDSSGGRRRQGGITKAGNSSARRAFIEAAWAYAHPARVSWVIARRHTGLAKSVTDLAWKAQLRLCARFRCLAARRLPRNKVVVAIARELSGFVWAIARQVKPLA

SEQ ID NO: 107834 - protein, 341 aa, unidentified
MEYCGIDLHAEYSQICILDESGEVMETSRVRTSRKALERFFSRGAMRVVMEAGGSSPWVSRLLASLGHDIVVCSPRRVRLIAESKLKNDRVDAEVLARLVRLDPEFLGPIQHRSEEAQLLRANLKVRSAMVEARTKWINNVRGLLRSFGYKVSGKVPHTFVERLNRIELPSELRAVIEPLLEQLNLLSSEIKRRDEQLEEMIKDLPEVAHLREIPGVGPVVAAYFVLTIDDPGRFRNSRDVASFFGLRPSMRESASMRHFGRITKEGDPEMRRLLVQAAHACLLTKADSELKRWALALAERKGRSKAVVALARKLAVLMHHLWVTGEVYQAFPNNGSSRAA

SEQ ID NO: 107835 - protein, 362 aa, unidentified
MEYFAGLDVSVEETAICVVGDDGTVVLQTAVETDPAAIGEALRRYAGRLRRVGHEAGSLSPWLHAGLLAIGIPAVCLETRHVRAALSAQRNKTDAADALGIAHIMRTGWFRQAHIKSENCYRIRLLLVQRRNLKRKFLDLENAVRHSLKVFGIKLGKVGRGSMEKAVREAIAGDPMAAGVMECMLRARAALWAEYLILNKLVVQIAMRDELCRRFMEIPGVGPVTALSFSSAIDDPARFRRSRNVAAYFGLTAKRWQSGTSIDVQGRISKAGDPDVRRALYEAASAMLTRFKGRDTVKTWGLKLAKTKCHAKARVAVARKLAVIMHAMWRDGTFYTGDPDASAHDVAAWNAAKVQRLSIAQS

SEQ ID NO: 107836 - protein, 478 aa, unidentified
MEEQDGQMAPRRLVGIDLGIASRHSVRVLEADGQVVCRSSCVPTVASLSAVERAALAGAPEGTRLEVVFEPTGPAWMPVAVFFARRGHAVFRVSSAKAADLRRFLRRHAKSNGIDAETLARLPLADPRGLQQLELPGPDAAALDRRVRACARLTQAGSKHKVRIKDLVRQLLPMTPLTGDLGKADLAVLERYAGPGALVAAGEAELTRLITTTSNKQQGQERAGQWLAAAASAIELYGDYPGVPFEELAAEVATEVRLLKAIQAELAVHAAARERHYLQVDPGQLARSLPGFAEISAPVLVAAMGRPGRFRDGARFKSYVGLAPRASETGETDRKGQPMSKAGPSLLRSAFVRAADTARRQDPQLAKIYYQQMTERGATHLKASCVVASHLAERAWAVLSRGTPYVICDNQGSTVTAAQAKKIIAEKWTVPEEVRKRRRSRKMAGKAPQAATTGPHRRGDPPRPRSSPHRSQAVKTAT

SEQ ID NO: 107837 - protein, 422 aa, unidentified
MLGIGIDWAEEFHDVAFGTPEKGVVEQFRISHGPDGVGALIDRALRLEPDPAEVRVVLETRHGLLVEALIDAGFTVLPVNPDLVARRRGPARKKDDAEDARICCLLALDRHAGLKALVPHGEFGGELRAIARDDERAARDQRRLLNRLRADLQTTYPAALTLAGADLGAPTVLRLLQRWPTQPELAQASRDDLISFARAGRHGWPDRFADQVAAALATPSLPTRDYLVRAKAAGIRLAAVQLLALHQARRGWEQRMAELLLGGRRTGRDHTVTDPDPGNAFPGGAIYLSMAGLGDRLAARVAGEIGEHIEQFTSPNGLQCYAGQAPVTRRSGKSDFVVARRLAHNRYLGDAVHQWAFCSLRQSGWAREFYDQKIAAGKSHHNALRALGNRWLEILWHCLTKGVLYDEAVHVANRNRATGHAA

SEQ ID NO: 107838 - protein, 353 aa, unidentified
MRTYYVGMDVHRATIAMVVLNGAGKVVEQLVVETSATRVRSYLKQLQGRVYVTFEEGTQAQWLYDVVQPLVTEVIVCDPRHNKLLKAGHKSDRIDAQKLAELLRNGALKAVDHRDHGVRALKELVRNYDCLVSDTTRVMNRLKAMFRRQAIACSGHEVYRQDRREVWLAKLRERGAKERASSLYRQLAALKALRHEAKLAMVREARRRAAYVWLMSVPRLGAVSVAQLLAVVGTPYRFRTKRQFWSYVGLAVVTRSSADMEVVAGVLRRSRRPVATRGLNRNHNHLLKRVFKTAATSACQSEPFKQHYERRLQQGMDPALARLSVARQLSAITLSLWKRGEKFQAERMKRQAA

SEQ ID NO: 107839 - protein, 316 aa, unidentified
MKEKVEFEQVIERGCGLDVHKETVTATIKGEGIKQETREFSTYTRSLISLRDWLLKNGITHVAMESTGVYWKPVFNILGEHFQIILVNARHVKNVPGRKTDQLDSQWLAKLLMAGLLKASFIPARKIRELKDLVRYKTKLTHQVSSEKNRFVKILEDANIKLSSVLTDIFCVTGMKMIREIIECDYDPDKLLYHVHGSVKKSRSEIKEAITGYVTDHHRFMMQTILESIEKTENIIAKIDSQIAEQTKEYGLEIELLETIPGVGHDGAIGIISEVGADMSVFPDEKHIAKWAGMCPGNNETAGKKKAAGQVTVMLI

SEQ ID NO: 107840 - protein, 348 aa, unidentified
MTVTIVETRAITGGVDTHADMHVAAALDPIGGLLGVREFPATVAGYASLLGWLGGFGTVCLVGIEGTGSYGAGLARHVTTAGVRVVEVDRSDRQDRRRQGKSDPLDAVSAARAAQSGRACGASKGRDGAVEAIRALMVAKRSAAGERTQTVNQARALILTGPEDLRARFTGHTVAALVAELASLRPRPGSTVGYATRIALRELGRRAEFFDAQLERLDELIVPLVTAHAPGLLALYGIGPNTAALLLIAAGDHPERLRSEAAWAHLCAAAPIPASSGKTIRHRLNPGGDRQANHALWRIVFTRMGSDPATRAYVERRTAEGKSKKEIIRCLKRYVAREVYPHLRASAG

SEQ ID NO: 107841 - protein, 336 aa, unidentified
MSTDIVTAIRSPSNTHCPDHVVAFEVSKRQLVVHTLPADRSCTIPNTSQAIRRVLQTEIKHNRQAQLGAMLVVCEATGGYETHVLDVAVELGLDAHKAHGSRVRNFAKYKGFKAKNDPIDARLIALYGMQTEDLVRYQPPSAAAKSLRALQERRDDLKSMLQAETNRLEHASNAHVLKSLNSSIAALAKTLAAIEAAIALLLRSEASIARKAKLMRTVPGVGPTVAATLIAHMPELGTLSRGRAAALAGLAPFDNDSGNQKGHRHIGAGRSAVRRCLYMAALAAVRTCPHLREFATRVKARGKPFKVAITAVMRKLIVMINAVLASQSPCRYTRAA

SEQ ID NO: 107842 - protein, 341 aa, unidentified
MGEVSIIGVDLAKNVFQVHGAAADGSVLFRRKLRRGQVLSFFATQPACTVAMEACASAHHWAHAIGDLGHAVKLIPPAYVKPFVKRQKSDATDAEAIAEAATRATMRFVAVKTEAQQASAMAYRTRDLFVRQRTQTINALRGHLAEFGVVAPTGIAHVGRLTALVEGEDGVLPEAVVELARMLLIQIEGLSERIETLEKQIRERAAQDEAVARLMTMPGIGAITATALVTFAPAPETFAKGRDFAAWVGLTPRQHSTGGRERLGRITRMGQRDIRRLLITGAVGVVRWAARKGAPEGSWLARMLAKKPRMLVAVALANRMARMAWAMMSKNESYRVPAAAA

SEQ ID NO: 107843 - protein, 456 aa, unidentified
MSHKIEQKPRRVRLNSLEQINLDAGGLDIGVEEIWACVPEDRTAEPVRRFETFTADLHRLADWLESCGVTTVAMESTGVYWIAIYEIVEARGIEVCLVNAQATKNVSGRKSDVLDCQWIQQLHTYGLLRPSFRPPADICPLRTYVRQREKLLQQRAAHIQQMQKALHLMNLKLTSVISDITGLTGMQIIRALLRGEHNPVHLAQFRDPRCKSSEEEIAKALTGNYQPEQLFTLRQAVEAFDFYTQQLANCDTELEQHYACFEPQVDIVEQPLPDKPQRRRANQPDFDLRTFLYLTSGVDLTAVDGIDLLLAQEILAEVGTDMSKWKSAKHFASWLGLAPNNRSSAGKIKSRQTQKTKNRANTAFRLAAQSVSRTQSAFGAFFRRIKAKHGAPIAITATAHKIARMVYHMLKDRVPYSDPGATTYNEQQRQRSLRHLQRQALKHGMTLVPEAQPSVS

SEQ ID NO: 107844 - protein, 430 aa, unidentified
MSYRIAGIDVHKKMLAVVVSDVEIESEYQFERRMFGSNPEQLRSLAAWLLEQEVEEVVMESTAQYWKPVWEALERYWKPIREKREGARRKSGTLHLAQAQSNRGPRGRKRDFPDAERLVKRLVARELTLSFVPDPEQRLWRTVTRRKYQLTRDHTRLQNQLESLLEEAHIKLSSLVSNLLGVSARRMLKALAEGETNPAALAALADERLCATPEQLCDALGACADLKPVYRRLLKMMLEQVQFLEQQITKLDQEMAGLLSQHQDAVERLAEVPGLGVDSAQQIIAEVGPTAATFPSEKCLSSRVGACPGDEESAGVNYSHRSPQGNRHMRRILNQAANAAVKAKGSIFEIVYRRSVPRLGHKQTIGAIAHRQCRLIWLLLHQGVRYEERGPAVTKQSKQRRTSKMIRQLRSLGYRIEPPNPQHPTQAQAQ

SEQ ID NO: 107845 - protein, 343 aa, unidentified
MKHYAGLDIAVKETSVCILDETGKICREVKVATHPEDLLRILQDPAWHLERIGLEACQLSQWLFDGLAEAGLPVVCIETRHAKAFLKAQINKSDRNDARGIAQMMRVNLFRPVHVKTLTSQKRRVLLTARKLLQEKAIAIENDIRGLLLNFGLKVGMVGAVKFEQRIHELVSGLPDLAEIVERLLDARRKLREHFAALHRKLLDLARGDEVCRRLMTIPGVGPVVSLAFVATIDIPARFRNSKAVGPVLGLTPVRSQSGESDRVGRISLCGDGMMRTLLFEAAQTMLRPSTRWSWLKAWAMKVAQRRGGGKAVVALARRLAVIMHRMWCDGTDFRWTREVQVA

SEQ ID NO: 107846 - protein, 408 aa, unidentified
MEVVHPRCCGIDVHQATLAVCVAIKEKGKSEKHKLRCGTTTAELLRLADWLQGYQVTHVGMEATGVYWKPVWHMLEGHFELLLANPTQVQALRGRKTDLKDGERISDFLQHGLLQGSFVPPKPIQQLRDLTRSRTTLKQEQVRIGNRIRKVLEDANIKLSSVMSDVMGVSGRAMLRAMVRGESDAETLARLARKRLRGKIPLLQQAAAGSLNEHHRFLLEQWLAHWDELTERIAKFDERIEEQMRPFAAVVETWNSLPGIDRITAWTMVAEMGADMNQFPTVAHAASWAGLCPGQEESAGKRKSGRTRRGNVWLRRALTQAAWGASMTKGSYFKAFYHRLAAHKGKKRAIVAVAHALLSTGYMLLWTGRTFSDLGEDYFDRLDRERLTKRLLKRLEKLGHRVLIQPVA

SEQ ID NO: 107847 - protein, 467 aa, unidentified
MAKSVGKLSKHIGGSKGNILAERIKSTPVEKTMIVPIEIGKNSHKALLADYGGSIFKDSFEFHSSQEGITFLNNTICKVAKEYHIEGVFVGMEATGHYFKKPAESLYMLGYENIFVLNPLTTSQFRKAGLTWSKTDEIDLRAIGQALIGGYGTLYRPEEPIWGDLREICRYRRFQVRRQTALKNKIHTLLDMLLPGVGNLKMFKNPHLWHPASLEFLNKYPSVAAVSRLRPAYIVKFFLRRGRRLSSEDGYHLLDWSRQTFSYESPATSTRQEILKSLTCELRQLSQNISKLEVEILGHLVKLPAVLLLSIYYLGPIRAGEFAGEIAHLEQYPTSRAFIKAAGLDPTRYQSVNRESPHHSISKKGSRTLRYISVMIGNALMIHNDYFSFYAKQLMLRGKSKDCACVATADRFLRVAFQMLKEQKTFQPPNGLGITQNPLEKIRLFLQERDASELIEKYVKQAKKYFK

SEQ ID NO: 107848 - protein, 384 aa, unidentified
MDQATPSTASANTLHCALELSKKSWLLAIQFPDREQPSLYPIAGGDAEKLMAKLTQARDRWAKTSGALPMITLCYEVGYDAFWLARCLKARGVECVVIDPGSLQVSRRGRRVKTDRVDVKTLLRTLIAWCRGERHVWSLVRIPSIDEEDLRRSHRERSRLVRERTAHINRIKGLLFAQGIRDINVKSRYKTLAVDELVTGDGHRLPLRLAGEIAREIRRLATVQEQIAEIERERDAAPTTCEATERKRDLLSQLKSIGPAISAFLSREVYYRQFANQRQVGSFLGLTPSPYDSGDEERCQGISRAGSGHARAVMIETAWLWIKHQPKSALSRWFVERTAGQSKRVRKIMIVAVARKLAIALWRYVELGLVPQGAILNPRMKARS

SEQ ID NO: 107849 - protein, 346 aa, unidentified
MTIVERDRTITGGVDTHLDVHVAAALDPVGGLLGVESFEVNARGYRALLHWMGSFGAIHKVGVEGTGAYGAGLARYLQQKGIDVVEVDRPNRQARRQSGKSDPADAVEAARAALSGRAAGTPKTRDGRVEAIRALVVAKRSARRARIAALCQMRQLSFTAPDPIRERLKGLSTTALWETCASLRPRPATDVVDHATKVALRSLGRRIEELEDEVAVIDALLSELVTKTAPGLLALYGVGTDTAASLLVAAGDNPERLRSEAAFAHLCGVAPIEASSGKVIRHRLNRGGDRYGNQALWRIVMVRLVSDPRTRAYMERRTKDGRSKLEVIRILKRYVAREVYRQLPRP

SEQ ID NO: 107850 - protein, 418 aa, unidentified
MRQDEGHPTSDDIFIGIDLATKQHQVVILDSQGRRLTSFKVPHSREGLGELVQRCTSPLLLPGRGRAVIAFEATGHVWEAVAAFLEEQHLEYQIVNPLATFRTREARQMGRDKRDLTDAEQIAHLLRTGVVTQCQLLPDKYMQLRRAWGEYHRLRKERARLQTLLTHQLYGTFPEIVGEWKTVSAPGCVAVLRTALTPRQIAKLTKPAFIQLVHQHRRGRRMWRFKIEQVWEKACRTVAAPHGQQAAMREVARLVERIDFIGDQLDQVATELHALLDTFEEAKYLATLPGIGWVTVAALIAEIGPFDRYRHGRQLVKLAGLQPSRRESGAMAGRTPITKRGRAQLRAVVYMATLSSIRHNPRIKAHYERLCQRPTRPLPKMHAFGACMSKLLLYAFAVVKNREAFDVDHLWKENKIAA

SEQ ID NO: 107851 - protein, 360 aa, unidentified
MNEITRVGVDLAKRIIQVLAVNAAGMRVTGRALARDKFLPWCAQLPAGCVVAMEASSSAHHWARKLAAMGLDARIIAAHLVAPYRLQGRSGKNDANDAAAICEAASRPRMHFVPIKSVEQQSMLCVHRLREGFKDERVACINRIRGLLAEFGLVFAQSPAALRKVLSDVLEDADNELGGLARLALQRALAQWQELDAHLVWCDERIAAHGKANESVRQAEQLMGVGPVTASAVVATVCDFRQFKNGAQFGAWLGLSPRQNSSGGKYNLGAITKRDDPYLRTLLIQGAKSAVMTAHRRDDPISRWAHALREKSGWQKAVVALANKNARILWAVFVRGKPFDARHVSVKPGSHAAAGIVPGS

SEQ ID NO: 107852 - protein, 418 aa, unidentified
MKYFVGIDVSKEFHVVNVINESEKRVLKNFKFLNSKDGFNSFKIKLSSLSKDKDSFVLGLEATGVYGENLYDFLSSNGYNIKLLNPFQTSRYRQNYTMKSVKNDNIDSLYIALLLKDDRFSSGYVADEKYMALRVLYRNRSSCLKESKEIQKRIFSILSVTFPEFEKFINPFSVSGLALLKKYPTATHYKGVSAKAILKLFRHIKGNNFSYDKATKLLELADSSVYSGKAKEQRAIALNSLIRLYEKHQEEIAILDKEINSLLNNNSLKDDDKTAIKEAKQRAESIIKNLHTIPGVSTKTISAILSECGDLSRFPTISKLLGFIGLHPTQESSGKKEVFGHLSKRGNSTVKHALYLASVSSIRYNSELRKLYNDKRAAGKSKKEALIIVSRKLITIIYAIFKNNEPYNPSRVFAMVRQ

SEQ ID NO: 107853 - protein, 426 aa, unidentified
MTDDVSRYNQFCQFRSAIRTATDTLIVGIDIAKDRHHAFFGTPMGTTLWRRLIFDNNKSGYDKLITQADRLCPKHGLSKIVFGLEPTGNYHKPLANWLIQKGYMVVLVSGKAVSNNRDLLNGRWDKNDTKDSANVADLVSRGKCQFYDDPGPEIMALRNLLSFRKRLKKEEHSMRMRIRNSLLAKFFPEMDRHWGSGLEENLAIIKWYLDPKKIAATEFDTFVNHVTTTDRGLRQTRRLRTIYDAAANSVGMPVTASDQFEAKMLVEKLVNVRLRISNTMEQIKKISSCMPEEKPLQSIPGFGPYISALVMAVIGNPFRFSNRKQVIRLAGFDLNASRSGKTSNSAVPVISKRGDGDLRYGLYQAALIASYHNEHFQRIYHRMLKGREAERDIKTKRRVKLAAKMLIIAWTLMKKNDVFDPSYLSS

SEQ ID NO: 107854 - protein, 358 aa, unidentified
MNKFNNLDFSGTTIFCGLDVHLKSWRVNIRDMQMELRDFTQNPDALLLHKFLTKNYPNASYKVAYEAGFCGFGIQRQLAQLQIDCVVLNAADIPKSDKDKRQKNDKRDARAISEEIKNNSRAGIHIPQATIEYARSLVRQRQRLVLDSTRQKCRIWHCLHFHGLELPQKIDTGQYWSNKFVKKLESNPCNGDNWLKMNLQLMIKDHQQKRSLILETTRGIRSLCRQDIFKKQIELITSIPGIGEINAAIIFFELGDIGRFKSPDNLYSYAGLVPDTDDSGDTKKTKGITHRQNSRLRKAIIESSWVIIRQDPAMLMLYKNYCKCMHKNKAIIRIGKHLLSRIRYVLKQQKPYVQAILK

SEQ ID NO: 107855 - protein, 339 aa, unidentified
MKLYAGIDLHSNNNYLAIIDDQDKRLYHKRLSNQPDVILAELAPFHEQLSGIVVESTFNWYWLVDTLMDNGYKAHLANPTATQQYNGLKYRNDMHDAFWLANLLRLGVLAEGYIYPKEDRPVRDLLRKRGHLVHLRTSLINSLQGIISRNCGCKLSGNKIKQVRKNHISPLLAGQEDLELSGEVSKDAIDHFSWQIRKIETVVLDKVKLRKPFLGLQTIPGIGKILALTIMLETGAIERFPKVGNFSSYCRKVPTIWKSNNKKKGEGNSKNGNKYLAWAFSEASEMARRYDQMAKAFYNRKVSRTNRMIAHSALAHKLARAAYYIMRDGVDFDQKKLFA

SEQ ID NO: 107856 - protein, 351 aa, unidentified
MKKSSRGKWESEVGLVIGVDLGDKQSSVCVRGADGEIRQEDRVRTNSMELSRFFSGLRPAMVVMEVGTHSPWVQRLVETLGHEVVVANPRRLKMISESDRKSDRVDAALLSELGLCMPRLLHPVRHRSAETQADLLVIRARARLVEARTKLWNALRSMAKSMGARLPRKVQPEHVEAWGQSLKPLWESIVSLTEKIQAYDQVIDTLVRTKYPAALRLQQVTGVGPIISLTFVLTLEDATRFRKSRHVGSYLGLRPKQRDSGEQQPQLRITRSGDRYLRQLLVQGAQYILGRFGTDSDLRRWGLKLAARGGKNAKKRAVVAVARKLAVLLHRLWIGEQVYEPVRKQIAVATA

SEQ ID NO: 107857 - protein, 320 aa, unidentified
MPVDYLGIDISKSDFHAHLLQSGSSAKRTFPNSSAGYGQLQRWLSNRKASGVHACMEATGAYWIGLAAYLYHHSVCVSVVNPARIKNFARSQMRRTKTDGVDAQIIAQFCQTQTPVLWKPPAKEILEIRALLAYRNQLIAERHRVRQLASTIYEARVVQDRTSSHIAALNDLIDGVDGQLHALIKQTPAIADAVQRLAGIPGVGQLSAAAIFAQLPLDQLRNSKAAAAYAGLCPSDRQSGTSIHGKPRLSKMGNADLRKALYMPAVSVLRTTSSLAQFAARLRSRGKPGKVIVAALMRKILTVAYAVLKSGKPYVEALNA

SEQ ID NO: 107858 - protein, 343 aa, unidentified
MQIRSVGIDLGKTTFHLVALGDNGKVLLKKKFTQKQLIAFTANMQTCLIGMEACSGSHFLGRALRAQGHDVKLIPAQFVKPFVKSNKNDFIDAEAIAEAVERENMRFVAIKTDDQLDLQALHRVRDRLMTRRTALINQIRAFLLERGIVFAKSPIRLREALPEVLENVNENLTPRMRNLVAMLWSEWKDLELQIVQMNDEVERIASSDAACRRLRQIPGIGPLVATAIVASIGNGAAFRKGREFAAWLGLLPNQHSTGGKVRLYGISKRGNCYLRKILIHGARAVVLRSKRDRIAMGPWMTSLETRAPRNVLIVATAHKLARIAWAVLSSGQDYRAVPEALTV

SEQ ID NO: 107859 - protein, 375 aa, unidentified
MFTSSSRPARQTCCSLEHELVSQLLVSASARFTLSKQPERLSIMNMNLQGGAVQRQSHPNAGIDVSKEHLDVCWETNELRLGNDGAGWSELAAKLKAADVDLVVVEATGGYERGLVLALQQTGLTVARVNPRQTRDFAKSMGVLAKTDALDARTLRDFADVLARHPQRQRFITPLVDERRQLLASLMTRRRQVVEMRAAEQQRLEHADAMATRSINAVIRALDKQIRQIDKDVDGHMERHFKQQRELLDSVKGVGAVTTLTLLSALPELGRLGRKPIAKLAGLAPLADDSGKRRGVRRIWGGRAQVRSALYMATLSAMRYNPTIAAHYRRLLAAGKPKKVAMVACMRKLLVILNAMLRDNAQWDPARHLVTATSA

SEQ ID NO: 107860 - protein, 387 aa, unidentified
MAQVNDLSRSLTAFDPISTLVVVVEMSKASWLVSGAVPGVERQPLKKLEPDATALLRLIERWRNEAVRAGRPISRIALAYEAGRDGFWLARWLIARGIEAHVIHSASVAVSRERKRAKTDRLDAAMLMRVFLGWLRGERGHCGMVAIPTMEEEDARRPSRERECLVNERSRITNRMKSALARLGVRGFKPHLRKAPERLAGLRTAEGTGLPMNIIEEFRRDMARLALVREQISSIEKTRAERLERAPDTGPHAMVRLLARVIGIGIETADMLVREVLSRKLRDRRAVARYAGLTGSPDESGLKRREKGLAKAGNARVRRGLIQLAWRFLVFQKDSALARWYRTRTEGPSGARKTTMIVALARKLLIALWRLVTTGEVPDGVKLRPAL

SEQ ID NO: 107861 - protein, 356 aa, unidentified
MIEMNAAEIIIGIDTHKDIHAAVAMNGIGARLGATTIPTTPAGYQTLQAWAEAFGTIRAFGVEGTGSFGAGLSRFLQASGHTVIDVNRPNRQLRHQHGKSDSLDAESAARAVLSGQADTQPKTGTGAVEMIRHLKVARDTAVKSRTQAMVTLKTLIVNAPAVLRQTLDALRGKMALIRHLAALRPGPMISTVASAKTALRAIARRWLTLDAEIRAHDANLEALTTAQAPAMLKAPGIATGTTAEMLILVGDNPQRIRSDAAFAKLCGVCPVPASSGKSSRSRLNRGGNRQANAALYRVVIVRMRHHRPTLDYVRKRSAEGKTKREIIRCLKRFVAREIFGYLCRPGRTTNPTPEPT

SEQ ID NO: 107862 - protein, 397 aa, unidentified
MIAVGIDIPKAKSTVAVIDSDGTVLASPFTMAHTQPEMEAFVTYLKGLGEPTTILMEYTGHYHYPVLKKLQDEGFPVCIVNPYQMKKYGDVEIHKAKTDKKDALRIAAYALEKSYKLVPYSSMEQKYEDLKFLSRQYSQRITYVAKLKVQLIALLDQTMPGITRILPLNSRNPEKCALLLFIKRFKSFDEIQRIGKARFLASYDVLAKKASERSASSKGLSIYELAVDSITTRGEDPYIWLSQNQCVDLLSATQNAADEIISQMRNIAETIPEYKVLRAMHGVGDRLGPIILAEIGDVHRFHSGKALNSYAGNDAPPYQSGQFESRNRHISKRGSSTLRKACYEVMQALKLTKPQDDPVYLFMLKKEQEGKPFNVAKMAGVNKFLRIYYARAMELYK

SEQ ID NO: 107863 - protein, 349 aa, unidentified
MSSVARFFVGVDLHKTVIQICVLDQQGQIVEERRYHAGDLVAGLKVIGSLMKYKEHGRIAVEAIGVNRWFVNSLLERGFDVVVCDPTKLNLKMLGRKTDRRDALEIARRLMLGDIDRNAVTYYPNDEEYGKRKVIRSRHKLIQMRQGVTNQLRSLLNAYKITGFGKKLTTNKAIRRLWRLEWPTEELAAVGQAWVMTLVNLGEAIAHLDGQLEEMAQDVRVSGMRNHLPGVGPVTASVLVYELGDVTRFAHSRSVACYAGLVPRVNQSADKAHHGRLTKRGNRELRYVLGEWAIRLLSCDERVARWAKPRLRRSHKNKVRMALARRLLIGVYKMLRTGEAFSMERCLGM

SEQ ID NO: 107864 - protein, 389 aa, unidentified
MYENGKKVIYVGIDVHDETFTCCFYDPDDKQAKKGLRTVKIFSSAAQVRCYLADFCKDNPFNMSGFTFRCAYEACGYGYELARSLHSSGIDCVLLAPSTINEYHNNQRIKTDKRDAFTIAKSYANGEASPVHIPDKHDEEVDNLIRVRDMYKDTAKRYKQQIIAFVKRLGYKYEKHGHYWTQRYMKWLADLPLSTVNRYVLDNLLNSLAQAMDSLADFDGQIAFIATNDNRYKEKVQRLRGLFGIDTYTAMAIVVKSGDFKRFAKAKSYMAYLGLIPGEASSGGTVHKKSLTKTGNPRLRQLLTESAQCYLRKPNLLKSKAFKKRQEGLPEEFITYADRGLMYIVRKGKKMLYNKKNWNVIVSALARTLAGFIWGAMTTHLDRNPKAAA

SEQ ID NO: 107865 - protein, 367 aa, unidentified
MKKNSTVEQSPKEAKVAAQGTMTIGLDLGDKSSRYCVLDEQGQVRAEGSVATTKKAMAGKFGSLKRCRIALEVGTHSPWLSRLLQSLGHEVIVANARQVQLISASSRKDDRMDAQLLARLARVDPQLLRPIRHRGEKAQQHLTMIRVRAALVETRTSLVNAARGLAKALGERLPACDADSLNQQRSEALPDVVRELLQPLLQAVESLTQQIHEQDQKVEQIARSEYPETRLLRQVSGVGPLIALTFVLTVEDPDRFAKSRDVGCYVGLRPKRSESGASQPQLRITKEGDLYLRKLLVQGAHCIVSGRGPDTDLKRWGLRLAQRGGKNAKKRAVVAVARKMAVLLHRLWVTGEVYEPLRNSGAKRAAA

SEQ ID NO: 107866 - protein, 369 aa, unidentified
MEKSIMYVGLDVHKNSIDVALADSGRESEVRHYGSIGGDLGSLDKLTRKLISQGKALHFVYEAGPCGYEIYRHLTKQGLDCIVVAPSLIPKKSGNRVKTDRRDAEMLARLHRAGELTAIYVPRLEDEAMRDLCRAREDAKSAERKARQHLSSFLLRSGYRYSGKTSWSLAHWRWISDLQMSHSAQQITLQEYVDAVRSCLERVERITEQIRQLSGQWRLGPVVEALQALRGVSLVVAATTVAELGDLSRFDHPRQLMAYLGLVPSEHSSGETTKRGGITKTGNGHARRMLVEAAWSYRLPARVSRRLRDRQQNLPQSVWEIAWKAQLRLCARYKRLISKGKQSQVAVTAIARELAAFMWAIARTLPAAG

SEQ ID NO: 107867 - protein, 400 aa, unidentified
MISVGIDVAKGKSTVGMLKPYGEIVCKPFDIEHQNKDLSELASMILKFDDEVKVVMEATGIYHLPVLTYLQEKGIFVTVINPYLMKVYRSESLRKAKTDKIDSRIIANYGIEHWLTMEEFKVSEDIYGELRLLGQQYRHYMKLHVTSLHELTHLLDYTMPGIKTMLASWNEGNRKDKLSDFVEQFWHFDEITKYSEAEFIDAYAAWAKDKKYHQSQTKAKAIYELAHEGIPTLSSETPSVKMLVTEAVRVLKEIDATLGVILSRMQELAKSLPEYSVVREMGGVGDVLAPKLIAEIGDVRRFHSGKALIAYAGIDTPPYESGQFIGNNRAITKRGSAALRKVGYETMRCIKTCPRPDDPVYQYVIKKEAEGKAKKSAKIAGLNKFLRIYYARVKEIYNNS

SEQ ID NO: 107868 - protein, 408 aa, unidentified
MAILVGDDWAEDHHDVYVMDETGSRLASRRLPEGLEGIRGFHELVADLVNDPSEVVVGIETDRGLWVQALTAAGYQVYAINPMAVSRYRDRHNLAGAKSDAGDAKVLADLVRTDRHNHRPIAGDSPDAEALKVLARAHQNLVWARNRHTNQLRNALREYYPAALEAFTDLADRDTLAVLDRAPTPEVGARLSIAQIRAVLKRGGRQRNLDRRATEIQQALRASQLTAPQPVVAAFAATTKAAVGIIVELNRQIGELETVQADRFEQHPDADIYLSLPGLGGVLGARVLGEFGDDPDRYANPKSRKNYAGTSPITIASGRKKAVLARHVRNRRLYHAIDQWAFCSLTTSPGCRAFYDQHRAAGELHHQALRALANRLVGNLHGCLKHRTTYNEHTAWGHRQPTLNDAAA

SEQ ID NO: 107869 - protein, 423 aa, unidentified
MKGEIFFMKIVRPICCGMDVHKNIIVATIGITNKKTRITEYIQETFSTLNPDLLNLKQWLINYKCFDACMESTGKYWIPIFNILEDEINIYLTHPKYVKAIKGKKTDKKDSKWICDLFKHDLIKFSFIPPKEIRALREISRYRYKLVGMRSSERNRYQNCMTVSNIGIGSVFSDPFGKSAQAIMKEVLESDIIEDEKILKCVHGSCKNKDKILDSIKHCNIETDQRFKMNESMTHMEELQVHIDNCEIEMMKRAAPMFDQFMHITQLPGISTLSAILIISEIGVDMKQFESDKQLTCWAGLAPANNESANKKKSVRISKAGQYLKPLLVQCALGAIKDKEGYFGIKYSRIKKRRGHKKAIIAIARMMLVSIYHMILTGETFNPSDYESFRNPKPPIKQQDLTEESAIEFLKKSGFDVSKLTKP

SEQ ID NO: 107870 - protein, 380 aa, unidentified
MMTNIDTGDICCAALELSKTSWVCAFAAPGDSQVVVHKIKAGDVDRLIGILNSSKAKAEHHLGRPLHIVLCYEVGYDGFWLARLLIARGIRTIVFDPASFLMPRRGRRAKTDRIDAEGMTRTLRIWLSGDRKVARDVQIPSVAQEDAKRIERERKHLVEARISIVGRIKGLLALHGIWLTGKRVGKGLRERLDTIRTGDGRPLAPYLRRDIERMLCHYDFVTQQIEEVLADRKKALTDKSGRFPHAEKVQLLATLGAVGETTATVLVAEVYHRSFETRRHVASFVGLAPSPFNSGDTDRDRGINKAGTKLARQTLVELAWFWLRYQPNSKLSLWWHERFGGMGMRGRKVGIVALARKLAIALWRFVEEGVIPEGATLKAQ

SEQ ID NO: 107871 - protein, 449 aa, unidentified
MSNGSGVSRGDRNRNVRLARLREAVPVTNAVVGIDLADRKQVLVVCDHDSKVLARRTFRCKAWDLGVALDWAGERARLVGFSGVTVSCEPTGHRWRVLGQLAADRGMSFVCVQPAASAYARRTEDLTSDKTDDKDAVLIARLTAQLRCYLPEPVDPTWGRLRHLGARREQLLETHTRCVQQIRDLLECVWPAVLDAAAQPVKSTTWVAALAVVVARDDGNLARTRRLGLDRFTRLVRAEVVRRGRAKPCLRIVRKVFAALSETAGVVEHRQAALERIGWILTDWERARADQIVVEARMVAVLGQLELTDLVCSIDGLSPVGAAAILAETGDLSRFTSARAVVKLAGLAPRERLSGTFAGKARLSGAGRPRLRAAAWRAVWGCLQNNRVYAARYRHLTSRETNRLTPTQTVVAAAILRQLHAVVTTGQAWDPDIAAHGLRLANHVGVVAA

SEQ ID NO: 107872 - protein, 408 aa, unidentified
MIFVGDDWAEAHHDICVIDEAGKKLAKRRVPEGLDGVNQFHALVAAHASDPAEVVVGIETDRGLFVQALIAAGYQVYAINPLAASRYRERHSTSGAKSDPGDALVLAELVRTDRHNHRPVAGDSELAEAVKVLARAQQILIWVRQRQLNTLRSTLREYYPAALEAFGDDLGSRDALAVLGRAPTPALGKGLSAAKVASAIRAAGRQRNVETKAGEIREHLRGAHLEPPAQLAKAYGATVKATVGILTEMNAQLAALEEELRGSFETHPDAEIIVSLPGLGTVLGARVLAEFGDDRTRYDDAKARKSYAGTAPITKASGKSKVVLARFARNSRLADACYLWAFSALSASPGARAFYDAHRAARGPNDKDAHSKALRALANRLVGILHGCLRHHSPYDEAKAWHREEAAA

SEQ ID NO: 107873 - protein, 446 aa, unidentified
MSALAVLDPRAAFVDVGSEKMHVSIGGGLPRVFGTVTSQLEALRDFLIEHQVRSVAMEATGVYWLPLYGVLEAAGLDVRMVDGRQTRHLPGRKSDMQDCQWGSTLHAHGLLRAGFVPPAHIRRLQDYVRLRGEHIVAAAGHVQHMQKALERMNIKLHAVISSLTGASGLAVVRAILAGERDPAALLELCDVRIRKVKAERVLESLRGEWADEHLFALGQAVQSWDHYQAQITDCDRRIEAVLAQMPGGDGPAGDGPAAGVEKPAKPRTRPGVNTPEISNLRELLERMCDGKDATTLPAHSEYTVLQLIGEVGTDLTKWPTEKHFASWTGLAPGSAQSGKRRTAVKRRRNRAGQIFCVMARALARSKYIALGGYYRRMAARRGGLVANKALAHKLAILFWRVMVKGMDYVEKGLAHYEAQVLETRQRLLRSLAKQFGQQLVPIQGSP

SEQ ID NO: 107874 - protein, 395 aa, unidentified
METTFASSQSTASSESTNLFVSIELSRAKWLVTSLSPGSSKISRHGVAGGDAAGLLQLLTDLRVKAERHIGMEVKIVTIQEIGFDGFWIHRVLAANSIESHVVESASIAVPRRRRRAKTDAIDGELLLRTLMAFKRGEPRICAMVVVPSPEDEDRRRLSRERKTLVRERIEHINRIKGIMACQGISDFEPMRANARQRLAELRTGDGRPIPERMKAEIGRELDRLALLRSQIAEVEAERNALLSAGTKAELGTEAEERETDSPGAQLMKLRGIGPEFAMVLWQEGLYRRSANRRQLAAYAGLAPSPWQSGDVNREQGISKSGNARLRTTMIEAAWLWLRHQPESALSRWFHERVKADRGRLRRITIVALARKLLIALWRFTIDGEIPEGASLKAA

SEQ ID NO: 107875 - protein, 414 aa, unidentified
MNTLVSNTSLSGTLIALDIAKKHHDAKIRHPDGRTSYLRIENTLEGFNRLLALTASPHDDIIAAFEPTADYHRNIAWWLHKQGVKCHLVSSVRCARAREMLFKTWDKNDRKDASVIMYLLEQGLSSPFYDPLANGIIDIQEISNTYHQVTLARTRCLNSLVNHYLTLYFPEAEQFLHMSRAEWFCQFLLQFPTPSCITSLNRDLFVKQSWDVVGRKQYKKQFLEHLYDVAADSIALPLSEDSLAVTTFRLQLHRYVGLSAQRLQLEKQAENYLQERSDYRHLRTIPGIGAIIALMIIAESGDLTRFAHYRQYLNFCGFNLSASQSGQKHSGYRLSKRGNARLRYAFWLAATVAVRTRENSFRYKYERYIRENGDKPDQKRKAMTAVTTKVARVAHAIVKQGIDYKGYYEISHRT

SEQ ID NO: 107876 - protein, 348 aa, unidentified
MGQIMNNYNVNSIVTVLGIDIAKQSFQLHGTDKHSKAVLKKRLTRNKLSAFIANSPPCLIGLEACGGAHYWVRTFKAQGHKVRMIAPQFVKPYVKSNKNDAVDAEAICEAVQRPSMRFVPDKSIAQQDIQSLHRVRSQLVARRTAQANQIRGLLQEYGLIIPKGISHVRKAIPLILEDADNTLTYLFRELLNELYDELVHLDDRVNTLEKKLEIISRESDDCQRLLTIPGIGLLTATALIAAIGNISAFNSGRELAAWLGLVPKQHSTGGIPTLLGISKRGNSYLRSLLIHGGRAVVRVAPLYSDKRNTWVNTLNERRGKNISAVAVANKNARIVWALLSNKENYKAA

SEQ ID NO: 107877 - protein, 350 aa, unidentified
MEEVSVIGIDLAKNVFVLCAQTASGEIAWRKRLKRRAFKQFMAVKAPRCLVAFEACGGAHYWGRFLTALGFEIKMMAPRAVKAYRQGPHKNDWRDAEAAAEAGSRHPVRAVRVKSEAAQAVQVLVRLRALQIRQLVQTGNHLRGILNEFGIVLPKGHKRLREAIARLRQEDPASAALPASVRRTADRLCLQLAEQARRVTEATSELEAAIKDEEDCRQLRTVPGIGPINAAALSVALEAPQAFPNARAFAASLRLVPRQHQSADKQIMLGIGPLSANETRRHLVLAGQSLITMVRRFQQPPADKFLLWVYRLDRRKHRNVAAVAVAAKLARIAWALMAKDQIYQPRLATA

SEQ ID NO: 107878 - protein, 378 aa, unidentified
MNRIIKIGMDVHTTNYTLCIFEPSFEHNGTVHCITQVKPEIKNIIHVIETFKKKYENEELNIVCGYEAGCLGYSLYHELKEKGVECVILAPTTMKTEKGGRKLKNDYRDAKMIAECLAYGGYSAVHVPTELDNSVKEFIRMRDDIKESLKSIKQQIIAFLTRNGKQFKGKSYWTRKHIDWINTVSFSEPLLQDTLKEYMIEYNHLCDRVETLDRQIEEISLKEEYVEKVQQLQCLIGIKTHTALSLIVETSDFNRFKKGNMYSAYLGLIPGDDSSGGHEKKLGITKAGNNHLRKLLVEASQGYTRGRVGFKSKELKSRQEKCSSEVVAYADRANERLRRKYYRMTLRGKKYNVAKTAIARELACFVWGIMTDHIDLCS

SEQ ID NO: 107879 - protein, 344 aa, unidentified
MKFTRCGLDIAKQVFQVHGVNEHGVVKARKTLARAKVLAYFAQVPPCLIGIEACGGAHYWARELGKLGHTVKLMAAQFVTPYRKRGKNDVNDAEAICEAVGRPNMHFVAVKTEEQQAVLMVHRARTMVVANRTALANQTRGLLGEFGLAVPKGVTKLRRQMPQILEDAENGLPALAREVLAGLREQFRELDQCIQQYDLKIRELAGASEPARRLMQLESIGAMTATAIVAGMGDPKVFKSGRNYAASLGLIPRQFSSGGTIRLGPITKQGDRYLRTLLVHGARSYLRVVDRKTDRKSAWARAVKERRHINVAAVALAAKHARIAWAMLAKGTEYRPLQPEGAAA

SEQ ID NO: 107880 - protein, 402 aa, unidentified
MNCVGIDVSKGKSTIAVMRPFGEVVVSPFEVCHTASELSELARLLKSLDGETRVVMESTGNYHAPVAWLLHDAGLYVSVVNAMLVHDYGNNSLRRAKTDKKDAVKLANYGLDHWLTLPRYVPDEDTRLMLKTCYRQYQQYSKVQTMLKNNLISLLDTAFPDANRLFTSPPRADGSEKWVDFVATFWHCECVCGLSEKAFTAKYQKWCRKHGYNFSEDKALDIYASACRHFGVIPKTDTAKLLVEQAISQLRATSAALAALKQEMQSLAASLPEYPVVMEMFGVGPTLGPQLMAEIGDVRRFHSKKALVAFAGIDAPPYQSGKIDVRSRSISKRGSASLRRTLFLVMGVILQHAPMNEPVYQFMNKKRSEGKPYRVYMMASANKFLRIYYASVKAYLESLEHD

SEQ ID NO: 107881 - protein, 404 aa, unidentified
MAVIIGIDPHKQSHTAVAIDEVERTLDEVRVRASLAQAERLMSWALGFEERTWAIEGATGLGALLAQQLLSRGERVLDVPPKLASRVRLLETGAINKNDPNDARSVAIAALRSRNIEQVRPEDHAGVLKVWAKRNNDLGRLRNKVACRLHSVLCDLVPGGVAKEIRAAHARSLVDSVKPANATEAARCELASDLICDLERLDDQLKASKARIRKAVSASGTTLTELYGVGPVVACMMVGHTKDVRRFATSDRFASYTGTAPIEVSSGDKKVFRVSRRGNRQLNHAIHIVAITQLRNRGTEGRLYYERKVAEGKTPREAIRALKRRISDRLYRQLWIDAERQDPEGTRRVREGNQGAALKPARPAFTLNAGSLDKPLPDPKPRYARPRRFAPAARRPQRRAPART

SEQ ID NO: 107882 - protein, 391 aa, unidentified
MFYVGIDIAKVNHCGCIIDDAGNVVEESFSFSNTVSGGEKFVSKLVKSNICKDNILIGMEATGHYWLSVYSFLNDLGYPLVVINPIQTDAYRKFSIRKSKTDPIDAKLIANIIRTHNYQTSSFSEENIFALRQLSRYRMSLVDNCSDLKRQIIALLDQVFPEYDKQFFDVFGVTSKELLSKCPTPEDLLTISTTKLSNLLEKNSRGRFGLEKAKELKESASKTFGIKFAKDAFSFQIKQLIGQIGFIEDQIKELEKKLNEILTSLDSQITTIPGIGPVTGAIILSEIGDISRFSDPSKIVAFAGLDASVKESGNFVGTQNHISKRGSPYLRRAIWTSAGIATMHDPVLKEYYQKKRAQGKHHGTAIGAVATKLVRIIYAVLTTNQPYELRK

SEQ ID NO: 107883 - protein, 365 aa, unidentified
MSTITIGVDLAKSLFSVCEVDGAGHVLRRQDLKRDAFAVWLAQVPAGTVVAMEACSGAHHWARRCLEHGLQPRLMAAQFVTPFRKSRTVKNDRNDAEAIATAARQGNMRFVLIKSVDQQARLAWHRVREGYKTESLAIGNRLRGLLAEFGIVVANSDVALRRVLGDLDQAAALPGEFKGLLRGLAVHWAQVRTAIDACDARIDAHAREDERCVRLRAIIGVGPITADAMVASVGTAREFKNGRQLAAWLGLVPTQHSSGGHTRLGTISCRGDTYLRTLLIQGARSSLQRAKAVSAEKSTPEQIWIRQLAGRMSFGKVLVAIANKHARQLWAMLAHDETYDADAWLKHPMVQRPAGKHAITSNAMA

SEQ ID NO: 107884 - protein, 402 aa, unidentified
MNFFVGLDWASQAHAVCVLDATGQVCWQGSVEHSADGLAELLRRLARFGPPASLPVALERPSGLVVDTLMDAGYRVVPIHPNALKASRPRYSAAGGKSDPGDAFILGDLLRTDGHRFRPLQPLSDETRALRALVRGRDDLVAERVALANQLRALLDRFWPGAAAIFPDVDSPIALAFLSRYPTPHSAERLGEKRLARFLVQHAYCGRRPAAELLARLRSAPITQTSELEAEASGEIVRALVTVLLPLVTQIQQLSTAIAAALPQHPDGPLLQSFPRSGSVNAAQILAELGDDRSRFATDEQLAAEGGVAPVTRESGKHRGVAFRRACNKRLRQALTSFADHSRHASPWAAAIYAAARRRGCHHPHAIRVLARAWVRVLWRCWQDRRPYDLTLHRAAQRVAAA

SEQ ID NO: 107885 - protein, 375 aa, unidentified
MGWTPPRRPWCARVVVFVTTDQEASVSEVSTIGLDLAKHVFQVHGADASGKVVFRKRLRREKVLEFFAGKPACVVAMEACSSAHHWARELTRLGHIVRLIPPAYVKPFVKRAYVKPFVKRQKNDAADAEAICEAAQRPTMRFVAVKSETAQANAVVFRARDLLVRQRTQAINALRGHLGEYGLVVAKGPGHVIKLVEHVEDPDSNVPDAARLVLRTLVEALRFLRERIDLLDREIARRARENNEVRRLMSIPGVGPITATALAALAPPADAFRKGRDFAAWVGLTPSQHSTGGKQKLGTTSKMGERTLRRLLIIGASSVVRKALRQGTAAGSWLGRMLARKPRMLVIVALANKMARIAWAVQAKGEVYRAPVVAA

SEQ ID NO: 107886 - protein, 362 aa, unidentified
MTTEEKQRTLFVGIDVHKNTHTAVGISPFGEKLFELTVDNYQKDFDDLAKEVRAVGERSLLSPFIGLEDCSGYGERIASALYSDGFPVVHVPPILVDRLRKRQTHPEKSDSLDALGVAKVMMHDTDSLPVYSISERSASAKFLKELSQDREYLTVERSRLRNQLHLLLHRIYNTEYASYFKDPFALKALRHWARVKPACDPYLLRAMKRKVNRMLELHTAIKELEGDMQSLIEEAGYTLPTASGCGVVLAATIIGEIGDIERFRAPASLAKYAGCAPREQSSGKTVRYRKTKSGNRRLNCAFHRMALSQISPTGNDAARAYFKKKVSEGKTKSQALVCLRRHMVTVVYMMLKHGTEYRCPQA

SEQ ID NO: 107887 - protein, 411 aa, unidentified
MLTEALFYVGIDWAAETHAVCVLDDRGRAAGSFTIAHTADGFADLARRLGRLGAEPDRVPVAIERPDGRLVDALLEAGHPVVPVKPNAIKAWREAEVLSGAKSDEADAEVIAEYLRLRAHKLRVAVPYSAETKALRTVVRTRDDLVEMRVAATNQLTALLDAHWPGAKAVFADVESPIALEFLTRYPTPAAAARLGEKRMAAFCTKHGYSGRRSATELLARLRAAPAGTGDEALTEALRDAVLALVAVLQAAVAALRDLDRSVTAHLGEHPDAEIFTSLPRSGRISAAQVLAEWGDAREAYDSPDAVAALAGQTPVTDKSGKHHAVHFRWACNKRFRKAITTMADNSRHASPWAAKVYADARARGHDHPHAVRILARAWIRVIYRCWHDRVPYDPTRHGNAQRLNQQPFAA

SEQ ID NO: 107888 - protein, 340 aa, unidentified
MTPIRIGLDIAKNVFQVHGVDDNGTVVIRKRLRRSDILGFFASLPPCLIGIEACSASHHWARELVRLGHQVRLMPARYVKPYVQRGKSDALDAEAICEAVGRPTMRFATIKTAEQQAVLTLHRARELLVKQETMLANLIRGCLGEFGIVAPLGIRRVSELIAVINDDADTRILPEARIAMRAVADQLCDLQKRIKEIEQAIRAWHRSNEASRRLATIPGVGSITASAIVATVANATEFKSARHFAAFLGLTPKQCSTGGRQRLGRISKQGDVYIRRLLILGGTSLVRYARGPGGSVWAKQLLARRPARIVTVALANKAARVIWALLTRGEVYRAPQPQAA

SEQ ID NO: 107889 - protein, 309 aa, unidentified
MDIIVGIDVSKDNLDVAVSPSGASFFVGNDHDGIEELVLRLKAEKVDLVAVEATGGFETLAVAKLAACNICVIVVNPAQVRAYANAIGRRAKTDTIDAALIAAFVVATKPQIRPLRDAQTQALSALVDRRRQIVQMIVAEENRLRMALEKTTHKSIKRLLAALNREKGSIDTDMDEHIRKSPLWRVREALLTSVPGVGRATARTLLAEMPELGSLDRRQIASLAGLAPWTRQSGKWKGKSFIGGGRTKVRAVLFMAALVASRHNPLLKEFRDRLVASGKPKIVAIVATMRKLLTILNAIIRENKPWQSA

SEQ ID NO: 107890 - protein, 367 aa, unidentified
MEKSSKVYVGMDVHKESIDITLAEQGGEVRRLGQIGGDRGSLLKMARKLQSRGGERVFVYEAGPCGFWIHRELAALGERCMVVSPALVPKRAGDHVKTDRRDSERLASLARAGELEAIHVPDIRDEAIRDLVRGRDDAVIAQRRVRQQLKALLLRNDIRYVGKTSWTGAHRRWLSELKLPEPAQQIVFEEYVDAIAVATGRIERLTQAIETETLAWRFAPVVAALQAMRGIQFVHAVTLIAELGDLTRFGSARQLMAYLGLVPREASSGEQRRQGSITKAGNSYARRALIEAAWAYRHPARVTRIIATRQTGLPKAACDIAWRAQLRLSAKYRRMNARHLNHNKIVVALARELSGFVWAIGQSVKPQ

SEQ ID NO: 107891 - protein, 344 aa, unidentified
MIGFDLAKNVFQAHGVDAAGKVVVRRQLRRAQMEKFMAALPPGVVIGMEACSGAHHWGRVAQRLGHEARIMPAAYVKPYVKRNKNDGRDAEGVCEAMGRPTMRFVPVKSLESQAVLVLHRTRRLLVRQRTMSGNAFRSALAEFGIVAAQGLKGLRSLMELLEDPAGAVPQAARLPLRVLARQWERLNADICKLETEIVRAAKADEVARRLMAIPGLGPIGATAILAAVPDIRVFKTARDFAAWLGLTPRQFGTGGKHSSGGISKQGDRTLRTLLTVGATAHLRYERARDVKDPWLQALLARRPFRVAAVAYAAKMARIIWAMLVTGEHYRTPNRLHGASVQAAA

SEQ ID NO: 107892 - protein, 355 aa, unidentified
MSSEKYIGLDVHQATISVAVLDSTGKLVMESILATKAATILEFFAGLRGTLSVTFEEGTWAAWLYDVLKPHVAKLVVCNPRKNALLKDGNKSDRIDAHKLAELLYLNKLSSVYHGETGVRMLRELARSYLTIVKDLTRVMCRLKAVYRSWAIPCAGRDVYYTRHRDEWLGKINEAGVRRRAERLYQQLDMLQYLRQQARRELLAESRKHAITVKLRQIPSLGPIRSALAVALIQTPHRFRTKRQLWAYSGLALETRTSAEYCYVKGGLRRSKKQISIRGLNKGHNHDLKGLFKGAATRASVLPGPFQDFYQRSLAKGIKPTMARLTLARKIAAITLTLWKKGENFDADKLKSQAA

SEQ ID NO: 107893 - protein, 479 aa, unidentified
MNSIVLTANVQPNLDVNYIGMDVHSDNVVVCVRRNTINSSGQLVGKTIKTKKVVIKNSQEPLVELLSKYADGQQHIMTAESTFNWYWLADIAEDHGWNFRLADPCTVSQANIKAANDETDAEYLADRLRTGSLKSTSVLPRQLRGVRDLMRHRLRVMQEVSDKKVRLSNLYHNHCAHPMHGKLLAALQDVYDEINIDAVLESGICNNGSELIIGDLLTGLREAETRLAKIEAAVYARIDEIDSYKAERMLLKTSMKGCGDVLSAIIVTEIGDISRFRTMGDFVSYCRLAPTSKLSNGKSKGQGNAKNGNAYLSWALTELATLMARFNEPIRRYLERKQEKTGLRVVAVRALAAKLARCVYQVLRKKESFDLGLAFGSKPTHGQMTAAAEAAQTPPEPALPPVPAVAGEHHCPAEESDAPIVVKEPVPVKSKRSTRKKAVSAASSEPAVAAEGRQTARKADRVKARCALTATPPSCAGTS

SEQ ID NO: 107894 - protein, 350 aa, unidentified
MSIVAETVEYVAGIDTHARTHTYCLVHARTAAVVDTATFPTSKSGNARAINWIARRSQGSVLAAVEGTSSYGAGITAALTEQGVEVVEVRPAARSTHSHAGKSDQLDAEAAARSVIGRDYDTLARPRQTGPRAALRVLLASRSIIDQQRTANRNALTALLRTIDLDVDARKPLTDTQIRVIAAWRTTRTAAAVDASVIARREARRLAVAVLEQTQLLKDNYRQLHQLTEQLAPGLQDVPGLGPVTAAIIVCAYSHRGRVRSEAAFAALGGIAPLPASSGNTSRHRLSRSGDRQLNRAFDIAVRTRMSYDPDTRAYIARRRAEGRTNREIRRCLKRYVCRSVFRQLQASTA

SEQ ID NO: 107895 - protein, 348 aa, unidentified
MEKDGEMHDTMIAVDLAKRVFFLHVASMTGHLKERKKLTPLQFRHYMAGAPKCVVVFEACGSAHYWAREVMAIGHEARIIPAQYVKPFVKRHKNDRNDAEAILVAAQRPEMHFTAVKSEDQQSRAVVFRARERLINQRTELVNALRSTLYEYGHTFPVGFGHVKRIAELLEAPECDLPALVVTECQDLLVQIAEKTDRITAKDKLIKQLAKESAVAQRLQTMPGVGPITALAVEAFAPDMEQFSCGRDFAAWLGLVPLQKSTGGKSRLGKLSKMGQVDIRRLLIIGAMSRIIGRARHTIPEDSWLGRKVAAKPKMLVGISLANKMARQIWAMLTKNEDYRDPALVGAA

SEQ ID NO: 107896 - protein, 377 aa, unidentified
MSKIRFVGLDVHADTITVAVAEPDGEVRSFGAIPNRLESIRKMVAKLGPVNNLKACYEAGPTGYVLYWQLTTLGVACEVIAPSLVPVKAGDRVKTDRRDAVKLARSYRAGDLTPVWVPDAAHEALRDLVRAREDARQDQLRARHRLGKFLLRHCCRPPEDVKRNWTRKHMDWVKRQVSFTEPALQATFLDYVHEVEHAADRIQLLEKAIDDAVAVAPAEIQEVIRALQALRGVGKIVAVTVVAEVGQLSRFSNPRQLMGYSGLVSSEYSSGNRIQRGSITKTGNAHLRRVIMEAAWAYQHKPWIGGWLEKRQHGLDEQIKAMAWKAQWRLCTRYKKLAAKGKNKPQIVTAIGRELLGFIWAIAVQTETKSHTAAQAA

SEQ ID NO: 107897 - protein, 402 aa, unidentified
MKKFIAERASQQTSAALDVTRGWSRYGAFIGLDVHKETVAVAVAFPGRDKPEYRGEITHEQKAVRKWLDRLNAEFEGVLLLFCYEAGPCGYGLYRQLVAAGHDCQVVAPSLIPKKAGERVKTDRRDALKLARLLRSGDLTAVWVPDTEQEAMRDLTRARDDMKSQERKARQQLNAFVLRRGHHWPRGKTRWTQAHFNWLESIRCEQPWLQIVLQEYTDAVKAATRRVEDLSDQLLRALPGWSLSPVVDALVALRGIDKLAATVLLAELGDISRFDSPKQLMAYLGLVPSEHSSGARRRQGAITLTGNGHARRLLVECAWSYRFPARQTMHLKRKAKAASAEAKAIAWRAQKRLCGRYRQLTQAGKNVKLVCVAIARELIGFIWDIVRHEMPRLRPQRAVVAG

SEQ ID NO: 107898 - protein, 255 aa, unidentified
MTEFILGVDIAKGKFDVALLANQKLKHKVFVNNAEGFSELTMWLKKYGVDHAHICMEASSTYGEELAAYLYDAGHTVSVVNPARIKGFAQSELLRIKNDKVDAGVIARFCDKMRPDPWKPLSPEVRRLQALVRRVDALLVMRAQELNRVGATHETVLHSIKEHISFLDEEIAALKKEIADLIKKDPNLKTKADLLRSIPGIGEATIAAVLSELSLFEKCDSVRKVVAFIGLAPGEFTSGSSIKGKPRISRRAAPE

SEQ ID NO: 107899 - protein, 411 aa, unidentified
METIVERPAALDVHKAQVTACVRTPAPGGGRDAHFAEFATTVAGLLTLRDWLAAHGVTQVTMEATGVYWKPVWAILEDEFELLLVNARHVKQVPGRKTDMSDSAWLCQLAEAGLLRASFVAPKPIRTLRNLTRYRKTQIQERAREANRLHKALEDTGIKLDCVASNILGKSGRAMLDALVQGTTEPDILADLARGRLRKKIPALREALEGRFDRMHALWIGAILAHIDFLDEQIEQLTAAIGEQIAPFEKAVELLCTITGVQRRTAEVIIAEIGIDMSIFPTAKELASWAGQCPGNHQSAGKRRSGKTRNGSKWLDWALEEAALAATRSKDTYLAAQYARLRPRRGHKKALGAVKHSIIVACWHMLTTGELYNDLGGDYFQRRDPEKTTKRLVAQLERLGHTVTLQEANAA

SEQ ID NO: 107900 - protein, 364 aa, unidentified
MYYVGLDVHAKRSSLSILDANGKLVKHLEVKGSWQKLLEVVDAQVPRPFAICYEASCGYGYLYDQLGRRAERVSVAHPGQLRLIFRSKKKNDRVDGEKLAKLLYLNEVPQVYVPGLDVQSWRGLINYRRKLVGRRAAVKTQIRAHLRGLGQLAPATGGLWTKKGIKWLREQAMSATDGLRRDIMADDLDGLEEKIRKVEKELNKIAKSHPGVMLLMTIPGVGVRTAEAFVAHVDDVTRFARTKQVGSYFGLVPCQDASADRNRLGHITKDGPAPVRWLVAEAAWQGRRRSARIRGFFDRVMRNDPSRKKIALVATAHYLTRVMAAMLRTGEAWREEESPAPAAEPGPRPQERNKTKKKKGANKE

SEQ ID NO: 107901 - protein, 335 aa, unidentified
MDKLEGCMELCGLEVSAGELVVAMQEKAVRRFANTAGGHEQLRKALTRGGKRVRVVLEATGLYGMDVALGLSATEGVEVMVANPRSVRDFAKAMMQRSKNDPLDALVLREYAARMPFRVWQPPSRNRLALWAITRRIAGVTEQMRAEKNRRHAAEISQVTPACVRRDIARNLRQMEQALRRLRQEAEKCIAAEADLQRQFQLLVTVPGIARSSALQILGELAVLPADRDIRQWVAYAGLDPTEYRSGESVRRQSRLSRDGNRHLRSALYMPALVAIQHEPHLRGFYQHLVNRGKRKKQALLAVARKLLHAIYGMFRSSTPYNGDRVFTLAPQTLA

SEQ ID NO: 107902 - protein, 412 aa, unidentified
MNIVYERCAGIDVHKRSVVVCTITPDQQGQRHKQRDTFSTMMPDLLRMRQWFQSLGVTHVAMESTGSFWKPIFNVLEGHVEVLVVNAQHLKAVPGRKTDLKDAEWIADLLQHGLLRPSFVPPAFQRELRELTRYRGSVVEERSRTINRLQKILEDTNLKLSAVATDLMGLSAREMLAALLAGETNPTALAELARGKMRAKRDLLVQALQGQFKPHHRLLISEQLTHIDALDEEIERLSTDIAQRLLPYEAQLKRLGTIPGIKRRLAEVILAEIGPDMQRFPSARHLASWAGMCPGNRESAGKRLSGKTRKGDPWLRTALVEAAHAATHCKDSYLSAQYHRLVLRRGGKKATIAVGHTLLVIVYHVLADEKDYQELGGNYFDDYDRQAVQKRLVHRLEKLGYEVILAPTSPAP

SEQ ID NO: 107903 - protein, 316 aa, unidentified
MVPSPLFVGIDVAKATLDIAVRPTAETWSVSNDATGIDALVLRLGAWAPTLIVLEATGGSQGPLVAALVAAALPVVVVNPRHIRAFAQAVGILAKTDRIDARVIAHFAEAVKPAPRPLPDAETQELRALLVRRRQLVEMVSAERARLDTVPPRIQDAIQAHIAWLTTQVAGLDDALTRARQTHPVWQAKDDVLQSIPGVGPVLARTMLGQGPAWGTRGPKPLAALIGVAPFNRDRGTLRGRRPVYGGRAEVRAVLSMGALVATRHHPVIKTFYERLLAAGKAKKVALTACMHKLLTIMNAMVRDLKPWQPQEVPSA

SEQ ID NO: 107904 - protein, 335 aa, unidentified
MNDRRPPDELEALRRRTSFLPSSLSDDRYFAIEDCRHVSGRLERHLLPRGERVVRVPPKMMAGARHSARSYGKSDSIDAACVARAALREPGLPEACLAGPEQDVRLLVDHRDDLVDERKRIQKRLRWHCHDLEIGLALPPRVLDRYVWLDRLESVLEALPESTRRRIALDQLGRVRELTKEIRSLERELRGRMHGLSPDLLAIPGCPTLCAAHLVGQTAGASRFSGEAAFAMHVGVAPLPVSSCQSNRHRLNRCGNRHLNSTIHLIAVTQARMHPPAMAYMERKQADGMSYREALRCLKRQLARVVFKTMLRTERATMGEVLRAEFTADSVAIAV

SEQ ID NO: 107905 - protein, 358 aa, unidentified
MNKLTKIDKFFNNVDLTADDQLFVGIDVHKRTYNVALYLNDAPALDFVMPAAKEKLSQKLKKTNSALKRVAYETGPTGYGLARHLRQYDLPVTVAATSRIPRSSGDDKTDKLDSRKLAEYAAKGLLKPVAVPTLKQEADRQFYRMRHRQARNRSKVKTQIKSFLLMHGIDEPAGLSSWSCNSVDQLRTLPLRKTLRLSLDELLGDLDYYSLRVKTLDRSLKEHLDKGLLARQISILKTHPGIGVVVSCQFAVELFHYRDFGSTRELSKYLGLSPRIHQSGERSVCGGINKVSNSRIRSNLVQAAWQWIRVDIEAKKTYLRLLNNCGGIKQKAIIAMARKLSGHLWTMLVNDEPYDPNK

SEQ ID NO: 107906 - protein, 433 aa, unidentified
MDRARSALPAPGGLGRPPSPRGHEQDLTQEELAARALSLTQVDDLSRSLVPFDQNSSVIVVVEMSESSWLAAGQVPGIERLPLKKLEPDPIALLRLVERWRDEAVKVGNAIERIALAFEAGRDGFWLARWLERRGIEVHVVHSTSVAVSREHRRAKTDRLDTAMLMRVFLGWLRGERGHCGMVAVPTLEEEDARRPSRERESLVSERTRIINRMKAILAWLGIRSFNPKLRKAVQRLDGLRTPDGLPLLPNTIDELRRDMARLAMVCEQIKAIEKARLARLEQEPAAGPHAMVRLIASIIGIGIETADMLVQEVLSRNLRDRRAVARYAGLTGAPDESGSKRRQKGLAKAGNARVRRGLIQLAWRFLRFQKDSALAQWYRARTEGPTAARKTKMIVALARKLLIALCLVPAFCWSGFSLKRCCSVAQASQMNW

SEQ ID NO: 107907 - protein, 334 aa, unidentified
MNYIGMDIHKQFTVAVAKDKEGNKLCEEKFDNSRDNFEKFLKCFIPEETRIVIESTSVWEYIFDMLDEMCYEVKLANPVRTRAIAEARIKTDHVDANTLCDLLRANLISESYIPPREIRNIRNVMRQRQSLVNGKTQIKNKIHAILLMNGIKIPYRHLCKKAVEWILEDLNTLSIKSVMVSFTNLLEQYNFELKIIDEKIREIAMKNREAQLLSTIPGVAEIRAMEIVTEIGEIKRFESPGNLCSYAGLVPGMRQSGTSLHFGRLVKQANRNLKYVFVGASWSIVKTKENNVFKQFYLRLSKKKGKQKAICAVARKLCCAVYAMLRDNREFMLL

SEQ ID NO: 107908 - protein, 345 aa, unidentified
MKYYSGLDVSLEETSICVVDSDGVIVAERKVASEPRAIAEALLALGLVFERVGLEAGPLSPWLHDGLHSEGLPAICIETRQMKAALRAMRNKTDRNDARGIAQVMRTGWFRFVHVKSPESQELRLLLNHRKTLQRKTLDLENEVRGTLKAFGLKVRKVSRGRFAARVRELIADRPRLRAATEPMLKARGALMAEFDRLHRMVLEAVRGDLLCGRLMTVPGVGPITALAFKTGVDVPERFAKSKTVGVHFGLTSRKFNSGEIDYNGRISKCGDAMVRTLLYEAANAMLIRCARYSALKAWAMRIAKTRGLKRAKVALARKLAVIMHRMWLDGSEFRWSDKASAAAH

SEQ ID NO: 107909 - protein, 373 aa, unidentified
MNAVGIDVSKGKSMVTILRPFGEIVSSPFEIKHTSSDIHSLIKLIHSIEGESRVVMEHTGRYYEALAHQLSAADLFVSAVNPKLVKDFNNDSLRKIKSDKADSVKIARYALDKWQSLEPYSITDELRAQLKVMNRQFHFYVKQKTAMKNNLIGLIDQTYPNANTYFNSPTRSDGSQKWVDFVSTYWHVDCIRKMSLNAFVEHYQNWCKRKKYAFNKSKAEEIYTKTKELVPVFPKNEITKHIIRQAIDQLNSTSVTVETIRTLMNETASKLPEYSIVMQFKGIGPSLGPQLMAEIGDVTRFTHKGALTAFAGVDPGVNESGSYAQKSVPTSKRGSSNLRKTLFQVMDVLIKTMPLVLCQEKVQIKYNQFSLFM

SEQ ID NO: 107910 - protein, 348 aa, unidentified
MTITIIGLDTAKTVFQVHGVDESGRAALKRKLHRSELVAFFEQQPPCAVFLEACGAGHHWGRLLSGLGHEVKLIAPEAVRPFVKKGKKNDAADAAALCVAGSRPETRFVPIKSVEQQAVLTLHAARSLLVKQATMLANALRGLAAEFGLTVPKGMHKLEMLMTLVSSDESIPEAGKQVLAELHAHGCAVVERLATLEEQIVRHARQDATARRLATIPGIGPITASLIAATVGDNIGAFESARHFAAWLGLVPRQHSTGGRTRLGRITKAGNAEIRRLLVLGATSMVWRAARWNSRAGQWLQGVLTRRPVRLVTVALANKMARIAWALMTRKQVYQAHGHALTAAEAAV

SEQ ID NO: 107911 - protein, 341 aa, unidentified
MNIKRVGIDLAKQVFQVHGVDHQDKVVLRKQLRRNQLLSFFATLPPCLIGMEACGGAHHWARELQKLGHTVKMIAPQFVKPYVKSNKNDANDAEAICEAVGRPTMRFVTIKTIVQQDLQAIHRIRSELVRQRTAKVNQIRGFLAEYGLVVGRQVATLRRALPELLENAENGLSFDFRGLLEDLRQDLIRLDERVAEMDKKVHTLANSMPAAKRLQSIPGIGPISATAILCAVGDGKQFKRGRDLAAWLGLTPRQQSSGGKDRLLGISKRGDTYLRTLLIQGAKSVLKVVNNKTDPRSLWLQNLCGRRHKNIAAVALANKNARIVWALLSNETSYLPEGKPA

SEQ ID NO: 107912 - protein, 321 aa, unidentified
MKTVLGIDLAKKKFDVALLNNGKCRSKVFENNPAGFSSLLTWLAKNGVQSVYACMEATGNYGEALAKFLHEAGHSVSVTNPARIKAFGQSELLRTKNDKADAKLIARFCEKMEPTLWQPPPAEIEYLRGLGRRRDALISMRTQELNRQETANETVNSSVQTVLECLDKEIEQISKLIKDHISKHPGLKHKLDLLNSIPGVGPSTIEAILSEINAFEGFETIEQVVAYMGLSPKEHTSGTSVKGKSAICKIGNARLRKALYMPALSAITHNPIVKALYDRMKAKSKNGMVIACACMKKLVHLIYGVIKTNKPFDPAYTLKTT

SEQ ID NO: 107913 - protein, 481 aa, unidentified
MSQPKKHSPKPGQEKPAAGQGKRGGKRKGMCLEDRPILEPNAAGIDIGAREIFVAVTPDRAEDPVQVFSTFTEDLERMAQWLVSCGVSTVAMESTGVYWIPLYDVLEKHGIRPCLVDAHGMKNVPGRRTDWHECQWLQFLHSVGLLRAAFRPDGEVCAVRSLMRHRNDLVQMTNQHIQHIHKALTQMNVQIHHVIDDITGVTGSAIVDAIVAGQRNPLELAKLRDPRIKASEETIVKSLKGNWRPEHLFRLKQSRQMYRHYQEQITACDAEIEKLLVAFQPRVDPQEKPLPPDRKKKKHRARQKKGALNTGFDLRTESYKLFGVDLTQIPGLMLMVLTLFSEVGRDMSRWKTAGHFVSWLALCPDNDITGGRVAWRGMRKVHNRAGELFRMAAYSLHHDRSPLGDYLRRMKSKLGPPGATTATAHKIAIIFYTMVKKQVEYDATLWAERDAQREKRFEAKIKRQAQQLGYKLVPIEENPAA

SEQ ID NO: 107914 - protein, 327 aa, unidentified
MPEAIKGKEDWIVEGKSMFVGIDVSKATLDIAIRPSGSRESIANEQAQIQQLVKRLSAMPMALIVLEATGGVERRVVRALAAAELPVIVVNPRQVRDFAKAKGQLAKTDRIDADILGHFGEAVRPAVRALPDPASEELRALIARRRQLTEMLTAETNRLAHGAKTVRRRIEAHIRWLEAELDRVDTELDQTIQQSPIWREQEDLLKSVPGIGPVISRTLLAELPELGRLNRKQIAALVGVAPLNWDSGMMRGRRAIWGGRATVRAALYMAALVASRCNPKIREFHRRLRAAGKAPKVALVACMRKLLTILNAMIKHRVRWSPVVEVH

SEQ ID NO: 107915 - protein, 345 aa, unidentified
MIKNTIIAIDLAKHSFQVCKFNSDGKIDYNKAMSRKALIALLGNHVSALVAMEACGGSNYWARLARRHGHQVKIIQPRAVKGLQLKQKTDKNDAYAIGIAAQLPHINSCGIMEEDEQGLQALERVRMLQLEQRTALANQIRGLLTEFGIVIAKGLNHLVTALPDILEDAENGLPMNYRQALAAQSQMLQLYTTQIESYDRLIAEHTRHNPVCQKLSKLEGVGPLIALGLTVRLGNATEFNTGRDASACIGLTPKQHSTGGKERLGHISKNCADKRLRSLLYQGAMSVVNKAVSREPKTVKEQWLKALVDRRGKKVAAIALANKTVRTAVALIKNNDDYNPILLAA

SEQ ID NO: 107916 - protein, 369 aa, unidentified
MKVTTIGIDLAKSVFAVSCADGRGKLVMRKQLRRAQVLEFVSRLKPCVVGMEACGGAHHWARAIERLGHGVRLMSPALVRPYRTGPKHNRNDADAICEAVRRPQMRYVAVKSVAQQDLLALHRVRAQLIKQRVALSNQLRALLHERGVAARLGAAGLRAGLARALADEHDERHEVSGAMRELLLELSGWLRELEQRGAAITKRIEHAAKHDERCARLMEVPGVGPLGASALVATVGNARAFKRGRELSAYLGLTPRQHSSGGKTVMLGISKHGDRYLRTLLIHGARSLLYRNRRRAHPRAPWVARLVARRGPNVAAVALANHNARRLWALLSRGDRYRPSPQPRSFPSRPSTVVKSAREGKPRLNNQRN

SEQ ID NO: 107917 - protein, 353 aa, unidentified
MQTLTGPATTTYSAGIDLHKKPVQVHVINADGTTVYHGTIRKNKRAALRALLARFGTNITVGLESTYNWYWVADELAGLGIPCLLGHATDVHAQMPGKHKTDPLDAEKISRMVWTGTLPPAYCYPARWRATRDLLRKRLRLVWEHTRHLLHAEGVADQYLLAESSLTAAGYSAAFEADVEQLLDTDQYLQVVLAGVIKKLEATILQRAQVHDQQLFDLFERIPGIGPVIALTLLYEIHDIARFRTPQQFASYARVVNARCESAGKRVGRGKNKRGNPYLCRVLHTLALTSVRYMPPLAEWYRATIARHGRRTARRILAHKWAVAIHAIWRRREAFDLGKFLGTAYQPRAQHSH

SEQ ID NO: 107918 - protein, 404 aa, unidentified
MYNAVGIDVSKGKSTVAVLQPGGTVIRKPFDVSHTSQNLNELADYLSSLDGTTKIVMECTGRYHEPMVKALSEAGLFISIVNPHLIKNFGNNSLRKVKSDPADARKIARYTLDNWTELRQYSGMDNTRTQLKTLNSQFSFFMKQKVAAKANLIALLDNTYPGVNKLFDSPTREDGSEKWVDYAYSFWHADCVRKIGLKAFTERYMSFCKKHHYIFQQDKPEKLFNASKELVAVFPKEKTYKLLIQQSIQQLNLASEHVERLRREMNELASTLPEYSTVMGIYGVGKTYGPQLIAEIGDVSRFTHREALTAFAGVDPGVDESGQHKSKSNRASKVGSARLRKTLFQIMTTLLQNAPEADPVYRFLDKKRSQGKPYYVYMTAGANKFLRIYYGKVKECLRNLEQTE

SEQ ID NO: 107919 - protein, 399 aa, unidentified
MFVGWDWASTAHDVTVIDSAGELVHRMAIPHTEDGIARAVAKLADYGDPGELPVAIEATRGLVVDRLLGVGHPVIAVHPNAFHAVRPRWGAARAKNDPGDSFKLADYARTDIHRLPMLVPTLPETLELQALTRQRDCQLALRIAAVSQLAALLDQYWPGGKTIFAQLHSPIALDFLDRYPTPRAAASLTPARIEAFCHRRGYSGRRSGAELLDRLRSAPISASRLGEPVVAQMIRGQVAVVRALQAGIDALDIVIAEKVTAHPYAGLLAVLPRIGTLNLAQIIGEVGPILERATSFDQLAAETGLAPVTRSSGKTHTVAFRYATNRRARQALHTWLDNSRRSSDWAAQRYAAARARGQRHPHALRTIGRAWLRIIWACWRTQTAYDPARDERAKQPTAA

SEQ ID NO: 107920 - protein, 312 aa, unidentified
MASDWGADVGKDGVVLACHGSGKVLELANRAGVLQRWVKGLEPGSRIGVEASGIHHRCLARVAVAAGHTVYVVNPRDVKHYAAGVGRRAKTDRVDARLIARYVAHEHKQLRAYREPDPRQQAIAELLVRRHAVVKGKVGLNQALGDLPGYEKVRASMEELLREIDARLQALIDEQAGLHALCERLRSVPGVGPLLSAALGNLLMQHGFHSSDALIAFLGYDPRADDSSERRGRRRLSKRGPAELRRLLYTAAMAGARTKAWKPFYERDRARGLSSTEAMIVLARRIARTAYSIARHGTLFDPARLAGACTKP

SEQ ID NO: 107921 - protein, 429 aa, unidentified
MKIIYPRVCGIDVHKQFIVAVICISESVEPIYLKKRFSTFHNDLIRFREWLIQNDCQNVCMESTGKYYIPVYNVLESHISNIVVANPKWVRAVKGEKDDDKDAKWIADLFKFGIVRSSFIPQKDFRILRELTRYRYKLVNMRSSEKNRFQNALTSGNCKLDMVFTDVFGKSASNIIDLILSDNPYTDEDILSKVHKNCKASPDMILNSINGTDLTPVQKSRIELVNDHIKQLSSNIQRLDKLIDLMIEPYEDYISFLCQIPGVSRNSAIIILSEIGVDMNQFTSTRRLTSWAGLTPSSNQSAGKKKSVRISRAGVYLKPCLVEVAHAAVKDKSHPYYANKFNKISKRRGKKRAYIAIARKILVAAYHMLLTGEIWNPADLSEVETPVEQRLKYVKNNLKSDIKQLLDIGLTVEELTLMIQQNANIIATQ

SEQ ID NO: 107922 - protein, 342 aa, unidentified
MKIIGCDFHPSFQQIAMVDLQTGEYTERKLTPDEARQFYAELKGPVLVGMEACGNTLWLERLLASLHIELRLGDAGKIRAMEVRKQKTDRRDAQLLLQLLLENRFPQVWVPTVEQRDVRQLLLHRHKLVGMRRQVKNELQHLALNQGVQQKRKLWSAAGRQRLQELPLTGWTKQRREDSLQLLDELDGRIAKLDIAVQQEADRDAVARLLQTHPGVGPITALAFSLTLGTIERFGRSRQVVSYLGLNPAEHSSGGRQHLGGISKQGNPMLRSLLVEAGQSAARCVPELKRAYQRLKHRKHSGVGKVMVARKLAVRLFWIWKTQQPYAAARTQGSPSHSVVAG

SEQ ID NO: 107923 - protein, 346 aa, unidentified
MNYIGMDCHISNLDFAVVNETGRLVKAHSIATSVNGFMEFVKTVPPPRTIYMEEGTLAAWALETCVRFREKLVITDAKKNHWIGSSGQKDDSIDALKLAQLARGGYIKEIHHPVGQRRRFRELMMAYHDTVRSTTRIKNKIKARFRQNGIQCTGTTVYSETHREEWKGKLPQEATLLLILDGLWRQLEQSEQTEEELLAAAKAQAKQYPEIKLFKDIPGIGFIHAATISAILETPYRFADKRKVWMYAGLGIMTRSSGGKTYSEKLSTDYNRLLKYTLKQAAEAAIQAKDNPFRRKYLDMTLLHGIAPNLAKLTIARDMLATMWAMWRKGEKYSPEIREKAACKQD

SEQ ID NO: 107924 - protein, 433 aa, unidentified
MFEAEDEPLFADRAAGIDIAKAGIEVTIRVPSDTRRGGRQQETRPFRTTRKDLLALADWLRCWGVTKIGMESTGDYWKPVYFLLESEGLDCVLYHAAQVKALPGRPKTDKLDSVWLAKITERGALPGSFVPPEEIRRLRTHTRYRRHLTQARTAEKQRVEKLLEDAHLKLSSVISDIHGVSGRAMLEAIAAGERNATALAQLARGTMRGKIARLEEALDCAFVTEEHAAVLAMMLAAIDYYTARIEELTARIEVLCEPYLRQIEQLDAVPGTGVITAQDVIAEIGTDMAVFPTAAHLVSWAKWCPQVAQSGGKRKGANASGRGNRYLGAALGEAAVSAGRTHSFPGAKYRRLVKRMPKKKALVATGNSLLTIYHALLSDPAATYTDLGADYYEHRANSRRQVRNHIRAIERHGYKVAIEPIDPATAELEAAAS

SEQ ID NO: 107925 - protein, 418 aa, unidentified
MKSIKAEKIKTINEKTLVVALDVGKKVHYGYFRTPKNQDVKPFPFYNTGQSFNKFWEKLCRFKEKHMLDEVVIGFESTGPYAEPIANYLRKKPVKLVQVNPMHTKRIKELTGNSPNKTDKKDPRVIADVISLGHSLTVVVPEGSAAQLRRLTHARERAMERRTAMNNQLQDLVFIIFPELGDIIKPSTKTGMYLIKNYLAPESIVSIGNETLCNIVRKISRGKFGIDRAEKLHNAAKESVGITEGKESILLETSHLVSNIEAENRYIESLKEQMIVCLDQIPYSHSILSIKGIGNITVAGLIGEVGDFRKFKTISEVMKLAGLDLCEVSSGMHKGNHRISKRARALMRKLLFFAAINAVKSHGIMHARYQKMLNNGTPKIKALIAVSRKLLRIIFALARDNAQYEENYKRKHDYKLAA

SEQ ID NO: 107926 - protein, 356 aa, unidentified
MKAQKQSVGIDISKDSYTACLCILHMEGNLQFSEVKKFKNEKTGFNQLLRWVRKVKEPTLPISFLMEATGVYYEDLAHHLYDIKQQVHVVLPNMSKHYFSSLNIKTKTDELDAKILSRFGVERTHNKWIKPNETFLQLRNLCRYYVQLQEQKTAVGNIKHSKECSHQIQKLILKSNTKLIKEIDKQIIQVKLEIQKLIQQDEELSQKVEKLLTIKGIGILTIATILAETLGFQYVKNIKQLASYAGYDVVQRESGTSVKGKTRISKKGNRYIRNALYFPAMVACRYNENLKQNYLKIIEKKPSKMIGQVAIQRKLLILIYSLWKKDEVYDNQYSKKIAPEVNSEAMQDRILIESLP

SEQ ID NO: 107927 - protein, 487 aa, unidentified
MGTDRRLVGIDLGIASAHTVRVLDETGKTIAKRKAWPTSDSLAEVEAAALAGAPVGTRLEVVVEPTGPAWLPIAVFFARRGHVVHRVSSAKAADLRRFLSRHTKTNGIDADTLARLPLFDPAGLRPLELPGAERAALDRRVRACDRLTQAGAEHKVRIKDLVRQLLPMTPLRGDLGVADLAVLERWADPNALVKAGVKRVTAVIVKASHNHQGAERAAEWITAAEASIDLYAGHRAVAFGDLAAEVATEVRLLRAVQAELAGHEREREDCYRWVDPGALARSMPGFAEVGGPALVAVMGNPARFRRGKQFRAFTGLAPRASETGETDRKGQPMSKAGSSLLRTTLVRAADHARKQDPQLARIYYVQMVERGKDHLGALCVVAANLAERAWAVMARGMPYVICDTDGRPVGPDEAKTIIAQHWAVPADVRARRRSKKAGKAPQKVLAGQSKPHAQGAGKRGDLPRRASSNAHHNHVNPTNTSSKLRTA

SEQ ID NO: 107928 - protein, 345 aa, unidentified
MELHTIGIDLGKTVFHLVGLNLCGEVVVRKKFSRKQLLHFTANLQVKLIGMEACGGSHFLGRALREQGHEVRLMPAQYVKPYVKTNKSDYIDAEAIAEAVGRPKMRFVPIKSDDQLDLQSLHRVRERWVMRRTAVINQIRGLLLERGITLRQGRGHVDAALPGILEDASALLSGALRLLLAQLKLELDHLQMRIDEADAMIKKAAGDNEACRRLVAIPGIGPVTATAIIAAIGNGAAFKKGRGFSAWLGIVPGEYTTGGKQKLLGISKRGNSYLRRLFVQGARAVLQQRAKQSSGLSAWLAQLTTRTHSNVAAVALANKLARMAWAVLAKNEPYRPPIVVGAATT

SEQ ID NO: 107929 - protein, 410 aa, unidentified
MPKIVYPVCCGIDVHKSFVVACVATTDAALVTTYRSKRFSTFTGDLRRLAEWISQNDCKDVCMESTGKYWIPVWNILEPTCRLVLAHPKYVKAIKGKKTDKRDAKWIADIFKHDLINGSFIPPADIRQLRDLVRYRFKLASYTTGEKNRAQNCLTVSNIKLDDVFSDVFGKSASAIVSRLLENDEPFDVAPYVSKKCQTPIPEIQAAVDGAMCANQAEKLRIIRSHMDSLETCKANLESEILSLAEKFLPQMNLVLTVPGIQSFAAAAIIGEIGVDMSVFETSRHLCSWAGLAPQNDQSAGKKKTTRISRAGVYLKPLLVQCALTAIRSKKHPEIANRYNAIKKRRGHKKAIIAIARMLLTAIYNILKKNEPYNAELYRRSDKPPVQREVAVEQAIFILQRQGYLVSPVV

SEQ ID NO: 107930 - protein, 349 aa, unidentified
MEYPPDALAAVPPGGVTCGIDWANDDHAVCVVNMAGQVVQRFTVEHTGEGLAELVRRLRKAGVGEVAIERPDGKVVEAVLAAGLTIVVISPNQLKNLRGRYGSAGNKDDRFDAFVLADTLRTDRARLRPLLPDTPATVTLRQACRARKDLVGHRVAVCNQLRAHLKAAFPGAVGLFYELDSPISLAFLARFDCQDRADWLSPRRLAAWLASQGYCGRKDPAILHARLTAAPRGATGGDGAAKAHITRALTAVLTSLAEQIKALEAQIAEQLARHADAHIFTSLPKAGTVRAARLLAEIGDCRARFPEPQALICLAGTAPSSACSPPKTAPQNRPRDPNPRLEKISAMKG

SEQ ID NO: 107931 - protein, 412 aa, unidentified
MEVVHRRCAGIDISKKDAKVCVRVQGSGRRATTASVTTWGAMSNEILALREHLVAEKVTCVVMESTGDYWKPFYYLLEDAVNVMLVNPRDARNRPGRKTDVSDAAWLADLGAHGLLRASLVPPPPIRRLRDLTRARTDLNRDRVRQIHRLEKILQDAGIKLSSVATDIMGQSSRAMLEALIEGKTDPAALADLAKRRLRSKIPALTEALTGRFTAHHGYLIRMHLNLIDSYTTALRDLDTKIIDALSPSLAAARDRLCSIPGWSTTVAEVFLAETGGDMTAFPTAGHLASWAGVCPGANESAGRVKSTKTREGNRNLKGALGIAALSATRSRDTYFAAKYRRICAHRGPMKALVAVERAMVVAAHGMLTNGDFYRDPGANYFTARRPGSIKANAIRQLQALGYAVTLEPATA

SEQ ID NO: 107932 - protein, 427 aa, unidentified
MPYKIAGIDVHKRMLHVVVSDVQVDEEYDFTRRVFGSLPEALRSLAAWLVEQQVEEVVMESTAQYWKPVWGTLERYWKPICQTREGALATSGTLHLAQALSNRGRRGRKKDFRDAERLVKRLVAHELTLSFVPDVEQRLWRTVVRTKYQLTRNRVQLQNRLEALLEEAHIKLSSLVSDLLGASARRMLEAIAGGETNRETLAALADRSLRATQEQLQDALGVCQELNPVYRRLIKMVLDEVASIDKRIEQLNQDMANLLRPHEDQVKRLAEVPGLGVDSAQQVIAEVGATAATFPSEKHLSSWVGACPGEEESAEVNHSRRSPEGNRHMRRILNQAANAAAKHKGSIFQILYGRYVPRLGHNQTIGIIAHKLCRLVWKILHRGIRYEERGPEVSKASKQKRTRKMIRQLSRLGYRIEPSPSQSAITA

SEQ ID NO: 107933 - protein, 449 aa, unidentified
MHIRWGVAPRAPVQGTIRHRGGLAAKGSEGVVTEDVEWFAGIDWASQTHQVCLVDAGGKIVGEHGFAHGGAGLAELCSWLLTMTRAAPTAIAVAIEVPHGPIVEVLLERGFQVYAINPKQLDRFRDRFTVAGAKDDRRDAHVLGDSLRTDRHCFRRLSAENANVIELREWSRMSEDLQQERNRLANRVREQLWRYYPQALAISDDLAADWFLQLWAAAPTPATARRLRESTVGGILKRHRIRRITAAEVLASLRQKPLTVAPGTAEAASAHIRTVAQRLTLVNRQIKQAHHRLDALSDRITENEGDSDAMGQKSEQRDVTILRSLPGVGRIVLATLLAEASEPLRRRDYRTLRTLSGVAPVTRRSGKYCIVVRRQACHMRLRSAVYHWARVATQHDQHSRHRYAELRKRGHSHGRALRSVGDRLLAVACAMLTRQTPFDPDQPLKQMAA

SEQ ID NO: 107934 - protein, 337 aa, unidentified
MIHVGVDLHERFCYMTALDSTGRSLKAGSVANEPGALRQWLRGFSEPVSVAVEACSFWPAFQEAVEKEVDEMHLVHPQRVKAIAAAKLKNDRVDSATLAHLLRCDLLPPAWMADGQTRQKRQQVRLRISLGQHRAALKNQVHAILHQHGLRSPVSDVFGKKGRAWLEQAMLPAAARGALDTYCALIDQVSRHMEKQEREIRQMAKADPRAKWLATIPGIGVYSAMILLSEIGEVQRFPTAKTLYSYAGLVPWVRESAGQKCHGGIHRCGSPRLRWVMVEAAHTATRCSPAAKRYFQRLRRRKHPHVARVALARKLLGAAYALLRDGVCFDETIFAAV

SEQ ID NO: 107935 - protein, 427 aa, unidentified
MKVLHERVAGVDVHKKMIKVAVRSPGDKPWTRKTEILTFGTFYGVLRAMARELRRRGVTHVAMEASGIYTEPVYYALCEEGFAEVLVVNPAHAKALRGHKTDARDCARIAELLECGLLQGSYIPAVELKELRDLVRYKIKTVQARTSEVQRLQKALESAGIKLGSVASDITGKSATAMIEALIDGERRGAVMADLAVGHLRTAGKLADLSMALEGRFTGHHALMCRLILDRIKGLDAAAGDLDQREIGLLKTIPGIGDIVAQAWIAEIGPAPHRWFPSHDKLASWVSLAPGNYISAGKRRHGRTGDAGTYIKPMLVQAAWSAIRVKGRLQARFNRLVRRFGGPKNPAARKKAIVAIAHTLLKIAYTVLTTGTAYQDLGADFYTRRQSREHRQAWLEHQIQKLHPGCTITITISPPGPAPEAALTPST

SEQ ID NO: 107936 - protein, 317 aa, unidentified
MTTPSEAYVGVDVGKTWLDVALWGSEAVWRVSNDDEGVAKIMARVAAMEPQLIAVEATGGYEQLLVQSMLLNSLPVAVVNPTRVRALSKATGKLAKTDVIDARLIAEYAFKVQPEALAPKEANEIRLNALVTRREQLVEMRTAEQNRLGTAQNSMQADIRQHIEWLSVRIEELEAQIKELVDSLPEWREQAQRLDSIPGVGMITAVTVLAEMPELGQLDRQKIAALAGLAPFNRDSGQKRGKRRIFGGRKGIRRVLYMACLSAKKCNPVIRSLFERLMKKGKVFKVAITACMRKMLTIMNAMTRDQVNWRAPAPIPV

SEQ ID NO: 107937 - protein, 411 aa, unidentified
MDKVYDKCCGIDVHKKLIVACFRKGNKQEVREFGATTRELLELSDWLKSGECEIVAMESTASYWKPLFNILESSDLNAIVVNAHHMKAVPGRKTDVKDAEWIADLLQHGLLQPSYIPDKSHRELRELVSYRKSLVGERSRELNRLQKMLEGANIKLSGTVRDINGKSARNILEFLITGESIDDTKYDEMYEKKIIAHNLKASKEQIIDDLNGVMTALQRRMMKELLVHLDELNVHIKNLNDEIDNYMKPEEKQAVAFIEEIPGIGHTSAQAIISVIGTDMSRFATDAHISSWAGLCPGDNESAKKRKSGKTRKGNSLLRSTLVICAHSCIRNKRSYFYAQYMRISAHRGRNRAYVAVAHSMLVAIYHVLKDGVVFNDLGADYYNQFNKERKINAYLKKLKALGWEGPIVAA

SEQ ID NO: 107938 - protein, 430 aa, unidentified
MNINTNMKNPDNANDYAAFIAIDWADQKHVFSLEVAGQTTKETGTLEQKPEVIGPWVAKLRERFGGRPVAIAVEQSRGALIHALLSYDFIVIYPLHPSTVAKFREAFKSSGAKNDPLDTDQILQILTKHRERLKPLNADTEETRLLARLVEDRRKAVDLRTSHIQALTAALKEYFPQAIELLSGNLTSRLAGDFLMKWPTFEAFQQAKPSTLKRFYYGHNIRSPELIEKVLSLASTAQALTTDLAIVQSGSRLSQMYARLIQSLNPVIENYEGHIQKLFQDHPEANRFNKLPGAGPALAPRLLSFFGTDPSRYEAAGNAQSFCGIAPVTKSSGKTRVVYFRHACPKFDRQTFHEFARLSLAKCQWARNYVDYYTGKGKKFHTIIRALAFKWIRILFRCWKNRTPYDETKYMDNLKKRGSIFASLHLEKKT

SEQ ID NO: 107939 - protein, 317 aa, unidentified
MRASAAFFVGIDVSKQQLDIAVRPSGESWTVAHEEAGLSALVARLRGLAPTLIVLEATGGWEVPVTGALAAAALPVAVVNPRQVRDFARATGLLAKTDRLDAQLLAQFAEVLRPAPRPLPDAQAQELTALLQRRRQLVEMLTAEKNRLPLAARRIRPQLQAHIAWLHQQIAQFDEDLRQRIRSSPLWREKDDLLRSTPGVGPVLATTLVAALPELGTLSRRQIAALVGVAPLNRDSGTLRGRRTVWGGRAQVRAVLYMSTVVAVRHNPVLIAFYQRLRAAGKAPKLALTACMRKLLTILNAMLKHHRRWAPVRAQHA

SEQ ID NO: 107940 - protein, 312 aa, unidentified
MSDSFVSIGIDVSKKKLDVYVQHLDQYKQFNNDPYGITKLLQHLKKLKIDIIICEPSGGYERLFLSTATQANFPVAMVNARQIRDFAKAKGILAKTDMIDAKVIADYGSVFKPEPQSYTMHSDLQQYVARRRQLVEIQSREKRALEHVSCDALRQDIEQILQLYQDKITSIDKKIKAMITQDEQSEQKLEILTSCAGIGDVTAAILIAELPELGTINHQEISALVGIAPFNHDSGAMKGVRRIRGGRGNVRKALYMAVISAIRFNPDIKETYERLRKNGKHAKVALVAAMRKLLIMLNALIRDQRIWQKTKV

SEQ ID NO: 107941 - protein, 347 aa, unidentified
MLYAGLDLSRQRLDVCVLDENGRTIEVTAATPEVFGLRELVTRISRHGEEVSATIESMNGARFVHDQLELYGWDVEIADAVKVKGLAPLAAKTDKIDAWVLAELGRRDLVPAIWLPDPSVRAERERARFRLHLVRHRTALKNRIHATLITFGHPVPVSDLFGAKGRELLASLAIPEPWATTLARSLRIVDELGAEIEQCTADLQAAGADHPYVPLLMSVPGIAWVLGYTIAAELGDIGRFATPKKLAGYTGLCPLVRQSGRRDDRGPLAKNGPKYLRWALIEAATHAARHPAYRDRYEHTKKRLGRQRGSKVARVELARELSTAIWHMLTKNEPFAPGRPPALPLVA

SEQ ID NO: 107942 - protein, 346 aa, unidentified
MQVTTIGLDIAKNVFQVHGIDASEKVVVRKQLRRSQVLAFFTALPPCLVGMEACATSHYWARELTKLGHRVRLMPAKDVKAYVKRNKNDAADAEAICEAVRRPTMRFVQIKSVEQQGRLMLHRARDLLMRQRTQVINALRAHLAELGIVAAQGREGIKELLKIIASEQDARLPVDAHASLVVLAAELQAMQTMIGSIEKRIIAQHRSSEASKRLESIPGIGVMGATAIAATVPDPKVFRSGRDMAAWIGLVPRQDSTGGKQKLGPISKQGDRYLRRILVVGACAVLRYARQKPEKYPWLTQLLARKPFKVVAVALANKMARVAWALLAKGGTYRAPGLAPVVAAAA

SEQ ID NO: 107943 - protein, 450 aa, unidentified
MSKKRSKVASLPFVEPNAAGIDIGATQIFVAVPPDRDAEPVQCFDTFTEDLERLADWLQQCQIRTVAMESTGVYWIPLFEILERRDVDVRLVNAQHVKNVPGRKSDVEDCQWIQHLHAVGLLRGSFRPNHEICAIRSLWRHRDNLIQLATVHLQHMQKALDQMNLQIHHVISDLAGTTGLAIVDAILLGERDPRKLAQLRDWRIRASEETIVKSLVGDYREEHLFVLRQSLESYRQYQRLIQEIDTQVKQMMSRLPVNVDINERPLPKEKNPRKTPWRNEPPQLREDLYRTFGVDLTQVPGINTLTAQMLLTEIGPDLSRFPTSAAFCSWLRLCPDPRISGGKVLSSKSRPTKNRAALALRMATQGLHRSQTFLGDYFRRMRARLGTPKAMTAVAHKLARIVYHMIRTHQEYDTTVFEDHERRTQDRKRRKLKAQARELGFELVRVPAVP

SEQ ID NO: 107944 - protein, 358 aa, unidentified
MQNKVKTISFQGQNIYVGIDVHLKSWKVTIMLDHSFYKTFSQDPEPGILSDYLHRNFPGGNYCSAYEAGFCGFSVHRELEKYGINNIVVNPADVPTTDKERKQKEDKRDSHKIARSLRNRELNAIYIPDREMEELRSLVRYRKALVKDIGRNKSRAKAFLHYYGIHIPNELDSASQHWSARFTSWLKTVETTTDCGGFVLSEIISTTEHLRHRLLKVERQLREISKSGPLAKKIEFLRSIPGIGLIVSMMLLTELGDITRFPNLDHLCSFVGLVPTTKSTSDKEKTGNITPRSNKILRNSIIEAAWISIRHDPSLALRYNELCKRMKPSEAIVRIAKKLLNRIKYVLKNEKEYVYSVI

SEQ ID NO: 107945 - protein, 337 aa, unidentified
MKQIKRIGVDLAKNVFQVHGVDHHERVVLRRALSRAKLREFFAQLPPCLIGMEACGSAHYWAREFERLGHRVRLMAPQFVTPYRKNDKNDGNDAEAICEALGRPNMRFVPVKDTEQQAVLCVHRARALLVAERTALINQIRGLLGEYGIVVGQGASRLRRALPEVLEDADNGLPTLAREVFAERYSHLRGLDERIEAYDQRLRALAQQMAPARRLMQVPGVGPLTATAVVASIGDGRVFRNGRQFAAWLGLVPRQHSTGGKPRLGRITKRGDAYLRTLLVHGARSVLCRPGEDPRRRWAQALVQRRGFNKAAVALAAKQARVLWALLAHPDDYRPAA

SEQ ID NO: 107946 - protein, 332 aa, unidentified
MTTAVTETGSPSGPVAGIDVGKSCLDVWVGGQMRSFANDGAGIAAMLQWLASRPVSQVVCEPTGGYERPLVQSLSQAGLPVRLAHPNKVRAFARASGQLAKTDRLDAQMLSRYGEVFASSGITPPEPEREELQSLLRRRRQLADQRVQERNRLDRAWNPAVRASAQRHIDWLDQEIAALDREYREALESSQELSRRAELYRSVPGIGQLTAAILVADLPELGRGEGKALCSLVGLAPWSRDSGQQRGYRAVRGGRGTVRRALYMAALSVIRGPGELGRFYQGLRQRGKAGKVALVAVMRKLLLQLHAVARRGTCWTLNHPTVSPIPNPRPNP

SEQ ID NO: 107947 - protein, 345 aa, unidentified
MPISTTISPSRPIFAGIDFHKRFSVVTLGDADGKVLTQERLESDPHQIRKFFLRHGPLTCAIENCRGNEWFIETVKGCGCEVKVSNTHTVRLIADSTKKNDKIDSKFLMELLAKDYLPTCYQPSQEERLLREKLRWRTKLMRSRTQYKNTAHALMDKENRDGAVHSSRQRKKLSKKGRLTEERQERLKKNLEVIEFFDKRVNNEDADLDELAKQNQDVIRLKTIPGVGNISALMLVAEIGDVNRFKKAKQIGGYFGLVPRLYASSDVHYLGHITKRGCGLMRRLLVQDAWMAIRVSKAFRQRYSSIMKRRGKKVAIIAIARMIAEIAYRILKDKTAFDEKKVTLG

SEQ ID NO: 107948 - protein, 311 aa, unidentified
MNNTIGIDISKDTLDAHRLADGQHKQFLNGKTGHAQLVKWIGKQSDPLIIFEATGAYHRQLERVLGTHIIPFVKVNPKQARRFAQACGKLAKTDRVDCEMLAKMGAALQLVPKPFTTENLYDLKELLSARRALIKDRTAAKARKATVINALIKQQLEKRLRQIKNDIAKIDALMLDVAREDQYMSERLDILFSIPGIGVITALMILVDMPEIGALNNKQVASLAGLAPMSQSSGKWMGKARIQGGRPNLRNAIFMPALVAIRHNADLKTKYDQLVTAGKEKKVAITAVMRKLLVLANALLRDNRKWAEKAA

SEQ ID NO: 107949 - protein, 445 aa, unidentified
MYSLFFMEPYRKEHIMHNKNYISVGIDVGSAFSFMTILAPDETVILKPFKITHNNKDSLERAVSEIKKAEELYSLESRTFLESTGIYHFPLFCYLVDCGFNASIINPIITHSTKNGNIRKVKNDKVDSIGIAKLGLSGDIPVSQFPAKLVLEIRSLTRKYYDLTDERSAHINKLKGDLHTVFPQYLDIFCDVTGKTSTMILRQYGTPDKILRGHKKTMIEKISKASRKGLSKAAERYEKLCAAATAAKTFGCQIDSIYFNISLTLDLIEKLDSALDSILQRIHQLVTFNKSEKFIQQIKWLDTIKGVGFLTAVTIMCEIGDFSAFRNPKQLFAYFGLDPEVNQSGKFVGTEMHMTKRGSRIARRAVFAVALASIRTKRNGEGINPYLREYYEKKSGQKPKMVALGAVMHKVCNIIFAVLRDEKEFELRSPEEHCRQYQRPALQAA

SEQ ID NO: 107950 - protein, 307 aa, unidentified
MEKIVYVGLDVHADTIAVAIADDGRNREIRFHGVIENTADSVLGLTKRLVAANTQPIFCYEAGPCGYGLHRLLTKLGFDCAVVSPAMIPRRAGDRIKTDRRDAEMLARLWRAGELTPVWTPDEEQEAMRDLIRTRKQSLDALKIAKQQLQSFLLRHGLRYNRPTYWTKIHWRWVNELRKFRFPHQQLAFEELKRTIRQIEERIATLDQAIKDAVKDWRFDALVDALRSLRGVNTIIAATLAAEIGDINRFDNPRQLMAWLGLVPSEHSSGRTVRRGRITKTGNALARTMMVEASCRIDTHLEKDILF

SEQ ID NO: 107951 - protein, 410 aa, unidentified
MEILYPHCAGLDVHKDTVVACARHMAEGKVRTQVKTFKTTTEQLIALSDWLSSAGCTHIAMEATGVYWKPVWHILSDGEFELILANAAHVKNVPGRKTDANDAVWLADLMAHGLIRPSFVPDEPTQQMRDLLRTRKQMTRDRASHIQRLQKTLEDANIKLDSVVTDILGLSGRRILEALIDGQTVPQALASLAHRRIHASSDELEAALRGRVTRHHRFLLKLHLDQIDAIDAAIARIDQEVSANVEPFRAAIEQLIAIPGISPLAAQVLVAEIGIDMSRFKTAAHLISWAGLCPKNDESAGKRRSNRMKKGAPWLKTTLVQSAWAAARTKESYFQAQYHRLRSRRGSKKAVCAVAASLLTTAYHMLKNGSTYRDLGPHHFDQPDKQKQANRLLKRLQNLGYTVQIQPIPA

SEQ ID NO: 107952 - protein, 380 aa, unidentified
MSTSRAILRHKDTTSTSALYMSLDLGDKQWQICVGDGRSGISRFTVAAGDKVAVADRVNRAAKHFKLDNRSLVHSVYEAGRDGWWIHRWLREQGIDNIVVDPASIEVNRRARRAKTDRLDADKLLAMLIRHHAGERVWSVLHEPSPEDEDARREHRELHRLMRERIAHTNRIGSLLVLHNLRPGIVIGGRDWPRWWEAHRARVPPLLRAELERECERLKLVKDQVRAIEAAHRCELADGKQPLVDHLTRLRAVGSKGAWILVKEVFGWRQFANRRELAGSLGLTPTPHASGSIDREQGISKAGNRRVRALLTELAWSWLRFQPDSDLTLWFNRRFASAGGRMRRVGIVALARRLAIALWRYVKDGEIPAGAQLKPALAEA

SEQ ID NO: 107953 - protein, 345 aa, unidentified
MLILAIDLGKAKSMACWYQTTDATHEFRTVPTRPGDFHTLLGDRPVDRVVVEICDAAGWVVDLCRTLGIAVQVANTNQEAWRWKNVKNKCDRGDGLKLARLSAMDQLSLVHVPEKPVREWRSLILYRHKLIDRRTSVRNAIHSILVAQGRAIPGRRSVWSDDTMSQLAELAKPLGECTATEDLWRGHLKMELEHLDELCRRVVELDRKLDALGEADARVRRLRTIPGVGPRLSELVVAMIDDPNRFANARQVSAYAGLVPRRYQSGEMDRSGRISKAGCGKLRKLLTEIAWGMLRHNPHGRGVFDRISKGQKTRRKQAAVALGRKVLCWCWAMLRDGSEWRVPTA

SEQ ID NO: 107954 - protein, 348 aa, unidentified
MVANFTYDEYAVQCVGIDISKDKFTACLFTYNTASDLGWWTDVIEFRNNKTGFNQLVRWSRKNANKDYPIRYLMEPTSTFHEPLAYHLNAIGCTVFLIFPAKAKEFAKYEGIRTKTDDIDARTLSTIGCTNRKLKPWTPPKPIFRKLKQMCRFNNRMERMRTELTNQQSALKSGANAEASLMNRYEALLNELDKQVENNKKLIKKTVESDSDLKERVARITTIRGVGYLTVVSIIAETDGFSLIGNRRQLASFAGLDVIAYKSGTIDTNHRISKKGSSYIRAALYWPSISASMHNPQMKELYDRIASKNTRTKMIAITAVMRKLLLLIFTLWKSGEEYDSKRSASCTV

SEQ ID NO: 107955 - protein, 373 aa, unidentified
MRLAIGIDLHKMKAVAHAVYAGDGEAPERYRNFIDSFNREFSNSGSEPEDVATMADFLKGHEAHILIENSSKTHETYWVLVNRGLNVTVAFAADLYRITKSVKKTDKNDAIELAGYMRRRLDGENEFAACTMPTREWMMRREMCRAVFNEKMHLADLKRRTRSHLLVHGIKLSREYGDIFCKKAIAELLDSKDPCLRVFVSEAVALKKRTDEEAKYIQIMFANVRMFELIYSIPGFGLVSAAYITAMMMDISRFENSKKFTAYFGIVPKMRESADSSPRCATTHRGDEDARRIICQAANVHIRTVEESFVSIAYRRLRGAGKAHKEALVACGRMLMTVVYSVVRNNRPYTTDRAILDRAIETEAEMEDELGTV

SEQ ID NO: 107956 - protein, 342 aa, unidentified
MEQYVALDVSLKEISVCIIDSKGEVIFEGKTAAEPAMLVELIRSKAPQVKRVGLETGATSPWLFHALASAGLPVVCMDARHAHAALSIRPTKSDRSDARGLADMLRMGWYREVHAKSVTSHERRTILGARHQLVTMRSELDAQIRGILKTFGLILGTGNKDTLIQRAEKLAAGHPVMSGLVAKLAEVRRHVTSQIAAIDRDIRHLVHTEPTLKRLMSVPGVGPITALAFLSAVDDPSRFKHARDVGPYLGPTPTRYQSGETDRQGRISKCGDTFTRTCLYEAAHVLLTRVQRFSPLKAWGMRLAKRIGGRKARIAVARKIAVILHCIWTDGTEFWWTREKAA

SEQ ID NO: 107957 - protein, 347 aa, unidentified
MRFYNKQHLFYCGIDLHARTMYLCIMNQQGETVFQKNIPSKPEHFLKAVAPYREDIVVAVECMFTWYWLADLCAQENIAFVLGHALYMKAIHGGKAKNDRIDAQKIAVLLRGGMIPMAYVYPAEMRATRDLLRRRMHLTRKRAELIAHIQNTNSQYCLPDFEKRIAFKRNREGLAEHFPDPIVRKSMEMDLALIEEHDKQLAEVELYITRSAKVHDPNAYHLLRTVPGIGYILALVILYEIHDIDRFPTVQDFVSYARLVKCSAESGGKRLGSSGAKIGNAHLKWAFSEAAVLFLRLNPQAQRYLNKLASKHGKAKALSILAHKLGRAVYHMLKRNKAFDRKKFFGS

SEQ ID NO: 107958 - protein, 336 aa, unidentified
MFQLGIDVSKKTLDLCLLREGVKGSVKTRKLQNDINAVNAVIAWLSKQHCKPEDVHIIMEATGVYHESLAYGLHKAGGRISLANPHRAREFARGMGMLTKNDRVDAYMLACYGALKAPEPWLPPPEEVRHLSALLRRRDALVADSTREKNRLEKYLATDTPSVIAESVEAMIGQLNAEIKRLDRLIRSHLNQHPELKKDFDLLTSIKSVGYQLGLNMFVILRSHDFATAEQAAAFLGVVPVEKYSGTSVRGCPKLSKIGPPEIRAKLYLASLCGLRFNPLMKAMYERLCLRGKGKMCAIGALMRKLVHWCYGVLKTQKPFDVGYLSSYARSACKAA

SEQ ID NO: 107959 - protein, 358 aa, unidentified
MRIIGVDLHARQQTVAMLDTDSGELTEKTLKHAGDEVRKFYSALPGQVLVGIEATGSMHWFLELLEELGIERQVGHPAKIRAAEPRRQKHDRRDAALLLKLQVENRFPSIWMPSIELRDLRTLLMHRHQWVRMRTRVQNALQAIALGHGLRRGKTLWSQTGQHAIESLPLPPHAAHRRTALLDLYGKLQAEIDELDERVMDHAQQRPGAKLLMTHPGVGPVTALATDVFLGDPARFENGKALVSYVGMIPSEYSSAGRQRLGGLSKQGNPLLRFLWCEAAVHAVRRDPELQRFYRRKLAQKGLGKARVAAARKLGIRLYIMLRDQIDYQEFCRRGQMRQKSGAACAGMPEVGHGPAIQ

SEQ ID NO: 107960 - protein, 468 aa, unidentified
MQVVYQRCCGLDIHKKLIVACLLLMSSQGVQKEIRTFNTTLADLYRLRDWHVAIECQMVAMESTGVYWRPIWNVLEEELVLMLVNAQHMKAVPGRKTDMKDAEWIAELLQHGLLRASFVPPRPQRELREVTRYRSKLVQERARLVNRIQKVLEDSNVKLASVATDITGVSGRAILRALLDGEDDPEVLAELARGRMRSKRDALAQAVQGTLRDHHRFLLKSQLRQLDFYDTQIAELDQEIASRLGVQTGPDDPEPLGSGPLHGNRASSADQAPDGVADLASHSPEPSSDPARSQAEVMAVLDAVTGINQRIAQIVVAELGIRLDQFPSEGHLVSWAGLCPEAKISAGKRLSTKTGMGNRWLKQALIEAAHGAARSKNTYLGAYYQRLKKRMGSKKAIVALAHRILVIIYHLLKEQQSYRELGPGHADEQAAESSKRWAIRRLEQLGFAVTLTPNEGERLSGAAEEEIA

SEQ ID NO: 107961 - protein, 343 aa, unidentified
MNDTLIAVDLAKDIFEIAVSHRPGKVAECYRPRRAKLLAFFAQRPKATVIMEACGSAHHWVRKIQQLGHDVVLLPPHLVKPYVRRNKTDRADAKGLLEAYRNEQIRPVPVKSVQQQTLTMLHRLRSGWMAAKVARMNALRGLLRELGLFIPKGAKNVVPHVWVFIEDADSGVPDALRSTFAEACREIRDIEERIKGTERQLEALAGQMPTVQQLRTVPGVGLLTATALVGFIGDARRFPSGRHFASYLGITPREFSSGSRRHLGRISKMGDVYVRMLLIHGARSVLMHAKKMGQLDRLRQWALDVEKRTNHNKAATALANKLARIVWAVWKDHRTFQVIPVAA

SEQ ID NO: 107962 - protein, 332 aa, unidentified
MNGYKIVVGVDVSKNSFTATVLYDNKKENFEVKSDPVEFEKKIKPYLKKFKQSDMLIIMEYTGVYHLKLANYLYENGYKVAVVNPFSIKKFMEAKMTRVKTDKADSYFIAEYGRMFFDGELYKPKSDVEKEIEIKLKILEDLQKQLTMLRNQRESLAHVPMKKLKENLEYYDELIRKIEKSIKELEKEIKELTKKNYQEEYKLLKSIPGVSDRVIGVVISIFGGFKRFKSVKDAASFAGLNPSPYESGTSVKKSGSIKKMGNPYARKILYMAALSAIRFNKYCRELYERLVSKGKAKKLALVAVAHKLLRQAYGVLKSRRPFDENFCTWHLT

SEQ ID NO: 107963 - protein, 407 aa, unidentified
MDIIIERACGLDVHKDNITACIITPKGKEIETFSTKTIYLIELVDWIKEHNCTHVAMESTSVYWKPIVNLLEAEDIEFLVVNAQHIKAVPGRKTDVKDAEWIAKLLRHGLLKASFIPDRNQRELRELVRYRRSIIEERARQLNRIQKVLEGANIKLGSVVSNIVGVSSLDMLRSIANGNDDLDDLVNYARGTMKQKREQLKLALQGYIQEHQRFMIKTIIDHYDYLTNTIDMLDKEIAERMNDYQDDIERLDSIPGIATRMAEQMLAELGTNIKEQFPSAAQMCSWAGLVPGNNESAGKRKSSKTRNGNKYLKSALIEAAHSVRGSKNYLGALYRRMASRKGKKRAAIVVAHAILRISYYLLTRKEMYVDLGEDHFDKQRKQSIVKHSLRRLESLGYTVDIKEQITS

SEQ ID NO: 107964 - protein, 337 aa, unidentified
MEHIAIDLGGRESQICVRASDGTVLAEERWPTGSLKKYLARRPKSRVVVESCAEAFSVAEAAEECGHEVNVVPATLVRALGVGARGLKTEVRDARNLSEVSCRMARLPAVHIPAKASRERKSLCSLRENLVEVRTKLANGVRGWLRSEGLRSPRVGQPERLWLRVQEHLKQRDRVMPGYVERNLKAINFLTEQIEEADRELGATAKADPTCRGLMTVPGVGPVTAVRFAGAVDQVERFPNSHALESYVGLVPGENSSSERKRITGLTKAGAQKLRWTLIQAAWSARRCRRNDPMVAWALQVEARIPQNALPNPMRSCGNVSSLEHGGLGAPQSPVIQ

SEQ ID NO: 107965 - protein, 428 aa, unidentified
MAVFCGIDWAEGHHDIALIAGDGTLIAKRRIDESVDGVAEFTAMLVAAGDSAEEPIPVAIETPRGLLVAVLRASGRPIYPINPLAVARYRERTSVSGKKSDHVDAMALANILRTDAHLHRMLPDDSELARAIAVLARAYQDAVWRRTKLVQELRARLREYYPGFLAAFAAGSGSGRGLSTTQLASADARAVLAIAPSPADGLSVSKARVETALRRGGRQRRIASLATAVVAALRVPQLRQDPAVEQAMRTETLALRAVLDAICASVDQLAAALVEAFAQHPDYDIITSFPGLADVSGAIVLAELGDDRDRFVDDRALQAFAGSAPVTRASGKSRTVVRRRTRNNRLASIGYSWAFTAAARPSPTREHYLRRRDRGDKHPAALRHLFNRMLGQLHHCLQTGQTYDPTKAFPHTAAEPAANAEPAEQVAA

SEQ ID NO: 107966 - protein, 352 aa, unidentified
MQPKQTEQIQAEQIQAEQTQTEPTQTPPATRWFVGIDVAKAQLVVAAETSEWLQPTQSPVLSVPNTPAGFAQLQDWLIALGTVERIVLETSGGYEEAVRTFLLTAGWSVVRVNSVRARAFLKSQQGLLKTDARDARSLARFGKVVPEAGLTRSEVQEELRRVHARREQVRAMLEAERKRAQVVSPRVRPSVERMIEALEQELGWLDAQSEALVAQDAELQAQEQVLQSAPGVGRVVAQGLLAFLPELGRLGSRPLARLAGLAPVAQESGSSVRRRRRLREGRGAVRRLLYLAALSEVRVDGKWRRVYEGLLERGLSRKAALCAVARRLLCVLNAMVRDGRCYARMGWEGAGG

SEQ ID NO: 107967 - protein, 343 aa, unidentified
MNIQLKTNDVQVNSIHQAGIDVGAEELVMVIRKNGKLFNPQTFTNTRADRARLVMKLVKLPGIIVCMEATGVYHFDLAVALHDAGVLVMVINPKSSHNFAKVLMKNSKTDAVDANTLAEYAARMDFAAWTRPSDETIAVRCFSRRITALTTQKAAAKNHLHALTATQETPKAVLRDAKLAITQLQKRIDRLTTEALLLIGKHPKLERALALLISIKGIAQTSAISLMGELLLLPPDLTHREWVKFAGLDPKAFDSGKSVHKKSRISKAGNRNIRAALYMPALSAKQHDPHVRAYFQHLVANGKKPLQAVCAIMRKLIHAIHGMLKNDEPFDNTRFYKIPVSAV

SEQ ID NO: 107968 - protein, 320 aa, unidentified
MRNTVGLDISKLTFDATAIVGKTEHSAKFDNDSKGLDQFSDRLKSLGCQNLHICMEATGNYYEEVADYFAQYYSVYVVNPLKISKYAESRFKRTKTGKQDAKLIAQYCRSAQESELVKRQKPTDEQYRLSRMTAAYAQIKSECAAMKNRHHAAKDEEAAKAYAQIIKAMNEQLEVLKEKIKEQTEKPNCKEGVKRLETIPAIGRMTAAVLFHHLTSSKFETSNKFAAFAGLSPQQKESGTSVRGKGKLTKFGNRKLRAVLFMPAMVAYRIRAFPDFIKRLEEKKKPKKVIIAALMRKLAVIAYHVHKKGGDYDPSRYKSA

SEQ ID NO: 107969 - protein, 526 aa, unidentified
MVTKTRRRKSTGSKKRFIGKPTGQIQERVQAVGPEHFGIVAVDCAKRRSKWMLCNFYGKVIIEPTSVEHTSGGLRVMTQLVAEACKKEGLTDTIVAVEMTGIYHRPVQRAFRKAGFDTRTVHPFASNHYRQPLHPDAKTDDNDLEAIFHATVKGYGLATFPVGEVYQSLQALSRHRHNLVKQRARLMIQIRRLLHQTMPGFADLFDESKLFRKSIALPIALEFSSAGVIRRAGVNGIASHLKESKVRFQSRTIERIVAWAGTAGEPSELAAMHTRQWKELNEVRRLLDEQIAASEREMAGFLVKTPYVLLLSVTGINVVSASRLAGEAGPIEYYASARAINGRAGLYPSRYQSDEVDHADGSLVRQCNRKLRGAAMLVAENLIKCHPYYRGISALWTQQKIDPRDRRCRIANRAMRMVFQLVAGRQLWRGKGVDREYLLAKLREFHRVHKTSVEQSIRDMNEAFAWLPKSAYAEEAKPLAELARKRHRGPTPIGDLLIPLLIRLGVSIEEEEKDVESTASEARSAD

SEQ ID NO: 107970 - protein, 535 aa, unidentified
MVTKRKTGTTGTTGTKRSRSQKFKKAVLGRPQGVIQARVQAVGPEKFGVVAVDCAKARSKWMLVDFYGNVLCPPADVEHNRSAFQMAVLTLKQAVEKHGLKDVIVAVEMTGTYHKPPMRAFRKAGFETRIVHPFASSYYRQPEHGDQKTDENDLDSIFRAAVNGFGLIEKPVDAIYQQLQILVRHRRDLVKKRAKLQCQIRHHLELALPGFGALFDRDDLWSQVTPVPLLEAIAQRGGTVDVVKQAGQKGITQWLDASKVRYHKKTVERVTVWAANAAESDPMATFHTRVWMSQLADWKQKTQQIHDIERDSASVMVKTPYVLLLSHPGINVVSAAELAGEMGPIENYATARSISGRAGLFPSRYQSDEVDRGGKLTRFRNARLRAAWMMIADNMVKCNAYWMKQAERWRDEGHKPQDIRARIANRMTRGVFKMVSGRQIYQHASRLDRGYVMDKLLTFHRDHQTSPAVIVRDLKHAADQLPKSSQLEERAKLQEAALKARRSRQKGPQELGTLLVALLAKLGVAAKDDDAVEST

SEQ ID NO: 107971 - protein, 387 aa, unidentified
MKLCKRTGLYIKSKSQDYNELGVILSIGLIDRNRRHLSTLLALKNGVRTVGGSKRSNHNPVQHLHYYLIIFIGTKMARTVFIGIDVSKETLDISINNKHQRIENVETAISEFIKSKMANVFVKLCVVESTGGYKKLVIKLLREHNIAVHRAHPNRVYAFAKACNHFAKTDKLDAKLLEKYAEFITKNDEVVEYIVSQKQEELKELRAVERNLNDEVHANKCRLHKVTGKAREYIEKQIEFAKKQLEQIRQDIEDIINSDPDLKEKSKLLTSYKGVGRKTASILLIEVPELGRLDNKEIACLVGVAPKTSESGRKVSKAQIIGGRFYARKALYMSAVVAMHHNKKMKVFYQRLVDSGKAAKVALVALTRKIIICLNAMIKNNNFYLDV

SEQ ID NO: 107972 - protein, 341 aa, unidentified
MGVKKYWVGIDLHRNQFTYCVRYSDGKEVVGKESMTNLERFARRLGKHSEVAVEATGNTWMFCQVLKKHAGRLVVVNPNQFKVISHSVKKTDKNDAKVLAEFLEKDLLPEVRMKDELQAKIASLTQTREKLVQLRTVLKNKINNLFASRFILLKREELSSEKGLLKVLTYHFDSISDVELRVMVDQIRSLNKSIEELDKAIEDNGSKMDGFDNLKSVKGIGAKGAATLLSVIGDINDFRSAKQLAAYIGIVPRVSDSNETVHHGRITKLGSKIARSTLVQCALIAKRYNAYLFNFHEEVKVRRGGAKANIALARKFLEIIYRILKNKWIFEDFTQFKLKTA

SEQ ID NO: 107973 - protein, 360 aa, unidentified
MTQHTFIGLDVHARSVRAAVLDGATGELRSCAAPVTAAELVPWLRAQGKSVSVAYEAGPTGFVLARACAEQQIPCLVAATSRIPKAPAERVKTDQRDAVKLVRLLRLGELTAVRVPSLTEEGARDLVRARDDARADLMRARQRLSKLLLRRGLLWAGVKTWTCAHERWLAARRFEERPLRVAYEEAQAAMLSVKARRDALDAAIAVEAQGEPWRGVVGRLCCLRGVSTLTAFGLATEIGDWERFDGRSIGAYLGLTPSESSSGERRHRGAITKTGNSHARRLLVEAAWQQRRPLLRPSRELARRREGQPALVRARAEAAGKRLSQRWQSFDARGKRSTVSAVAVARELAGWCWSLATMEA

SEQ ID NO: 107974 - protein, 387 aa, unidentified
MEEITIIGVDLAKSVFQVHAANSDGRAAIRKRLPRTRFLSFMSQVRPCVVAMEACATSHHWARELTALGHDVRLIPPIYVKPFVKRQKNDANDAEAIVEAAMRPSMRTVPVKSPEQQALAMLFRTRELLLTQKTQLVNALRAHLAEHGVIVAGGRRSIDPFIRVLDDVTNALPPGVRKVGAIYLDRIARTAGEIEDLERQIDEQAKEHEMAQRLRTIPGVGPVTAMAIEAFAPAMESFARGRDFSAWLGLVPRQHSSGGKQRLGRTSKMGQRDIRRLLISGAMSIIHWRGRNGGKPGSWLARMLACKSRMLTAIALANKLARIIWAIMTRKDRHRPQQHVIIPNRCNADIFWGSDCSIPDDHISPRRSALFMARSVLRDFRDGGRQC

SEQ ID NO: 107975 - protein, 409 aa, unidentified
MITYIGIDWSSKKHDVCFVNAAGAAIARQVIAHTPAGFAEFERQRERLGVEPAECVIGIETAHNLLVDYLWGHHYSQVYVIPPNQVNRESQARWPSGPRADPSAAYLLAEMLRQDRTRFPVWCPDSLLTRQMRCRVSLLLHLTRHITALSNRLWAVLCRYYPAALTVFSELTAQIELAFILAYPTPQAAAQLTYAEFQTFATQHRHTQPRKLPAAFARLQQPQPLADPDTVATFQAEAVQLAQLLLPVVQAKQTQVRELTRLFQQHPDAAIFASLPGAGDFLAPGLLVKFGDDRQRFPDAASVQALAGTCPVTDSSGKRRVVRFRKACDHEFRTLTQQWAQATLTVSPWAQAYWQDMRPHCRSNSAAYRRLANRWLAIVWKLWQTHQTYDEDYHLQQRAARSQPRPPKH

SEQ ID NO: 107976 - protein, 348 aa, unidentified
MNYIGIDLHKKFSQVTVLGEGGEIKERVKIDNREEVLNRHFNNFDEPSKAVIEATFSWGWLADYLQSRKIEVVLAHPQKVKAIASSQIKTDKVDSLILARLLRADMIPTAYFCPKPLREVKEVLRSRASLVGLKTQVKNKIHSLLHKYNIREDEKFSDLFGKRGKEFLNSLELGEYTTPVLKRYIETLEFLEEEIKKTSVDLKQVFEKDEVAQFLERLPGIGFYTALILSKEIGNIDRFFSAKHLCSYAGLVPSTYQSGEHTRHGKIKQGNKYIRWVLIEAVPKTIGKDKVLNAFYQKIKAKKGHNKAKVATARKMLGQIWYLLKTKQSFVDPETGSPVFFSGAFPHH

SEQ ID NO: 107977 - protein, 344 aa, unidentified
MKHCKRLSIDLAKDVFQICGLSINNKTIFNRKTTRAKLLLEVLTIKPDMIFMESCYSANYWGRLFESHDFTVKLIPAQHVKPFVKGNKNDKHDALAIAEASMRPNIHFVPIKTIEQQDIQCLHRVRQRLISSRTGLINQIRGLLSDYGIIFSKGHHKILQSLPLLIEDMSNQLSFDMRELLNDLHEELKNKNTQIKNTEEKIKIISTKCKGFANLMDMPGIGLINSSALVSAIGDAKQFTSARGFAAFLGLTPKHEQSGRTLKNKGISKNGNRYLRTLLIHGARSVVSRYKNMDDPLKQFAMKIKGKRGNHKAYVAVAHKMSRIIWAMLTKNESYNPNHVLTKK

SEQ ID NO: 107978 - protein, 343 aa, unidentified
MQVNTIGVDLAKNVFQVHGVDSAGKVVISRQLRRKQVIDFLSKIPPCLVGMEACGTAHHWAREVSKLGHTVRLMPPSYVKGYVKRSKNDAADAAAICEAVTRPSMRFVPIKSADQQALLMLHRTRDLLIRQRTQLINALRAHLAEFGLVAKTGREGLAQLAEIVTNESNREALPSAMKQALLAIVDQLAALELQIGVLDRAIHAHHRANDMSCRIETVPGIGVIAATAIASTVTDPSNFKSGRDFAAWIGLVPRQHSTGGKERLGGISKQGDRYLRRLLVIGATSVVQHARRHPQKYPWIIRLLARKPAKLVAVAVANKMARIAWVIMAKGGHYRAPELAAAA

SEQ ID NO: 107979 - protein, 393 aa, unidentified
MVIVKPSGKIVADFQIEHTAEGWQRWGEQVAVLGPGVAACVETSQGVVVEQLLESGVVVYPVSTTSAKSYCQRKVPSGNKTDHGDAWSLADALRVDGHGWKALAKEDPLVAELRLLCRDEVALIQERTALINQLQSALREYYPAALEAFEDWTLPSAWAFLEAFPTPQALASAGKRKWEKFLHTERLARPQTYEKRMEIFAHATGFVSGQALTRAKSRLALARARMLRVLQSQIDSYHAEIEKLFAQHPDHDLFGSLPGAGPKIAPRLLGEIGSDRSRFEDPTALQCLAGTAPVSYQSGKIHKVYLRRHCNKLLRHAVHLWANLSRQSSPWAAVYYEQLRTRGKNHACALRSLGQRWLKILWKMWQTGTRYDAELHARNQLKHGSWVLKIQHA

SEQ ID NO: 107980 - protein, 406 aa, unidentified
MGRVIGLDISKHSAEVAVLQPGTGALKHSRFAAEPAAIRRFADQLGPEDRVALESCTNAFAFHRLLCQHAGQVVVSNPLRTRVIAEAKVKTDKVDAEILAQLLAADFLPPVWVPDAATDQLRHCVSHRQGLVTERTQAKNRIHAILHRNLIAPEFTDLFGKAGRAFLAKVELPASERRLLEADLRTIEFLNTEIKTADKNLAEALHDDNDIRRLLTIPGFALTSAAGMKAAIGDVRRFRAPSNLVSDFGLNPSVYQSGLKGYTGHISHRGRSHARTICVEAAQLLVRVPGPFHAYFLRLRRRKPYNVAITAVARKLVVVIWQMLTRGEDYRYAVPARTRQKLNKVHTLATGQRAARQRKPETDDPNSGQVGEDDYNRFLLERFGEDGPRAVNHPNQPRTTKSRPGP

SEQ ID NO: 107981 - protein, 451 aa, unidentified
MSNGSGVSRGDRNRNVRLACLREAVPVTNAVVGIDLADRKQVLVVCDHDSKVLARRTFRCKAWDLGVALDWAGERARLVGFSGVTVSCEPTGHRWRVLGQLAADRGMSFVCVQPAASAYARRTEDLTSDKTDDKDAVLIARLTAQLRCYLPEPVDPTWGRLRHLGARREQLLETHTRCVQQIRDLLECVWPAVLDAAAQPVKSTTWVAALAVVVARDDGNLARTRRLGLDRFTRLVRAEVVRRGRAKPCLRIVRKVFAALSETAGVVEHRQAALERIGWILTDWERARADQIVVEARMVAVLGQLELTDLVCSIDGLSPVGAAAILAETGDLSRFTSARAVVKLAGLAPRERLSGTFAGKARLSGAGRPRLRAAAWRAVWGCLQNNRVYAARYRHFTSRETNRLTPTQAQTVVAAAILRQLHAVVTTGQAWDPDIAAHGLRLANHVGVVAA

SEQ ID NO: 107982 - protein, 310 aa, unidentified
MNDTIGVDISKASLEVWRLSDRKHMRFSNDKAGLRELCKWLGPDPVRVVYEATGRFHRDLEAAVAKAGHGPVKVNPSRARRFAQATGNIAKTDRVDARMLAQMGSTLALEATPIRSQSMHEIKELHVARVALIKDRTACRNRLDTARNKVVLSQLKARERQIDKQIAQIDAELVRLIKADPELARRYEILISIRGIGPVAATAMIVDMPELGTMTPKEAASLAGLAPVTRQSGSWKGKARIFGGRHGLRTLLFMPAVIATRYNAPLRKIYLALYEGGKPWKVAITAVMRKLIVLANALIRDNRKWAEIAP

SEQ ID NO: 107983 - protein, 388 aa, unidentified
MYLIGIDISKYKHDCFIATESGVPIKAFSFENNRLGFDLFLKDLRFLDQSKEIRIGLESTGHYGSNLKQFITTSGYTYLEFNPYLTHMFSKALSLRKTKTDKVDAKTISSMLGSVDYKTLHTKFYHINELKQLVRYRHVQMMNRSKTLIELTNILDRTFPEFKPFFNERLAGSALFILKKFKSRTRISKFSTKDYESIRSYSKGKLSYVRVQKLKSLALSSVGYETQSDLLLLKHTIKHYEELSNTLDTIDEEILSIMKDIPQTLTTIPGVSVISAAIIIAELGDFKNFTNPSQIVSFSGLDTSVNQSGTMETRGHLVKRGSGLLRMTLWQITFSSLKLNPKLYDYYLKKRAEGKHHKVALVHCARKLIRTIYYLGLNQVPFDHSLFK

SEQ ID NO: 107984 - protein, 438 aa, unidentified
MTTNCNQPASPAPQPTAALSQIVSTNNFAYFAGIDWGSEKHRVCLMDRSGAVLGERWAEHSGSGLAGMAQWLREKSSDAPHTLAAAIEIPRGAIVETLAEHGFHVFSLNPKQLDRFRDRHFPAGSKDDSRDAFVLADSLRTDPHCFHAVRLDSPAVIRLRELSRLEDELLGEFNRAANRLREQFHRFFPQLLQLSPAADDPWLWALFETAPSPARAAKLTEAKIARLLQQHRIRRITAADLRAVLKTKSLTLAPGAAEAAAEHALLLLPRLRLLQQQRADLARRIQTVLDELTAPSEQDPKEHRDAAILLSLPGLGRKVAATMLSEAAQAIAERDYHALRSFSGAAPITRQSGKKKVVSMRYSCNLRLRNALYYWAQKSIPNDKRSRKHYAELRTRGKSHGGALRVMADRWLKVLVAMLRSRTLFDSQLRPETSLRAA

SEQ ID NO: 107985 - protein, 359 aa, unidentified
MMMTDAEKKAATEVILGVDTHLDVHVAVALDHLGRRLGELSVPTTAKGYEKLVRWAEGFGTLRCAGVEGTSTYGAAITRYLRTAEIAVKEVERPKRRHLHRSSKSDSRDAESAARAVLAGETAGEPKSADGRVEMIRALRSARRSAMKSRTQAANQLQGLRVTAPEELRHRLRRLSTKELVAVAARFRLRDAPCDVLAATKFALRSVARRYEALSAEIDELDAQLHRLVRQVAPELVSLAGIGTDHAATLLTVAGDNPQRLRSEASFASLCGVSPVEASSGKVVRHRLNRGGNRDANRALYMVCLARMRRDPRTREYVARRTQEGKSKREIIRCLKRYVARETYRVLVSCVACSSLTRP

SEQ ID NO: 107986 - protein, 461 aa, unidentified
MAKSKGPKRLQQQTMPGPLEQINLHAAGIDVGSRAHYVAVPPDRDEQPVREFAAFTADLYRLADWLRACRVETVVMESTGVYWIPVYQVLEARGFEVKLVDARQLKRVPGRKTDVADCQWLQQLHTFGLLAGAFRPEDQVCVLRSYLRHRAMLASYASQHVQHMQKALVQMNIQLQHVLQDITGATGMRIIRAILAGERDPYRLAALRDPQCKNPEETIAKALQGDWREEHLFALQQAVDLVDSYQAKIAACDERIQAQLHSFEDRSGGTPPPKGKPRRKDRNDLTFDATGLLFRITGVDLTAVSGLGAHTVLKVISETGVDMSRWRSSKHFGSWLGLAPNNRVSGGKVLGRRTTPNANRAATALRVAAQSLHHSKSALGAFLRRKAAQAGMPKAITATAYKLARIIYQMLTEGTTFVEKGQDYYERHYHQRVLKNLSRRARELGYRLVRQEGPVPEPTYD

SEQ ID NO: 107987 - protein, 452 aa, unidentified
MSKTKPQVIDDEEHERVHERVAAVDVAKDTGMVCTRLPHPSRPGARQSTVWTVRARMDAIRVLGRQLARDGIEVVTLESTSDYWRIWFFVLEACGLAVQLVNAAQAKNLPGRPKTDKLDAMWLARLTEMGLLRASFVPPRAIRDLRDYTRMRTRLIQERTRCFQRLEKLLEGALVKLSSVASKLTTISAQDMIKAMIAGQRDPRVLASLARTAMKAKREELAEALDGMFDDHHGELAGMLLDQIGFLDQRIAALSARARQLAAAMPAAWGIDGDGTTGPDAGAGPDAAVMPAVARLAEIPGVSPDLARAIVAETGLDMSRFPTAAHLVSWAGLCPSARQSGPRTRTGKKGQGNTWLRGHLGQAANGAARTQTFLGERYHRIARRRGKTKAQVAVARSILVIIWHLLADPAARFTDLGHGYYQARTDKDKKIKNHIRQIEALLGHPVTITKAA

SEQ ID NO: 107988 - protein, 329 aa, unidentified
MKKNFIIGIDVSKSKLDVHCHGQLKQLMVSNDTTGYKKLLKWIKKEVTKELVTVMVVMEYTGIYTYNLEKFLFNNQVDYVRRPALDIMRSAGMKRGKTDKADARMISQYGWYRKEELTAMKPVSHNHQKLQQLMSHRDKLVGDKASYVVRIKELKEQLAADLNKKVFESTEYVVGVLEIEIKAMNKMIEELVKTDDSFENNYRLLRSVTGIGFVTAVHMIITTENFTRFKETRKFACYCGVAPFEHQSGSSIRGKTRVSHLANKKLKSLFTTAAFAAIQHDAELKAKYEQKLKEGKSKMCALNVIRFKLIERIFAVIKRQSPYILSQAA

SEQ ID NO: 107989 - protein, 462 aa, unidentified
MRSEDPGLEVVHPRAAEIDVGNVAHYVAVRPDQDREPVRRFECFTTDLHRLADWLRACGVETVAMQSAGVYWIPLYEILEERGFEVYLVNARHTKNLPGRKSDVQESQWLLKLHTYGLLNNSFQPTAEIRTVRTYWRQRAEHVRAASTCIQRMQKVLTQMNVQLANVISDLSGLTGQTIVRTILAGERDPKKLAELSHPRIQASREEIAKSLEGNWRPELLFVLKQEVEMYDIYQQRIGECDRELEAHLKRFADNVHQKPAEARPVSEEQKDKKVRAKLPRSGKRVQGNAPCFDLRSELYRISGVDLTRIDSISVVVAQTVISEVGLDMSRWNTEAHFASWLGLCPDNRISGDKVLSKGTRHVINRAATALRMAATTLLRSRSYLGAQYRRLRTRLGAPKAITAMAHKLARLVYRMLKYGQDYVDKGMQYYEDRHRRQQIELLQKSAAKLGLQIVEIQAVGG

SEQ ID NO: 107990 - protein, 348 aa, unidentified
MSISYSGKKVYVGIDVHKKTFAISAISEGVVVKKATITAIPDTLKNFLSNHFPGAEIVCGYEAGFSGFHLQRSITSWGHTCLVVNPGSLEVASRDRVKTDKRDSLKIAEHLAHNRIKSVRIPTPENEEARMLSRSRSQIVKQRAQIALRIKSKLYQFGLIDPSNDRVMSRKYIEEVESLNLSETANFILKQFCTIWRFLDEQLTNINKQLELQAQKDSKLEEVYRSVPGIGAVTSRVLANELGDMSQFKNEDCLFSFVGLTPTENSSGDSTRKGRISRQGNPLIRHALTEIAWRAIGQDEALRAIYERISSRAGGKRAIVAVARRIIGRIRACFAKNETWKLNFQPKN

SEQ ID NO: 107991 - protein, 324 aa, unidentified
MSDSILGIDVSKETLDAYCARGQRKQGRTFANSPDGWKLVRAWLKAMGSKQAHVCMEATGRHSLGVALALHEAGHVVSVVNPAQIRDFARTKLGRNKTDKVDAALICEYAELFKPGPWTPPSPAMRRLCELQTMRAGIIRSRAEWKNRIGSGLGDSTATKLAAATIDHFTSQLEAIDRAIGETIEQDAELRGRRDLLLSVIGVGETLAASLMAEMPEPGVLRRSGEMVAYAGLNPSHHRSGTSIDRPTRISKIGNATLRSSLYMPALSAMRFNPAVAILVARLKSAGRLKPKQIVVAAMRKLLVLCFGVLKTGKRFDLAIAMPA

SEQ ID NO: 107992 - protein, 372 aa, unidentified
MSQSSTLYVGMDVHKETIAVAYVAKDHDAEVVSLGTFGTRQCDIDNLIRKLQSKAKHLVFVYEAGPCGYWLYRYLTKKDYVCWVVAPSLIPKRAGDRVKTDRRDAMQLARLMRSGDLTPVYVPAVDDEAIRDLSRAREDTLRDLKAAKLRLKAFLLRHDIRYTGRANWSPAHLRWLSEVICPTPAQQIVFQEYVQTVTEQTERLGRLELELHEQVQTWRFHPVVEALQALRGVQFTVAVTTVAELGDLTRFDNPRQLMNYLGLTPSEYSSGARRQQGSITKTGNTHARRALVEGAWAYRYPAKVSRHLQLRLEKLPAAIQAISWKAQVRLCKRYRHLMAKGKNANQVVVAIARELSAFMWAIAKQVAGSPKA

SEQ ID NO: 107993 - protein, 358 aa, unidentified
MKIIGCDYHPSFQQIAMLDLETGEYVELRLLHAGGEAQRFYESLSGAVRVGVESSGNMLWFERLLQKLGHELWLGDAGVIRAKAPRKQKTDVRDARHLLQLMRENNFPRIWVPSVGERDVRQLLKHRHTLVQMRTRVKNQLQHIALNQGLQKKQKLWTRAGQELLRGLELDGWTARRRDDLLHLLEYLEKQIEALDQAVKTEAEQRPEVRLLMTHPGVGPVVGLATVLTLGEVGRFPRGREVAAYVGLIPSEDSSGQRRRLGAISKQGSSFLRILVVQAAASAVKGDAEWARAYKRLAHKKHHGVAKVAIARKLVVRLYWMLRTQTRYPQVVRRSGSPSHPVARLQAERLSGHPASRR

SEQ ID NO: 107994 - protein, 347 aa, unidentified
MEKYSRIGMDTSKQIFQLHGVDEAERVVLRRKLRRREVLSFFGGLAPTIVGMEACGGAHYWARELARLGHEVRLIAPQYVKPYVKRGKNDAADAAAICEAMSRPTMRFVPVKSAASQAALMLAGLRERLVRNRVQLANAIRGYAAEFGLVAAKGRAHLEPLLARLSTDESLPDLARELFAAQAEEYAQLQAKIAAIDAKLMAWHRGNATSRRLARIPGVGPVIASLLVMKTADPQAFRFGRQFAAWIGLTPKDHSTAGKTRLGVITRAGDETLRSLLVVGATAVIWQARRGTGRCASPWLLALLERKPPKLAAVALANKIARIAWKLMTSGESYDARYALAAAPVKV

SEQ ID NO: 107995 - protein, 385 aa, unidentified
MAKQIFKYSVGCDISKDTFNVCILEVDQEMESKVKASHKFNNETKGFKEFESWVKKHKKHDVQTGFYMEATGVYYENLAWYLFEQEYNVYVLLPYKTKHYLKSIGIKSKNDKIDAQGLAHMGAQQKHNPWRPHSKSIYTLRSLTRQHENVTKLKTGLENQLHAIEYSAVRNAIVKKQLKATIRLLEKQLDELADEISNLIDTDEKLNQKYSHIDPLRGISKLSWATIIAETSGFETFENQRQLVSYAGYDVVENQSGKHVGKTKISKKGNSRIRRILYMPSLVSVRLKEPVLYNLYQRVYNRTGIKMKGYVAVQKKLLVLIYHIWKNDKAFQSDYSKTFGEEESKLLFPFGFGETIKESSPDKRATQDEHSYELSSKVLFPLAQI

SEQ ID NO: 107996 - protein, 356 aa, unidentified
MRYFGIDLHKRTAIIASEDEFGKKEKAKKFFCVEPDKIYRFFENHAPFRAVVEATAAYRWLYDLISPLGEVVLAHTLHLRAMFSRRAKTDKLDAALLAKLLRLDIIPEAYVPPARYHRLRDLTRSRARLAQDKVHAENRLQALCRELNVEPPGRSISTKKSLSWVASLTMSPVQKVRAGELVRRLEHYRGELAFFDGELERCAPEYPEAEALMDIHGIGLFSALLIIAELGEPERFRDGRRVAAYSGLTARVNQSGGHDYHGHITRQGSRWLRWILVQAAMKAVRKDLKLKNFYTRIRKRSSRNIARVAAARKLATICWVRLLRWRRTARLSKEMQRVRTRGVTARSRGLAGQVVV

SEQ ID NO: 107997 - protein, 447 aa, unidentified
MNMSTTKHDTDKSSSAVAAPGPASEPHFAAFIAIDWGDEKHAVALRVAGQTQTEHTTLEQKPQALTEWIAGLRQRFAGGTVAVILEQKRGALLYALQPHEHLVIYPVNPQMSAKFRQAFYPSGAKDDPTDADLQLDILLHHRDRLTAWRPDDATTRQLSLLVEGRRRFVADQVRVTNRLRDALKSYFPQALELAGEDLTSLMACAFLQKWPSLAALQQVKPAALRKFYYAHHSRSEELIAQRLKLQAQAQPLTTDAAIIAAQSLLVQSLAQELATLNPVLARYEKQIAQLFATHTDFALWDSFPGAGPALGPRLAVAWGTQRDRFPDPQAMPCFSGIAPVKEASGKQLWIHVRWACPKFLRQTFHEMAKCSLKGCAWALCYYQMQIERGKGHHAAIRALAFKWQRIMWRCWQDHLPYEDAKYVASLKRSARDLYARLSAAPAKERCE

SEQ ID NO: 107998 - protein, 364 aa, unidentified
MAEERRFVIGGVDTHRDRHCAAAVDATGAQLGCRFFAADGGGYAELVSWLEGLGELRALGVEGSGGYGAGLCAYAQGRGVPVVEVSWPDRAERRRRGKSDQMDAYHAAASVLSGRAHSPAKDRRGDVEGLRALRVAYEGAVKARTAARNSLHALVAAAPDRMRARLRALPARELVGACASLRAPGEGPLDAERAAEAALRSVARRVRALDGEAAELGALIDAMTLELAPATRALPQVGPQCAAALVLCAGANPGRLASEASFSALCGASPVPVSSGRTDRHRLNLAGDRRANSALYLIAIGRMRSPGESRDFVAARMASGKTKREAIRMLKRYIARQVFHALRRDLARLAGASGADGGPARTAP

SEQ ID NO: 107999 - protein, 355 aa, unidentified
MSQEKYIGMDVHQATISVAVMDVHGKLLMECLLETQASTVVEFIRGLQGTLSLTFEEGTSAAWLHDLLKPHVSRLVVCDPRKNALLQDGSKSDRVDARKLAELLRTNQVKPVYHGEHGIRTLKELGRSYLTLTKDVTRVMNRIKALYRSWAIPCSGSSVYAPRHRAEWLAKIVEPGVRLRAEHLYQQLDRLQPLRLEARHQLLRESHKHAAVKLLRQVPAIGPIRAALLVALLQTPHRFRTKRQLWAYSGFAVETHDSGEYRRVRGKLQRNRERITVRGLNDNHNQDLKNLFKGAAISASTRPGPLHDFYVARVEKGMRPTMARLTLARKIAAISLTLWKKGVKFDPKQLHRQAA

SEQ ID NO: 108000 - protein, 323 aa, unidentified
MSSVIGIDVSKEKLDICLIINDKAKFKIYENTQKGFYSLLKWIEFKCGPEKPKICMEATGTYMEELAEFMHDAGFEVSIVNPMQIKSFSKSKLLRAKNDKSDSELIARFCLLNNPRIWVPQRQELRKLREISRLIKSLTEESVRMRNKLESRLISEAAKSAILDIVSSIDSQILKLKSEMKKIVKEDKEISNVVNAFDEIKGVGFLTACAVISGMPDVKNFSNAKEYAAFIGITPTVFESGSSVKKHSKISKIGDKHIRGILYMSAVSAKNHNKHFSDFVQRLEKKGKKPKVIFCAVMRKLMHIFFGMLKNNSTFDKNLAFGS

SEQ ID NO: 108001 - protein, 429 aa, unidentified
MIMGFTKPIEHFNLQRKKVITMNTLYVGIDVSSKSNVIYLMLPNGDKHSNFSVANSHEGSTQLVKRILSALTSHSLDTVLIGLEATSVYGDNLVYFLREDATLAPFNRKIHVLNPKQVKKFHDAYNDLPKNDYVDSFVIADCLRFGRINKEVYMGDYRYKALQNLTRARFFAVQNLVKEKQRFMNVLFKKYSTMTQEKVFSDTFSTTALAVYDEFDSAEALANMDLHELTDFIIEKGKNRFPDPDAVAKAIQKAARSSYRLPKTVNDSVNQVLSISITSMKALESQIKEFDKAIKAQMELLPNVLISIPGIGPVYSAGIMAEIGDINRFNSQAALAKYAGLAWKQHQSGGFESEVTRLIPSGNRFLKYYLCEAAFSLVRCDKEYSDFYRLKYKEVNRCQHKRALALTARKFVRLVFRLLKDNRLYCPAK

SEQ ID NO: 108002 - protein, 338 aa, unidentified
MQLYGGIDLHSNNSYIGIVDEENRVMYKERHRNELPLILSALAPYKGELEALAVESTFNWYWLVDGLKDAGYPIHLANPAAMKEYKGLKHKDDKKSALWLANLLRLKILPEGYIYPKEERPVRDLLRKRLHLVRHRTSHILSVKNILSRNLGATIKSDDVKTLTGKDIERLIPDECRRLAIMASLSTVHHLTGQVEQIEKTIIGRARLRDEFKGLLTVPGIGITLGLTIMLEAGDIRRFAEVGNYASYCRCVKSIRTSNDKKTGEGNRKNGNKYLSWAYVEAAHMAKRYYPMIKKYHDKKAAKTNDIVAIKAVAHKLARASYYVLRDQAVFDEKKLFG

SEQ ID NO: 108003 - protein, 338 aa, unidentified
MEISVLAIDLAKSVFQLHGNDAHGRCRLRRKLRRSELRPFIALLPPCIVAMEACSGSQYWAREFRALGHQVRLIAPQFVKPFVKTNKNDSADAEAIAEAAIRPNMRFVPIKERWQQDLLSIHRARDLLIGHRVAVSNALRGFLAEQGLVFAIGDGALKKGLQEVFSRPEPVVSVQFAEILQALFSQLRLLTEQIEELDRKLEGVARTDERCKRLQKIEGVGPIISTAILGTIGDAREFKNGRSLSAFWGLVPRQSSSGGKQQLLGISKRGDGYIRKLLIHGARSAVQWAGKKDTPRNRWVLEKVRTRGMNKATVALANKNARVIWAVLAKGEHYRAAA

SEQ ID NO: 108004 - protein, 295 aa, unidentified
MSQQLSTTIAVIGIDIGKNSFHVVGLDQRGAIVLRQKWSRGQVQTRLANMPPCLIGMEACVGAHHLSRKLKGLGHDARLMPAKYVRPYSKGQKNDFRDAEAIAEAVQRPTMNFVATKTPEQLDMQALHRVRERLVSQRTGVINQIRAFLLERGVAVRQRQRFLRAELPGILAAPPDVLSPRMVHIIEDLASDWRRLDERIEGLSGEIEAIAHRDAGCERLMSVPGIGPIISSATVAAIGAGDAFAKRPRLRRLAGTRPQADLDWRSAAIATCGSCSCRRHGLCSSSQRADGHIEA

SEQ ID NO: 108005 - protein, 360 aa, unidentified
MAITITEGPRRIVGGVDTHKDLHVAAVVDEQDQVIGTRSFATTRQGYRQMLAWMLSFGELQRIGVESTGSYGAGLLRFMQQANVAVLEVTTPDKQDRRRRGKNDDLDAQNAAHAAFAGQRTVTPRSRDGMIESLRILMACRKTAVSARRVALQMIHNTIICAPDGLRDQLRSLTRMQLVRTLAAWRPDLTAYRDVDSAYRIGLKSLARRYLELHDEIADLDAMIAAIVDELAPNLVARNSIGHIGAAQLLLTAGDNPERLRSEASFASLCGVSPVPASSGKTVRHRLNRGGDRAANSALHIIAIGRLRTDHRTKDYVARRIAEGHSKLDAIRALKRYLAREVFTLITQRRREINATRIAA

SEQ ID NO: 108006 - protein, 455 aa, unidentified
MSDAITRDRPELKPVNIGAAAIDIGSKMHVAAVNPTCTDVPVRAFGTFTQDLHDMADWFKACGVTSVAMESTGVYWIPAYEILEQHGFEVILVNARYAKNVPGRKTDVSDAAWLRQLHSYGLLRGSFRPDAEIATLRAYLRQRERLVEYAAAHIQHMQKALMEMNLQLHHVVSDITGATGMRIIRAIVAGERNPAVLATYRDVRCHSSIKTIRAALVGNNRNEHLFALTQSLELYDTYQAKMLDCDRKLEALIAALSDKGAKPVGKLSRPRVKTKQVNTPSFDVRAALYGVLGVDLTEIHGLGPSLALKLIGECGTDLRAWPTAKHFTSWLCLAPGNKISGGKVLSSRTRRSSSRAAALLRLAATTIGRSDTALGAFYRRLSSRAGKAKAVTATARKIAVLFYNTLRHGMTYRDPGADHYEEQYRSRVLANLKRRAKSLGFVLQAVPGDTEAAVS

SEQ ID NO: 108007 - protein, 403 aa, unidentified
MNAVGIDVSKGKSMVTILRPFGEIVSSPFEIKHTSSDIHSLIKLIHSIEGESRVVMEHTGRYYEVLAHQLSAADLFVSAVNPKLVKDFNNDSLRKIKSDKADSVKIARYALDKWQSLEPYSITDELRAQLKVMNRQFHFYVKQKTAMKNNLIGLIDQTYPNANTYFNSPTRSDGSQKWVDFVSTYWHVDCIRKMSLNAFVEHYQNWCKRKKYAFNKSKAEEIYTKTKELVPVFPKNEITKHIIRQAIDQLNSTSVTVETIRTLMNETASKLPEYSIVMQFKGIGPSLGPQLMAEIGDVTRFTHKGALTAFAGVDPGVNESGSYAQKSVPTSKRGSSHLRKTLFQVMDVLIKTMPQDDPVYQFMDRKRTQGKPYYVYMTAGANKFLRIYYGRVKEYLSVLPDPS

SEQ ID NO: 108008 - protein, 322 aa, unidentified
MNTFQLGIDVAKAKLDCALRSPDGKLRHKTVSNTPDGFQALCVWLDKQGVGVLHVCMEATGIYWEAVAEFLASREAATVSVINPAQIKAFGVSQMVRTKTDKADAKLIAQFCFERAPAPWQAPSIAEQALRALVLRLDALHVMHTQESNRLLVARPAVKDGIAKHLHWLDQEIAVLIKAIHDHIDTDPSLRDKQRLLDSIPGLGERSIAVLLAYYGTLERFGNARQATAFAGLDPRQHESGSSVKGKPQLSKVGHAFLRKALYMPAMSALYRTRWGQQFFHRLSAAGKPPMLIIGAMMRKLVQVAFGVLKSGKPFDPSLHHA

SEQ ID NO: 108009 - protein, 493 aa, unidentified
MITKTRKRKSIGTKKRFIGKPAGQIQERVQAVGPEHFGVVAVDCAKRRSKWMLCNFFGKVVVEPTSVEHSTGGLREMTQLVARTCQAEGLTDVIVAVEMTGIYHKPVQRAFRKGGFDTRIVHPFASSHYRQPLHPDAKTDDHDLEAIFQAAIRGYGLATLPVGEVYQSLQAVSRHRHNLVKQRSRLMVQIRRLLHQTMPGFADLFDEGKLFHHSIALPVALQFPSAEAIREAGVDGISRRLNQIHVSFQTRTIERIVAWAGNATEPSELTPMYTRQWQQLNQVRQMWDEQILATEREMAGFLVETPYVLLLTVTGINVVSAARFAGEAGPIEHYASARAINGRAGLFPSRYQSDEVDHADGSLIRQCNRKLRGAAMLGGKFDQVPSLLSWSGGTVETAEGRSARPPLPDCQPSHADGLSTHRGQTSVARQRRRSRIPAGQAARVPSPPPNSDRPIDPRHERGFFLVAEIRLRHGSETAGGIGSQETSWPQTHR

SEQ ID NO: 108010 - protein, 385 aa, unidentified
MERNDLSRALVAFDQNSTIVAVIELSLNTWLVSGLVPGVKRQPLKKQTADPERLVALLHRWREEATKAGRAIDRIAVAFEAGRDGFWLARWLRARGIEAYVIHASSLAESREHRRAKTDRLDTEALMRAFLGWLRGEARHCRMAAIPTLAQEDAKRPSREHVSLVTERTRLVNRMAATLVWLGLPKVNIKVRQAAEHLAALRTPEGEPVPPNTLAELRRDLERLAVIRAQIKAIEQARLERLQSAPAQGTHPMILMLAKILGLGIETADMLVHEVLTRGLRDQRAVARYGGLTGAPDESGNKRREQGLAKAGNGRVRRGMLQLAWRWLMFQKDSALTQWYRSRTVDGRSDTRKTMIVALARKLLIALWRYVTTGELPQGVVLKVA

SEQ ID NO: 108011 - protein, 346 aa, unidentified
MIAIGSDVHKGRCVLAMMEEEGKVKMLEPIECTREAWLKRLGELPPEAEIALEVSTSGYFVMSVLEEAGWLKRAHWVHTAGIDSLRKQKSDRLDARRLARKLAANTADPLPEAWFPPAPIRQLRMLARQRCRIARLRVLTKNRINSLLQMHGLRPEKSPISAVGRDWIRQQALPAPVEQCFEQLFRLYDFLHSERETSEQNLAAHAALFPEVKLLRTIPGIGHILAAIIWGEIGTLERFPCAAALVNTTGMVSSLYESGEVSIQGHITRQGSAWLRWALITAANCVTRSKSPLGQRYWSLRRAHKKPNVAKTAVACSVARCVYGVLKHGEPFQAERWGRRSGKLEP

SEQ ID NO: 108012 - protein, 345 aa, unidentified
MHKSSHTIAGIAAATGEMLGDKTARVATRGFGEILHWARGLGADRVWALEDCRHVSGSFERFLIARGERVVRVPTRLMANSRRSSRERGKSDRIDAVAVARAALAAGIETLPTAALAGPELDIRLLVDHRERLVRTRCALNNTLQWHLHDLWPELELPGSSLFYGKWGPRIARRLARTEQTMRVRIARDELRRLRELTQAIRALEAEIAKLVGQVAPQLLTEPGFGALTAAKLVGEIAGAGRFASDAKLARSAGLAPIPVSSGRTDRHRLDRGGNRQVNAAIHRVAVTRARCHQETIEFIARKQSEGKTHREAIRCLKRHLARRIWQLLRAPHPESETAPHPSIS

SEQ ID NO: 108013 - protein, 413 aa, unidentified
MDVLHPRCCGLDVHKSSISACILLREAGRVQKHQRRFGAMTQDLQELAEWLGRFGVTQVAMESSGVYWKPVWNILEGQFTVVLANAQHIKNVPGRKTDQKDAEWIAQLLQYGLLRPSYVPCEIIRDLRDLTRMRASLSQEAARLSSRIQKVLEDANVKLASVATNVLGKSGRAMLEDIISGEDDPERLASLALGHLRVKIPQLRLAFEGKIRSHHRFLLRRLLDQVQFVEQEIALLDQRLEDIGGQRPELAQAVERWDTIPGIDRVAAWALLAEIGDNMAQFPTAEHLASWAALCPGNHESAGKHLRGTTRQGSPWLRRMACQCAWAAARTKNTYLSSQFRRLAARRGKKRAIIAVAHTIIVIGYHLQTNQSNYEDLGGNYFDRIHSDGLKRYLVKRLQQLGHKVTLEPMEAA

SEQ ID NO: 108014 - protein, 350 aa, unidentified
MRFYKNHHQFYIGIDLHARNMYVCVINNLGEKVFHKNLPCSVENLEIIINTFGNDIVVGVECIFTWYWIADFCLERNIDFALGHALYMAAIYKGKTKSDKIDSEKIADMLRGGFFPLAYAYPKQTRAVRDLLRRRLYYVRQRAELSVHLQNTNHQYNINEPLTASKIATKKYRDTIGEKFSDPAIADMVDADLYLYDQYHLIISKIERQINDLVKLQLPQELKILQTIPGFGFVIPLTILYEIGDVSRFKDVGHFLSYARLVKCTHDSADKKQSGGHNKIGNVHLKWAFSEAAVMILSGNPEAQKWHERLVSRYGKAKSMSIIAQKLGRTVFYMLKRKESFDEIKFYTGQ

SEQ ID NO: 108015 - protein, 527 aa, unidentified
MTIRVPSSRRRRQSPSSSRTKYRLQKPNGSISPRVKEVGGEHFAIVCVDPAKHRSEWMMADYFGNVLIEPRTLEHQAAFFKAAVALIRQAQQQHDIQDTIVVVERTGNYHLPPKRAFADAGFETRVLHPFATRQYRQPADPGNKTDRNDLAAQHRAAAAGFGLCEPPLEPPYHTLQLKVRHRRNLVQKGASLACQIREHMHLSLPGYAALFDHLFEHKTAMAIGHGCNSPARVLELGHDGLARLLREHGLRHLPRTIDKILAWASQAVGQSLPDGPLHHAIWTDLEELYQHFQQRISAVEVELAGELVHTPYTRLLAIPGINLVLAAELAGELGPITRYGNANAITGRCGLYPSRSQSDQTDHDRGPIIRQSNRRLRSALMRIADSLACHCAYYRGQAGADEARGIDKRATRVKIAKRFTRLAFACLAGNEPLRHSCFQQAGSILEKLRAFHHEHQTPLDRVLADLQAAVSQLPGNTCRREAEIVADVLERQTHRHRGGVAIGELLPAVLARLEIRAKQEDEHRGRS

SEQ ID NO: 108016 - protein, 341 aa, unidentified
MRIVMVGIDLGKTVCSLAGLDENGRVVLSKRLRREGVAPFVSSLPVCGVAMEACCGAHYLGRRLLEAGYEVRLIAPQYVRPYVKSHKNDERDAEAIAEAAMRPTMRFVSVKTQAQLDLQTLHRVRERLVERRTALINQMRGILLERGIMVAKGKYRLARALPEILSMDVTKLTPRIRSLLEQLREEWRALDDRITDLDTEFVVVARQEETMKRLVEIPGIGALTATALVAAIGKGDAFDSGRDLAAWLGLVPRQATTGGKPRLLGISKRGNAYVRRLFIHGARAALRYHEGRRTRLGAWLRGVRERRHRNVAVVALANKLVRIAWAVLRGGVHYTEFVAAK

SEQ ID NO: 108017 - protein, 414 aa, unidentified
MDVLHPRCCGLDVHKSSISACILLREAGRVQKHQRRFGAMTQDLRELAEWLRQFGVTQIAMESSGVYWKPVWNILEREFTIVLANAQHIKNVPGRKTDQKDAEWIAQLLQYGLLRASYVPCEIIRDLRDLTRMRASLSQEASRISSRIQKVLEDANVKLASVATNVLGKSGRAMLEDIISGEDDPEHLASLALGHLRVKIPQLRLALESKIRSHHRFLLRRLLDQVQFVEHEIVLLDQRLEDIGGQRPELAQAVERWDTIPGVDRVAAWALLAEIGDNMAQFPTAEQLASWAALCPGNHESAGKRLRGTTRQGGPWLRRMVCQCAWAAARTKNTYLSSQFRRLAARRGKKRAIIAVAHTLIVIAYHLQKNKSNYEDLGGNYFDRIHSEGLKRYLVKRLQQLGHKVTLEPMEAPN

SEQ ID NO: 108018 - protein, 354 aa, unidentified
MKKLFIGIDFAKEKFDAAIIDAIGLREFGERQFGTFPNDKKGYRQFMKWVKGHCGNSSETDWLFCGEDTGQCSHGLSKWLYGKGLDIWIESPYAIKHSSGIQRLKTDKADASMIAEYAWRHQDKATMYKPLSESLEQLREVFLYRHKLVQQRVAMEIRDKGKESEDSSRGLSFIRRKAKHLIAELDKTIKECDLMIDSLIDSDEELKANYKIVTSIKGIARQNGACLLIYTNNFSRFDLDARKIACYYGVAPFGKESGTSIHSPARTSHFANKLIKSLLTQGANIAKMFNPEIRAYYDRLIKKGKHKSVALNNVKNKLLRIIVALVRDKTIYDPKTFQFYQQRWKDKNQETLAL

SEQ ID NO: 108019 - protein, 366 aa, unidentified
MDEVKFYVGLDVHKDSIAIAFARAHARDDPQFVGTTRYSMISLTKALSKLGKPSELSVCHEAGPCGYGLVRALREQGYRCDVIAPSRVARRPADRIKTDRRDALLLARLHRAGELVPVAIPEPPDEAIRDLVRAREDAVNDQRRVRQRLKSFLLRHGHAYTGTRWGPKHELFLSKIKFENSAQHIVFTEYRLAVRFATELVERLTQSLRTHAETWRWLPMVKGLMTLRSIDFVSALTIVAELGDLRRFPHPREFMSYLGLVPSEHSSGNSKQRGRLTKTGNTHVRRILVEAAWNYRLPARIGESLRPRLEGQPRQIIDIAWKAQLRLCHRFRRLRARGLHQNKTCAAIARELCGFIWDIGTRLQPA

SEQ ID NO: 108020 - protein, 424 aa, unidentified
MREEGLSMAEEIEWFVGIDWASQSHQVCLVDARGECLGERAVAHGGLGIEELCDWLIARTGATPEVIGVAIEMTQGPVVEALLERGFCVYGINPKQLDRFRDRFTVAGAKDDRRDAHVLGDSLRTDRHAFRRLSNDEPVIVKLREWSRMADDLQQERARLASRMREQLWRYYPQMLELADDLAADWFLDLWNQAPTPAKAARLRQTTIERFVKAHRLRRWQAPEVLRILKQKPLSVAPGVVEAASDHIRTLTVRIRLVNQQLKVAHRKLDELCAQLVPSEEDEPGQQCEQRDVVILRSMPGLGRTILAVLLAEVWQPLRRRDYHALRSLSGVAPVTRRSGKTCVVVRRYACNKRLANALYHWARVATQHDALSRRRYAALRQRGHSHGRALRTVADRLLSVACTLLEQQTLFDPTYEVREAAGA

SEQ ID NO: 108021 - protein, 338 aa, unidentified
MDNYIGMDAHSSICVFSIVDANGKEVNQAKIATNGQLLVEYIRSIEGSKKLVFEECELSAWLFETLRGEVDELIVCNPTRNQQYKKAKTDKLDAQNLARLLRGGFLTPVYHDGSKTEHLRALMSGYQDIVDTGVSIKNRYKSLFRKAGLPARGAGLYDDSSLLENLSRPDQRFIGRGFYRLLETLEKEREQYIVAIRKSSRAFPEIRLLKAIPGIGDIQAAKIVSQVISAQRFRDKHKFWSYCGLVRHRMESGGHIYGSKRSWGNRILKCVFKMAAQTVVRGENEFRAYYDELRLKGTSDRAAKNAVSRKLAAISLSILKTLRPYDETRIMPQTEQAG

SEQ ID NO: 108022 - protein, 364 aa, unidentified
MKRKVYVGMDVHKETIQIAYLTSNSKEILKEQQIKHNEVQIKKFIKKLKTEWNEIHCCYEAGVTGYPLYRYLKSLGVNCILVAPGKIPRQNTDKIKTDKRDAIKLARLMRSGELESIHVPSEEDEAVRDYLRSRDSLRLDLGRNRQRLMKFLLRKDIKYSTTKYWTVSHYKWLNNLHFNNEILQETFNDYYSRVRVQEENLKAMDKKIQEIAESEPYREKVGILRCFRGVDYLTAMFLLCEVNDFKRFKTADSFMSFLGLVPGEYSSGSKRKQTGITKTGSPRLRRILTEAAWQHRFPGTGSKIVTARRSGQHALVVALSEKASLRLHKKFRNLQLRGKTPQVMITAVSRELSGFLWAAMNLVA

SEQ ID NO: 108023 - protein, 370 aa, unidentified
MDPALALGWDVELSRAEREASMQIVRIGLDLAKYVFHLHGVDERGKVVLRKTLRRPSLAPFFANLPPCIVGMEASNGAHYWAKTLSELGHDVRLISPQFVTPYVKSNKNDRNDAEAICEAVGRPNMRFVAVKSSEQLAIQAVHRIRSRLVGNRVRLVNQIRGLLGEHGVVIAQAIGNLRRALPRVVDDESNGLTSIVRALIGELREELSDLDGRIAIYDRKIMELYRTSEACQRLGEVEGIGPITATALVAAAGDGRCFRNGRQFAAWIGLVPRQRSSGGRSRLLGVSKRGDRYLRTLLIHGARAVMGRIRGKQDPRSLWLLKVRERHHANVVAVALANKNARIAWSLLARGLNYDQRQTVSSASAPRAV

SEQ ID NO: 108024 - protein, 330 aa, unidentified
MNFCGIDVSADELVVALRQGDRDLPQQRFANTAAGHRRLLAWLRGQGGATRITLEATGVYSLDIALALAAAPGREVAVVNPKLIRRFAESLDERSKDDPLDARILLEYSVRMPFRRWQPPSPTQLALRAITRHMLATTELRTATRNRWQIARRSASTPACVRRELERSLRQIDASLLRLQRQARTLVAHDPTLESQFQLLLTVPGIAELSALQLLAEIALLRDRKVRQWVKHAGLDVRHYSSGSSVCRRSHLSKCGNRYLRRALFMPALVASRFDPSLRAFYQSLLARGKHKRQALAALMRKLVHAIYGLFRHRQPYLGTRLCPRFAEAL

SEQ ID NO: 108025 - protein, 315 aa, unidentified
MTSLATSFSYFLGGDVGKAEIVFYNSQDGTTISIQNNPKALAAFAATLKPGCLVVCEATGGYESALLKTMLKANIAVHRADARKVKAFIRSFGIRGKTDAIDARALAQYGRERADKLRLWAEPEAAQSRLQSLVLTREDLIKQRVANKNRLAAPGNAAVKPMLKAVIDCLTKQIDTIETQIHELIQGQPKLARNAKILASISGIGRIVSIALQALMPELGTLSRREVAALAGVAPHPNQSGGRDKYRKTIAGRPVKSLLFMAALSASRSKTTLGEFYRRLLAHGKTKMVAIVAVTRKIIVIANAKIRDAEQMQLS

SEQ ID NO: 108026 - protein, 351 aa, unidentified
MKKTITKTIGCDLGDKFSHLCVLDGSGEVTERARIRTSQTGFAGWFSGRPAATVIVEVGTHSRWVQQQLQQLGHEVVVANARQVRLIYHGKRKSDRIDAEKLARLGRLDRKLLRPIQHRGEAAHADLMVLRCRDQLVKARTELMNHVHGVAKSFGLRLKKGYSPTFCRHARALLSTQLLVAVEPMLCCIEQLSERIKHYDRTIAKMAEDYGEAGAILTIHGVGPLTAMAYVLTLEKPERFERSRDTGAYLGLVPREWQTGNSDPQLRISKAGDGFVRKLLVNCAQRMLGPFGRDSALRRYGLRLMERGGKNAKKKAVIAVARKLAVLMHRLWVTGEVYEPLRGCSGVAVAA

SEQ ID NO: 108027 - protein, 416 aa, unidentified
MKIVRPICCGMDVHKNIIVATIGITNKKTRITEYIQETFSTLNPDLLNLKQWLINHKCFDACMESTGKYWIPIFNILEDEINIYLTHPKYVKAIKGKKTDKKDSKWICDLFKHDLIKFSFIPPKEIRALREISRYRYRLVGMRSSERNRYQNCMTVSNIGIGSVFSDPFGKSAQAIMKEVLESDIIEDEKILKCIHRSCKNKDKILDSIKHSNIETDQRFKMNESMTHMEELQVHINNCEIEIMKRAAPMFDQFMHITQLPGISTLSAILIISEIGVDMKQFESDKQLTCWAGLAPANNESANKKKSVRISKAGQYLKPLLVQCALGAIKDKEGYFGIKYSRIKKRRGHKKAIIAIARMMLVSIYHMILTGEKFNPSDYESFRNPKPPIKQQDLTEESAIEFLKKSGFDVSKLTKP

SEQ ID NO: 108028 - protein, 346 aa, unidentified
MDSGYDGRQVVGMDLHRRRSVLVRMTEDGRRLGMAKITNSPVELRKEIARAGRAPRVVLEATYGWYWAADALAAAGAEVHLAHPLGVKAFSYRRVKNDERDAADLADLLRMGRLAEAWPAPAPVRELRELTRYRHRLVSLRSSCRNQVHAVLAKLGVPVTCSDVFGVAGSAWLDSLQLPQPYAGKITSLRQLAGELSTEIGMLTDVIGDLLAGDRGYQVIQALPGIGPVLAAHIVAEIGDVTRFATADRLCSWAGLTPRHRESDVKVSRGRVTKQGSRLLRWAVIEAVQHIPADSPIGAAKAAIVARRGAQAKNIAKTAAARKLLTLIYYGLRDHQIRCLGAPVAA

SEQ ID NO: 108029 - protein, 350 aa, unidentified
MVVVGADVHKRTHTFVAVDQVGRKIGEKVVEATTVGHRQAIRWARTQFGVELAWAIEDCRHLSARLERDLLSADQKVVRVPSKLMAQTRASARTRGKSDPIDALAVARAYLREPDLPVASHDEVSRELKLLVDRREDLVGQRTSTINRLLWRVHELDPGQAPKPASLDLAKHRRMLGDWLAAQPGLVAELAREELADITRLTEAINVLAKRIGERVRAIAPVLLAMPGCGELTAAKIIGETAGVARFKSEAAFARHSGVAPIPVWSGNTVGRVRMTRTGNRQLNAALHRIAVTQIRLDSLGQAYYRSRLAAGDSSTEALRCLKRRLARVVFHHLHTDHNIRTKPCQPAAA

SEQ ID NO: 108030 - protein, 412 aa, unidentified
MKRFSKTANTPVWVAVDIAKAKHEVLIERADGKRIGLTVANTQSDFEKLATHLSTLAKACEVALEPTGDYHRPLANFLLRRGHRVHFVSSIATNRTREALYNSWDKNDPKDAQVILHLLKGGVTQHFSDPLEDGNHDLQELLGTYRQIVDRKVRVYHALMTHYLPLYFPEAEPFIASSRSEWFLDVFLLAPIPADVLAFTKAAFLKKTVKSDEGHPTVRRRLVAEYYETAKQSVGIPVPPGSVAMQMFRLVLAEYIHLAKVRRRLEKDIHDRLEGHVDYQRLRTIPGIGPIVALTILAEGGNLRRFSHYRKFLKFCGFDLSTSQSGQRRGIPQLSKRGNAQLRCAFWMAGRSAVAQRRNGFRKKFDDYVRSNPKDVDLKRKAYTAVAAKMARVAYGLVKTNSDYRHFLQEAV

SEQ ID NO: 108031 - protein, 402 aa, unidentified
MFNNQFPKRNDNGLIETVSSAAAQQRKKRPRGDRLRPGALDAVAKRDPGRSRTSSPNSRQSRRPTRSSSSHLQVREDVVSDSEAMGEPKAVAAFVGIDVSKDKLDVCMLPGGECLQFGNDPKGLAKLVAHLKSLPACLSVIEATGGYERAALLAVQDANLAIALVNPRQTRDFAKALGQYAKTDRLDAAVLAEFAQRVQPTPQAKIPEKRRQLEALVTRRRQLVEQRSAEECRFQQATDKFIAKSVRHMLQTIDRQTDAIEKRIAELLESDDDWRAKLQVVQSAPGVGPVTGAALVAELPELGKLNRQQIAALAGVAPYPCDSGLARGKRSVWGGRKKLRSVLYMAALTARRCNPVIKAFARRLAIAGKSFKVIQVACIRKLLVILNSMVKTKSTWRDTSTS

SEQ ID NO: 108032 - protein, 377 aa, unidentified
MTQFSVSTSNEQSIHVALELSKNSWLLAIQAPGRDNPSLHPIKGGDAEGLMAKLNAARDRVAQVTGRTPKVTLCYEAGYDGFWLARFLEQRGIECLVMEPASLQVNRRARRVKTDRIDVENILHTLIAWCRGERHVCSMVVIPSVEEEDLRRTHRERNRLVRERTAHINRIKGLLFGQGIRGINVMKGYKTLAPAELVTGDGRPLPKRLGREITREIERLALVQEQLVEIECERDREPTPCAATERKRHDLLRLNGIGPTIAAILAREVYYRRFANRRQVASYLGLAPSPYDSGDGRRSQGISKAGNSLARYSLIQAAWLWLRHQPNSALTQWFHRRTEGQSKRVRCIMIVALARKLAIALWRYVEIGLIPQGAVVK

SEQ ID NO: 108033 - protein, 353 aa, unidentified
MPRSTNLSVATMGIDIGKNSFHVVGLDQRGAIVVRQRWTRSQIRARLANMPPCLIGMEACVGAHHLSRRLHSLGHDARLMPAKYVKPYRKGQKNDFRDAEAIAEAVQRPTMKFVATKTADQLDLQALHRVRARLVSQRTGIINQIRAFLLERGIAVRQGLRFLRAQLPEVLGKRTDVLSDRMVHVIENLAADWRRLDERIQGLSGEIQIVASQDPGCKRLMTVPGIGPIISSAMVAAIGSGAVFSNGRDFGAWLGLVPRQLSTGDRTILGKVSKQGNRYLRVLFVQAAWVVLIKPQTWERYGLKQWITAAKRRLHPNVLAIALANKLARIAWAVLSNDCDFKCEKTDETPRCA

SEQ ID NO: 108034 - protein, 337 aa, unidentified
MTHVGVDLHERFCYMTALDATGRSLKAGTVANQATELRRWLRGLPAPVEVAVEACSFWPAFQEAIADQVSVIHLVHPQRVKAIASAKLKNDRVDSATLAHLLRCNLLPEAWMADRATRERRQQVRLRISLGQHRAALKNQVHAILHQHGKRSPATDTFGRKGREWLRKIALPPEAREAVNTYGGLIDQVSQHIQRQEQRLKNMASGDARVKWLTSIPGVGTYSAMIILSEIGEVQRFGNAKALFSYAGLVPWVRESAGHKSRGGISRCGSPRLRWVMVEAAHTALRCSPAARRYFDRLRKRKHAHVARVALARKLLAAVFAMLRDGECFDETIFATV

SEQ ID NO: 108035 - protein, 420 aa, unidentified
MEVVVENCAGVDVHKEQVTVCVMLGAPGKSVRKETRVFSTFTGELMKLASWLHSLKVTSIAMESTGVYWKPVYAVLEAAEGFALVVGNAQHMKNVPGRKTDVKDAEWIAQLLRHGLIRKSFVPPPDIRQLRDVVRYRRSLVQVRASERNRLQKLLESANVKLGSVVSDVFGMTGMAIVKALVGGEANPATLMELAQGNLRAKKADLKAATECRIEPHHRWLLSLQLEQLKRLDETIDVLDKDIDQRVEPYRAQVTLLESMPGVGATGAANILAEMGADMSVFPTAGQFAAWAGVCPGNNESAGKRFSTPTRKGNPYLRTAFVEAATSAVRTRNTFYREKYYRMGCRMPRKKAKVAIAHKMAVAAHAMLKTGTCFKDLGPAYLDQLDTRRTAQKLAQRLVNLGYAVALTPPPSTEPTPRSC

SEQ ID NO: 108036 - protein, 384 aa, unidentified
MGNSITLYVGLDVHKDSIDIATADPGRTGEVRHVGSIGGDLTALDKALRKLISRGEHLHVVYEAGPCGFVVWRHLSASGLSCEVVAPSSIPKRSGDRIKTDRRDAMMLARLSRSGDLTPVRVPSAADEAVRDLVRARDDAVRECRNARHRLKALLLRNGITYEGRSTWTAAHLRWLSRLKMQHAAQQIGFQEYLHSVTESSARIVRLEQAMRDALPDWRLKPLVQALQAMRGVQLIAAMTLVAELQDFTRFESARKLMAYVGLVPGEHSSGPKRRQGSITKAGNSAARRMLVEVAWHYQHNARVTPIIARRQDQLPKAITDIAWAAQLRLHAKFKRLLARRVMKTKAVVAVARELTGFVWAIAGEVHDSGWQGLTITAGADKAA

SEQ ID NO: 108037 - protein, 366 aa, unidentified
MKKISTARVNGNMIFKGHRLTIGMDLGDRWSCYCVLDKAGEILLEQKVATTAEAMKQSFEKIPRSLIALETGTHSPWISRLLRELGHQVLVAHAQKVQLITKSNRKDDRHDARTLARLTRIDPELLGPVRHRSARAQIHLTVIRARAELVRARTALVNAVRGLVKSYGQRLPKCGTQQVSRELAAGLHAELREVLEPLLQEIESVNERIQEYDERMEKIAKESYPQVELLKQVKGVGTQIALTYVLTLEDPHRFAKSREVGCFLGLKPGRRDSGESEPQMRISKEGDRYLRTMMVQGAHYILGPFGEDSDLRRWGLKLAARGGKNGKKRAVVAVARKLAVLLHRLWVGGEVYEPLRNSHKAMRAAA

SEQ ID NO: 108038 - protein, 349 aa, unidentified
MERYIGLDVHATSCTAAVIDGQGKRLRSYVIETNGQALVEFLKMQPGTLHVCLEEGTQSGWLSEILSPYAARVVVTHVAESRGQKNDEHDAFGLADQLRTGAIQTTVYKSVGAFATLRQLVKAHAMIVRDTVRVQNRIKAIFRSRGVHVEGKSIYRPDGRDATLQALPESSRAAACLLLAQYDALRVVRDRAQKELVAESHRHEVTKRLESCPGVGEIRAAQLVAVVVTPDRFRTRAQFWSYCGLGIVMRSSSDWVQGTQGKWVRAPVQQTRGLNRKHNSLLKQVFKGAAKTVIHQHPNDPLHADYERMLAGGTKPNLAAVTLARKIAAITMAMWKKKEDYKPATTKKP

SEQ ID NO: 108039 - protein, 403 aa, unidentified
MKSVLSIDVANGKSEVLLITEYGEVLIEPYEVKHCLNEFNLLKEKIDNFNLNDLTIFMESTSTYHLPIQRFFTKNNYNVQVINPILGKNNTRNLRKTKTDIEDCYNLADLFFKNTVKIHTKNMNDIYSSMIELSRQEKHLTESLVRSKNRFKQIIANAFPEYIKCFTANDIFGKTSLNFIKEFPHADIIKEKRIDALANNLYKSSKNGCSYNKCLSKAKKIKELANNSYPGIDVDSYEVNNLINIVDVISYNGSKLNDVKQDIVKLARQTPYFNIINSIYGIGETSTAQIIAELGDINRFENIKQLNAFCGLDPTIIQSGKSINYHGPISKRGNRNARKILFITCCSIIRASVLHNMDNEILLYYRKKQAENKHFKECIIACSTKLLRTIFAMCKNNSLYVQK

SEQ ID NO: 108040 - protein, 366 aa, unidentified
MKRIAYIGIDYHMETVSAAVIIENEKDFFDTIRMSNNDEIILKYLKKISKKFEIKACYEASCNGYDFQRKMGKWGFNCDIIAPSLIPKKPGDKRKNDFRDAQNLTKLYANGQLTIVHPPTEEQESIRNLIRCRLNLKENEKNVKLQINSFILSQGLRWPNSKWTVKHRAWLSGLKLQESYSQQVLSEYLGHLEYLGARINNLDATIKKISESEIYEPSVKKLKAFKGLDILGAMILIAEITDFRRFPNPGALMAFLGLIPSENSSGNKQKGGGITKTGNHRCRKQLIESVQHLMKKPIISYKMKKNLQEVDSGSANIAIKCMNRLHKRFWALMAKGKSRNKAKVAIAREFVGFIWAMMTQPESATI

SEQ ID NO: 108041 - protein, 354 aa, unidentified
MSEKLNSEIAVIGIDIGKNSFHLVGQDRRGRIVLRQKWSRGQVEARLANLPPCLIGMEACVGAHHLSRKLKAFGHDARLMPAKYVRPYSKGEKNDYRDADAIAEAVQRPTMKFVATKSADQLDLQALHRVRERLVGQRTGIINQIRAFLLERSIAVRQGLHFLRAELPGILAKRTDVLSPRMLRVIEDLAGDWRRLDERIDALSDEIMTLARQDKGCERLMTVPGIGPIISSAMVAAIGSGDAFSKGRDFGAWLGLVPKQMSTGDRTILGSISKRGNRYLRTLFVQAAWVVLVKIKPEGWERYGLKSWIESAKQRLHRNVLAIALANKLARIAWAVLHKGRAFECVKTNASRSA

SEQ ID NO: 108042 - protein, 340 aa, unidentified
MTASLPADNGFIGIDVGSSNLDVAWHGGGTARYANCPDGIAALVERLKQQPPTRIVLEPTGGYEKALVKALRRARLPFEFVHTSRFKAYRELRGVRAKSDRSDTRLLAAYAASPAEVRGRKADHVDLPEDATREALAEFASRRDQLKHMIHAETCRLGTVRLDEVRKSIMDHLETLRAEDKQLHKRMLELVRQRADLKRDQRLLSSIKGVGPKSALALLACVPELGRIDNKKIAALIGVAPFVHQSGTILAPARIHGGRAAVRRILYMAAVAASTHNPVLRPFYERLIAKGKPAKLALIALLRRLVVFANAVIRSGQPWRGATANAASSDCPLPVAACAA

SEQ ID NO: 108043 - protein, 304 aa, unidentified
MSYFAGIDLHKRYLTLCVLDPIGNVVVQHRRLTTDGLFAVLAELDGPITIAVEATLHWAWLHDRLVAQGYTVQVADPGQVKLISKARCKTDPIDARKLADLLRSNLLPAIWVPDPTTRANRKLLRGYAFLVRSRTRIKNRIHAYLAEINLASPATDLFGKQGRLWMDSLTLPDEVRFQIDGLLEILDFLELRIRKVAKRIEQRVDMTPEAQLLLTVPGIGAKTAMLIMAEIGDISRFPSSHDLTSFAGLVPSTRLIRAKGNSKATVAAARKLCCYLFWMLKEGRTYPEWLHNRHSNHLLEVRPT

SEQ ID NO: 108044 - protein, 409 aa, unidentified
MRIIGLDIHRVFAEAVAWEEGRLRRLGRVDMRRDLLEAFAASLSANDIVVIEATGNASSAAAVVAPHVKKVVIANPKQVRIIAHAKIKTDTIDASVLAQLYASGFLPEVWIPDEPTQALRRQVTRRNQIVRQRSRLKNVIQSILHSHLIPSCPHADLCGAKGRQWLSGQMVPEDERLAIDRHLREFDRLGDDLQVIERDLARSALEDDGVKRLMTIPGVDMTVALAMKAAIGDVSRFNEPQKLVSYLGLNPSVRQSGPGPAYHGRITKQGRGHARGMLVEAAWAAARAPGPLRAFFLRVRARRGHHVAAVATARKLAVVIWHLLTKSESYAWARPSLHAKKLRDMELKAGSKAARGQKGAAHAYNIKSHREEERRWVEQAEGAYARFVAGWNPRGPRKARTNAANEGRR

SEQ ID NO: 108045 - protein, 417 aa, unidentified
MSLNVEGASIFVGIDWAAETHAVCVQDEAGRKVAAFTIEHTAEGLTALVRRLARIGEPETMPVGIERPDGRLVDVLLEAGHPVVPVKPNAIKAWRDGEVLSGAKSDAADAEVIAEYLRLRQRRLHLATPYSVETKALRTVVRTRGDLVEMRVAATNQLSALLDAHWPGAKAIFADVESPIALEFLTRYPTARHAAHLGVKRLTAFCVKHGYCGRRPAEHLLARLRGAPAGTLNETLCEAIRDAVLALVTVLKALAGAVKDLDRSVTATLGEHPDAPIFTSLPRSGQINAAQMLAEWGDCRQAYDSPDAVAALAGATPVTKESGRHRAVHFRWACNKRFRAAITTFADNSRHASPWAAKVYADARARGHDHPHAVRVLARAWIRVIWRCWQDRISYDPARHGNAAPLSQPPQNDPLAA

SEQ ID NO: 108046 - protein, 346 aa, unidentified
MEHYAGIDVSLERSSVCVVDALGKIVKEAKISSEPTALVAFFEALGFVVKRIGLEAGPLSQWLHAGLQRAGFEAVLLETRHVKAALSAMTVKTDRKDARGLAQLIRMGWFRPVHAKSIRSQEVRALLVARKQLLGRLIDVELSIRGILRGFGLKVGPVTRTGFDGRIRELVTGQATLARIAVAMLSARAALKAEYEKLHKAVLAIVRDDAVCRRLMTVPSVGPLVAITYKSAMDDPNRITKSKAAGALFGLTPRKYQSGEKDVTGGITRAGDEMVRTALYEAANVLLSRITRFSKLKRWGIDVAKRRGSKRAKVALARKIAVILHRMWVDGSTYRWTEAQPIAAQA

SEQ ID NO: 108047 - protein, 348 aa, unidentified
MKNLFIGIDFSKEKIDVTMISAIGLTEQSARVSSEFKATPCGYRQFLKWVEEHSCGIDVSSWLFCGENTGDYSKPLCNYLYGKGYDMWLENAKCIKDASGLRRLKTDRADSAMIAEYAMRNHDRALFYRPLSNSLSQLRELFLYRHMIVRHKCSFQVRKEEKRMTMEKSPSRTLISNTGKHFITEFDKAIAKLDKKIKEIIESDEELKHTYTIVTSVPGIGTQNAVCLMVYTKNFHKSDFDARKIACYYGVAPFGKESGTSVRSIPRTHYMANRLIKSTLTQSALIAIRFSPHLKQYFTRLISKGKKMQVALNNVKNKLLHMVTAMVKNDMLYSPDYINACQRIANTL

SEQ ID NO: 108048 - protein, 410 aa, unidentified
MMEAKSQADESSGPAERSLPRQQAEDMSAPETIAALQDPLTRGANGMDPALPARVTVSRPLLRGRTVMQIVRIGLDLAKYVFEIHGVDPQGKTVVRKTLRRHAVSTFFANLPPCLVGMEASNGAHFWANALSDLGHDVRLISPQFVTPYVKSNKNDRNDAEAICEAVGRPSMRFVPVKSAEQLAVQAVHRIRSRLVADRVRLVNQIRGLLGEHGVVVAKDIGNLRRALARIVDDEDRVLNPLARALMAELREELAELDARIGGYDLKIRELYRNSEICQRLGKVEGIGPVTATALVAAVGDRSSFKNGRQFAAWLGLVPKQRSSGGRARLFGISKRGDRYLRTLLIHGARSALERVRDKQDPRSLWLGRMRQRRHPNIVAVALANKNARIAWSLLTSDSVYDVRLSVRAS

SEQ ID NO: 108049 - protein, 318 aa, unidentified
MTQMAHTTALYVGIDVSQKTLTIAIYPTDEVWTIDNTSEHHTALAQRLAHLPIQRVLLESSGGYEKAVVAALQQAGLPVVVVPAQRARYFAKSMRGDLKTDRADARMLAYFACCYPVQSVAPCSPVQAELKELWARREQLVQQVEREKKRLQTVQSEAVRASLARMLAVLKDEIAQIEARVEALIASDAALAQKAALLQTAVGVGRVVAYGLVAELPELGQVSHRTIAALAGLAPVRCESGDWVGRARVRGGRPRVRRLLYQAAVVASAHDGRWRAVYAGLLAKGKPKKVAFCAVARQLLVVLNAMVRDGRAYERVSE

SEQ ID NO: 108050 - protein, 415 aa, unidentified
MRVHRNCCGLDVHKKIIAACLIKEDGEGNSIPEKRLFGSMTRDLHELAQWLCAAQVTAVAMEATGVYWMPVWNVLEPYGLQLLLINPEHYKAVRGKKTDLKDGTRIAELLQEGRLEGSYVPAVAIRVLRDLTRYRTKLVQYQSSLSNRIQRLLEQCNIKLASVASDVLGVSAMAMLRALSEGETDAARMADMAKKQLRKKIPQLQLALEGCVLPHHRWLLREMIEDLDHVGTKITRVEETIEQQMRPFQSAVERWVTVPGIKHRLAWTLVAEVGPTVEAFPSAADIVSWAGVCPGNNQTGGKRKSGTTRAGNPWLRRALCEAAWAASKTKGTYLQAQFRRLAALRGPKRALIAVANSILTAGYYMLQRATTYQDLGPDYFDKRNTVRATHRLVKRLEALGHRVILEPRFAADPSS

SEQ ID NO: 108051 - protein, 387 aa, unidentified
MQSVTSATAVATTARANDITLFVSLELSKSKWVVTINSPGSEKFSKHVIEGGDGAGLLDLLSRSRAKAEQRCGARVNVVVIQEAGLDGFWIHRLLLADGIESHVVDAASIAVDRRHRRAKTDSIDGETLLRTLMAWARGERRVCSMVRAPSPEEEDRRRLTRERGTLLKERIQHTNRIRGLLSGQGVRDYNPLRRDRFERLEALRTGDGRELPPLLKAEIRRELDRIAVAATQLAAVERARDALIRTDAEERNNPAGLLLKLKGMGPEFASLLWLESLFRSFDNRRQVAAYGGLAPSPWQSGSVERDQGISKSGNRRLRKTMIELAWFWLRHQPDSALSRWFHARVGSAKGRVRRIAIVALARKLLVALWRYVTQGVVPEGAVFKAA

SEQ ID NO: 108052 - protein, 361 aa, unidentified
MSGTMTFAGLDVHARSTHAAAIDVITGELVRARFGAGVEAPVAWLAGLPGPVRACYEAGPSGFGLYRAAVAAGVCVEVIAPGKTPRGPSDRVKTDRKDAELLARLLLAGSLTVVVVPPVEVEAARELMRAHDACRRDLMNARHRVSKMLLRHGRVYPRPSTWTIEHRRWLSRQQFDEAASELTFADLVAAVDGLTARKAAIAGRLSGLALEQQWWPTVARLRCFRGVDTLTAFALHLELGGDWQRFARASALSSWLGLVPSLHQSGGSSRQGPITKTGSTFARRLLIESAWHYGRDPRIGATLANRQLGQPDHVLQIANRAQHRLHRVYHRMRARGKPHNVAVVACARELACFLWAAATAD

SEQ ID NO: 108053 - protein, 349 aa, unidentified
MTIVEDRPVITGGVDTHADLHVAAALDPLGGLLGVQEFPATATGYAQLLDWLGGFGPIALVGVEGTGSYGAGLARHLAVAGIRVVEVDRADRQDRHRQGKSDPLDAVSAARAAQSGRASGAPKGRDGAVEAIRALMVAKRSARAERTQAINQARALIVTGPDELRARFAGHTPAQLVEAIAALRPRPGDVPGYATRVALRELGRRAQFLDAQLERLDELIGPLVTARAPGLLRLHGVGSDTAALLLIAAGDHPERLRSESSWAHLCGAAPIPASSGKVSRHRLNRGGDRQANHALWRIVITRLGSRPGHPATRAYVERRTKEGLSKKEIIRCLKRYVAREVYHQLRGGA

SEQ ID NO: 108054 - protein, 427 aa, unidentified
MKEQSRTIVGIDWSADSHTCYDLQTDKSFKITDSVEGYEKLLKNYPEAVFVIEEANNRIGDYLLINNREVYVLPPCRSKEARKYHFSSGTKSDGLDAQAIALTFKEHPSYCLKARYSKVGVKITKLVTAYNIVSKTHSQQCNRLYSLLLRYFPEYLHIMDKQYRSDTSLRILSVCPTITELKKVSNEKLKKILNKENHRMTSVLKNKLDRIRSEGISWEDTSCEGKLILLLVNTLLSLRKGLEVLKKEMEKTLENSPYRIILSIPGVKAVIGSYIVKAYLTHDFKSYQEIQKYAGTVPLLFQSGRKSIMLMRKKCDNDLKGMIHMAAFASLKTCGWARNYYRRKRKEGKTYGHALRALGNILLKIAFSMLSKMKEYDETLFLNAKGIKTTQLNDTSFSETFPYPEYSQDAQLSLAATKDVVDNLIVT

SEQ ID NO: 108055 - protein, 364 aa, unidentified
MTESITFVAFDMHQDSITAAWLRPGAAEPETRTVPNEPKPFRRLVKELLARGPARACYEAGPVGYEPQRQLAAWGLPCEVIAPSLIPRRSGDRIKTDKRDAKKLVKFYRSGELTPIRIPTPAEEAARDLVRCREAAGVDALRALHRLRKFLLRRDLRCPAGRPGTQAWWRWVHALRLPDPAAQRTLEEYTLAATTARTRWKALDPEVTALATREPWVAPVAQLRCFRGLDTLGAVSLHLEVFDWRRFGSPRPCMSFVGLVPSEHTTGRRRRQGSITKAGNAHLRRILVEAAWHYTRRADRRAAVRKRQQGQPPAVVAVAQQAEQRLYRRFQHLVAGRKLRTVAVTAVARELCGFLWAAMVASPA

SEQ ID NO: 108056 - protein, 405 aa, unidentified
MKDLLEISCGLDIHKEKIGPLGKPTHSEIREFTTLIPDMLALRDWIISENCHHIAMESTGIYWIPIYEILEDAFSGDITLLVVNARHMKNVPGKKTDIRDSEWISTLLRAGLLNASFIPEKRIREFRDLNRYRKSIIRDITSQKNRVEKFLQSSGFRLSSFISDIFGASGRNIILHLMEHGQIDKMSLDSYLKTKTRKRIDEILMSVNGTLSEHQKSFLKILMCHYDSMKEHLIEIETHLQEDMLPFALQIEQLNTIYGISTTASCAIIAEIGTDMKPFKTAEHICSWAGLCPGNNESAGKRKSTSITKGNPYIKSMLCEIAWVIAGKRNTYLSAWYWRIKQKKGARKAIVALARKLLVIIYTMLKQGTNFDENCFEVRRKNCEQKQLSRYIRELEKHGFSDSRI

SEQ ID NO: 108057 - protein, 415 aa, unidentified
MALKIVYKICCGIDVHKTFVVACIASTNDKGVTSYESHRFSTYTSGLKTLLQWLIDRNCKDVCMESTGKYWIPVYNILEKGCSIVLAHPKYVKAIRGKKTDKKDAKWIADLFKHNLVAGSFMPPSDIRQLRDLMRYRFKLTCFKSSEKNRLQNCLTVSNIQLGNVVSDTFGKSAQAILDKILENPEDTSFDLEPLVFKSLKKKLPELRDAIDGYITPEQAGKLKVIKTHYEDLESRKAELEELILALAAPYQQELAILQTSPGISSDFTAIGIISEIGTNMEAFPSAKHLCSWAGLTPTNNESAGKKKSVRVSKAGCYIKPLLVQCANAVIKSTKHPEMRNRYLRLKKRRGHKKAIIAIARMLLTALYHMLKNGENYNPELYRKTDLPPAGREITIEQALMLIRNQGYKIKSATT

SEQ ID NO: 108058 - protein, 429 aa, unidentified
MNYTQNKKIEQVTDTTLVVGIDIGSQTHYARAFDNRGRELTKRVFSFANDIEGFNTFNQWAEKLRKENGKTEIMIGCEPTGHYWFALSKYVTDHKMNLVMVNPFSVKKIKELDDNSPKKTDAKDPKTIAKLVIDGRFSYPYMPEGIYAEIRDLEYSRDRIIKQHNISANRIQRWLAIHFPEYLGIYTRFDAASGLAVLEKAPLPKDIIALGVKGIRDIWHDNKMRGRGVTEDRAKTLVEAAHNSIGLDGGPGTRSELYMLLEEHKLWTSQLVTVEKALEETVLKVKNVEKLLAIKGVGIITIAGFIAEVGDIRRFKSPKQIQKYAGLELVENSSGKHKGRSRISKRGRRKLRKILYQVMIPLLASNKEFRQIYDYFVSRVKNPLKRRQAMMAVSCKLIRVFYAVLTKGVDYDRFKMMSDIHHEGELTAA

SEQ ID NO: 108059 - protein, 331 aa, unidentified
MKLKEFIGIDMSKLKFDVRIHSNQNSSVFENNSAGYKILMKWIKKNVKCEKEEILFALEHTGIYSLPISVFFAQNDYKFVVLPGLEIKRSLGIQRGKNDKIDAKRIAEYAFQKQDKIKLSQLPFKNILKMRRLLSMRDRLVKHRAGFLKDRSENEIFLKKTDNKVLFEVTMKSICDLDKQIIKIEKELRDIVKNDVLISKQYNLITSIKGVGEQTALFTIAFTNCFSSFENWRQFASYSGTAPFPYSSGTSIKGRSKVSHLANKKMKALLNMCARSAIVCNPEMRIYYQNRKEKGDNGMSAMNIIRNKLISRIFAVVKRGTPYVDTFKFAA

SEQ ID NO: 108060 - protein, 341 aa, unidentified
MKKTVVVGIDFSKKTLDVSCFKVGSSTNSYYQQFINSEKGCFELISWVKKHFNDTAQWLICGEYTGIYSMTAAVVFNDQALSFWLENPNQIRLSSGVCRQKSDKVDSMQIALYASRFMDRVKLYQPQSQALLRVRELVRFKDRLTKVRTQLLVSASELKQVRKDWQEADYIYDTSKEMINQINANITEVEQKMIELLKTDQELKRMYDLINSVVGVGMQTAVYLMVHTCGFEAFESPRQLACYCGIVPFSKRSGTSLKGRPHVSHIANKKLKSLLHMCALNAVKYDPQLKLYYQRKTEEGKHKMNVLNNVRNKLIHRIYAVITSGQEYDKDYYLRKIDIAA

SEQ ID NO: 108061 - protein, 335 aa, unidentified
MKKMFVGIDISKEKLNLCFRTASRIVCEEEIENTSAVIKRQLKKSLRDLETTLEDVLVCAEYTGRYIYPLTCACQDLGIFLWMEDPTRIKNSFGVIRGKSDTVDARRIAEYAYRFNDKAVAYAMKDKDIMSLKNLLSDRDLLLADRKKYEAQLSDQKRYMSVEDYKNKARRWKKIISTIKEQLAAIEAEMQDIVDSNESISHQAELLKSVPGVGDKLSVNMIVITEGFTRFRDARQFNCYAGLAPFQYSSGKSIHSKAKVSQRANKHIKGLLHLCAVCVSTHALSGEYRDYYERRKAEGKHPMCILNIIRAKIVARMFSVIRRDTPYKKEYSYAG

SEQ ID NO: 108062 - protein, 429 aa, unidentified
MNYNTQNAKIASITEKSLIVGIDVGSETHYARAFDWRNYEYSKKPFAFNNDEAGFAAFKAWMEDIAEKHGKEAVIPGMEPTGHYWLNLGAYLQEQGMKPVHVNPHHVKKSKELDDNNPNKNDRKDPKTIAGLVNEGRFSYPYIPTGIYAEIRNLSNLRIQTQEELTRIKNRIARWFSIYFPEIKDVYKNPDAVSGMMVIKKAPLPCDIKGLGVDGVNQVWRDAKLKGAGLKRARTLVSAAEHSIGSTEAPESARIEIRNLLNDYEVYKNRMDDLMREIEAKLSEIPYIDKLMEINGIGLKTVSCFIAEVGDIRRFDNPKQLQKLAGYAIVADSSGKHNGESRISHRGRKRLRYALYEAAISVIGKNKEFREIHDYYRTRKQNPLKKMQSVIAIACKLIRIFYTILTKGVDYDGQKMLSDIVRPETVMAA

SEQ ID NO: 108063 - protein, 365 aa, unidentified
MDNAHYITIGMDVSDRKTQVCVMAGDGKSPKIVMETAIPTTREGLAKFLSTQDRSTPVAFGTGTHCRWMDEVAGGLGFKVHVANPCRLRMMTESKTKNDVNDARMLARLALSDPGLLHPVKLRGAGHQRMINLHEMRSLLVRQRAGAIVQLRAIAKSMGFRIARRRAAGFHNLDGKAWPEGFRDIAWPMLKNLGQLAVTIKTYEKRIRELAGTPAFKAQVDRLMEIRHVGLYVATGFVAVTGGDMDRFGKPRDVGPWPGITPKQDQSGDVDRQCHITKAGSPFMRRLLVESAQTVLRDCSVDTDLKAKGLRICARGAKMAKRKAVTAVARSLAVLMVAMLKKPDAPYVPLSGRCEKELLAMRATA

SEQ ID NO: 108064 - protein, 349 aa, unidentified
MLADQVDYVVGVDTHLDEHVLAVVASPGGAVVAQRAVAANARGYAQALRFAQRYAGGTRVWAIEGAGHYGAGLARYLNERDEAVLEAGRSPRNERRLRGKDDQLDAVRAARVALTSEPLALPRSGQRREALRLLLVARRSAVDVRREALVQLRSVIVTAPDALRDELRGLPVQRLLDRCNRLRRSTAAAPDELATRLVLRSLARRIVAASVEADELEREILLHVRVLAPQLLDEPGVGPIVAAQLLVAWSHRGRLRSEAAFARLAGVAPLPASSGQTTRHRLSRGGDRQLNRALHTIVLHRRQHDPATKDYIARRIAEGKTRRDATRLLKRYLARNLYRLLENGSPLPT

SEQ ID NO: 108065 - protein, 394 aa, unidentified
MKKVCGLDVHKDSIFLCILAGNGQTFLKEYSTLTPDIEAIRDLIKEQQVDEVAMESTGIYWIPIWRILQGHVEMKLVNPYFIKQLPGRKTDVKDSQWIATVLQKGLIRGSYIPEKHIQELRQYERRYVRICEHITRIEQEIDRQLHRCNIRITNFTCKIGSVSVMGVVRGLFQGESTPEELIKHIHGRITNKHKEKIAASLQGVVADSDRFILRHNYEELELLTRQQKECVKEMENICDTLYKEELQLLCTVPGIQKLSAMTIIAELGVDLKTFVTAASLVGWVGLRPRNDESAKKIKCRKITNGNKYLRRILVQCAWAITRSKSCWLSGKFNELAKRRSQKKALIAIARKLLVIIWHILSNHEAYKEYKPKLSKEQKQKRIARLEKQILELQS

SEQ ID NO: 108066 - protein, 466 aa, unidentified
MKRHRRRHAPKPRVSPSVLDHINPHAAGIDCGSAEHFVAVPPDRDPTPVRSFATFTGDLQRLADWLTACRVTSVAMEATGVYWIPLYEILDARGFTVLLVNARHVKNVPGRKSDVSDCEWLRDLHIVGLLRGSFRPTDGIVALRAYLRHRQTLIETAGSHVQRMQKALVQMNVQLPLVVSDITGVTGLRILRDIVAGRTDPPALAQHRDYRCHASEAEIVAALTGNYRPEHVFGLRQNLEAFDHVQQQIAACDTAIEAHLQTLAAHATPATTPLPPARPRQKPRDNEPRFELRTPLHQLTGVDLSQLDGIGPYNALRLLSEIGTDMTRWPTDKHFTSWLTLAPKNRISGGRLLSSRTQPSANRAAAILRLAAMNLGRSQTALGAFYRRLAFRVGKAKAITATARKLAILVYRTLKDGLVYRDPGADAYDAQHRTHVLRRLRQRAENLGFAFVDLKTGEVADGTTVS

SEQ ID NO: 108067 - protein, 400 aa, unidentified
MRAVFGIDVSKTSSEVAILVNGEKVHGYTILNDAIGFNRLLGDLKTVHNPEIIFEATGVYSRRLQAFLEEYSYAYTRLNPLEAKKQLDSLRVRKTDKIDAEKLAKSQLVHNRKPTYVQEEVYQHLRDLSRFYQNMTEDLVRTKNRLHKVLQVTFPELENLLSTPTGEQYWNLVMAFPCKEFVLSLSQSNLCEIIRQSTSKRISEKRIAYLTDKLIKLAKQSFCAVKKTSPMLEEVRYYAQELLRLSERRQVVLNDMVALAQPLPEYDILRSIPGIAETTATSIIGELGNIRRFQSTNQINAFIGIDLRHYESGNFLAKEHITKRGNPYARKILFKCIHNIASASHTNPCHIADFYEKRKRQSTIASTKPHTIASIHRLIRTMYYLITHNKLYDYSLAQNR

SEQ ID NO: 108068 - protein, 375 aa, unidentified
MKKSSTKAMRFVGLDVHAATIAVAVAEPDGEVRFLGAIANQENAVARLVKKLNAEGIWEACYEAGPTGYALYWQLAKKGIVCTVVAPTLIPVKAGDRVKTDRRDAERLARSFRAGDLTAVWVPDPAHEALRDLVRAREAAKRDELRARHRLGKFLLRQGIRAPDGTRSWTKKYLEWIKTKVRFEEQAQAWVLEDYVNEVEHCGQRIERLEQLIDEAVECAPETMRQVIEALQALRGIAKVSAVTIVAEVGQLSRFPTARQLMGYSGAVASEYSSGESIRRGSITKTGNAHLRRIVVEAAWTQRFRPVLSKQVKARQKGLDPEIVEIASKAMHRLHSRYERLSAKGKNKQQVVTAVARELLGFVWAIGVAVERRTA

SEQ ID NO: 108069 - protein, 322 aa, unidentified
MKPKFYVGIDVSKDKLDVAVKEAGTDDKFSPAKRAAKVWTTSNTAKGHGELARRLKELGPERIALEATGGYEQKAFRALREAGLPAVILQPLCVHEFAKAMGKRAKTDAIDALMIAFFAEVRQPEVLPLPTENQDRIAELRGLRTDFVKTRNQFTTRLETCGAEARAHIEQLLTDVEAQIAALDAKLHEALQATPEDAAKAALVQSVPGVGPVTAATLIGELPELGKLDRRRISALVGLAPMNRDSGRQSGKRRIQGGRGDVRQVLYMAALTARRWNPVIRAFADRLATAGKPHVIMVACMRKLLVILNAMVLAGTSWSLSA

SEQ ID NO: 108070 - protein, 352 aa, unidentified
MRKITTIGLDLAKKVFHVHGVDAEGNVVVARRLRRKEVLAFFANLTPCLVGIEACGSAHYWAREIAKLGHTVKLMPPRYVKPYVKRGKTDPGDAAAICEAVTRPTMSFVPVKGLEQQGLSMLHSARSQLTGQRTQLTNAVRGHLSELGIVAARGMLGFAELAAIVRDESDKRLPVTARAALMILVRQIETISTEIAALDSTLRKENNASELGPRLESIPSVGPVIASALRARVTDAALFENGRHLSAWIGIVPENDSTGGKIKQKGLSKKGDRYLRSLLVNGAMAVVRQAQKRPDKHPWVAKLLARMSAKQAAIAIANKTARIAWAIMVHGGVYEAGHRAPQYRAQACAAAG

SEQ ID NO: 108071 - protein, 343 aa, unidentified
MSEVTTIGLDLAKNVFQVHGIDASGQVVVRRQLRRSQVLPFFEKQVACVVGLETCATSHHWAREIAKLGHDVRLMPARYVKPYVKRNKNDAADAEAICEAVTRPTMRFVAVKTEEQQSVLMLHRTRQLFVRQRTTLINAIRAHMAEFGIVAGVGRNGVERLLRLIDEGADGRVPPVARECLQALRTQLVLVKRQILKADRRILAWHRSNELSRRLETIPGVGPLIATALVASIPDPHAFGSARDLPAWIGLVPKQNSTGGKERLGGISKAGNRYLRSLLVVGALSVIRRAKQVGYTRRAWLAELMARRPVKVAAIALANKIARIAWALMVNGTRYREPVPQAV

SEQ ID NO: 108072 - protein, 349 aa, unidentified
MILVGCDLHTRKQQVALLNTDTGELRDQELSHVGDDVERFYAALSPPVTVGIESTGYSLWFHALLQRLGHTLLVGEAAKIRAMVVRKIKTDRRDARHLRDLLKDNRFPVVWIPDPTTRDLRALVKHRLRLVRIRTMVKNGLHAIALNQRLALGPSLWSRQGLAQLQALVLLPHTRRRREDSLELLHWLNRHIDELDLHVATAAAADPAARRLMTHPGVGPLTALTTVLVLGPVGRFPSSKHVVSYIGLAPAISASADKYRLGHISKQGSALLRWVLGQAAPLATRGDAALKRIYFAVLRRRGRPKAKVALARRLLIRLYVMLRDQIDYDEFCRRGRTRREGLELARTPV

SEQ ID NO: 108073 - protein, 356 aa, unidentified
MLNDKKYIGMDVHKESISIAVRNEAGKIVMECVIETKASVIVQFIDGLRGDLQVTFEEGTWAAWLYDLLKPHVTRLVVCDPRKNASMREGNQSDKIDARRLAELLRLNHLNPVYHGEHGLRSLKELVRSYLTITKDLGRVMSRVKAIYRSWTIPCTGKQVYAPRHRAEWLAKITEPGVRRRAEFYYQQLDALRALRQQVRRDLLAESKKHPAWKRLCQIPSIGPIRAAVLLGILQTPHRFRGKRQLWAFSGFGIETQSSADHRSVDGQLQRVKKPSSIRGLNRNCNHDLKNLFKGAAIVASSKPGPFQEFYTALLTKGIRPEMARLTLARKIATIVLIVWKRGASFDAQHLKPQTA

SEQ ID NO: 108074 - protein, 370 aa, unidentified
MENDTTVFVGLDVHKDSITAACIGARPSDHLIELGTVGTQQYAIDRLIKKLSGRGRLQFVYEAGPCGFWLERYLRDRGEECLVAAPSLIPKRPGERVKTDRRDARNLALALRAGTLTAVHIPTPEQEAFRDVVRAWQQSKRDITAAKQRLKSFLLRNDIRYTGRATWNAAHRRWLSELVLPRAPQQIVFQELVDAINERERRRDRLEHELDALAPSWAGYRLAQALLAFRGIRKTVAYTLIAEVATLARFSHPNRFMAWLGLVPSEHSSTRRQGAITRSGNRWARTLLIEAAWSYRYSPKVSGVIERRAQDIDPAIRDLAWKAQLRLTHKYRRLIAHGKHKNVAVTAVARELAGFLWDAARIVERSSTQV

SEQ ID NO: 108075 - protein, 347 aa, unidentified
MDNLTRIGMDTSKHIFQLHGVDGVGKTVLRKKLTRKAMVAFFEQLPATVVGIEACGASHHWGRVLGRFGHEVKLVPAQYVKPYVRRGKNDAADAQAICEAMNRPAMHFVPVKSPEQQSVQMVIGLRQRLIRQRTRLLNTIRGYAGEFGLVAAKGIVKIDVLLAQIAQNSALPELAREMFKLHAQEYAQLQIEIDKVEKMLMTLHRNNEVSRRLAQIPGVGPIGAMLLAAKVTDISAFASGRSFAAWIGLTPRDHSSGSKTRTGRISRAGDDALRSVLVLGATAVIRQARSGRGHPSPWLAALLKRKAAKLAAVALANKMARIAWKLMATGQYYDPFHETRTPMVEAA

SEQ ID NO: 108076 - protein, 340 aa, unidentified
MEEASVVGIDLAKSVFQVHGIDAKGQVVLRRRLSRAKLLGFFAELPPCLIGMETCASANYWARQLAELGHDVRLMPPQYVKPYVKRSKNDASDAEAICEAVTRPTMRFAGIKSATQQSVLVLHRTRAMLTRQRTQLGNAVRAHMAEFGIVAPVGRLGLDRLFAIVADDEDSRVPTVARSCLAMLAEQYRLVLVHLLETDRAIRADSRASECGRRLQEIPGVGPLLASALVATIPDAGVFRSGRSLSAWLGLVPRQNSSGGKERLGGITKAGDGYLRRMLFVGAMAVIRHAERHGTRRAWLLALLSRRSPRAAAVALANKIGRIAWAMMVRGERYREAVAA

SEQ ID NO: 108077 - protein, 360 aa, unidentified
MEVGQEVVLHPVVGGVDTHKDLHVAAVVDELDRVLGTRCFATTRQGYRQMLAWMRSFGQLRCIGIEATGTYGAGLLRSMQNAGVDVLEVTAPDKPDRRKRGKNDDLDAQNAAHAAFAGKRTVTPRSRDGMIESLRVLKACRKTAVVARRIALQMIQNTIVCAPDGLREALRQMTRMQLIRTLAAWRPDLTDYRNVDSAYRISLKSLGRRYVKLHDEIADLDVMIAAIVDELAPNLVARNSIGHAGAAQLLLTAGDNPERLHSEAGFAALCGVSTVPASSGKTTRHRLNRGGDRAANSALHIIAIGRLRTDPRTKAYMAKRVAEGHSKLEVIRCLKRYIAREVFTLISQRQKEINQARITA

SEQ ID NO: 108078 - protein, 346 aa, unidentified
MHHAAIDLGSRESQICIRQPDGTIVEERKLPTRKLTEVFKTWPTSRVVMEASAEAFKVADAALAAGHQVRVVPGKLVRLLGVGDRGVKNDQRDARQLSKASWQTDVPSVHIPSAAARELKSFCGARDVLVATQRNLSNNVRGWLRTQLWKLPSGTMATLPERLRAHARASQRELPEHIERQLTMLTQVTEQVQAANKQARRLAMEHPVCRRLMTVPGVGPLTSLRFVAAIDDPSRFSTAHRVQSYVGLTPGEHSSGGGGKTGGGKRGITKAGPSELRRCLVQAAWSVMLARRSHPMLEWARQIAQRRNRPVAVVALARKLAGILFAIWRDGTTYEANHAARRSALT

SEQ ID NO: 108079 - protein, 387 aa, unidentified
MQASTVDTPTAGHCGTIFVAIELSQKRWLVTLHSPDRDKMSRHNLEGGDHAGLLALIGRERDRAARALGAVPAVVSCYEAGYDGFWLHRLLMAAGITNYVFDPASIAVDQRARRVKTDRIDGEKMLRTLMAYLRGEPQVVRIVRVPAPEQEDARRASRERGRLIKEQTAHTTRIKALLRLLGMAMGNPRRRDWLSWLATQRDWQGQAVPPRMLGEIRHEHARLMLVRERLDELMQASAAADPAPAAVQMTERSELLLRLKCLGPAFATTLASEVFYKDFRNRREVASYFGLTPSPWQSGGIDRDQGISKAGNPRARCAAIELSWLWLRHQPESALTRWFRSRTHNNASKRNKRIAIVALARKLMVALWRYLTTGLVPDGALLKAVKA

SEQ ID NO: 108080 - protein, 347 aa, unidentified
MGEISAIGLDVAKSVFQVHGADAAGKTALRRRLKRGEVLRFFSDLRPCLVGIEACATSHHWARELRALGHDVRLIPPQYVKPYVKRNKTDAADAAAICEALTRPQMTFTSVKSVEQQAGQATHRIRELLTGQRTALMNALRGHLAELGLIAPKGGQGLKKLLALVDDEAVPARLRVLLKLIADQIGELTAKLEVCDRELLEQHRSSETSRRMATAPGIGVVLGDAIATSVANPADFKNGRHFAAWLGLLPKQASSGEKKRIGRVSKMGNEYLRRLFVSGAISLIIAARRRPDRASPWLREILARKKPTLVVAVALAHKMARIAWAMMKRGSDYLPGYRSRPPMAVAA

SEQ ID NO: 108081 - protein, 338 aa, unidentified
MPLYSGIDLHANNSMVVLLNEQDQVIYQRRLTNHLPEILEALAPYQPDIIGVVVESTYNWYWLVDGLMEAGYRVHLANPAAMQQYSGLKYTNDQSDARWLAHLLRLGVLPEGYIYPKAERAVRDLLRKRAHLVRQRTAQGLSVHNLMVRNTGVRFGAKRIDEFTPSELTSLLPNAEHVLAVTSSLAVLHCLGQQIKILEKAVQKRLKYTPAYAQLQTVDGIGTILAQTIVLETGDMGRFPTVGNYASYCRCVGSTKISNGKRKGQGNVKNGNPYLEWAYMEAAQFAIRFSPTVQRFYQRKQTRSHLMIARKAVAHKLARACYYIMRDLVPFDVHKAFG

SEQ ID NO: 108082 - protein, 313 aa, unidentified
MYYIGIDVSKKALSVFDGVNDLEFENTEGLKAFKRYLKKRYKSFDNIGILFESTGIYSDHLKTFCARHQLKAFILNPKQSYNFARSLGKRSKTDTIDARTIYTYHQLIPEEKLQVPLLNPVAKRLSGYLTSYQFMQKQRVSLSNHLESVQDKVLLKILKQELKRVQRLEDQLFAEIKVYIKGHPKLKDDFQRLLTIAGIGEKLALTLLSLFVNYQGTNRAQITALVGLDPIEKTSGTSVKGKAKISKNGNRHIRKLLYMPTLCAIQNNQKIHIFYNRLIDRHKPKKVAVIACMRKLLLVAHAIHRNRTEYVAI

SEQ ID NO: 108083 - protein, 340 aa, unidentified
MLYAGLDYHPRTSDLCILNEDGKAIKRRRVRGGRDAVAAELAGLGGPVAVVFEATGGYGPLHERLSAVAGVRRVVMAHPAHLRLIWGTKRKNDRLDALKLAKLLYLDAVPQAHVPPPEVRRWRRLVELRRALVRRRAAVKNQAHALLRGAGLAEPRGVSLFSRAGLGWLAAQALDDASSLERSLLLEQVRQVNEQVRQVERALRATSAADPRVALLMTVPGVGPRTAETFCAYVDRVERFGRVGEVGSYFGMVPCQDSSAGRERLGHLTKQGPPLMRQLLVEAAWSAVRTSATLRERFERVCRGDPGRRKLAVVALAHHLCEVMAAVLRDGRPWREPHAR

SEQ ID NO: 108084 - protein, 405 aa, unidentified
MFEIEDVGVFLGLDVGKTAHHGHGLTPGGKKVFDKPLPNSEPRLRAVFDKLREKFGTVLVIVDQPASIGALPLTVARDAGCKVAYLPGLAMRRIADLYPGEAKTDAKDAAVIADAARTMPHTLRSLELTDEITAELTVLVGFDQDLAAEATRTSNRIRGLLTQFHPSLERVLGPRLDHQAVTWLLERYGSPAALRKAGRRRLVELIRPKAPRMATRLIDDVFDALDEQTVIVPGTGTLDIVIPSLAASLAAVHAQRRAMEAQINALLEAHPLSPVLTSMPGVGVRTAAVLLVTVGDGTSFPTAAHLASYAGLAPTTKSSGTSIHGEHAPRGGNRQLKRAMFLSAFACMNADPASRAYYDKQRARGKTHTQALLRLARQRISVLFAMLRDGTFYESRTPTDIELAA

SEQ ID NO: 108085 - protein, 323 aa, unidentified
MSDPINKYTMIGVDVAKLKLDIAIDDKKVLTIDNKEESFRKLLKIIPDIDQVCFVMEATGGYERKLVSFLQSKGIAVAVINAKRVRDYANSMGAYAKNDHIDSQMIRHYAQAAFAKNRLKLLESRSEIAQQLEDLLRRRNQLVGQRAVEKQHLEAAINKESVRSITRMVKQLDKEIERIEVMIKAYIDADDNLKKSMEQLIQVQGVGEVTVLTLLTQLPELGKLSNKEIVALVGLAPYCKDSGKKTGRRVIFGGRMLIRSTLYMAILSAVRYNKPIREFYQRLLAHGKLKKVALVACMRKLLTILNSMAKTESEWNPDFAKTA

SEQ ID NO: 108086 - protein, 383 aa, unidentified
MEFERFKLRLPSLFILDKENEMKERLNYVYVGINIHKETHTAVLMTFLEEVLGKIKINNNRTEFKKLFAFVEEKKGDFIPIYGLEDVSHFGRNLAIFLIEKDCVVKEVNSALSYMERKSYPTTKKNDEWDAQCVSAVLMRRFHLLPDANPQDYHWTMSHLVKRRNALVKATTALAHQFHDQLQNYYPSYKQFFKEIDCSTALAFFEQYPSPKHLKGVTAEELGEFLRIKSHNRCSTKRAERILSLVEDDDINERKYQFVRDYVVQSIARQIRLNQEEVKRLESVQRKFLKKLDYQLETISGVSTVTACALIGHIDDIQRFSNANKLANYAGIAPINHSSGGKGKDEQNKSQGNRDLYAVVYFLAIQQICVDLKGKPVRKIEVA

SEQ ID NO: 108087 - protein, 410 aa, unidentified
MEVLHPRCCGLDVHKATVVACLRLVIDGKAIKETRTFATTTAGLLALSEWLTETQCTHVAMEATGVYWKPVWHILSDGDFELVLANAAHIKNVPGRKSDVKDSDWISDLLAHGLIQPSFVPDGPTQEMRTLLRTRKQVVREKSSHVLRIQKTLEDANIKLDSVITDIMGVSGRKMIGALIAGEKDPAKLARLADPRVKASKESLREALRGRVTKNHRFLLRLHLRQIDAIDAAIAEIDREVEASIAPFRTAVEQVSTVPGVKSLAAQTILSEIGLDMSRFPSSGHLISWACICPRSDESAGKRRSTRIRKGSPWLKTTLVQCAWAATRTKGSYLQAQFYRIRARRGAKKAILAVAASILTAIYHMLKDGTFYQDLGPDHFDPRTKERHKNRLIKRLADLGYVVELVPQAS

SEQ ID NO: 108088 - protein, 419 aa, unidentified
MSFKILKFNCCGLDVHKTWIYACIGITDSNNRTEYKQARFSSFTKGLNELCDWLAKYNCKDVCMESTGKYWIPVFNILEQHGLWVTLSHPKYTKPMKGNKTDRKDAKWICDLYMCGMVKPSFIPPADIRELRDLVRYRFKLTCMITGEKNRAQNCLTVSNLKLDDVFSDVFGKSSRSITEQILQHPGEKFDVAPFVHGRCKTPIEEIQAAIDGAISKEQAVKLRQCLDHIDELQKHISEVEQEILRLSDKYEAALTLIRTVPGFDKNPMTAIQVLSEIGGDMSVFPTAKHLVSWSGCCPRNDKSDRKIKSTRISRAGSYFKPVLVQVANALIKSKKHPEFTIRYKRIKARRGHKKAIIAICRMILTAIWHILTDLKPYTPEGFLESRPVNKEKVLTTSQALNLLRQRGYLIKDDPSLAS

SEQ ID NO: 108089 - protein, 367 aa, unidentified
MKKHTTMNKPVSATDVSVCTTVAVDLAKKVFQVAGEDAQGQLAYEQRIKSREAFQVFLQKLPEGVTVLMETGPGAQAWARLLQAQGNPVRILPAQRVAEHRSGAKNDRNDAHAILRAGRDSSIASVPVKSVAALAMQAWHRVRRGYVRRRTAMGNQIRGLLLEQGIALAQGDVGLKQGVTRVLEDASQPLPALLRELIDEMLNEWKRLGERIAALTGRLEACAAADPTAKRLMTVRGIGPITATALLAKQVEPERFANARQFAAYFGIVPDQHSSGQKVRLGKMTKRGDAYVRSLMVVGSHAVLKQLRPDSEHPDDRRLQRWLQRLGRKGAAVRLANRNLRIAWVLLCSEQTYQRKPNACREMEMSH

SEQ ID NO: 108090 - protein, 334 aa, unidentified
MKGNKQMNSLCLFPEELVLPVLGLDVAKASVQAELRTKERKVRFDFANNAKGFAQLARVLDQQGAPKIWAGLEATGAYSQALALWLHAQGHRVSLLNPRRVKQYAQSAGRRNKTDVLDAAIIADFVCAMRPARWQPPTLEVAQLQALVRRREELSVMLQAEKNRLEGVAVGVRSSLQRIIAALSAEKRRVEKLITQQIRSHPQLSRDHQLLCSITGIGSLTAAILLAEMARPGQVERARQAAAHAGLVPRREQSGSSVRRNRGLGRDGNRYLRKALYMPALVAIKYNAPLSHFASRLRSAGKPKMSIVCAVMRKLIHIAFGVLKHQQPFNPSLA

SEQ ID NO: 108091 - protein, 407 aa, unidentified
MFAGIDWAAEEHAVCVVDDAGRVAEQFTIGHSADGFERLVRRLARHADPAELAVAIERPDGRLVDRLLDAGHPVVPVKTTAIKAWREAEVGSGAKSDPGDAQVIADYLRLRRYDLRALRPFSAETRALRAAVRTRADLVDARVAAGNQLAAILAAFWPGAGDLFADVWSEIALAFLERYPTPTAAAHLGEARMAAFLRKHGYSGRRTPVELLERLRSAPAGLSDGPESEARRDAVLAMIRVVRALNRSIKDLDRAVVAHLDEHPDAVVFRSLPRAGQVNAAQMLAEWGDCREAYDGPEAVAALSGMAPVTRRSGRHTAVGFRWACNTRFRNAIATFADNSRHGSPWAATVYQAAIGRGADHPHAVRILARAWIRVIYRCWVDHVAYDPGRHGAARRLEDVRSVVVAA

SEQ ID NO: 108092 - protein, 461 aa, unidentified
MPDGGGENSSPRRTKQIEGLPVIRRNVAGIDLGSERHWVCAPVAGSISREVADFGATTPELIRMTKWLQACGVESVAMESTGVYWIAPHEVLEAAGLEVLLVDTRQLARVPGRDKKTDPSDCEWIQRLHSCGLLRGSFRPREEVCMLRTLVRDKANLVAECSDWLRRMQKSLDQMNVRVHRAVSHMDGITGMAILRAIAEGERDAQKLAKLRDTRCHKSEEEIAEQLSGHWREDHLFSLRQSLKMYDAIQQRLADYDREILQRLAAMQREEFRQQPPPPVKNPHKAKNMKKRGEEPMREALFRMSGVDLTGIDAIGVETVQVVLSEYGPDLSRFPTEKQFVSHVTLIPHKPMSGGKPVRKKRRSSASTRVAAALRMAALSLRNSATALGAYYRKIARRLNGDVAVFATARKLATLIYRLLRWGQPYVDEGAEAFERRYQETRLKTLKAKAKDLGYQLVASN

SEQ ID NO: 108093 - protein, 410 aa, unidentified
MKRDKHIYIGLDLHKFQHTAVILDCWFEKLGEMTFQNKPSIFPSLLEYVNRYLTEGLTPVFGLEDVGGYGRDLALYLIEQGYIVKFVNSSLSNAERNSYAMTQKNDSWDAQCVADVLIRKLPYLPDAAPSDIHWIIAQLVGRRSALVKAQTALKNQLHMQLNYHYPSYKKFFSEVDGKTALAFWENYPSPSRLEGETVERLRVFLLKPSKNGCSTKKAELILSLVQDDSEVKRKFQTSRDFIIQSIVRDIRFKKQEIKKVDKELKVTIQKLGMQLETMPGIDTVTSSALIAEIGDIHRFANSDKLARYAGIAPIKMGSGGKETMKKTKQGNRKLYDTFYNLAVQQVQVCKGSKIPRNPVFHTYYNQKLNEGKSKSQSLLCIMRRLVRIIYGMMKNKTAYIMPEIPDTIAS

SEQ ID NO: 108094 - protein, 433 aa, unidentified
MCYRPIYSVTGNICETTFKGYHPGIYLSPNKILGVNMKTIIGVGIDCSKNKHVVCISDNMGNQCESVFTIHNKLKDVEYLAEKVLEVENKLGKADVVINMESTGIYHLPLYSVISKIFKTNIYQPKQVKDMSSKNIRKSKTDKRDARTLSRIHLEIPPPQTDYGDREMYDIREIIRQRFSYKDIRTNLKNKFRRNLSIVFPNFDTLFKNPYASVPWNLLKICPTPEDVLRLGVQDISKIMEKASRGQKLRVTPQDLIKLTEESIRCDIMDRGALFGLKALMEDIEYLDRRIKQIDNEIEIYWNKIKRTLYFPTFPGLDMVKAVALHTEYGGFRRFPHPDKAVAFAGLENMVYISGDSKNFNGRMTKAGSPIIRRVCWELLNTPVLNIPKITAHMDKLKSKGKQRNIRVHSASKKMIRTLWAMEHHEQVYVRET

SEQ ID NO: 108095 - protein, 351 aa, unidentified
MPRKSSVCTVTAIGIDMGKTTLHMVGLDSYGAIVLREKVSRGRIASRLANLPPCLIGIEAGMATHYVARELTALGHDVKQVPPTYAKPFRQGHKNDFRDALAVAEAVQRPTTRFVPPKSNEQLDLQALHRVRSRLVSQRTAVINQIRGFLLERGIIVRQGLRFLRQLLPDILAKRTDVLSPRMVRIVSDLAGDWRQLDDRIEIVTDEIETLAKADDSCRRVMTVPGIGPIISSAMVAAIGNGSAFSKGRDYSAWLGLVPKQMSTGDRTILGRISKRGNSYLRMLFIQAARVILLRPANWPKHGFGAWLVRAIQRLHPNVLAAALANKLARIAWTVLAQERRYEARVTKAEA

SEQ ID NO: 108096 - protein, 350 aa, unidentified
MVTLGSDSHKRTHTLVAVDDNGQQQAQKTVPATTAGHLDAMQWALRWPERRWALEDCRHVSRRLEADLLVAGQLVVRVPPKLTVVARRVARTSGKSDPIDALAVARAALREPDLPVANLDGPSRDVRLLLDHRDDLVGERTRTQNRLRWHLHELDPETEIPARRLSRFRTLTELEQRLQGVRGVVAEIALELIVRIREMTARINQLEVEIERRVRRLAPTLLELDGCGALCAAKVVGETAGIGRFRSRAAFAMNNGTAPVPVSSGNQRRHRLNRGGNRQLNVALHRIAITQLKGPGRARDYVTRRIAAGNTKTEAIRALRRRISDEVYRRLLHDERSRIDAGTNCSEAAA

SEQ ID NO: 108097 - protein, 339 aa, unidentified
MQVSTMGIDLAKNLFVLHGVDHNGKTVLRKKLSRSQFVPFIIQLPACLIGMEACSSSHHFARLFSNAGHRVKLIPPQYVKPYVKTNKTDAADAEAICEAVTRPNMRFVQIKTAEQQGVLALHTERSFLVRERNGCANSLRAMLAEFGCVMATGFSALYKAVPEILEDEENELPHFVRVSVQRQLEHLKTLETRIRQTEHELSDWARTQPACQRVEKVPGVGLMTATYLVASVGNGRQFDTAKQFASWLGLTPREHSSGGKQKFGGISKRGDSYFRCLLVHGARAVLRHISKNEKTMPWLAALVRRKHRNVAAVAQACKTARILWSMLFHETEYRPLTGA

SEQ ID NO: 108098 - protein, 417 aa, unidentified
MLKIVFPICCGIDVHKTFLVATIASTDRSSVTTYQTKRFSTFTKDLENLSKWLLDNQCTDVCMESTGKYWIPVYNVLELTCEVILAHPKYVKSLRGKKTDRKDSVWIADLFKHGLVKASFIPEKAIRDLREVMRYRTKLVSMKSSEKNRYQNALTVSNVQLASVVSDTFGKSAQALINQLLQQPKDTSFDVLPFLHGSLKKKAEQISESLNGSIDDIQAQKIRSCTSHMAELDSHIEDLQVAADLIASPFTAALRIIESVPGIGHLSALTILSEIGTDMSKFLSAKHLCSWAGLTPCNDQSAGKKKSTRISRAGCYIKPILVQCALAAIKDKSFPYYGQRYQVLKHRRGHKKAIIAIARMMLSVIYTLLSRGELFSKELYEESLKNPMVILSQEEQFQRLAKKFGYVVVKVHEPVPV

SEQ ID NO: 108099 - protein, 385 aa, unidentified
MQSDLSRSLVVLKQDTTLIAVIELSLSSWLVGGLVPGLKRQPRRKLDPDPCGLLALLERWRDEGVRAGQKIERIAVAYEAGRDGFWLARWLRSRGIEAHVIHPNSIPVPREHRRAKSDRLDTELLLRGFLGWLRGEAKHCSMAQIPSIAQEDLKRPNREHQRLVNERTSLINRLKACLIRFGIRTFNPKLKKAAEQLSGLRTPEGGPLPANTLAELGRDLARLRLVREQIKAIETERCAHLAKASKDRHATTVRSLIRVVGLGVETADMLDSEMFARPLRDRWAAARYGGLTGSPDESGTRRREQGLARAGNSRVRRGMIQFAWRFLRFQEDSPLAQWYRHKTQSARKDIRKLMIVALARKLLIALWRMATQGVEPEGITLRQVG

SEQ ID NO: 108100 - protein, 358 aa, unidentified
MAQGSWVGLDVHARSVLAGVIEEATGELRVRPVGPECGPVVEWLLGLPAPVRVAYEAGPTGYTLARACAAAQIDCLVAAPSRIARAPGDRVKTDRRDTERLVRLLRLGELTPVRVPDEDEEAARDLVRAREDARGDLMRARHRLSKLLLRHGRLYPTRAWTRAHAAWLARQRFDQPALALAFEEAHAAVLGVRARREALDAAIVALAGEPRWAAQVGRLCCLRGVGVHTALALCAEIGDWKRFSGASIGAFLGLVPSESSSGQRRQQGPITKTGNAHARRLLVEAAWHHRHPLRASAELARRRQGQCAAVRDRAERAGRRLHQRWAHLEGRRAKRSTVVAVAVARELAGWCWSLAVME

SEQ ID NO: 108101 - protein, 337 aa, unidentified
MFMQVYGIDLSMEKFDVNFIDEKGKEKQKEVKNGVVSISKFLSTVPKDAVLCAEHTGAYGDLLVYLCNQEKIPIALVPGYTIKHSLGILKGKTDPIDAGRIREYGERFTDKLVFSEYDEECIVELKQLNTLRSQLVKARKTLLTSDKGRKHLPMQSISVHNHLQPVLSGLDAEIEAVEKEIEALIKANEDLNENYELVTSIKGVGPVIATDLLIKTGNFENIDTARKAASYAGVCPFPNTSGKMVGKSRTSPFADKKLKSLLYMGAKSAVKHNKEYQLYYQKKKLEGKPHYLIMNNISNKMLRTIYSVVKNKTPYSQDYICLDPRERNINSSTKKVA

SEQ ID NO: 108102 - protein, 349 aa, unidentified
MDFYAGLDVSLESTSICVVDDGGKVVREGKVPSDADAIELFLAEWGIRLKRVGLEAFSFSAWLFAALDGKGLPVVCIETRHTKAALNAMINKTDKNDARGIAQLMRTGWFRPVHVKSLQAQTLRVLLGGRKALLGKVLDMENMIRGLIRPFGLKVGQVSIGRFEARVKELVVGLAALEAIVVPLLEARAAMRLQFARLHRMALAAARDDNAVRRMMTVPGVGAIVALTFRATVDDPARFRKSTAVGAHFGLTPRRYQSGETDRSGRISKCGDDMTRSMLYEAAIAILTRIPRSFKLRLWGLRLAKKKGLKRAATAVARALAVLLHRIWVDGSTFRQGTGMKGGRIARAA

SEQ ID NO: 108103 - protein, 340 aa, unidentified
MRKYIRIGVDIAKNSFQVHALESEDCSATKRKLSRSGIVKFLAEVEPCAIGMEACGSAHYWARRFRAMGHEVKLTPPIYVKPYVKRGKNDAADAAAICEAMSRPNMRFVAVKSEDQQATLMAHKTRELLIKQRTMSVNALRGHLAEFGVIAAKGISHVEELVERAAAADLPAMVQATLGVLLAQLRSLDAATDELERAIVANHRRDPVSRLAASVPGVGALAASAILASAPDPQAFKSGRDFAAWLGATPKQNSTGGKEKFGSITKQGNRYIRRLLVLGAISVLRAAPKRKGALCDWLAALRARKPAKVVAVALANKLARIVWAIITTGEAFRTSIYAKA

SEQ ID NO: 108104 - protein, 450 aa, unidentified
MSKQKKTRKTAKVLHVLQPNAAGIDIGATEIYIAIPEDRVQESIRCFGTFTEDLHEAAQWLKSCNIDTIAMESTGVYWIPVFQILDSYGLDVILVNARHVKNVPGRKTDVQDCQWLQYLHSVGLLRGSFRPAQDICAVRSLLRHRDTMVKSASSHVQHIQKALTQMNFQIHNVISDIVGLTGLSIIDAIVAGERDREKLANLTHPRIKADRKTILKSLEGDFRPEHLFTLKQALSSYRHYQQMIRDCDLEIETHLNEVDSNTDIDDNTTLPSNRSKSRAKNDGSIFDLRSHLHLLLGTDLTLIDGISTLTSQVLYTEIGPDLSMFPTANHFCSWLGLSPQNKISGGKILSSRTRPGRNRAAQALRLSANTLIRSKSYLGDYYRRMRTRLGAPKAITATAHKLARIIYHLIKNRKPFDDTVFAEQERKHQERMKKRLITRAKSLGLQLVGA

SEQ ID NO: 108105 - protein, 347 aa, unidentified
MLHVGLDLSRTRLDVHVMDEAGAPLALTTAAPDAGGLASLAHRIDELGEPVAAAIESMNGARFVHDQLELHGWRVEIADAVKVKGFAPLACKTDKIDAWVLAELSRRDLVPAIWLPTPGIRAERERARWRLHLVRHRTALKNRIHATLLTFGHPCPVSDLFGVAGRRLLESLALPEPWAADVAAALRLIDLRDGEIDDCEAALRKAGADHAYVPTLMTAPGIGWVLGYTIAAEIGDIGRFSTPKKLVGYTGLCPSVDQSGGHDWRGELAKNGPKYLRWALIEAATHAARHPVYAQRYQRTKTRLGKQRGAKVARVDIARKLAEAIWWMLTTNKPFAPAGAPQRALAA

SEQ ID NO: 108106 - protein, 366 aa, unidentified
MKKLSTATAHGIDKLQTHQLTIGLDLGDRSSYYCVLDEAGNIVLEEKVATTPKALDTRFAAMPRSRIALETGMHSPWVSRLLSGLGHETIVAHARNVRLIGESRRKDDRLAAQTLARLARIDPQLLSPVKHRSAQAQADLTVIRARAGLVRARTALINTARGLTKSYGERLRGCNPRNMNPEKASALSPELQRALEPLLAGIESLSEQIREYNERIEQLAQESYPQVALLKQVKGVGTLIALTYLLTLEDAHRFRKSRDVGCYLGLQPGRRNSGQSQPQLHISKQGDPYLRTLLVQGAQHILGPFGADSDLRRWGLKLAERGGRSGKKRAIIGVARKLAVLLHRLWISGEVYEPLRNSRQLVPAAA

SEQ ID NO: 108107 - protein, 343 aa, unidentified
MYFIGLDVHKKTISYCVKDAAGRVHQEGKIASTRRELDGWIGTMPQPRTIAMEATIFTGWIYDHLLPHAERLKVAHPLMLRAIAASKKKNDRIDAGKIADCVRCDFLPECHMASTEIRDRRRTLRYRNLVIKQMVQMKNRVSGLLMETGVSYNKQRLHKVGYFAELMTTNKEVHESIRPLLKLSRDMISRSQKLDYALVSSLQRDPVLKERLRRLRTVPGVGPITALTWALEIGDYTRFPSIKQAISYCGLCGDEKSSAEKVMRMPISKQRNKHIQRVLIEAAKLAPSESPELALTHARELEKGNRNRATLAVARKMVCYMLAVERRQQDFVPAEEFSRSIAV

SEQ ID NO: 108108 - protein, 341 aa, unidentified
MQHFVGLDVSVKETAICVVDEQGGVVARTTVESEPAAIVSWLLGRGIRFGRVGLEAGAMSPWLYAGLVEAGLPAVCVETRHMHAALSARINKTDRNDAHGIAQMMRVGLFKPVHVKTPASQRRRLLLTSRKLLQRKVQDLENDLRGSLRNFGLKVGVVGAAGFDRRVRELAAGEPFVAAVVGPLLEARAMLRLQLAKLHKMLLDLVRDDPVCRRLMTAPGVGPVVALTYRACVDNPGRFDRSKCVGAHYGLTPRLYQSGETARVGRISRCGDAMLRASLFEAGLVLLTNPRIRWSPLKAWGMAVVKRRGMQKAVVAVARKLAIILHRMWRDEVDFRWAKAA

SEQ ID NO: 108109 - protein, 385 aa, unidentified
MRGNSFIPRDYDVFTGLDVSKKSMSVTFTNHQGFIRSLNMPHKAEHLLNYVRKHFPDQKIAFVYEAGPTGYGLYDGLAAQAYPCLIAAPSMIPRAPGQRVKTNRLDSKVLSENLRGGQLKSIHIPSPTYRHLRHLTQLRDVLVSELAGMKQRIKSLLLFEGIEFPPAPPGSQWSFMVKDKLRKLPCSGTVRFKLDQLLDSLEFNEKQVLKTITEIRRFCRNDPELSQCRQYLMTLPGIGWITASQLLARIGDWRELNNIRQLAGFLGLVPTEHSTGEKVDRGSITRTGDERLRSKLIQASWSAIRQDGELREFFRSLCRKHPRAVASRVAIVAVARKLSVRISVVLMKQRSYEVREKVHSAPLTQEETSPQGTTRRLGEPGEKNS

SEQ ID NO: 108110 - protein, 310 aa, unidentified
MEACFVGIDVSKDRLDVHLRPSGEAFAVARDGKGLEDLVARLQGLSCELVVLEATGGFETTVAAALAAAGLPLAVVNPRQIRQFAGAIGRLAKTDALDAEVIARFAEQVRPPARPVPDEAVQALGELVTRRRQLIEMMKAESNRRLQLTQRRLIKGADRLLAVLQKELSELEQDIDDQIRGTPAWREKEDLLASVPGVGSIIARTLIAELPELGILGPKPLAALVGLAPVNHDSGKSRGQRHIRFGRASVRSALYMAALTAKRCDPTFKAFAQRLRDKGKPKKVVVIAVARKLLTILNAILRTQQPWRHA

SEQ ID NO: 108111 - protein, 330 aa, unidentified
MKKYVDVIGIDVSKLTIDAHIHNRAVHRVFSNTPKGYKALITWVEKYLKGKLYFLCFENTGHYSTNLSVYLSEHDIDYVEESPLAIKRSAGIVRGKTDKLDAAMIARYAWLYKEELDLSSPKEQDIQELGRLLSFRDQLVRDRTGKMSSLKEMQNLLSSPSTDTCCKIITKTIHYLTKQIAALEQHIKKLIKSDESLQRNYKLLNTLKGVGLILSCQILYHTSNFKRFDSWRQFSSYCGVAPFEHSSGTSIHRKNRIHHIGDRKMKTLLTLASVSAIQCDKELKQYYKKKVAEGKPKMVALNNVRNKILSRVFAVVKRGTPYVELQKFAA

SEQ ID NO: 108112 - protein, 382 aa, unidentified
MQASTQGTPTNGHNGTIFVAIELSQRSWLATMHSPAKDRISRHKLEGGDHAGLLKLIEEARDRAARKLGTRPEVVSCYEAGYDGFWLHRLLTQAGIASFVFDPASIPVEQRARRAKTDRIDGELLLRTLMAYRRGEPRVVRIVRVPSVTQEDTRRASREHGRLITEQTAHINRIKALLRLLGLPVGKPQRRDWLAFLAQQRDWRGEAIPPGLLAEVTREHARLMLVRDQLEALQQARTATPACAEAAEMAKRRDLLRQVKGIGPVFAATLTDEVFYKDFRNRREVAAYFGLAPTPWCSGRMDREQGIGKSGNPRARHKAIEMAWLWLRHQGDSALARWFKERTANASKLAKRIAIVALARKLIVALWRYLTSGLVPEGAVIA

SEQ ID NO: 108113 - protein, 361 aa, unidentified
MGEFASFGAKNARWKRKKKFVEYEQVIERGCGIDVHKKVIVATVRGTGIKTETRTFDGFTESLERLRDWLKECKITHIAMESTGVYWKPVYNILEEDFEILLVNARHIKNVPGQKTDKKDSRWISKLLLSGLLKGSFVPPRNIRDLRDLTRYKRKVIEQISSEKNRIHKLLEDANIKLSSVVSNLSGATATKIIDAMIDGQEDINELVKLRHGKMHCSVEELAASLKGKLTGHHKFMLQTYKDSIESKEAIIKKIDDQIEKQLEESELLLDAELLATIPGVGKEGAAYILAEIGDNMEQFPSEQHLASWAGMSPGSNESAGKKKSSRITHGDKYLRFYWYNAPGQQQEQRKRICEVSMIVL

SEQ ID NO: 108114 - protein, 352 aa, unidentified
MEIIALDCHKHYSFASVQTLDGKSLCQGRIEHQRGSIRTFLSRYTRGSAVAVETVGNWYWIVDEIEAAGMVPKLVHARKAKLMLGSINKTDKLDALGLNQLQRAGTLPTVWIPPGDLRDRRELPRTRMVFAVARTRLKNRIHSVLAKYGLQDQFKGVSDIFGKQARKQVWKRLEQLPAQTHYTTVLLLEQLDRVEAVVQDMERRMAEVFKPTEVIKRLDSLPGVGLILAVVISQEIGDIKRFGGPEQLASYAGTVPRVHASGGKIRYGRLRPDVNHYLKWAFCEAANVVATHWTAHPQRHVSRLYSRIRARRGHPAAVGAVARHLAEATYWMLTKDQAYRERGVVKVSSRQA

SEQ ID NO: 108115 - protein, 321 aa, unidentified
MQKDLLYCAIDVSKDKLDVDGAALALPAQLGNDQAGFRQLIKAAKKYPGAVQFVFEATGPYHLGLALALWEAQIPLSVLNPARVRYYAKAQGKAKTDPLDKQVIGDFARSFRPPPTPAPDPVRRELTELLQRRDGLISTRAAEQNRLGQCRHKIIKGQIRRLMAQLAEQIGQIDGLMKKLVNSSQELKAKVKALCQVKGVGHLTAVTLLITLPELGTLGRNRMVRLVGLAPLNDDSGTQKNKRYIQGGRARPRCALYMPALSASRHNPVLKEVYERLLKAGKLKKVALTALMRKLLICLNALLRKLADPHPSPQGLCLAKP

SEQ ID NO: 108116 - protein, 426 aa, unidentified
MNPTPPFDLVIGLDRSDRKADLHLLHLHSGAEQRQTIPTTPEALKAWAEALHTAHPDDRVAICFEQPANNLIAFLTRYPWITLYPINPISLQKFREVFVVSRAKDDGKDAQYLARLLAAHHDRFQPWQPDTQQTRLLDRLVVDRRSVVDHRTSLCNRLQAILKDYFPQALDLAGDELWRPLGTAFLQRWPTLQAVQKAKPEVIRKFYYAQGSRSEKLIQERLDRLAQAVPLTDDPALLESYALRVRLTVQELELVTRTIKRYDQKIAAVFAEHPDHEIFRNLPGAGPVFGPRLLTSFGTRREDYPKATNVQRASGIAPVTKQSGQSKQVHRRYRCSVFFKQSIHEWAAETRFWSDWARAFYEMKRADGMNHHAAVRALAYKWLRVVWRCWQDRVVYEEAKYLAALKKHGSPVIAWLNKSRLQASPA

SEQ ID NO: 108117 - protein, 382 aa, unidentified
MHYRTSSQHTDETVIHAALELSKNSWLLAIEASEHNRPSLHHLKGGDSSALLAKLHTACEQFECRTGNRAKIVLCYEAGYDGFWLARLLESHGIDCLVVDPASLQVDRRARRVKTDRIDVEAILRTVIAWRRGERHVCSLVHVPSRDEEDLRRSHRERDRLVKERTAHTNRIKGLLFTQGIRDINLRRRRKPLVIDFADLVTGDGRCIPPRLKSEVERELQRLALVDEQLAIAEAERDQVAKQCEDSEKKRRQLALLRGVGETGAAILVREVFYRTFSNRRQVGSYLGLAPCPYDSGSSTRSHGISKAGNARARSTMIELAWFWLRYQPDSQLTLWFERRVTGQSKRIRRIMIVALARKLAIAFWRYVETGLVPSGAIVAKV

SEQ ID NO: 108118 - protein, 342 aa, unidentified
MKNKEVVKQVSGVDIGKERFYACYKVQYADNSVVIKGTKDFPNDPGGMKAYYQWCKKRNKNPEIKLVHVMEATGVYYEELAYYLHDSKERVSVQLAQKIKYFAKSCNIKTKTDKVDAKVIAEFGVEKNLTGLGLWTPPGKDFKMIRDLTREHASLKKALTTAKCQLHALNYAHITNEEVMKMKKEQISFYEKQTVLVEKEIIKLVKQDSELHAKIENIATVKGLGYITIIKIISETNGFLLFTSIRQLVSYAGLDVIEKESGKYTGKTKISKKGNVRIRTALYMPAMAAAAHNKTLKKFYNRVNEGRSMKRQGLIAVMRKLLILIYTLWKKEETYLENYQPI

SEQ ID NO: 108119 - protein, 390 aa, unidentified
MFYMGIDVAKRQHRITVLDAKGEPVHKPFSIDNNRTGIDDLLQRLSQWTGQIEIGLEATGHYWLALFEQLTRADYTVHVLNPLQVHAYQRSGIRKRKNDTIDAQWIADFVRIGGARHTTDPTTMPIYMQLRQLSRFRFSLVEQVGDTKRRILSLLDRVFPEYETLFSSVFLLSSRRLLTEAVTAQEFVDFDLDELTDILKTASRGRLGQDKAKALQHTAQQSIGVTFLADASRIQMGCLIAQLNFLSQQIDELDDALAQLVEQLPNQYLTTIPGIGAVTAAAILGEIGNIQRFDSLKQLVAYAGIDPAIYQSGQFEATQAHMSKRGSPYLRHALWIAATVARMHDSELKAYYDKRRAEGKAYGTVIGAICRKLLARIFVILRDQRPYEIR

SEQ ID NO: 108120 - protein, 319 aa, unidentified
MSKRDIEFEQVIDRGCGLDVHRDTVVATVMGTGIKTETRTYETTTSSLKELGAWLESLRVTDGAMESTGVYWKPVLHVLRTYPINFIVVNARHIKNVPGRKTDKADSQWICKLLISGLLKGSFIPPEKIQELRDLHRYKKKLIGMVASEKNRIIRVLEDANIKLSSVVTDTAGATASYLIKGLIEGRSDLETLISECYHKKLKASRQQIKEAITGRITPHHVFILKSMQKHIESLEIQMSEIDVEIEKYVMEFEKEIELLQTIPGVGKQGAIGIVAEIGVDMDVFPSEHHLASHSGMCPGNNESAGKKKVQEHDMETNI

SEQ ID NO: 108121 - protein, 640 aa, unidentified
MLRPAGWLGRLASPRLRLVPPTGPPVYGRACPSQGLPGPGSAITTRPNHPLPRQDFHLQACQRPKAAPHPDTAPERGQKPSPLPPSHPAKAGWEGVIRFSTLPRAAARPARSGTGLALGYYLAAPDTLSKVIHHRGKGPGQDPSPKVVNNFAAGYSGGGEQSATSETRPFAPYPTRVSRRLPTPTTAPGPSAKRTPPHEGSGIRSRPPQVPAPLRAARIMNANWSEQPFFAALDWAKEHHDVIVVDRVGTVVADFQFEHTAQGWDEFSQKMQAFGQCPVTIETSAGMAVDQLLQRGYTLYPINPLAAKDYRKRKAPSGTKTDRHDAWSLADALRTDGHAWRPLHPQDEATMTLRLLCRDEIALIENRTALVNQLQAALSDYYPLALESFKDWAKPFTWAFLRAFPTPQALAKAGQRNRQKFLHTHKLWRPDTSAERLALWERGQQLNASPAVLSAKSLLALSLATVLETLQRQIQEYRSRIEAAFAKHPDHDVFGSLPGAKEVLGPRLLSLIGSVREVFPDADSLMCQAGVSPVSYQSGKVCKARIRFVCDHFLRHTVHLWVDESRKTCDWAQTYYRAKRDQGHEHASALRCLGKRWLKVLWRMWRNHTRYDEAEHLKALQQHGSFVWQSLKYQLAEAAA

SEQ ID NO: 108122 - protein, 472 aa, unidentified
MEEAAMKHNQQRARSGKKSRGSISLLERIQPDAAGIDCGQNSHFVAVPPDRDPQPVREFRTFTAELHRLADWLAQCGVKTVALESTGVYWIPLYEILEERGFEVLLVNARDVHNVRGRKSDVKDCEWLRELHSVGLLRASFRPAATIVPLRSLMRQRQTLVEEAATRIQRMQKALTEMNLKLHTVLTDLTGQTGLKIVRSILNGQRDPEQLAVHRDHHCHASHQEIVAALTGNYRAEHLFALRQNFAAYEFHLQQIAECDTAIEKLLAKLAEQQPPPSGPLSTPRRKRGSKHAPTFDIRTSLHRLTGGADLSQIHSIGPHAALQIVAEIGTDMRRWPTEKHFTSWLTLAPNNKVSGGRLLTSRTPPSANRAAVILRRCAMSLGRTSTALGAFYRRLAARTGKAKAITATARKLAVLVYRVLSGDLIYNDPGAAAYHQLNRARELKSLRKRAKLLGYQLVNHSTGEVLSIPVS

SEQ ID NO: 108123 - protein, 417 aa, unidentified
MAMELIVERCAGIDVHQAQLRVCARVPDEQGKRKRVEEFATFGTTTPDLLELADWLAARGVTQVAMEGTGVYWKCVYYILEEHFELWLVNAQHVKNVPGRKTDTSDAAWLCRLLEHGLLRKSFVPPREIRELRDLARYRKALIRKRASEVNRLHKVLEDAGVKLATVASDVMGVSGRQMLAALVAGTTDPAVLADMAKSRMRTKLPQLRKALDARFREHHAFLVSQALAHIDYLEEAIDVVSKRLDEMLAPFQPAIDVLVSIPGIQRRTAEVVIAEIGTDMSRFPSSRHLASWAGLCPGNNESAGKRKHGRTTKGSPWLRTALVEAALGATRPSGYLRSKYWRVRSRRGHQRAVIAVAHAMLEIIHQLLSTGELYTDLGADFFDKRQAEQLTRRAIRQLERLGHQVILKEPVTAQTA

SEQ ID NO: 108124 - protein, 389 aa, unidentified
MIYVGIDVAKNKHDCCILGSEADKLYPVFTIPNNKTGFDELYEKIFSVTDDKTEIKVGLEATGHYSLNLLGSLIDKGLPTCVINPLHTNLYRKGLSLRKTKTDKVDAGSIAMMLMTDKTLKPYSDTSYHSEELKSLTRYRFDKVQERAKLKSSVARLINILFPELEKLVPSLHMASVYALLSEFPGASYIADSHLTHLKNVLETASNGHYGRDMAATIRDAARDSVGSVMPAKSMELKHTIHLIEVMTEEIDEIEASIKSIMDTCASPIMTIPGINYRMGAMILAEIGDFNRFNNADQILAFAGLSPSTYQSGQLDSSYSHMEKRGSRYLRYALFNATKYVCHWDDNFGAYLSKKISEGKHYNVAVSHATKKLIRTIYRMELTGEAYRK

SEQ ID NO: 108125 - protein, 361 aa, unidentified
MDKITRVGVDLAKRVCQIHAVDRTERTVLARPMSPQRFEQWAATLPAGCVIAMESCSGAHHLARRLRLMGLDARLIAAHFITPFRVQGASGKNDANDAAAICEAASRARTRCVTVKTAEQQAWQGIHRLREGYKEERTACINRIRGLLAEFGLVFPQSADALRRVLSEVLEDARNELPGAMRLGLQRAQAHWRVLDDEIAWCDQQLKLHVRQDRAATRAAQLHGVGDLTASALVAAVGDMSQFKSARQFSAWLGLVPSQNSSGGKHRLGRITKRGDDYLRTLLIQGAKSALLAASKRSDRISQWLLQLRERVGWQKALVALANKNARILWAVLTREVDYDPEHVPPLPPCKQPVLKAQLPA

SEQ ID NO: 108126 - protein, 421 aa, unidentified
MSKRRYQSVEFKKVDWSGIVQRLDGERIVLAVDVAKEDFVATLLDGGQRAVVTFKWRHPQDTGEVVACMVGLGQGRRLEAVLEPSGTYGDVLAWQLRQAGIALYRVSPKRVHDAAEVYDGVPSLHDAKAAYLIGRLHLQGISQPWQESAEERRELKAMQTRLGVCKGREQAACNRLEAHLSRHWPEILCLLPLGSASLAALIGAYGDPASVAAAPSGAEALLRRSGRPGLSEDKIQAVLAGAQSSLGVPPVAAERELLQWLGSEAVAAHQEVRQVEREIEQRLARDALLAILAAIVGKVSAAVLLASVGSPLDYPDAASYLKALGLNLKERSSGKHKGQLKITKRGPSLARFYLYFAALRLLARDPLVKQWYRLKSNRPGALKNKIVIALMRKLAKALWHSARGAGFDTSKLFNLKAVAGA

SEQ ID NO: 108127 - protein, 414 aa, unidentified
MLKIVHPICCGMDVHKSFVVACIATTNERGVTTYKSKRFSTFTGDLRRCAAWLAENNCKDVCMESTGKYWIPLYNILERTCNIVLAHPKYVKAIRGKKTDKRDAKWIADIFKHDLVTGSFIPPADIRQLRDLVRYRWKLTSFTTGEKNRAQNCLTVSNFKLDDVFSDVFGKAAFAITTRILNNPAEKITDVSNFRTKGMKATDEQVLAAVDGAMCEEQAEKLRIIRSHMDSLELCKLNLESLILSTAEKYLPQLELIMTVPGIQSFAAIGVISEIGVDMSVFPTSKHLCSWAGLTPQNNESAGKKKTTRISRAGAYIKPLLVQCALCAIRAKQFPEVRNRYLALKKRRGHKKAIIAIARILLTAIYNMLKKNEPYNPELYRKGDRPPTHREVSVGEAIFILQRQGYLVTAPPTP

SEQ ID NO: 108128 - protein, 343 aa, unidentified
MQAVTTVGLDIAKSIFQVHGVDAEGNVVVLRKLKRRYVVAFFQKLPRCLVGIEACASSHHWARELQALGHTVRLMPAAYVKPYVKRHKNDAADAEAICEAVTRANMRFVATKTPEQQSCLMLHRTRHLFIRHQTAVINAIRAHLAEFGIVAPVGRNGVEALLNIVADPSDNRIPEIARACLAALGAQLRTLKAQILEFDRLIMAWHRSSEASKRLDEIPGVGPALATALVASVGDPRAFRSGRDFSAWIGLVPKQSSSGGKEKLGNISKRGDRYLRSLFTTGALAVIRYAKLHGTTYRPWLTALLTRRPTKVAAIALANKLARMAWAVMAKGERYKEPVALAA

SEQ ID NO: 108129 - protein, 381 aa, unidentified
MLSASGVAAQPHPKRPAVDRLRLGAQHTVAELDRRRSLEISPNSRLSRRRPNSRTSSHRQERDISMDGANQAWVGIDVAKASLDLHLLPVGQSYELPNDTAGHRQLVKLLPDPATCLIVLEATGGFERLLVAHLLDAGYRVAVINPKRARDFARALGLAAKTDRIDAKVLALYAQKIEPTPVAKTPEKQAEIQQLVARRRQLIDLRTQESNRLELTTAKLARKSIQAILKTLQRQIHSIEAALEELVQSDDDWRRKGQLLQSVQGLGGVSATTLVAEVPELGKLNRQQISSLIGLAPFNRDSGIHRGKRSIGGGRKSVRSVLYMAALSAKKHNPVIKAFAQRLIQRGKPFQVVITACMRKLLVIANAILKSQQPWSPQTVA

SEQ ID NO: 108130 - protein, 350 aa, unidentified
MAEGNRVVTVGVDTHKDAHVAAALDASGALLGTASFPADARGYASMVAWMRAFGRVEAAGVEGTGGYGAGLARALDAAGVRVLEVSAPDRSERRRRGKSDGIDAEQASRAALAGTRCAPAKSRCAEMGALGALEAAYAGAVKARTAALNALQAQVVALPEEARAPLRGKGSSELVRACASMRPGAGSSPETLAKVALRSLARRARMLDEEAKGLEAEIDALTKALAPSTRSLLGAGPHVAARLLLAAGANVSRLRSEASFSMLCGASPVPVSSGRADRHRLSRAGDRRANSALYTMAITRMAHDERTRSYVARRMSEGKTKKDAIRCLKRYIAREAYRALAQDMEALGMS

SEQ ID NO: 108131 - protein, 365 aa, unidentified
MDNITHIGLDVHKETIAVAALRSGAVTSDERTIPNTPEAIRKLVEHLGDSSSLLACYEAGPTGYDTQRLLASLGVRCEVIAPALIPRRAGSRVKTDRTDARNLAHLFRAGELTVISVPTPAEEALRDLIRAREDLKSDRRIARQRLKSFLLRHGRRYPRTAAARWSGAFEAWARSQIFSEPAAQAAFCHLLAAHSVRSTQLDAIDAEIEEAANDPGLAPGVARLRCFRGIDTLSAVTLLAEVGDFRRFGSAASFMAFTGLVPSEHSSGLSVRHGSITKTGNCHLRRVLVEAAWSYRHRPAVGEALANRLEGQPPEVVAYAWAAQCRLSARFRTLARSKANNKAVVAVARELAGFVWGMMTDRIQV

SEQ ID NO: 108132 - protein, 420 aa, unidentified
MKVTYQTCCGVDVHKSFLVATIIKTTSGVEPSYQKKRFSTFNNSILQFKNWLIENQCRDICMESTGKYWVPVFNLLEDDINVTIANPKWVKAVKGNKDDTKDSKWIGDLFRLGLVPGSYIPCKPIRILREFTRYRCKLISCRTSEKNRYQNALTVCNVALDSVVSDIFGKSATSVIDYLIEQSNNSINHEEIASRLLRSLKKKSDSVIESIEGYQMTDSQKYRMRLVRAHLDYITSSINDIDTMLDSLIAPYENAVQLLCTIPGVDRNSAITVISEIGTDMTPFSNSKRLCCWAGLTPGNNESAGKKKSVKITRAGVYLKPALVQVAHAAVKSNKSPYYKQKYERIMKRRGKKRAIIAIARMILTAIYQMLSTGEAWNPTDLYKIDMPEPMKEKQKEKAIKQAKKLLIREGILSESQLVS

SEQ ID NO: 108133 - protein, 370 aa, unidentified
MHKGTAYIGLDVHKASIAAAIAVDDGKPPTLLGTIANDPAAVRKLVAGVQHGFGEIRAVYEAGPTGYGVQRQLSAMGVECRVVAPAQIPRRANERVKTDRRDALKLARLLRSGDLDPIWVPDEAHEALRSLVRARADAHADLLRERHRLNNFLMIRGLHGPVGARMSSTRYDRWLETLHFERPAERVVFDDSRDAIRGGEQRERRIETALYECARQSRHAGLIRALQALRGVGELTAITIVTEVGDFRRFATAPHLMAYVGLTPSEHSSGASQRRGHITKAGNHLLRHVLIESAHHARRTPQVSPLMRRRLAELPEPLVALSWRAQQRLHFRYRQLGARVGRPRAVVAVARELVGFIWAVGTMWEGLPAA

SEQ ID NO: 108134 - protein, 370 aa, unidentified
MPRYQRYWVGLDAGHLETAICLVNADGYAFFEAKTETRAAPIRDILRRFGVEPVQSVTIEAGVGTQMVRDLRSCGFPVQVVDVRKSSKFLAIRRQKTDANDAKGLADLGRLAMATGTQVFVKPVEHQDIRIMINIRRTLLKHRAKTDALLQSIFRLYGGSIKLLNGRGSLAAEVANQQRLLRTNGVTIGIDLDPLVSMGETLRSHISDMDREMRMMAAAIPACARFQTIPGVGPITSLSFYSAVGDPYRFKHNRDVGPYLGLTPTLYQSGVTARRGRISRHGNKLTRTHLITAATVLLCSIQAESSLRSWGLQLATKIGFLKARVAVARKLAVLMITMWKTGEPFAPDYHRPRFLQSEEAGLDPVQISGA

SEQ ID NO: 108135 - protein, 375 aa, unidentified
MSDHSEAFVGLDTSKLRNAVAIAEGVRGGEVRFLGEFENSAAATAKLVKKLAAKYRRLTFCYEAGPTGYGLYRQIKNLGSECIVVAPSLIPKKPGDRVKTNRRDALSLAKLLRAGELTAVWVPDRGHEAMRDLTRARETAMMDLRSKRQQTSAFLLRQGLHYSERKKTWTKTHMNWLASQKLEHAEQRLVFEEMMLAMRQAQERLERLEQAIRVAVPDWSLAEVVTALMAMRGIDLISAATFLAEIGDLSRFQHPSELMGYLGLVPSEDSTGDRIKRGPITKAGNRRARRMLVECAWSYQHPPRVGQEKQEKVAAAPRAVREIAWKAQCRLHGRYRALVRRGKLKTVAITAVARELAGFIWAVSRAITTARVVAK

SEQ ID NO: 108136 - protein, 336 aa, unidentified
MEREYVGIDLHRRRSVIVRLGGDGDQRSSVRIDNDPGEFAAAVCAAPAGSDVIIEATYGWYWAADLLQDLGYRVHLANPHGNDWGHRRVKNDERDAHDLADLLRLGRLAECWIAPPETRELRELVRFRAKLSCMRTGAKAQAHAVLAKNGVLPLRNDMWGVGGAAQFDTLEVPRAYSHRIEVLRDLVCFFNREILEIDRQTHRLLRHDPGYKAVPAIYGVGEVMAAIFVAEIGDVTRFSSPEALCSWAGLTPIHRESDTKVHRGRITKQGSRLVRWAAVETVARYHGGIYEASFQSIAERRGKNKAAVAIARKVLTLVYYGLRDGEIRCLASPKAA

SEQ ID NO: 108137 - protein, 388 aa, unidentified
MLAAADRTDASTAIQTDLPAIFASLELSRSAWLITSLSPGGGEKMSKHSIRAGDVAGLLVRLAQLKEKARGRTGRDFPIIAIQEAGLDGFWIHRVLQSEGIESHVVDAASILTSRRRRRAKTDGIDGETLVRTLLAYKRGEPRVCAMVKAPTPEEEDRRRICRERKTLVGERVEHVNRIKGLLFAQGVSDYEPLKRNRRARLEELKTGDGRPLPAHLKAQISRELDRLELVLPQLKAVEAERDALLKPVSEGCPAPAAMLAQLKGMGPEFTAILWSEGLFRSFSNRRQLAAYAGLAPTPWQSGSVAHEQGVSKAGNPRLRTTMIQLAWLWLRHQPTSALSVWFQQRVQSNGSKMRKTMIVALARKLLVALWRYSTSGVVIEGAVMKTI

SEQ ID NO: 108138 - protein, 471 aa, unidentified
MFSWLGHHRVLPVSNARLFGVLHIVDALIHTEMKGCVSLSKFINDFVVGIDVSSEFSVVAMLEPNGSLIRKPFRIDHNPKGFNKLLEILKKEEERLKQKPIYFVESTGIFHLPLFFLRSNDLKGFVLNPLCVHSTKNFDLRKVKNDAKDAESIARLAKFQEVKYSLVPEPQILALRMMSREYYAMSDMLTEMKNRLCTDLYLLFPGYLDVFGNPFGKASLEILKTYSSPRALSEVDSSELALMISKISRKTVSWANKKVNALLEITTQALSMPMEFDILSLKIKTHVENIENFQNRLDGLIDQLKVMIQSPDFPAKERRYIELLEGMPGIGFLTAVTLIAEIGDFSKFHSPKAFVAFFGIDPSVNQSGKFNGDRNKISKRGTRFGRRVLFTAALASIRTTRKGDAINPVLRDYYHQKCENKKKKVALVAVMHKLLNYIFAVLRDEKPFALRSPKDHQSWRHTKETALKLVA

SEQ ID NO: 108139 - protein, 311 aa, unidentified
MTYIGIDVSKATLDVAPHEGRVIQLANDGAGIASLVAELRTSAPTLIVLEATGVYHHSVTAALVAAQLPVAVVNPRQVRDFARSTGQLAKTDRLDALLLARFAAVVQPAPRPVPDEATHELTALVDRRRQLLDMLTAERNRLAIARRTVKPGVQRHIRFLEQAIGRAEDDLDQWIQQSPVWRAQEDLLLSVPGIGTQTARLLIAELPELGRLSRREIAALVGVAPMARESGAWYGVRHCTGGRARVRAMLYMATLSAVRYNPVIRACYQRLLAAHKPKKLALIACVRRLITIVNAMVKTQQRWLAPSLATA

SEQ ID NO: 108140 - protein, 461 aa, unidentified
MGKARDTEAPRSRGRQLEGLPVIRRSVAGIDLGSERHWVCAPTTDRAGREIADFGGTTSELIRMAKWLKERKVDSIAMESTGVYWIAPHEVLEAESFQILLVDTRQLARVPGRDRKTDPTDCEWIQRLHSCGLLKGSFRPREDVCMLRTLVRDKANLVAESGDWVRRMQKSLDQMNVRVHRAVSDIDGVTGIAILQAIVNGERDARKLAKLRDPRCRKSEQEIAEQLNGHWREDHLFSLQQALKMHQAIQERIGDYDREILRKLSTMQAEEFRELPVPKVKNPQKAKAIKKRGEEPMREALYRMSGVDLTTIDSIGVETVQVVLSEYGPDLSRFPTEKEFVSHLTLAPRIRTSGGKPVRKKQRNTASTRVASALRMAALSLRHSQTALGAYYRRIARRIAGDVAVFATARKLATLIYRLLRWGQQYVDEGVVAFEKRYQESRIRSLQAKAQELGYQLIQSA

SEQ ID NO: 108141 - protein, 410 aa, unidentified
MDIIIERACGMDVHKDNITACIITPEGKEIETFSTKTPFLMQMIDWVKEHGCTHVAMESTSVYWKPIVNLLEAEDIEFLVVNAQHIKAVPGRKTDVKDAEWIAKLLRHGLLRASFIPDRNQRELRELVRYRRSIIEERARQHNRIQKVLEGANIKLGSVVSDVMGMSARDMLRAIAEGEDDPEKLSSLARRTMKKKKDDLKLALQGYISDHQRLMIKTILNHIDFLTDQIDTLDQEVANRVSVYQDDIDRLDSIPGIARRMAEQMLAELGTDIKKQFPTAPQMCSWAGLVPGNNESAGKRKSSKTRNGNKYLRSALIEAAHSVRGSKTYLGALYRRTAARKGKKRAGVVVAHAILRISYYLLTRKEMYVDLGEDYFDKQKRQSIVQHSVRRLESLGYTISIVESEPSEAS

SEQ ID NO: 108142 - protein, 422 aa, unidentified
MKTLHSRCAGLDVHKTEVVACLRRVGKRKVEREVRRFPTTTRGLLELGDWLERGGCTHVAMEATGVYWKPVWHILEDRFALVLANAAHVKNVPGRKSDVNDATWLADLLAHGLIRASFVPPPAIQELRDLTRTRKQLTREIVQHAQRIQAVLEEANVKLASVISNVLGPSGRRILRAMIAGETDAAKLATLGSERLGCPRAALAETLTGRVREHHRFLLAQHLRTIEQLEESIAAFDARIEAALAPFQDAVERLTAVPGIGATAAQVIIAEIGDDMSRFPTAGHLLSWAGLVPRLDESAGKRRSTRIKKGAPWLKPLLVQCAWAAARKRSSYFQAQFLRLKARHGAKKAAVAVAASILTTVYHMLGDGTCYHDLGPQHFARRDPNKTAARLANRIRNLGYHVEIRPAACEFDSRGISGRLRA

SEQ ID NO: 108143 - protein, 391 aa, unidentified
MALYYVGIDISKYKHDCCIISATSQQIVSRFSFRNDRDGFDLLADSLHSIADPQDIRIGFESTAHYALNLELFLENAHHSFMEVNPALIAQYKKSTTLRRTKTDSVDCELIAKWLMTVEYKPHPIGFYHSYSLKSLTRLRDRLVRQRSLYLVKLTNVLDHTFPEFKPFFGNRFGKTALYLLEHFGSAPKMARMNSISYDNLRRISRGKFSPQRFFELKELAANTVGVSNSIFDVELNCLLDLLRNISDNIAELERQIFELIEEIHPHFMSIPGIGPISAAVIYAEYGDISNFSSPAQMLAFAGLEPSVNDSGTESHGGRMVKRGSSQLRYALLNCCFPLIQYDMTFAQYYAKKRREGKPHRVALTHVAKKLVRVIFALERGEMDYDPKAIH

SEQ ID NO: 108144 - protein, 371 aa, unidentified
MSMMHHRYVGLDVHRATISVALADTDQPPVSYGKIPNEPLAIHKLMQRLGGPERILHVAYEAGPTGYVVHRQLSALGIDCLVAAPSLIPVRAGDRVKTDRRDALKLARLLRSGDLTPVWVPDQAHEALRNLVRARAAAKADELRAKHRLGKFVLCQGARPPIGVRNWCKRYFQWLHQLTFEQVADQVVFADYLAEVIAAGERVKRLDAALKQCAQSTPQSALIQALQAFRGIGLLSAVTIVAEAGQLRRFPTAPQFMAYTGAVPSEASSGAKQSRGRITRTGNRALRHMLGEAAQHARHAPSVSDELRRRQKHAPPAVIDLAWRAQLRLHARYRHLSGRLGPHKAIMAVARELAGFVWAAGALLAEGAAAA

SEQ ID NO: 108145 - protein, 454 aa, unidentified
MRKPQVVPDEDHEVMYERVAAVDVAKASGVVCLRTPDPARPGRFVNRIWDNVPATRAQIAGLGRELLRCQVQMVTLESTSDYWRIWYYVLETAGLAVQLVSPSQAKNLKGRPKTDKLDAMWLARLTQQGMLRPSFVPPAAIRRVRDFTRARQDLVAERTRCLQRLEKLLEDAMIKITSVAADGMKAKSVVAMVAALAAGERDPRTLADLAKGPLRAKRDALAEALDGMFDSHHGVIARMLLGQVAFLDQQITRMEDQAIAALAEVPGSWGVDASGQAGPGFGVTPGSPVLAAAHRLAEIPGISVWLAIVIIAEIGLNMAAFPTPAHLVSWMGLCRSAAQSGTRHGKGKPKKGNSYARAAAGQAAIGAARTATFLGERYARIARRRGKAIAQAAVARSIMIIVWHLLADPAARYRDLGPDFYASRINRDKKIRNHLRGLQALGVTVTITDDEQAA

SEQ ID NO: 108146 - protein, 354 aa, unidentified
MTITKYIGMDVHKESISIAVMNSAGKFVMECVIETKGSMLLQFIDGLRGDVRITFEEGTWAAWLYDLLKPHVSEVVVCNPRKNALLKDGSKSDRIDARKLAELLRGNHLKPVYHGEQGLRTLKELARSYLNISKDVTRVMNRLKALYRSWGIACAGTKVYARRHRSEWLGRISEAGVRRRAEHCYQQLDALRLLHQQVRRDLLLESKKHQAWRLLGLIPGIGPIRAALLIALIQTPHRFRTKRQLWTYSGLGLETHDSAQYRVVEGQLRSKKSVTLRGLNQDHNHDLKDIFKGAATRVSSSSGPLHDFYEHLLAQGRKPTMAHLTLARKIAAITLIVWKKEVRFDASYLKSQAA

SEQ ID NO: 108147 - protein, 409 aa, unidentified
MRVMYERCCGLDVHKALITACVRVPGPDGKRTSEVRTFGTTTSELVRLMDWVMESGCTHVAMESTGVYWRPVFNILEEVAVVLLVNARDAKNLPGRKTDVKDCEWIAEMLEHGLLRSSFIPPEPIRDLRDLTRYRKSLIRSRADEVNRLQKVLETANIKLTCVATDVMGATGRSMVRALIAGERDPIRLAQLAKGSLKKKQDALGAAMHGRFRDHHAFIASQILEHIEQMEEHIKECGRRIEECLRPFSEFQDLLQSLPGVRQRGSEGILAEVGVDMTCFGSAPRLSSWAGLCPGNNASGGKRKSGRTRPGNPWLKPLVIECAWAAIRVKDSYSSALFRRIARRRGPKRAILAVAHHLIASVFHVLAKREPYRELGAKYFDKLAGDTIKKHHIRRLEALGFHVTLTAAA

SEQ ID NO: 108148 - protein, 405 aa, unidentified
MRYYVGVDWADQTHAVWVVDESGTKIAARAVSHTAEGLGEWGRELDEWRAQGIDLWAAIERPDGRVVDFLLDHGVVVYPVNPKALDRARDRFRQSGAKSDPFDARVLADFLRTDHAHLRALQPSSEAAQELKLLTEDCQRHIRQQTRLVNQLTATLKAYYPRALEVAEVTSALAREFLPAYPTPEALTALTERQWQRWARAHRLPEARAGELWAVLRQPQLPVPAHVVRAKARLMQTLMEQLRPVVAAVAQYRKAIDDFFASMPAAQWARTLPIGKHGITAPTLWARLGDAPGRWESFRHLQAHAGTVPVTKRSGKQQRVVQFRFACDKALRYVVDQVAYLSLLSSAWARPYYDQQRARGHSHRQALRALGAKWLKIIFIMWQRQVPYDEQYHLATMTRQQLGRR

SEQ ID NO: 108149 - protein, 308 aa, unidentified
MRFYNRQHRYYCGIDLHVKTMYVCILDAAGQVLVHRNVKSTPEAFLEIVAPYRDDLVVAAECMFTWYWLADLCAAESLVFVLGHALAMKAIHGGKAKNDKIDSHQIASLLRGGLLPQAYVYPAGMRSTRDLMRRRLHLVRKRGELLAHIQNTRAQYNLPAFERRLAYPANRDGVSAHFADPSVRKSIEVDLALIDQYDTLVVDLELTIIREAKRHDADAFHRLRSVPGIGKVLALTILYEIHDVTRFDRVQEFASYARLVKCVHQSAGKKLGTGGAKMGNVHLKWAFSEAAVLFLRHAAGGKKLLRGH

SEQ ID NO: 108150 - protein, 363 aa, unidentified
MQKISTMRTRRKNIFQGQLTVGLDLGDRSSAYCILNGAGEIVLEHKLATTPEAIEQVFASMPRCRIAMETGTHSPWVSRLLTALGHEVIVGHAQKVRLITKSRRKDDRLDARTLARLARIDPELLSPVKHRSAQAQLHLTEIRARAVLVNARTALVNAVRGLVKSYGERLRKCDTQQVRREASNGLSAELHKALEPLLEEIESLNERIKEYDRRIEKMAKEMYPETAVLKQVKGVGDLIATAYVLTLEDPHRFRKSRDAGCFVGLQPGRRNSGESEPQMHISKEGDEYLRKLLVQGAHYILGPFGEDSDLRRWGQKLAARGGKNGKKRAVVAVARKLAVLLHRLWVSGEVYEPRRNSQMSAVA

SEQ ID NO: 108151 - protein, 376 aa, unidentified
MERGSPMLNTTTFVGLDVHARSIEAVALDAMTGEVRSATFGYDAAEVAGWVSSVDPSAKCVYESGVTGFDLQKRLSSMGIDCVVGAVSKMIKPSADRRRKNDRNDAEFLARMLSVGNVVEVWVPDDECEAARDLVRALDDARDDLKRCKQRLSKFLLRHGHAFSETTPSGRRKGNWTAAHWAWIKSISFAEKADDDVLAYYIDATRQAMEDKARLERLVEAEASKPRWKRRVDSVRCLKGIDVMSAADLVFEAGEFSRFRNARSFAAWIGLTPSEHSSGESVRQGGITKAGNKHLRRVLVESAWHYLGCSPHSKDLAKGQAPDPGARRHAAKGVRRLVGRRAAMLERGVHKNKANVATARELACWCWAIGCMVENG

SEQ ID NO: 108152 - protein, 416 aa, unidentified
MNAVGIDVSSRKSTVAVLRPLGEVVCLPFDVTHDIAGLASLVEKLKALDGETRVVMEHTGRYYEAVEKALHEAGFFVCAVNPLLIKEYGANSLRRVKTDKADAVKIARYALDNWADLRDFTPMDAIRYDLKTLNRQFQLASKQRTASANNLIALLEQSFPGIRKCFDSPVRSDGTQKWVDFAHSFWHVDCVRKQPFPAFCERYRKWCKRHAYLFKLSNAEEVYALAKRAVVLTPKSKVVKVLVQEAANQLISISRSVEVYRAEMDRLAAMLPEYPVVMAMYGVGKSYGPQLMAEIGDVRRFERKQALVAFAGIDPMPNQSGDKNVRSNKSSKRGSPYLRKTLFNVIRTYLQCAPQDEPVFQFLNRKRAEGKPFYVYMLAAANKFLRRYYAKLRDYFASLDTLQSVDPIPATLKASL

SEQ ID NO: 108153 - protein, 310 aa, unidentified
MPTIKYVGVDLSKLELVADLAAELKPRAFANIPSGHAALLAALPAGAQVVCESTGGYQRTLVEALQSAGIPVSVVMPRRVRAFAHARGLRAKTDPIDARLLSAFGQALQLVAAPPRDPVQGQLQDLMRARQVLLEQLNDEASQADHRRVPLLVAQAEERTQLLRRQLRDIQRAVAALVAGRPEWRARFERMCQVQGIGEVSAWTVLAELPELGTLARGQAGALIGVAPDPNDSGPRQGKRHIGGGRSHARKVLYMAALTASQRNPILAPFYRRLVEERHKPKRVALTAVMRKLAELLNRLLGDPDFVLAT

SEQ ID NO: 108154 - protein, 338 aa, unidentified
MKAYAGIDLHSSNNYLGVIDNNARKLYGKRLSNKLDKVLKALKPIKKSLAGIAVESTFNWYWLVDGLIENGYNVRLANPSAIKQYEGIKHTDDKWDAFWLAQMLRLNILPEGYIYPKQERPIRDLLRRRQLFVRHRTSHILSLQGMISRHVGMRLSGREIKKLTIEDVEQIFDSPYLVLAALNNIDTIRFLSRKIRLIEREIKLEVQLKPEFECLLTVPGIGIILALTIMLEVGDIRRFPKVGNYSSYCRCVKSQRLSDNKKKGEGNRKNGNKYLAWAYVEAAHFAIRACKKAHSFYQRKKSKTNGAVATKALSNKLARASYYIMRDQRAFDQNMLFG

SEQ ID NO: 108155 - protein, 419 aa, unidentified
MAFKILRKNCCGLDVHKTWIYACIGITDADGRTEYKQARFSSFSNGLRELADWLAKYSCADVCMESTGKYWIPVFNILEKTCWVTLAHPKYTKPQKGNKTDRKDAKWICDLYMCGMVKPSFIPPADIRQLRDLMRYRTKLTNMLTSEKNRAQNCLTVSNLKLDDVFSDVFGKSSRSIIQYILEHPGEQFDVAPFLDRRCKHSVEEVQAAVDGAVSREQAAKLRECLQHIDQLNEHRKNIETEILCLAEPYPYQLELLRTVPGFSSAPLTAVALVSEIGVDMSVFPSSKHLVSWAGCCPRNDQSSKTVKSTRISRAGCYLKPLLVQIANAVIKSDKYPECRERYRRIKARRGHKKAIIAVCRMLLTAIWNVLSKLVPYSAEGYLSDKLTEHSVVISKAQGLELLRKRGYIFKDDLPADSA

SEQ ID NO: 108156 - protein, 327 aa, unidentified
MKISVGVDVSKDTLDVAFVGKNIAQRSFSNSEWGIGSLLKIISEQVETEIVVTMEATGVYHLNLAVHLLEAGLTVSVVNPLIIKRYGEMKMLRAKTDPVDARMIADYGYNQEPILFVPKPKECQQIVGFLNVIEDYLGIKTQNTNRLESLQFQPERQIEIIDSIKRINGQIDREIKVIEKMIHEVLIENNKDAYNHVMSIPGIGKRTASAMIGYFNHFENFETAKQVSSYIGINPSPYSSGSSVRGRGSISKKGNGYLRKLLYMAALSASRSNEQCKNLYKRLLAQGKCKKVILIAIANKLLRQIFAIIKFRRDYSSNYEPVFSKVD

SEQ ID NO: 108157 - protein, 361 aa, unidentified
MRMASGSMAHDIAAGVTVGVDTHGEVHVAAAFTSDLGWPLGHLEIPTTPAGYGRLLRWAQAFGDATPRFGVEGTGAYGAGLARHLRHAGCTVIEINRPNRQTRHARGKSDPIDAEAAARAVLSGEASSVPKSDEDRVGMIRTLRVARRSAVHSTTQIVNQIHSLLVTAPADLREQLRPLTGTSLLETLAAFRPGPITTPTAAAKMALRGLARRHQYLGDEIATLNVELERLTQEVAPELCALKGVGPDVAGALLVAAGDNPERLRSEASFAQLCGVAPLPASSGKTTGRHRLNRGGNRQANNALWRIVVGRLRWHQPTRDYVARRTAEGLSKREIIRCLKRYVAREVFRVIAAERELARAA

SEQ ID NO: 108158 - protein, 368 aa, unidentified
MSDGTATMSVTAKESSTGTILAIDLGKFKSVGCLYDPATNQHTFQTIATTPATVHDLLVATSPALLVMEACNVCGWISDLAESLSIRVCVANTNGEAWKWKRVKRKTDREDALKLAKLCATDQLPLVHVPKLAVRQHRSLIKHRHALIDRRTGIKNTIRSLLDAQGLSLPGRSRGWTIESISELKKLSRDLSECEANNLWRGQLDLELKLLEAVQQLIKEADKKLDALAAKNERVVRLKTIPQVGSRLAELVVTTLDDAKRFKNARQVSAYAGLVPKQYQSGQMNRLGRITGQGPGLLRRVLVQVAWGLQRREGTRGRAVFERLCHGQRTRRKQAAVALARKILIWCWALLRDGTVWDESRGLTPTVS

SEQ ID NO: 108159 - protein, 391 aa, unidentified
MLALLDCCCGLDVHKDAIYACILKGSPDEEPVVIHAKFKAIQSDLQAMCTWLLKNDCLNVAMESTGVYWRPVYEACEQFLRDYQCLMVVNAYHMKNLPGRKSDVEDCEWIATLFRHGLLKPSFVPNRLVRNLREYSRLHRSFVEERVRYSNRLEKFLQAHGFKLSSVLSSILGVSGRRLLTTLSQKGVLSPIDVSDAMDKRVKKPLEEIRAAVTGRLDYSERSYLKILLGKIDALDEDINDIFLLMRQLAKPYNVQIEQLDSIPGIDMSAALAIIAETSATPQDSFDNAKKLVSWAGLAPRNDESAGKIMSRKITKGSPYLKSILCQVAWAAVRSRNSCFHDWFWSHQGKLGKKKAIIAVARKILTLIYSLLKSGGFYDPMVAKSPFQSPC

SEQ ID NO: 108160 - protein, 377 aa, unidentified
MKSIKFVGLDVHAETIAVAVAEQCGEVRSLGVIPNREESIRKLVKKLGPVEQVRFCYEAGPTGYVVYWQLTALGAKCEVVAPTLVPVKSGERVKTDRRDALKLARNYRAGELTAVWVPDAAHEALRDLVRAREAAKKDQLRAKHRLSKFLLRHGRRPPTGVKPWTLNYLAWVKKEVHFEQPAQEATLLDYLHEVEHAEARIDRLDLAIEEAVKSTPPKMKAVIEGLQALRGIAQVAAVTIVAELGEISRFPGARQLMGYGGIVASEHSSGESTRRGRITKTGNAHLRRVVVEAAWASRHRPNVGAALRKRQELVSEEVREIAWKAQHRLHTRYRKLTARGKDKGKVVTAIGRELLGFIWAIGVKVEAAQKEIERRAA

SEQ ID NO: 108161 - protein, 334 aa, unidentified
MTSPSITPNPSATPVTPVFVGIDVAKDKLDVARSDTGEIRQFHNTAAGIRSLVASLVPAAPARIVLEATGGLEEALLEALLDAHLPVARVNPGKVRHLARGLGIQAKTDAIDAALLVEFARLAEPRLAQKRSQKQAELDALVTCRRQLVSAKTDQSNQLASTTSPFAKKALRTVLASLEKQIKRLDKQIASIIDSDDDMKHKDQILRSAPGVGPVLSSAIISQLPEAGKTNRHEVAALIGVAPFNHDSGKHKGKRAIRGGRADLRSILYMSSQIAMMHNPILRAMATRLQTLNKLPKVIIVACMRKFITLLNAMLRDNLTWGQLDIVKELASNA

SEQ ID NO: 108162 - protein, 330 aa, unidentified
MRYVGVDLHKRSVVMHAEDEHGVRKDSGRFDSQDRPGIVQFFEKLKPFRCVIEASCSYRWFHELVSPMGEVVLAHPLRLRAIVAGRAKTDKLDAALLARLLRAGLIPEAYIPPRSYQELRDLARARARLSQQASSAACELHALLTRRNIRMPYANVFSKGAQRWLAGLELGGVDGFIRDELTARIRHYRGEMAKLDVLLEEMSARFPEHEALTALHGVGLYSAMLIIGELGEPGRFGDGRQVGAYAGLTARVSQSGESSRHGHITRQGSPWLRWILVEAAMKLVRRDRQLGNLYQRIRKRSGVKIARVAAARKLADICWVRLMAWQRRAA

SEQ ID NO: 108163 - protein, 336 aa, unidentified
MQNTEYTYVGIDVSKETLDVFLDGKYRRIGNNAKDLRKFCQELAAMNREGPVPFVVVEATGKYHQDLTVALHTADVVYSQLNPRQVRDFARARGLLAKTDKIDARMLADLGKTMRPDPSQLTSEAHRRLFELATRRDSLTTDRVREGNRLEACRDDFVRREIKAHLKFLEKSVARLESEIEQLLEENAELHQKREVLIETKGVGPKISVALLAYVPELGNLSRNEAAALVGLAPLNCDSGKSRGKRRTWGGRAKARKSLFQGAVVAKRHNSHLREVYERHRAAGKPKKVALVAVARKLLIHLNSRLKHPQGSPSTKPAKPEPKRRGRPRKVELVAA

SEQ ID NO: 108164 - protein, 339 aa, unidentified
MSKPIQAIQALAFCGIDVSAATLAVAVQQQDQRFEERIFDNTASGHKALIRWLHKLKVHVRVSLEATGIYSLDLALALDGADGIEVAVLNPKLIHRFAQTLRRSKTDSADAQVLAEYSMRMPFTPWSAPGLSGLQLRSVSRHIQSLVVEHARECNRLHAAEKSASTPRCVVEDLKRSMASLKRRLARLRSAALELVLSDELLQKRFELLIGIPGIATISALELLGELAPLSSQMSARQWVAHSGLDPSHRESGTSVHKPSRISRAGNRHLRRALYMPALVAVRHDPHLKAFYESLLGRHKAKMQALIAVARKLLHAIYGIFKSRIPYDGKKLFPQQATA

SEQ ID NO: 108165 - protein, 339 aa, unidentified
MKDIKILGVDIAKDVFQLCGIDEWGKVIYTRRVKRAQYVSTVASLKVGCVVMEACGGANHWYRTFMGMGIPTQLISPQHVKPYVKSNKNDRNDAQAIAEAASRASMRFVRGKTVEQQDVQALLKIRDRLVKSRTALINEIRGLLQEYGLTMARGAKRFYEELPLILASEAVGLTPRMKRVLNCLYTELLNRDEAIGDYEEELKVVAKANEDCQRVQSIPGVGYLTALSVYASVGDIHQFHRSRQLSAFIGLVPRQHSSGNKEVLLGISKRGNVMLRTLLIHGARALLRHVKNKTDKKSLWLKALIERRGMNRACVALANKNARIIWALLTRQETYRCGA

SEQ ID NO: 108166 - protein, 320 aa, unidentified
MDGKRVIGIDVGKRWLDVAHEGAAKIERHPNEAQAIASLVGAFDPAGDIVVFERTGGYERALESTLAAAKVPWAVVHSARVKAFREVQGIKAKTDPIDARLLQAFGCDRLDAGKLRLGRIEDVVLDALMARHRQLKAALHAEQCRHETAAIELVRASIARMIAQLETELATIAAGLAGHEANDPQLAFKEKVMCERKGVGQATARALLAALPEIGRLDRRQIAALGGMAPRVHRSGRTERRRGLAPGRTAVKVILFNPARTAMQWDPEIKAFCSRLRARGKPGKVIMVAVMRKLLVRLNAAVRDALARDDVPISAVSAAA

SEQ ID NO: 108167 - protein, 412 aa, unidentified
MEVVYECCCGLDVHAKRVVACLITKGHKEIRTFATMTDELLQLGDWLSGVGCTHVAIESTGIYWKPVFNILEGLLTVILVNARHIKAVPGRKTDVRDCEWLADLLRHGLLKASFIPPPEIRELRELVRYRHTVVTEHTAVANRITKLIESANIKLGQVASEVLGRSGRLMLRALAAGETNAETLAEFAQGKLKNKKAALRRALTGSLTPVQRWVLTELLTRAEELEAARGRVETRINEAVAMCTDSFVPEAVELLKSIPGIGQRTAQTIVAEIGVDMSRFPSAKHLASWAGVCPGNHESAGKRKSGQPTKGNKSVRTILTEAAWTATRAKETFLHAKYHRLAKRMSKQKALGAIVHRLLVICYHLLKRRVPYAELGTAPLDEQQVARQRRRLVEQLVGLGLKVTIEEGATVS

SEQ ID NO: 108168 - protein, 349 aa, unidentified
MGMVGGLDLHRRQITFDVVELESGDEWRGRVWQPDRDRFRRWLRDDVTRRANGGSVALAVEGCTGWRYVVEEIEAAGFEAHLAEPADNQAARGRKRRAKTDRSDARLLRDLLVAGELPESWIPPEPVLEWRERVRLYVSLVNQRTVWCQRIHAELYHHGVAVPEGAIRTPKTRAMLADATLQLAPAARERIEAGYRMIDATDLEAQPLKRQLQRFGTRQPACRALVDAQYGIGGLIAVAVWSELGDCRRFRRSEQVVRHTGLDVTVDSSDRRRAGGFLSRQGPETLRWALYEAAKNSSHHRSPDHQYYAQVKERHDGKIAAISVARQFARRSYHVLRNLDPDIVYAMPN

SEQ ID NO: 108169 - protein, 351 aa, unidentified
MKYYTTTSEYNCGIDLHARQMYACLMDRQGKVLLHTNIQGNDFEYFLKRVEPYRYDLTVVSECTFNWYWLADACQAAGIKFVLAHALYAAHIHGGKNKNDRIDSEKLAHLLRSNLIPPAYIYPSERRPIRALLRQRMSYVWQRAELMTHLSMNQTAQNCVPALKGGHNRDVWLERILAQTPNPYHQFAVRCDMDAIRTYDELIAKLDGTITLHARHHQSRDYTLLQTVPGIGDVLAMTILYEIDTISRFPTVKDFTSYCRLVKGSVASAGKLKGLTGGKMGNAYLRWAFGEAAVICKRSHRLLSPYADRLVAKHGTFKGNAILANQLARAVYFMLQSGQAFDPERVVKAAK

SEQ ID NO: 108170 - protein, 334 aa, unidentified
MKQDAQIGVDVDSEELVCVMQRAEERMPLATFVNTAAGHKKFIRWATKGGRPARVCLEATGIYSLEFALALHQAKNVEVMVVNPRAIKDFGRACMQRAKTDAVDAGGILEYLQRMPFTTWQPPAPEILELQAINRRIVQLTTERTREKNRRHASEFAGASGDAIAHDIEVNIRHLERRIERMHESGLRLVRGVPALATKLAHLVSAKGIGEASAMRLLAELLVLPVDLAAPQWVAHAGLDPRPYESGTSVHRPRRITKVGNRHLRAALYMPALVAIQHEPNVKAFYNKLVSRGKKPMQAVVAVMRKLLHAIWGMLKHDQDFDGNKFFKLTEKIA

SEQ ID NO: 108171 - protein, 315 aa, unidentified
MNDSQVFVGIDVSKSCLDLASRPTGEVWQVPNDADGISALAQQLTGMSPSLVVLEATGGLEWALTSELAAAGLPVAVVNPRHVRDFARASGILAKTDVLDAQVLAHFGQAMEPEPRPLPDAEAQELQAMVGRRRQLVEMITAEKNRRRTMIARIQPQVEEHIRWLEKSLADLDQDLDGFIRSSPMWRTKERVLRSVPGVGPVLSATLLANLPELGELSGGQIAALAGVAPFNRDSGTLKGRRTVWGGRRRVRAALYMAALVASRYNPVIKDFYQRLCSMGKPKKVALTACMRKLLVILNSMVKHGREWQPNLGAT

SEQ ID NO: 108172 - protein, 399 aa, unidentified
MLHDHPCVGPTAIRTQFGAIFVSLELSRSKWVLTSLSPGNGEKMSQYSLTAGDIGGLLVRFADLKRKAKERTGSDYPIITIHEAGLDGFWVHRVLQNEGIESHVVDAASIATSRRRRRAKTDKIDGEALLRALLAFKRGEPRVCAMVVAPSPEAEDRRRICRERQTLIEERIIHVNRIKGLLFAQGISDYAPLRRDRRKRLEGLSTGDGRPLPVHLKAQISRELDRLELLIEQTRSVEAEQEALLAAESKAGIEKVGPEKAGPEEEPRNAVAMLLAVKGIGEHSAAILWSEGLCRQFSNRRQVAAYAGLAATPWRSGAVIHEQGLSKAGNPRLRTLMVQLAWLWLRHQPQSALACWFRARGERGRKGSIVALARKLLVALWKYVAHGVVIEGAAMKPAA

SEQ ID NO: 108173 - protein, 400 aa, unidentified
MRVVFGIDVSKVSSEVAILVNGEKVHGYTMANDAIGFSRLLGDLKTVHKPEIIFEATGVYSRRLQTFLEDNGYAYTRLNPLEAKKQLDSLRVRKTDQIDAEKLAQSQFVLNRKPTYVQEEVYQDLRNLSRFYQNLTEDIVRAKNRLHKVLQVTFPELETILSTPTGEQYWNLVIAFPCKDFVLDLSKDKLSESIRQSTSKRISDKRVAYLAEKLIALANQSYCAVKKTSPMLEEVRYYTKELLRLSEQRQAVLDEMVELAQPLPEYDILLSIPGIAETTATSIIGELGDIRRFQSANQINAFIGIDLRHYESGNFIAKEHITKRGNPYARKILFKCIHNIASASHTNPCHIADFYEKRKRQSQTTSTKPHTIASIHRLVRTMYYLITHNKLYDYTSTQNR

SEQ ID NO: 108174 - protein, 414 aa, unidentified
MDEASEIRVKVGLDWGDEKHVYRLRMVGSSTVEKGEIEQKPEALQEWLNRLRERAGGGRVAIALEHSRGALLYALLEYEFVVIYPINPKALSHYREAFYPSGGKDDPRDADLALDYLEKHPERIRVWKPESSEVRSLRLLTQQRRQLVDLRTELTNRLTCNLKNYFPQALGWAGPLKEDTACEFLERWPSLSELQKTGTGKIRRFFRGRGAHAEKLEAKLIEIPKAVPLTRDTAILSAGSLLTRSLVKQVRPLNQSILEYERRIAEVFEDHGDHDIFDSLPGCGPALGPRLLCLLGEDRDRYSSAEEVQTVSGIAPLIVASGKVRVVHWRWACPKFQRQAVHEFAAHSRHWCSWAQAFYKMQISRGKDHHMAVRALAFKWLRIIFVCWRDHAPYDDERYMESLKANNSPLLAYL

SEQ ID NO: 108175 - protein, 378 aa, unidentified
MPSENIVHVAIELSFSSWLVAARLPGAEKSRLHRIEGGDTTALLALIAELRSRASTKLGRPVDVACCFEAGRDGVWLHRLLTAHGIAAYVLEPTSILVNRRARRAKTDRLDAEGMLRVLAAWLAGDRQVCSMVRVPTPEEEDAKRPHREREHLVQDRLRIENRIEALLFTQGIRGRPSLRSWGRDMVELRTGDGRALPPLLRTELDRLRRRLVLVLELIRELEAERAAAIAAAADDAMVQKIIVLQRIRGIGPNFAAVLVREVLYRSFANRRQLASYVGITPMPYQSGGMDRDRSISRAGNPRARTTLIQLAWLWLRYQPGSTLATWFRERVGTLQGRTRRIAIVAMARKLLIALWRYVETGVIPDGVEIRAQTEVTA

SEQ ID NO: 108176 - protein, 340 aa, unidentified
MQAIRFGIDLAKTVFQVHGVDAAGKVVVAKQLRRDQVVKFFAKAPPALIGMEACGSAHYWARELRALGHEGKLIPACYVKAYVKRNKNDARDAEAICEAVSRPTMRFVPIKSVEQQCARAIQRTRALLTRQRTQLGNALRGHLYEMGITAGEGAAGLLSLVERIEAADAAIPAALLGSLAALARRWRAVGEEADGLREEICAQVKTSEAAGRLMKIPGVGPISAHAAIAAIGDGSQFASGRDFAAWLGLTRKNYDTGGKHRNTGHISKAGDRALRSLLVLGASAWLRHVRAKPEKGSAWIRGVLGRRPVKVAVVAQAAKTARIIWALLRSGKSYRAPLAA

SEQ ID NO: 108177 - protein, 343 aa, unidentified
MQTITTIGLDIAKSVFQVHGVDAGGRVIVRRQLKRRSVLAFFQKLPPCLVGIEACASSHHWSRELQALGHTVRLMPPAYVKPYVKRQKNDATDAEAICEAVTRANMRFVPTKTPEQQSGLVLHRTRHLFIRQQTAVINAIRAHLAEFGIVAPVGRHGVEELLNVVADPSDRRVPEMARACLLAFGAQLRRIKEQILEFDRLIRAWQRSSEMSMRLDECPGVGPVLATALVATVADPNAFRSGRNFSAWIGLVPKQHSSGGKNRLGNISKQGDRYLRGLFVAGALAVIRYAKIHGTKHRPWLTALLARRPTKVAAIALANKIARMVWAMMARGERYKEPVALAR

SEQ ID NO: 108178 - protein, 344 aa, unidentified
MHIASIGIDLGKATFHLVALGERNKILLRKKFSRSHLLAYTANLPSSLVGLEACAGSHWLGTVLREPGHPVRRMPAQFVKPYRKTHKNDFLDAEAIAEAVTKQNLRFVQVKTQDQLDIQAMPRVRDRLVQRRTARINEIRGFLLERGIPFAAQPIHLRKNLPAVMEDAEQNLSPRLRWLLDRLWQEWKQIESDVQVITEEIERISNEDPRCRQLRQIPGFGPLVSTATVAAIGNGAAFRRGRDFAAWLGVVPRQYSTGGKQKLFGISKRGNIYLRRMLIHGARAVLFRVKYDTGGFGQWVQRLAQRAPRNKVVVAIANKLARIAWAVLSSGQDYRHQPLPSSAA

SEQ ID NO: 108179 - protein, 340 aa, unidentified
MNVTTIGIDLAKSVFQLHGVDADGGIVFRKKLRRSAVLDFLRDRSPCLIGLEACATAHYWAREISALGHDVRLIPPAYVKPYVKRQKNDAADAEAICEAVTRPNMRFVPIKSADRQGVLMLHRTRDLLMRQRTMTFNAVRAHLAEFGIITAQGPHKILALITAIQAGEVPGLPQIAAVALESLATQLDNLAGEIRRLDRRLMSWHRADETSQRLETIPGVGIITATALAASVPDPSVFKTGRQFAAFLGLVPRQNSSGGKDRLGRISKMGDGYLRRLLVVGATSVVRRANTNTSATGTWVRCLLERKPVRVATVAVANKTARIAWAILARGETYRAPMAA

SEQ ID NO: 108180 - protein, 386 aa, unidentified
MLYLAIDQHRKQLTVNLRSEAGDVILKRQVSTRWDRVRKFMQELQERSVAEGGVVAIVEVCGFNDWLLKLLAEYGCREVVLIQPEKRSKNKTDRRDANVLGEILWTNRHRLLAGKSVQNVRRVVPASPRDAEDRQLTALRQRQGKLRTRTINKVQHLLLKHNLQQECPTKGLQTKGARKWLKELPLAVIDRLELDQLLFQWEVLDKQLEELERKIGERWVENPTAKIIASIPGAGAYASLTLACRIGSIDRFPHACSLAKYWGLTPRSNNSGDATRRLGSITKEGSAMARFILAQLVVHMLRRDAVLKEWYRRIKKRRGAKIGRVAVMRRLATILWCMVKRQERYRLGGSTTGNGSDCVVMPDRNTFFEEMQGRSRAEKKKAVAVG

SEQ ID NO: 108181 - protein, 351 aa, unidentified
MPQKSRTAIAVIGIDIGKNSFHVVGHDGKGAIVLRQKWSRGQVEARLANMPPCLVGMEACVGAHHLSRRLNELGHDTRLMPARYVRPYSKGQKNDFRDAEAIAEAVQRPTMKFVATKTTDQLDLQALHRVRERFVSQRTGITNQIRAFMLERGIAVRQGLRFLRAALPAILASRSDVLSPRMLRLIEELAMDWRRLDERIDGLSAEIEALASADAGCERLMSVPGIGPIIASATVAAIGTGEVFSKGRDFAAWLGLVPRQISTGDRTILGKISKRGNRYLRVLFVQAAWVVLVKVKPSRWEGHGLKHWIEAAKKRLHRNVLAIALANKLARIAWSVLARGRTFETSKLQAA

SEQ ID NO: 108182 - protein, 358 aa, unidentified
MALDHRWCVGVDLHKDTLTACVFCGCCGEVSFQKIACRCRRQIAEYFAALPRPHTVALESVGFYRWLWEMLEPIVEELVLADATQARHPQAGTRAGRRLKTDREDALNIAQLLAAGRLPRSYAPPIEVQWLRDLTRHRNSFSRQHARILHRVKSIMNANNRPGPARMQSDGLIRYLKAQGEKLPARHVEMLWQCVDALTLTERQIAHTERTIGQVVRRESFREVYGILTSFPGVALVTAATVMAEVGDFKRFPDTKAIGRYAGLNPRVYASGGKQRMGHIAKTGSPDLRWVLQQAAWTAIRYDEHVKRIFLRIAKRAGRKAAAVAVARKLLTWMHIAAKKGEPYRTPGARHTVLPGAA

SEQ ID NO: 108183 - protein, 391 aa, unidentified
MSMYFVGIDISKYKHDCCIISAADQQIVSKFTVKNDKDGFEHLLTTLNSLSNPEDIKIGFESTAHYALNLELFLENAHHSFMEVNPVLIKEYKKSTTLRRTKTDSVDCESIARWLMTVEYKPHSKGFYHSYSLKSLTRLRDRLIRQRSFYLVKITNVLDHTFPEFKPFFNERLSKTAIYLLENYGSAEKMAHMNSASYDKLRCASRGKFSIQQFLRLKELAANTVGVNNSIFDIELNSLLTLYNSLCKEIKTLEAEITKLIEEVHPHYMSIPGIGPISAAVIYAEYGDISNFSNPGQMLAFAGIEPGINDSGTESHGGRMVKHGSSQLRYVLLNACLPLIRFDITFATYYAKKRAEGKKHRVTITHVAKKLIRVIYALERQDVDFNVQKLR

SEQ ID NO: 108184 - protein, 413 aa, unidentified
MHSEQLRYVYVGVDLHKRQHTAVILNCWNEKLGEMTFDNAPAAFPFVLEAVNKHLKPGMTAVYGLEDTGGYGWAFGLYLIRQNQRVKSINPAFSAAKRKSYATVQKNDSWDAECVARVLRDDMNHLPDFKPDEHYWVMRQLVMRRRGISKSISAVVRQLHVQLSYVYPSYKSFFSEVDGKTALAFWRTFPSPRHLENVTAETLTRFLRKHSNFACSTKKAEQILCSMHGDGKTTESYVEEKELIIRSQVRQLRYFKKEIAELDEMLKRMLERVDCQLHTMTGVDVVTAAELTAEIGDVSRFPNADKLARYAGIAPIFAGSGGKGRYYKSKQGDRSLHNIFLSLAIRQLVVHRGTKEPRNPAFLAYFHRKMAEGKTKKQAFVCIMRRLVNIVYSILKNKTPYRLPEVYATDAAQ

SEQ ID NO: 108185 - protein, 374 aa, unidentified
MEVTMKSIIYVGMDVHSTNYTLASYTFETDRPFAVTQVDPDYKHILNYLKQVQKNYGGSCEFLCGYEAGCLGFTLYEQLKAHNVSCVILAPSKMPKVKNEIKTDKRDAIKIAKCLAYNDYSAVYVPTKEDHQVKEYIRMRDVHKASLKKVKQQILAFCLRNGFQFSAGKHYWTVKHMAWLKGLKMDEMLREILDEYLATYQASVDKIERFDRRIEELAADSRYAQKVKMLSCFIGIRTHTALALLVETGDFHRFAKADQYAAFLGLVPGEYSSGCNNNHLGITKAGNSHLRRLLVESAQCLARGRVGYKSKALKAKQYGNSAQVIAYADRANERLRRRFYHLTLKLKKKRNIAIAAVARELCCFIWGMMTERTA

SEQ ID NO: 108186 - protein, 310 aa, unidentified
MKITTIGLDLAKSIFQVHGVDATGQVVVRKSLRRSQMLPFFAKLPPCLVGIEACGTSHHWARELLKLGHEVRLMPPAYVKPYVKRGKTDAADAEAVCEAVTRPTMRFVPVKSPEQQAALSMHRTRDLLVKQRTQLINMIRGLLAEFGIDIPKGLERALLMARQIIDGKAPEVPIEAARIVTTLSQQALDIHFRLREIDRDLAVWIRGSDVARRLMTVPGIGPVGASAVVASVTDPHQFRSGRQFAAWLGLTPLQKSSGGKERLGHISKMGDKYLRKLLIVGMTSLVRRAKYSPGRSFHVWLLRPRETTQR

SEQ ID NO: 108187 - protein, 414 aa, unidentified
MGGFPVFSLLLFQGGVALSALYIGIDVSKDFSTAQAIDWKGNKCFYLELAMTADGFDKLLKAITTHDKDISQVTVAMESTGCYHINLFSFLTHKGIRCIIINPLLTANFARLSLRKTKTDKKDALTIAHFLLVHKDYLLKTDLSPDRQDLKDLAREHESLTNLIAGMKNDIRRMLQITFPELESICNIFSETILNLLRQFPSARLIKIAKPNTITKALLHKDKRKKTSVSAEDIIKAAKASVASHGAAKEIILPEKISTLQHLIEKKVRMKKMLVEACEDMMVEDIEIITSIGGISNITASRLLAEMGDYRAFSTYKHLIAFAGLDPSVHQSGKFEGISRISKRGNRHLRYIIYLMTTCVVRGDNIFRTYYQKRRAEGQPFKKAIMATAHKLIRVLFTMLSKRTTFQPKEVNAI

SEQ ID NO: 108188 - protein, 371 aa, unidentified
MEKSIMYVGLDVHKNSIEIAFAEAGRDGEVRSYGSVDGSLAALDKVIRKLVSKNYDLHFVYEAGPCGYDIYRHLAAQGFDCVIVAPSKIPKQSGNRIKNDRRDAQMLARLHRAGELTSVYIPSVEDEAMRDLTRSREDVKASERKTKQRILAFLLRHGHRYSGKSSWSRAHFRWISDIKMPHPAQQIVLQESLEALAECTCRVERLTEQIQLLSPQWRMFPVAQALQALRGVSLIVATTTVAEIGDLTRFDGPTELMSYLGLVPSEHSSGQTTKRGSITKTGNGHVRRVLVEAAWAYRLPARVSRKLLIRQEGLSQEICAISWKAQLRLCARYTRFLIKGKSKQLIVTAIARELCAFMWAIANEVQNPGKA

SEQ ID NO: 108189 - protein, 358 aa, unidentified
MQHQVKELNFGGQNIYVGLDTHKNQTTVTVLGENLHHKTFSQPTAADILARYLKKNFPGANYYAAYEAGFSGFWLQETLQSQGINCIVVNAADVPTKGKERNQKNDNVDSRKIAYALRKGDLDAIYVPSKECQRDRGLLRARQKIVSNQTRCRNRIKGLLNFFGIVYPEKFSKSGTHWSRKFMDWLKSVNLGGSGNDTLAIYLEEAEFLRALLAKTMKKINHLSNQERYAKNVKLLISVPGVGRLIAMILLTELERIDRFKTRDSLCNYVGLIPDVYSSDQTVHVGDITQRGNKSLKKFLIESSWVAARTDPALAMKYNQLCSRMNGNKAIIRIARMLLSRIRYILMHEQEYQMAVVA

SEQ ID NO: 108190 - protein, 383 aa, unidentified
MEYYTAIGVDVSDRTSKICVMTKIGGSRRIVEETTVATTREGFSEYLANKSRDWPVTFETGVHCRWMANHIRGMGFKVHVANPAKLRQLTESNTKNDANDARELARYTLADVELLHPVFLRDEPYQQMIRLLKARTALVRTRTKLISEMRGFAKSMGFRIPKRDAGYFHLIDRRAWPKDLESLCWPLMGVLETIAIKIKAIEKQMHELADSDVFKSDVERVRQVFGVGFFCSAAFVAFLGGNYARFAKARDVGPYLGLVPRQDQSGDVDKQLPITKAGSTMLRTLLTECAQVVLKDSAMPTDLKLKGERIQGKKSANSRKRAVTAVVRGLAVTMLALLKHPEREYRPLSDSNRRLLEHIAAEREAAAGEGSRVGSREAAEAVA

SEQ ID NO: 108191 - protein, 346 aa, unidentified
MRFYTGQHRYYCGIDLHARTMYLCILDQQGKVVLHRNMRCDPERFLEAVAPYRDDLVVATECIYCWYWLADLCTREGITFVLGHALYMKAIHGGKAKNDKIDSRKIAVLLRGGTLAQAYVYPPQMRATRDLLRRRLFFVRKRGELFAHVRTTSHQYNLTIPTGQLLYQCNRARIPEIFDDPIVRTSVEADLELAGHYDGLIRSMERTVLEQAKVDDMSSLDLLQSIPGVGMILSLTLLYEIHDIARFKSVQDFVSYARLVKCQKGSAGKVLGTSGAKIGNAHLKWAFSEAAVLFLRKNPRGQKHINRLRARHGKGKALSILAARLGRASYFMLRRRSAFDMDRFMN

SEQ ID NO: 108192 - protein, 310 aa, unidentified
MAAPCYVGLDVAKAQLDLATCPATAPARFAHDDAGLIALVAHVRAVAPVLVVLEATGGYEADVAAAVVLAGVPVAVVNPRQVRDFAKAIGRLAKTDALDADVLARFAAHVRPEPRPLPDAAQQDLTALVARRRQLVEMLTAERLRLTVARARVKRDVQTHIHFLEQRLKATNTDLRDCVQASPVWRAQDNLLQSVPGIGPTTAATLIADLPELGRLSRQQIAALVGVAPLNRDSGARRGLRVTWGGRAAVRAPLYMATKVATRCNPVIRAFYQRLRAAGKPPKVAAVAAMRKLLTILNAMVKAQRPWQPA

SEQ ID NO: 108193 - protein, 389 aa, unidentified
MKIFVGIDIAKLNHFAAAISSDGEILIEPFKFTNDADGFQLLVSKLESFDKNSLIIGLESTAHYGDNLVRYLVAEFYQVCVLNPIKTCQMRKNNVRKTKTDKVDTYVIAKTLMMQDNLRFVSFFDLDMMDLKALGRFRQKTIKQRTRLKIQLTTYVDQVFPEIQYFFKSGLHQHAVYALLKEAPSPKEIASMHMTHLANLLKVNSHGHFTKEQAKELRVLAQKSVGANDSAISIQITQTIQQIELLDSQLEKIEAEMTDIMKFNDSVIMTIPGIGYINGGMILGEIGDIHRFSNPNKLLAFAGLDPSVYQSGNFQAKTTRMSKRGSRVLRYALVNAAWNVVRNNATFKAYYDAKRAEGRSHYNALGHCAGKLVRVIWKMLTDEVEFNLE

SEQ ID NO: 108194 - protein, 398 aa, unidentified
MENKIKILGLDVSKSSVSVCLLLEKPNEPRQFYYSCQFLSLSANKEGIEKLLSLKADVAVMEPTGTNYSKIWKEHLVKAGVKVVFVGHKQLRNYRADHLDLPDKDDNADSLALACYWFDYHQSESRFVAKHSDVINNIRELMLRLEHLNRVQSPIINRLRQDLAWQFPEAALINSRRGKKGLAPLLWGWIAKKRDSKKYDAMYQRTIGTGLEESTRSQASLICDLQQQEFAIETTLSNLLKDPCFAPYYKVFNKFGFGSRVSIILIAYIYPLESFLKDGKPEVRILRGRKSCKPTKRYISLRRFQKTLGMAPSQEQSGDKAKVKVDHGSKLCRKALWQWVFTALEPQKQRLNNEIVQTLCTYLDAEKASGKPVRLIRSRVAVRAVKLLFRELVKELSK

SEQ ID NO: 108195 - protein, 367 aa, unidentified
MKKVSIAATKQRKNISQRKLTIGLDLGDRNSWYCVVDEAGQIQLEQRVRTNAKALQEVFGTMPRGRIALEIGTHSPWISRLLSELGHEVIVANARKVRLIGESRKKDDRMDAQTLARLARIDPQLLYPVKHRSAKAQADLTLIRARAGLVRARTALVNTARGLAKSYGERLRGCNVRNMNPEKAEGLSPELQRALEPLLACIESVSEQIREYNERIEDLAQESYPQTALLKQVKGVGTLIALTYMLTLEDPHRFQKSRDVGCYLGLQPGRRNSGKSEPQMHISKEGDPYLRTLLVQGAQHILGPFGIDCDLRRWGLRLAERGGKSGKKRAIVATARKLAVLLHHLWVSGEAYEPLHNSSKTTVAAAA

SEQ ID NO: 108196 - protein, 427 aa, unidentified
MKEPTIACGIDVHKMFLQVCILSRSGEASQHRFHNTLNGILALKDLVLAEGCEIVAMESTGIYWYRLFLELESDIRTIVANARQIKSIPGRKTDMNDARWIAELALHGLIRPSRIFPRRDREFRDLTRNRETLVRTRTTIKNRIHKILDSAGIRLNLALKDLFGKSGRHLLSGLAEQKDLETTLATIPSPRILRRADQLREILQGSPLSPIQLHLLTTQLHLLEEIEEKIAHLDELILASLEDPQLEAVAICTSVPGISITAATTILAELGDVRDFSTASRLVSWAGLAPSVYQSADTQVCGKITKQGSKSLRWILVQVAQAASRTTGTVFSSFFRRIAYRRGRNKAIVALARKILSILWHLLVNRESYVEPGLKRVRKLPAPMTLPKISIDDAVETLLSAGYRIYSPENQKSTGKGVRAERATHPL

SEQ ID NO: 108197 - protein, 348 aa, unidentified
MRFYTQQHRFYCGVDLHARTLALCVLDAQGQVVARPSVPASPQAVLDALAPFRDDLALACECMFAWYWLADLCQEQQIPFVLGHALYMKAIHGGKAKNDPIDAEKIARLLRGGNLPVAYVYPKAMRATRDLLRRRTFLVRRRAELLAHVVNTNSQYNLPPLSKKLSYAANRAALDLSRFADPSVRKAVEADLALADACDEQIRDLELYLTRTAKVDDPQAYQRLRSVPGVGPVLALVLLYEIHDVRRFPSAGDFLSYARLVRCAHESAGKKKGSGGSKIGNAHLKWAFSEATCLLLRQSEQAKAWLARREKKRGKARALGALAARLGRAVYHLLRKGEAFDAQRFFAS

SEQ ID NO: 108198 - protein, 366 aa, unidentified
MKYVGIDLHKKTIVVCVVNKERKVLQREKFACLDVASITAWFGRLGSFEFVVEATAAYEWLVQWLEPLADDWVLAHPGKMRVIAESTKKTDKLDAQVLAEFLALGMIPQAYRPNARQREHRKLVRYRAQCQQRLSKLKCQIRYLASTYNADHRQLFRPECLEELRQRADLTEADQFVLALHLLDFERAVQRVKATKTELQRFAAKGSEAEQREREILLSAPGVGEVVSEVVLAELGDAARFASLKQATAYAGLVPGKRESDGKGKDMGITKKGSRLLRWAMVEAAWSAVQNSARWRGVYERIKKRRQSKRAIIAVARRLLAVLVSMLRNGTKYRHTLVELKERTTRLERRRKQRRAAKAVKEAAVA

SEQ ID NO: 108199 - protein, 443 aa, unidentified
MAEAEDIEEIEQSVELVERVAAIDIAKASGMVCVRLPHEDKPGFRTQRVFNTVATSGAILDLADHLICQGVTRVVMEATSTYWKPYFFLLESRGLECWLVNARDVKNVPGRPKTDRLDAVWLAKLAERGMLRASFVPPKPVRELRDLTRARAVMTHERTRHKQRTEKLLEDAQIKLSTVIADIFGVSGRAMLEALIAGERSPKALADLAHGTIKASHSTLAEALTGRFEEHHAFMCRMLLDTVDYLTVQIDKLTARITIRLSELSTTEDDEGPGQGTLMPITDVERLDEIPGIGPSTAQVILAEIGLDMSVFPTAGHLVSWAKLSPRTIQSGAKNTSGPTGKGNPWLRGALGEAAISAARTDTFLGARYRRIVKRRGHMKALVAVARSILVSVWHLMANPTARYRELGADFHVRNLDPTRKARDLVRQLKALGHDVTLAPAAA

SEQ ID NO: 108200 - protein, 372 aa, unidentified
MAKSIRYVGLDVHAQTIAVAMAQGRGEIRSMGTIPNTVGSVKKLMKRLEPLSTVRVCYEAGPTGYALYWQLAELGVKCEVVAPTLVPVKPGDRVKTDRRDAEKLARSYRAGDLTPVWVPDAAHEALRDVVRAREAAIKDQLRARHRLSKFLLRHARRPPEGTKAWTGKFWTWLDTVSFEYGAQNATLLDYRTEVERGAERITRLEKAIDQAVQDAPAQMKAVIDALQALRGVAKITATTLVTEVGNFSRFTRARQLMGYGGLVPSEHSSGGTKRRGAITKTGNAHMRRVLLEAAWTYRHRPKLCGSHKKRQQGVSEQIKDISWKAQQRLHSRYWRLTGKGKVPGKAITAVARELVGFIWAVGVQAEREAAAA

SEQ ID NO: 108201 - protein, 347 aa, unidentified
MRTILRQSVGIDIASKTFTACVCKNMSDGSIDQSEVLECENSKPGFKQLIKWVNKRCNTYVPLTYVMEATGIYYEQLAYYLNDLELKVSVVLPNMVAHFGKSLNIKSKTDLIDARMIARMGAERNLPLWETPPKVLKELRDLTRLFTDLKHQRTMFQNRLHSMQAGNAPLDFIVKSTQSIIAKLDREIAKCTKEIEGLIKQDEWLHKKAENIQTIKGVGLITIAVVIAETLGFKLIKNNKQLTSYAGYDVIERQSGTSVKGKQRISKKGNSRIRAALFFPAMVAAQRNQIFKEDYVRISERRQNKMIALTALQRKMLILIYTLWKNDTVFDEKKYSGNQEIKFLLRS

SEQ ID NO: 108202 - protein, 370 aa, unidentified
MLNTTTFVGLDVHARSIKAVALDAMTGEVRSATFGYDAAEVAGWVSSVDPSAKCVYESGVTGFDLQKKLTALGVDCVVGAVSKMIKPPADRKRKNDRNDAEFLARMLSVGNVVEVWVPDDGCEAARDLVRALDDAREDLKRCKQRLSKFLMRHGYAFSETTPTGRRKGNWTAAHWAWIKSISFPEKADDDVLAYYVDAVRQAMEDKKRLEKLVEAEASKPRWKRRVDSVRCLKGIDVTSAADLVFEAGEFSRFKSARSFAAWLGLTPSEHSSGESARQGGITKAGNKHLRRVLVEAAWHYISASPHPKDLAKGQAPDPAARRHAAKGIRRLVKRREEMLGRGVHKNKANVATARELACWCWAVGRMVENG

SEQ ID NO: 108203 - protein, 412 aa, unidentified
MKDLLEISCGLDVHKEKIVACILTGPLGKPTHSEIREFTTLIPDMIALRDWIISQNCHHVAMESTGIYWMPVYEILEEAFSGNITLLVVNARHMKNVPGKKTDMRDSEWISTLLRAGLLNGSFIPEKTIREFRDLNRYRKSVIRDITSQKNRVEKFLQSSGFRLSSFISDIFGASGRNIILHLIEHGQIDRTALNSCLKTKTRNRIDEILMSVNGTLSEHQKAFLKILMGHYDSLKEHLAEIEKNLEADMIPFALQVEQLSSIYGISTTASCAIIAEIGIDMKPFKTAEHICSWAGLCPGNNESAGKRKSASVTKGNPYIKSMLCEIAWVIAGKRNTYLSAWYWRIKQKKGAKKAIVALARKLLVIIYTMLKQGTLFDESCFEARRKNCEQKQLSRYIRELEKHGYHVEVQA

SEQ ID NO: 108204 - protein, 425 aa, unidentified
MNRNMNNRINQVDENTLVIGIDIAKKLHYACAMDDRGRVLKKSFGLSQDLEGFQKLLTEIQALMSQFAKSQVVVGFEPTGHYWMNLSAFLVEAEIPFVMVNPMHVNRTKELDDNSQTKNDKKDARVIASLIRDGRFSFPRILQGVDAELRTGNNNRKALKKEMVAIQNRMIRWIDIYFPEFSTIFKSFGKVACELLEHTPFPSDLTRISEAEMIQIYEDNPAVHTVPKKKLILLREKASVSIGVRESQETARFEIRRLVRNYKQCLQDLEVLEERLIDLAKQLPDFEYITSIRGIGENTAVEILAEVGPLSNYQHPEQIKKLAGLSLRENSSGQHTGKKSITKRGRSSLRATLYKTILPLISNNKTFRELYDYYTKRQDNPLKNKQAMVVLCGKLIKIIHALCTKRRQFDAEKMMRDIHSLLPAA

SEQ ID NO: 108205 - protein, 414 aa, unidentified
MKYYTSTTEFNCGIDLHARQMYVCIMDRQGKKLVHCNVKDNDFAFFLKLVEPYKLDLTVCCECMFGWYWLADACQDAGLTFVLAHALYVKAIHGGKNKNDRVDSEKLTHLLRSNLIPPAYVYPSAKRPLRALLRQRIYYVWRRSELLARIYSHQLAHNRTPAKQTRRVRDSWEEQLLKAENHPLRQIALKNDMAMIRAFDHQIFQLEEELQRQTKQVACREYALLQTVPGIGENLGLTILHEIGDINRFPTVKDFVSYCRLVKGTVASAGKIKGLRGAKLGNPYLRWAFGEAAVIAKRDHYLIGPLSQRLEAQMNGNKFKANTIVAIKLARAAYFMLKNRTVFDPERLVASMQKCFGPGRSQPGRLTGRAKKAMPPSVAESVSCASSTPSCVGQASSPGDSIGSCGQVQPAVDC

SEQ ID NO: 108206 - protein, 338 aa, unidentified
MKYTPVGVDIAKHVIQIHFINEHMGEVVDKQLRRQDFLTFFGNREPCMIGMEACGGSQYWARELTKLGHKVRLLQARFVQTFVMGNKNDVMDARAIWMAVQQPGKEIAVKTEEQQSVLVLHRTRMQLVKFRTAQINALHGTLLEFGEIIHKGRAAEREFPEALERMKERLPPYLIMVLENQYNRLNELDSLIEDIEKQLTSVARQNETCKRLLDIPGVGPLIATAAVATMGEASAFKSGREFAAYVGLVPKQTGSGGKVRLLGISKRGDTYLRTLFIHGARAMALVAKEPGPWITELKKRRPASGAIVAMANKLARTVWAITAHGRKYDRNHVSIRPY

SEQ ID NO: 108207 - protein, 404 aa, unidentified
MKGPIVSIDVSKGKSDYQAFKDLNVKYTGSRSIKHNKEGFDEIVNLVREMEKKLETEVCVVYEATGVYHRVLKKVLEDNNIKQFIINPLLSAKTRKNDSLRSPKTDKLDPKSIAKTYYSHSLHNSHKQETIYHELRELSRYYEDILVHIRKDKVAFRVQLDIVFPGYDTLYDDLYGPVALAIIEKYPHPEMLQKKKINTVSKVIQNKTCHRQAVSDTMADKAIEYSKTIYSGCDKDDIEVLILQRFIKKLNEDMAEAERTIGEMIKLAQELPDFNIIKSIPGIGDNLAARIIAELGDMTRFKKKNELVAFAGLDPRISESGQNDGDHMHITKKGNKRLRCLLYLAVTCSIRLKRDDNSIKDFYIKKKQQSNPMCSKAAKTACASKLVRIIYSMCKTGELYQYNK

SEQ ID NO: 108208 - protein, 343 aa, unidentified
MDRTTYAIDIAKHVMQVHWVEVDTGEIKRRRLSREKLLPFFAEVQPARVVMEACGGAHHWARCLSGLRHRVELLPPRQVRAFVRSDKDDAADARAIWLASQHSDIRRAPIKSCEQQAVLSLHRARQHWKDVRTATINGLRGLLYEFGVVLPKGRQAALKALAQRRAEVDAMLPAPMCRLIDGQLAMLQQTSGCMEQLEAEIGATSPKTAVKLRQVPGIGPLGASGLAAMLGDGSAWRSGREFSATLGIVPKHTGTGGKTRIGHLSKRGDPYLRTLLMHGARSVLNHTKQKPLWLEQLMLRRPFNVVVAALANKMARVAWALVAHGRDYNPNWLSVAPANTAVR

SEQ ID NO: 108209 - protein, 320 aa, unidentified
MDAYLGIDIAKATIAVALLTADGKVRHKSCANTPAGLTALGAWLHRQRVTRVHACLEATGTYGDALATWLHDTGPLVSVVNPAIIHAYARAQLARSKTDRIDAELIARFTATQAPPAWTPPAPEIRPLQALVRRLDALHGMRTQELNRLEAGRIVADVRTSIEAVLAHLDAQIVHVKALIRDHLDRHPTLRAQRELLTTIPGIGETTAAVLIAELFDKSYTSARQAAAFAGLVPRIVESGTLRHRSRLSKLGPGRLRKALYMPAVAALRWNPTIRAVRARLHAAGKPPMVIVGAAMRKLIHLAYGVLKSGKPYASTYVHP

SEQ ID NO: 108210 - protein, 339 aa, unidentified
MSAVCTIGLDLAKQYFQVHGVDGRGYVVLQKKVNRHNLLNFFAQLPKCIVGMEACGGAHHWARELEKLGHTPKLMPAQYVKPYVKTNKNDRTDAEAICEAVTRPNLRFVAMKSVEQQEVLTLHRIRQGLIKHRTALVNETRGLLLEFGMALPQGIEHVRKSLPRIVEDLHNGLTLIQRDTFSDQYNELVEIDERVVKLERQLKIFANTSESCQRLLKVPGLGVLSATALIATVGKATCFKNGRELASWLGIVPKQHSSGGKDRLLGISKRGDVYLRSLVIHGARAVLRFCWRKEDERSVWLQRLADRRGSHKAVVAQANKTVRICWAILARNEEYCAAA

SEQ ID NO: 108211 - protein, 403 aa, unidentified
MDETVWVGIDVGRHAHHAAAVNGAGTVLWSRRIPNDQPAIEALVDRVAGVETVVWAIDMTAPESALLRGVLAVRRQHIRYVPGRVVHSMTGAFAGEGKTDARDAVVIAQTARLRGDLATVSVPDDVAIELDLLTGHRNDLVAERTRGINRLRGLLTRIFPALERCFDYSTLTGLAFLIQFTTPSSIAAASDGEIFDHLRGHGVRRPTIPKMIDRARAAAAAQTVTLPGEATTAMLVQQAAASLMALTRQIAVLDKQITEVFRRHRHARILESVPGIGTRSGAELVAITGGDLTSFGSAAKLAAYAGLAPVPHDSGNRHGTLRRPQRYHRRLRKVFYMAALNSSQRDGPSREFYQRKRREKRSHVHALIALARRLVDVVWALIRDGRLWTSQPVAPPTTSPVAA

SEQ ID NO: 108212 - protein, 394 aa, unidentified
MFLVGIDIGKHKHSFCIIEKETGESIVKPKFFNNNKVGFEELLSSFKGLPKKDILIGMEDTGHYHFALLKFLLDKKYQVALINPVTTDLTRKLSGSHTKTDKLDTLTICDVLTSNQRTKPYRISKVDRFDLYEQKQLTREHHNLKEQSNVLKNRLQKSIDIVFPEFNSLFKSMYGVVYMNILKEFGSADALAHSDIRTIRKCFDFKGRGNRIKLTAEKLKKAAINSIGFPSIAEVVQIKHLVNQIELVEEQIEELDKKIEEFSIANNSPILSIPGISHFSGTSILAELGDIHNYSKPSQIIKFAGVAPLTYESSQFMAKHTAITKKGSTYLRKTLYQIILPVINNNKVFKDYYNLKLSQGKGYRCAQGHCVRKLLRVIYQLLSTNTQFDPALLV

SEQ ID NO: 108213 - protein, 366 aa, unidentified
MWMEAPVKIQRTSVGLDVHARSVVGCGLDGDTGEVFQRRLTPDRGEIAAWLRDLPGPVAVTYEAGPTGFGLARALDAAGIACVVAAPSKLIRPTGDRVKTDARDAAHLARLLHLGQITEVTVPSIEQEAARDLVRAREDVRGDLMTARHRLSKLLLRQGIVYSGGRAWIREHQRWLRRQRFDNAALQLAYDTAFDAMLATLERRERLDTAIAEMAADSRFTPVVTRLGCLRGVSTLTAFGLAVEIGDWSRLTGRSIGAYLGLVPSEYSSGATRTQGAVTKTGNGHARRLLIEAAWHHRAPYRPGAVMRRRWDAASPAARARGQAGNRRLHERWMRFDERKKRSVVANAAIARELAGWCWSLAVLED

SEQ ID NO: 108214 - protein, 368 aa, unidentified
MKKNSISVGAWCTKARAQKRKFTIGVDLGDRSSRYCVLDEQGEVVQEGSVATTKKGLAQVFGALPHCRVALEVGTHSPWVSRRLADLGHEVIVANARRVRLITQSSRKDDRLDARTLARLVRIDPELLAPIHHRSAQAQADLMRVRARAALVEARTALVNSARGLVKSYGERLPQCGTERVSEALGAELSEPLRVALGPLLAEVETLNERIKEYDRQIEAVARERYPEVERLKQVSGVGTLIALAYVLTLEDPLRFRRSRDAGCYVGLRPKRRDSGDSSPQLRITKEGDRYLRKLLVQGAHYVLGPFGPDCDLRRWGLKLAARGGKNAKKRARVAVARKLAVLLHKLWVSGAVYEPLRQSQQGRLAAA

SEQ ID NO: 108215 - protein, 326 aa, unidentified
MEHELHYIGIDTAKEKLDVDVLRPDGRHRTKKFANTTKGHDELVSWLKGHKIDHAHICIEATGTYMEPVAECLYDAGYIVSVINPALGKAFAQSEGLRNKTDTVDARMLAEFCRQKRPAAWEAPHPLERALRALVVRHQALTDMHTQELNRTETAREVQRPSIDAHLLWLEAELKRLEKQIKDLTDDDPDMKHRRKLLESIPGIGEKTSAVLLAYIGLKDRFAHARQFAAFAGLTPRRYESGSSVIGASRLSKAGHVSLRRALYMPAMVATSKTEWGRAFRDRLAANGKKGKVILGAMMRKLAQVAYGVLKSGVPFDVSRHNPVAA

SEQ ID NO: 108216 - protein, 460 aa, unidentified
MSTRTIGIDLAVRGEHKAIVADELGRYVTPLLRFHTTAAGLERLLASAREGDSSCELQAVMEPTGMAWFPVAVYLLRQDVRVYLAPGQQVADLRKFYKRHAKSDRIDVRILVKLPAVNREHLHPLVLPTAAAVACQRACRQRDRLVGQITAIRNRVLAIDRFAWPGLHGTVFAQPFGPAARWFRECWYDPQQVCRAGVAAVRQAWCASQLDPDDDGAWTTALVQHAEQVLALYGSEAAYLDFALLQSEVSREQAHLRFLQAQEHSLRLGVIRPLYRQLHPGRHLETLKGVGQESAAVYASYIGDPSRFDSLHAFRGWTGLVPDSRQSSDQQSKGLHITQAGPNLIKKFAYLDADVARLYDPQLAAVYYDQMVHKGKHHNQALCACAAHLLDRVLVVLRDKRSYQLRDVDGTPVSDEQARRIIAERYQVPQEVRQRTNKQARRERAERKAERQTKRESRPR

SEQ ID NO: 108217 - protein, 315 aa, unidentified
MKITTIGLDIAKLVFHAVAVNKAGKLVRKKMLKRKEVLGFFAKLEPCLVAIEACGGAHYWNREITALGHQVKLLPPQYVIPYRQGNKNDYNDALAIAEAAQRPNMRFVPAKSIEQQDVQMLHRVRERLTQQTTALVNQVRGMLAEYGIVLAKGKTAFRSQLPDILEDGENALTAKGRAIFHGLYNEFVELENRLKGCEKQVLQENADNPICQRLGTVLGVGPVTATAFYAAVGEGKAFHNGRHFSAWCGLVPRQHSSGGKDNLLGISKRGNAIYEPCSFMVPGPFCVTASTKPISSACGRRPSWSVEALIAPALQ

SEQ ID NO: 108218 - protein, 354 aa, unidentified
MLAELVGHVIGIDPDRDWITAAIVDARTTGVMATERFAANSDGYIEAFDWADAHTEAGERAWAVEGTASYGRGLTAALTRSGEWVIEFDRPHQRATKDGAKTDELDAVRAAREVLGRKRLHQPRVHDGHREALRVHVVTRAGAVRARTAAINELKALLVTSDDSLRSELRGLTTRALVKRCAAMRDSKQRSVAELSTRSTLRCLARRVQHLTDEIKTHDSAIRRLLQDVAPQLTDQPGIGHVTAAAFYIAWSHPGRCRNEAAFARLGGAAPLPATSGQEQTRHRLNRYGDRQLNHALYIVAMTPSRCHPDTIAYRARRRAEGKTDREITRCVKRYIARQVWRLLEHPNAPEITT

SEQ ID NO: 108219 - protein, 424 aa, unidentified
MTDTFSFFVGVDLGAERHAVVVLNAAAEILGRRYFAHNGAEVLELFSWLAKLTDQASPQQIAIAAETPRGSILESALERGHPAFSINPKQLDRFRDRFSMAGAKDDHRDAFVLASSLRTDQHCFRRLQLGDPRLVLLRELSRSQEQLQQNLRRACNQLWSLLQRYFPALLQLSPAADDPWLWSLLQAGPRPATAARLKLPRLEKILAQHRVRRFSASELKALLEQPPLPMAPGAAEALAEPVLLLLPHLELLHKQLAQLSARIDKLIDQLQQDTSFTEHRDIEILRAFPGLGRVFTATVLAEAYLPLVERDYHALRALSGVAPVTRQSGKTELVLLRRACNHRVQHAIFHSANVFVQKDPRAKLQYRRLRAKGKTHARALRGVADRMLNLLFALLKSQSCYDPQRRTVPTEPEGTPPPKKTLDK

SEQ ID NO: 108220 - protein, 384 aa, unidentified
MQKPNDLNQSRIVLKQDSTLIAVIEMSLSSWLVAGIVPGVERQPLKKLAVDESALLKLLNRWREEAEKAGRRIERITVAFEAGRDGFWLARWLRARGIEAHVIHASSVAVSREHRRAKTDRLDTELLKRAFLGWLRGERDHCKMVAIPTTKDEDAKRPNRERQSLVGEQTRIVNRMKAALIRLGIRGFNPKLKKAAGRLEDLRTPEGEPIPPNTLAELHRDMERRRLVSDQIRQIEEARLERMEQAPGEGPHAMVRLIARVIGVGIETADMLVHEVLSRKLRDRRAVARYAGLTGAPDESGSKRREKGLAKAGNARVRGGMIQLAWRFLLFQKDSALAQWYRTRTEGGRNRKTIIVALARKLLIALWRLVTTGEVPAGVVLRAA

SEQ ID NO: 108221 - protein, 409 aa, unidentified
MLLVGVDWAEAQHAACLMQPAGTVVRRLTSPHSAAGLARLCEAIAAAEAEPAEVLVAVERPDGLLVEALLDAGYVVYALNPKAVDRYRERTRVAGGKTDPADAELLARILVTDRDRHRPLRPSSPMVEEIRVLARQDERASRDQRRLLNRLRHDLLAVFPAALDAFPDLTAISALAFLERWSTAAAARDQDRAAIEAFLRQQFHSQARAAAGRIHAALQADALTAPPHLAAARAGAIQLAARQLLLLHRQRAAWAQRLRELLDGDGAHPDGEILLSLPGLDARLAARVLGEIGDRRERFPTPAALQCYAGTAPTTKASGRSRVVVARGACNRFLRQALFRWAFCSLLRSAWARSFYDAQRANGKGHSKAIRALANRWLEILHHLLATGQRYDEAVHQRNRARATRPAAA

SEQ ID NO: 108222 - protein, 363 aa, unidentified
MKKIAYVGIDYHQNTLTVAVRLENQKKINETVRIRNEDKIIRKYMKKLSAQFEIKACYEASSSGYYFQRKMKSWGYDCEVIAPSSLPKKRGDRRKNDFRDARDLADNYANGTLSIVHLPTEEEESVRNFIRCRSAFKEAEKRAKQQINSLLLSRGLRWSQSKWTFQHRKWLWELKMPDEYLQAVLDEHLAHLDYIQSRVKSFDQQIEQIAKSDLYEPAVKKLRALKGIGTLSAMLLITEITDFRRFPNPGALMAFLGLLPSEHSSADKQRGGPITKTGNPRCRSLLIECVQHYAKKPQISYVMKADLSRVDPHSASIAVKCLKRLHKRYWALTMKGKIRPVALTAIARELVGFIWAMMQPQAV

SEQ ID NO: 108223 - protein, 374 aa, unidentified
MENTITYVAMDTHKKQHKIALHYPCHEEIVEFTIGNTVRDIKKMVNKIKKQAPGEVEFCYEAGVCGFTLKRRIEQFGCRCIVIAPSLVPRKPGDRVKTDRRDARKLLMMFKAGLLTEVHAPNEHQEAARELTRLRETARDNLKRIRHQLLKLLTRHGYVYTDGRHWTQKHITWLRTVEFTESTLTGVFENYFNEMIYCIGRLENIDKEVGLLADSPEYKEIVGLLCCYHGIDILTAITIITEIFEFGRFESPRHLMSYLGLTPSEDSSGDKQKKGAITKAGNKRIRRLLNETSWHYRHRYVPSAALKKRRKGQPQWAIEIADAAGRRLSTRHRYLINKGKMPCKANIAVARELAGFIWFTVTQYQARKNTKGVA

SEQ ID NO: 108224 - protein, 386 aa, unidentified
MKTVAGLDVHKDSVYLCILRENGEKIERVYGVLTPQLDSMRDFMAENKVSEVAMESTSVYWIPIWRVLVDSFELKLVNPYFIRQLPGRKSDVKDAQWIAECVMKELIRGSFIPSPLVQRLRLYDRRIFEINAELVRKYSKIDAILQRCNIRLSNYVSNTDCKSYKAVVKQISEGVTSPQELLRHVHKRIINKHGEDTILAALTGVVSDSEIDMLAQYVAESAILEDNKNKCIEKMREICNSEFKEQMKNLQEIPGVSERSALTVLAEIGPDVNAFPSAKHLVSWCGFNPRNDESNKKIKSNKITHGNRFIRIASVQCAWAASRTKDCYFSKFYAFHTQVRKKFKLKVVVAVARKVLVCIWHILKFNVPYKDFEPQKPVAKDCTQLA

SEQ ID NO: 108225 - protein, 350 aa, unidentified
MNNCTTIGMDLGNKMHKVVGIDEGGRVFLKCEVINTKDALEAFFKEHADATVAMETGTCCRWISAIARKHCRQVLVGNARKLRAIWESQQKNDWNDATMIANIARTSHELFHPVELRDDEHHDLYQLLQLRDLAVRQRTQIINTIRGMCKASGDFIRRCDAQGVYMHPEYISTDQIWKFTSTVERLESIADSINHYDWQIRNYADDHFPNEVSLLQTIPGIGPITSCAFVALAPNPKKFGNPRDAGCYFGLTAGQDQSGDKDAPMHVTKAGNTMMRKLLTTAANYIMRESSADTALKRYGMRICERGGKIARRKAKTAVARKLAVVMMAMLQSGESYCDGRVSKEKPAAD

SEQ ID NO: 108226 - protein, 354 aa, unidentified
MKKIFIGIDFSKEKFDATLIKAEGLKECAPSVHEVFDNKTSGYRCLAKWVKAHADGCAADAWLFCGENTGGYSIGLSNYLYASGYDMWLECAYKIKHSAGIQRVKNDKADSRTIAEYAMRNYDKMIPYKPQSASLTCLREVFLYRHSLVRQKVALQVRRDEKRLTQEKSEARAFVSFTSKHLITEVNKAIAKCDQKIKDIIASDDELREVFDIITSMPGIGIQNATCLMVYTDNFRKFDLNSRKIACYYGIAPFGRQSGTSVNSRPQVSPFANRMIKSLLSQAALAAIKFDMNVHNYYQRLIERGKHPLLVHNNIKNKMLHILVAMVRDRVKYNPDNVYRKSNEVSLAPQVLNI

SEQ ID NO: 108227 - protein, 465 aa, unidentified
MKNNRRRTSHPRRSPAVLDRINPNVAGIDCGSAEHYVAVPPDRSPSPVQSFKTFTSDLLRLADWLVGCGVTRVAMEATGVYWIPIYDILEARGLEVLLVNARHIKHVPGRKSDVSDCEWLRDLHSVGLLRGSFRPTEGIVALRTYLRHRHSLVENAGSYIQRMQKALVQMNLQLTLVVSDITGVTGLKILRDIVAGQHDPEQLARHRDYRCRATPAEIVAALTGYYQREHVFVLQQNLELFDACQIQLAACDRAIEAQLQRLTATQEVPTTPLPAPRVPRRPIDNDPTFEIRTPLHRLTGGVDLTQIDGVGPYTALKLIAEIGTDMHRWASAKHFTSWLTLAPKNKISGGRLLSSRTEPSANRAAAILRMAAMTLGRGSTALGAFYRRLAGRIGKPQAITATARKLAVLVYRALKGELVYRDPGAEAYDRQQRSRMLRRLRQTATTLGFDLVNRDTGEILHAASL

SEQ ID NO: 108228 - protein, 321 aa, unidentified
MVYIGIDIGKSSFVAAYPSAKGYRTQTFPNTTAGVRKFIVTLSVAEHHCVMEATGNYGFLLLYLLHQGGIAVSLVNPKQIKHFARMMMAVTKTDEKDACMIAMYGEKMNPPIYKMPSQAIILLKQKKTVIRQLRKQLVASKNMRESLIVLPYRDKACVRALDKTIDFLTRQIEQLEAELADIASSEFDKQLKALTSIKGIGITLATALILATGGFTYFDNAKQLSRFIGICPTYQQSGTSVNIKGHINRNGDEHLRSLLYVASWTALRYNAACRECYLRLKANGKPSKVALIAVANKLVRQAFAIATTDSTYVDGFVSTKK

SEQ ID NO: 108229 - protein, 458 aa, unidentified
MRKKSKRIKGMEEARPFEGMSKVNQNAAGVDIGATEIVACVSRGEDVQLVKAFGNYTVDLHAICEWFRKYGIQTVAMESTGVYWIPLFEELERQGFECLLISSRSLRRVAGQKTDVEDAQWIQTLHSYGLLKGSFRPQADLVALRTLLRHRAQLLEHRSPHIQHMQKALLQMNVQLSQAVTDVTGMTGQKIIRAIVAGIRDPEQLATLRDPGCKHSEEEIEKALTGTWREEHLYVLKQSLELYDFYTEKIEACDAEINRQYGMTRPDWGDGELPVVPDKKRHAHSKNAPKESREIRTHLYRINGVDLSLVDGMGVSLAQTVTMEVGSNVGEKFPTEKHFCSWLGLAPKHDISGGKVLNNKTLKTRNRAGQAFRMAANSVKKADCPFGVLYRRLRSRLGPAQATVATAHAIARVVYKMLKYKVEYDPLSVNEYQKQYEEQQVKYMKKRAAKFGYQLVPA

SEQ ID NO: 108230 - protein, 350 aa, unidentified
MVVVGADVHKRTHTFVAVDEVGRKLGEKVVEATTAGHRQAVRWARSQFGVELVWAVEDCRHLSARLERDLLAADQKVVRVPPKLMALTRKSARTRGKSDPIDALAVARAYLREPDLPVASHDEVSRELKLLVDRREDLVAQRTSTINRLLWRVHELDSSRAPKPASLDLAKHRRLLGDWLGTQSGLVAELARDELADITRLTETINALAKRIGERVRVIAPALLAMPGCGELTAAKIIGETAGVSRFKSEAAFARHSGVAPIPVWSGNTAGRVRMTRSGNRQLNAALHRIAVTQIRLDGLGQTYYRHRLAQGDSSTEALRCLKRRLARVVFHHLHTDEKTRQQPCQPVAA

SEQ ID NO: 108231 - protein, 343 aa, unidentified
MKIMRIGVDLAKNVIQVHGVDRTEKPVWRRRLSREKWLKVLLEKVEPGCEIGMEACAGAHHWARRLQEHGLTVKMIAAQFVKPYVKSNKNDANDAEAVCEAMSRPTMRFVSVKSVEQQDIQAVHRVRTGLVEQRTAKANQIRGLVGEYGLVAPKQLSHLRAALPGWLEDAENGLSERFRRLLNALWGDLVELDTRVGELDDEVAAIAKSDPVAQRLQQLRGVGPITATALVAAVGSAEQFAKGRDMAVSLGLTPKQHSTGGKDRLLGISKRGDPYLRSLLVHGARSMIRAAKGKDDRLSQWVTSLAARSHPNVAAVAMANKTARIAWAMIRNGTNYQPERAAS

SEQ ID NO: 108232 - protein, 308 aa, unidentified
MATEIPHTQATRFVALDVHRQYLMVGAVDLQQHVVLSPRRFGFAAFAEWASAHLTHADAVVLEATSNAWLLYDQLQPLVAEVIVAHPQAVKLIAAARVKTDKRDTMKLASLLAANRIPAVWVPPQAVRELRALVTHRNRLVKQRTQAANRLHSVLHRHNLDPPPATPFAVHQREWWLALNLPLAEKLRGQQDLSLYQTLETLIQESDAELGRLSTCDPWIKQVPFLVQLPGLGVLSALRLLAAIGEITRFPSAKHLVGYAGLGESRHQSGETNRGGRISKEGRSDLRGVMVEAAWVAVEHHPRLPSPG

SEQ ID NO: 108233 - protein, 368 aa, unidentified
MNEPSTVFVGLDAHAESTAIAVAEPGRAAPRFLGTVGARFVDLTKSLAKLGRPTGLMIVYEAGPCGYTLARELAGAGYYCEVVAPSKVPRRPGERVKTDRRDALMLASLARAGELTPVNVPDERDEAMRDLSRARIDAVRARHKARQQLKALLLRHGQRYNGKCSWTAAHERYLASVSFTHRAQDVAFVEYRHAVSEAQARVQRLSDALAQELEHWRMRHLVEALMTLRGVDQLVATTLVAELGDFKRFGHPRELMGYLGLVPSEHTSGERRRLGAITKTGNSHARRVLIEAAWNYRFPARITARLQTRQQHQPADIRAIAWRAQLRLSHRYRRLKARGLQHNKICVAIARELAGFLWNIGQRIAASP

SEQ ID NO: 108234 - protein, 425 aa, unidentified
MNDLLTTLSVGIDVSSKSNSVCALNFRGEIVFRCKAPNNLPGAEYIAREIINHFTENFESVTIALESTSYYNLHLASFLSTHESLLPLNPMVYNINAKNVSNYKKSYTDQDKTDPDDAFAIADYTRIGRIHTNPWKGTQFLALQRLTRHRLHLVETLSREKNYALTNIYLKFNQLKILPKDDRPFSNIFGATSMAVLSEFLSLEEITFMPLENLVNFISKKSKNHFVDPEHTAKLLKKAARDSYRLDKTLYEPINTAIASSFSIIKSIEKQLKVTDQAIIKVIKGFNTTEYTSLRSIPGIGKVFAAGILAEIGSIKFFDSNDKLAKYAGITWRQKSSGNYKAEETHMTKTGNRYLRYYLIEAADIVRKLSPEYKAYYRKKFNEVPKHQHKRALALTARKLVRLIFALLSNNRIYSNEYVGSKTNK

SEQ ID NO: 108235 - protein, 423 aa, unidentified
MSYRIAGIDVHKKMLAVVVADVEVHGEYQFERIRYGSNPEPLRLLAAWLIEHEVEELVMESTAQYWKPVWGALERYWKPSCQKREGAGPMSGTLHLAQARSNRGRRGRKKDFPDAERLVKRLVANELILSFVPDAEQRLWRTVTRRKYQLTRNKVRLQNQLEALLEEAHIKLSSLVSDLLGVSARRMLKAIADGGTDPAALAALADKKLRATPAQLCDALGACTELQPVYRRLLKMFLEELHLIEQQIGQLDQEMAALLSQHPESVQRLSEIPGLGMDSAQQIIAEVGATAATFPSGKHLSSWVGACPGDEESAEVSQSHRSPKGNRHMRRILNQAANAAVKAKGTIFEIVYRRLVTRLGHNQTIGAIAHRLCRLIWIILHQGVRYEERGPSVNTKSRRQRTSRMIRELRTLGYRVEPVGTPA

SEQ ID NO: 108236 - protein, 356 aa, unidentified
MAMLADTIDGVIGVDTHRDTLTAAAVTAIGGLLADATASTDAAGYRQLLGFATSHLPGRRCWAIEGAGSFGAGLATFLLDQGEQVIEVPRRRRSTRRTAAKSDPLDAVHIARDALITQHPAIVRRRGDREALRVLLTTRRNAVTAWTQTVSQLKALIVSAPEELRAELRGRGTKAQITYCAALRERPTRSLEHQMTARALHATARRCQLLRAEINQHQHDLHTLVVAITPWLLELPGVGPITATQILISWSHAGRWRSEAAFAAQAGTSPIPASSGQTKRYRLNRRGDRQLNHALHTIAIVRMRDDPLTHAYVQRRTAQGKNPREIRRCLKRIIARQLYNLLKHYDRPAIQILHTT

SEQ ID NO: 108237 - protein, 361 aa, unidentified
MRHLSAKLLADANQRANREPSMGELTTIGLDLAKHVFQVHGVDADGATVLRKQLRRGQMLAFFGKLPPCVVGMEACATSHYWARELRALGHEVLLMPAQYVKAYVKRNKNDAADAQAICEAVTRPTMRFVPVKTAEQQAAVLLHRGRERLVRQRTGLANALRAHLAEFGVIAPQGLRNVGQLIAIVRDESDARLPALARQVLAVLATQIEQLEAAVAALEKQLMAFHKSNPVSQRLATIPGIGPIIATAIAATVTEPGQFRSGREFAAWLGLVPRQNSTGGKTRLGGISKRGNRYLRRLLINGASANLLRSKATNADPWVIGLRRRRPSLVVAVALANKTARIAWAVMQRQEDYRRMAAAA

SEQ ID NO: 108238 - protein, 347 aa, unidentified
MVTIGIDPHKTSHTAVALDPSGEMLGELRVVADASMLRRLRKWASSWPQRVWAIEGAAGLGRLLARQLVAAGERVVDVPSALAARARVLASGHGRKTDGIDARSVAVVAQHRGDLFAVAADDHTAVLRLLSDRRDELTGERRRTINRLHRVLRDMHPGGAPRQLSADRAARLLTSIRPASAVDLERKAIARQLIADVRRIDHALLENRRRCEQAIAASGSTLTEIFGISDVLAAKILGHTGDITRFASADHYASYTGTAPVEASSGEQTRHRLSRAGNRSLNHALHMAARVQTMHPGPGRTHYQRKRAEQKTSTEALRSLKRQLAKIVYRQLRHDHLGRPFIDSELT

SEQ ID NO: 108239 - protein, 319 aa, unidentified
MTTAIGIDMGKFSFWASCDENDVHEFANTDAGLKTFFEMLAKRSIVPSETTVGVEATGAYHLFFCANLVKHGWRVMVINPLESNRVLASQSLRKVKTDKRDAIAIRKMVVMGLGYPYTDTDETLALKTLIVERAGLVGMRAMLKQRREAHRTKQKAISKTLHDSSKTVFAALKKEITAIERRFAKHDPETQALLRSIPGIGVFSAAALVAFVGDINRFSSPEKLVAYMGLDCRVFESGTSIKGKGYITKRGNSFLRQALWNAAFISRQKVPYLKAYFEKKKGEGKHYLSAMCAVERKLVLLVYAVWKRGTPYEKRELAR

SEQ ID NO: 108240 - protein, 349 aa, unidentified
MNQDEIILGVDTHLDKHVGAVISAAGKLIATQSVETTSAGYLQLLAWARSLGELRRAGIEGTATYGAGLTRVLRDNNIDVFEINRPDRATRRLRGKADPTDAESAACAVLSGRATAIPKEQAGAAYAMRAVSVARRSAVKARTQAINQLRGILVSAPQEVRERLLHTKTEACVSACARIRSLGKTPLLQSLTTTLRLLAKRWLALAAEIKLLDTQLEHLTNNHAPRLRKEFGVGAQTAAVLVCVAGDNPDRIKSEAALAALCGVSPLQASSGKTTRHRLNRGGDRAANNALWTIAMVRMRSDARTQAYVARRTAQGLSPKEIQRCLKRYIVRALYPLILADLGKLAAAS

SEQ ID NO: 108241 - protein, 417 aa, unidentified
MQMELSAFTAVIGIDWADKKHDVCVQARGSDERQFSRIPHQVDKIDEWAQAMYLRHGGQMAVALELSKGPIVSALQKYNFFVIYPINPTTLAKYRQTFNPSGAKDDPTDAELALDILFNHPHHFQPLNPQSVEMRTLMTLVEQRRRLMNDRVRITNRLRNALKQYYPQALDWFDHIDTPLFCAFIQQWPSLTQAKRARRTTLEKFFHQHNLYRKSVLERRIEAIKSAMPLTTDEAVIMPHRLQTLALVNQLEVALQSIAMYDEEIAALAPRHPDYSLFSGLPGAGPHLAPRLLVAFGEQRERFASAAELQKYAGIAPVTERSGQKSWIHWRWQCPTFLRQTFVEWAAQTINKSYWAGLYYYQQRAKGCSYQAAVRALAFKWIRILYRCWITRTPYDEAKYLKALKERGSQLLMVETT

SEQ ID NO: 108242 - protein, 369 aa, unidentified
MREYSEAFVAFDVAKTKHAVAIADGGRSGEVRFVGEIASLPAAVERLIRKLAGRYGKLHICYEAGPTGYGLYRQIEALGHACLVVAPALIPKRPGERVKTNRRDAVTLARLHRAGELTGVWVPDVTHEAVRDLVRAREAASDDRRRKRQQLLSFLLRHGRVYSGSGHWTLAHRRWLAKQSFDHPAQQIVFQEAIDAIADADQRLRRLEQQLAAIVPNWSMAPVVGAYQAMRGTSFIVAVTFAAEIGDVRRFDSPRQLMSFLGLVPAESSTGETVRRKGLTLAGNRRARRVLVEAAWTYRYPARVGETLRARLDGLPKIVRDIAWKGQVRLCARYRRLSATGKKLPVVVAAIAREMAAFLWAIGRQVAPA

SEQ ID NO: 108243 - protein, 386 aa, unidentified
MVIIGVDPHKSVHVASAVDPATNRRIDTVKAEASLAGYRRLLRWADKFGERRWAIENARGLGRHLAQWLVARDEVVDDVPSTATARVRELSRGGRRKNDVIDAAAAASVAALQGDGNQVEPEDLTTVLALLDERRTNVIVQRTRLVNQLHALLRDLVPGGGPKDLTAITASRLLTSVRPTGPVETARKDLARDLVVEIRAADQRVRALTVQIAEAVSSTGTRLLEVDGVGPVVAAKLLGRSRHASRFATAASFASYCGVAPIEVASADRARHRLPRGGDRQLNLALHIIALTQVRMRHSTGRAYYDTKIACGKSHNEAMRCLKRRLADHVWRLMVRDERTQTAGPGGHSGASLQSSAAGSTPTASSSDKSLPEPTEYNSTTQRSVA

SEQ ID NO: 108244 - protein, 316 aa, unidentified
MSGKRVIGIDVGKSWLDAAAEGCERVRRYGNDAAAIAALVEQLDPAEDLVVFERTGGWERNLEAALADRMIPWAVVHSQRVKAFRQVRGIKAKTDRIDARLLRDYARDRWNAGALRLGRREDVTLDCLMARQRQLKAMRHAEACRLATAPLDAVRSSIEHMIAHLDEALAATAAELARHEDEHPGLALKEEVLCNQIGVAEQTARGLLALLPELGRFGCKEITALGGLAPRVHESGSIRKRRGLAPGRTSIKVVLFNPARTAMRFDPQIKAFCSRLRARGKPGKVIMVAVMRKILVRLNAQLRDAMAKAPAAAAAR

SEQ ID NO: 108245 - protein, 354 aa, unidentified
MSRILAIDLGKFKSVTCLLDSDTNQTEFWTMATDRHYLLAVLKNYHPDLVVIESCGLAGWVHDICTEEGYEVLVCNPNQEAWKWKHIKRKTDRDDALKLAKLAALGQLVPVYIPCRQQREYRRLVKYRQVVVGRINRVQNNIRAIFAQRGMEMARGQKAWALERLELIAQHRKPLAECSLDDLWRGELDLELRQLEHLRQHQHEIHKQLQALARADERVQLLQTIPGVGRKTAEVVVAYLDDPHRFQNARQVSSYAGMVPRRFQSGEMDRQGRIHKRGPRQLRSALVEAAWLMLRYNPWAKSVYDRLTSGQKTRKKKAIVAVARKLLVRCWVMLLRKEPWNKETMTAMSVAVAV

SEQ ID NO: 108246 - protein, 373 aa, unidentified
MAKSIRYVGLDVHADTIAVAVAEAGAGEVRFLGTIPNRPEAIRKLIRRLEPVSTLRVCYEAGPTGYALYWQLTGLGVKCEVVAPTLVPVKAGDRVKTDRRDAEKLARCYRAGELTPVWVPDAAHEALRDVVRAREAAKGDELRAKHRLGKFLLRHGRRPPEGTTPWTKKYWTWLNSVHFEYRAQEATLVDYRAEIEHAADRVERLEKAIDEAVLAAPAKMRAVIEALQALRGVAKITATTLAVEVGNFSRFAHPRLLMGYGGVVPSEFSTGKSKRQGAITKTGNAHVRHVLVESSWSYRHRPNQGGELRRRQKGLSEEVKAIAWKAQNRLHNRYWRLTSKGKAPGKAITAVARELLGFIWAIGVRVETTQAAA

SEQ ID NO: 108247 - protein, 394 aa, unidentified
MRFVGIDIASETHVVAVVDETDAVLVRPTKFTEDAPGYDRLFGLLGTPADTLVALEATGHYWKNLFAVLVTRGFAVALLNPLRTRRFADEELARTKTDAIDARGIARFAAQKRPAPTRLPDRATEELRELVRLRDRLVQDVGDRLRQLHRLVDLGFPEFTRHVKSLDSELATAILHDYPTAAAFRNVSARRLAGLRYDGRHKVGDDLARALLAAATRSVGQHHGAAYRLQVRYACEDLDLLRRRLRTLERDIERTLDDHEIGTLLTTIEGIGPQTAARLIAELGNPAEFRSAAALASYVGVIPAIRQSGKWTSSRAGLNPLGHAALRAALWMPVLTAVRKNPWLRAYYQRLTARGKLPKVALIAAMRKLLIAVYTVAKTRRPFVSQRAPQEARA

SEQ ID NO: 108248 - protein, 314 aa, unidentified
MNQKHENTDLIHHVAIDISKATLQIQDDKGSFAVTNDAIGLKKVLVHLNSHINPLVVFEATGGYERLLLESLRKAEMPMAMVNPARVRDFARSEGIRAKTDPIDAKMILAFAKSKKLKPMATPSQACIKLAALLDRRAHLTEQQAREKNRLQNSEAFIHRSIKRMVRVLEKELAAIEKEIDALVDSDPGLKARAQIIESVKGVGHVTAWTLLAYLGEMEELSRNGLVAMAGVAPFNRDSGKFSGKRCIQGGRAKVRKCLYMAAHTAARCNPVVAAYVKGLRDRGKPYKCAIVAAMRKILIHIQSLIKKAQLSPC

SEQ ID NO: 108249 - protein, 317 aa, unidentified
MTSEILFGIDVAKDELVIDSELGSLTVSNTTEAIDTWLKSLPTLSYLGLEATGTYHQLLADRAVSMGKIVYVLNPRDMRHYALGLGRRGKTDRVDAQMIRRFITAERQHLRPYQPATMVQHQLALLQRRRATVVKHRQALQKALRSVSELAEPLQETLVALDALLTRIDHQLNDLLELEPVLKAEARRLESIPGIGRQTSTQLAVLFDRVALTRSDAAVAFVGLDPRASDSGQKRGRRRVSKRGPGELRRLLYNCAQAAAKTAVWKPYYQSLRAREFSATQALVILARKLLRIAFSLWQQADAKFDAQKIGCLKNAA

SEQ ID NO: 108250 - protein, 342 aa, unidentified
MYYIGLDVHKKTISYCIKDVGGQVQWEGTIPATRTELDSWMKTLPKPWTAAMEASIFTGWVYDHLLPQAAQVKVAHPVMLRAIAAAKKKNDRIDAGKIADCLRCDFLPECHMVSTEIRDRRRTLRYRHLLVRQRVQMKNRVSGLLLETGVSHNKQRLHKVKYFRELLATNKEVDDSIRPLLKLSRESIERLQKTDYALVSSLERDPLLAQRLKNLRTVPGVGPITALTWAVEIGDVSRFQSVKQAISYCGLCGDEKSSADKVLRTPLSKQRNKHIQRVLVEAAKLAPKQSHELALVYEKAKQKGNTNRATIAVARKMVTYLLAVDRGQRSFVPVEDFSTAVA

SEQ ID NO: 108251 - protein, 457 aa, unidentified
MAPRPKKTKKKVTTPVRVLPTLNPHAAGIDIGAREIWVAVPPDADPQPIRSFETFTDALLQLRDWLKACGVTSVAMESTGVYWIPLFQILDAAGFQVCLVNARHCKNLPGRKTDIQDCQWLQYLHSVGLLNPSFRPPEVICVIRSFFRHRNRLIRCAADQVRLMHKALTQMNVQLQHVISDLTGVTGLAIVQAILEGQRDPLKLAALKDHRIKASKDTIARSLQGDWRAEHLFALRQNFQTWQHYQGQISACNQQLQQHLAALDSRADLAAQPLPPPKSSHRTAQRNEPQFDLRSESYRLLGVDLTAVPSFQTSTVLVLLAELGPDFPDKFHSAKCFASWLGVCPDNRISGGKVLSASTRDVRSRVAQALRLAAQSLWRAQNYFGDLYRRWKARLGTPKAITAMAHKLARILWHLLKFKQPFNPDVFRHEEQKMRRKKLARLQNSAAALGYRLVESL

SEQ ID NO: 108252 - protein, 348 aa, unidentified
MTMVGGFDVHRKQITFDYVDDDGLVRWGQIRPATRKTLRAWLGEHCPDGDAEFALEGCTGWRYVSEEVASAGVGVHLGDPAEIAGLRGPKKRAKTDRADARLLRTLLLEGRFPESWIPPAHVLEVRTLGRLYCTLMDERRAWQQRIHAQLFHQGCPPITALLSAAGREALARAELSATGRQYADTALRRIDELSTEIGPLRTQLVNFGRRQVGCQALQAHYGIGWLCAAIIWAEIGDARRFTSSDQLVRFAGLDVTVYSSDGKRSPGHLSRQGSPELRWAAFEAAKCAARRSSPDYAYYHQLAAKRDGHNGKNPTLAVERKILRRCYHTLRELGDAALALPIPEEVAA

SEQ ID NO: 108253 - protein, 280 aa, unidentified
MKYVGIDLHKKTISGCVVVKERGKKKIAARKRLECRDEAGIKDWFSELGKFEVVVEATASYEWFVKLVEPLAQRVVLAHPKKLRIIAESKRKSDKLDAQVLAEFLASDEIPLAYRPGPRVREHRALVRWRNFIQRRITSVKNKLRHILAAYNADVPHLFTAEGRVHLAGVQLSAADRFVADHLVVELEQHQERLAAATRRLREFAASAPLAEREARAILDSVPNVGPVTTDVILAELGDWRRFGSQADVVCYAGLAPGFRERAGKAKQLGIAKEGSRLLR

SEQ ID NO: 108254 - protein, 312 aa, unidentified
MEVLYPRCCGLDVHKSSITACVLIAQSGKPLKHIRRFGCTTRELRELVVWLQEFGVEHVAMESTGVHWKPVWNVLEGHFQIVLANAQPIKAVPGRKTDTKDCQWIAELLQHGLLRSSFIPPLVTRDLRDLTRARTSLSQEHSRIASRIQKVLEDANLKLASVASNTLGKSGRAILAAIIGGEESCERLADLALGHLRAKTPQLQAALEGQVRDHHRFLLQSLLRQLYFIESEIELLDARLDQLGQQHLDLAEALNRWITVPGVDHVAAWSFIAEMGADVSQFPTAAHPASWAGVCPGNNESAGKRKAITHFH

SEQ ID NO: 108255 - protein, 364 aa, unidentified
MKRKVYVGMDVHKETIRIAYLTSNSKEILKEQQIKHNEVQIKKFIKKLKTEWNEIHCCYEAGVTGYPLYRYLKSLGVNCILVAPGKIPRQNTDKIKTDKRDAIKLARLMRSGELESIHVPSEEDEAVRDYLRSRDSLRLDLGRNRQRLMKFLLRKDIKYSTTKYWTVSHYKWLNNLHFNNEILQETFNDYYSRVRVQEENLKAMDKKIQEIAESEPYREKVGILRCFRGVDYLTAMFLLCEVNDFKRFKTAGSFMSFLGLVPGEYSSGSKRKQTGITKTGSPRLRRILTEAAWQHRFPGTGSKIITARRSGQPALVVALAEKASLRLHKKFRNLQLRGKTPQVMITAVSRELSGFFWGAMNLVA

SEQ ID NO: 108256 - protein, 436 aa, unidentified
MSKSKNPTKEVIPIMKKRIYRRMPVNDFQPQTISHADLGGKLVFAIDVAKVDMVAALAGANGHVLHTICWKAPDQNSTVLSILRSFRTAGITVESVMEPSGTYGDVLRHQLEKDGFPVFMVSGKRTHDAMEIFDGVPSLHDAKAAAIIARLHVDGLSTRLADEVPERRQLKAGLAIMDLYQERYLQLAHRLESWLARHWPELPTLLELTSSSLMALLARIGGPADVAAAPEQATKLLLGISHRLIAADKVAAVIASANASVGVPMVGLERDALMAIADDAYRAHRAFTTAKTKVDQLAATTPAATLAPVVGHTTAAAIFAEVGDARSFHCTRAFLKAMGLNLKEKSSGTVHGQIKITKRGPSRVRQLLWLAIFRWIQKDPIADAWYQRKKQRDGGRASRAAVALMRKLAKGLYHVGRGGTFDSSKLFDTRRLQVTT

SEQ ID NO: 108257 - protein, 347 aa, unidentified
MVEGTMGSHHKERSTKMNKHNMLCAGIDTGKRKLEVALTSGLRLQIDNNAEGHAALSGWLRKHRIKRVGIEASGGYEREVVAQLRRWRFVVVVFQPAQVRAYAKFHLQRAKNDKIDAALIALCTADVRKIHAPPDARLIPLAERLTFMEQITEDMARAKNRHESCRDPRTKRHWEAEIARLKGVLRIELKALVADIRQHSDLSKRLDLIASVDGLGIRTALAIAVRMPEIGRVTREQAAALVGLAPFDHDSGDQVGVRHIEGGRERLRKALYTAALPAVFLWNHQLKLMYRRLIAAGKRTSLRLWPAHANSSSTLILSSSAVPRGLHCELPLSLPVIVLLSLVSLFD

SEQ ID NO: 108258 - protein, 316 aa, unidentified
MAEPHCSVGIDVSKDSLEVALYPSEEGTSFSHTPEGVQQLVDRLCAAAPNRVILEATGGLERFLTAALLAAGLPVVVVNPRQVRDFAKATGRLAKNDRVDAKVLARFGAVIAPEIRPLPDTQQQLFRALVVRRRQLVEMIVMEKNHRASAVRPLHPRINRHLKQLEKALAELDAEIDDQVKGSPIWRAREALLLTVPGVGPQTCRALLAELPELGRLGRKQIAALAGLAPFACDSGLRKGHRQIWGGRVGARNALYMSTLVATRHNPALRAYYQRLLQTGKLKKVALVACMHKLLLILNAMLRDQKPWDLIRYQNA

SEQ ID NO: 108259 - protein, 355 aa, unidentified
MKQYIGCDSHARYSIFVSVDEKGGVGAPVRVEHGDRSLRDYLGTLDRGTPVAVEASGGWYWFMDELEQAGLDARLVNPLEAKRRMGGKHKTDKLDAKGLAILLRNGTLPEVWIPPAGLRDLRGLMRTRLATRSQTTVLKNRIHAALRRYGTLQGEPSDDLFGKKKRLLLSVAIGRLPEQTQRATRHEWEMLDLIEEHIKELEVPIRERIGRLGWVRLLKSMPGVGEILGATVYLEIGDINRFPAPEHLASYAGLVPTVHASGGKSWSGPTSPQANHYLRWALVEAANAVLMHRHRYAGQHVIELYDRLKKHKCHGKAIVALARHLAEASWWILKKRQPYRPPHAQAAAMSASRNG

SEQ ID NO: 108260 - protein, 458 aa, unidentified
MTKKKRVQKVVEMNALQQINSHAAGIDIGGEEIYVAVPPSCDPESVKVFPTFTADLYRATDWLKGCGITTVAMESTGVLWVPLFEILEKEGFEVCLVNARHIKNVSGRKTDILDCQWIQQLHTYGLLSASFRPDEYIVQIRGYVRQRDMLVKYRSAHIQHMQKALNLMNLKLTDVLSDITGVTGMKIIRSIVAGERDPHVLAQFRDRGCKKSEEEIAKSLEGHYRAEQVFALKQALELYDFYELQIESCDVELEKLYQQKEMPEHPDNPGPAPKRRKPRKNQAKFDLKGALYRMTGVDLTRIDGIDALTAQKVLSEIGTDMHRWPTVKHFTSWLHLCPNNKITGGKVIKTGTLKTKNRATTALRIAAASLSRSKSALGVFYRRMSARIGKMEAITATAHKLAKIIYTMLKEKTEYCDLGVDHYEKVNRERILKRLHYQAAKFGFCLEPLVNSSRMVVS

SEQ ID NO: 108261 - protein, 343 aa, unidentified
MDNIGLDLHQRESQLGILTDDGEVIERRIRTTPERLRALLGGRPPARILLEASTESEWVARQLETLGHTVIVADPNFAPMYATRSGRVKTDRRDARTLADALRVEAYRPAHRSAEGHRHVRAELAVRETLVRTRTRYVGLLQALVRRDGLRLPSGMPEHTATRVAAVPVSPMLASELAPLLALLPALNAEIAAADQRLAAGLAANAVVQRLATVPGIGPVTATAFVATLDDITRFASAHQVEAYLGLVPSERSSGERQRRGRITKAGNTRVRWLLVEAAWRILRSPRADAAPLRAWAERLALRRGKRIAAVALARRLAGILYAMWREGTTYQPQRTAAPAAVA

SEQ ID NO: 108262 - protein, 347 aa, unidentified
MRFYNQAHQYYCGIDLHVKTMYVCILDAAGQVLVHRNVPSTPEAFLTIVGPYRTGLVVAVECMFTWYWLADLCAAEGIAFVLGHALAMKAIHGGKAKNDKIDSHKIAILLRGGMLPQAYVYPAAMRSTRDLLRRRLHLVRKRGQLLAHIQNTRAQYNLPAFEKRLAYPSNREGVADHFPDPSVRKSIEVDVVLIDQYDALITDLELTIVREAKRHDADAFHRLRSVPGIGKILALTILYEIHDITRFDRVQQFASYARLVKCRHESAGKVVGGGGAKIGNVHLKWAFSEAAVTFLRQNREGQQLRARLEKKHGKGKALSILAHKIGRAVYYILARETVFSMEKFLAA

SEQ ID NO: 108263 - protein, 353 aa, unidentified
MKTYYVGMDVHRASIMIVVLNGAGKKVMQSVIETGAERVRGYLKQLGGKVYVTFEEGTQADWLHEVVRPLVSEVVVCDPRHNKLLQSGNKSDRVDAQKLAELLRLGSLKRVYHGDNGVRTLKELVRTYDCLVSDTTRVMNRLKAIYRGRAIACGGHDIYRQERRKQWLGKLKERGAKQRAGFLYEQLAALKPLRHEAKGEMVKEARRQAAYPWLLSVPKLGAVSVAQLLAIVGTPFRFRSKHQFWTYVGLAVVTRSTADHEVVDGVLRRSRRPLATRGLNRNHNHLLKRVFKNAASSACYSGPFKASYDSRVAQGMAPSLARLTIARQLAATTLALWKRGEQFDPERKKQQVT

SEQ ID NO: 108264 - protein, 376 aa, unidentified
MREKLRFLGLDVHAETIAVAVAEPDGEVRSLGTIANREDSIRKFIKKLGPAEQLRACYEAGPTGFVLYWQLAQLGVECAVVAPSLVPKKPGDRVKTDRRDALKLARSHRSGDLTAVWVPDEASEALRDLVRQREAAKQDQLRARHRLTKFLLRTGRRQPLGLKAWTEHYMRWLAQIRYSQPAQEVTLRDCLNEFEHMSARVKRLEEAILEVVKLAPQAMQEVIRGLQALRGVAHISAVTIAAELGNISSRFESARQLMGYSGVFPSEDSSGKRIRKGGITKTGNAHLRRIVVESAWCYRHRPRVGEKLRKRQQGIPAEITEIAWKAQNRLHRRYAKLMARGKEPRKTITAVARELLGFIWAIGIKAEAACKQPMAA

SEQ ID NO: 108265 - protein, 426 aa, unidentified
MLNSQINKIQAITSDTLIVGVDIAKNIQWAQFINFRGIEVSKHICFENNYSGFNSIMEKIEEIKSKNNFLSVIVGMEPTGHYWKTFATFLHNNGIKVVQVNPYHTKKAKELDDNSQTKSDKKDALVIAKLIKDGRYSAIYFPEGEYADLRNLSNTRLEVSRLLNICKNRIHACVDEYFPEFETVFKSFIKGKIALHILKRIPFPTDILELTLEDIISVIREAAKKSVGKKKAEELIRAAKVSIGVKVGLEGARIRLNNLLEEYELYHNQLEKIEKEMAQELEKTGYKDILTSIPGIGIISAASFIGEIGDPKRFSNPQQIIRLAGYNLVEDSSGKHKSKTMISKRGRKILRTILYKISLIVVCKNQEIKLLYKYLITRKENPLKKKQALIVISGKMVKIMYSLIKKEEVYDKEKVLGIYRKQQIVA

SEQ ID NO: 108266 - protein, 415 aa, unidentified
MEIVYERVAAIDVGKREVAVTVRVPGQTAGIRSQQTRKFRTFYQVLRQMVGWLVDHGVTHVAMEATGVYWKPVFHALCEADTLEVVLVNARHVKNVPGRKTDVKDSEWLAQLLECGLLRGSFIPPREIAAIRELTRYRKKTIQARTRELQRLSKVLEDAGIKIDSVASSITTLSARDMIEALIAGERDPRALANLARGTMRTKIPDLAMACAGRFADHHALLARMHLDHIDHLTSMIDGLDERIEQVLAPYAQQLRLLRTIPGIGDRAAQVLISELGVDMSRFPTAAHLASWAGLCPGNNESAGRHMSGRTRKGNVEVRDILTECAWSAGKTGSYIGAQFHRLHRRFGKKGGGKAAVAVAHTLIVVVWHVLNDQSEYRELGHDYFTRRDNPEAAKRRLIHNLEALGYRVELTATA

SEQ ID NO: 108267 - protein, 352 aa, unidentified
MIVLGADTHKRSHTIAAVAAATGEMRGEQTVQVGARGFDALLRWARGLDGERVWALEDCRHVSGSLERFLIARGERVLPIPTHLSASARKSARQRGKSDPIDAVGVARVVLQEGLESFPTAHLDGPELDLRLLVDHRERLVRQRVALNSTLQWHLHDLWPELQLPGSSLFYGRWAPRVARRLARTQQTMRVRIARDELRRIRELSQAIKALEHEIAELVAKIAPQLLSEPGFGPLTAAKLVGEIAGAQRFATPAKLARAAGVAPIPASSGNTQRQRLDQGGNRQINAALHRVIVTRARCHPETRDYIARRQAEGKTTREAIRCLKRYLARHVWRLLQPPHPGQGTPPSPSIS

SEQ ID NO: 108268 - protein, 318 aa, unidentified
MNTKTKQNINVGVDTGKYQLDIYIRPLDIYFTVPNDDKGIKEAVKTIKKYKPERIVIEATGRLEMPFILACANANLPFTIANPIHVKRFVGAIGQRAKTDKLDAQLIAHYSEAIKPKLSQLKPDTMQAMSDLVTRRNQLLTMQTMEKNRLQIMPKALAMTIKPVLTLFNNQIKKIEEKIVKLIESCPEYQAKNMILQSMTGIGKIAAASIISNLPELGYINSKQASSLIGVAPMNRESGRYKGHRKIQGGRPQVRTVLYMAMMSAMQSNPVFKVTYQRLLAAGKPKKVAIIACIRKMIVILNSMLRDGVMWEAPKVNN

SEQ ID NO: 108269 - protein, 355 aa, unidentified
MLLSAPVANREDDLDSLFGRFPDALVVVDQSRNIGALALARARAAGMSAAYLPGLAAHGAARLFAGDAKTDERDAMVIAKTALGIPDALLPVGDPGPTIAAARALAAQRNFLTCENTRNKNRLRSILLESCPAFEALVDLSDGPQLRLMASLGGAWSVADAGPRRAAALTRGAARGKIEALVRSTTSSTRPDASVVAAEDRAVKLLARRISENSAEIEAITAEISALLEGDDTYRCLLTVPGIGPKTASELAISIDIEDFPSHDRLASYCGLAPRNRQSGTSISSVTASRQGNKRLKNLLIFSCNCLTRTEGRWGDYYTRCLERGMSHGKALKALARKRLKVIYAVMRDRVPYAA

SEQ ID NO: 108270 - protein, 405 aa, unidentified
MISDLSLQASGRPGVEHQRLPHTPDALVEWLGQLRRRFRGQLVGIAVETSRGPLVHALLEHEFIILYPVNPRSLQRFRETFAPSGAKDDVPDADLLRELLVKHRDRLRPWVPEDVETRALRRLVESRRQVVDLRTKLTQQLTAALKEYFPQALRWAGDDLASAMACDFLLRWPTLAALQRVRATTLRRFYTSHHCRRAERIEERLAEIQRAVPLTRDRAIVETTALLVQTLARQLQALAPSLEQFDQDIARRFAAHADADLFKSLPGSGAALAPRLLVLFGADRTRFASAAEVQQLTGIAPVTRRSGQRSTVQWRWAAPTFLRQTLHEFAHHSIRYSAWARAYYALQRRRGKGHHAAVRALAFKWLRILWRCWQDRTAYDETRYHRALRQRGAPIAPELIAPEAA

SEQ ID NO: 108271 - protein, 348 aa, unidentified
MKNKSFVGIDISKNVIDVSIFREDTNIKMFPHEVFNNTRKGFGDMCSWLKKSRVVLSQALFGMEFTGCYSLDLEKFLTSKNYSFCMLSTRIVKHHPMGTIDKRDKNDSAKIADFLYRYDGTECAKPYKLPSKAMQQLKQLVNERKFLVEQRTNFMNRMQMFETKEDSAMYESYIKKLNHDIEKIDQEECELMSKEEDVFDTFQNLLTIPGVGFVNATNIIAITRNFTAFDTARQYARYVGVAPCSHTSGTSVKWRARPSAHCNGQVKADLSMAALRAVEYDVEMQMFYNRKLGGRKDSDTKRKALNAVKFKLIRRMFAIGKQKRKWEVLNTSDDRKNLHIEKSKASEL

SEQ ID NO: 108272 - protein, 373 aa, unidentified
MDHHSGAFVGIDTSKLRNAVAVAEEGRGGEVRYFGEIDTTEAAMRKLVTKLAAKYSRLTFCYEAGPTGYGLYRLIRKLDHDCIVVAPSLIPKKPGDRVKTNRRDAVGLAKLLRAGELTAVWVPDERHEAMRDLSRAREAARKDLKGKHQQVSSFMLRLGRHFPGKKTWGPAHMNWLMLQKLEHREQRIALEELLGAVRQESERVERLEQAIRDAVPEWSLAEVVTALQAMRGIDLITAVTVLAEIGDLSRFQNPRELMGYLGLVPSESSTGDTINRGGITKTGNGRVRRILVESAWSYRYPPRVSREKQMKVAAAPRAAREIAWKAQMRLCGRFRSLTRKGKRPTVVATAIARELAAFIWAINREVMAHATAS

SEQ ID NO: 108273 - protein, 412 aa, unidentified
MPKIVYPICCGIDVHKSFIVVCIATTDEKLVTTYKSKRFSTFTGDLRRLSDWLVQYNCRDVCMESTGKYWIPVYNILESTCHVVLAHPKYVKTIKGKKTDKRDAKWIADIFKHDLINGSFIPPVDIRQLRDLVRYHYKLTGYTTGEKNRAQNCLTVSNIKLDDVFSDVFGKAASAITERLLENSEPFDVKPYLTKGIKASPEEIQLAVDGVMCVNQAEKLRIIRSHMASLELCKANLESEILSIAEKFLPQINFVLTVPGIQTFSAIAIIGEIGADMSVFETSRHLCSWAGLAPQNDQSAGKKKTTRISRAGVYIKPLLVQCANCAIRSKTNPEIANRYNAIKKRRGHKKAIIAIARMMLTAIYNILKKNEPYNAELYRKADAPPQNRQVTPEQGLCILQRQGYVILPPVPA

SEQ ID NO: 108274 - protein, 338 aa, unidentified
MRKFIGIDLHSDNSVVVITDEEDRVVYQKRLPNNLEAIEAALAPHREEAVGVVVESTYNWYWLVDGLMDRGYRVHLAHATAIKKYEGLKYSGDFADAAYLAHLLRLGLLPEGYIYPREQRAARDLARKRMQLVRCRTAQVLAIEGILMRQTGARKSSNAIKQMSAEQVEELAFAPDVTLAVQANRAVSEVLQQQIEVLEQRLKERLRPQTEYHLLRTVPGIGEVLATVIMLETGPVTRFAEVGNFASYCRCVDTLRESNGKKKGEGNGKNGNKYLAWAFVEAANFALRYCPPAKSFYERKKRKTNGVVAIKALAHKLARACYHILREHKPFEVSRCFA

SEQ ID NO: 108275 - protein, 455 aa, unidentified
MAKQKTHKIPTIETVNIGAAAVDIGSREHMAAVNPEVTDAPVRAFGTFTHDLHDLADWFKSHGVTSVAMESTGVYWIPAYEILEQHGFEVILVNARYAKNVPGRKTDVSDASWLRQLHSHGLLRGSFRPTAEIATLRAYLRQRERLVEYAAAHIQHMQKALMEMNLQLHHVVSDITGITGMKIIRGIVAGERDLDMLASYRDVRCKASTETIKAALNGNDRPEHIFALTQSLELYDFYQAKMVECDRNLEATLAGLGSDTEHDPSKLPRPRTKTKQVSTPSFDVRAALFGVLGVDLTQIHGMGPSLSLKLVGECGTDLRAWPSAKHFTSWLCLAPGNKISGGKVLSSRTRRSSSRAAALLRLAAVTIGRSDTALGAFYRRLGARAGKAKAVTATARKIAVLFYNTLRHGMTYKDPGASHYEERYRNRVLGNLKRRAKSFRYDLQELPLVADIAVS

SEQ ID NO: 108276 - protein, 400 aa, unidentified
MRVVFGIDVSKVSSEVAILVNGEKVHNYTMSNDAIGFSRLLGDLKTVHKPEIIFEATGVYSRRLQAFLDEHSYAYTRLNPLEAKKQLDSLRVRKTDQIDAEKLAQSQFVLNRKPTYIQEEVYQDLRDLSRFYQNLTEDIVRAKNRLHKVLQVTFPELETILSTPTGEQYWNLVIAFPCKDFVHELSKDELSKSIRLSTSKRISDKRVAYLAEKLTALANQSYCAVKKNSPIMEEVRYYAKELLRLSEQRQAVLDEMVELAQPLPEYDILLSIPGIAETTATSIIGELGDIRRFQSANQINAFIGIDLRHYESGNFIAKEHITKRGNPYARKILFKCIHNIASASHTNPCHIADFYEKRKRQSQMTSTKPHTIASIHRLIRTMYYLITHNKLYDYISTQNQ

SEQ ID NO: 108277 - protein, 402 aa, unidentified
MPFFVGIDWASQTHAVCVIDEAARIQWHGTVPHTAEGLPELLGRLRRFQTRGPLRVALERPSGLLVDTLVDAGLEVVPIHPNALKASRPRYSAAGGKTDPGDAFILADLLRTDGHRFRPLHAPSDETRALRTLVRGRDDLVAQRVGLANQLRALLDRFWPGAAVIFADVDSPIALAFLTRYPTPHSAARLGEKRLAQFLGQHAYCGRRSVADLLARLRTAPPSQVGEAEAEASGDAVRALVAVLTPLVAHIQQLGAAIAATLAQHPDGPLLQSLPRSGAVNAAQILAELGDDRARFPTDASLAAEGGLAPVTHASGKHHAVVFHWACNKRLRQALTTFADNSRHASPWAALVYQRARGRGCRHPHAVRILARAWVRVLWRCWQDRTPYDVTRHRAAQTLAAA

SEQ ID NO: 108278 - protein, 412 aa, unidentified
MSVFVAEVARPTLVFRGLLGQAEPILITGGRAVADYREAFVGIDVAKLKNAIAVAESGREGEVRYFGEVDASYASMRRIIQRIAAKFDRVHFCYEAGPTGYGLHRLIQSLGHECMVVAPSLIPRKPGDRVKTNRRDALALARLLRAGELTEVWVPDEGHEAMRDLVRARAAAVETLRVHRQQISAFMLKHGRIYPRKKGWTMRYLCWLQEQQFDHPAHQIALQEMVEAVRISKERVGRLERVIKEFVPNWSLAPVIRALQTLRGVDLIVAVTFATEVGDVSRFESPRQLMGYLGLVPGERSTGETVRRGSITKAGNGRVRHMLVESAWKAQSRLTARYRLLVARGKRTTVVCTAIARAIGRLHVGCCKGGAGDQDIGHCSELAPRAWAEAGQRQGNIRQTLCGRPCPTPVVR

SEQ ID NO: 108279 - protein, 485 aa, unidentified
MAKVKLSAFDRLRLGARLNRKERRDVEQRLSATDPGLEIVNRDAAGIDVGNESHYVAVPRGRDAQPVREFGSWTAALVEMAQWLMGCGIRTVVMQSTGVYWIAVHDVLQKHGLEVNLVDARGTKNVPGRKSDVQECQWLMRLHTYGLLRSCFLPAPEIHGIRTMWRLRDQHVKDAARCIQHMQKSLIAMNVQLHNALSDISGRSGQAIIRALLAGQRDAKSLAALRDPRCMASEEEIVHSLQGDWKADVLFELQQAVDAYDFYRQQMAKCDEQLKQYMALLPARKVETVVSSAEPAATTDRSKTSRSRKPRKPKGNQPAFDLEAELERILGVNATTIDGINVITVQTVLAEVGPDLSAWKTEAHWSSWLNLAPKRDVSGGRVIRHIREHRTNRAGNAFRMAAQTLLHSHSYLGARCRYLRAKLGGLKAVKAMARVLACLYYRLVTKGQRWVDQGIEEFNRRSEQRELAVLQRKAHKHGMHLVPTS

SEQ ID NO: 108280 - protein, 365 aa, unidentified
MSKLYLSIEISKTYWQLCFSKGTTKRKFVQLHSTEYERLPKIIEGMKKRLHLPLESEVLSCHEAGLQGTWIHRYLERIGVNSLMVDSASIEVNRRKRRIKTDSVDANKLMNMLRRYDTGEKDSCSVVRVPSPEAEDFRRIYRELVRLNKELTQHNNRIISLLDLHGSIPVKVDMSFLGRLPRITNYIGDRIPKYAFMEIKRVYERWLLTHEQEKKLRTEMRRVERAQDRVEAEKIVQLQRLRGIGVKGSWGLVSEMFGWREFKNRKQVGGYLGLTGTPYNSGNSIKEQGISKAGNKQVRTLMVQLAWLWLRHQAKTDLAKWFQLKTISGSKRIRRVAIVGLARKLSVALWRYVDFGIVPKGAVLE

SEQ ID NO: 108281 - protein, 358 aa, unidentified
MIVMKYYTSTTQFNCGIDLHAHQMYVCVMDRDGNKLVHTNIKNNDFEFFLKRIEPYRHDLTVCAECMFGWYWLADACQAAGIHFVLAHALYLKAIHGGKNKNDRIDSEKLAHLLRTNLIPPAYVYPAEKRPLRALLRQRILYVWRRSELLSRIQSHQLAHNRPTLRQTRPNREPWETQLLAQEDNPIRQLALQNDLALIRHYDTQIATLEAQLQKLTKTAAWRDYTLLQTVPGIGEHLGLTLLYEIGDIHRFPTVKDFLSYCRLVKGTVASAGKIKGLRGAKLGNAYLRWAFGEAAVIAKRDVNVIGPLAQRLVARMNGNKFKANTVLAIKLARAVYFMLKSHTVFDPERWVAALAHK

SEQ ID NO: 108282 - protein, 409 aa, unidentified
METVHQRCAGIDIGKRSLTVCVITTGTRGEPAKETRTFRTLTRDLLALADWLDERGVTAVAMEATGSYWKPIWNLLEDRFELLLANAAHLKAVPGRKTDVRDAEWIAELFRHGLLRASFIPPRPERELRELVRYRTSLIRERASEINRLAKVLEGANIKLGSVSTNIGGVSGRAILAALTQGASDPEALAQLAKGRLRNKHEVLVEALAGSVGPHQRFLLAAQLRHLGDLDTLIESLDAEIKERLRGAQELIERLSTIPGVGRRSAEVILSEIGADMTRFGSARQLASWAGMCPGNYESAGVQHGGQTRKGSPWLRTALVNSARSASRTKTYLGAQYHRLAARRGAKRAFMAVGHTILGIVYELLTTGQSFRDLGTTYFDQRDAERIRRRLTHRLEALGYTVTLAPHAV

SEQ ID NO: 108283 - protein, 417 aa, unidentified
MAVDSVARKRSVIKPDTLVVGIDLAKHTHVARARFCDGSYTRPVKVPNTHAGFLALSEQIDAWKPRQDSAVLVGVESTGSYGVNLVRWLSEHGCQVVLVASLHVCREKELPDNGRGTSDNKDALIIADLVARGQYLGFVALSGACLELRPLVSLRARLVREQTGWLNALHQTIDVLFPEFETVFADLKRPSARLVLDRFGTVAAARTHTPSEMRRLLARDGARVSLAKLRRLSAAAAESIGPLEVSAGQERSLSEILKTLATLDERIAGIEEEILLLLGQLPEAEYLMSVKGVGAMTAAVILSETGGLGQYSCAAAVLKLAGLNLYQNSSGQYRSGRHISKRGRSQLRRALYMVAVQNAKHGWPLHPYYAALVERGKPKNVALTAVCCRLVRLLYALVRDGRCYSECPPEAGRLEAA

SEQ ID NO: 108284 - protein, 317 aa, unidentified
MRASAAFFVGIDVSKQQLDIAVRPSGESWTVAHEEAGLSALVARLRGLAPTLIVLEATGGWEVPVTGALAAAALPVAVVNPRQVRDFARSTGLLAKTDRLDAQLLAQFAEVLRPAPRPLPDAQAQELTALLQRRRQLVEMLTAEKNRLPLAARRIRPQLQAHIAWLHQQIAQFDEDLRQRIRSSPLWREKDDLLRSTPGVGPVLATTLVAALPELGTLSRRQIAALVGVAPLNRDSGTLRGRRTVWGGRAQVRAVLYMSTVVAVRHNPVLIAFYQRLRAAGKAPKLALTACMRKLLTILNAMLKHHRRWAPVRAQHA

SEQ ID NO: 108285 - protein, 313 aa, unidentified
MHLGIDVSKQTLDCCLISDGIFYERKFANDSGGIDKLQIWLHEHGADHTLHCCCEATGTYYETVAVALSGQYKMSVVNPRTVKGFGAAVLNRSKTDRQDAKLIARYCQAMKPEQWQSATPEHRQLQELVRYIARTKRQRAAEQTKRQTAPDYLKPHIQSTIEHLTELLNHLEQDLKAHYRSHPEQDSRRKRLETIDGIGENAAAVLCSIITDRFSNAKQLVAYLGLDPKEHQSGTSVKGRTRISKIGKSETRAALYMPALVAYRMGAFPNFTARLEAKGKPPKVIIVAIMRKLAVIAFHLLKNGENFDRSRYR

SEQ ID NO: 108286 - protein, 392 aa, unidentified
MLYLAIDQHKSQLTINLRNEHGDVIQKGQVRTNHADIDNFFGKLAKRARQHRGFMAIVEICGFNDWLLEKLKKAKCSEIVVIQPDKSSNKKTDKKDANALGELLWNNRKRLQGGQRPNGIRRIFPAGLEDAQVRQLANFRQFLITQRTKTINKIKGIFNKHNMLQDAPTELIRTDKFRKWVADVQLPVVDRMEVDVHLELWKTYDKQVVEVEVQLVRRSEKNKNIFKLKSIPGISAMGAIILLSRIGDIKRFKTPRSLANYFGLTPGCHNTAGKQRLGGITKTGSPVARNVLNFAVIHVLRKDKAMREWHKKIKGHGKAKVARVAVMRKLATIIWHMLRWDKEYQFHYDPPATVKKRDGQRPSREVLGGMDNKNHALKKGKTPSNCRAKSKA

SEQ ID NO: 108287 - protein, 457 aa, unidentified
MNEPQKKASVKSKDKRKKTNQEEPIVYLDAAGIDVGATEIYVAVPADRATPNVRKFESFTPDLHKLADWLGQCQIKTVAMEATGVYWIPLFQILEARGLEVFLVNAYHVKNVRGRKSDVSDCQWLQQLHRSGLLAASFRPDDLTVRVRCLLRHRDSVVAQGAEHIQRMQKSFDQMNIQLHHVLSDITGCSGKAIIEAILLGERNPEKLADLRDRRVKAPRDKVIKALTGDWRSEQLFALKQNYEAWRFFQEQIAIIDQEIKRYYDRYESRSTIAKESQSSSSGKNARDVDSDMQQELIRVAGVDLTAIPGISTSSARGILGEIGLDMSRWKSDKHFAAWMGLCPNTKITGGKVIGSATRKVKNRAAQILRICSWSLTRSCSELGDFYRRMRSRMGAPKAITATAHKLCRIIYHMLSTREPYDETRFKVSGEEARRRQEKRIKKQAQFLGFQLVPIQP

SEQ ID NO: 108288 - protein, 356 aa, unidentified
MKTKQYRTIIGVDLGDKKHHVCITDKDGTIILEKTISNNHRQLSKLAFEHKGALFAVEVGVHSPWVSRLIKASGCSCLVANARKLRAIYQNDRKCDMLDARMLAKIARVDPELLSPIQHGSEERQLHRLSITLRDSLVRQRVNIISTVRFSLKSLGMRLPGCSTPYFANLCRKELAGSPLLEVISGSLEALDGLDEQIKKLDKRIEQIAAQFYPQTRLIQQIAGVGPITSLSFVLAVGEPDRFKNPRDVGAYLGLVPRRDQSGQSDKQLPISKAGNREVRRLLVQAAQYILGHFGPDCDLRRYGLNIAASGGKAAKRKAVIAVARKLAVLMLVLWKTEQSYEPLRNTQMKEAEEAA

SEQ ID NO: 108289 - protein, 337 aa, unidentified
MKLTIIGMDIAKQVFQLHALDPQSGRVERIKLKRAQVLEFFAKRAPSIVVMEACGSAHDWARRLQSLGHEAKLISARSVRPFVIRNKTDAADARAICTAAQQPEARFVAVKSEAQQTVLAIHRVRAQLMKFRIMQTNALRGLLYEFGEILPEGYRAFSKAFPAALARAAERLPAMLIDSLREQWVRAQDTEREMAVLEQRLNNLFRHNPDCQKIAEIPGVGLLTATATVAAIGDVGTFKSGREFAAWLGLVPRQSGTGGRIRQMGLSKRGDTYLRTLLMHGARSVIIQGKRSDWVDGLLKRRPFNVAVAAVANKLARTIWAVLARPEKYRASPTATA

SEQ ID NO: 108290 - protein, 391 aa, unidentified
MIYVGIDIAKDKHDCFITNSDGEVLFKSFTISNNPDGFETLFQKIQSVSDDLTKVKVGLEATGHYSYNLLGYLLDKGLPTYVINPLHTNLYRKSLSLRKTKTDKVDARTIASMLMSDVNLKSYSDISYHNEELKSLTRYRFDKVKERAKLKTSVSRLVCILFPELEKLVPTLHITSVYALLSEFPGAKHIATAHLTRLTNLLSEASKGRYGKDTAITFRDAARASIGSNMPAKSLELKHTIKLIQELDSEIDEIEKEIKIIMDEINSPILSIPGINYRMGAMIIAEIGDFSRFDSPDKILAYAGFSPSTYQSGQLDGAYAHMEKRGSRYLRYALYNATKYVCHWDPTFAAYLAKKRAEGKHYNVAISHAAKKLVRVIYHLEKTKQQYIKAA

SEQ ID NO: 108291 - protein, 408 aa, unidentified
MERYYLGVDWADEFHQVWVSDPEGNKVIEKKVVENVEGLTEFGRWLDENRAKGIELWAAIEKPHGRIVDFLLDHGVVVYPVNPKALDRARDRFRMSQSKSDSFDAYVLAEFVRTDHGHLRALEPNSDPAQELKLLTRDQYRLVRQKTRLLNQLSRTLKEYYVRPLEIFSDLETNIALDFLQQYRTPQALAKLTRRQWNRFSKREHHLGEDHCKELWEKLNQPQLEVPEHVVRAKARLLAVLVVQLKTLRDAVESYNKRVKSFFACMPAAELVRMLPGAKTGTIVATLWAELGDAKSRWESFRHLQAEAGVVPVTKASGKSRVVQFRFSCNKIMRHAAYWLAFVSLNRSEWANQYYRDQRAKGHSHHQALRALGAKWLKIIFVMWRDHKPYDENIHLANITRQKMRQAA

SEQ ID NO: 108292 - protein, 321 aa, unidentified
MNKDRKIYGIDISKDVFDVFSNESGHDQFKNDEKGFKALTKSLKKEALVVMEATGYYHYRLAQYLHKKGVVVSVVNPLSVKRFIQMKLAKVKTDKSDAKAICEYGQMNEVPLYSALTDVQSECLQLFRLLDNYLKKRTATKNKLHGEEALGIPSKFVYRSLKRDLKHLNNEVTGLEDRLLELVKQDQQAQLTLLKSIPGMGVKTALFLIVITDGFKKFDNASQLCSYVGITPTIRESGSSVRGRSRISKVGNKKLRNLLFLCAFSACKHNKACREIYERIVNKGKSKKLALIAVANKLLKQAFAIAKSGKPYDENFVSKLI

SEQ ID NO: 108293 - protein, 412 aa, unidentified
MNQKVDDCVLDKEKVAANTRDSAYFVGVDISMKSFHVALIQEKKKVLWDESFSMNQKGFKAFYQKLQSYSNCIVGMESTSTYHLNLLLYLMEKEVFVVLLNPMLVKRYISSQTLRNCKTDKADASVIASFVKDTQGSLPRYTETQTHHLFRLARCKEDMTHQITALKTKLKQLLRLTFPELVDSYEIYTTTMLQLVTFYPSAQAFCTAGEKKIDKRLLVLSKGKGKPVSYTGHSICHLAHHSIGRTDPSVEFVIQQTIQTLQFYETKKEEVKAKLEKEVKKFAVEDVKILSSIPGIGKDSAVHFMAEIGNMDRFRNYKALTAYIGTDPGIEQSGQSLHRKKISKRGNASLRRLGYIIAQKVIQYCPRFQEYYQKKRNEGMAYKKALIAVWNKLLRTIFSMLQRRTYFLLSDS

SEQ ID NO: 108294 - protein, 341 aa, unidentified
MSIVGAFDVHRRQLTFEYLDTSSGELKRGRVIPADRQHLRAWLARFAGQDDVHFALEGCTGWRYVAEELLAAGITPHLAEPADTAALRGKKRHAKTDKTDTRHLRVHLLAGDLPECWIPPQHMLEARAVVRLYKDLLDERGAWHQRIAATLFHQGVPLIGSMARPEGRAAVEQVNLSPAGRQAVQTGLRQIDRLTGELDPLRRQLAMLSRRQPGCAALRATQFGVGPVTAVAIWAELGDARRFHNSDDVVRHTGLDITVRSSDGKGPPGSLSRQGPQLLRWALYESAKCAARAAAPDHGYYTAVRDKRTAGLATLSVARKLARRCYHTLRELGEEALAPAA

SEQ ID NO: 108295 - protein, 354 aa, unidentified
MKRTTKYVALDVHQATTVASVRGENGRVIARTILPTEAPALVEFFRGMRGTIHVAFEEGTQAQWLHDLLVPVVDRVVVCDRRGERRQGNKGDQVDADALSDLLRRGSLRAVYHGSAHRATLKELTRAYANLVEDTTRVMLRLKALFRARGIRAPGRRVYHPRERAQWLAQLPDRGARLRAAGLYAELDVLRALRPPAKAAMVAEARRDPAWPVLQSLPFFGPVRVAQLMATMRTPWRFRTKRNLWAYAGLAVVTRSSGEYDWVAGRPVRRRRAPLTRGLNPNHNRVLKNVFKGAATAAKARPGPLQEWYHGVVARGVREELATVTLARKLAAITLHLWKTGERYDPTKLTEPAR

SEQ ID NO: 108296 - protein, 372 aa, unidentified
MNSIVYVGMDVHASNYTLSCYTLTSDECFATVQMEPDVKNILTYLKKVQRNLGAPCEFRCGYEAGALGFSLYYQLQKHGIPCTILAPSTMPTFHRNEIKTDRRDAMKIARCLAFGAFRPVHIPTKEDAAVKDFIRMRDDHKIALKKIKQQIQAFCMRYDLHFTEGRSYWTQKHLAWLKGLPLDDLLREVLDEYLVTLHQLADKIEHFDARIEELAQGERYAENVKKLSCLIGVRTHTALALVAETGDFRRFAKAEQYAAFLGLVPGERSSGDKQSRTGITKAGNTHLRRLLIEASQCYGRGKPGYKSRLLKERQQGNTSEDIAYADKANERLRRKFYRMVLRHNKKHNVAVTAVARELSCFIWGMMTGHTAI

SEQ ID NO: 108297 - protein, 358 aa, unidentified
MNRNTGMNVGQIIGTMNGLQVMGLDIAKHVFQLHTVDMGTGEIVNMQLKRARVLTHFVNKPACLIAIEACGGAHHWARELQALGHTVRLLHAKAVRPFVSGNKTDATDARAIWLAVQQPGVKFVGIKSTTQQATLTLHRQRELLMKMRTMQVNALRGLLYEFGATFAKGHKALFAEVEQAFVDLSAQLPQMVVDSLREQISRIRALSQDMASIEKRLALQLKGDQDMRRVAQIPGVGLLTATAAIATMGQASAFKSGREFCAWLGLVPRQTGTGGKVRLGPISKRGDTYLRTLLIHGARSVLSHSKQPGPWLEGIKSRRPANVVIVAQAAKTARTIWAVTAKQQDYQRGHQSIRPQAA

SEQ ID NO: 108298 - protein, 343 aa, unidentified
MKHYAGLDVSVKETCVCIVDGTGTVCREIKVPSHPQDLLRILQDPTWRLERIGLEAGPLSQWLFEGLADAGLPVVCIETRHTKAFLKAQLNKTDRNDARGIAQMMRVHLYRPVHVKTLASQKRRALLTARKLLQDKAIAIENDIRGLLRNFGLKVGIIGAVKFQDRIRELIADRPDLAEIIEPLLAARRALREHFVALHQKLLAVVRNDGVCRRLMTVPGVGPVVALAFVATLDSPARFRTSKAVGPALGLTPVQHQSGESNRVGRISLCGDAMLRTLLVEAAQSMLMRVIKWSWLKAWAMNVARRRGGRRAVIALARRLAVVLHRIWTDGTEFRWTRDAQTA

SEQ ID NO: 108299 - protein, 331 aa, unidentified
MKISETIGIDISKLDFDIRIYSNQKYEHFENNVQGFNKMIKWTYKNSSFLKEEILFVFEHTGLYSYQLSVFLTDQDIPFIMVPGLEIKRSMGIARGKDDKIDATKIARYGYRLRDEIQPYKLPSEQIRSLKSLLSLRCRFVKQRAGFKASLKEQELILTKKLNKILFETQERTFNYLSKQIKRIDDEMERIIKNDKELKEQFALIISIKGVGVQTALFMMAYTSAFTKFKNARKFASYCGIAPFPNSSGTSIRGRSKVSNLANKKIKSLLDLCAKTAIQYNPEMKLFYNRRIEKGKNKMSTINIVRNKIVARIFAVIERKTPYVDFMKYAA

SEQ ID NO: 108300 - protein, 472 aa, unidentified
MPSSGKSSKRSQSKSSSSKPVRDLESLTQINLNAAGLDIGASEIYVCVPTGRSKQSVRVFATFTADLQTLADWLKHCGVTTVAMESTGVYWIPIFQILEERGFEVYLVNAQYVKNVTGRKSDVLDCQWIQQLHTYGLLHASFRPDEQTCALRSLVRHREMLLRYRASHIQHIQKALEQMNLKLTNVLSDVTGVTGLRILREIIAGVHDPEQLAKHRDWRCSKNEAEIAKSLTGNYRREHLFALQQAVELYDIYTAKLQACDGEIEQRLAQFVPQVNLDDHPLPPPTRRPTTRPKNHPRHDLRPSLYQLAGVDLTQVDGLDVLTVQTILSEIGTDMSKWKTVKHFTSWLGLCPHNAKTGGRVVRSKTKPTDNRANLAFRQAAAALVHSKSALGNFYRRIRTKLGTPKAVVAAAHKLARIVYHMLKEQVPFAAVPPAQADAQYRERALRQLQRKAQQLGVKLLLEPALQTSGEV

SEQ ID NO: 108301 - protein, 341 aa, unidentified
MSTITIGLDIAKSVFHLVWMSATGKVLKRKMLSRKKVAEYFANLEACIVVMEACGSTHYWSRVITRCGHEVKAIAPQFITPYRKGNKNDYNDAEAIAEASQRENMRFVPLKTLEQQDIQMLHRIRERLVKNRTALSNQIRGLLAEYGLVMPKGINHLKAQLPGFLEEGENELSILARRYFQRLSEELDDLSIQIKSVDREVLGINKQNEFCQRLSTMTGIGPIVATAFYAGIGDGKAFKSGRHVSAWLGLVPKQHSTGGKPVLLGISKRGNTYLRTQLINGARAALRHCENKTDQVSIWARQLKERSNYNIATVALANKMARMAWAMLHHQEDYRLKVVTQ

SEQ ID NO: 108302 - protein, 355 aa, unidentified
MKEPITSYVGLDIHKDSIAIAIAKAGRDAPQFIGTTVAQLAQVRKVLTRQKCTPSKTLVVYEAGPCGYGWARYLNTNGWHCEVISPAHVVRSAAGKAIKTDRRDALLLARESRAGNLTPIAVPDERDEAIRDLSRAREDAIAARLRARQQLKAMMLRHGRTYSSNAWTLAHERSLATVRFEHPAQQIAFDEYRQSVKDAHERCERLTQALREQCAGWRMGRVVEALMCLRGFDFIAAVTIIAELGDLNRFSHPRALMSYLGLVPSEHSSGNSRRQGAITRTGNRHARRILVESAWTYRYGAHVGREHQIRQQGQPKAIRDIAWKAQLRLTHRYRKLSLGRKMKATKVCVAARTLP

SEQ ID NO: 108303 - protein, 339 aa, unidentified
MTMVGAFDIHRRQLTYELVDVDSGEVQRGRVETPTRQSLRAWLADLPVLPKAMAFEGCTGWRFVAEELRAAGVDAWMGDPAELASRRGPKRRAKTDRSDAHLLVTQLMGDAFPRAWIPTPEMLEARTLGRTHLTLADERRAWRQRLHALLFQHGLPSPPDLRTRAGRAWLAELTLPSGSAQLLRTGVAMVEALEVQLDTVDTALSGYRSWPGPAALQPEYGIGPLLSAVIWAELGDCRRFSSSDQAVRYAGIDVSVYSSDSHRSPGHLTRQGPAVLRWALYEAAPHAGAPASPDHAYFVEAKQRLGHKRATIAVARGSRLGRVASAGSATMIGISLPSP

SEQ ID NO: 108304 - protein, 354 aa, unidentified
MKRTTKYVALDVHQAMTAASVREESGRIIARSILPTEEPALLEFFQGMRGAIHVTFEEGTQAQWLHDLLVGRVDRVLVCDRRGKARQGNKGDQADADQLSELLRRGALRAVYHGSPHRSTLRELTRTYQNVVEDATRVMQRLKALFRARGIKTPGKRVYHPKNRKEWLAKLAGEGVRFRAQALYAQLDVLRELRPKVKGTMVAEARRDPAWSVLRSIPFLGPVRVALILAIMRTPWRFRTKRNLWAYCGLAVVTHSSSDFAMVDGQPVRRRRAPMTRGLNRNHNRELKDVFKGAATAATGRPGPLLDLYEAMIARGMREELARVTLTRKLSAVTLRLWKKGERYDPAKLTMQAR

SEQ ID NO: 108305 - protein, 344 aa, unidentified
MPSIVGGLDIHRKQLTFDYLDLVNGEVKCGQVSPADRAHLRAWLARFENPAGVAFAVEACTGWRYVTEELQRAGMEAHLAEPADTAAARGRKRRAKTDRADARLQRELLAQGRLPECWIPPEHVLECRALLELYHDLRAEHTAWLQRVHAVLFHQGAPVFHDLSRTDAPAELAALAREHLSPAGQQQVMLYLRMLEVTAGELDVLRRQLIAAARQLRGARVLAESIYGVGPVTALALTCWLGGAGRFTSARKAVRFAGLDITVYSSDGKRSPGHLSRQGPPVLRWAVYEAGKTHARHVAPDHGYYAAVKDRKDGKRAALSEARKIIRLACHILSELGDDALATV

SEQ ID NO: 108306 - protein, 353 aa, unidentified
MEQRTTIGIDLAKEVFAICVLSAQGAVVETRTMRRAAFERWLVGLQGEFVVAMEACSSAHHWGRRLAAAGHTVRLMAPAFVVPFRKSGKNDANDAEAIAIAARQPTMRFVAVKTVEQQAILSWHRAREGWIAERTALINRLRGLLAEFGFSIAQAAFRLRKALPALSSDAALPAPIRALLLEASEQLRCLDARVARCDEEIGAHGRDNETARRLRGMLGIGPLTSSALVATVSDATAFRNSRQFGAWIGLVPRQHSSGGKPHLGELTRRGDKYLRGLLVQGARSALQVALRVAPEKATRLQRWIVALHARKGYHKTLVAVANKHARIIWALMARGEDFDANAWQRHRPKSAAA

SEQ ID NO: 108307 - protein, 419 aa, unidentified
MKVVYPICCGVDVHKTFLVATLITTQGIFPSYKKKRFSTFNNSILAFKQWLIDNNCFDVCMESTGKYYIPIYNLLEDSIRVTVANPKWVAAVKGNKDDVKDSKWIGDLFRLGLVPGSFIPSKDIRILREYTRYRFKLVSCKSSEKNRFQNAFTVCNVALDSVVSDMFGKSASSITNYLVNADSFDPKYCISLLQRSLKKKADEVIESIEGFQMTGEQKERIRFVRRHLDFVEQLIAGIDQAIAGLVEPFESAIILLCTIPGVDRNTAITILSEIGTDMSQFSSSKRLCCWAGLAPGNNQSAGKKKSVRITKAGVYLKPALVQAAHAAVKSKTSSYYRIKYERIAKRRGKKRAIIAIARMMLTAVYHMLQTGEVFNPCDLYRVDMPVELRIKQKEKALRQAAKLLIAHGVVSPEHISLSV

SEQ ID NO: 108308 - protein, 436 aa, unidentified
MGYERTVFTGDDDPELECVAGLDLGKAELSCCVRRTSPPGTRVAPVVSTWPTMTNSLTDLANMLVSERVDLVAMEATSDYWKPVLYTLEAHGLNVIVVNAKHFKHLPGRPKTDILDSQWLARLASKGMLRASFIPHYDIRRIRDLTRDRVSLVSQRTANKNRVEKLLEDACIKLSIVASDIFGVSGRLMMAALIDGQRDPQVLAEMAKGRMRVKMNDLVEALTGRFTDHHGFRLKLLLDLIDILDRDIAILESRIDDLIRPYQHQRDQLDAIPGIDQNIAAAIIAEVGVDMSRFATPAHLASWAKFAPGVNQSAGRSGSKAKGKGNPFLSRALGQASVATRRTDTFLGARYRSLRRRIGKKKALVAVAHSILTIIWHLLSDPQATFNELGSDHYSRRLNPERTIQTHKKALEKLGFTVTLQPDNPHRQSETSTPCQ

SEQ ID NO: 108309 - protein, 412 aa, unidentified
MRVLHERCCGLDSHKKFVVACLLTASPDGTVHKEIRTYSAMTNDLLALADWLRAEDCGPVVMESTGSYWRPVFNRLEEQCEVVVVNASHVKAVPGRKPDVKDAEWLADLLRHGLLRASCIPAPAQRHLRDLTRYRIHLVDERARLTNRLQAVLEDANIKLASVVTDVRGLSAREILQRLRDGETDARALAELARGRMRAKREALAQAVVGRLQAHHVFLLREQLAHLDYLDAAIAPVDAELTARLAAEHEAIALLQTIPGIAQRTAEVLVAEIGTDLSRFPSAEHLASWAGMCPGNAESGGRRLSGRTRRGNPWVRRTLAEVANVAARTKNTYLAAQFRRIAARRGKGRAIVAVGHSVLVAIYYMLTRHQPSRDLGAQYFDEQARDHVQRRLVQRLERLGFAVTLEALPATS

SEQ ID NO: 108310 - protein, 365 aa, unidentified
MNANQVGVVANPGRLVVNQYVALDQYVALDVSLRKTSVCVLNSWGHVVTEADVPSEPGALISFIRTRAPHASRIGLESGPMSTWLWHALKAAGLPVICMDARHAHAALSVRPIKSDRNDARGLAEMVRVGWFKEVQVKSLGAHERMALLGVRRRLVDIRVEIDGQIRGILKTFGLVVGSGNKGAFAQRARMMAQDHPILSALVEKLLDVREVAAAKVAVLDKEIRRFVRDDPTLRRFLTVPGVGPVTALAFRATVDEPSRFRRARDVGPYLGLTPRRYQSGETDRQGHISKCGDRFTRTCLYEAANVLLTKVQRWSPLKAWGTRLAKRIGSKKARVALARKIAVILHCIWTDGTEFWWTKEMAAA

SEQ ID NO: 108311 - protein, 339 aa, unidentified
MKTTTIGLDLAKSVFQVHGVDAAGQATVRKKLRRAEVLKFFEALAPCLVGMEACATAHYWARQISALGHEVRLMPPSYVKAYLRRQKNDAADAEAICEAVTRPTMRFVPIKSAERQGVLALHRTRELLVRQRTMLINAMRGHCAEFGIIAPQGVRRLAELVEQVRQAQAAELPDLARSALLRLAGQLDGLAAEIHALERRLLAWHRQDQASQRLATIPGVGIITATALSATIVDPSAFRSGREFAAFLGLVPRQNSSGGKDRLGRISKKGDGYLRKLLVVGATSVIRRARTGPPAAAWIRSLLERRPARVVTVAMANKTARIAWAVLARGEVYRVPAVA

SEQ ID NO: 108312 - protein, 380 aa, unidentified
MTETTRTAECNAAPAPLMMALELGSTKWTLGVTTGPGQRPRVRTIPAGDLLTLEKEILVAKARFGLPLDAAVWSCYEAGREGFWLHRFLLAHGITNHVVDSSAIEVSRRQRRAKSDGLDVRKLLSMLIRYEQGEHQVWQVVKVPSVEAEDQRHLHRDLETLKRERASTTTRIQGLLSSQGIQVSTLAKLPEQLDTLRLWDGTPIPPGLRRRVLRVYAHHTFLTEQIAAIEAERRAQLQTSSEASIDRIRQLMMLKGIGINGSWLLVMEFFGWRAFKNRREVGGLAGFTPTPYQSGESAREQGMTKSGNRHVRWMTTELAWSWLRLQPDSALSVWFRERFGNGGKRLRRIGIVAVARKLLMALWRFLETGVIPAGAVLKEV

SEQ ID NO: 108313 - protein, 347 aa, unidentified
MKKIIIGIDISKEKIDASAIDVRNSQLGVLKLDYQAFENRPMGFRRMLVWARHLIKGVTQEEVMFCCETTGGYDRSLCDYLFAKGLDIWRESSLQIKKSSGLRKGKDDKADSLTIAEYAMRHMDKAVYYISPSETVRELKALLLYRRKLEQEKTSKKVRVAELKATAAKSKSVSFILRDAQKSIRALEKSIKECEKQILALYDSDEELKRSYDHLTSIKGISIVNATAMIAYTNNFKNITTSRKLASYYGIAPFREVSGTSVNKKAEVKCYSSSMLRAYLTQAAQWTIKEHGIYREYYLRMSAKGKCYGVILNNVKNKLLHLSVSLIANDMDYEENHEFLRAQRMAQ

SEQ ID NO: 108314 - protein, 411 aa, unidentified
MESLIVRCAGLDMHKKSVEACVRRWEASDRLQQETRHWGTMTRDLQAMADWMAAHGVTHVAMESTGVYWKPIYNILETRFTVLLVNARHLKQVPGRKSDIRDCQWIAQLLQHGLLKGSFIPPRPQRELRDLTRHRTQLVEEKGRTLNRIQKLLEDTNIKLASVASDILGASGRAILQALIDGESDPRKLADLAQRQLRGKIPELEKALQGHLTEHHHFLLQLLWKQLAQQEELLGELDTRIAEQTRPFAEQIERLDAVPGVDRRVAEVWLAEVGADMSPFPTDQNLASWAGMCPGNEESAGKRRRRRITPGNRWLKRTLAQAAWAASHTKNSYLASQYRRLAGRRGKKRALIAVGHSILVIFYHMLKEQTTYADLGAHFFDRLEPERLTRYYVKCLQRLGHKVTLETPVAA

SEQ ID NO: 108315 - protein, 438 aa, unidentified
MRAKCNDDLSTVNFSTIGLDVHKNRLVACAVHVQHDAKGREVHEKEYFESTGTYSGRQRLTEWCSSQNADLILMESTGIFWKAPFRDLEKADLHPVLINPRIFNRGSDKRKTDKSDATWLANLARLGLYRASFIPAEPYRSLRLVQSQIKSLVAERHRLKNRLVKVLDDSGFRFTVAFADIGGASSQSLIAGILEDAPREELALMIDPLCKKSIEEILDAVSEELSQINKDIVQSILRLIETHTKEIETLEQTVIRELKKCEKVKQNIRLMTTIPGVSEKSAQLLMSMIGPDFVENFSSPHAFARWLGVCPGNNESAGQIKSGRTPHGQRLIKKVLTECAQAACHTKGSHLAVLFGGWKHKGFCKAVMAVAHKLALLIHWVVVNQKPYIDKEFDYTGVFKQDGQRRPRWIRALRRYGLMTLADVEKEKAARGWIIAKA

SEQ ID NO: 108316 - protein, 391 aa, unidentified
MSMYFVGIDISKYKHDCCIISAADQKVVSKFTVKNDKASFVQLLTIFNSLSNPQDIRIGFESTAHYALNLELFLENANHSFMEINPLLIKEYKKSTSLRRTKTDSVDCESIARWLMTVEYKPHSKGFYHAYSLKSLTRLRDRLVRQRSFYLVKITNVLDHTFPEFKPFFHERLSKTALYLLENYGSAQKMARMNSVSYEKLRSVSRGKFSPQQFLWLKELAASTVGVNNSIFDVELNSLLTLYKSLVKEIDTLEKEILKLIEEVHPHYMSVPGIGPLSAAVIYSEYGDISNFSNPGQMLAFAGIEPGINESGTESHGGRMVKRGSSQLRYTLINCCLPLIRFDMTFAAYYARKRAEGKPHRVAITHTAKKLIRVIYALERQDMDFNIQKLR

SEQ ID NO: 108317 - protein, 416 aa, unidentified
MEVIVSRCAGLDVHKNTVMACVRVPGPNGGRTSTVRQFRTFTAGLRQLRDWLVAEQVSQVVMEATGVYWKPVWHVLDATPGLELMLVNAHAVKNMPGRKTDVADAVWLAELGECGLLRPSFVPPPVIAQLRDLTRYRKKLIEERARETQRIQKLLEDAGIKLDSVVSDILGVSARQMLEALIAGVRDVAALAELARTRMRPKIPQLRQALEGRFGAHHALMLRMHLEHVDQLSVSIDRLDSEVDRVIRPFRSALQRLITIPGVGRRTAEVIIAETGADMRRFRTAGHLASWAGMCPGNHESGGKRRSGRARKGNAALRAALCEAAWAASHARSGYLPAQYRHLLRTFGKKGQTRAVFAVGHSILVIAWHLMAHDRDYADLGGDHFTRTTDAEARERYLVRQLEALGHKVTLEPAAA

SEQ ID NO: 108318 - protein, 456 aa, unidentified
MRREKKAVGELSLECIEPNAAGIDIGAREIYVAVARDRDPEPVRCFSTFTEELGAIAAWLKRCGIVTVAMESTGVYWIPLYEVLEEAGLRVCLVNSQHVKHVPGRKSDVSDCQWLQYLHSVGLLRGSFRPEAAICALRALSRHRASLVEAAAVHVQHMQKALTQMNLQIHHVLSDITGKSGVAIVDAILAGKRDPQQLAKLADGRIHAERETVVKSLVGNYRSEHLFTLRQSLEAYRHYQKMLVDCDREIEQHMSQLPNQPNGGQPASSLQSNKRGKRRKNQFHFDMSKELYRVLGTDLTAVPGLSAMTVHTLVTEIGTDLRRFPNVASFTSWLTLCPGSKKSGGKVLSSKTRKSNSRLAAALRLAAQTLHKSHSYLGAYYRRMRARLGAPQAITAAAHKLARVVYHLISTRTAYDESVFAQEEQKQTIRHQQRLRKQALALGFQLVPISHQEVVH

SEQ ID NO: 108319 - protein, 354 aa, unidentified
MSQEKYIGMDVHQATISVAVMDAHGKLIMECLLETKAATIVEFIQGLHGSLSLTFEEGTSAAWLHDLLKPHVNRLVVCDPRKAALLKDGNKSDRIDARKLAEMLRTNQLKPVYHGEHGIRTLKELGRSYLTITKDVTRSMNRIKALYRSWAIPCAGATVYAPRHRAEWLAKITEPGVRIRAEPLYQQLDLLQPVRLQARRELLVESHKHCAVKLLRQIPSVGPIRSALLVALLQTPHRFRSKRQLWAYSGFAVETHDSGEYRCVRGKLQRNRERITVRGLNDNHNKDLKNLFKSAAISASTCPGPLQDFYVALVAKGIRPTMARLTLARKIAAITLTMWKKGVSFDPKQLHRQA

SEQ ID NO: 108320 - protein, 340 aa, unidentified
MRQLYAGCDLHGNNNFIGIVDGEGKRVFKEKLSNDLSVVRDTLKPFQGDLVGIAVESTYNWYWIVDGLMEKGYKVHLANPSAIQQYSGLKHSDDKHDAFWLAEMLRLGILPEGYIYPREERPLRDLLRKRGHLVRLRTSLVNSLQNILSRNLGKRVNANDVKALREDRVSLLLEMNEDLALAGRVSKEAIDHLTRQIRKIEGVVEKRIKLREEYRYLLTLHGVGKILSLTIMLETGPISRFPTVGDYVSYCRKVPSQWTSNGKRKGSGNTKNGNKYLAWAYSEASGFARQLYPEPRAYYNRKMQKSNAAVAHSALANKLSRAGYYVMRDQVAFRPEKLFG

SEQ ID NO: 108321 - protein, 429 aa, unidentified
MHYTQNQKLEQVTEKTLVIGVDIGSENHHARAFNYRGIEYSRKDFKFDNNAKGFEAFQEWMQSYVLMNGAKKVIVGFEPTGHYWYNFADFLKAQGIMFVMVAPQHVKHSKEMDDNTQRKDDHKDPRVIAKLVIEGRYIIPYVPEGIYAELRTAYVRYCELTESKVRLENRITRWLDIYFPEYREAFKDPGAKTGIMVLKIAPLPADVLKLGVDGINQLWRSVKVRGAGIKRAETLVAAAMRSTGREGGDAVRWDLWQMLEEYELVIRHLGQMQVMLEELVAKIDGEERLLRIKGVGFITVAGFFAEVGDLSRFTDPKQIQKLAGLAVVTPDDSGKHNGRSEISRRGRKRLRMILFRAAMSMVKSNREMKMLHEYYTTRERNPLKKMQSLMAIAGKIIRVFYGIMKNGTEYDPVKLLTDIRRPGTDKNAA

SEQ ID NO: 108322 - protein, 400 aa, unidentified
MRTVFGIDVSKASSEVAILVNGEKVYAYTMPNDIIGFSRLLEDLKTVSNPEIIFEATGVYSRRLQAFLEEYSYDYTRLNPLEAKKQLDGLRVRKTDKIDAEKLASSQFVLNRKPTYVQEEVYQNLHDLSRFYQNLTEDIVRTKNRLHKVLQIAFPEIENLLSTPTGEQYWNLVSIFPTKHWVLELSEAELKEAIRNSTSKRISENRVGNLTEKLVGLAKQSYSGISKTSPMVEEVKYDAQELIRLTNRREQVLQQLIALAEPLPEYEILLSIPGIAETTATSIIGELGDIRRFKSANQINAFIGIDLKHYESGDFLGQEHITKRGNPYARKILYKCIHNIASASHTNPCHIADFYEKRKRQSQITSTKPHTIASIHRLIRTMYYLIMHNKLYDYTLAQSH

SEQ ID NO: 108323 - protein, 383 aa, unidentified
MKEVTRIGIDLAKNIFHLVGMDGSGQVVWRKALARRKLREFLAQQKAAEVGMEACATAHYWGREIQRLGHRVKLIHPRFVTPYRKSDKNDFNDAEAVAEAMSRPTMRLVELKSLGQQDMQSLHQARRLLIKQRTQSANQVRGLLAEYGVVAPRGLGALRRAVAELSSEPPRVTPLMAALAAASVELVAAIESQLQAFDRRIQQACRTDERCRRLTAVPGVGPLTATAAVAKVGNARQFPTGRALGAFVGLVPRQHSSGGKTVLGAISKRGDRYLRTLLVHGARAALRTAAQHQDRLSRWATALKQKHGANVAAVALANKNARIIWKLLSTGAEFDPQHPATAAERAPAAQAGASTKNAGRRLAVRLEHERRSRGFFSPSSNHQ

SEQ ID NO: 108324 - protein, 338 aa, unidentified
MVYVGVDLHRKRSHVVALDPAGEVVLSRRIGNAPTEFWRIFGELEPQPIEVVFEATYGWSWFADLLADAGIPAHMAHPLATKAISAARVKNDAVDAKTLAHLLRTNLLAEAWIAPPDAREARRLVRTRAGLVRMRSRIQSQLHALLADLGVIPELTTLFGPAGRRWLAELPMPASARGRLDAGLRLIDAITVEVAHADADLRACFAGDHRVRRLLPIPGVGLVTAATVVAEVWDIGRFPSPERLCSWAGLTPGERTSDAHTRRGHITKQGSRWLRWMLVEAATTAVRDPQLGRFAAQIAQRRGPKIARVALARRLLTLCYYALRDDGGCRAYPAPSRS

SEQ ID NO: 108325 - protein, 376 aa, unidentified
MKNYSKFVGLDVHKADISVGIANGDRGEAGFYGTIENKPHAYLKIARKLSKGGEEILFCYEAGPCGYEVYRQLTKAGYDCVVIAPSLIPKKAGDRVKTDRRDAVNLARLLRAGELTPIWVPDTEQEAMRDLTRAREDMKAAERHSRQRLGGFLLRNGKVFPGLSKWTKTHFKWLEGLRFDTAVQQIVFQEYFDMVKHTQGRVAAMEEEMRKALTGWTLQPVVEGLMALRGVSLVTAMTLMAELGDLSRFESPRQLMSHLGLVPSEHSSGERQKRGGITKTGNSHVRRVLVEAAWTYKSPARKTAHLQRKAEKAGKVVQEIAWKAQKRLCKRYWYLINKGKLPVESCTAVARELVGFIWAIACEVTGKVAVSTTAKG

SEQ ID NO: 108326 - protein, 344 aa, unidentified
MEKFSRIGMDTSKQIFQLHGVDEVERVVLRRKLRRKEVLAFFSGLAPTVVGMEACGGTHHWARELLHLGHEVKLIPPQYVKPYVKRGKNDAADAEAICEAMSRPTMRFVPVKSAESQAALMLAGVRDRLVRNRVQLANAIRGYAAEFGLVAAKGRAKLEPLLLRLQADETMPALARGMFAEQAKEYTQLTAQLAAIDAKLMAWHRANEPSRRLAQIPGVGPVIASLLTMKTPDPQAFRSGRQFAAWIGLTPKDHSTAGKVRLGVITRAGDETLRSLLVVGATAVIWQVRRGKSRSASPWLLALLKRKPPKLAAVALANKIARIAWKLMATGESYDARRALAIAA

SEQ ID NO: 108327 - protein, 311 aa, unidentified
MEYIVGIDVSKASLDCHNLQDGTSWKVSNNAQSWEELSSQLESVKLVVVEATGGYQEGLVDTLLAKNLPVAVVNPRQVRDFAKSAGRLAKTDRLDAEIIARFGLALNPTPQTSPSEIKELRDLVNYRDDLLKLCSAQKNRKLQYRDPAIRDSIRKSLDALQKEITWVDEKIQAFIQTNKAIEAKASVLQAVKGVGPVLTASLLGLLPELGQIDNKAIAALAGVAPFNCDSGKYRGGRRIWGGRKAVRKTLYMSALVAKRYNPLMKAYFEQLAARGKSFKVAIVACMRKLLVILNAKMRDYYSLNAAQTKTA

SEQ ID NO: 108328 - protein, 403 aa, unidentified
MNMNAVGIDVSKGKSMVAILRPYGEIVSPPFEIKHTSGNIQSLIKQIKSIEGESRIVMEHTGRYYEPLARELSQAGLFVTAVNPKLIKDFGDNSLRKVKSDKADSVKIARYTLDSWTNLKQYSLMDEIRNQLKTMNRQFGFYMKHKTAMKNNFIGILDQTYPGVNTYFDSPARDDGSQKWVDFATTYWHVDCVRKMSLNAFINHYQKWCKRKKYNFSKAKAEEIYGAAKELVPVLPKDDLTKLILRQAAEQLNSASKIVEELRTLMNETAAKLPEYPVVMEMKGVGPSLGPQLMAEIGDVTRFTHKGAITAFAGVDPGVNESGTHVQKSVPASKRGSSVLRKSLFQVMDALIKTKPQDDPVYMFMDKKRAQGKPYYVYMTAGANKFLRIYYGRVKEYLMSLPE

SEQ ID NO: 108329 - protein, 346 aa, unidentified
MEHYAGIDVSLEWSSICVVDALGKIVKEAKISSEPATLVAFFEALGFAVKRIGLEAGPLSQWLHAGLKRAGFEAVLLETRHVKAALPAMTVKTDRKDARGLAQLIRMGWFRPVHAKSIRSQEVRALLVARKQLLGRLIDVELSIRGILRGFGLKVGPVTRKGFEARIRELVTGQATLERIAGAMLSARVALKAEYEKLHKTVLAIVRDDAVCRRLMTVPSVGPLVAITYKSAMDDPNRITKSKAAGALFGLTPRKYQSGEKDVTSGITRAGDEMVRTALYEAANVLLSRITRFSKLKRWGIDVAKRRGSKRAKVALARKIAVILHRMWVDGSTYRWTETQPIAAQA

SEQ ID NO: 108330 - protein, 323 aa, unidentified
MTRIICGVDIASKSLEARIGQQGAAGSFANDAEGINALGYFCRTHQAELVAMEATGGYEQQAFAQLSGQGLAVAILNPRAVRQFAQSMGSLEKTDRIDAGMIAWYAEVKKSQPVCLAPENQQHLRALVTRLRQLTEMRASQLNQQRLVTDRKVQASFKKLLALLTRQIGELEQSIAVLLGKDPLWRELDQAFRTIKGVADRTVARLMAEMPEIGTLSNKTISKLAGVAPLANDSGKHQGKRAVRGGRAAVREILFIVASVVGRHEADFIAFRERLRAAGKPPKVVRIALAHKLLVRLNAKAREVRQRLATLQPDSVVLLAELG

SEQ ID NO: 108331 - protein, 414 aa, unidentified
MAKNDRIVIGGVDTHKDVHVAAVVDDIGRILGTSAFPTTAKGLTELHAWMRSFGDVGRVGVEGTGAYGAGLARHLGGEGVEVVEVNRPNRQMRRRRGKSDTVDAEAAARAALNGEATVAPKAQVGVVESIRVHRVAFVSARSHRTQVALQIRDLIVTAPPELRAVLGPLATEERVARCARFRLTGDPADPSVGVKSALRSLARRHEALTIEMAELEATLDRLTAVANPALRGAKGVGTDVAAILLTAAGDNPGRLRDEAAFAAMCGVSPIQASSGKTQRHRLNRSGNRQANHALWRIVNVRLTCDPASKAYLERRTAEGKSRREIVRCLKRYVAREIFRLLVVPEAVPDGADLRTARIASGLSQTPVATALNTSVNAISRLERSRIFDTDLARRYELFLASISENESPPVPAAA

SEQ ID NO: 108332 - protein, 367 aa, unidentified
MSEDITYIGLDAHMETIHAAILLPGSPESVLDSFANTPDGILRFARRIKKRAPGPIESCYEAGPLGFGLQRSLIALGLGDVVIAPSLIPKKPGERIKTDRRDARKLADLFRAGLLTEVHPPTAEQEAVRDLCRAREAAKGDQKRARHRLSKFLLRRSIRWTAGRKAWTQAHQEWLRGRRLPHPADQAILDDHLLALEQLEGRLHAFDEQIAALAAQEPYVEAIGHLRCFRGIDTLTALSILTELHDVQRFASPRQLMAYLGLVPSEHSSGGVEKRGALTKTGNRRVRRLLIEAAWHYRHRPAVGYRLKKRREGQPARVIAIADRAQQRLHRRYRRLLERGKPHNKVVAAVGRELVGFVWAALQPQES

SEQ ID NO: 108333 - protein, 386 aa, unidentified
MKNQIKPIHDRNTSTPSPGQSNPAVAAAPAPPAPVRHVFTLGLDVDLLNVVTAIQCDRGAIALAQKFSRAQLLAWVQKQTAAGHEVHTVYEACGFGYTLHHALVAAGAHSLVTTPMRLSPERRRKNDRLDARALCVRLSRHREGHAHELKPIRIPSAAEQQRRELGRQREFFKRERGRLENHGRALRIEFEHETLPAGWAGPRKWKQIAPQCSEFVRGQLEPVVLQIRACQARMQELTARIQATVAQEKIPTGLGALTVALLEGEVCDWKRFRHRKAIGSYTGCCPSEHSTGGVQRFGHIDRHGNKHVRVLLVEAVWRLLRWQPDWHARVKYLQKLKHGASLKKKIAVALARQLAIDLWRWRTGRCTAAQLGWTVESAKDEAGTAQ

SEQ ID NO: 108334 - protein, 334 aa, unidentified
MENIALIGIDLGKNSFHIHCQDRRGKAVYHKKFTRPKLIEFLATCPATTIAMEACGGSHFMARKLEELGHFPKLISPQFVRPFVKSNKNDFVDAEAICEAASRPSMRFVQPRTESQQAMRALHRVRESLVQDKVKTTNQMHAFLLEFGISVPRGAAVISRLSTLLEDNSLPLYLSQLLLKLQQHYHYLVEQIKDLESQLKRKLDEDEIGQRLLSIPCVGTLTASTISTEIGDGKQYASSRDFAAATGLVPRQYSTGGRTTLLGISKRGNKKIRTLLVQCARVFIQKLEHQSGKLADWVRDLLCRKSNFVVTCALANKLARIAWALTARQQTYVA

SEQ ID NO: 108335 - protein, 337 aa, unidentified
MNVTLIGIDLAKNIFQVCGVNQAGKSVFNRAVKRSQLLATLRHYPDAVIAMEACSGSNYWGRELLKLGYEVKLIPPQHVKPFVKGNKNDRNDAFAICEAAQRPNIVFVKPRTLEQVDLILVHRIRERRIRERTALSNQIRGLLNEYGIVFRQGKTPFITELPEILATENNGLTVTARRYIRELLDELRTIDAAIKTTEKEVQAQAKNHPDAKRLTGIRGVAEMIATAVVSFAGDGSGYKNGRHFAANLGLVPKEFSSGGKQKLGSITKRGNSHLRRLLIQGAWSVIRYADKSNDRISQWALKLIERRGKHKAVVAVANKLARIIWATLFYRTEYRPN

SEQ ID NO: 108336 - protein, 344 aa, unidentified
MTNIQHKETAHKTKPDLFAGIDVGAEELILVIRKNGKLFDPQKFANTPADRDRLVKKLVKLPGIMVCLEATGIYHFDLSLAFHDAGVLLMVVNPKASHNFAKVLMKNSKTDAVDANTLAEYAARMDFVAWTRPSDETIALRSFARRINALTGQKAAAKNHLHALNATSETPKAVLKDAKLAITQLEKRIDRLTDEALVLIGKHPELKRILALLIGIKGVGETSAIALMGELLLLPPDLSHREWVKFAGLDPRAFDSGKSVHKKTRISKAGSRHIRAALYFPALSAKQHDKHVKAYFQHLMDNGKTPLQGVCAVMRKLLHAIHGMLKNNEPFDNTRFYAIPESNG

SEQ ID NO: 108337 - protein, 464 aa, unidentified
MTVSKRLWRNRKERKEWARRLQSEDPGLEVVHAHAGGIDVGNSAHYVAVRPDRDPEPVRRFECFTADLHRLADWLKSCGVKTVAMQSTGVYWIPLYEILEEHGFEVYLVNARHTKNLPGRKSDVQESQWLLKLHTYGLLNNSFQPVSEIRVLRTYWRQRGEHVRGAATCIQRMQKALTRMNLQLANVISDISGLTGQAILRAIVAGERNPLKLAALSDPRVHASQEEIAKSLEGNWRPELLFVLQQEVDMYDTYQKRIAECDQRLQKHLASLTHPLQVQPSTQKPKTKKPAAKNAPRFDLSSELQRVTGVDLTRIDGIDVMVAQTLLSEVGLDMSRWKTESHFASWLGLCPDNRISGDKVLSRGTRRVVNRAATALRQAANTLMRSRSYLGAQYRRLRTKLGAPKAITAMAHRLARLVYRMLKYGQTYVDKGTEYYEERFRQQQIQLLRKRAARLGLRVAEIPA

SEQ ID NO: 108338 - protein, 350 aa, unidentified
MKKITTLGVDLAKNVFQVHGVDLAGKAILAREVRRSHLMKTIAQLEPCVIGIEACGGAHYWARRFAEHGHQVKMMSPQFVKPYRKSDKNDRNDAEAICEAVTRPSMRFVAVKSVEQQDMLTLHRVREGLMKERVALINRIRGSLSEYGIVIAKNVSNLRRELPGILEDAGNELTVMARQIFNELYDDLSAREERIAQVERSIRMLGSQHEVVRRLETVPGIGYLSATALFGTVGDAKQYKNGRQLAAWMGLVPRQFSSGGKQRLFGITKRGDKYLRKLLVHGARSITTRAEHKPQPQDHWLNELRVRRGKFRSYVAQANKTARIAWAIMARGEVNRVPTATLETSVAVAA

SEQ ID NO: 108339 - protein, 407 aa, unidentified
MQVLYPRCAGLDVHKDTIVACVRCVSAPEHHEVQSFSSTTTGLLALSDWLASHLCTHVAMEATGVYWKPVWHVLEDSFELVLGNAAHIRNVPGRKTDVNDAMWIADLLAHGLIRSSFVPPAAIQELRDLTRTRKQLAREIAQHCLRIQKVLEDANLKLGSVLSDVLGDSGRAMLKAIVSGEDDPVRLASLAQGHARRKTSELREALSGRVTAHHRAMLGLHLQVIDALEHALADLDAAVGLALTPIRQHVQLLRTIPGVGDLTARVLVAEIGVDMTRFPNPAHLISWAGLCPRNDESAGKRRSTRVRKSGTWLKTALVTAAWAAVRTKNTYLHAQFLRIKARRGAKKAIVAVAASMLTAAWHMLRNGVEYKDLGPDYFNRHDMQGTVKRLLKRLTDLGYPVQPASPS

SEQ ID NO: 108340 - protein, 343 aa, unidentified
MEYYVGLDVSLKQTSICVVDQTGSVVREGVVDSDPEAISVYVRSKAPGAVRIGLETGPTSTWLWTELKRLGLPVICIDARHAKAVLKMQINKNDRNDAIGIARIMQTGWFKEVHVKDIDSHSVRALLASRALLVKIKRDLENHVRGLLKNLGLVIGRATFNVFAARAEELIEGRPDLVAAVRPLLEARNAVEQQVSELDRKVMKLARRDAQVQRFMTVPGVGPITALAFKATIDDPARFARSRSVGAYVGLTSRRHASGEIDWSGRISKCGDAMLRSYLFEAAGVLLTRVPKWSTVKAWGMRLAKRNGLRKAKVAVARKLAVILHRMWIDGTEFNWSKKEIAA

SEQ ID NO: 108341 - protein, 366 aa, unidentified
MKKNSTVATSRKKIFRGPELTIGLDLGDRFSHYCVLDAAGKVVLERKLPTTPKGIHDVFGKLPRSRIALETGTHSPWVSRRLTQFGHEVIVAHARNVRLISESSRKDDQLDARTLARLARIDPGLLGPVRHRSAQAQIHLTVIRARAALVSTRTALVNAARGLTKSYGERLKKCGTEQMNRDSSQGLSQELRDALDPLLREIESLNERIAEYDRRIEQIAKEVHPEVALLKQVKGVGTLIALTYVLTLDDPHRFRRSRDAGCFLGLRPGRRNSGQSEPQLHISKEGDRYLRTLMVQGAHYILGPFGQDSDLRRWGLQLAERGGTNAKKRAVVAVARKLAVLLHKLWVSGEVYEPLRNNQKVEGAVA

SEQ ID NO: 108342 - protein, 424 aa, unidentified
MDAKKQNSWEQHRYYMGLDWAKQEHAIAVVDGNGRIMVETTIKHTAEGWHRLREKLIDLAGPDLSFVAATIETNRGPAVERLLELGCVVYPINPNAAKCYRSRKSPSGNKTDRLDALSFADALRTDGHGWRPLNPEDPKTQELRLLCRDEMSLIEQRTTLVNQLQQALHEYYPAALEAFDDWTSPSSWAFVERFPTPEVLKKAGKRHWEKFLHTHRLYRPETYQKRIEIFASATEFCGSQAVTNAKSMLAVSLAKQLRLLEQQLKAYRERIDALFQAHCDYSIFASLPGVGQKLGPRLLGEFSDDRDRFPAYEGLQCYAGTAPVSFQSGQIHRVRFRYACNKNLRAAVHLWANLSRKKCAWAQVYYNQKRLEGKSHACALRCLGQRWLKILWKMWQTKTPYDEQMHTRNQIKHGSWVLALTASK

SEQ ID NO: 108343 - protein, 361 aa, unidentified
MTKGSTGMGTEAATDFIGLDLSDKTATYVVVSAGGEVIQEGRLKLSQAGLNKALGARPPAQVAIEVGAHSPWVSRALKGLGYAVTVANPRQVKLIADSPKKNDLLDAENLARLLRYDPAMLRPISHRGEAAQADLALLRSRDALVQARTRLINSARGMAKAAGGRLPSCSAESFHSKVRDHLPELLKPALEPMLPAIASLTEQIRTATRQLEKLADDRYPETRILRQPKGVGYLTSLGFVLTLEEPQRFAKSRSAGSFVGLTPRQHDSGESQPQLRITKAGDPFLRRLLVQSAQYILGPFGEDSDLRRWGLKLAGEGKNKIRRKKAVVAVARKLAVLLHRPWLTGDVYEPRRQAEPEQEAA

SEQ ID NO: 108344 - protein, 313 aa, unidentified
MHLQTSFVGIDVAKATLDICLRPCGERWSIPNDEVHMTELVQRLQQLQPVLIVMEATGGLEVPLAVALALAALPVAVVNPRQVRDFAKAVGILAKTDALDAGVLARFAESVRPIPRPLPDAQTRELEALVARRRQVVEMLTAERNRLRTALPSVRPRIANHIAWLEDELHQLNDHLQYAIHNSPIWREKDALLRSVPGIGPTVACTLLAGLPELGYLDRKQIAALVGVAPLNCDSGKLRGKRSVWGGRPQVRAALYMAALAATRCNPVIKAFYQRLREAGKAPKVALTACMRKLLTIVNAMTAHRTSWRFGLA

SEQ ID NO: 108345 - protein, 385 aa, unidentified
MEVVGGKAAKRSEAGFPPTTGDRSIVPGPIEAVTKRDRRRSRGTSPNSRQSRRLPSSSHLQDGDHSMDGSIALFAGVDVSKRSLDLCLLPDDRRQSFTYDEQGLAQLSKALPAPGTCRIVVEATGGYQRAVVAELVNAGHQVAVANPRQVRDFARGLGILAKTDRIDAYVLARYSQQAEPRTVAQVSEKAAELEQLVVRRRQLVQLQTAETNRKHASSSKSVRTSIQQVIVVLRKQIDQLEQQILALVESDDDWKDKMDRLGSVPGVGPVTAASLLAELPELGQVNRQEIAALVGVAPFNRDSGRFRGKRSIWGGRASVRSVLYMAALTARTHNPILRDFAKRLEAAGKPFKVVITACIRKLLTILNTILKDGTSWRLEKSLVNA

SEQ ID NO: 108346 - protein, 371 aa, unidentified
MERYYVGLDVHSRESVFVIKRADDIIARGTIPTTPAGLEGLRAAHQLPPGTRVALETGTSAFFVARELARLEFEPQVIDAHEVRRKALRPQQKSDSRDALELCEGLSRGFYRSVVHIPSPAISTLRTTLSRRRHFVRLQVAEVNAVKRLLRGVGREGGRRGSLRTDGHWTRLLDSDVIPAELAGHVRCHYAVWRQAAEQVRALDHALGEQAKDLRDLVHRLETVPGVGPIVALTTIAVFADVTRFESAKHAASYSGLVPSTFQSGDRDAHGHITKRGSAELRTMLCEAAHHARRPTHPLHPHFARVATRRGYKTAVVAVAHRLCRILFAMLRDGVDFNPARLGIEEGHFTRTTTYKYRLTPKPAGRLAAAD

SEQ ID NO: 108347 - protein, 336 aa, unidentified
MQQQQYVGIDLHRRRSVIVRMNGEGEKLSCVRLPNDPVEISAEMAKAGESPEVVIEACYGWYWLVDMLKDQGASVHLAHPSGLKWEGRRLKNDEIDATDLADRLRMHRLPEAWIAPPEVRELRELVRYRAKLVALRSGLKAQVHAVMAKQGILPQLDDMFGPGGQALLDAMPFDRAYALRVESLREMIDAFDKEVALFEREVHKLLRDDKGYRAVQAIDGVGKTMAAIFVAEIGDVTRFSSPDKLCCWAGLTPRHDESDTKVHRYGISKQGAKLVRWAAIEAVARYHGGAPIKPFYSRVADRRDNKVARVAAARKLLTLVYYGLRDGEVRCLAKAR

SEQ ID NO: 108348 - protein, 335 aa, unidentified
MYKCMNNFYFIGVDVSKKKLDFCVMFENKVVHEDVVANHPSAVTALIHQLEDEFGISNAQMLVCAEHTGQYTYPLVCACEAAECKLWLEHPSIKYSSGVQRGKNDKIDAKRIAIYAARFEDKVRLYERPDQEIERLKQLEAERSLYVVDLAKYKAQMKDQKEYMPKSIYKEKVKRLKKLMKNLQEVIDSITEEMECIVNSTEILSRQYKLLQSIDGVGPVVALNMIVVTEAFTRFDNARQFNCFAGLAPFRYTSGSSQHSRARVSHRADKCIKTLLHLSAVAVISKAGGELKEYYLRKVEEGKNKMTVINALRAKIVARMFAVIKRNEFYKPIFY

SEQ ID NO: 108349 - protein, 328 aa, unidentified
MENERTYLTEWELEDLGKFVKKLRPSDEVAVEITGNTRLFFDAVAEHVARVVVVNTNQFRVIRQSVKKTDPNDARTLALYLSKNLLPEVRMKDKERGQLASLTQTRDKLVKLRTALKNKINNILSARGLNLPKEALSSEKKLAEVLELPFDAIVRIELRVIVEQIRSLNKSIAELEKVIGEEGSKREGHKSLSSIKGIGKITGAILLSVIGDVNDFADEGHLARYFGIVPGVSNSNETERSGRIHKRGTKLGRTALVQSALIAANYSPYLKRFYEQVKARRGAGKAIIALAKKYLGIIYRRVYKDLCKRSLHLKEENVWKSKKKFWTN

SEQ ID NO: 108350 - protein, 347 aa, unidentified
MTKLMAGIDLHSNNLMIGIVDEHGQRLKHQKLDCNLHQVLRFLAPFKPRLKSIAVESTFNWYWLVDGLRARSYPVVLANPARIDQYSGLKHADDQSDAFFLAELQRLNILPQGYIYDPTLRPVRDLLRRRLSLVHQRTALMLSFKSLYARTTGQAMSLSQLKGLNLEQAKGLYEHPANQLIAKVQKEHIDQLTESIALIERAVLKSARELPAYEKLQTLPGVGRILGLTITMEVGDIRRFATPGEFASYCRTVNSQRLSNGKKKGENNQKCGNKYLAWAFVEGANFAKRYDEPCRRWFDRKAAKTSTVLATKALACKLAKAAWYLMAEGIDYDEKRMFPEGMRPNMK

SEQ ID NO: 108351 - protein, 397 aa, unidentified
MKILAMDVGKSKTVGYAVNTATGEAAFEAVATTPTVIRRWMQKRRPDRVVMEIGPLAGWIHDAVRAEGVREVQVANANHEAWRWRNVRRKNDRLDAAKLADLSAAGQLPTVHMPTAAVRQWRQLIAYRSKVVDRRTAIKNSIRAILAAVGQTAPAGRAGWKKETLKWMQGEARPLESVGAEDLWRGQLGLELKALDGVNEQIEAVEKKLAALGQADSRVRRLQTIPGVGPRLAEMMVALVDRPGRFRSGRQVGSYLGLVPRQWQSGSSDRRGHISRQGCRLARKLLVEVAWVTVRYNPQFRRMYERLHGGSPARKKIAIVGVARHLAVTMWAMLRDGTSWRPPASDSEKAPCRPPAPPRARGKTRTTTVRRGEALPPHTPPPSQRKGKKDMMTTAKA

SEQ ID NO: 108352 - protein, 411 aa, unidentified
MHHRQNYLYVGVDLHKEQHTAVMINCWQEKLGEIQFENKPSAFSKFLLEVETYVCDGITVVFGLEDVGGYGRALAKYLVDHERVVKEVNPALSFLERKSQVMIQKNDSWDAECVARILINKFNQLPDAKPNDLFWSIQQLDSRRNALVKAQSALKNQLHIQLNHHYPSYKKFFSELDGKTALAFWQQYPSPSCLEGVNIKQLTAFLLDVSNNTCSVKKASDILKLVKEDGQTMKEYQETRDFLVRSIVRDIEFKKKEMKYIERELKRLVNLLGYQLETMPGIELVTASALIAEIGDVRRFPNANKLARFAGIAPVYFGSGGKGKTHKSKQGNRALHALFYNLAVQQVQVAKGSKLPRNPVFHAYYQKKLKEGKTKGQALVCIMRRLVNIVYGMMKYKTAYELPVVEEKEVV

SEQ ID NO: 108353 - protein, 462 aa, unidentified
MQCRFWRAGLPTCGVRALLLVKESGNLPHSGEAADKLDEDGPCAIPRISSRRLRSRVRKQEPAAEQEGDPMIYAGVDIAKADHVIGAVDETGAEAAKPMAFKNSEAGFERCIAWPESVAQTEDDVFVGMEATGHCWMACFAHLTAAGYRVCVVNPMQVHAMRRLKGLSGVKNDRIDSLLIAETLGQGDYDQTRLAADEVQALKQLTRYHQGLKRELATVKTQAICVLDAYFPEYAGLFSDMFGAASLKVLSECPTPSEAARKRASSIAKMPSEGSHGRLGAERAARIKAAARSSVGIRLGEDAASFQIKTMVSQIEFLNATIAKVEREVGMLLERIEPNITTIPGVSTTTGAQIVAEVGDVKRFKNAASIVKYAGLNSGVDESGKFSAEGVPITKQGPPYLRRSLWLAANRARRFDPRLKAFYDKKRREGKPHRVAVTAVARKLCHVVYAVMRDGEPYDPGK

SEQ ID NO: 108354 - protein, 344 aa, unidentified
MDHYAGIDVSLERSSVCVVDTTGKIVRETKVASEPEALIGWFGSLGFGLARIGLEAGPLSQWLYAAMKKAGLAVELLETRHVSDAFKAMTVKSDRNDARNIAQLMRLGWFRPVHCKSITAQEIRAMLTARKLVQSKLQDLENSLRGILRGFGLKVGKTTRTTFAGRIGELVKAHPNLQTIGEALLRVRAVLLAEFNGFEKHVRATSRLHEKARLLMSTPAVGPIVSLTFACAIDDPSRFTSSKRVGPHFGLTPKRYQSGETDYTGRISKHGDASVREALYEAAHIMLTKPIKGCSELKSWAMRIARRAGINKAKVALARKLAVVMLRMLKDNVPFNPAAKAATA

SEQ ID NO: 108355 - protein, 293 aa, unidentified
MILIGVDPHKSSHTAVAVDPAGHLVAQRRFVVNAGTFRQLMRWCEQWPERRFAVEGARGLGRTLAQQLAAAGDNVVDVPSTLSARARLLTTGGDRKTDAKDAFHVAQVALFRHDLRPVEPEDQTTILRLLTERHDDLVHERTRVLNRLHAVLRDLLPGGAPTGLSADKAAVAMKAIRAVTATDACRRDIARNLLADLRRLDRQVKDNEAEMRDALAVTRTGLTTLPGLGTVLAAKVIGHVGDVSRFPTEHHFARYTGSAPLDASSGNNVRHRLNTRRSASRNSSTRPTRSLSR

SEQ ID NO: 108356 - protein, 355 aa, unidentified
MNDAKYIGLDVHQATISVSVLDSSGKLVMEAILETKAETILQFLRGLRGSLHVTFEEGTCASWLHDLLKPHVAQVLVCDPRKNTLGKVGNKNDRNDARELAELLYRNKLKPVYHGEHGVRTLKELARSYLTITRDLTRVMSRLKAIYRSWAIPCAGQQVYAPRYRAEWLAKISEAGVRRRAEFYYQQFDALAALRQQARRELLAASREHFAVKLLCQIPSIGPIRAALLVALIQTPHRFRTKRQFWSYIGLALKTYGSGEYRFVGGQLQRSKKALAIRGLNLNHNHDLKNIFKGAATWAAATSGPFQNFYEACLARGMKPSMARLTLARKIAAITLLVWKKGVRFDAEYLKQQAA

SEQ ID NO: 108357 - protein, 413 aa, unidentified
MDENTTSAGIDWAKDEHALCVIDEAGRVVFERRFAHDEDGLAQLCLELVDNGVWRVAIERPDGVLVERLLDAGLVVLAIHPNQLKAARPRFRASGARAKSDAFDAFCLAELARTDHHRFRALTPDSDQTKALRVLTRSREEMVTTRVALANRLRAELEAFWPGAAILFSEIDSAISLAFLRRYPSPKDALRLGEKRLESFLSHNHYCGRKDASELLQRLREAPKGRAGEAEIQARREAVLGLVATLKALLEQIKLLEDRIAKAVRAHPDGEVFLSLFLGHNTTLTAACLVAQIGDRRDRYPTNEAMAAAAGMSPVAVESGKRKVAGFRRACDKRLRKAVATLAESTRHHNRWAKDIYRRARARGCDHAHAIRVLGRAWVRVIFRMWREGEPYDPARHGGLRRLQSVEGLSQGV

SEQ ID NO: 108358 - protein, 447 aa, unidentified
MWIRNKKHIKKTRRFQTMKNASRSNRKLEAITYKTIVVGIDIAKSRQWARFVDYRGMEIGKAVSFNNDREGFEYIVSEIRAKIKMFDAEKVFVGMEPTGHYWKPLANYLMKQNITVVLVNPYHTKKAKELDDNSQTKSDKKDALTIAKLVKDGRYYDTYMPHDKYADLRVLTTARISLNDKKSAIENKITAVLDEYFPEFTTVFKHPYKGKASMQILKSCPLPKDIKVLGIDGVLTEIKKAVKRTVGRKTAGKLVNAASISIGVDYGEAEATFKIQKLVEELELVNKQLEEIKERMGNILDDLDIGKYLLSVNGLGVVTVAMLLGEIGDPLRFDDAKQISRLAGYNLIEDSSGKNKSGTAISKRGRKNLRRVLYQISLTMVATNSEMKQLYHYLKTRKENPLKKMQALVVIGKKVLSLIYALAKKKEYYHGDRVLGAVRQSQLLLAA

SEQ ID NO: 108359 - protein, 482 aa, unidentified
MAKRKMSTFERLRSGSMNRQERKEWQQRLYAEDAGLEAVHPDAAGIDVGNASHFVAVPADRDQQPVREFGSWTADLQRMAEWLKRCGIRTVAMQSTGVYWVALQEVLERDGFEVCLVNARGTKNLPGRKSDVQECQWLMKLHTYGLLRNSFHPPEQIRAVRTIWRQRDRLVKEAGREVQQMQKALTTMNVQLANAISDVSGLTGQAIIRAILRGERDPQQLAKLRDYRVAASEAEIAHSLEGNWREDVLFELQQVVDAYDFHQKQIAACDVQLQKYLSALPIRSRPGAGEQSTADAPSEKPNKQRRHKLQKNQPTFNLAAELQRTMGVDVTAIDGVDVMTTQVILSELGPDLSTSFPSEGHFASWLELAPRRDVSGGKVLRHQSRKSNNRVATALRMAAQSLWRSDSYLGARYRHLKARLGGQKAVKAMARYLACLIYRLLTKGKAYVDRGAAHFQSKRTERELLALRRKAAELGMEVVAVS

SEQ ID NO: 108360 - protein, 418 aa, unidentified
MLVAGIDIGAELHHVAVVDDAEAVVVKATSFAEDAAGYQKLFELLGRAGARGGADLPLAPASAPPERTLVVMEATGHYWQNLFAALVAEGYAVALVNPLRTHRFAGEELARTKTDNIDCLQIARFGAQKRPAPTGLPEMAAEELRELVRLRTRLIQETVARVNQLHRLIDLGFPEFTRYLSDLNTELANAILRQYPTAQTFRALSPRRLAKLSYDGRHRVGEEIARNLIEAAKISVGSQHSPAHQTGVRYACEDLQTLRTRLKRLEAEISGKLEQHQVGKLLTTIIGIGDCTAAMLLAELGDPARFQSAGALAAYVGLCPGHKHSGKHQPRSSSLTPFGNRRVRQALWMPTLGAATQRNPWLMAFYRRLMERGKPHKVALIAAMRKLLVAVYSVAKNRRPFVPFLNTQPAARFDYEKA

SEQ ID NO: 108361 - protein, 355 aa, unidentified
MESTKFVGLDVHKDAITIAVMNSAGKLIMESIIETKAITIRQFIQGLHGDLHVTFEEGTWAAWLYDLLKPYVTKVVVCDPRKNTLLKVGNKSDRIDPKKLAELLRNGALSAVYHGENGLRTLKELARSYLTISKDLGRVMNRVKALYRSWAIPCAGTQVYAPCHRSEWLSKITEAGVRRRAEHYYQQLDALQTLRREVRKDLLLESRKHNATKLLRQIPCIGPIRAAQLVALMQTPHRFRTKRQLWTYSGLGLETRDSAQYCYVEGQLQRSKKPQQLRGLNSNHNHDLKNIFKGAATTASVSAGPFHDFYQALLTKGMRPTMARLTLARKIAAITLIVWKKGVRFDPQHLKQQAA

SEQ ID NO: 108362 - protein, 338 aa, unidentified
MKLYGGIDLHSNNSVVVLIDEEGREILRKRIANDLIKIVSLLEPWRSNLLGVVVESTYNWYWLVDGLMESGFKVHLANTAAIQQYSGVKYTDDTSDARWLSELLRLGILPEGYIYPKEQRTARDLMRKRMQLVQQSTLNVQSIQGLYARHLNKRISANKIKQLTAEQVDVDFLIPHVALAVKSNLVVMNCLQEQINTLEKVLKKDLRLERAFEQLTSIDGIGLVLALTIMLETGAISRFDTVGDYASYCRCISGAKFSNGKKKGNTNSKNGNKFLAWAFTEAANFAIRYNETVKQYYQRKLAKTNKVVAIKTVAHKLARACFYVLRDQVEFNVQKAFM

SEQ ID NO: 108363 - protein, 373 aa, unidentified
MNYNTVYVGMDVHKESFTLCSCKYEDEKASHYQRTPASYKNVLRYLAFLRTIYGEDTRFVCGYEAGCLGYSLYHQLENFNVECVILAPTTMLEQRSKRRIKTDKRDAEIIARSLAQHNYSPVHIPTETDNQTKEFIRMRDDHKAELKKIKQQILSFCLRQGYQYDGSGNWTAKHVKWLRSLKPAGLYKEILDEYLLTYTILTDKLNRLDQRIEELASKEEYTESVSKLTCFLGIKTHTALSVIVEVGDFQRFCICTKSFAGYLGLVPGQHSSGDDRNGLGITKAGNTHVRRLLVESAQSYTRGKIGYKSRVLRSRQAGNSPQVINYADRANERLRRRYYKMVLKDGKKYNIAKTAIARELACFIWGMMTDNIY

SEQ ID NO: 108364 - protein, 347 aa, unidentified
MIKHSMTVAGIDTGKTELHVHFLPSEDGFVVANTAEDIAELVARCRKAGVERAAIEATSIYHRRAARALAEAGIETLVVQPRQSRAFANAVLQWAKSDAIDAWVIARFAQVMDVIMPLASGQIEALAETLTFIEHLEERLAWLKTSRERFTDQRLLKAIAADIKRLGQSRRKHLRVLEASLRKDKDLAQRLDLLLSIPCIAERTALSLLIRMPELGSISREQAASLAGLAPVVRDSGNAKGERHIYGGRDRVRKALSMAAFTGLCSGTVNSRLATGTFSPEASITLRPSLPAPESSSSSQTPSSPAKHRGSRDRSCLDLKPKTLWLLLSQCSALGPFPPPASRAGGH

SEQ ID NO: 108365 - protein, 400 aa, unidentified
MDKAQTAWAGIDVGKTHHWVCVLDAEGNKLSSMKVSNDQTEITATIATVGALADRIVWAIDIIGAPSAMLLALLTQAGQSVRYASGRVVAAMSAAYSGEGKTDAKDAYVIAETARIRRDLTVIAPGTDLVRNLELLTGHRADLIADRVRMINRLRDVMTSVFPSLEREFDYSSCKGALILLTGYASPERLRRVGETRLAGWLQRRRVRNYAAVAARAIAAARAQSVTLPGQEIAAAIIAELATSTLALDQRLTELDAQIAATFDEHPQAEIIQSMPGFGPILGATLLVAAGDLAAFPSAGHLAAAAGLVPVPNDSGRRTGNLHKPRRYSRPLRHVFYLSAQTSMMRDGPNRDYYLKKRHHGRTHTQAVIALARRRIDVLWALLRDERTYTATPPALAQAA

SEQ ID NO: 108366 - protein, 385 aa, unidentified
MSELNDLSRSLTSLEQDKTIIAVIEMSQSSWLVAGIIPGIERHPLKKLEPSEEELVRLLMRWRTEATKNGHTITRFAVAFEAGRDGFWLARWLRARDIETYVIHPTSVAVSREHRRAKTDRLDTGLLKRVFIGWLRGEPDHCHMAAIPTLAEEDAKRPNREREGLVRERTRIVNRMKSCLARFGIRNFKPTLRKAPERLAILGTPEGVPLPPNTLLELRRDMARLRFVMDQIKEVEETRAQRLEQAPQEKTHAMVRLIARVIGVGIETADMLVHEILSRQLRDRRAVARYAGLTGAPDESGNKRREKGLAKAGNARVRRGMIQLAWRFLVFQKDSALARWYRTRTESAGKKRKTMIVALARKLLIALWRLVTIGEVPAGVVLRAA

SEQ ID NO: 108367 - protein, 344 aa, unidentified
MAIVGGLDIHRRQITYDWIDTTTGETRRGQLSPATRLELRGWLARFTGQQADFALEATTGWRFVAEELECAGFRAHLAEPADTRALRGPKRRAKTDRTDARHLRELLRAGTLPESWMPPAHIADARTQVRLRCALVGERTGWYQPIHAILFHHGLPERSQLLTADGRAWLARAELPAVARQAVELALRMIDHLEVELDTLDAQLAGIARVQPGCQALQRRYGIGWLTAVAIWAEFGDVRRFANSRQAVRFTGLDITISESDGKRARGHLTRQGSPVLRWALHEAAMSAARPGSPDHPYYLQVKQRLGGKRAALSVARKLAREAYHTLRDLGDQALVPAELPTAA

SEQ ID NO: 108368 - protein, 423 aa, unidentified
MEVESIDYAAWIGLDWGSQKHAICVKPADSETVEHYTLEQKPEALHGWFMNIIARFGGRKVAIAIEQTRGAVIHFLLCLECVHIFTIHPKSLKNYRDAIHPSGAKDDPTDAELLLQFLTLHQHRFKPWIPDKPEVRLLVRLVEVRRKMVGKRVRLTNELTQTLKEYFPAALDCAGDLDKVMACDFLAKWPTLGKLQETQPETIRNFYKEHGSRRRNVIEDRLKQIRSAVPLTTDAPVIEPSVFLVQSIAPQLRSVIDAIARFDRRINEVFEKHPDAQIFSSFPGAGAALAPRLLAAMGSDRSRFSSSVEVAEYSGIAPVTERSGKSKWVHRRFACAHFVKQSFHEFAAHSILFCDWARCYYDQKKRDGKKHHAAVRALAYRWIRIIYRCWKNRISYDEDKYLKSLRQRKPAWLESLPSVNLKP

SEQ ID NO: 108369 - protein, 410 aa, unidentified
MVERFVGIDVALREHRIAVLDRDGEAVGQSFTIAASTDGVATLLRTLGARGATAAQTLIGLEASGHLWENLEAALVGAGYRVIVLNPLQTRRYRDVVRRKAKTDDIDAHVIAGLLRSGAAQASYVPDEQIQSLRELARLRARLMADRQDYLRQLVAQLDVVLPEHRTVLGDLLTARARGILAQFPTAPHLAHANPRAIRRAAEDAGARGFSLNDATVVRDRARRSLYSGKAAAARAHVVRTLVSQLERLTSAIDEVDRAATALLPPSAPGTGPSDAELRQTIPGIGPQTAATLLGELGAFTRFTDARALVAYVGFYPVINESGDRAAPPRLSPVGSRIARHSLYLAAVNAVRRSAEWRTIYLRKKAQGKTAKQALVVVAVKRLHALYAMLKHRQPYNPSRLLVAPATIGS

SEQ ID NO: 108370 - protein, 427 aa, unidentified
MRVLYDRVAAIDVHKDMIKVAVRVPGKKRGSRTTDVLEFRTFYGVLQAMARELRRRGVTHVVMEASGVYTEPVYYALTELDFTEVLVINPAHAKALRGHKTDARDAVRMLDLYECGALLRGSYIPSPDLREVRDLVRYRVKTVQARTSEIQRLQKTLESAGIKLDSVVSDITGMSSTAMIEALIDGERRGEVLADLALGRMRAAGKLADLSMALTGRFTDHHALMCRLHRDRIGMFDDAVGGLDAKISPLVARYAREAELLKTLPGFGEVVAAGWLGAIGPAPHQHFGTAERLASWVTLCPGNYISARKSRSGRTGDGGNYIKPLLVQAAWAAIRTPGRLQARFHRLVRKFGGPKNKGARKRAIIAIAHTLLKIAYAVLKSGKPYQEPGADFYTRRESAQAREEYLLRQLQKLNPGCVITITPAEAA

SEQ ID NO: 108371 - protein, 455 aa, unidentified
MSRNRKSKKTGTPMLHNLNPNAAGVDIGATEIYIAVPADRDAQPVRHFSTFTEDLHAAADWLKSCNIETVAMESTGVYWIPFFQILEARGFQVFLVNAHHVKNVPGRKSDVSDCQWLQYLHSVGLLRGSFRPEQAVCTVRSILRHRDSLVQMASSHVQHIQKALDQMNLQLHHVISDITGVTGLAIIEAILAGERNPQTLAKLRNVRIQATESTIAKSLVGDYRREHLFTLGQSLAAYRHYQELIGACDREIEQYLETFESKADRPQDPQSKSQGGQEPHGGRARFDLQSHLYRIFGVDLTQVPGVHTLTAQTLLGEIGPDLSRFANAAAFTSWLGLCPDNRISGGKVLSVKTRKVKNRAATALRMAAQALYRSQSYLGHYFRRMRAKLGAPKAITAAAHKLARIIYHMVTTRQAYDETICVQNEVQNRQRLEARLRKQARDLGLEIIPAKTRAV

SEQ ID NO: 108372 - protein, 398 aa, unidentified
MVNVGIDLHKTQFTVCVRTRSGETFAQYPTTEDGYRAFLAEAASWQRKGQEVRVGVESTGNTRYFKSRMEAAGIGVTVINTMKLKVVTESVKKTDKHDASTIAEFLEKDILPTSQLCSRESEQLRRLLKVRTTLVRAEVVIKNQIHALFTAEGHEDVKSAALQSKRGRKQVLNALNQWEHGLVAQPLFETIELLEEEVKRIEGQLRALTAGDRMVELLMSIPGCGEIGAWTIRAYTDDIKRFASAKKYCAYAGLAPWVQNSNEAVHHGKITKRGPKELRTALVQVVMGLRRMKDKTISLRLMQRYQMMKKNKGSGKAIIATARKVATVIWHMLTEDAEFDLGKMVDRKLMKKAEAMSSSAGVATAALIGCQERPIAPKIGGKKEKTPGVAREKRKKVG

SEQ ID NO: 108373 - protein, 355 aa, unidentified
MESTKFVGMDVHKDAITIAVMNSAGKVIMESIIETKAVTILQFIQGLRGDLHVTFEEGTWATWLYDLLKPHVTKVVVCNPRKSALLTDGSKGDKIDARKLAELLRGGYLKPVYHGDHGLRTLKELSRSYLTISKDLTRVMNRIKALYRGWAIPCGGTQVYALCHRSVWLSKIPEAGVRSRAEHFYEQLDALQGLRKQVRRDLLAESRKHNATKLLRQIPSIGPIRAAELVALIQTPHRFRTKRQLWNYSGLGLKTHDSAQYRYVDGQLQRSRKPQQLRGLNQDHNHDLKKIFKGAATMASISAGPFHGFYEALLAKGAKPTMARLTLARKIAAITLIVWKKGVNFDAKHLKQQAA

SEQ ID NO: 108374 - protein, 344 aa, unidentified
MPVVRIGLDLAKYVFEVHGVDDHGKVVLRKRLRRAALPEFFANMPTCLIGMEASNGAHYWARTLMALGHEVRLISPQFVKPYVKSNKNDQNDAEAICEAVGRPSMRFVPPKSAEQLTVQAIHRIRQRLVAGRVRLVNQIRGLLAEHGIVIARDIAQLRKRLAEIIGDSAGELSALLQSLMRELHAELLALDVRVRSFDLRLREIFRNSEQCQRLGKIEGIGPITATALVAAVGDRSSFKNGREFAAWLGLVPKQRSSGGRQRLFGISKRGDRYLRTLLIHGARAALARVGGKQDPRSAWLGRLRLRRHPNIAAVALANKNARIVWAMLRGEEAYDMRRSVGHVA

SEQ ID NO: 108375 - protein, 369 aa, unidentified
MNQSSTVVGLDVHKEKITVAILPPRAPRPSEVLTIENHPKAIARLVKRVAARGHPFFVYEAGPCGYEVQRQIAQIGHTAVVIAPALVPRRPGDRVKTNRRDAEKLARLYRAGELTEIRVPTRSEEAARDLVRAREDALKDRLRARHRLSKFLLRQGRAHHETKGWGAVHRAWLRAQQFDSLVLQSTFEAYMHALEDAEVRLESLDQQVLALAQTEPYRVPVQYFRCLKGIDTLGAITLVVETQDFRRFPNPPAYMSYTGLVCSEHSTGANERRGPITKAGNAHLRRILVEAAWSYRHRNITGPELRKRRTGLPSEVIRIARRAQDRLHRKFWRLMSRSKLSQVAAVAVARELAGFVWALAQQCPQSMSA

SEQ ID NO: 108376 - protein, 343 aa, unidentified
MKLSRVGVDLAKNVYQLHGVDRFGKTMWKRRLKRHQWLKVLLDKIEPGCVIGMEACASAHHWGRELQSRGYTVKLIPPQFVKPYVKSNKNDARDAEAICEAMSRPSMRFVTVKTVAQQDIQATHRIRAELITQRTAKANQIRGLVAEYGLVAPKHMSSLRAAIPCWLEDAQNGLTADFRSLLHGVCGDLRALDDRVCEMDQVIEQLAKNNEDCVRLQQLRGVGPMISTAMIATVGDARQYHKSRQMAAAIGITPKQHSSGDRDRLLGISKRGDVYLRTLMIHGARAVVARANHKDDPLSRWVTGIATTRHPNVAAVALANKTARMAWAMLRNETDYDPDFAIR

SEQ ID NO: 108377 - protein, 458 aa, unidentified
MPPLFQARTNRLRAWRLIFEKPLYSRVLISKGAVTAAIKYRKEIIMAIMKRCCCGVDVHKDFIIAVIATFYHMEVTFTKYTRFSTFTKGLREFKEWLRAHNCFDICMESTGKYYVPVYRVISDENFHVDVVHPKYVRAPRGKKSDKRDAKRIADMYMRDHIAEYSIIPPAEILAIRDLTRYRRKTVNTITAEKNRMSNCLTVSNIKLDGVLSDMYGKTGQALIGQIIERGTCNFDPEPYIDKRVKAPLETFKLALDGDVVPATLAKMAIIQDRLGYLGNQKAELESSMASLSEGFSRQLEILDSVPGVDSISAISIISEIGVDMNVFGSIKRFLSWVGVVPQNNESAGKKYSTRIGKGNSWLKPVIVQCANAAINDKKHPEIRDKYLAIKKRRGHGKAKIAIAKRLMTAIYYMLLRDEMYNPHIAKDVAPNRGKIDLDKLIEYYSSKGYTVVSKGVAV

SEQ ID NO: 108378 - protein, 316 aa, unidentified
MSENTIGIDVSKDHLDAHALPAGTALRVPNTARGIAQLLRWIGAEPVARIVYEPTNRYHRALEARLAAAGLPLAPVNPLKARRFAQALGLQAKTDKIDARMLAEMGLRLTPGLQVPSPKNLQHLKDLVAARRALVADRVADGNRTGGHSLALLQRLARRRRAAIEADITRIEAAIAALIAADPALAEKARLLQSLPGIAALTAATLLAEAPELGQLEARQITALAGLAPVTRESGTWRGKATIQGGRRHLRRALYMPTLTAIRRNRDLAALFTRLRTAGKPPKLALVAAMRKLLILANTLLREGREWQETRPIRNP

SEQ ID NO: 108379 - protein, 429 aa, unidentified
MNYTQNEKIEQVTDTTLVVGVDIGSQTHYARAFDNRGKEFTKKVFSFGNDIEGFNTFDQWIESLKTANSKTAVLIGCEPTGHYWFALGKYLADHKKTMVMVNPFSVKKIKELDDNSPKKTDAKDPKTIAKLVIDGRYSIPYMPEGIYAEIRDLVYSRDRVVKQHNISANRIQRWLAIHFPEYMGIYTRFDASSGLAVLEKAPLPKDVIALGVNGIRKLWHDKKMRGRGVTEDRAKILVEAAHNSIGLDGGAGTRSELYMLLEEHRLWISQLEAVEKALSEAVLKVDHVENLLAIKGVGSITIAGFIAEVGDVRRFKSPKQIQKYAGLELVENSSGKHKGRSRISKRGRRKLRKILYQVMIPLLASNKEFRGIYDYYVTRVKNPLKRRQAMVAVSCKLIRVFYAVLTKGVDYDRFKMMSDIHRDNELTAA

SEQ ID NO: 108380 - protein, 366 aa, unidentified
MIVIGTDTHKQSHTAAALDGATGGVIAEQTARAKRRSFEDLLLWARQLGPERVWAIEDCRHVSGALERFLLAHGEQVVRVPPKLTAGARSSARERGKSDSIDAVSIARAAIREGLDTLPVAQLAGPELDVRLLVDHRERLIAQRTQLSNDLRWSMHDMWPEFDVPARALTASGWQERVASRLARAEQSARVRIARDELRRIRELTRTINALEGELATLIATLAPRLLAEPGCGVLTAAKLIGEIAGISRFATEAQFARITGTAPIAASSGRTERHRLDRGGNRQLNCALHRLAVTKGRMDPDTSAYLARKQAEGKSRREALRSLKRHLARRIWLVLQPPGRDTPPTRHRPAVTIHCNTPYGSFSLT

SEQ ID NO: 108381 - protein, 346 aa, unidentified
MKITTIGIDLAKAVFQIHGVGERGKVAVRKQLKRSEMSSYFANLEPCLIGMEACGSAHHWARKLQGFGHTVKLMSPQFVKPYVKTNKNDKADAEAICEAVSRPNMRFVSVKTVEQQAILSVHRARSGFVKARTAQANQIRGLLSEFGVVIPKGIHSIMKRIPEILEDGENGLPGTMRNLLQRLTENLKEMDRQVDELEKQIQLWHRENEASRRLAEIPGIGPITASAITATVGNAREFRNGRQLAAWMGLVPRQNSSGGKQNLLGISKRGDTYLRTLLIHGARSVIQYAEKKAVESSWLRKLMARRNKNVAAVALANKNARTIWALLAHDRTFRADYISVAVAAAV

SEQ ID NO: 108382 - protein, 391 aa, unidentified
MVFVGIDVAKDKHDCYICDSDGLELYSPFIIANNREGFEELMERIRCVSDDLSKVKVGLEATGHYSYNILGYLISQGTPISLINPLHTNLFRKSLSLRQTKTDKVDARTICMMLSSGMDLSSYSESSYHMEELKSLTRYRFGKVGERAQLKQSLSRLVTILFPELETLVPTLHMKSVYALLSEFPGAIYVANAHLTRLKHLLADSSKGRYGKEFAETIRDTARKSIGSDMPAKSLELKHTIALIHVLTEEIDEIEFSIQKIMDTLDAPILGIPGINYCMGSMILAELGDLRRFSSPDKILAYAGMSPSTYQSGQLISSYAHMEKRGSRYLRYALFNATKYVCMWDPTFKSYLAKKRAEGKHYYVAISHAAKKLVRLIYHLQMTGEAYCPQT

SEQ ID NO: 108383 - protein, 410 aa, unidentified
MERVIERCCGLDVHKKTVVACVRVPGRTSAREQHVRTFGTTTAELLALRDWLGGYGVSHVAMESTGVYWKPIFYVLEDAFTCVLANAAQIAQVPGRKTDVKDCAWIAQLLEHGLVRGSFVPPVPIRELRDLTRYRAALIGEHTRETNRLQKVLEDAGIKLASVASDVLGVSGRAMLDALTQGTRDPDVLADLARGALRRKLPALRQALTGRFRPHHAFLVSQVLAHLDYLDEVIEALSTHLDEVMAPFAEAVSRLDTIPGVNKRTAEVLIAEIGVDMGVFPTAGHLASWAGLCPGNNESAGKHRSGKTRKGNRWLRGALIQAALAGGTRATKGAFAARYRRVMRHRGHKKAVVAVAHAMLVAAYHLLARHTTYQEPGADYYERRHAERVRHRAVQLLERQGYRVILEPAA

SEQ ID NO: 108384 - protein, 406 aa, unidentified
MSVYLGIDWSEQKHDVCFMNEAGAVIQFLTVAHSVNGFAQLDQAIRALGLPAADVYIGLETAHTLLIDFMLERGYPHLYVLPPSQVKANQDRFAQSHAKDDQRDGWVLADMLRTDRGRYRPWQPDTRLTRQIQVQVRYVLYLNRMIRRQTNHLRALLLRYYPLAAELFSKLDSPIALAFLQAYPTPQAAQHLSPSQFEAFLREHRHPQRAKWAALYAALTGPQLVPHPDTVALYAQQAPLLAEQLATFVCAKPQAVRVLRQLFDQHPQAGLFGSLPRVGDFLAPALLAKLGDDPQRFASPAAVQAIAGTCPITQRSGKHRAVLFRHACDREFRYIATLWAGQVIAHHPWAQTLYAQYRKRGISETDATRRVANRLLAILWKVWQSHTPYNEATHLQNRLARARPRG

SEQ ID NO: 108385 - protein, 438 aa, unidentified
MSNKVIFNLDELFISVGIDVGADFSWMSIALPNQQFVGKPYKILHNSIDSLTTAVSKIKEAEELYSLESRIFLESTGIYHYPLFCYLRDKGFNCSVINPIITKNSTNINIRKVHNDRFDSKKAALVGLKPDLKVSLMPSDLALNCRNLCREYYDLMDNRSAYVNKLQGELRIAFPQYLGIFSKVTINTSLTLLETYTSPSAFLKADKQEIIDIIKSTARFGLTYAQNKYNAIIQAATDANQFGYIIDSNIKRIRLYISFIRKYDEEINSILESLHELVDANEDADFVKQIHLIETFKGAGFLSAVSIMGEIGDFSAFSKPKQLFAYFGLDPSVKQSGKFEGTKVQMSKRGSAIARRVIHTLTLQSISISRNREAKNPVLREYYLKKCDSKPKLVAMGAVSHKVCNMIFAILRDNKPFKIIAPQEHIKQYNSAKCDIAA

SEQ ID NO: 108386 - protein, 393 aa, unidentified
MVYVGIDVAKDKHDCFIVNSDGEVLYDVFTIQNDMDGFEDLLFKIKTASKDLSKVKVGLEATGHYSCNILGFLHNKGLTTIVINPLYTSLSRKSVSLRKTKTDKVDARTIASMIMSDVSLKPYSDTVYHNEDLKSLSRYRFDKVSDRSKLKQSVSRLVNILFPEIEKLVSTLHAKAVYALLSEFPGAHQVASANLKHLTALLSTASKGHFGREKANEIREAARRSISSYLPAKSLELRHTIKLIHELNAEIAEIETEIKKIMDSIDSPTLSVPGISYALGSVIVSEVGDFSRFDNPDKLLAFAGCSPSTYQSGQLYSTHAKMEKRGSKYLRWALLNAAKYVCKWEPTFAVYLRKKLAEGKHYNVAVSHAAKKLVRLLYHLETTGEKYIPQTLS

SEQ ID NO: 108387 - protein, 359 aa, unidentified
MTKHITICAGIDTGKSKLDVAVEGSREQLQVENTSEGHAVLLAWLRRHRVKRVGIEASGGYEQPVVAELRRKRFVVVVFQPAQVRAYAKFHLQRAKNDKIDAALIAACTAAVRKIHPAPDPRLQPFAEQLTMIDQIGEDIARLKNRIESCRNTQIKGLWEEDLARLAKREKVELKALIASICKHPDLAKRLDLINSIDGIGLPTAVAILVRMPEIGQITREQAAALAGLAPYDDDSGEQVGTRHIEGGRKRLRHALYAAALAASFRWNKQLMTLYRRLIAAGKEHKRALVACARKMLVFANTIVARGTPWQDRPPENATSTKATFLRPDLPLRRHRAQRPSRMAVGSLLPRSPKPPGHP

SEQ ID NO: 108388 - protein, 389 aa, unidentified
MLNSEGSTVDQRWIEHTGDSLHELTEWLRTKASQTPNTVAVAIEVPRGAVVETLVENGFAVFSINPKQLDRFRDRYSPAGAKDDRRDALVLADSLRTDLHCFHRVKLDEPTLIRLRELSRLEDDIAQEQNRLHNQLREQFHRFFPQLLALSPAANEPWLWDLFQAAPFPAKAAKLSAARIEGILKKHRIRRVDAVKVQAAVSTRALTLAPGAAEAASEHALLLLPRLRLLEQQREHIAKRVQTLLEELTQKADDEESLEHRDAAILLSLPGVGRKVAATMLSEASEAIAERDYHALRCYAGSAPITRQSGKKTVILMRQGCNERLRNALYHWARVSVICDPKAKTMYAGMRARGHSHGRALRGVADRWIAVLISMLRHNALYDSKKRAA

SEQ ID NO: 108389 - protein, 377 aa, unidentified
MKRIKFVGLDVHAETIAVAVAEQDGEVRSLGVIPNREESVRKLVKKLGPVEQLRFCYEAGPTGYALYWQLVKLGASCEVVAPTLVPVKAGDRVKTDRRDSLKLARNYRSNELTAVWVPDAEHEALRDLVRAREAAKKDQLRARHRLGKFLLRHGRRAPLGVRSWTIKYLEWVKRDVHFAARAQEVTLLDYLHEVEHAAARVARLEGAIEEAVKLAPPAMRAVIQGLQALRGVARISAVTIVAELGEITRFGNARQLMAYGGIVASEDSSGERTRRGGITKTGNAHVRRVVVEAAWAYRHRPGIGVTLRKRQEGVSEEVKEIAWKAQHRLHAKYGKLMAKGKNKGVVVTAVARELLGFLWAIGVHVEKQQKNSLQEVA

SEQ ID NO: 108390 - protein, 421 aa, unidentified
MAHLAQEEFAAFVGLDWADAKPDVCLQATGTTRREFLRFEHRPEAIDAWVQTLHTRCHGHPVAVCLELNKGPLVSALRKYDFLGLFPVNPLTVARYREACIPSRAKDDPSDAELQVALLLKHRDKLKPLQPQSSARRARTQLVEHRRRLVGDKGRCTNRLTSALKNYFPQVLQWFPDKDTAIFCDCLSRWPTLKAAQLARRSTLEGCFRAHHVPSVDVIAPRLQAVKRAMALTTDDGVIAPNVLLVQALVAQLRVTLQAIADFDTAIAQRAQDHPDFSLFDALPGAGAVFAPRLLVAFGEQRERFSSAEELQKYAGIAPVTERSGKKAWVHWRLQCPTFLRQTFVEWAAESTRHSFWAQVYYQQQRDKGKAHQAAVRALAFKWIRILYRCWQDRTPYDESVYLQALKRRSAPLLHTLAQEA

SEQ ID NO: 108391 - protein, 361 aa, unidentified
MNGTMTWVGLDVHARSTHGAAIDVETGELKRARFGAGSEEVVKWLGELDQPARAFYEAGPTGFALYRAGRAAGLEIDVIAPGKTARPRADRVKTDRKDAELLARLGLAGQLKPIAVPSEFVESARHLMRAREQLRGDLLGARHRVSKLLLQHGRVYPEPTTWNQRHRAWLGRQRFEQEATELAFIDLLAAVDGMVARKEALDERLSRLATDERLWPTVARLRAFRGVGTLTALALHLELGGDWERFSSPRRLFSWLGLTPSLEQSGESKAQGSITKTGSHYARRLLVEAAWHYSRQPRIGVTLQNRQQGQPDHVLQIAWRAQHRLHRLRTRLKARGKPANVATVAVARELSGFLWAAATAP

SEQ ID NO: 108392 - protein, 366 aa, unidentified
MKKTSTVRINGNVIFKGHKLTIGLDLGDRWSFYCVLDEAGQIILEQKLPTTPEAMKHTFGKIPRSLIALETGTHSPWVSRRLSELGHEVIVAHAQKVQLITKSNRKDDRHDARTLARLARIDPALWGPVRHRSVQAQLHLTVIRARAELVSARTALVNAARGLVKSYGQRLPKCGTYQVSEKLAEGLSAELREVLVPLFKEIESLNERVKEYDERMENIAKQVYPEVALLKQVKGVGTQIALTYVLTIEDPYRFPKSRQVGCFLGLRPGRRNSGESEPQKGISKEGDRYLRTMMVQGAHYILGPFGEDSDLRRWGLKLAERGGKNAKKRAVVAVARKLAVLLHRLWVGGEVYEPLRNSQKVMREVA

SEQ ID NO: 108393 - protein, 286 aa, unidentified
MVLIGIDPHKATHTAVAVDTEETALAELTVKADHHQVERLLKWAIDFPDRRWAIESANGLGFLLAQQLVAAGEDVVDVPPTLAARVRVLGSGKTQKNDPNDALSTAIAAMRAKRLRSVVAENHGGVLRLLVDHHHDLGSLRTQAVCRLHALVRCLIPGGTQIRLSAARAGVVLRSVRPTNAVDVERKRMALGHVADIRRLDAEIAASKARIVTAVAASGTSVTELYGVGPVVAAFLIGHSGDMARFVNRDHYASYNATAPIEASSGPRVRHRLNPRATDASTTPST

SEQ ID NO: 108394 - protein, 433 aa, unidentified
MQDAQDEPLFVQRVAGPGIAKAGVEVTIRVPSDTSPGRRQQETRAFGTTRRELESLADWLGSWGVTTAGMEATGDYWKPVFFLIESRGFDCELYNAAQVKALPGRPKTDRADSIWIAKITERGMIASSFVPPEPIRRLRTHTRYRRHLTRARTAEKQRAGKLLEDGHLKLSSVISDIHGVSGRDMLNAIAAGQRDPRALAQLARGSMRGKIRRLEEALDCSFFTGQHAAVLAMMLAAIDYYSAQIEVLTATIEELAGPYLHQVEQLDEVPGIGTICARDIIAEIGVNMAVFPTAAHLVSRARFSPRARQSAGKRKGSNSTGRGNPYLGAALGEAGISTGRTQTFPGARYRRLTRRMPRKKALVATGNSILTAAYALLSDPDARYIDLGPDYYEQRMHTRRQARNHIKSLERLGCKVTIQALSPDTGELLAPAS

SEQ ID NO: 108395 - protein, 402 aa, unidentified
MNCVGIDVSKGKSTIAVMRPFGEVVVSPFEVCHTASELSELARLLKSLDGETRVVMESTGNYHAPVAWLLHGAGLYVSVVNAMLVHDYGNNSLRRGKTDKKDAVKLANYGLDHWLTLPRYVPEEDTRLMLKTCYRQYQQYSKVQTMLKNNLISLLDTAFPDANRLFTSPPRADGSEKWVDFVATFWHCECVCGLSKKAFTAKYQKWCRKHGYNFSQDKALDIYASACGRFGVMPKTNTAKLLVEQAISQLQTTSAALAALKQEMQSLAASLPEYPVVMEMFGVGPTLGPQLIAEIGDVRRFHSKKALVAFAGIDAPPYQSGQIDVRSRSISKRGSASLRRTLFLVMSVILQRAPMDEPVYQFMSKKHSEGKPYRVYMMASANKFLRIYYASVKAYLDSMEYD

SEQ ID NO: 108396 - protein, 338 aa, unidentified
MELYTGIDLHSNNNYLGIIDEDGNRVYKRRLPNDLSQVLKAMEPFKQDIKGVVVESTFNWYWLVDGLMEHGYKVHLANPAAIKQYEGVKYIDDQWDSLWLANLLRLGILPEGYIYPKQDRPIRDLLRKRLHLVRQRTSHILSVENLISRNLGIRMGGNTVKQLDSDYLTHLFKDEHLLLAVNSSVAVMRFLTMRIKDIERIVKAKLKLRKEYEPLLSVPGIGDILGLTIMLEVGDIGRFEKVGNYASYCRCVKSTRISNAKNKGKGNQKNGNKYLSWAYVEAANFAIRFCAQARRYYQRKAAKTNSVVAIRALSHKLARASYYVMRDQVSYDPKLLFG

SEQ ID NO: 108397 - protein, 405 aa, unidentified
MNAVGIDVSKGKSTVAIMQPLGVVISSPYDVSHNAKELKALSDFIKELSGETKVVMEATGVYYEQIAKYLHDQGIFVAVVNPVLIKDFGGNTIRKVKTDKKDAIKIAQYALHYWSELNEFIPEKDERKSLRILNRQYRQAVKITTMINSNLIMLLDSVFPGANKLFTSPARELDGHVKWVDFVWEFSHCDKVAGLTPSAFKKKYKSWCDKHKYHYSEVRAKEIHEFSRNCTCSISCSPDNCAIVKQTAKFMSDALENSHKIRTEMERIASQLPEYNTVISMYGVGKTIGPQLIAEIGDIRRFRSRKAITAYFGYDTEPDDSGQKVSKSRPMTKKGSPLLRRTLFNIMTVFITNQPPNEPVYRFLDKKRSEGKHYFCYMAAASAKFLRIYYAKVSEAMNKTKAPSG

SEQ ID NO: 108398 - protein, 418 aa, unidentified
MEIVYERVAGIDVGKKIVAVAVRTPGEHPGKRRQQVRKYNTFYQTLTEMVAWLVAEGVTHVTMEATGIYWRPVFHALCAAEAPLEVLLVNARHVKNVPGRKSDALDAAWLAELTECGLLRGSFIPPPQIAAIRELTRYRKKLIEQRTSELQRLAKVLEDSGIKIDSVASALTTLSARDMIEALIAGERDPAVLANLARGRMRTKIPDLRLACAGRFGDQHALMCTLHLEHIDHLTDMIARLDTRIDEASLPFVQQTNLLATIPGIGERAAQVIISEIGVDMARFPTAAHLASWAGLCPGNNESAGRHRSGRTRKGNTELRTVLTECAWAAARTSTYVGAQFRRFHRRFGQKGGKKAATATAHTLIVIIWHVLAESSAYRDLGSDYFTRRIDSPRARERRLIRELEALGHKVTLEPTVA

SEQ ID NO: 108399 - protein, 370 aa, unidentified
MQFVGIDLHTNRFTCCYLNEDGKEKTMRTFELSPEDLKGFYKTLTRDTIVLIEATVNTFDFAKLFRHAVQEVIIANTYQLKNINLSDKKTDKVDADKLARMLKLQVLGGEKLIVGVTIPPKEISDLRSLFASYRIIRKQITQTKNRIHSLLKENLYPFIKEYIFGKKTRKAIRSISQDQILSFRINFWMDSLERLESSFGILEERIKIAGAPFMKEIDILSSLSSLSVITALAIIADIIDVSRFRNSKKFASYLRSAPRVESSNEHTIIKSTNKAGRKLSITLLSQSLNHFRDSNKKLNAWYGRLSIYKKKGVVRMALCRRVFTEIYQVLKKNEYHRFINPRLHGKKMLEYKNLLERNNIVFQENYQIPA

SEQ ID NO: 108400 - protein, 411 aa, unidentified
MEVLFPRCAGLDVHRDSVVACVRIAENGAVLQEVRTFGATTKELLGLSEWLTEHGVTHAAMEATGVYWKPVWHVLDGSVDLVLANASHIKNVPGRKTDVNDATWISDLLAHGLIRASFVPPTPVQELRGLTRTRKQLVRERASHVQRVDKILQDANLKMGSVLTDIMGMSGRAVLAAILAGESDPEKLVAHVGKRVKTSRAKLVEALRGKVTPHHRFLLGLHLAQADALEAAINTVDKEVGERIEPFRVAANRLAQIPGLSEVAAAAVVSEIGIEMARFPTSGHLISWAGLCPKNDESAGKRRSNRLRNGAPWLKTLLVQCAWCATRANGTYFQAQYRRLAPRRGAKKAIMAVAASILTSIYVMLRRGVDFVDLGADHFVKKERSKTANRLIRRLGELGYEVTGIRDNQAA

SEQ ID NO: 108401 - protein, 353 aa, unidentified
MPVYVAVDFHAREQTISWCDTADGEVHRTKLRHQHDDVRKFYEQFRGEVIVAFEASGYSAWFEQMLAELGHTVWLGNAAAIRRKAPRKQKNDRRDADLMLDLMMKSDFPRVHTFSAESRTVLRQLRYRHKLVKVRTIAKNSVHAIGINAGLPWRGRLLTQTGMEQLQVLPLSPVLSQQRDEWLALIRLMNKQIGAVEESLEQRAKDDEAVELLRTHPGIGLLTALALRYTLDPISRFTSTRCVVGYAGLDCVEDQSSERRRMGSISKQGSRLLRFLLNEAGQTAARKDPQLKQFYRRLLRRRDKPKAKVAVARKLLVRSFIMLRDQIDYAEFVRRGVAARVARETHSPKVTDL

SEQ ID NO: 108402 - protein, 350 aa, unidentified
MMHAGLDLSRRKIDVCLLSDEGEVAGEFAVPSDADGLRGLNRRVMDLGVPVRGVIESMTGARFVHDTLEQLGWDVLIADAMKVKGLAPLACKTDKIDARVLAVLSQRDLVPAIWLPDPRVRREREQARFRMHLVKHKSMLKARIHATLMTFGRPCTVTDLFGVAGRNMLAELDIPQPWRGTIDASVLLIDDLERQIAQINAQLRAGGTDHPYVPLLMSAPGIGWVLAFTIAAEIGEIERFSSPTKLVGYTGLCPRVYQSGEKDRRGPLTKAGPKYLRWAMLEATMHALRHPAYNERYQRNKRRLGKQRGAKVAQVDIARRLTEALWHMLTKQQPFNPTPAAGGAAFRLAA

SEQ ID NO: 108403 - protein, 346 aa, unidentified
MEQISRVGMDTSKRFFQLHGVNAAEEIVLRKKLRRKEMVEFFQALAPTVIGIEACGSSHHWARLLRSFGHEVKLIAPQLVKPYVKRGKNDGADAEALCEAMSRPTMRFVPVKTAEQQAALMLIGLRERLIGNCTQLSNAIRGYAAEFGFTAAKGMAHLDPLLERIQADESLPLAARELFAVQSKEYAQLRGQINEVEAKLKAWHKSDECSQRLIKIPGVGPIGAVLLKMKTPAPEQFRTGRQFAAWIGLTPQDHSTAGKVRHGGITRAGDEALRAVLVAGATAVIQQAVRYGGRASPWLDALLKRKPPKLAAVALANKMARVAWKLMVTGDSYSTKSAPAALASRI

SEQ ID NO: 108404 - protein, 392 aa, unidentified
MFFIGIDIGKNNHVASMMDDSGRVIFKAFSFPNTSEGGQALFTKISSYSSDTSCFEIGMEATGHYWLSVYSFLFEKGFLLHVINPIQTDGWRRGTEIRKRKNDIIDSVLIADLIRYGQFVETRLADEDLFSLRTLTRFRTYLVESISDLKRKVVCVLDQVFPEYQAVFSDIFGKTSKEILLKFSSPLDFESVSSETLAELLARLSRQKLGADKAEQLKSAASSSFGITFAKNSFAFQLKTLIEQITFIEKQVKETESEISRFMEKLNSPVTTITGIGSVTGAAIISEIGDISKFDSPKKLVAFAGIDASVSQSGEFEATHNVMSKRGSPYLRKAIFQAALVAVFKDPVLSAYYQKKKAEGKHHLTCIGAVSRKLCYIIYAVLKNNQPYVPKA

SEQ ID NO: 108405 - protein, 340 aa, unidentified
MVHVGVDLDKRSSQIAVLTEDGEIRQQRLPNDPTQLEKFFAELPPHTPIAIEASGTWWWLVDLLEHLGHDPILSHPKQTKAIAAARLKNDRVDAERLALLLRGDLLPTVWIPPPALREARELVRHRIQLVWLRSVIRNRLQAMLARRNLQPTSGKSWLTQRGQRELKQLPLPEAPSRIREDCAALLPTLDAQIRRLDTELVTRWGRDPRVQRLTTIPGIGPFIAIVLVLELGDIHRFASAKRVASYVGLTPRVRGSAGRVRAGHITKEGNRLLRWVLVLAATQAVRKPGPLRTWFHAVKKRRGKKVARVALARRLAEIVFHVWHQECDYFTVVRHGVVRG

SEQ ID NO: 108406 - protein, 410 aa, unidentified
MEQVVERGCGLDVHKKTVVACVRVPGGTGQRDQHVRTFGTTTAELLALRDWLDAYGVTHVALESTGVYWKPIFYLLEDAFTCVLANAAQIAQVPGRKTDVKDCVWIAQLLEHGLIRGSFVPPVPIRELRDLTRYRKALIHEHTREANRLQKVLEDAGIKVASVASNILGVSGRAMLAALTHGTTDPDILAELARGQLRKKLPALRQALAGRFRSHHAFLVSQLLAHLDYLDEVIETLSTHIDEVIAPFAQEVSRLDTIPGVNKRTAEVIIAEIGVEMGVFPTAAHLASWAGLCPGNNESAGKHKSGKTRKGNRWLRTALIEAALAAGTRATKGAFAARYRRVMRHRGHQKAVVAVAHAMLVTAYHLLIRKTTYQEPGAHYYERRQADRVRHRAVQLLERQGYRVILEPAA

SEQ ID NO: 108407 - protein, 348 aa, unidentified
MRFYTQQHRHTCGIDLHARSLYVCILDDTGQKLVHKNIKASPEPLLKLIANYRDDLIIGVECMFSWYWIADFCADNGIEFVLGHALYMKAIHGGKAKNDKIDSEKIARLLKGGMFPYAYVYPRQMRSSRDLMRRRIKLARERGDLMAHIKNTLSQYNLPAHPENLRYENKREPMHHAFPDPSVQRSIDLDLARIDFYDEQLAKLEWYLKRTAKSFDPKAVILLKSVHGIGDILSLVILYEIHDITRFPRVQDFVSYCRLVKCQRESAGKIYGTAGAKIGNPYLRWAFGEAAALFLRGNPEAQVWLEKKARKHNKAKALTILAHKLGRAVYFMLRRENLFDQDRFLAPR

SEQ ID NO: 108408 - protein, 397 aa, unidentified
MITLLFVGIDVAKYKHDIAILDDSGDVLKSHLRIKNNHESFKLLHQTLKKLCHAGTEEIFIAMEDTGIYGLNLFRFLHFKHYTVHTYNPLLIKEFAKSTSLRKTKTDQRDALTIAYKCFLDRMDAPPKVNPVMGELKRLTRHRSRIGQYQSDLKIQYIRVIDVVFPELGSLLKPANLHLKYVYAMFVVYPTTAQLANAHLTSLTNLLKQASKGRIRKSRAIQIRDLARESIGTVSDSLSFELTHLIETIRFYQHMIQDTNQQIKSLMAEIQSPILTIPGISYRLGSVILSEIRAIEQFQNPGQLLAFSGLEPSVYQSGEYASQGKMVKRGSPSLRWAILQAARLIAIQSPVFKTYFVKKRKEGKHYNVALSHVAKKLVRVIFYLLKSKQSFDESKLV

SEQ ID NO: 108409 - protein, 335 aa, unidentified
MYTKTVVGIDMSMDDFHVCLMQVKEDHKSVVKGSRKFANTAKEFEEFLSWCSTKSKTKVPVIFVMEATGVYYEDLAVYLHEQQKYVCVELANKTKHFAQSHNLKTKTDKVDAKMLAQYGIERQLERWEPMSPQYKELRDVCREKLSIQKELSRARNQLHAMSHSSSMSKHVTELKVKQIQFYQQAIDELKQEIKRLVNKDPELKRKLAIVQTIPGVGLELAVILACETNGFRLVKNIRQLVSYAGLDVEFRQSGLYNGKTRITKKGNARIRQALYMPALSAIQWNEPIKQLNERVCSRNPTLKKKGVVAAMRKLLILTYILWKKEEEFDTSYQWI

SEQ ID NO: 108410 - protein, 428 aa, unidentified
MDQVNRNRLEEFRQLRQEVRHSEEYLIVGIDIAKDQHHAFFGTATGKTLLRRLVFGNDHEGFRKLLNYTEALRVRHGLKKVVYGMEPTANYHKPLGEYLITLGGMVVLVSGVTVKRNRESLDGRWDKHDVKDSANVADLISQGKCLHYEHPSAELRGLRGLLSLKRRLKKQEQSYRVRIRNHLIAQYFPEMDSHYGRSGAEGLGIVRWCFPPSQITELDVDPFIQRVTSRRIRVEQRRRLEAIWEKAGASIGCDGVPGVEHEAKVMVEGLKQLREMIKETEDKIQELCNEFPEYRFLLTIPGFGPDVSAKVLGAIGDPDRFQNGKQVLKLGGLDLSADRSGKDSDKAIPEISKRGKADLRYALYQAALIASTRDQDFMRYYTSKLRRREREKGIHVKMRVKLSAKMLLIAWTLMKKKEAFNPAYLNAE

SEQ ID NO: 108411 - protein, 315 aa, unidentified
MTKQLPPVNVGVDVSKDKLDVHLLERDLSLSVPNHEHAIASLITRLARYRLERIVVEATGRLEHAFVSAAIAKGLPVVVVAPLKVRRFAEAAGQLAKTDAIDARLIARFAAALKPAARPAADANSQIIKDLVVRRRQLTSLRTTEKNRRGVMPEALKPSIDRIMESLDREIASLELLIQDVVEQHTAWRHKRDLLTSMPGIGRSVASTLIGDLPELGSLSRREIASLTGVAPFNRDSGTFHGKRRIRGGRAHSRTALFLSAMVAIRYNPAIKRFYERLLQNGKHKKVALTACIRKIVTALNAMLRDNKPWQSSLA

SEQ ID NO: 108412 - protein, 366 aa, unidentified
MKKSSTVAKRGNEIFRKPKLTIGLDLGDRTSHYCILDEAGNVILERSLPTTPKGIHQTFSKMPRSRIALETGTHSPWVSRQLTQLGHEVIVAHARNVRLIGESSRKDDQLDARTLARLARIDPGLLGPVRHRSAKAQIHLTAIRARAALVSTRTALVNAARGLTKSYGERLRKCGTRQMNREIAQGLSQELRDALEPLLEEIESLNERIAEYDRRIEQIAKDAHPEVTLLQQVKGVGTLIALTYVLTLDDPHRFRRSRDAGCFLGLRPGRRNSGRSEPQLHISKEGDRYLRTLMVQGAHYILGPFGQDSDLRRWGLKLAERGGKNAKKRAVIAVARKLAVLLHKLWVSGEVYEPLRNNHQVVSAVA

SEQ ID NO: 108413 - protein, 361 aa, unidentified
MRIIGCDLHARQQTLAMLDTKTGEIVNLTLMHEGNKVREFYSQLPRPVLVGIEATGSMYWFLNLMEELGIECRVGHPATIRAAEPRKQKHDRRDAELILKLLAENRFPAIWLPSKELLDLRALLLHRHQWVRMRTRIQNALQAIALANGLRRGSGLWSHDGQNKIASLPLWPHTAYRRNALQAMYQKMESEIENLTQQVAEQANHRCTSRRLMTHPGVGPVTALATDVFLGDAKRFVDGKSLASYVGLIPGEHSSGRRQRLGKVTKQGSPLLRFLWGEAGAHAVRRDPELQRFYRRKLVQKGLGKARVAVARKLGIRLWIMLRDEIDYEEFCCRGQKQHSGAACAEMPETANGANRHRPID

SEQ ID NO: 108414 - protein, 417 aa, unidentified
MERFAAYISIDWSDQKHDVCLVDAVTGKKECLVLKHSPETLDEWAISLRTRFAGQQIAVCLEQSRGPLIYALLKYDFLILYPINPTTLARYREAFSPSRAKDDPRDAEYLVELLIHHRDRLKAWLPDDEKTRTRQLLVEHRRRLVNDRTRISNRMTALLKGYFPQVLQWFDDIRTILVGDFLLCWPTLDSVKKVKPTTLEKFFREHNSVRRETNENRIAAIKDAVALTTDRAVINSSVVMIKALASQMKATIEAIGEFDQQITALCQTHQDFFIFDSLPGSGTVYSSRLRAALGTDRERWACVEELLCFSGGAPVVERSGKSERIRWRYFCPKFFRQSFIEYAGESIKHSFWAKAYYSSQRAKGKSHQAAVRALAFKWIRIIWRCWQTNTPYNEVTYLESLRKKGSPLLNFAANNPA

SEQ ID NO: 108415 - protein, 349 aa, unidentified
MALTIVKEARPVTGGVDTHAGTHVAAALDPVGGLLGVREFPATAAGYAGLLGWLGGFGTVCLVGIEGTGSYGAGLARHITAAGIRVVEVDRADRQDRRRQGKSDPLDAVSAARAAQSGRARGAPKGRDGAVEAIRTLMVARRSAAGERTRTINQARALVLTGPDDLRTRFARHTPAALITGLASLRPRTGDVAGHATRIALRELGRRAQFLDGQLQRLDELIIPLVTAHAPGLLALYGVGPHTAALLLITAGDHPGRLRSEAAWAHLCAAAPIPASSGKVTRHRLNPGGDRQANHALWRIVFTRLGSDPATRAYAERRTAEVKSKAEIIRCLKRYVAREVYPHLRPAGG

SEQ ID NO: 108416 - protein, 402 aa, unidentified
MNAVGIDVSKGKSMVAIMRPFGEIVSAPFEIKHTTSDINSLVELINSVEGESRIVMEHTGRYYEVLAHQLSAANLFVSAINPKLIKDFDNDSLRKVKSDKADAVKIARYALDKWQNLKQYSVMDELRNQLKTMNRQFGFYMKHKTAMKNNLIGILDQTYPGVNTYFDSPARSDGSQKWVDFASTYWHVDCVRKMSLNSFIDHYQNWCKRKKYNFSQSKAEEIYGKAKELVPVLPKDAITKLIIKQAVDQLNSASTTVESLRTLMNETASKLPEYPVVMAMKGVGTSLGPQLMAEIGDVSRFTHKSAITAFAGVDPGVNESGTYEQKSVPTSKRGSSDLRKTLFQVMDVLIKTHPQDDPVYQFLDKKRAQGKPYYVYMTAGANKFLRIYYGRVKEYLSSLPES

SEQ ID NO: 108417 - protein, 338 aa, unidentified
MIGVDLAKSVFQLHAASMTGQLRFCKKLSRQSFLKFMAEQPRAVVVMEACGSAHYWAREMTSLGHEVKLIAPQYVKPFVKRQKNDAADAEAIVIAAQRPEMRFVEPKSAEQQGRAMLFRARTRLVQQRTELVNMLRAFLYELGHVVPQGINNVSRIAAIITEPNSDLPEIARIECRDLLEQIEAMTVRIATSDRRIKDLAGQADMARRLQTMPGVGPMTALAVEAFAPPMESFKCGRDFAAWLGLVPKQHSSGGKTRHGRVSKAGQSDIRQLLIMGAMSRLNWMGRKSISETSWLARMLARKPRMLVAIALANKMARMIWAMLTKQEDYRTPATAIAA

SEQ ID NO: 108418 - protein, 314 aa, unidentified
MDAPRYAGIDVSKDHLDVHLRPEGTAFRAGTDEAGLASAVARLVGARPALVVLEATGGYEAPAAAALAAAGLPVAVVNPRQVRDFARGAGKLAKTDRLDAAVLAHFAEAVRPPARPLPDAEAAALAALVARRRQLVEMRAAEQNRLGLARAAVARSVREHIAWLDGQIDRVGRELAAAVEASPAWRAKDDLLRGTPGVGPVVSRTLLAELPELGRLSGRRIAALAGVAPVARDSGRRSGARSIAGGRAAPRCALYMACLSAVRYNPVLRAFYRRLLGAGKAVKVAQVAAMRKLLTILNAMVRDNRPWDPALAAC

SEQ ID NO: 108419 - protein, 350 aa, unidentified
MDQITRIFIDTSKSVFQLHGVNAAETPVLRRKLRRGELVAFFTKLPPTVVALEACGASHHWARVLGDLGHEVKLIAPQLVKPYVKRNKNDGRDAEGGCEAMSRPTMRFVPVKTAQQQAALMLAGVRERLVRDRTQLTNTIRGHAAEFGLVAAKGLDKIEPLLARIAEDQTLPALARALFAELGGDYARLEGRLKATDARLMAWHRGNELSRRLAKIPGVGPIGACLMVMKTPDPHAFKSARCYPAWIGLTPKDHSTAGRQRLGVITRAGDETLRSVLVVGATAVIKQAIVNGGRGAAPWLAALLTRKPPKLAAVALANKTARTAWKMMVTGQDFDPVRMMRQPPAPTLAA

SEQ ID NO: 108420 - protein, 347 aa, unidentified
MRLAVSSARLRAVFSAIDRTTAIRLRVRCCNSPINGCCRSSNAIAVAESGREGEIRFWGEVDASDASMRRIIRRIAAKFDCVHFCYEAGPTEYGLHRLIRSLGHECVVVAPSLIPRKPGDRVKTNRRDALALARLLRAGELTAVWVPDEGHEAMRDLVRARAAAVETLRVHRQQISAFMLKHCRIYPRKKGWTMRYLCWLQEQQFDHPAHQIALQEMVEAVRISKERVGRLERAIEEFVPSWSLAPVIRALQTLRGVDLIVAVTFATEVGDVSRFESPRQLMGYLGLVPGERSTGETVRRGSITKAGNGRVRHMLVESAWTYRYPPKVGARKLYRLEEAPPAVREIA

SEQ ID NO: 108421 - protein, 345 aa, unidentified
MNKRNVIAVDLAKQVFQVALLNRQDKLLSNKSMRPGRFSEYLAKQPRSLVAFEACGRAHHWARMAKSLGHEAVILPTKRVASFRQGHKTDGKDALAIGMAARQPQIRPVAPMTLDQQALQSDQRVAQHVSDEKTATGNMLRGLLAEFGLEIPRGDKALKREIPLILEDAENGLPLGVRESLDIAWQLWRQLDVQVKQLDKLLAQRAAAHEPCQRLMALAGVGPKNALGLYVTLGNGRHFKNGRNASACIGATPQQHSSGGRVRIGHISRQCGNKRLRANLITGAHAVIQVLEKRGPRTEKERWLAALIERRGKGRAAVALVNKTIRTAWAMLAHQEAYHATPRTV

SEQ ID NO: 108422 - protein, 403 aa, unidentified
MNNVAGIDVSKGKSMVSVLRPFGEVVAKPFSIGHTGSELKELADYLKSLDGETRVVMEHTGRYYEPVARFLHEEGVFVSAVNPKLIKDYGNNTLRKVKTDKADARKIARYGLDNWAELRQHTPMDTIRMQLKTLNRQQSLYTKTKTMMKNNLIALLDQTYPGVNALFDSPVREDGSQKWVDFATTFWHVDCVRNMSLTAFAERYRKWCKRHGYNFSQSKAVEVHAGAQDLIAMLPRDALTKTMVRQAIDALNAISASMERLKAEMQALAAQLPEYPVVMAMHGVGDSLGPQLMAELGDVTRFTHRNAITAFAGVDPGADQSGTHEAKSTRVSKSGPPELRRALFLVMDCLLKTQPQDDPVYRFMDKKRAEGKPYLVYMTAGANKFLRIYYGRVKEYLASLEEN

SEQ ID NO: 108423 - protein, 361 aa, unidentified
MQHEPVETKGVIGGFDCHSEVHVGAALDPLGRLLGTASFPATPNGYHRATEWLRSFGPIIAVGVESTGSFGAALARVLSAQGLRVIEINQPHRHTRSRRGKTDAIDAEAAARKVLSGEATGAPKDTRGVVEAIRQLTVAREGAVKARTAALCQLGDLLVTAPAAVREQLAVRKSLESKATLCARLRPARGAARGDLLDPSAAAKIALRSVARRITNLTKEAAVLAEQLDRLVAFAAPRTLRQLGLGTQNTAALLVAAGENIGRFNSEASFAHLCAAAPVSASSGHTSRHRLNHGGNRQANRALHMTVIVRLRYCPRTRAYMERRVGEGRTKQEVIRCLKRYVVRDVYRTLRADLSDLALRE

SEQ ID NO: 108424 - protein, 343 aa, unidentified
MSEVTTIGLDLAKNVFQVHGIDASGQVVVRRQLRRSQVLSFFERQHPCLVGIEACATSHHWAREIAKLGHEVRLMPARYVKPYVKRNKNDAADAEAICEAVTRPTMRFVAVKTEEQQSVLMLHRTRQLFVRQRTTLINAIRAHMAEFGIVAGVGRNGVERLLRLIDEGSDERVPPVARECLQALRTQLVLVKRQILKADRRILAWHRSNELSRRLETIPGVGPLIATALVASIPDPHAFGSARDLPAWIGLVPKQNSTGGKERLGSISKAGNRYLRSLLVVGALSVIRRAKQVGYTRRAWLAELMARRPVKVAAIALANKIARIAWALMVNGTRYEEPVPQAV

SEQ ID NO: 108425 - protein, 412 aa, unidentified
MSDGTVSWFAGIDWGSEKHQVCLLDAAGKVVGEREFRHGGAGLAALCEWLVSVAGEPGRVAVAIEVPHGPVVDALLDRGFAVHAINPKQLERLRDRVSLAGAKDDRRDARVAAGGLRTDPHLFRPVEAGDPAVIALREWSRLAEELQQERVRLGNRIRQQLWRYYPQLLEVSDDVTAEWVLDLWTLAPTPTKAARLREATLARLLHEHRIRRVDAERVLAILRQRAITVAEGVTEAAVLHLRSLVARRRLANREFHQAERKLNELCATLRESPPAAEGAPHDAAILSSLPGVGTVTLATLLSEAAGPISRRDYAALRTLSGVAPVTKRSGKSCLVTMRYAAQVRLRNAVVHWARVAVLNDPKCRSRYAALRACGHSYGRALRSVADRLLGMACVLLQRQVLFDPDYGSSAAA

SEQ ID NO: 108426 - protein, 342 aa, unidentified
MSIVTIGLDLVKHAFQVHGVDETGRVVVRRQLRRDAVEDFFGSLPPCLVGMEACATAHHWARRLAALGHQVRLIPPTRVKAYVQRGKKNDATDAAAIAEAVTRPHMAFVPVKSEDQQAVLMLHRTRDLLVRQRTMLVNALRAHLAEFGIIAAQGRAKAGGLVAGLADAAIPELARIALRELAGQIEACDLRFAAVEKEIFDWHKTNEPSRNLATIPGIGPITASLLAATVTDPKAFKNGRQLAAWLGLVPRQNSSGGKDRLGGITKTGDRSIRRLLVIGATCVIRYARTKAPGEADWLKALLDRKPARLVTVALANKMARIAWAVLTRGEVYRKQFPMPAAA

SEQ ID NO: 108427 - protein, 378 aa, unidentified
MDVIYPRCAGLDVHTETIVACALWEEEGEIQKEIQTFSTFSKGLGDLLDWLEDHGVTHVAMESTGVYWKPVFAFLEGYVDLTLANPQRIKNVPGRKTDVSDAEWIAKLLRHGLIEKSFVPPAPIRELQDFTRLRKKWVGQLSSEKNRIQKVLESSNVKLGSVLSDLFGVSGRNILARLLEKGYVDKDELDECLRGRLKTKKQAVYDSLLGTLTEHELYLLRLLWKHVEELERLIEEVDQHIDRLLEPYREEVDLLMTMPGIKKQTAAVIIAEMGTDMSVFETPERAASWTGLSPGNHESAGKRKSTRTTKGNPHLRSALCEAAWSAARSKMHPLSRKFWSLAARCGKKKALIATARRMLVIIFCMISRKEPFRQPQLI

SEQ ID NO: 108428 - protein, 338 aa, unidentified
MPLYAGIDLHSTNNYLGISDEKDHRIFKQKLPNDLRSILLSLNLFKNNLQGVVVESTFNWYWLVDGLMQNGYKVHLANPSAIKQYEGLKYTDDKWDSFWLAHMLRLNILPEGYIYPKEERPLRDLLRKRMRLVRERTSHILSLESMVNRSLGMQISSNKIKTFREEDAEELFDHPHLIMSAKSSIAIMRLLTEHIKAIEKEVKSQIKLRKPFQSLLTVPGIGDILGLTIMLEVGDIGRFTKVGHYSSYCRCVTTARLSNGKSKGKGNSKNGNKYLAWAYVEAANLTMRYCPQARRFYQRKMEKEGGVVAIKALANKLARATYYLMRDQVAYDPKKLFE

SEQ ID NO: 108429 - protein, 315 aa, unidentified
MSDVPCFIGIDVAKAQLDIALRPSGERWAVPNDTSGVAMLVERLQPLHPTLIVLEATGGLERAATSALATAGLPVVVVNPRQARDFARATGQLAKTDAWDARALAHFADVIRPTPRPLPDAQTQALRALLGRRQPLIGMRTAEQNRLAGASERLTKDITAHITWLNAAIATLDDDLETLLRASPLWRENDDLLQSAKGIGPVSAHTFLLELPELGTLTRQQIAALVGVAPLNCDSGTLRGKRTIWGGRAHVRTVLYMSTLVATRFNPQIKVFYERLLAAGKVKKVALTACMHKFLTILNAMLKHRTPWQPQEVQS

SEQ ID NO: 108430 - protein, 414 aa, unidentified
MEGTYKIAGIDVHKSMLAVVVADAGQEGAFQFQRRKFTTLASGLEQLAAWLRQEGVQEAVMESTAQYWKPVWQELEGQCELFLAQAQSNRAPRGRKGDYKDAERLLRRHVAGELILSFVPNPEQRLWRTMTRSKHQLTRDRVRMQNQIESLLEDAHIKLATQVSDLLGVSSRRMLQALADGETDPARLAALADPALRATPEQLQDALRGAPTMGPLHRQILELFLSRLELVESHMQILEKSIGQGLQAHRDAVQRLAEVPGFGVDSATQVIAEVGPTAGTFHSAPELCSWVGVCPGREESAEVSKSNRSPKGNRMMRRVLTQVANAAVKSKGSVFEANYRKLVVRLGHKKAIWAIAHRLCRLTWKILHQGVRYIEYGTRLNVKAVQRRARRLLRDLQSLGYQVQITASPAPLSV

SEQ ID NO: 108431 - protein, 437 aa, unidentified
MKNYTALEVGNSDYLGVVTRNRNPFDSKPAQISDHIDRNWKMALAHIQHLPCTARNLFHRLTIIENTACEGFVNGMVAPYILCHSGMINRHYLSGAAIMNVKTIGIDLAKEVFQVHGIDEHGKRLFNKQLKRAKMLSFFANIPPCLIGMEACASAHFWAGKLMSMGHNVKLMAPQFVNPYVKTNKHDAADAEAICEAVTRPNMRFVPVKPPEQQAVLALHRSRQSFIKQRTAQANQTRGILAEFGIIVPRGIQQLHLPEILEDADNSLPSLFCVQLSLLQHHMVYLFDVIATLDKQIEQCYRQNALCQRISKIPGIVPITATALIATIGNASNFENGRQLAAWSGMVPRQHSSGGKHVLPGISKRGDIYLRTLLIHGARAVLQSVKRKQDAISGWASRLLARRNNNIASGALANKNARIVWALLAKDQEYYAPIMNV

SEQ ID NO: 108432 - protein, 403 aa, unidentified
MYVLALDVSMGKSYAVIYHETTFLFEQEILHDKPYFCQLLQEIYALPERPQIVFEATGVYSRVIETFCQKNHFDYCLLNPLEAKRQLNSDLRSVKTDKRDAHRLAQTHSQFLRKQKQQSSEIYEQTRDLAHFYQQIESDIKHMRMHLHTALQLTFPELETLFTNRLSKLALNLVELFPHPAYLVGLSQTKVKNLLKKNTDKKISDQKALAKAQTLLSLAQNSYPAESGQSISVQKVVYYAQQLKQLLTTKEQLAAQLIEAAKQTEEFDLYQSIPGIGELSAGLIIGELGDIRRFSSHKQLNAFVGVDTRRYQSGKYIAQEHMNKHGNPKARKNLYFIMMNMIRQQAAAPNHIVDYYYKLKTQPSPKKHKVALVACINKLLKCLHSMVRHSSTYDYSYTASNDQ

SEQ ID NO: 108433 - protein, 355 aa, unidentified
MSQEKYIGLEVHQASISAAVMDPSGKVLMECLLETKAATILEFIQGLRGTLSLTFEEGTAAAWLHDLLKPHVSRLVVCDPRKAALLKEGNKNDRVDARKLAELLRTNQLKAVYHGEHGIRTLKELGRSYLTVSKEITRTMNRIKSLYRSWAIPCSGTTVYAPRHRGEWLAKIMEPGVRVRAQHLYQQLDNLQPLRLEARRELLLESHKHAAVTLLRQIPSMGPIRAALLVALLQTPHRFRSKRQLWAYSGFAVETHDSGEYRWVRGKLQRNREPITVRGLNDNHNHDLKNLFKGAALSASARPGPLQDFYLARVTQGMRPTMARLTLARKIATITLTMWKKGANFDPQQLHRQAV

SEQ ID NO: 108434 - protein, 411 aa, unidentified
MDTVIERCCGLDVHKDTVVACVRTTVEGGKRNQETKTFGTTTTELLKLRDWITACKVTLVGMESTSVYWKPIFYILEDEVECWLLNARHMHNVPGRKTDIGDAEWIAQLLEHGLVRPSFVPPKPIRELRNLTRYRKAQIEERSREAQRLDKILQDAGIKLSSVATDIQGKSARAILDALVEGERDPEVLADLALGKMRPKIPQLQEALLGRFSRHHGLLIGAILAKIDFLDSAIAALSEEIDQVIAPFEPQLQLLDTIPGVDRRSAEGIIAEVGADMSRFQSSGHLASWAGMCPGNNESAGKRKSGRSRKGPKFLGALLSESAAAAGRSKDTYLSAQHHRLTGRIGYAKANKAVGHSILVACWHVLSTGLPYNDLGADWFVKRKPEAHARRLAAQIEALGYSVTITPSEAA

SEQ ID NO: 108435 - protein, 341 aa, unidentified
MGQASTIGLDIAKWVFQAHGADATGRVVFRKRLVRAKVLEFFAGQPPCLVALEACGGAHYWARELGKLGHTVRLIPPAYVKPFVKRQKNDVADAEAICEAAQRPGMRFVPVKDEAQQANTVVFRARDLLVRQRTQCINALRGHLAEYGHVVPQGPAHVDRLVALVEDPKSSVPESARGILQVLIRTLNALEEQLKELDGEIARRAKTDPVARRLMTIPGIGPIAATAITALVPAPEGFRAGRDFAAWLGLTPLQKSTGGKHKLGAISKMGERTIRRLLILGASAVVRWASRRGAAAGSWLARMLARKPRMLVTTALANKMARIVWALLVKGGTYRAPAVAA

SEQ ID NO: 108436 - protein, 579 aa, unidentified
MGKGSGVSRGDRRRNGRAERLRALVPRDGAVIGIDLGEDKQAVAVIDHDVRVVWRKTVRVKAHQLGEVLDRAVAEAGAKGFSRVTVACEPTGARWMQVQRLCGERGLPLVCIQPLVSHIAREQQDYTPHKRDESDCVLIGRLAVELHCYVPEVLDEAWAHLRHLGRRRAQLITAATASVLRVRDFLSVAWPAAPAACAQPFVSVTWLAGVQVVASRCGGRPEQLAAMGQEAFAGLVRSAVPGWGGMRADGRVTRAVFAALADTRDAVGWSRRGLLRRVADELGDLQRTRAQLRAVEADMVTVLGELGLARLADIPGLTAVGAAAILAETGDPRRYETSSSLVKHAGLSPAGNASGAFEGQERISRRGAGGRDVARYLEVADGPAEVLGPTLGGERQDFELGCGARDRDVLRCDPVVHALQERAAQPSREGHILRRSRIDFHTQGGVHRQREIARLDRRDHAVPCHDEEGAAVDDLVAAFGLPRKIVERELAAIERRQAIQRGDDPRAYAHFDVDRHALAHVDGARWNDQLDERPAAGFELNAFRERSGRNQGRCGRRLGFDQGGRIGIIGADHVEYDRL

SEQ ID NO: 108437 - protein, 472 aa, unidentified
MLFIGGGSQQEYVERTRGLDPSRCLAAGIDVGKYEALCLIADHRGEVVGEALTFPLTEPGVRVLEAVLAAAVRARAAVSVRVGVETAGHYHRTVVARLVAAGHDVVELNPAHVKAARTQQGSRRLKTDLRDAAAIVDLVISGSGRSPQQRSDALVEQLVLAGVRRRRVLARTALSNQLLGTLDLIFPGLDGCFDDLLGSKVGPVLLHDLADPSRLHRLGVEGLRAFTARRGVRLQRRKAEQLHQAAADALRLPAAERSCRAAVLAADLAVLDLLNKQIDQAEEHLAAVLPDTPAGVLTSLPGVGVVRASNYGAALGDPDRFANADRAYRASGLVPASYESAGRTRPGQGISREGNAELRNAIIELGRGLAQRDPDFARYRAGVSARMKPLMAAIAVGHRAHRLAFALMRSGEPYDPARLAKSVATNGERRTNKAGRPVKKNSREAACRHDVTHPPVTTVPRTTAARKTLTRT

SEQ ID NO: 108438 - protein, 418 aa, unidentified
MQIDTDEREVIERVAALDVGKAEVVCCARVPGPRGQRMQEVRTTSTMTAALLALGDWLASLGVTRVVMEATGDYWRASFYLLEDRFETWLVNAKDVKHLPGRPKTDRLDAVWLCKVAERQMLRPSFVPPPQIRQLRDLTRYRVDLLAERTAEKQRVEKLLEDALIKLSVVVSDLFGVSGRAIMAALIAGERDPGVLAGLARGSLRSKTGRLTEALTGRFTDHHAFLLDRMLKRIDGITADIATVQERIDAQITPFAQAETRLDEIPGVGSTAAQAILAEVGIDMTRFPTPAHLTSWARFAPGVSESAGRKKGNAGTGHGNRYLARVLGEAAIGAARTDTFLGERYRRIARRRGKNRAIVAVGRSILVIVWALLSDDDAKFVDLGPDYYASSTNAERKIRQHVRELQALGYSVTLNPAA

SEQ ID NO: 108439 - protein, 321 aa, unidentified
MNASIFVGIDIAKFSLQIACLELKLETQLPNSLVGWTQLVKLLKIHRTKVLLICEATGGLERGLVDQLQKADLKVCVLNPRQARDFARATNRLAKTDKIDAAVLAEFGRRMQTRPAAKVAPWVRTLAALVGRREELTAMRTAENNRLDQNLLSFVAKQLNASIKRLTQDIKALEVQLDRLIESTPELQTKHQLLCAVQGVGSITASTLLATMPELGSLESNQVANLLGVAPLNCDSGQWRGKRRIYGGRRFARRVMYMASLSATRHNEILKAFYGRLVQAGKPKKVALVAVMRKLIIYLNRVLKPKNIVTLPAPTAEAPCF

SEQ ID NO: 108440 - protein, 345 aa, unidentified
MSTTEVDTFAGIDVSARELSVALRREKGEDKPAMAKFSNRPSGHRALIAHLLGGGRRVRVCLEASGNYSLDLALTLRAHRQVEISVINPRRARRFAESLGQRSKTDPVDARVLCEYAARMPWVAWQPPSSVALHLRAVTRAIADLGVIHTQQNNRAHASAASQALPVLVVKEMQRHQKYLEQRMTRLRREALRLIAGDSELDRRFRLMLTTTGIAETSALQILGELAVLPDMLDARQWVAFSGLDPRLFKSGKSVEKRPRISRGGSRHLRRALYMPALVALRRDLYLRGFYQHLLARGKARMQAVVAIMRKLLHALFAMFRTNQPYDGSKLCALHLPACAVAACA

SEQ ID NO: 108441 - protein, 443 aa, unidentified
MAERTRARSLTIAHPNAAGIDVAAGSHFVAVPAERDDAPVREFASFTEDLERLAAWLTQCGVDVVAMESTGIYWIPLYELLESKGFTVHLVNARHVKNVSGRKSDVLDCQWLQQLMSFGLLSGAFRPAEQVCQLRALSRQREMLVQGQTRHVQHVQKALAQMNVQLDQVISDVMGLTGQRIVRAILAGERDPAVLAKLRHVRIHADEATIAKSLVGTWRAEHLFVLAQAVALYDAYQAQLEACDAELARVLATLAITEAKPPEGARRRRGTRADLDLRTALYRACGVDLTRIDGIDVGTAMKVLAEVGPDLSRFRSAKHFASWLGLCPGTKISGGKVLSGASKRIPNRLAQALRQAATTLKNSRSSLGAYYRRLCARLDKAKAIRATAHKLARLIYALLTRGHDYVDHGEAYYEERYRERVLFHLKRKAQAMGFALTPVETPA

SEQ ID NO: 108442 - protein, 350 aa, unidentified
MLIIGCDYHPSFQQIAFVDTSSGELSERRLFHREEAEQFYGKLKEQSVPVRVGMEASGHARWFERMLRDLQFELWIGNAAEIRAKRVRRQKTDRQDAQLLLRLLMEDRFPRIWVADAENRDLRQLLWHRHRLVQMRTRVMNQLHVVALNEGLRRKKALWRQAGRQELESLALASWANRRRQDLLDLLDQLTPKIQQLTQALEEEVEKRPVTRRLMTHPGVGPLTALAFELVIGTPERFHCGKQIASYVGLVPSEESSGNRRRLGHISKQGNALLRYLLVEAAQVTIRTQAQWRSRFFHLAMRRGRKIAKVAMARKLAVHLYWMWRQGCDYGHLQKLGSHAGEPGNPYGVR

SEQ ID NO: 108443 - protein, 356 aa, unidentified
MAIVAHTRPFVIGVDAHARTHALAILACPTAEILDQGQFPATAAGLARAVGWVARRTCADRDALWVVEGVGTYGARLARAAADAGFDVVEAPRMNARADRGVGKSDLLDARRIAQAVLPLDDAQLRRPRSDEGARAALRILIASRDHITNERTAAINALIALLRVVNLGVDAHGALSAGQITAIGAWRSRTEELSIGVARAEAIRLAKRVRAADKELGDLTRQMTALLEATPAADLLDKPGIGPITAAIAYAAWSHPGRVRSEAAFASLAGVNPIPASSGNTVRHRINRGGDRRLNRALHMAVVTRMRMDPETRAYVAKRTAQGRTLREIRRSLKRYLARQIYRQLNAANTPAAAA

SEQ ID NO: 108444 - protein, 312 aa, unidentified
MEKLSYGGIDVSKDRLDVVVLPEGWFFSVSNDTAGWAELVARLRPLAVSAIGLEPSGGYERGIIRALLAAGLSVRRINPNKLRQFARARGVLAKNDRLDARLIAEYVAIMPTRVVQRDDAVERLAEIVTMRRQLCDEHVAVDNQAAHLEDAMLRRLSKRRLIRLEADIRLLDKRLAEMVATNAAFAQLYELLTSMPGVGPVLAFTLIALLPELGKMSRKQIAALVGLAPYDFDSGKLRGHRSIYGGRMPIRNVLYMAALSASRYNPALKAFSNRLAHANKKSKVIIVAVMRKMITTLNAMLRDNAAWQPQSN

SEQ ID NO: 108445 - protein, 400 aa, unidentified
MYKYFLGIDISKDSFDFCFTDETENVLYKDHYQMDMTDFTKLSEYLAPFSNDEILIVMEATGIYHLNLLSYLLEQGLSVSVVNPLFIHAFTKSMTIRKTKTDAKDAHIISIFAKRNGATLKLSSSNDLESIKPIVREKEKLTNSMSALKTDMKSIVNQIFPEMLKNTNIFSKSSLNLLLQAPSKRIIRNLKEKKIAKLLSSDTTRGAKPKVGASEILSMAKNSIGINNQSLEKILVSKIKQLEFLQLQLDEFNAIIEQFVDEHHNDDIELLTSISGTGKASAASFLVELGNINNFATHKQLTAFIGTDPTIYQSGTSVNVKGSISKRGNSHLRRSVWHMARAGTVWNPTLKAYYDKKRSEGKTFKQSVIAVANKLIRIIFSMLKNNTKFSTSYNSKGAIA

SEQ ID NO: 108446 - protein, 420 aa, unidentified
MKVVYQTCCGIDVHKSFLVATIIKTTSGVQPSYQKKRFSTFNNSILQFKEWLIKNQCHDVCMESTGKYWVPVFNLLEDEINVTIANPKWVKAVKGNKDDTKDSKWIGDLFRLGLVPGSYIPCKSIRILREFTRYRYKLTSCRTSEKNRYQNALTVCNIALDSVVSDIFGKSATSVINYLIEQSGNSVNHEEIASRLLRSLKKKSDSVIESIEGYQMTDSQKYRMRLVHAHLDYITSMINDIDTMLDSLIAPYENAVQLLCTIPGVDRNSAITVISEIGTDMTPFSDSKRLCCWAGLTPGNNESAGKKKSVRITRAGVYLKPALVQVAHAAVKSDKSPYYKQKYERIMKRRGKKRAIIAIARMILTAIYQMLSTGEAWNPTDLFKIDMPEPMKEKQKEKAIKQAIKLLVREGKVSQSQFAS

SEQ ID NO: 108447 - protein, 373 aa, unidentified
MPKYSTAFGMDVHLRSTTVCALDADTGEAVTRRFPGNPWGEIAGWMDGFPGPSLAAYESGYLGFAPQRELAGLGVECVVAAVSKIPRSAADSASKNDRNDAARMAKAILAHDISPVWVPSPEVEGIRDLAGAYGGATARLATAKQRLLAFLAKRGFVYGGTTPAGNPRKYWTYDFLRWLDKVRPEDDGGVRTLAALRNEVEAAAEARADLLSEYRAAVDASPIAAEVAALQSIKGCAFALAAAFSAEVGDFTRFRSGRQVTAYFGLAPSQRSSGDSVRLGGISGAGNALVRKLAVEGSWCYAAARHQPKLMPRDTGVPLEIRMHGRKGSERLLRRREEMLARGMPAAKANAATAAELVRWLWALGMMCREGAE

SEQ ID NO: 108448 - protein, 357 aa, unidentified
MSKSRVLMDRACSSEATAFCGIDVSAATLSVAVEAGPEWKVGQRQFANSAAGHRQLINWLGKNRCPVRVTLEATGIYSVDVALALAEAGGFAVQVLNPKKASDFARSLGRSKTDKSDAVALAEYSRRMEFVAWKRPSREVLELRVLGRYMATLSEEHARLLNRLHAAEASRMAPRCVRDDLKRTLAGIQKRLLRLRRDARARIESQAETHRKWLRLLAIPGIGELSGMQILAELAGMDEQMTVRQWVAHSGLDPAHQTSGTSVNKPSRISRQGNRHLRKALFMPALTAARFDPHLKAFYLQLLARGKTKLQALTAVARKMLHAIYGIFKTDTPYDGAKLFPAMAAALAKQPQSVPIY

SEQ ID NO: 108449 - protein, 331 aa, unidentified
MQRKEIFIGVDVSKEWLDIAVQGTKNHVQIVNSSQGFKQLQAWLKSSGISIDDCWFVLEYTGGYEYRLVQFCQSKNITFTRVPGLEIKKSLGMQRGKNDKIDARRISEYGYEKKTKLKPHKACNAAILKLKQLLTQRRSFVKDKKAHEHRMKELHAMMELKVSDPVSKNYKQAIDFARKMIDKTEKELMKIINADESMSINFKLITSIPGIGNVNGWMTIAYTENFERFSNARQYGTYCGVVPYEHTSGKAIKGKTRVSHVANKTVKADLDMAARASASHDPEMKTYYERRELMGKHHMSIMNEIKFKLILRMFAVVNKQEVYVKNLKSVA

SEQ ID NO: 108450 - protein, 412 aa, unidentified
MEGETVIAGVDTHKDVHVLCLLDGLGRKIRSGSFGADPEGYDRLAEAIGDPGSCMVVGVEGTASYGAGLTRRLVELGYNVVEVLRPKRDKARPGEGKSDPLDAERAARKAASGRGCSVPKSQDGWVEAVRQLYVARRLAVATSTSCVACAKSMLTTAPSALRERFRGRERPKDLMPLLARGRKAGDALEESVLASLRSVAAVWKEARSQVESLDERIRALLEANAPALLGIEGCGTTTAAALVVAAGDNPGRLKGEAAFSMLCGVSPIPASSGKTERHRLNRGGNRQANWALYEIAIKRMAYDERTRRYVAKRTSEGKSRREAIRCLKRYIAREVYRVLMDPNPDGAAPEGPELAKMRKAMRVTQKQAAAGLGMSAASLGHLEHGRRRSTRLERRYYELLCELEGALPQTAS

SEQ ID NO: 108451 - protein, 411 aa, unidentified
MEILHPKCAGLDVHRDTVVACARIAAEGAVVQDVRTFGATTKELMALSEWLTDHDVTHVAMEATGVYWQPVWHILEGSFELVLANAMHIKNVPGRKTDVNDATWIADLLAHGLIRGSFVPPAPVQDLRMLTRTRKQLVRERASHVQRVDKILQDANLKLGSVLTDIMGQSGRAILDAIVQGETDPAKLVLLVTKRVKASRDKITEALRGKVTPNHRFLLKLHLGQADALQAAIEEIDREVGERLDPFRVSATRLTQIPGISDVVAAAIVSEIGVDMSRFKTSAHLISWAGLCPKNDESAGKRRSTRLRKGAPWLKTLLVQSAWCATRAKTTYLQAQFLRIKARRGPKKAIMAVAASILTASYHMLKNGVDYHDLGSNHFSGADKTKSVNRLLRKIENLGFEVTGIREKQAA

SEQ ID NO: 108452 - protein, 341 aa, unidentified
MNEVTLIGIDLGKHVFHVHGQDAKGHAIFRKKLSRLQLLPFFSNLKAVTVVMEACAGSHWLARKLIAMGHVARLISPQYVRPFVKSNKNDYIDAEAICEAASRPSMRFVEPRTEAQQLLAALHRAREGLVTERTATINRIHGLLLEFGIIIPPSRATLRRLPDALAVHDLPLRQGQMIHRLYEHYQYLDHEVSDIERDLTAQLREDENAARLLSIPGIGTITASLLASEIGNLAQFAGGRNFAASIGLVPQQHSTGGRGTLGGISKRGDKHLRHLLVQGARAVIQRADQRTDRLGEWIRSMLSRRHSNVVACAVANKLARIAWAVLTKHTLYDASRLKLEV

SEQ ID NO: 108453 - protein, 344 aa, unidentified
MQITTIGLDLAKTVFQVHAINSASEVVVKKTLRRVQMRRFFEQLDPCLVGIEACGTSHYWAREITKLGHEVRLMPPAYVKPYIKRGKTDAGDAEAICEAVRRPTMRYVAIKAPEQQAALALHRTRDLFVKQRTQLVNMIRSLLAEFGIEIRRGIEQALMLAKRIAAHEVADIPPLAAKVIAGLAGQVLDLQARLGEIERELLAWHRSNDISKRLATIPGIGTVCATALAASVTDPHQFRSGRQFAAWLGLTPLQHSSGGKERLGRISKMGDKYLRRLLVVGMTSLIRRAKYKPEAVDPWLADLLSRKPARLVTVALANKAARVVWAIMVRGGVYRRPAGVTTPA

SEQ ID NO: 108454 - protein, 367 aa, unidentified
MLRVPFPRAPKELAMTATSFPILAIDLGKYKSVACAYDPATGEVHFEALTTSRSTLQRLVERDRPAAVVIEACALCGWVSDLCRELGVACHVANTASEAWKFKHTKRKTDRDDALRLAQLFALKQLPTVPIPAKPVREWRALIAHRQALVGERMAAQNRLRSILVGQGLAAPRGASAWTELGLKGIEQFALPLSECGPEDLWRGQLHQVLRHYREMLALIAEAEAKLDALGKVHESVKLLQTIPGVGPRTAETVAAYLPDPKRFASGKQVSAYAGLVPRQYQSGELDRRGRITRRGPGLLRKMLVECAWCALRYNRWAQSVYVRLSRGQARKKQAIVALARKLLVRCWAMLRDGTAWREEPRPAAVG

SEQ ID NO: 108455 - protein, 322 aa, unidentified
MKFVGIDVAKDNLDVAVHGEPTSRRFAQTEDGYEALCTFVAAQEPKLIVLEATGGYEMAPLAALLTRQLPAAVVNARRVRDFARALGLEAKTDRLDAALLAEFASKMFERIRVMPLPSEDAVALRELLIRRRQLVTQLAAEKTREKQLIGPRKVERVLSSVERAISFLEREIETLDDDMGTRIKNSDVWKRKDELLRSVPGVGPTTSRTVLTVLPELGTLSNKQIAALVGVAPFNDDSGSPRKGKPRHIRGGRAEVRNVLYMATLTAVRCNPTIRAFHMRLVASGKKGLVAMTACIRKLVVILNSMLRHDALWDAKKLASAT

SEQ ID NO: 108456 - protein, 318 aa, unidentified
MSDSVFIGIDVSSQTLEVASSSQAKTWQVANDAAGIEQLVSQALALTPALVVLEATGGYEFEAACALQAAGLAVAVVNPRTARDFARSMGALAKTDAQDARMLAAFARVLHQHPERERFVKPLADAELQQLQALVLRRRQLVQMLTAERQRLRLAHAAARPSIERMIEFLKQEIGDSEEEVAAHVQRHHAQLAQALASVPGIGAASVAVLLAELPELGKLDRRRIAALVGVAPLNRDSGQMRGQRCIWGGRADVRRTLYMATLVAVRHNPALKACYERLLAVGKRKKVALVACMRKLLTMLNAIAKHGSVWDSTMHCA

SEQ ID NO: 108457 - protein, 338 aa, unidentified
MQEVAVVGLDLAKNIFQVHGIDAAGVVVVRKQLRRSQVLPFFEGLSPCLVGIEACASAHHWGRQLMAIGHEVRLMPPAYVKPYVKRGKTDAADAEAIAEAVTRPTMRFVAVKTEAQQAVLMLHKTRDLLVRQRTMLINALRGHLSEFGIVSAQGSAGVQAALRSLILEQERLPELAQAALRGLAGQLETLRAEIERLEHRILAWHRQDATSRRLATIPGIGPITASAMAASAPDPALFRSGRQFAAWLGLTPRAHSSGGKERQAGISKMGDGYLRRLLVVGATAVLRMARQHGTGGAWIRGLLDRKKPKAAAVALANKTARIAWVLMAREETYTPAAA

SEQ ID NO: 108458 - protein, 415 aa, unidentified
MNKLYAGIDVHSKTNYVYLMKPDGDKHSSFSVKNTPDGSKKLADNIISALHSLNISVLTVGIESTGVYGENLMIYLRDESRLNAFECNFHVLNPKQVKNFKKAYSDLPTNDPVDAFVIADNLRFGRITKPLYIDDGYKYKALQTLTRARFFTVQNLAREKQRFANYLFMKFSGLAQEKVFSNQTGAASMALADEFETIDELVYMNINELADFIAEKGRGHFPDPQAVAKAVQSAAKSSYNLPAPLNNSINQVISVSIANIRALKEPVKTFDNAIEKQLRLIPNSNSLLSIKGIGLVYAAGIISEIGDINRFDSHAALAKYAGIAWSENKSGNFSGEVTNLVKSGNRYLRYYLVEAADSLRKCDSEFRRYYDLKFKEVNRFQHKRALALTARKFIRLVFRLLKDNRLYTPPEMFKG

SEQ ID NO: 108459 - protein, 347 aa, unidentified
MSQNLSTVAVIGVDIGKNSFHVVGQDVDGVIVLRQKWSRRQVEARLANIPPCLIGMEACATAHYWARELVKLGHEVRLMPAKDVKAYVKRNKNDAADAEAICEAVRRPRMRFVQIKSPEQQGQLMQHRTRDLLIRQRTQIINALRAHLAEFGIVAAQGNAGVNELRVIVADERDTRLPIDARASVIVLAAQLEALECVIGAIEKRIKMQHRSNEASQRVETIPGIGVIGATAIVATVADPTIFRSGRDFAAWIGLVPRQDSTGGKQKLGPISKQGDRYLRRILVVGAIAVLRRAQENPGKYPWLTQLLARRPFKVVAVALANKMARTAWALLAHGGTYRAPELAEAA

SEQ ID NO: 108460 - protein, 406 aa, unidentified
MKQIVSVGIDVSKGKSTVCAMIHPYTIIKESFEVLHTVEEMSMLADYIGSLDGEIRIVMESTGHYHLPVAQFLYQKGFFVCVENAYIIRQFSRIMLHGAKTDPLDAKKLAKYGLAYWSELKPYKFHPSCYTELSLLSKQYQTYIKLLIAAKQNVIHLMDEMLPGFKEALDTASSVQFSKVKYVDFAKEFYHVDMIKSMGKEIFRENYKQWCKEKGYRFQSEKADELFHLAEDGIPTLPTEFPSTRLCMEVATEQVSQLGYALEQILSQMQNLAKTLPEYQTIRQMGGMGEKLCVRFIADIGDVRRFHNGKALVAYAGIDAPPYQSGQYTGTKRRISKRGNSALRKTGYEVMKSLKSHPPKTDTRVYDFIIKKENEGKSKKQAKIAGLNKFLQIYYARVIEIYKNIV

SEQ ID NO: 108461 - protein, 380 aa, unidentified
MAPPARPRVVIGLDVGKSAHWACVVTREGELLASRPIPNRENAIDGLYAQYPGALVVVDQVRNIGSLALSRAKLAGMPRAYLPGLAAHGASRLFAGDAKTDERDAMVIAKTALGIPDALLAVADRPPEVEAARSLAAQRDFLACENTRSKNRLRSILLESCPELEAQADLSDPATLKLMAAVGGPWLISEASPQAVGALTRGCRRAKVAALAGSVESSSRPHPAAVACEDRAVRLLARRISENDAEIEISALLSADETHRCLLTVPGIGPRTASELVISIDIADFPSHDRLASYCGLAPRNRRSGTSISSVSASRQGNKRLKNLLIFSCNCLARSRNRWGEYYARCRDRGMPHGKALKAVARKRLKVIYAVMRDKVPYAA

SEQ ID NO: 108462 - protein, 345 aa, unidentified
MKITTVGIDLAKSVFQVHGVSEHGKAVLRKQLKRSEVLKFFANLPPCLIGMEACGSAHHWARKLIELGHEVRLMAPQFVKPYVKTNKNDRNDAEAICEAVARPNMRFVPVKTPEQQAALGLHRARAGMMKARNAQANQIRGLLGEFGIVLPQGIGQLRRRLPEIVEDSKNGLPGLMRTLLRRLLAQLQQLDQQVLELEREIVLWHRQNDDSRRLERIGGVGPLTASAYVASLGNAKGFNNGRQVAAWLGIVPRQDSTGGKPKLLGISKHGDVYLRTLFIHGARSMLRHLEHRPDQTDSWLKRLMLRRGKNVAAVALANKNVRIAWALLAHQREFDPDYVPTAPSR

SEQ ID NO: 108463 - protein, 408 aa, unidentified
MVPIPCCAGLDLHKETVVVCLRLAVPNAPTRVLRKVFGTFADHLTALREWLLEHKVTHVAMEGTGTLWIPVYAALEGAFDLTLCNAHHVKNVPGRKTDQSDAAWLAQLLAQGLLAKSFVPDATVRIARELTRTRVMLVEDRARAVNHLHRLLDAIGVRLGSVVSDLQGTSAQLILRALADGVTDATQLAALAKGRLTKKKELLRRAVAVELRPSDRYLIDLWLRQLAQFGAEIEALDTLIAGALAPYTAELTLLQTVTGMDVVAASALLAEIGVDMTAFADAHHLASWAGLCPGQRESAGKSKGGRPRRGNPFVKRILVQVAWLLTRMKDHPWQGHFRALVVRRGTKKALLALAHQLLRAIFHILRHRTPFQPANRPPLTERQKTRRRERLLDQLQELGYVVDVREAA

SEQ ID NO: 108464 - protein, 358 aa, unidentified
MRIIGVDLHTRQQTIAMLDTETGEVTEKTLKHEGDTVRKFYEALPGPVQVGIEATGSMHWFLELLEELGIACRVGHPAEIRKAESRKQKHDRRDAALQLKLQIEDRFPSIGMPSTELRDLRTLLRHRHQWVRMRTRVQNALQALAVSRGLRRGKTLWSQAGQQAIESLPLPPQAAYRRTELQGLYRLLHEQIEELDQRVREQAVQRPGAQRLLTHPGVGPVTALATDVFLGDPARFEDSKTLASYVGMIPGEYSSAGKQRFGKLSKQGNPLLRFLWCEAAIHAVRRDPELQRFYRRKLSQKGLGKSRVAAGRKLGIRLWIMLRDQIDYQEFCRRGQMRRNSGGARAGMPEVAHSPAVQ

SEQ ID NO: 108465 - protein, 429 aa, unidentified
MIMGFTKPIEHFNLQRKEVLSMNTLYVGIDVSSKSNVVYLMLPNGDKHSNFSVANSRDGSAQLVKRILSALTSHSLDTVLIGLEATNVYGDNLVYFLREDATLAQFNRKIHVLNPKQVKRFHDTYNDLPKNDYMDSFVIADCLRFGRINKEVYMGDYRYKALKNLTRARYFAVQNLTKEKQRFMNVLFKKYSTMTQEKVFSNTFSTTALAVYDEFESAEALANMDLHELTAFIIRKGKNRFPDPDAVAKAIQKAARSSYRLPKTVNDSVNQVLSISITSMKALESQIKEFDKAIKAQMELLPNVLISIPGIGPVYSAGIMAEIGDINRFESQAALAKYAGLAWKKHQSGGFETEVTRLIPSGNRFLKYYLCEAAFSLVRCDKEYSDFYHLKYKDGNRCQHKRALALTARKFVRLVFRLLKDNRLYTPAK

SEQ ID NO: 108466 - protein, 367 aa, unidentified
MKILSYYEKEDFEAIRIGMENTSVYSKNLVWFLYEHEALNEHKLSIIPLNAIMVANYKKSFLDMDKDDITDSFAIADFIRIRPGLLPFKLDDRQEALKIMTRSRYNYVQALSRMKSQFLTRLFLSFSEMEAGKPFYSIFSKTSLSLLEEEFTLDELAEKPIPELVEFLQEKGGGKFQNPEEIAKVLKKAASSSYRVPAMVRESLNRTMASDMEIMRILENEIHNCDKNIEKLMKSVPAILVSIPGIGPVLAAGIMSEIGDISRFQKQESLGKMAGFKWKRNQSGKKESEDKAAVLSGNKKLRYYLVEAANRVRIHDPVFEAYYRKKYAESKTHAHKRALILTARKLVRVIFYLLKENKLYKPDVGIS

SEQ ID NO: 108467 - protein, 440 aa, unidentified
METEIDINHQDEFAAFIGIDWAARKHVFALCDGTADRIEVSEIEHTPEAVDAWAMELSRRFGERPIAVALEQVRGALVFMLAKYQHLVIFPIHPATLANYRKSFRPSGAKGDPHDARLLLDFLLRHRDKLRRIQPDTPETRTLRFLVEERRKFVDERIRFTQRLCAHLKLYFPQVLNWFCDMSSQIAEDFLERWPTLEELQKARTSTIQRFFIDHNSRNAGKIGSRVEDIRRAVPATQDSAVIIASSSSALALVGVLRQLRLAISAYDSQIEKLARAHPDFAIFDSFPGAGAALVPRLIAALGTHRDRYRTAHEIQCYSGIAPVVESSGKQHWVHYRRSCPKFLRQTFHEWALHSIAGSAWAKDYYRQHRASGQSHHSAVRALAFKWIRILFRCWQDRTLYDEAMHGTARRRRARNEGDSAVQLQWKTCAGFSKLSLQIP

SEQ ID NO: 108468 - protein, 352 aa, unidentified
MEQLIGCDAHKQFSVFVAVNEKGCAGEALRVAHDRQLYREFLTQLPPHSAIAVEASGHYSWLVDEMERSGHCPKLANPLEAKRRMGLTKKTDKLDARGLAILLRNGTLPEVWIPPSELRDQRELLRMRIFLVRLKTRVKNRIHGTLARHNVVVPGADLFGVEARLRLASRLPELPLHSREAVERELATLDFLETQVESAERQLEAIMKVSVEADLLKTLPCVGKILSMVLMLEIGRVGRFPSAAHLASYAGLVPRVHSSGGHTRMGQVCGNVNRNLKWAFVETGNLVVVNQRRLAGTHVVRLYQRIKRAKNHQKAVVAVARHLAEAAWWVLTKQEVYREPRNLRQALSSTHG

SEQ ID NO: 108469 - protein, 460 aa, unidentified
MNRKRSKSRIDRTLPMMHPNAAAIDVGATIHMAAVRADRAPQPVRSFGTFTTDLHRLVDWFTECGVETVVMESTSVYWIPIFELLDARGFTVFLVNARDAKHVPGRKTDVSDAQWLQRLHSYGLLRASFRPKGQIAELRAYVRQRERLLEYAASHIQHMQKALTEMNLQLHHVVADITGSTGLRIIRAILAGERDPEVLACLRHYSCHSSAETIAKALTGSYRTEHLFALEQALALYDAYHEKASACDVRIEAVLKELSIHRGRDVGSVPPASRRQHRTDQANALAFDVRAALFALLGKDITRIDGLGPYLSLKLIAECGDDLSSWPSAKHFTSWLGLAPSNKISGGKMLLSRTRRSGGRAAALLRLAAVTVGRTDTALGAFYRRLSSRIGKAKAVTATARKVAVLFYNAVRHGMEYVDPGASSYETRYRTRVVNNLHRRAKVFGFVLQPLEAKAHAVVS

SEQ ID NO: 108470 - protein, 353 aa, unidentified
MRKMQEFIVKDNRIFVGLEDSKKTWKLCVRSEGMIVHQTSMPTKYENLRNYLTHRYPGCRVKVIYEAGFQGFWLHDLLKEDGFECIVTPPNKVVQEKDNRVKTDKIDASRLAKNLEHGDYRSCHVPDKELREDRQISRTLDQIQKDIKRTKSRIRMMLYYHGLHTDLPDETWKPSDYERLREISVGDSLKIAFDATLDLLEKLGALRNRLMKAMQRLCKKERYEKSAALKASSPGIGWLSAIRFTLEWGDMSRFANGKKMGSFSGLTSGEYSTGDTVRRGRITKQSSPRVRAWLIECAWRAIKLDPVLLHKYRQVWKHSGSKKKAIVAVARKLAVRMRIVEVRQTPYCIGVSE

SEQ ID NO: 108471 - protein, 333 aa, unidentified
MHYVGIDVSKRSLDVCLLAEGSKGSRKTKTLSNGQDSAQNLAKWLILQKCELSQTHVIMEATGIYHEYLACGLHQMGILTSVINLCRSREFAKAMGIFTKTDAVDAYVLAFYGCLKQPEAWTPPEEEVRKLRALLQHRDSLLNDKLRIDNRLNTLKSTEAVQEVMDSLSLVNQYLKSEVARIERLISSHIAQHPGLKRDLKLLMSVDGIGKQIGWNMLAVLRGNNFKSAEQLAAYLGVVPVERRSGTSVHGRARLSKIGSSNIRAKLYMGALTAISKNSHIKALYERLLAKGKMKMSALGAAMRKLVHLCYGVLHTQQPYDEKYKAKIINFSS

SEQ ID NO: 108472 - protein, 360 aa, unidentified
MSKRVSKKESWFKGNNFTAKDEIYVGVDVHKRHYHVAIWHNGRIGCAYSMTSDNNKLLRDIQPLRSSLKNIVYEAGPTGYSLVRLLRSANLPAEVVAVSKTPRMTDSSAKTDRLDCQQLAEYAAKGLLTFVAIPTEQQEADRQVVRLRDQLTSKRRRIMQQIKSFLLQHSISWPGGNWSKILIERLRQLDISSELRFTLAQYLDEYEFFCGKIAETETKLRQIFSSKRHSAAIEIFKSHPGVGDIVAWEYRAELFNITRFSEPKQISKYTGLCPKVSQSGKTCHQGPITKTGRRQLRAMLVQAAWAWYRRDPHARQIYNRLLHNTGNGKKAIVGLAKRIAIHLWRMLCDGCLYDANVVKV

SEQ ID NO: 108473 - protein, 410 aa, unidentified
MQTLVERGCGLDVHQATVVACLLIVLQNGKVQKQIRTFGTTTRELQSLREWLLSEGCTHIAMESTGVYWKPIYAILEGALEIVVANAQHVKKVPGRKTDVKDAEWIADLLCHGLLRSSFVPPKPIRELRDLTRYRRKLVESQTAERNRLLKLLETANIKLASVATDVFGVSGRLMLEALVEGKATPQEMAELAKGRLRQKIDELGPALEGKLEEHHRFLLRLQLDRLEAAEKDLAVLEQRLQEKLKPYAEQLTLLDEIPGVDWTLAAVIIAELGVDMSVFGSVSQLASWAGVCPGNNESAGKRKSSRIPKGNVYLKTALVEAANSAAKAKGTYLRDKFYRLKARRGYKRAAVAVAHKILVAIYHMFSDRVCYNELGDVYLDKLNKHHLTRNLVHRLERLGYTVTIEQKAA

SEQ ID NO: 108474 - protein, 506 aa, unidentified
MNKYIGIDVHAASSTVAVIGESGRRLGTFVVETTGEAVLGCIRVIAGKRHICFEEGVQSAWMYELLEPHAERVVVAAVGASPRGQKSDDRDAFSLAERMRVGTIDRAVFKQVGAYKTLRELGRAHMMVVQDVVRVQNRIKSLYRSRGVAVTGKQVYGVDGRREWLERLGPGTRQAAETLYAQYDAISEIRKRAEKELTQEARRHSISKVLETCPGLGPIRVAQLVPIVVTPHRFRTKRHLWSYCGLGICDALVIRLGARQDRGLATCQGAANARVEPDAQPSAQGDLQGRRHDRRHAATRRSIVRRLFEAARRRNETQPGQSQHRQKDRGDHAGHVEIRKGVQRDPAPQASFRIARSEWRHVHAREAGPSGHLITGTRKVRGRVSVDSLDPMQLSESPSVGYAPSEYRTKPWPIEVLIEGWFPSFARRGQTGLQVARIAHPMRGRLLDARCAGASSCCHPIGSRQFSNPDRNRGSCSLRGVDAGCQNQCIAGRWGKVSLDIPFHRK

SEQ ID NO: 108475 - protein, 348 aa, unidentified
MKQNIITIGMDLGDKVSCYCLLNPAGEIVKEGKLATTRQAMAQTFGPMKRSRIAIEVGGHSPWVSRYLRQLGHEPIVANARQVKLISQSSRKDDKLDARLLARLARVDPQLLRPIRHRSEEAQLDLMSIRVRAALVEQRTALINTARGLAKSVGERMAACDSDQVSVERMRDLPAPLAEVLRPLLEQIESLGAQIKTCDARIERIARERYPETALLRQVGGVGILIALTFVLTLEDRGRFQKSRDVGCYVGLRPKRSESGQRQPELRITKEGDPYLRKMLVQGAHYVLGWRGPDTDLRRWGQKLAARGGKNAKKRAIVAVARKLGILLHRLWVTGEVYEPLRHHPLAA

SEQ ID NO: 108476 - protein, 497 aa, unidentified
MVWIFQAELIPDRKLIDLRRAHLFLLLSNYFILPMEKSTTRQKKRKLNIIHPYAAGIDIGSRSHVVSVPPDLDDEPTRTFNGYTDDLKFLVQWLIGLGITTVAMESTGIYWIPLYELLSNAGLEVYLVNARHVRNVPGRKTDVNDAQWLQQVHSYGLLQASFLPDRDIAQLRSFMRLREQLTRSRASIQQQIQKALMQMNLQLQHVVSDVMGVTGRNIISAILLGVRDSKELAELRDERCKNSKEMIEKALCGNYESDHLFELQIAFEIYNTYSSKIEAAEEMIEEALLQLSKTAQKPLTGFDKADILRSLPSVPKQRRKKVLSFDPGPMLQAITGRDVLQIPGLGEGTILTIISECGTDMTRWKTSKHFTSWLGLAPQNKITGGRIKSSRTRGGAGRAATAFFMAAMRVNKLDSALGAFSRRLAARAGKGKALVATARKLAVLFYKMMSEGFTWNDMGSEAYEEQIRQRQVKNIIKKAETLGLRVLEDSLEAAPAS

SEQ ID NO: 108477 - protein, 348 aa, unidentified
MTMVSQQFSYVIGVDTHAKTHTLVALDHLGGKHGTAQTFPTTPPGLKRAQAWIERETTGPVLVAMEGTGSYGAQFCDLLTAAGVRVTETKPPKRGVRRAGKTDPIDAEHAARYALALPMEHLITPRNHAGHHAALTVLLTARAALKKAHSASNNRLTALLRGYGFGLDVRLALTAEQVKVVAAWRAHRNDDVGMVTIRAEAAREAREILSRQAELTANEKGLLKHVKALAPYLLLEHGVGAIVAAQLIVSWSHQGRIRSEAAFARFAGIAPIPASSGNTIRYRLHRGGDRALNTAIWVTTFYRYHHDPATAAYVEKRTKEGKTPKEIQRVLKRYIARHLFRVLDNHTI

SEQ ID NO: 108478 - protein, 326 aa, unidentified
MGEDDTMSSELFIGIDVSKDHLDIAVRPTGQCLTLENTDTGVDELIRTLSEFSPTLIVMEATGRYHQLALGRLVAANLPAIAINPRQSRDFARALGRLAKTDRIDAALLAEFADKVRPVLRSIPDSDTQELEALCTRRRQLMTMLIAEQNRHHSAPRSLRPGIQKHIHWLEKELEHSDKELKNRIRSSSAWREKEDLLSSCKGIGPVTTHSMLAYLPELGTFNRRQIAAIVGVAPFNDDSGKHRGRRSISGGRRQLRNVLYMAALVATRHNPTIRAFYQRLIAAGKLPKVAIVACMRKLLTMLNSMVRNNTPWRADYSLDRQDSLS

SEQ ID NO: 108479 - protein, 323 aa, unidentified
MNKYKETFGVDISKDVFDVHGSNKGHHQYKNDEMGFKKYLKELPQGSLVVMEATGYYHYRLAQFLYKNGVVVSVVNPLSIKRFIQMKLAKVKTDKSDAKAICAYGLSNEVPLYNALTDTQSECLQLFRLLDTYLKQRTATKNKIHGEAVLGIPSKFVHRSLVRNRKQLDKEVSAIESKILSLVKEDQQEQLTLLTSIPGIGQKTALFLIVVTDGFSKFENASQLCSYVGITPTVRESGSSVRGRARISKVGNRKLRNLLFLCSFNACKHNKACKAIYERITNKGKSKKLALIAVSNKLLKQAFAIARSGLPYDEGFVSVLTRR

SEQ ID NO: 108480 - protein, 313 aa, unidentified
MAHMVATAGIDVSKDRLDVAVHPTGQEFSVTNDAAGWRLLVRRLRSVQPRAIGIEASGGYEHGAIGALLEADLPIRSVNPWKLRLFAQAAGVLAKNDRLDAGLIARFVATMPSRAVRRDPAVEQLAELVRARRQLVDDLQQIGCQAEHLRDATLRRLQARRMRQLERDIVLLDQRIAQTIAASPGLRARCELLCSMPGVGPVLAATLLALLPELGSLSNRSVAALVGVVPYDFDSGRMKGLRCIFGGRAAVRRVLFMAAQAAAMFNPTLKAFKQRLLAAGKKPKVAIVAVMRKLIITLNAMVRNNVPWHPAVT

SEQ ID NO: 108481 - protein, 337 aa, unidentified
MQIAIIGLDIAKSVFQVHGADKAGEPVLRRQLRRRDVLRFFANLEPCLVGIEACHSSHYWARELIALGHDVRLIPTQYVKPFRRGSKNDLNDAEAICDAASRPAIHSVAVKSAEQQAIQSLHRTRERLVHERTAKANQIRSLVAEEGVICAKGIAQLRRCLHELIAENDRTTPLLRSLAGLFLEQLAALEGWIGELDGKIQEIAKTSTVCRRLVRLPGVGPVIATAIVGTVGNAHAFKNGRQFAASLGLVPGQRSSGGRTMLLGITKRGDTYLRKLLIQGARALLRVVGRHDDRQSRWARQLLTRRHKHVVAVALANKLARTIWALLVKGEAFEMPR

SEQ ID NO: 108482 - protein, 344 aa, unidentified
MNKYAGLDVSLEETAIAVVDESGRVVREAQVASEPEAIDAWFRTEAAGIVRLGLEAGPLSSWLYAGLKARGWPAVCIETRRLRAVTRAMPVKSDRKDAEAIAQVMRTGWYRAVHVKSLASQRLRVLLRHREILQAKRRDLENELRGTLKAFGLKLGKVGQRQFAARVLELVAGEPWLERLARPMLAARAALGESFAELHALLLKIVRDDAVCRRFMTVPGIGAVNALAFKTGVDDPTRFRHSADVGPHFGLTPRRYQSGESEHIGPISKAGDAMVRSLLFEAAMALLHRVRAPSSLKRWARTLAKRVGTRKAAVAVARRLAVVMHRMWLDGTDFNPELGRAAAR

SEQ ID NO: 108483 - protein, 333 aa, unidentified
MIYFVGIDVSKSTLDIAVVNSGVLIKEEQISNEKASLRGFLKTLKQSFNLSLERIVVCMEHTGIYNYRALEVLHDSGINVCLEPALQIKQSQGMTRGKDDKVDARRIAMYAYKNREQLVFWKPQREVLQKLQALLTTRERLIKVKKQLQVPLQESAGFIDPSILKSMKTSTISIIKSITKELKELDLKIRNTVKMDEKIAKQYSYATSVPGVGPIIALNVIIRTAEFQRIKEAKQFACYSGVAPFKHQSGSSIRGRTRVSKLANMTMKTLFSLGATSAIQHNPEIKLYYKRKLAEGKKPMSVINAVRNKLITRIFACVNQERKYEKNYQYALA

SEQ ID NO: 108484 - protein, 373 aa, unidentified
MEESTKVHVGLDVHKDSITIGAAEPGRAPARVIGKTAHDVNKLLKVLVKLGRPEQLHIVYEAGPTGYGLQRALQARGYLCEVIAPSQMPRRPGDRVKTDGRDCVQLAECSRAGQLRAVWVPDPADEAIRDLSRAREDAVNSRTKARQQLKGFLLRHGVRYTGKTSWTKAFYRWLATLSFGAGASQTAFTEYWLAVQAADDRVQRLTQALQPSIAGWRFEPVVAALQALRGIDVISAIGLVAEIGDLSRFDHPRKLMGYLGLVPSERSSGERVSRGSITKTGNTHARRLLTEAAWNYRFKARIGRQAQRRQEPLSEQIRSMGWKAQLRLSRRFAALLERGVQPNKACVAVARELAGFVWAIGMRVSREQTATQQ

SEQ ID NO: 108485 - protein, 426 aa, unidentified
MFVESGDDELVIERVAALDIGKAEVVCCVRLPKPEGGKARVQEVSTHSTMVPSLCDLANRLVGLGVTRVVMEATSDYWRPPFYLFEAHGLDPWLVNARDVKHLPGRPKTDKLDAVWLCKVAEKGMLRASFVPPADIRRLRDLTRYRVDLVGVRTAEKNRVEKLLEDACLKLSVVASDIFGVSGRAMMNALINGERDPHVLAAMAKTALRRKIPQLQEAFAGLRLGTFDDHHRFLLARMLARIDAVSVDIAAVEVEIGEHLAPFADAAARLDEIPGIGPAAAAAIVAEIGVDMSRFPSPGHLASWAKFAPGINSSAGKTKGNGSTGHGNAYLARALGEAAVCASRTDTFLGERYRRIARRRGKKKAIVAVGRSILVIIWHLLSEPDTRFCDLGSDHYDRHVNTTAKRRNHIHQLEALGYKVTLEPAA

SEQ ID NO: 108486 - protein, 348 aa, unidentified
MYIGIDLHKETCYATTLDKEGEIIDRREFKNNREEWEKYIEEMPRDSKVAVEACSYWYPVCDLLEERGIEMVLSHPSKTRIIAEAKIKTDKVDSKNLAKLLRADFLPQSYIPSKEIRENRELLRLRVQLGKDRTVVKNRIHALMAKNGVKHEFSDLFGVEGMNFLREIDLPELQRIAVDVLLRQLESIDKEIEHVQKQIAVIAREDEDIKILMTIPGIDYYSAMIIKNEIGEIERFLDYKKLCSFAGLVPRVHQSGNTRWEGHITKEGDALLRWILIQVVHQVVRYPGELRKFYYELKKKKSTKIAVVATARKLLRVIYCMLARKENYRYERKALTESKLKRLEKTTC

SEQ ID NO: 108487 - protein, 355 aa, unidentified
MTEPALGIDIAKLKFNVCLIKHDGKLKHKVLPNNEAGFEQLTEWFSRQGAGRVHACLEATGTYGEALALFLHQAGHAVSVVNPAAIKAFAQSRPSRTKTDRVDAELIARFGQAQEPPRWTPPAVEVRELQALVRRLESLIEMRVMEENRLSSGITVDSVRQSVEELLNHLNEQIKHCEELIRQHIDNHPGLKRQSELLDSIPGTAESTAAALLAEITGIKQYKSARQVAAYAGLVPRERQSGTSVRGRARLSKIGNARLRRALYFPAITALRCSPFFQAWAKGLQERGKSKMSVICAVMRKLVHLAYGVLKTGKPFDPEWEKIACLPTQYLTGREVLTDSIPVDDKRQTHSAPVE

SEQ ID NO: 108488 - protein, 311 aa, unidentified
MDATVVVGIDVSKDRLDVHVHPAGESFGVARNAEGLDELIARLVPLRLAGVAVEATGGFETVVAASLAGANLPVIVVNPAQVRAFAQALGKRAKTDPIDAAVIARFVEATKPAIRPLPDEQTRLLAELVARRRQIIQMIVAERNRERLIANRHLRKSVARLIKALEKELNVLDADIDDSVRGSPAWCEKEDLLRSVPGVGPVVARTLLAEMPELGSLNRRQVASLAGLAPWTRQSGKWRGKSFTGGGRTALRSTLFMAAMVARRCNPLFKAFYERLLASGKAKMVALIAVARKLLTILNAILRDKSPWQTA

SEQ ID NO: 108489 - protein, 347 aa, unidentified
MNFYTKQHKFYCGIDLHTQKMFVCILDAGGNVRVHQNIHTDSEAFLHIIAPFREDVVVAVECMFTWYWIADLCTQEHISFVLGHALYMKAIHGGKAKNDKIDSLKIATLLRGGMLPQAYVYPARMRATRDLLRRRNHFMRKRAELFAHIQNTRSQYNLPDPLGCIAKPQNREGIVERFDDPSVQKSTAVDLEVIEAYDHILTQLERDIIACAKEHDLRSYALLQTIPGVGRILGLVILYEIESIGRFPQVQDFVSYCRLVKCIKESNGKKYGSSGKKIGNAHLKWAFSEAAVLFLKGNEPAKKYLQRLARKHGKAKALSILAHKLGRAAYFMLKNKEAFNQKKFLGL

SEQ ID NO: 108490 - protein, 334 aa, unidentified
MQNITLIGIDLGKHSFHIHCQDKSGKALLRKKFTRTKLMQFLATCPPSVVVMEACAGAHFMARCISDFGHETKLISPQFVRPFVKSNKNDFVDAEAICEAASRPSMRFVQPRTETQQAMRALHRVRESLIRDKVKTTNQIHSFLLEFGISLPIGDAVIKRLSLVLAEHEIPEYLSRLLVRLHTHYFYLVEQIAELESELSQSINADDTAQRIMTIPGVGPITASLLSSQLGDGKQFSCSRDFAASTGLVPRQYSTGGKSTLLGISKRGDKNLRRLLVQCARSFIMRLERKHGKLAEWVREQLNKKHSNVVTCALANKLARIAWAITTQKKEYQA

SEQ ID NO: 108491 - protein, 312 aa, unidentified
MHELFVGIDVAKDTLEVHERPSGEGITVTNDERGLQELGARFGQRVPALIGLEATGGYEVVVAATLTSAGLPVAVVNPRQIRDFARATGQLAKTDALDAAVIARFAEAVRPPVRPLATGTAQALGELVARRRQLVEMLGAERNRQGQVRDRQVQRQLGAHVKWLTKALADLDRELQDTIRSSPVWRETEELLRSVPAIGPVTAHTLIAEVPELGRLGRRQIAALMGVAPLNRDSGTFRGRRMIGGGRASVRRVLYMAALVAVRYNPRIAAFYARLTGAGRPKKVALVAAMRKLLTILNAILRDHRPWHPEIA

SEQ ID NO: 108492 - protein, 364 aa, unidentified
MYDSTMTVTVGLDVHARSIRLAVVRADELLEERTLAYDEEAVERVLRRWPVVRCCYEAGPTGFGLQRFLAGRGIDCQVVAPGLVPQRPGDKVKTDSRDARKLARLLAGGLLQPIHVPTPELEAARDLVRAREDARLDRMRDRQRLSKFCLRHGLRMPTSSWTVVRRKWLGEQHVEFPAQQQTFDTYVHTVDLVDARIERLERAIRETAEQQPWRGLVARLRCLRGIDTLTALALVAEIGDFDRFKTAEEFMAFVGLVPSEHSSGEKRRQGSITKVGNSHVRRLLVESAWHARRRPKVGYELTRRQRGQHAEVIEHAWRCQQRLYQRWQRMAGRGKPHQKIVVACARELAGFVWAIATEQPLRNA

SEQ ID NO: 108493 - protein, 325 aa, unidentified
MEKTFIGIDVSSETLDICIKISGSAEYLKISNQKTAIKAFLKNYAVAECVLAMENTGRYNWTLLEVLAGMDLQVYVIPPIHLKKSLGLSRGKNDKIDSMRICNYIEKNQNESDQWKASSVSITRLKVLLTERRSRIKMKSQLVRQQYDYKLMKSLALDKELLKLNKKLIEAINKQISEIESTIEQTIMGDNELKKQCELIRSVPGVGKIVSWTMIAKTEGFSTINDPRKMACYCGVVPFEHQSGTSIRGRSRVSAFADKGLKSMLHLAAMSAIRSGNELEPYYKRKVAEGKNKMSVLNAVRNKIIHRIFAVIKNQTMYKYELVLS

SEQ ID NO: 108494 - protein, 317 aa, unidentified
MNSTNNQNEINVGVDTGKTQLDIYIRPLGIYFVVSNDEGGIKEAITVIKKHKVTRVVIEATGRLEQPFIMACAKANIPFVIANPVNIKRFAGAINQKAKTDKLDAQLIAHYAEVIKPKLSELKPEQIRLMSDLLSRRRQLMDMQTMEKNRLQIMPKEITSSIKPVLTVLKNQLEKIDNKLLKLIESCDEYKIKNDIVQSVPGVGKVVAFNLISEMPELGYINNKEAASLVGVAPFNRESGSYKGKRMIRGGRSQIRTAMYMAMMSAIQCNPTFKKLYQRLVAAGKPKKVAIIACIRKLVITLNSMVRDGVYWDPKMN

SEQ ID NO: 108495 - protein, 393 aa, unidentified
MICVGIDVAKDKHDCFILSSEGEVLADVFTISNNAEGFDTLLQTIHRCARPEDKIKVGLEATGHYSYNILGFLLDKGLHTFVINPLHTNLYRKSLSLRKTKTDRVDARTIAAMLMSDVDLKSYTDTAYHNEELKSLTRYRFDKVKERAKLKQSVSRLVTILFPELEKLVPTLHMASVYALLSEFPGAKQIARAHLTHLKALLNDASKGRYGRDMATELRDAARCSVGSVMPAKSLELQHTIRLIRELNTEIEDIESAIQTIMEEMQSPITTIPGIGFRMGAMILAEIGDFSRFDSPDKILAYAGMSPSTYQSGQLSLSGTYSHMEKRGSKYLRYALYNATKYVCLWDSAFEAYLAKKRAEGKHYNVALSHAAKKLVRLIYAMEKSRQPYNSVA

SEQ ID NO: 108496 - protein, 426 aa, unidentified
MRVLYDRVAAIDVHKDMVKVAIRVPGVKRGTRQTDVLEFRTFYGVLQAMARELRGRGVTHVVMEASGVYTDPVYYALRELDFEEVMVINPAHAKALKGHKTDAKDAIRLLDLYECGLLSGSYIPDPDLREVRDLARYRMKTVQARTSEIQRLQKTLETAGIKLSSVVSDVTGGSATAMIEALISGERRGAVMAGLAQTRMRTAGKMADLSMALTGRFTEHHALMCRLHRDRITIFDDAVKDLDAKIAPLVARYAREAELLKTLPGFGDVIVAGWLGAIGPAPHQHFATASRLASWATICPGNYMSAKKSKGGRTGDGGAYIKPLLIQAAWAAVRVPGRLQARFGRLVRKFGGPRNKGAQKRAITAIAHTLLKIAYGVLKTGRPYADLGADFYTRRESPDARQDYLMRQLQKLNPGCVITITPTEAA

SEQ ID NO: 108497 - protein, 316 aa, unidentified
MRLYNNFIGIDIGKFTFVVALHGEKITKEYTNTLEGIQEFLKAHEEILATTFCVLETTGGYERSLLLALSANQYVVHRADTRKVKDFIRSYGTKAKTDALDAKGLAHYGYERHGQLKIYESANETELTLFTLVMRRNDLTQMRVAEKNRLKAPNNQAIKGSCEEVIAMLSEQIESITTSMNELIENASILKEKRKVLKTIPGIGDAISTELLVLLPELGTLDRRKIAALVGLAPQANESGRYKGYRRTGYGRQGVKPKLFLAAMAARNSNSALKAFYEKLIASGKRKMVALTALMRKILVIANAKIRDFNKEYNWA

SEQ ID NO: 108498 - protein, 320 aa, unidentified
MTEHTKEQCITVIGIDLAKRSFHLCGMDAQGRRVFSKQVSRAKLASELANRHPCLVATEACGSAHYWGRLFESHGHQVKLIAPQFVKPFVKSNKNDAADAEAAQRPTMRFVLIKRVEQQDLQAIQRMRSQAVEQRTAQVNQIRGLLAEYGITIPQGRAHVRPCLAAILEDAENGLSALFRASLQGLAGELLHLDERVAAYDAQIAAIGSDPRLLGSGRGLAAFLGLVPRQHSTGGRDRLLGISKHGDTYLRQLLIHGARAVMRWVERKADALSRWATALRARRHNNIAVVALANKLARIAYAVLISGQPFDPARGAVSKA

SEQ ID NO: 108499 - protein, 403 aa, unidentified
MQHVIAFDVSMGKSYMVIYNAQKQCIFESEINHSKPDFEELRKRIDQLMNENKKSPHIVFEATGVYSRQLERFMQDNKFEYFLLNPLEAKLQCDSLRIHKTDRSDAHQLALTHFTASRREKTGTDNLFYQLKSLSRFYSELDDELSLIRSRMHKVIQLTFPELEQIFTTKSDLFLNFVQLFPHPDFVQNLSKTVMKNQIRKNTNKNISISIAEKKAMEVLEAARYSYPAVRQDDVLCEQLKSYAKRYQELLHQKEQCITKMVRLAESRTEYPIILSFPGIGPNTAIRLLAEIGDITRFENNKQLNAFAGIDIRRFQSGKTFFKDKINKRGNKHLRKLLFLIIQNMIKLRRYGQNHIVEYYDKLKTQPYNKCHKVASIACVNKLLKLLFYLITHNIHYDYRLTA

SEQ ID NO: 108500 - protein, 372 aa, unidentified
MECRGGGEANASAFCWNDRLAKISPTHTLSVNRNLTAPVGDRRLSQANAGVVPPRNYKRGHYIMDVKNYGVDVSKDKLDVACDGRVVQIDNEKKAIKSFVKGMPIGSLVVMEATNTYHLEMADICHARGMRAFVVNPRITSHYRKANGFRGHNDRMDALALSRYIEREHDGQREYVPKSADQGRLKTLVRRRWKLVGIRTQLQESLGSLKELSRELEALLARIDALIAKLELLIDKQLEGNADRARIETIKGVGPIVSAVLLSDLACCEFARADAFVAFYGLDPMPDDSGKRKGRRKLSKQGDRLARAMLYNAAMSAVKSKDWKPMYDRCQARGLTKVQALIVVARKIAKTAWSIHTHKTTFNPDRLFQALT

SEQ ID NO: 108501 - protein, 393 aa, unidentified
MFIVGVDVAKRSHEAIVLDDSGGIVKKAFNFKNDSTGFQKLTAVLDSITTDPSDFIVGMESTAHYWLALYSALHKRGYTVHVLNPIQSNALRGMYIRQVKNDEHDSFIIAEVIRFGRYTEGGLPPSELYELRELCRARSFIVDMTADLKRKVIALLDQAFPEYETVFSNIFGLTSSELLLNCSTPEEILAIDTEQLARIIEVPSRKRFSTPKAEQIKEVAANSFGIVLEYGSMGLLIKQYMEHIRYTEKQIAELEEKITELYAHFDTQLTTIPGIGTTLAATILSEIGDISRFSSAAKLAAFAGIDPTVKQSGEFTATHNHMSKRGSPYLRRAIWQASTLAVIHDPALKAFFEKKRAEGKPYMNAIGHVTRKLTNIIFAVLRDNKPYYCRSDI

SEQ ID NO: 108502 - protein, 326 aa, unidentified
MDERGKAVLRKQLRRAQVAVFFGNLPPCVIGMEACASAHYWGRTLQRFGHTVRLMAPQFVKPYVKTNKNDVADAEAICEAVGRPNMRFVPIKSIEQQAILSVHRVRKGFVKARTAQANQIRGLLGEFGLIIPQGIINVTKRVPELLEDAANELPLAFRQLIERLAQHLKELDRQVKEFEKEIIAWHRSSELSRKLEKIPGIGPLAASALVASIADAHSFDNGRQVSAWLGLVPRQSSSGGKATLLGMSKRGDAYLRTLLIHGARSAILAAKNKTDNTNGWLVNLLNRRHPNIAAVALANKNVRTVWALLAHGGEFKANYVPARMTA

SEQ ID NO: 108503 - protein, 412 aa, unidentified
MELLHRRCCGLDVHKETVVACLRLVSDGKVTTEVRTFQTTTADLLRLSEWLAANECTHVAMEATGVYWKPVWHVLDDGEFALVLANAAHVKNVPGRKTDVNDAMWLAELLAHGLIRASFVPDAQTQEMRNLLRTRKQLVREQSSHVLRVQKTLEDANIKLDSVLTDLMGKSGRAIIEALIAGETNPVKLAGLADRRVKASPEKFREALRGRVTKHHRFLLRLHLNQIDALDAAMATLDAQVGANLGPFRIAVELIGSIPGIKNLGAHVIVSEIGIDMSRFPSAAHLISWACICPRNDESAGKRRSNRVRKGGTWLKTTLVQCAWAAVKKKDSYLQAQFYRIKARRGPKKAIMAVVASILTTIYHMLKDGTMYKDLGRNHFERRSSDQQKNRLVKRLADLGYAVEIKPLATTA

SEQ ID NO: 108504 - protein, 312 aa, unidentified
METKFVGIDVSKLTLDFDCLPVSAAQPFANDAVGIAALVAWLQDSGVERIVIEATGGYETAVASALAVASLPVVVVNPKQVRDFAKAMGHFAKTDRLDAKVLALFGERIKPPLRAIPDEAQRALADVLGRRTQLVVMRAQEKARLATVAAVARKNVEQHIAWLDKCIGKLDADLGDRLRQSPVWCNKATLLDSAPGVGEVTTFSLLAKLPELGTLNRQKISALVGLAPFSDDSGKRQGARYIRGGRAEVRCVLYMATLSAIKHNPPIKAMYERLTKAGKPFKLAMTACMRKLLTILNAMLKKNQTWKIQPSS

SEQ ID NO: 108505 - protein, 421 aa, unidentified
MSNSTLSKKLASVKPGTLFVGIDLALDRNVAVVLSEQAEQLTRFGFPNERDGYDYFYRRLAAIQEQQQAPAVLVGMEPTNYFWKLLAADMEHQQPDYGYRLVNPYTVKKRREGDQLDRSKDDNRDAFTIADLLRTGKYTETQLLHGGYAELRQYVTVYARLRRDVRRQKTLIRNVAGQLFPELPRVFKDLAGLTALAMLRNHAAAAVVRKMSQDAFIAGVRSDLPGQRVQVAKLRRAHVLARRSVGLTEGVEALQLALRLHIEALEALEQQLEEVYKALVDAFLALPESAYLLSVHGLGIITAATILSEIGDPSHYTNARQLVKLAGTQPVPNTSGRKSRSKTPMSHKGRPRLRTALFFAVMRLVQIDQAFARDYLHLQTREENPLTKMQALGVLMNKLLRILWALMRQRSSYDPELQLAV

SEQ ID NO: 108506 - protein, 321 aa, unidentified
MTRIICGVDIGSSSLAARIGQDGAAASFANTSEGIAELAAFCESHQVALVAMEATGGYEQRAFAQLSGHGRPVAVVNPRAVRQFAQSMGWLEKTDAIDAGMIAWYAQTRKSQPLCLAPPAQLELRARVTRLRQLTEVRTAQLNQQRLVTNEAVQKGFRQMLKFLAEQIRELEQAIAALIEADPLWRELNQAFRTIKGVADRTVARIMAEMPEIGTRSNKTVSKLAGLAPLANDSGKHQGKRPVRGGRATVRDILFLVGSVVARYEPDFIAFQQRLRAAGKPPKVVRIAVAHKLLVRLNAKARQIRQQSVPLQMSCSVSQQP

SEQ ID NO: 108507 - protein, 339 aa, unidentified
MTVKTVGLDLAKDVFQVHGISENGRVIFNKAIKRAKLLAFFETLPPCRVGMEACGSSHHWGRQLRKLGHDVKLMPAGYVKPYVKRGKNDAVDAEAICEAVRRPTMRFVEIKTEEQQAILSIHRTRDLTVRQRTQMANMIRSLLREFGHILPIGIEAVTAFAKRHLTGDHPDMPEIANGMLGIQCYQFIGLNERIEGYSKMIEQHALLNADARRLMRMPGIGPITASAIVATIGDGNQFRTGRDLAAWLGLTPLNKSSGGKERLGKITKQGDRYIRKLLVVGMTSRAVMAKRSPEKVDLWTAKIIADKPFRLATTAMANKAARSIWAMLTKKQEYRQPAF

SEQ ID NO: 108508 - protein, 378 aa, unidentified
MYRIIKIGMDVHSTNYTLCAMEPVIGAEDRIFANIKVTPDYKNVLMFIENLKLKLGLNDTYDIECGYEAGCLGYSLYNQLTAAGVRCVILAPTTMLTQQGQRIKTDARDAVMIAQCLSYGGYHPVYIPAEEDDSVKEYLRMRDDHKLALKKVKQQINAFCLRHGHRYEKTKWTIAHLKWLKQLELSALYRETLDEYMASYDEQTAKIERFDKRIEELASQERYQEKVKKLGCFLGIKTHTALSLIVETGDFERFAKGNVYAAYLGLAPGERSSSDSINRLGITKAGNQHLRLLLIEASGGICKGAVGHKSKDLRQRQNGNPADVIAYADKANTRLRSRYYKFIRHGKKRNVAVAAIARELACFIWGMMTDHIQMQKSA

SEQ ID NO: 108509 - protein, 388 aa, unidentified
MIYVGIDIAKLNHFAAAVSSEGEILIEPFQFSNDYDGFYLLLSKLAPLDQHSIIIGLESTAHYGDNLVRFLICKDFKVCVLNPIMTSSMRKNNVRKTKTDKVDTLVIAKTLMMQDSLRFSTLEDLDYIELKELGRFRQKTMKQRTRLKIQLTSYMDQVFPELQYFFKSGLHQKAVYALLKEAPMPKDIASLHLTHLSNLLVKSSHGHFTKDMARELRVLAQRSVGLNDSSLSIQITQTIAQIELLDSQLFETELEMANLVTCLHSVLMTIPGIGTVNGGMILGEIGDIHRFSTPGKLLAFAGLDPTVYQSGNFQAKRTHMSKRGSRVLRYALMNAAHNVVKNNATFKAYYDTKRAEGRTHYNALGHCAGKLVRVIWKMLTDEVEFNLE

SEQ ID NO: 108510 - protein, 456 aa, unidentified
MKKKATMEIIHPHAAGIDVGSRSHFVAIGQDKEDIQQFGVYNEDLIALTQWLLDNDITHVAMESTGTYWQSLFSTLQEAGIIVTLCNGKFTKNIKGKKTDVIDCQWIQKLHTLGLLSGSFLPDSITEQLRTYCRHRLNLVDAAADCTRKMQKYLRLLNIRLDIVVRDITGLTGLAIIESICSGETDAATLAALRNGNCKKSEAEIAKALQSNKRPDYLFALQQELHLYKQYQQQITACDIEIEKAILQSINTDENKKQLKTSNKPHKRINKNAPKNFDLNQLSYQYFNGIDLMAIEGVSHSTVIALMSEVGYEGVKKFETPKQFSNWLRLSPNTKKTGGKVISSHLPKGSNRLKMALRNAANAIGNLKDTHLSDFFRRISFRRGRAAAVSATARKLAVIIWNMIIKNIPYKPPTDYLFLDQKRKLKLVARIRKSISKFELKPGDLGFTNASLSATS

SEQ ID NO: 108511 - protein, 341 aa, unidentified
MEAARYIGIDLHRNRFTCCVRLENGREYLSTWALEQLPRFVKKLRPTDQVAVEVTGNTRLFHEAVAPHVARVVVVDTNQFRVISRSAKKTDPRDAALLALYLAKGLLPEVRMKDKAHGQLASLTQTRDTLVKLRTSLKNKVNNLLSAHGLNLAREALSSEKKLEEILALPFDELVQFELRVIVEQIRSLNRSIAALEERIAEEGRKLPGHRNLTSIKGVGTITSAILLSVIGDVNDFPDESRLASYLGIVPRVSNSNQTERSGRIHKRGNKLARTALVQSALIAANYNSYLRSFYERVKARRGAGKAIIALARKFLGIIYRTLKNQWVFEDFPNFVLAEEA

SEQ ID NO: 108512 - protein, 380 aa, unidentified
MPEAVIGLDVGKSSHWACVATRDGEVLLSAPVANREDDLDSLFGRFPDALVVVDQSRNIGALALARARAAGMSAAYLPGLAAHGAARLFAGDAKTDERDAMVIAKTALGIPDALLPVGDPGPTIAAARALAAQRNFLTCENTRNKNRLRSILLESCPAFEALVDLSDGPQLRLMASLGGAWSVADAGPRRAAALTRGAARGKIEALVRSTTSSTRPDASVVAAEDRAVKLLAHRISENSAEIEAITAEISALLEGDDTYRCLLTVPGIGPKTASELAISIDIEDFPSHDRLASYCGLAPRNRQSGTSISSVTASRQGNKRLKNLLIFSCNCLTRTEGRWGDYYTRCRERGMSHGKALKALARKRLKVIYAVMRDRVPYAA

SEQ ID NO: 108513 - protein, 292 aa, unidentified
MKTPVIGMDIAEHVFQLHAVNVATGKIERVKLKRGDVTNFAKRERSLVVIEACGSAHHWARQLRQLGHDVRLICAHSVRPFVLRNKSDAADARAIWTAVQQPDARFVAIKSEAQQSVLALHRIRAQLMKVRIMQTNALRSILYEFGEILSEGYQSFTKEIAPALARTSERLPGMLVDSLREQRVRIQAVNEDIAVLERRLSHALRDSPECQRIAEIPGVGLLTATATVSTIGDPATFHSGREFAAWLGLVPRQTGTGGRIRQLGLSKRGDTYLRTLLMHGARAVIARCTHTP

SEQ ID NO: 108514 - protein, 377 aa, unidentified
MKRIKFVGLDVHAETISVAVAEQCGEIRSLGVIPNREESIRKLVKKLGPVEELRFCYEAGPTGYALYWQLTRMGAQCEVVAPTLVPVKAGDRVKTDRRDALKLARNYRAGELTAVWVPDAAHEALRDLVRAREAAKKDELRARHRLSKFLLRHGRRPPIGVKAWTLEYLAWVKRGVQFEQMAQEATLLDYLHEVEHGAARIARLDGAIEEAVKLAPPEMRAVIEALQALRGIAQVSAVTVVAELGEFSRFARAKQLMGYGGIVPSEDSSGERTRRGNITKTGNAHLRRVVVEAAWAYRHRPSVGAKLRKRQAHVSEEVKEISWKAQQRLHQRYKKLLAKGKNKGVVMTAVGRELLGFIWAIGIKVETAQKEPLQRAA

SEQ ID NO: 108515 - protein, 320 aa, unidentified
MEGQFYIGIDVCKAWLDVACVPHAPAPLPCRVDNEESARGALVRRVAQMAPQLVVLEATGGWETALAAELCAAGVAVAVVNPKRVRDFARAGGVLAKTDRLDARVLALFGQRMQPQVHAMPDQAQQEITELVDRRAQLVTMRAQEKNRLTTVKPVARKSVREHIEWLDARIKQLDRELDTRLKDSPVYKARYDLLDSIPGVGRVTISTLLGRLPELGSLERKRAAALVGVAPFNDDSGKRRGQRYIQGGRADVRCVLYMAALSAARCNPAIKALFQRLRAQGKPFKVALTACMRKLLTIMNAILKSGRPWSAEFVSASVS

SEQ ID NO: 108516 - protein, 340 aa, unidentified
MEVATIGLDISKHVFHIHAVDGQGQVAGRQRLRRGEIVSFFSSLAPCLVGIEACATAHHWAREIQQFGHDVRLIPPAYVKPYVRRGAKNDAADAAAICEAVARPNMRFVPIKSVENQGFLMLHRARGLLVRQRTMTACAIRAHFAEFGIIVGQGRQRVDGLVDLLDDEEVTLPAHARIALAVLVNQLKELDRQVEAIERELAQILRVNPMAKLLSSIPGIGPITATALAATVPDATMFRSGREFAAWLGLTPKQNSTGGKDRLGRITKQGDSYLRHLLVIGARNVVRYPKARSRVGGGWIEALLERRRPMVVAIAVANKLARIVWAMMTTGEFYRPKLAA

SEQ ID NO: 108517 - protein, 383 aa, unidentified
MKSVCGLDVHKDSVYLCILSEFGELIEKVFGVLTYQLEEMRDLMLHHHVVEVSMESTSVYWIPIWRVLSPHFKLNLANPYFIKQLPGRKSDVKDAQWIAECTMKELIRGSFVPPETIQQLRQYDRRIFDLNEEIVRKLSKLDAVLQRCNIRLSNYVSNVDSKSYKAVVRAISQGITAPEELVKLIHGRIINHHGIDVITASLKGVVSLAEIDMISQLRDELDMAEAHKEKCQARMLEICEREFPEELKRLQTIPGIKERAATSLIAEIGTDMNKFETANHLASWSGLKPRNDESNKKIKSRSITHGNVYLRKTIIECAWAASRTKDCFFSRFSYHQTQVRKKNKMKVLVAVARKMLVAVWHVLHDNTNYIDFTTDRKTSRTRG

SEQ ID NO: 108518 - protein, 354 aa, unidentified
MSQKLNAAIAVIGIDIGKNSFHIVGHDHRGSIVLRQKWSRGQVETRLANLPPCLIGMEACVGAHHLSRKLQMLGHDARLMPAKYVRPYSKGQKNDFRDAEAIAEAVQRPTMKFVATKSADQLDLQALHRVRDRLVGQRTGVINQIRAFLLERGIAVRQGLHALRFELPGILATRTDVLSPRMLRIIEGLAEDWRRLDQRIEGLSSEIETLARQDKACQRLMTVPGIGPIISSAMVAAIGTGDVFSKGRDFGAWLGLVPKQISTGDRTILGSISRRGNRYLRALFVQAAWVVLVKVKCWERYGLKSWIEAAKKRLHHNVLAIALANKLARIAWAILHNGRPFACVKTEETASRPA

SEQ ID NO: 108519 - protein, 419 aa, unidentified
MGKIIENCAGIDIGKRFLLCCVLTGSAAEEPRSETLRFEVTVAALQRLREWLTNKKVTHVVMESTGSYWIPVFNILEDHFVIVLANPDEVKNRKGHKTDRKDAEHLADLLRHDHVRSSYIPPKPVRDLRDLTRRRLQLTEDATRERNRVQKLLEHVNVKIGNVLSDIFGVSGLNMLLALLSGQATPEEIAQLARGQAKRKIPQVIEALEGHRMSDHERLLIRSCLRHLACLEEEVEELDGEILRRMQMPPFEAAYRLMHTLPGVGQLAAASILAETGTDLAPFPTADQMASWAGLCPGNRESAGIQKGGQTTHGNSYLRTALVQCAWAATRKQGSVFQARFQQLSPRRGQKRAIVAVAHQMLTIAYCMLKKGVPFRDAESIPRQRRRKRRAHHHLCCLRRLGLSVRVVADSNGVLGESV

SEQ ID NO: 108520 - protein, 415 aa, unidentified
MLKIVYPICCGIDVHKTFVIATIATTDHENITTYQTKRFSTFTRDLKALAAWLSEHQCVDVCMESTGKYWIPVRNVLEPSCQITLAHPKYVRAIRGKKTDKKDSIWIADLFKHGLVPGSFIPPADIREIRELLRYRSKLVSFKSSEKNRVQNSLTVSNIMLSSVVSDTFGKSALAILEHLLKNPDEKDFDFLPLLHGSMLKKEADIALAIDGTITKIQADKITLCLCHMNNLKSYIADIESKAMQLARPYSGSLAIIQSVPGVSELSALIILSEIGADMSAFHSAKHLCSWAGLTPSNDQSAGKKKSVRISRAGIYIKPILVQCANAAIKDKSFIHYRTRYEAIKHRRGHKRAIIAIARMILTAVYYMLSSGEFFNPGLYEKAQCKPGFVASSEAHAVKLLQRLGYVVVKEPESA

SEQ ID NO: 108521 - protein, 455 aa, unidentified
MPKTTTDNRPELKPVNFGAAAIDIGSKMHMAAVNPACADIPVRMFGTFTSDLHDLADWFKACGVTSVAMESTGVYWIPVYEILEQRGFDVILVNARFAKNVPGRKTDVSDAAWLRQLHSYGLLRGSFRPDAEIATLRAYLRQRERLVEYAAAHIQHMQKALMEMNLQLHHVVSDITGATGMRIIRAIVGGERNPDVLATYRDVRCHSSAETIRAALVGNNREEHVFALSQSLELYDIYQAKMLDCDRKLEVLIAALSRKGTKPVGKLSRARIKTKQVNAPTFDVRTALYGVLGVDLTEIHGLGPSLALKLIGECGTDLKAWPSAKHFTSWLCLAPGNKISGGKVLSSRTRRSSSRAAALLRLAATTVGRSDTALGAFYRRLSSRAGKAKAVTATARKIAVLFYNTLRHGMSYRDPGADHYEQQYRSRVLANLQRRAKSLGFVLQAIPEDANPAVS

SEQ ID NO: 108522 - protein, 363 aa, unidentified
MHSINNTELSSPEGTRLEFNPSKAVIKLGIDVHQEFYVVVEQVGGGNPKPAQRFRKEAFVHWAARRKSQGIQVHAVYEACGFGFGLQRQLAAQGIECHVVCPQKLDEHNRRVKTDGLDAKALCLKLDRFVQGNREALALVRVPSEEEEQLRAIHRQREQLVKARKQLEAQGRSLMVNHGIEPVKGWWKRRTFAALAVPKWMRQLLCNSQPILLALEEKIRALTVQLQGAAVPGQPRRLGMMTSVVIDREVGSWSRFHNRRQVGSYTGLCPGEYSSGKIRLQSCVTKHGNPRLRAALVELAWRLVRFQPNYQPVVKWKQVLAKGALATGAARKKAIVAVARQLAVDLWRVRTGRVSAETLGLKN

SEQ ID NO: 108523 - protein, 345 aa, unidentified
MTKRKTETVNDLSRCLDPLDMDATLIAVIEMSQSSWLVAGIVPGVERQPLKKIAIDEHALLKLLSSWRKEAEKQGHRITRVAVAFEAGHDGFWLARRLAAFGIEVHVIHASSVAVTREHRRAKTDRLDTELLKRGFLGWLRGERGHCKMVLVPTLAEEDAKRPSREREALVGEASRIITRLKAAFVRLGIRRFNPKLKAAAERLATLRTPEGEPIPPNTLAALKRDLERNNIIKRQIREIEQTRLDHLAQAPAKGPHRMVLLLARVVGVGVETADMLVHEVLSRKMRDRRAVARYAGLTGSPDESGAKRREKGLARSGNARVRRGMIQLAWRFLWLQKDSALAEW

SEQ ID NO: 108524 - protein, 402 aa, unidentified
MNAVGIDVSKGKSMVAIMRPFGEIVSPPFEIKHTANDINSLVELINSVEGESRIVMEHTGRYYEVLAHQLSEANLFVSAINPKLIKDFDNDSLRKVKSDKADSVKIARYALDKWHNLKQYSVMDELRNQLKTMNRQFSFYMKHKTAIKNNLIGILDQTYPGVNAYFDSPARSDGSQKWVDFASTYWHVDCVRKMSLNAFTCHYQNWCKRKKYNFSQSKAEEIYGKAKELVPVLPKDDLTKLIIKQAVDQLISASTTVESLRALMNETASKLPEYPIVMDMKGVGPSLGPQLMAEIGDVSRFTHKGAITAFAGVDPGVNESGTYEQKSVPTSKRGSSDLRKTLFQVMDALIKTKPQDDPVYRFLDKKRAQGKPYYVYMTAGANKFLRIYYGRVKEYLATLPES

SEQ ID NO: 108525 - protein, 415 aa, unidentified
MKTFAELTHFAGLDWAKDHHDVVIVDRQGLIVAQFTFPHSAAGWQQWRQCVSSYPALGVALETSSGPAVEQLLDSGVTVFPMNPRSAQSYRQRKAPSGTKTDQLDGWSFADGLRTDGQGWRPLAPLDPLVQELRLLCRDEVELTQQRTALVNQIQQALGEYYPAALEAFDDWTAPYTWEFVKAFPTPADLVKAGRRRWQNFLHAHKLYRPQTVDARLEAFAKATALTASPAITRAKSRLVLTLAATLLTLEKHLEQYRAAIAQLFAEHPDHDLFGSLPGAGEKLAPRLLSEVGQDRHLFEDAQGLQCLAGTAPVRFQSGQVDRARIRWHCNKHLRYAVHLWADCSRKYCAWAQTYYQAHRAKGASHASALRRLGQRWLKILWTMWQEHKPYDPERHSRNQQKHGSWLLKLEPAKS

SEQ ID NO: 108526 - protein, 349 aa, unidentified
MISYIGLDAHSATCTAVVVNEKGDILCRKTFPTTESQLVSFLEGIPGVKHLTFEECHLAQWLYVTLVEYVDQLLVCNPVYVAKKQGAKTDFRDALHLAQELRTGHLKAVHHEESRWIELRVLTNNYLALVEEIVRTKNRLKAVFRSEAIDTNTRGFYTAKDRVKELSHESAQFVAESLYDQIDRLEKTKGEYREFFQTNVKKYKPIRNLTSVPGIDLVRANIITAIVCTPHRFKNKHLFWGYCMLVRHIQVSGGRIYGNRRIHGRAELRDVFLGAAESALRTETSLRNYYEALRAKGVDHKDAKIALARKIAALCLCLLKNNDTYQDDFDVQQNRRTETRKSLNLDVTL

SEQ ID NO: 108527 - protein, 363 aa, unidentified
MNSVYHTELSSHEGTRCQFNGGRADIKLGIDVHQDFYVVVEQVEGSNPKPPQRFQKQTFLHWAARLKKSGTKVHAVYEACGFGFGLQRNLTALGIHCYVVCPQKLDEQNRRVKTDGLDAKALCLKLDRFVQGNRDALALLRVPTEQEEQQRAIHRQREQLVKARKQLEAQGRSLMVNHGLEPVQNWWKGRTFAALPAPQWMKELLSNSQPILLGLQEKIAALTIQLQSAAAPKQPRGLGQMTSVIIDREIGDWRRFSNRRQIASYTGLCPGEYSSGNTRLQSCVTKHGNPRLRAALVELSWRLVRFQPSYKPVLKWRAILAKGALATGAARKKAIVAVARQLAVDLWRIKTGRLRAEQLGLKT

SEQ ID NO: 108528 - protein, 400 aa, unidentified
MDEIDDVGVFLGLDVGKTNHHGHGLTPAGKKVFDKQLPNTEPKLREVFTKLKTKFGTVLVIVDQPASIGALPLTVARDAGCQVAYLPGLAMRRIADLYPGEAKTDARDAAVIADAGRTMPHTLRSLELTDEITAELTVLVGFDQDLAAEATRTSNRIRGLLTQFHPSLERVLGPRLDHQAVTWLLERYGSPAALRKAGRRKLVEVIRPKAPRMAARLIDDVFDALDEQTVVVPGTGTLDIVIPSLARSLGAVHEQRRALEAQIEILLEDHPLSKVLTSLPGVGVRTAATLLVTVGDGTSFPSAAHLASYAGLAPTTKSSGTSIHGEHAPRGGNRQLKRAMFLSAFAALHDPASRTYYDKCRARGKTHTQALLRLARQRINVLFAMLRDGTFYEPRTPRLA

SEQ ID NO: 108529 - protein, 417 aa, unidentified
MEPKLIVAGIDVHKKMLAVVVVDEDHPQQAREQRKFATNGSDLKHLAAWLDSHGVSLVVMESTALYWRPVWLALEGQYALHLAQAQSNAAPRGRKSDYVDALRLARRFLAAELRLSFVPDAEQRTWRCVSRNKHQKRQRRVQIQNQIEALLEECQIKLSSVITDLLGLTGYRILQALARGETDPAKLVELAAVNLKASKEQLAEAVSVPMQSQYRSVLALQLEELDLLDKHIGELSRQLGKALQSHQEAVLRLCEIPGVREDAAWQMMAELGPAATTFETAEQMASWIGVCPGREESAGKSNRNRSPKGNRTMRRVLNQVAWSAVRTKDSFFRELYHRLIPRLGVHKAIWAIAHRIAKVVWKVLHEKVHYIERGPLALDPVSMKRRVTKLARQMRRLGYTIEVKPVAVATAGIELPV

SEQ ID NO: 108530 - protein, 312 aa, unidentified
MDLFVGIDVSKAVLDIAVAPTGEAWSVGNSTEGMQQLVSKLGEISPRLIVLEATGGLERRAIAALAGASLPVVAVNPRQVRDFAKATGRLAKTDAIDASVLALFADRIRPQVRPLRDEETQELEALVVRRRQVVDMITAEKNRLAAAPPSKRVRTAIGKTIKWLQKQLEETDSDLDNAVKGSPIWREKDDLLRSVPGVGKVLSRTMLSLVPELGTLGKKQLAALVGVAPLNWDSGQQRGRRCVWGGRAHVRAVLYMGALAAARFNPVIRAFHARLIAAGKLPKVALVACMRKLLTILNAIVRDRTPWTREAA

SEQ ID NO: 108531 - protein, 323 aa, unidentified
MEHELHYIGIDTAKEKLDVDVLRPDGRHRTKKFANTTKGHDELVSWLKGHKIDHAHICIEATGTYMEPVAECLYDAGYIVSVINPALGKAFAQSEGLRNKTDTVDARMLAEFCRQKRPAAWEAPHPLERALRALVVRHQALTDMHTQELNRTETAREVQRPSIDAHLLWLEAELKRLEKQIKDLTDDDPDMKHRRKLLESIPGIGEKTSAVLLAYIGLKDRFAHARQFAAFAGLTPRRYESGSSVRGASRMSKAGHVSLRRALYMPAMVATKWGRAFRDRLAANGKKGKVILGAMMRKLAQVAYGVLKSGVPFDASRHNPVAA

SEQ ID NO: 108532 - protein, 410 aa, unidentified
MERQVERCCGLDVHRDTVAACVRIGGGPGQRTQQHVQTFRTTAGDLVVLRDWLAAHEVTHVAMESTGVYWKPVYYALESDFTCLLVNAAHIKQLPGRKTDVKDCAWIAQLLEHGLLRGSFVPPAPIRELRDLTRYRKAVIQDRTRVVNRLHKTLEDAGIKLASVASDVLGISGRAMLEALVQGTTDPALLAELARGRLRGKLPALRQALAGRFRGNHAFLIGQLLAHLDYLDEAIGILSGQVETVIAPFADALTRLDSIPGINQRTAEVIIAEIGVDMSAFPSAGHLASWAALCPGNHESAGKHKSGKMRKGNRWLRTALIEAAAGASRVKNSALQARFRRVLRHRGPKKAVVAVAHALLRAAYHVLADHAIYRELGADYYDRQHGQRVTRRAIQLLERQGYRVTLEPAA

SEQ ID NO: 108533 - protein, 527 aa, unidentified
MNPVNFSCCSSPLIFRLAWLGRAGILFTLLFLWLTRADGQEYSAQNWHIEDGLPDEEITAVAQTPDGYLWLGTTSGLLRFDGVRTAAWQPPAGERLPDNSTFLALDWGSQKHAWILQPADGGKRNEGFVDNTPEAIAVWAAGLYQRFGGRPVAVALEQKRGSVVNLLLPYAHLVLFPVPASMSASYRKTFVPSGAKDDPTDAGWILDLLLRHRDRLRRLAPDDANTRLLLMLVEDRRQLVDDKTSLTLRLQDCLKQYFPQLAQWFDVDTALVADLLQQWPDLQHLQRCHDGTLRRFFRKHHGGEKLTGERIEAIRAAVPATDDPSVLEAGSMKARHLTESIAALRGQITRLECRRDELVADHPDAPIFASFPGAGPATVPRLIAAFGTCRERYQCAFDVECDSGIAPVHIRSGKVDLVSMRRACQKFTRQTFHEFAGQSIPRCQWASAFYHAHCTKPEEHHAAVRALAFKWIRIMFRCWKDRKPYDEQLYLTSQRRRSALLGPGLAAVTSLEWKNVAGFSKLSEKKA

SEQ ID NO: 108534 - protein, 423 aa, unidentified
MEVIHERVAGLDVHKDSVVACFRCISGRAAKRECRTFDTSTEGLLALRDWLTEGGCQLVAMEATGVYWMPIYKILGDGDYCVVVANAAHIKAVPGRKTDMNDAMWIADLAAYGLIKASFVPDEEGHELRTLMRTRKQLVREQTRQVQRIQKTLTEANIRLDSVISDIMGLNGRRMIEAMIGGQRDPRKLAALADKRIKASAKELYDAPHGRLTDHHRFLLKLHLGQWDALDLSVQTIDREVAARLVKLDEARKAGEARFSALIELLSTIPGVSRISALTILSEIGYDMSRFPTVGHLIAWAGLCPDQNESAGKRKRSRLRKGAPWLKTMLVQCAWAAKRATKSYYRAQFYRLQARRGPQKAICAVAASILTAIYHMLKTGTPHEDLGIDDFDRKTPETKAKRLAAQIAKPGYKVTLTPAAQAA

SEQ ID NO: 108535 - protein, 316 aa, unidentified
MIEKTYVGIDVSKAKLDIAIRREGLRKIATFINSQEGIEECRKWLSDNNAKEAIIVVESTGSLHWLVCLLLTDYGYDVRLINPLITKKYQKSSIRDAKNDKIDAIRLAEIGRIEENLPQFFDSRETLKIKRYESLLAKLVHAKQQIKRAYEDAIEASTIIDVSLNLDCILECIELLDTAIDVLKKMITDTADDLAKEISQIKGVSIFQATVLSTAIKGRSFENRDQMIAFFGLDIRVRQSGTWEGKGCLSKRGNPFYRKILFQIGWSLWRHNEEYKAYYDSIHGRGKHYYTCILATARKFLRYFFRVYKFSLVNSL

SEQ ID NO: 108536 - protein, 390 aa, unidentified
MPKYDDLSRSLVAFDQNSTLVAAIEMGSKGWLVGALVPGLERDPRKKLPPDKQALLKLLDRWCAEAARKGHPIKRICVAYEAGRDGVWLARWLREQGIEAYVIHPTSIPVSREHRRAKSDRLDLMLLLRALLGWLRGEPGHCSMVAIPTVEEEDGKRPLRERETLTAEVTRLINRMTSLLVRHGIANFNVKLKKAGEKLAEVKTAWGEPLPPEAVAELQRSFERLRLAKQQIAEIDKARRRRLEKAPEAGMHPMILILARVFGVGLMTAESLVREVLYRNLRDRRAVARYAGLTGSPDESGKKRREQGLAKAGNGRIRRALIQLAWRLLRHQPESALVKWYQARTADGRRDTRKVMIVALARKLLVAFWELVTNGTVPEGMRLHPAKVAE

SEQ ID NO: 108537 - protein, 398 aa, unidentified
MDVHKKVLMVVAADSSAPDVILQRCKFGTGHSELQRLLAWVQEHGVAELVMESTAQYWRPVWAVLESHVVLQLAHAQSNRAPKGRKSDWADAKRLVRRLAAGELFLSYVPEPEQRDWRMITRARQALIRDQVHLHNQIEALLEQASLKLSSVMSDLMSVSGQRILNALAEGQTDPQALAALADPRLRCGSEVLMDALRGRFTAVHQLLLRQLLLRWSTIRQHIGDLNREAAQRMQSYTGVIERLIEVPGIGPEAAQEILAELGPLAAAFASSAHLASWIGVCPGMQESAGQNQSGRCAKGNRYIRRVLSQMAEAAVRTKGCHLQVVFRKLVVRLGYNKAVWAMAHKITVILWNILHRGARYIEHGEAINPKAVQLAIQRHLKALRRLGYDLTPQPATA

SEQ ID NO: 108538 - protein, 321 aa, unidentified
MQSYHLGIDVAKAKLDCALRLPDGKQRNKVVNNNASGFKTLLEWLQKHGGSTAHVCMEATGVYWEEVAAYLAQRGLPVSVVNPAQIKAFGASHLVRTKTDRVDAQLIATFCFERSPALWQAPSASEQALRAMVLRLDALQNMRTQESNRLDVAREAVKAGIASHIAWLDKEIDKLARQIRQHMDNDPDLKGKQELLDSIPGLGERTIASLLAFYGNLQRFDNARQAVAFAGLDPRQHESGSSVRGKPRLSKVGHSFLRKALYMPAMVALHKTAWGAVFRQRLAAAGKPPMLIIGAMMRKLIHVAFGVLKSRQAFDPTLHGA

SEQ ID NO: 108539 - protein, 360 aa, unidentified
MQTQSHVSSPYSLGIDLHKRFAYWTLINNKRDILWEGKVLTDGEKTKSAALALPVPANECQAVIEPVELWGWYAEILEDCGIKVVMANPLQVALIAKSRMKYDKVDSKILAELLQTGYLPRSYLAPRETRDLRHLLRTHISLVVMRTRLKVKIHGAMELQGLVSPLTDLFGRAGTAWLKEQELRPVYRRAIDTYLRLIDSINVELEQVDDEIEKKAKYDSDTKILMTMPGVGPFTALLIKAEVGTFDRFQTPESLASFSGLIASSRSSGGKLRYGNITKQGSKYLRWAMVQAASRMTPKAGDLYKFYVRIKDKKGAKIARVALARKMLTIAWHIVKKKEPFQASFLGVSGSAKTVTLARS

SEQ ID NO: 108540 - protein, 325 aa, unidentified
MAKRITVCAGIDTGKRKLDVAIDGSCEQLQVENTAEGHKVLLEWLQRHKVKRIGIEASGGYEQPVVAALRRKRFVVVVFQPAQVRAYAKFHLQRAKNDKIDAALIAACTAAVKQIYPAPDPRLSPFAEQLTMIDQIGEDITKLKNRIETCRNERIRAVWKEDIARLAKRERTELKALVAAIRQCPDLAERLELIHSVGGAGLPTAVAILVRMPEIGQLTREQAAALAGLAPYDDDSGDQVGARHIDGGRERLRRALYLAALPASFRWNPQLIALYQRLRAAGKEHKRALIACARKLLIFVNTVVARGTPWQGEPPAARTANPSTA

SEQ ID NO: 108541 - protein, 348 aa, unidentified
MGAEELILVIRKNGKPLNPQKFANTPSNHIRLAKKLVKLPKMIVCLEATGIYHFDLSLALHDAGVSLMVLNPKASHHFAKVLMKNSKTDTVDANTLAEYAERMAFVAWTHPSNEKIALRCYARRIHALTKQRAAAKNHLHALTATAETPKAVLKDAKLAISQLEKRIDHLTAEALAFISKHQELEQILQLLIGIKGIAETSAIALMGELLLLPPNLSHRQWVQFAGLDPQTFESGKSIHKKSGLAKAGNRHIRAALYMPALSAKEHDPYVKAYFHHLVDNGKLPLQAVCAVMRKLLHAIHGMLKHNQPFDNSRFYVSSQFIRTKGYFYQNGLDFEQSIYKITKKQEYR

SEQ ID NO: 108542 - protein, 335 aa, unidentified
MHYLYYVGLDVSKETFDASLVAFEDANEMAHRKFANSRKGICSCLHWVEKRHGIRLDDVIFCAEDMGSYISEMAVCASDRTLNFNFSLISPLVIKYSMGIARGKTDRVDARRIAEYAITHYRKIALYLPAEKELCQLRTWLILRAHLAKQRVAKLVLLEKLDYKEKFADVSIQRSMLQEEIAYAEIHMKTIEREMKELIAADSNICRNYKLLTSIKGVGPITAIVMLCSTLNFTKITDHRKFACYCGLAPFEHSSGTSVRGGCHTSSMANRDIKVQLNRSALIAIRCDPQLKAYYERKAAEGKHKFSVLNAVRAKIAARCFAVVRRGTPYVALQI

SEQ ID NO: 108543 - protein, 347 aa, unidentified
MLIIGCDFHPSFEMVSIFDKQTGEVRQMRLGHREEAERFYRSLPAPVRVGMEACGQWVWFERLLAELGHELWLGDAGQIRAMVVRQQKTDRRDADHILTLLLQDRFPRIWVPSLEERDVRQLLVHRHKQVQARTRVKNQLQALALSQGVQRKRKLWTEKGRAELEQLPLLPYAAQRRQHLLESLDRLQQEIQQLNGRVEQEVGRRPAALQLRTHPGVGPVTALATVLTLGPVERFRSARQVASYLGLIPREHSSGGRQQFGRISKQGNPFLRFLLVEAGQSAVRGDAELRRLYQRLAARKHRALAKVAVARRLAQRLYWMLRQDLTYAQLLQGRHAGEPESFCGRCS

SEQ ID NO: 108544 - protein, 434 aa, unidentified
MSTQGRLIRFQEARCKFLIIGGLSMNVIYERCCGMDVHKKTIVACVLLGKKKEIRSFSTMTASLLSLVDWLKSVDCQCVAMEATGSYWKPIYNLLEMEGLPALVVNAQHIKAVPGRKTDVKDSEWIADLLRHGLLNGSFIPKREQRELKELVRYRRSMVQERARELNRIQKVLEGANIKLSSVVSEIDGKSSRDMLAMLAAGCNDAKAMANQARRQMRKKIPQLEEALQGFMCDHQRLMLNSMLEHIDFLESHILLLDREIREKMEPVNEQIVLVDSIPGIAERSAQVIIAEIGTNMNQFPSAAHLASWAGLCPGNNESAGKRRSGKTRKGSDTLKATLIECAKVAGHLKSTYFSAQYSRIAARRGKNRATVAVAHTILTIIYHMLKANVPYQELGPDFFEQRRKNEIVKKSVRRLEAFGYTVSIDQQTRTSTA

SEQ ID NO: 108545 - protein, 381 aa, unidentified
MTTLASRNTQDNTTEGTLFVAFELSEKTWKLGFTTGHGQQPRERTVTARHQEHVLNEIAQAKRRLGLPETAPVVSCYEAGREGFWLHRFLQAQGLTNYVVDSSAIEVNRRRRRAKSDGLDVRKLLSMLIRYEQGERQVWQVVKVPAVEAEDQRHLHRDLETLKQERASTTTRIKGLLSSQGLRVTSLTKLPEQLEALRLWDGSPVPPGLRRRVLRVYAHHTFLSEQIAAVEAERRAQLQASTDASLDKVRQLMLLKGIGINGAWLLVMEFFGWRAFKNRREVGGLAGFTPTPYQSGASAREQGISKSGNRHVRWMTTELAWSWLRFQPDSTLSIWFRERFGGGGKRLRRIGIVAVARKLLIALWRFLETGLIPEGAVLKEA

SEQ ID NO: 108546 - protein, 323 aa, unidentified
MQGQKSPERSAEPGVYVGVDVCKDWLDVYLHPIGQKFRAANTPEGLKALKRRIADLPVELIVMEATGKFHRQAHRTLHAAGLAVAVVNPLRARLFAEAVGQLAKTDRLDARVLALMGQTLEPSALAPAPEALEALQELARARASAKAEQTALSNRRGASRTAFLKAELGRRLKVLAAHIERLDAEIERRVGADAALKRRYDIVLTIPGVGPVAAVALVIGLPELGACSGKAAALLAGLAPLACDSGEKAGERHIRGGRAFVRTGLYLAALAAARCNPQLSDDYKRLRDAGKKAKVAIAAIMRKLVVLANVLIKEDRPWRPIHA

SEQ ID NO: 108547 - protein, 422 aa, unidentified
MLEETQETEEIIQRVAALDIGKAELTCCVRVPSPGKHGRRAQEVRSYQTMTRWLLVMADRLAELGVTRVVMEATSDYWKGVFYLLEAHGFETWLVNARDVKHLPGRPKTDTLDAVWLCKVAERQMLRPSFVPPRPIRQLRDVTRYRVDLVAARTAEKQRVEKLLEDAQIKLSVVASDSFGVSGRAMLAALLAGERDPKRLAQLARARMRAKLSLLAEAFTGFFTDHHGFLLARMLDRIDALSADIAALDTRIEALIGPFAQTVERLDEIPGIGQTAAQLLVAEIGVDMTRFPTAGHLVSWAKFAPGVKESAGKRKGTATTGHGNPYLARVLGEAAVAAGRTDTFLGERYRRIARRRGANKAIVAVGRSILVIVWHLLADPEARFCDLGAGFYDTRVNADRAKRNYVRQLEALGYKVTLQPAA

SEQ ID NO: 108548 - protein, 482 aa, unidentified
MAKRKMSTFERLQSGKMNRQQRKELQQRLNAADPGLEVVHADAGGIDVGNESHFVAVPAGRDPHPVQEFGSWTADLHRMAEWLKSCNIRTVAMQSTGVYWIALQEVLEEHGIEVFLVNARGTKNLPGRKSDVQECQWLMKLHTYGLLRNSFRPPEEILAVRTVWRLRDRFVKDAGRAIQQIQKALTTMNIRLANAISDVSGVTGMAIIRAILKGERDPRELAKLREPGIQASEEEVARSLEGHWRDDVLFELQQVVDGYDFFQQKLAACDRQLKSYLAVLPDRKVESEKAVEAAPQGSKKAKKRKSKKRSKNQPTSFDIEAELRRSFGVDLTRIDGINAMTAQVILSELGPDLSAFPNEDHFASWLELSPRRDITGGKVIKQKSRESKNRVANALRMAAESLSRSDSYLGARYRQFRGRMGGTKAIKAMARYLACLVYRLVTKGQEYVDRGAVYYEGKRAARDMTYIRRKAAELGMKLVPAA

SEQ ID NO: 108549 - protein, 355 aa, unidentified
MKVTTVGLDLAKNVFQVHGVDAHGRKLFNRQLRVAQAAEFFVKLEPCLVAMEACASAHHWVRRLREMGHEVRLIAPQYVKAYVKTNKNDAADAEAICEAARQPNMRFVSPKSLEQQAVMALHTLRAGAMKARTAQANRLRGLLLEYGIAIAQGIANVYKHVPQVLADESNELPDFLRQALRAEYDQLKLQEQHARALEAQLQRWHRECAASRAIERVPGLGVLSASALVASMGDANAFDNGRQASAWVGIVPKQHSSGGKQRLLGISKRGDAYLRTLLIHGARSVIAAIQKRLKAGLDPRLLSRRERWVLDLLQRRNANVAAVALANKNVRTAWAILAHGTPYEADHVSLSPVMA

SEQ ID NO: 108550 - protein, 336 aa, unidentified
MSHYCGIDLHSNNHVVVVIDDEDKRVFEKRLGNDLSLTLDALMPYRASLQGIAVESTFNWYWLVDGLEDAGYSLQLVNTAAVKQYDGLKYSDDHHDAFHLAHLMRLGILPTGYIYPKEQRAVRDMLRRRAFLVRAASGQLISIQSQIWRSTGVRVSSNTIRKVDFEPNTINGYTRQAVESLLAVYRILQTQIQVLEQLASDAVELSDEFRIVQTIKGVGPILGLTIWLETGDIHRFAGPGNYASYCRCVDSKRMSNGKKKGAGNAKAGNKYLSWAFSEAAHFAVRFEPLAQRFYERKKAKTNGIIAIRAVARKLARATWMMLKHKTPYEAKRMFPG

SEQ ID NO: 108551 - protein, 319 aa, unidentified
MDKLSQGQIIGIDVCRDWLDVYCLSDGYRRRLPNGPEGHAVVAELAQARDAVVCFESTGGQEWQLWARLETEGIVARQMPPAQVKAFAQSRGRRAKTDRIDAELIARFYAFRPEAGRSLPPEKLRLLRALVSKRAQLVELRKHLLAQNFAHRKLGTAAMFEDLDTELKALFDTRIKELENRIEQAVSCDDTLAERASILRSIPGIGPVASTMLITEMPELGTLTSEQAAALAGLAPVAHDSGTLRGRRAIAGGRRALRNVMYQAALVAAHHNPSLQVFAERLRTAGKPHKVIITAVARKLVTLANSLCKKRQSWAPSAP

SEQ ID NO: 108552 - protein, 312 aa, unidentified
MITLGLDPHPGSHTVVALDPNGASLATLTVLNTPEGLSQLHQFAIPFSTRRWAIEGAGNHFVAIFVGQLLDQGEMVYSIPPSLTSQYRARRGRKKNDVVDAENVGRALLANPQLVALHSGMEQRELQELTRAQRRLSEQLKANRGALQELTAESPVREIIQQVITTLVRQLAILERQIRTVVNAVMPSLLDLPGVGPIVAGVLLAEAGDARRFASPHHFASYCGAAPVERGSGENRRMQVNPGGNRRFNWALHIVALVRLRMDGGRSKRLFDKLQKGGKTKRSALRLLKTYIARELFRALRQTHLAVARHVR

SEQ ID NO: 108553 - protein, 343 aa, unidentified
MSKKQLQLLKQNIGIDVSKDEFEANLVVLTKDLESQSLAHKKFTNAIAGIEEFLEWAQKKADSSIELLFTMEATGVYYENLAFTLFERGYQVHVVLPNLAKKYAESLGNKSKTDKLDARSLGAMGVERKLFKWIPASKNLRQLKSLTRERAKRQKHKTQVINQFHAAKYARETTKSSIKRYEELIDILKKQIKAIEDEIMELIKQDKILNDKIEKITTVPGLGITTVASVVAETNGFASITNIKQLQSFAGYDPQLRESGKWKGATRISKKGNSHIRQALYFPAYTIIRYSQYHKEFYERILDKKGKSLMAATAVQRKLLGLIYTLWKNDTEFDPDYGQKNVA

SEQ ID NO: 108554 - protein, 260 aa, unidentified
MNKEQKYVGVDISKEYLDMAIVEPDNKWRFGNNAYGIGKAVERLKGLSPVFVVFEATGGLELSFWEALTEAGIEAAPINPRQIRDFAKAKGKLAKTDEIDAAVIAYFGQAMQPRSQPFPTTQEIKEMMSRRSQIVEMLTAEKNRLNWARSSRIKEDIQLHIEWLEREKDEVDKNLKQVINIDPEMREKSKLLQSTPGVGPIVSASLLTQVPELGTLNRHQIAALVGVAPLNRDSGHWRGKRSVWGGRKRTLYGNFGCHPA

SEQ ID NO: 108555 - protein, 396 aa, unidentified
MKGPIVSIDVSKGKSDYQAFEDLNVKYTGSRSIKHTKEGFDKIVNHVREMEKKLKTEVCVVYEATEVYHRILKKVLEDNNIKQFIINPLLSAKTRKNDSLRCPKTDKLDPKSIAKTYYSHSLHKSHKQETIYHELRELSRYYEDILVHIRKDKVAFRAQLDIVFPGYDALYDDLYGPVALAVIEKYLHPEMLQKKKINTVSKVIQSKTCHRQAVSDTMADKAIEYSKTIYSGCDKDDIEVLILQRLIKKLNEDMAEAERTIGETIKLAQELPDFSIIKSIPGIGDNLAARIIAELGDMTRFKKKNELVAFAGLDPRISESGQNDGDHMHSNKRLYLAVTCSIRLKRDDNSIKDFYIKKKQQSNPMRSKAAKTACASKLVKIIYSMCKTGELYQYNK

SEQ ID NO: 108556 - protein, 409 aa, unidentified
MEVVYSRCAGLDVHKDTVMACILTPGEGGEPRKQIRQFATTTAQLRELAGWLQAEQVTHAAMESTGVYWKPVFNILELSCELILVNARHIKQVPGRKTDKADSAWLANLLRHGLLEASFVPPLEVRELRDLCRMRTTLVRECVQVGNRIRKVLEDANVKLDSVASNTLGVSGRLMIEALIEGQQDPAVLAELARGRMRSKLTELTAALEGQVRPHHRFLLSQWTELLTSLEKHIEHVEEEIQRHMPPFEWAAVLVMAMPGIDRIAACALIAEIGADMSRFASARHLASWAGLCPGNNTSAGKSRSGKSHRGNVWIKGLMTEIAWAATRTKNSYPAALYRRLAGHRGKKRALVAVANALIQVVWHLLQHRKTYLDLGGDYFDRLNKQRLTQSLVRRLEKLGHTVTLKSAA

SEQ ID NO: 108557 - protein, 367 aa, unidentified
MQKVRFIGLDVHKESIAIAVADGDGSAPENVATIPNDTTLLVKRLKKLGAGATLRCCYEAGPTGFVLHRALRAAGIDCIVIAPSLVPKKAGDRVKTDRRDAVKLARFLRSGDLTEVHVPEATTEAMRDLERSRDDAKKAERVSRHQLSKFLLRHGRRYEGKTAWTGMHLDWIRGQVFEHEAHNRVLVDYVQAVETGTARVDRLTKDIVILVESWSLRPLVKALQALRGVQILTAVILAAEIGDFARFSSAPAFMAYLGLVPSEHSSGETQKRGRITRTGNGHVRRILVESAWSYRYRPTMSWEIRKRNEGVAPGVQAIAWKAQHRLNERYRKLLGRGKNKQQTVTALARELAGFVWSIARQPQLLAA

SEQ ID NO: 108558 - protein, 387 aa, unidentified
MPQPNDLSRSLVPLDQDSTIIAVVEMSQSSWLVGGVLPGIERQPRKKLEPSPERLLALLHRWRDESVRAGRTITRIAVAFEAGRDGFWLARWLEARGVEAHVIHPSSVAVSREHRRAKTDRLDTELLKRGFLGWLRGERGHCSMVRVPTIAEEDAKRPNRERECLVKERTRLVNRMKGTLARLGIRNFRPTLRNAAEHLAALSTPEGSPLPPNVAAELERDIARLRLVISQIKQLEEVRRQRLEEQPERGPHAMVRLLARVVGIGIETADMLVNEVLSRPLRDRRAVARYAGLTGAPDESGARRREQGLAKAGNARVRRGMIQLAWRFLRFQKNSALAQWYQARTADHRGATRKTMIVALARKLLIALWRFVTIGEPLDGVTLRPAS

SEQ ID NO: 108559 - protein, 428 aa, unidentified
MEVIYSKACGVDVHKSFIVAVICDSTSITPKYSRKRFSTFNNDLIRFKDWLLENDCQNVCMESTGKYYVPVYNALESFISNVVVANPKWVKAIKGEKDDNKDAKWIADLFKMGLVRSSYIPFKDFRVLREFTRYRYKLTNTKSSEKNRFTNALTVSNCKLDMVFTDIFGKSAQSIIDIILNNDTFSDKDIISCVNKKCKSSQEDILSSISGIQFTSEQKLRINIVKDHIDYLIKQINNLDNIIETIVAPYEPYVNLLCTIPGIDRNSAIGILSEISNDISQFKSHYRLVSWAGLAPGCNESAGKKKSVKISRAGVYLKPYLIEVAHNAVKDKTNSYYAKKFEKISKRRGKKRAYIAIARKILVSIYHMFETGEVWNPVDLASVETPIEDRIKYTKNNFNQSLKQLLSLGLTSEELINLINQNANKLDA

SEQ ID NO: 108560 - protein, 349 aa, unidentified
MCEMYFDPKETGMKYCGIDLHSNNCVVIISDEEDRIVFNKRLANDLGQIRAVLEGHREELAGVVIESTYNWYWLVDGLMDVGYRVHLAHPSAIKKYEGLKHSGDFADAGYLAQLLRLGLLAEGYIYPREERGARDLARKRMQLVRYRTAQILSIENILIQQTGARIKGEAVKRLTAEQVDEFAFAPDVALAVEANRAVSQALGQQIEALERRLKERMSLRPEYRLLKTVPGIGETLATTIMLETGCIGRFAQVGNFSSYCRCVDSLRESNGKKKGEGNTKNGNKYLAWAFVEAANFALRYCPQAKSFYDRKKSKTNRVLAVKALAHKLARACYHMLRDQKPFDVGRCFG

SEQ ID NO: 108561 - protein, 350 aa, unidentified
MVVVGVDVHKRTHTFVVVDQVGCKLGQRTWAATTAGHQQAVCWVREQFGAEVVWAVEDCRGLSGRLERDLLAAGQRVVRVPPPLMAEQRRTARAPGKSDPIDALAVARVALREPDLPVAAHDEVSREMKLLTDRRDDLVKQRTAMMSRFLGKLHEIEPGWSPPAGSMDRPTWQRKLADRLADVPGIVAELARDELADITRDTVTINALERRIAILVGPMAPTLLAMPGAGALTTAKILAETAGITRFKSEAAFARHAGIAPIPVWSGNTAGRVRLSRGGNRQLNAAIHRIALTQIRLHGPGKTYYEKKKTEGKTSREALRCLKRQILGVVYRHLLTDHKTATQTALRAAA

SEQ ID NO: 108562 - protein, 346 aa, unidentified
MENIALDVHKHYTWARVENKEGQELYASRLDHSRGCIKNFVQRWTPGSAVAVETVGNWYWVVDEIEAGGGKPQLVNARLAKLMMGNVNKSDKLDAKGMNRLQRTGTLPTIWIPSTAVRDARELPRTRMVFSRQRTQLKNRVHATLSKYGYVVDEVSDAFGKRGREIIKELSSKLPPHTKQALDHVLDQLDEVMENLKAIEADMIKAFVPCPQTTWLESLPGVGKILAVVAWTEIGSMERFNRAEQLASYSGLVAREHSSGGKFHYGAVRRDVNVYLKWAFVEAASSAIQNRHRCGYQHISQLYERIKPRRGHNRAKVAVARHLSEASFWMLKKGEPYREPRLSTQR

SEQ ID NO: 108563 - protein, 338 aa, unidentified
MTTIKYFVGIDIASSTFTASVGGTPWKVVLKPQTFENTENGYLVFLEWLASYQVPAKQSVVCMEATGVYSEGLAYFLFAKGYQVAVQSPLEVKRTFKPNGPKTDAVDSLQIAEYACRHMDKLSFWHPRNEILEQIKALLATREQFVSQNVAHKNALQAIQRKMVRTPVAEQAHSQMMEQFKKQIDAIDHEIRRLIESDPTFKEMLLLLLSIPGVGLLLSAHMILLTQLSLQHQELASYLGIAPHEHSSGSSVFKHATSRHFGPAAVRKLLYLASCSVRTHQPQFQSYFARKTKEGKPAKVALNNIANKLIKIICAVLLTKKAFIKNYHSVQPLALTGS

SEQ ID NO: 108564 - protein, 338 aa, unidentified
MKLYGAIDLHSNNNVTVLSDEQDRVVYEKRLPNDLSLIAEQLATYRDSIQGIVVESTYNWYWLVDGLMDEGHKVHLANTAAIQQYEGLKYTDDQYDARWLAHLLRLGVLPQGHIYPKQHRPVRDLLRKRGQMVRQRTANLLSIQNLFSRNIGSSMNANRVKRLDSKEIEELIPNADLALAIKANLAMLQCADGQVDILEKAVIGRVKLKSEFELLKTVPGIGLILALTIMLETGDIGRFPTVGDYASYCRCVGSKKISNGRKKGQGNTKNGNKYLAWSYVEAANFAIRFSAKIKSFYQRKKSKTNGIVAIKAVAHKLCRACYYIMKDQVAFDVSKAFA

SEQ ID NO: 108565 - protein, 343 aa, unidentified
MDHFAGLDVSVKETSICIVDDTGRIVREVKVASEPEALLQELAKSAYRFKRMGLEAGPLSQWLFSALAEAGLPVICVETRHMRAVLKAQINKTDRNDARGMAQMMRVGLYRPVHVKTLRSQKQRMLLTHRKLLQSKAIAIDNDLRGTLRNFGLKVGMAGAVKFEARIKELVENLPDLAALVEPLLVVRRVLREQLGILHRRLLAIVRDDEVCRRLMTIPGVGPVVALTYRATVDVPARFKNSKAVGAVFGLTPSKYQSGEINRTGAISRCGDEMMRVMLYEAAQIMLTRTNKWSWLKAWAMQIARRRGMKKAIVALARRLAVIMHRIWVDGTEFRWTREVAAA

SEQ ID NO: 108566 - protein, 408 aa, unidentified
MHNRQNYLYVGVDLHKEHHTAVIINCWQEKLGEIQFENKPSAFSEFLLEVETYVSNGLSVVFGLEDVGGYGRALAKYLVDHERIVKEVNPALSFLERKSQVMIQKNDSWDAECVARILVNKFNQLPDVKPNDLFWSLVSRRNALVKAQSALKNQLHIQLNHHYPSYKKFFSELDGKTALAFWQQYPSPSCLEGTNIKRLTAFLLDVSNNTCSVKKASDILKLVKEDGQTMKEYQEMRNFLVRSIVREIEFKKKEMKYIERELKQLVKLLDYQLETIPGIELVTASALIAEIGDVRRFPNANKLARFAGIAPVYFGSGGKGKGHKSKQGNRALHALFYNLAVQQMQVAKGSKMPRNPVFHAYYQKKLKEGKTKGQALVCIMRRLVNVVYGMMKYTTAYELPIVEEKEVV

SEQ ID NO: 108567 - protein, 324 aa, unidentified
MDKYTNYFGIDISKDVFDITNSKGDHFQFANTAIGFSKFLKLLNTSSHCVMEATGYYHYRLAYFLEENSVRVSVVNPLSIKRFIQMKLSKVKTDKSDSKMICLYAEKEDLKLWKGHSKKQQICLQITRLLSVYIKQTTMLKNKIKGEQVLGTPSKVVFRSLNRSLKNLQKEMKKIEDELIRLIKENYQDLLTRLETIPGIGRKTSLLLIILTDGFERFDSASELCSYAGLTPIIKQSGTSVHGRARISKIGNRKLRNLLFMCSFNACKHNKACKSIYDRIVAKGKSKKLALMAVCNKLLKQSFAIAKSGLIYDENYKSILIRET

SEQ ID NO: 108568 - protein, 445 aa, unidentified
MSGQMPSTKSEPEWAAFAAIDWADQKHFWRLVQADSRQQEQGELENTPEAVEVWAASLQQRFDGRPIAVCLEQSRGALIYMLTKYAHLVLFPVHPTTAARYRETFCTSGAKDDPNDTASLLDLLLRHREHLRQLQADTAETRLLQFLVEERRRAVNEKTRQSNRLTDCLKLYFPQILRWFDDVGTPVVGDLLERWPTLEELRRAHPGTLRKFFNEHNCRSAERNQARIDAIYAAVSTTNDAAVLEAGTLTARGLVALIRTLRDTVARLDQRIDQLVAAHPERALFASLPGAGPVLMPRLIVAFGTRRERYGSAYEVQCYSGIAPVREASGKTSWVHFRRACPTFLRQTFHEFALHSIGQSAWAKAYYDHLRLDEKKTHHAAVRSLAYKWIRITFRCWKDGKPYDEQMYLNSLRRRGSQLGTALASATSLRWKTVAGFQKLSENNG

SEQ ID NO: 108569 - protein, 408 aa, unidentified
MGLSVVHERCAGIDVHKAKLMVFVDLPREHARRVYGSDTESLLKLADWLQSMQVEDIAMESTGCYWKPVYNVLEATGLRPVVGNAMHMRGVPGRKTDVGDAEWICGLHRHGLVRASYIPPRAQRELRELVRYRQTLVEERADEANRIQKVLEGANIKLGSVVTDILGVSGRAILAGLAGGIEDPQVLAGLAHKRLEKKQDALQLALRGTMRTHQRQMLASQLDHVRYLDRQITMLGDRIDERLTQDQHSAVERLDAIPGISPLIAQVILTEAGDMQAFADSAHLASWAGLSPGDNESGGKRRPARTRRGNRCLRRALTLSGQAAGRSRKTYLGAAFGRIAARRGSKRAAMAIGRRILTIAYHVVKEGGTYQELGPNYLDERRRARVTRLAVARLERLGYTVQLQTATE

SEQ ID NO: 108570 - protein, 325 aa, unidentified
MRKPQSQVKPQTQIGLDVSSQTLDAHIRVDGKAFSVPNTDAGFDQLCEILSAYSVSMILMEATGGYEDNVACYLQLQGFDVVVINPRFARRFAQSMGRLAKTDRIDAAILAQMAFMIDSGPDRDRYIKPVTDEQRKQLSRLSSRRRQVVDLITIEKQRLTHADDYARESINGVISLLNVELKRIESDILRYVKKNFSELANRLLSIPGVGEQAMIVLIADLAELGHVNRRRISALLGVAPFNHDSGKFKGQRRIRDGRQTVRNVLYMGVISATRFNPVIKAFYDSLLLRGKPRKVAIIACMHKLIRIINAMMRTGKPFDTSLHGV

SEQ ID NO: 108571 - protein, 311 aa, unidentified
MTETTIGIDISKDHLDAHRLPGGEHDRFDNTSAGHKALLRWIGPTPTRVVYEPTGPYHRKLEVRLAAAGMPIVKVNPRQARRFAQAAGGLAKTDALDAAMLARMGAVLGLKARPVRGEVLNTLKDLHLAREALVKDRTAARNRAKVITLPLLKQHSVARLKQIDQQLAAIDAAIAERIGADPTLAARMAILVSIPGIAAVTAAMLVVEMPELGSLDPKAAAALAGLAPITRQSGRWKGKSFVQGGRKQVRHALYMPALVAMRFNPDMKAKYEQLTTAGKAPKQAITAIMRKLVVLANALLKKAMPWQPKLA

SEQ ID NO: 108572 - protein, 347 aa, unidentified
MLADQLDYVVGVDTHRDAHALALIAASTGVVVLEVEVGADRRGYARALTLAFEHAPGGRLWAIEGSGSYGAGLARFLAEEGEQVVEVERPRRSERRQGKSDPIDALRAARTALGRTKRALPRAGGAREALRALGTTREGAVATRRAALNQLRALIVIAPESLRAELRQLTRAKLLARCARLRPERHVCPELRGTTLALRACARRVQAASAEERELKREIVRLVTELAPQLLAEPGVGPVSAAQLLVSWSHRGRFASESAFAHHAGAAPIPASSGQVIRHRLDRGGDRALNRALHTIVVSRRKHDPATIAYAQRRTSEGKSVREAIRCLKRFLARHLFRVLEGTPMPA

SEQ ID NO: 108573 - protein, 408 aa, unidentified
MNPLFVGIDVSSRNNVAYLMKPDGSKHSSFSVQNNLGGAKLLSERIVSALGSMQLSDVVIGLEATSIYGDSLVYALREDGRLGQFQRKIHVLNPKQVRKFKEAYPDLPKNDWVDAFVIADHLRFGRIAREVYMDDYRYKALQTLTRARFEVIQNLTREKQRFANYLFLKCSGMAQDKDIANSSSTTIALMERFETVDDLANSDLEELTAFVTETGRGRFADPAATAKAVRAAAKGSYRLPKTVNDTVNQAMSVSIASMRALKEQVKVLDKAIEQQFEIIPNTLTSIPGIGKVYSAGIIAEIGDIHRFDSQASVAKFAGLVWHKNQSGEFEAEHSRMIKSGNRYLRYYLLEAANSVRRCDSEFRRYYDLKFKEVNKYQHKRALALTARKLVRLVFRLLKDNRLYIPPES

SEQ ID NO: 108574 - protein, 364 aa, unidentified
MTILADPLARRRRRPPSAWVIGVDTHTDTHAATLIDELGTILAQTELPATPTGYTQLQAWAQTQVPAGQRMFWSVEGTRSHGHGLTRHLLTRGHRVVEAPKPEARRRRNGKSDPRDATHAAQAALATERDPTERHAEPRADGPREALRILLVTRRHDTDMRTATVNLFKSLLLGAGELRETLRGLTTTRQVRTVADLPDDPSADLETRIRLQALRRAATTIADLDRAITANEKQLRTQVQQACPGLLDLPGVGPITAAVLLTAWSHHGRVHSEAAFAALGGISPLEASSGRVSRHRLNRGGDRTLNSAVHTIVTTRRRMKHTPTNDYITRRTTEGLNPKEILRCLKRYAIRNLYRFLQANAVTT

SEQ ID NO: 108575 - protein, 311 aa, unidentified
MMDTVFIGIDVSKARLDVHVLPSGEAFAVARNGEGLAALNERLGRMGVTTVAVEATGGFETVVAASLAGAGLPVAIVNPAQVRAFAQALGKRAKTDPIDAAVIARFVEATRPELQPLPDAQTRALADVVARRRQIVQMIVAERQRQQRATMPRLKRSIERLLAALEKELNELDQELDTLVRGSPIWRRNEDLLKSVPGIGPIIARTLLAEMPELGTLDRRQIAALAGLAPWTRQSGRWKGKSFIGGGRTAVRAALFLGALTAVRFNPTLRAFRQRLIDAGKPKMVAIVAVARKLLTILNAIIRDQKPWQNA

SEQ ID NO: 108576 - protein, 370 aa, unidentified
MAKRNMFVGMDVHKESIDISIAEEGRDGEVRHYGGIAGDLEALAKVVKALRAPTRRLRFVYEAGPCGFGIHRYLTAQGEECVVVNPSSMPKRSGDRIKTDRRDGAALARLHRAGELTAIYIPTADDEALRDLGRAREDAVGLSTQAKHRLKAFLLRQGRRYPGRAGWTRPYRRWLADLSFPLAPQHIALQEYRDTIDETERRVERLTEQLRQLVPAWRWAPVVEALQALRGVSFVTAVGLVVEIGDIRRFDHPRQLMAFLGLVPSEYSSGPSVRRGGITKAGNPHARRLLAEAAWAYQGSPRIGRHMLYRQEGLPQPICAIAWKAQLRLTSRFRKLVARGKAKPKVATAIARELTGFIWAIAREVPTPAA

SEQ ID NO: 108577 - protein, 420 aa, unidentified
MKAPCITNFSVLIGIDWADKKHDVCEIDLKVKSPRYSVIASKPEAIHDWAMSLKKRFPDKPVAVACELKKGPLIYCLEKYDHIVIFPINPSTVARYRKAFTQSGAKDDPSDALIQAEILERHMDKLSCIEPESSDIRALGLLVEGRRNIVQNRVDLSNKITAILKLYYPQVLDWFDEKDSTIFCDFVAKWPSLSRVKKARKQTLLNFFNQHNSRYSETNERRIKAISNAFALTDDAGIIEPNQLMIEILIAQLKLLVEAVGRMDKEIRNRYKQQSDHNIFDSFPGAGPQLAPRLLVAFGTNRTRYSNASEMQKYAGVAPIIEQSGQKSWTHWRYSCPKFLRQTFVEWAGQSVRFSFWAKAYYDQQIAKGKPHNTVIRSLAFKWIRIVFRCWKTKTPYDESKYLSALKAKKSPLLQYAIEG

SEQ ID NO: 108578 - protein, 361 aa, unidentified
MDKVNSLFSVFYQFKLMENKMKNIKFFIGVDISAEYITVSALSKKDGKVESFENFENNANGFQSLLAEFQSHKITAKNSIVCMEATGVYGESLAYYLVGKNFKLVIENPYKIKRAFDISPKKTDKIDSKRIAEYASRFTDKLTFWGPRSQILEEIRIFLSQREQITKQKTSLNNALKALQKKFHKSEKALKLYEDMINNCNTQIKYIDKEIESLINSEPEYKQIIENLKTVPGVGNVLAVHMMVVTEGFEAHLNAKEIGSYLGIVPLPYESGSSIRRRTSSSGVGPSIVRKLLYLSSMSSRRYDENMKKYFFRKVAEGKSKRLVLNNIANKLIKLLIALIISKKPYIKNYFSINPMILKKT

SEQ ID NO: 108579 - protein, 370 aa, unidentified
MKKIRFVGLDVHAETITVAVAEPGRNGEVRSLGSIPNRLESVRKLVKKLEPVDQLQACYEAGPTGYVLYWQLTELGVKCEVVAPTLIPVKAGDRVKTDRKDAEKLARSYRAGDLTPVWVPDEAHEALRDLVRARLAAKRDQLRARHRLSKFLLRHGQRPSTKVKAWTVAYLNWVKKGVHFDQPAQDATLTDYLHEVEHEQERIARLEQAIDDAIKTMPERMRAVVEALQSLRGIAKISAVTVVAELGEVSRFKKPRQLMGYSGTVSSEHSSGERTRRGGITKTGNAHLRRIVIEAAWAYRHRPGIGTTLRARQKTASQPGGERYCLEGTTPIASPVHQAHSEGKDYTEGSHSRQPGAFGIHLGYRGCGRE

SEQ ID NO: 108580 - protein, 428 aa, unidentified
MYYTQNEKILQVGEEKIIVGIDVGSEKHYARAFDWRGMEYSKKAYVFTNDAEGFAGFFEWITGIMEKSGKETVMPAMEPTGHYWFDLAKFIQDNGMQPVLVNPLHVKRSKELDDHLPSKNDRKDPKTIAKLVIEGRYAYPYMPEGIYAELRNATVLRFQAEAELTRIKNRIQRWFAIYFPEYKDVYGSFSAVSSMMILKKAALPCDIIALGEEKINEIWREAKLRAVGKKRAKTLVEAARRSIGHTEGHETARLEIFMLLEDYDRLQNRLEQIMELIETLVSKVPYAKKLMQIKGIGIKTVSGFIAEVGDVSRFNDPKQIQKLAGQAIVANSSGKHKGQSRISKRGRKRLRFLLFEAVLSLTATNPEFKEIHHYYTGRKTNPLKKKQSLMVLSNKLIRVFYAILKSGADYEPEKLLRDIRRPEEPQAA

SEQ ID NO: 108581 - protein, 408 aa, unidentified
MIFVGHDWAEDHHDVAVLDVDGIRLVGARLGEGVEGVARLHALVAEHVADPAEVVIGTETDRGLFVGSLVAAGYQVFAVNPKAVDRYRDRYRQAGGKSDAGDARVLADLVRTDRHLHRRVAADSELAEALKVLSRAHKDLIWQRQSQVNQLRSSLREYYPGALVAFGTDLAHPDAVAVLGLAPTPEHGQRLSQARIASALRRAGRQRNIEAFAQKIRAALTAPQLAAPPALSGAYGAATRGAVAVLVAMNAQIAALEAEIAEHLDQHPDAEVYRSLPGLGVVLGARVLSEFGDDPDRYASAKARKNYAGTPPVTQQSGKLRLVTARTARNQRLADSCYRWAFCSLHASPGARAYYDALRARGKGHHTAIWQLANRWVGILHGCLRSNTNYDETTAWAHHHVETKTAAA

SEQ ID NO: 108582 - protein, 357 aa, unidentified
MQRNKISFKGQKIFIGIDVHDKTWDVAIAPEVGIVKRHPQKASAKELFDFLKKHYPDGDYLAVYETGFSGFSTYYALKEVGIECIVIHAADVPTTQYEEVMKTDKIDSVKLVRSLKAGLLKGIYIREKQNIDDRSVVRIRKTIQRQLCGYKARVKHMLHCHGVEYPERFEKKQTHWSRAFITWLLNDVKLMSDTRTSLDLLIRQVEVIRGTMLQATNELRRLSHEDRYKRKYELITSVPGIGTIVGMTILTEVYDVRRFHNENEFAAYLGLIPTSHSSGAKTVHGEKTFRGNRQIGPMIIETAWIAICRDPGLGAQYLNYKKRMEPQEAIVRIARKLSNIIFSVLKNDKEYVPYTGK

SEQ ID NO: 108583 - protein, 375 aa, unidentified
MCERAVLTNRPSLDLSPFALEGLRACRGAWDRSGVFLNPNSCMGLEPGPSKEGSWMMAQNDLVVAGIDVAKDKVDVCIRSLSSRRTFASAAEGRRELASWLRRKKVGKAVMEASGGYEREWAKALRDAGIEVRIVDPKRVRSFAQSAGRLAKNDTIDAEMIAWFAETFNEARGQAYDAAREQLHQMVNARQALKDMQSKLASQGEHAVPAAVQRVHARISKTIAAELVTIEAAISALIQATPHFTELAEIIESVPGIGRTTSAALIAAMPELGQTNNKIVASLLGVAPFDDDSGRRRGERHIKGGRRRTRNVFYMACLGAATRHNPVLKAFYDRLVAKGKLKKVALTACMRKLISILNIMIERRQKWDAKRYAVS

SEQ ID NO: 108584 - protein, 350 aa, unidentified
MKIIGCDYHPRYQQIAMMDTETGELVERRLEHENGEARAFYASLAKPVRVGMEATGYGQWFERMLAEQGHELWIGHASEIRAGVVRKQKTDARDAGHLLRLLAENRFPRIWIPSPSERDTRQLLRHRYKLVCFRVSVKNQLHGLAMSQGVCRKKNLFTAKGREELEKLSLGPWASRRRQELLAMLDQLNPVIDELDRAVQQEAESRADAVRLMTHPGVGPVTALAYVLTLGPVARFERSKQVVSYLGLNPMEHSSGDKQHTYSISKQGNTTMRWLLVEAAQTAVRFDPELQRVYRRLKFNKGASVAKVAIARKLAVKLYWLLRATASCAQMAPMQGSSRGTLVPQVGSIF

SEQ ID NO: 108585 - protein, 381 aa, unidentified
MDQKQITSEKEINTKFPVLYVAFELGNSTWKMACSDGRKVRQVTVTARDLGQVQGVLLRTQAHFGMVAAVTVVSCYEAGRDGFWLHRYLQGRGIDNVVVDSASLEVDRRLRRAKTDRIDAGKLLRMLIRYHGGEKQLWRVVRVPSREDEDARHLHRELESLKRERTRHRNRIHGILMQQGLCLPNPSKKRFLKDLEALRTWDGHQLPAGLKARLVRVYQQLRLVEDQISALATEKRERLKQVDNAKMRQVAQLLKLPGIGPVSSWAFVMEFFGWRQFRNRREVAALAGLTPTPYDSGRTLREQGISKAGNRRIRTLAIEIAWAWLRYQPQSKLSQWFSERFASGGTRMRRVGIVALARRLLVDLWRFLEYGVVPEGAFLTT

SEQ ID NO: 108586 - protein, 340 aa, unidentified
MESFAGADLHKRVTQLAILRDGQPPSQFRFPNDPKTVQGVLRKLPKGTKIAVEATGSWWWFIEKARAMGHEVLLSHPKQTKAIAHARLKSDKVDAVMLARLLKAEFLPTVWIPGEKERYVRELLAHRMRLVRNRTAVINELHAVYAKRNVEVPGMIWHRIRPMPWRAEQLSGYALRIVSENVELLKVINRQIQDLDKELGKAGQEDPQAKRLMTVPGVGATTAVAVSSWVGDIRRFPNAKKLVSYFGIAPRVRQSADKERHGHITKEGSRMARWLLLQAALVNIRMAKQPARSHYLGVSKRRGKQIARVAATRKLVGVMYHLMKDQIDYEEFLKRGSNAQ

SEQ ID NO: 108587 - protein, 445 aa, unidentified
MFIQSQDDSHCCYSFFIKVVILLMKLKYSICCGLDVHKNVIVATIVTTNKDGISEYKQKSFSTINSDIQRFHNWLIENNCYHVCMESTGKYWIPIFNYLEHDIDVCLTHPKYVKAIKGKKTDKKDSKWIADLYKFDLVRCSFIPPKDFRQLRELSRYRFKLVCMKSSEKNRIQNCMTVSNVGIASVLSDPFGKTATEIMSYLLEHTSDSMDEHAVRKLIKKGAKAKSDEIIEAIKGYNIETDQAKKLELARAHLEYLDNMITQTEVELYVRIKPYYEFVEFVSTMPGMTELSSTIVLAETGVDMSIFDDAKHLCSWCGLSPANNESAGKKKSVRIAKAGDYLKPMMVQCALAAIKSKKQPYFAIKYGRIKKRRGHKKAIIAIARMMIVCIYHMISEKKPFSPTDYEELMDPQNHVERVVLTENNVFAYLESLGYDSSKLVKRNDN

SEQ ID NO: 108588 - protein, 397 aa, unidentified
MSRTVALDIHKRFAEVAVHEDGHVGRLGRVEVDELEAFAESLRPDDHVVIESTSQTWAVVELIGRYVGRVTVSNPMRTRAVASAKVKTDKIDARVLAELGAADFLPPVWTPDAETQELRLRVAHRAGLVRQRTRLRNQVHAVLARNLVTIDVSDVFGRKGRRALGEVALPGHEREQVDSALRLHDALDTEIKLAERTLAERALADSDVRLLMSIPGVGAMTSLAIVSVIGHVGRFPSSRELVSYFGLDPRVRQSGDRAARHGHISREGQAHARGLLIEAAHSAVRTPGPLRAFYQRIKARRGTKIAICATGRKLLTVCWQLLSKQEPYRYEAPSGTRRKTRLLQRAAGHTDLVSLAGERDARAIERRVLDNVQRHYEAHVAERTARDRKHVARLERT

SEQ ID NO: 108589 - protein, 346 aa, unidentified
MEHYVGLDVSLKLTAICIVDRTGKIKREGVVSSDPEAIAEFIKSHASHVERIGLETGPTVTWLWTELSKLGLPVICIDARHAKAALKMQINKSDRNDAVGIARIMQCGWYKEVRVKDLDSHAIKALLVSRALLVKIKRDIENQIRGLLKNLGLVIGRAKMNVFLLRAAQLTEGRPELAAAVGPLLKAREAIEQQIEDLDRKVLRLARNNAQVRRFMTAPGVGPITALCYLATIDDPTRFKKSSSVGAYAGLTARRYASGEVDWTGRISKCGDKMLRSYLYEAANVLLTRVAKWSALKAWGIRLAKRSGLRKAKVAVARKLAVILHRMWIDGTEFRWSSKEATNQPA

SEQ ID NO: 108590 - protein, 253 aa, unidentified
MTYIGLDVHKRVCYGTVMDEKGQIVKRGKFSNDPQGLKEFMEGIDEALVAMEAGYCWQPLYDRLEETGHDVRLAHPLKVKAIAQAKVKTDKIDSETLAHLLRADLLPESYVPPRDIRELRDRVRRRAFLVGMRTMVKNRVHSELAKRGIRLGVPLFTRNGRELLRGLGLEAVDQILPVLDALDRQIALVSGSLKRMCGEDPRASLLTTIPGVGYYIALLIVSEIGDVRRFPDSEKLCSYAGLVPIVRRSGGST

SEQ ID NO: 108591 - protein, 361 aa, unidentified
MHATTVAVDLAKSVFQIAVADDNWKVVEQHRLTRSQFERWFQNHAVDRVIMEACGSAHHWARWLNGLGIEVKLLPAAYIRAYVKRNKTDAADACALLEAARCADIQPVRIKSVEQQALQGLHRIRSRWMGTRTSRINTLRGFCREFGLVVPQGARTGIEVISRALADPHSAVPLLIREAMKLLVEEIRLLELRIAQLEKELTSLARQSPACTELLTIPGIGLLTATAMVAATGGSVSHFKDARHFASWFGLTPKEHSSGSHRQLGRISKRGDRYLRMLLTHGARALLRAAELARRSGKSLDALRTWATEVQARAHHNKAACALANKLARVCYAVLRDHTPYGNPQPRQERKPSRQTFAIAA

SEQ ID NO: 108592 - protein, 411 aa, unidentified
MMEDAMGGAEDIFHPSSRFTPMEHPMQKFDDLSRSLTTLEPGGTLIAVIEMSLSSWLVAGIVPGVERQRLKKLAIDESALLKLLHRWREEAKKAGHRIERIAVAFEAGRDGFWLARWLKARGIEAYVIHASSIAVSREHRRAKTDRLDTELLKRSFLGWLRGERDHCKMVEIPTIKDEDAKRPNRERDNLIGERSRIINRMKAALVRLGIRGFNPKLKRAAARLDGLRTPEGEPIPPNTQAELRRDMERRRLVSDHIRQIEEARLERIEQAPSNGPHAIVRLLARVMGVGIETADMLVHEVLSRNMRDRRAVARYAGLTGSPDESGRKRREKGLARSGNARVRRGMIQLAWRFLLHQKDSALTKWFRSRTENARGTRKPMIVALARKLLIALWRLVREGVVPDGVVMRPAQ

SEQ ID NO: 108593 - protein, 418 aa, unidentified
MAFKIFRKNCCGLDVHKTWIFACIGITDANGRTEYFEKRFSSFSRGLRELSEWLAKHHCVDVCMESTGKYWIPVFNILETTCNVVLAHPKYTKPQKGNKTDRKDAKWICDLFMCDMVKPSFIPPADIRHLRDLVRYRFKLNCMITGEKNRAQNCLTVSNLKLDDVFSDVFGKSSRSITEYILGHPGEIFDVSPFVDCRCKHPIEEIQAAVDGAISKEQAVKLRQCLDHIDELEKHKTEIEREIFCLSDSYSDALDLIRTVPGFDKNPFTAIQILSEIGGDMSVFPSDMHLVSWTGCCPRNDQSNFKIKSTRISRAGNYLKPVLVQVANALIKSKKHPEITERYRRIKSHRGHKKAIIAICRMLLTAIWHILTDLKPYSADGYLIVKPVAEKKTLTTAQALNLLKSRGYVITDDIVTAT

SEQ ID NO: 108594 - protein, 368 aa, unidentified
MMVVVETIHQRSAVHGQDYNINMRGHHRDRPGQEGLSDHGIDRLGEIVTRRCVKRRELLPFAAKLPPCLIGMEACASAHHWARELRRLGHEVRLIPPAYVKAYVRRQKNDAADAAAICEAVTRPSMRFVPIKSAEQQGVLMLHRVRELLVGQRTALINALRGHLAEFGVVAPQGARHVAELVAVVADTADARLPEIARGTLASLVRQMQRLDVEIDGLDRRILTWHRTDDASRRLATIPGIGPVTATAIVASVTDPSMFGSGREFAAFFGLVPRQSSSGGTERLGRISKMGDRYIRKLLVVGATAVLRYAKKGGSPSKTWAEALLQRKPFKVAAVALANKTARIAWAVLVRGGTYQAGKTGAAAAEAA

SEQ ID NO: 108595 - protein, 343 aa, unidentified
MKYIGLDLHKKSIFATVLGGDGKILSKVNLGSKREDLSYYLNAQGKSDDISVAIEASYNWLYYYRILEDITPNIVVAHPLKTRIIGEAKIKTDKIDSEVLAYMLKADMLPKVYIPTKTAMENKLLLRSRISLVRVRTALKNKIHAIIDRNRDLYTGLENLSDIFSKTGTYIIASTKIPCPDYMILTNYLDLISDINKKIADIEKEINKRVTPDKDIEILKTIPGIGIFTAFILKSEIDDISRFISKEKFTSYTGLIPSVHQSGNKSYMGKITKQGNKFIRWALTEAAQVAIRHSGYFRYYYNKTRARQGANKATIAVARRMAEVAYVLLKEKRPYIEKPIIFS

SEQ ID NO: 108596 - protein, 398 aa, unidentified
MRFAGIDIGGERHAVAVVNDNGALLVRSTLFGEEAVGYQRLRELLGDPDDCLVAMEATGHYWRNLFAFLVGHGFKVALLNPLRTRRFAEEELERTKTDSVDALGIARFAAQKRPGATPVADEVTAELRELVRLRTRYVDEHSDRMRQLHRAVDLGFPEFTRHVRMNTVLATAILSRYPTARSFARLSVLKLAGLAYDGRHQVGVVLARTLKDTAKVSVGSHHSEAFELQVRYTCSDMGLLRNRVKQLDQEIERKLQDHEVGKLLTTIDGIGARTAACLIAELGDPSRFRDAAALASYVGVVPRLRQSGKRAFSGARGLPLGNARLRHRLWMPTLVAVRKNPWLRAHYEHLLAAGKRPKVAIVACMRKLLGAIYSVARNRRPFVPHLATAGHEQPVTAG

SEQ ID NO: 108597 - protein, 354 aa, unidentified
MIIIGCDYHPGFQQIAFVDTETGELQERRLQHREEAEKFYRDLAAQGMKVRVGMEASGHARWFERLLAELQCELWIGDAAEISAKRVRKQKTDRQDAQLILRLMLKDDFPQIWVPSWENRDLRQLLWHRHRMVQARTRLMNQLQAVALNEGLRCKKRLWRDAGREQLEAFKLAPWASRRRGDLLELLDQLNPTIAKLTQAIDREVEKCPAARRLQTHPGVGALTALAFVLIIGRADRFQCGKQIASYLGLVPLEKSSGNQRRLGHITKQGNSLLRFLLVEAAQVTVRSLPEWRSKYCHMALRRGRKIAKVAMARKLAVRLYWMMRKEWDYEQLRTFGSHAGKPGNRHGVKQNTE

SEQ ID NO: 108598 - protein, 400 aa, unidentified
MISVGIDVSKGKSTVCILKPYGEIVSKPFNITHTHKDLSELSSMLFRLNDEVKIVMEATGIYHLPVLTYLQEKGFFVSVINPYLMKSYRNESLRKAKTDKIDSRIIANYGIDHWFKMKEFQTSGEIYEELKLLGQQYRHYMKLHLLSLAELTHLLDLTMPGIKNLLASWNETNRKDKRSDFVERFWHYDIITSMSEQEFTEKYILWAKEKKYVPSQEKAKVIYTLAQESIPTLPSETSSVKMLVTEAVRVLKEVDATLGLILSRMQEIAKTLPEYSVVREMGGVGNTLAPKLIAEIGDVRRFRNGKALVAFAGIDPPPYESGQFVSCNRKISKRGSASLRKVGYETMRSLKMRSRPEDPVYRYVVKKESEGKSKKSAKIAGLNKFLRIYYARVTELYKNI

SEQ ID NO: 108599 - protein, 346 aa, unidentified
MMIIGCDFHPSWQQVKWLDSETGKTGEQKLVHANGDAKVFYQQLVAPVLIGMEATGNSQWFVELVEDLGHEIWIGDAAQIRASYVRKQKTDKRDAAHILQLVVEGRFPRLWTPDREQRDLRQLVLHRHKLVEIRSRVKNELQHLSLNKGMQRQAKLWSQEGQKLLRELSLRPWAACRREDLLGLLAMLDEQIGKLDRAVQLAAAEHPQAQLLMTQPGVGPNTALAYVLTIGDVSRFPRGKQVASYLGLIPREESSGGRQKLGAISKQGNRLLRSLLVEAAQIAVRFDPGFRKQYLHRCHQKPKGVAKMAAARKLAVRLYWMLRTQKPYPEIVRIESSPRVPLVGAS

SEQ ID NO: 108600 - protein, 393 aa, unidentified
MPRKRILVKSIDTSISYQVIGIDLAKHLVSACLITGAGEIFGIDRLTYDDLLKSAERMSPTLFCMEPCPEVHYLAEKLQGYGHHTKVIDGAAVKEYIKTHFGGQKTDLNDAQAIAFLSLDTNLLEITPKNTSNSVLSSIQAVREQFRKEYIQSFVSLKGICQRWGLPISKGVMNKNKVEELVSESKKIPQEVKDWLLELLQSCRELQKRLNKISKYLKEYADNDEICQKIMSVPGIGPITATRLKATIGDIQRFEKPKSIVAYYGLVPKSKATGHNEKKGGITRRGDRVARSLLIEGAGVVLNLAAKGFLRSKPLNKWIEKKRKLKMPWGKLCCALAAKMLRIVRAILIQGTSFNAKIAGVARCSLPKESRNNVMGNNKLSEIPSPNGSVYIH

SEQ ID NO: 108601 - protein, 379 aa, unidentified
MQSIRTWAGIDVSAATLSARRWREGREEASTFSNDATGHRAMLGWLGRQARVCVEATGVYHVQLTLTLRRAGVEVMVVNPRIAKDFARALSTRSKTDAIDAGTLLEYVRRMEFIAWEAPSTAILELREVGRRLGELVHVAVDEKNRLHARRTAAISKAVVVDLEQHIEQLERRITAVETSAVRVIEADDDLHDLYRILVAAPGIARRTAILLLTELAVLDRNMTVRQIVAYAGLDPRQYDSGTSIHRPVRISKRGNARLRAILFMNALSAIRHDQGARRFYARLVSRGKQRMQAVVAVMRKLLHGIWIVLQRRIAFNSSILFAAALAQAEPSDSAIAAPHPQPEESHPQGRSEAKELRQQLDPAPAKAAPHRRRKSKAA

SEQ ID NO: 108602 - protein, 460 aa, unidentified
MNPKRSKSRNGGKMPMVHPNAAAIDVGATMHMAAVRADRAPEPVRSFGTFTTDLHRLVDWFTECGVETVVMESTSVYWIPIFELLDARGFTVFLVNARDAKHVPGRKTDVSDAQWLQRLHSFGLLRASFRPKGQIAELRAYVRQRERLLEYAASHIQHMQKALTEMNLQLHHVVTDITGATGLRIVRAILAGERDPEALACLRHYSCHSSAETIAKALTGSYRAEHLFALEQALALYDAYQEKAFACDARIEAVLKKLSIHRGHGHGSAPRASRRRNRTDQANALAFDVREALFALLGKDITTIDGLGPYLSLKLIAECGDDLSSWPSAKHFTSWLGLAPSNKVSGGKMLSSRTRRSGGRAAALLRLAAVTVGRTDTALGAFYRRLSARIGKAKAVTATARKIAVLFYNAVRYGMDYVDPGASSYETRYRTRVVNNLRRRAKAFGFVLQPSEPKVGAAVS

SEQ ID NO: 108603 - protein, 372 aa, unidentified
MQQASQSGKRGRFGYTERLSRKEACMRYVGLDVHLRRSSFCILDEDGKIVKQEQVVGNHAAVITRLGREPGPMSICYEASCGYGYLYDRLSKLAGQVSVAHPGRLRLIYGDKKKHDRVDAKKLATLLYLDVVPLVHVPSEDVRAWRMLVEYRQKLARKRATVKSQIRALLRTQGVECRRRPWARQSRAELAALPMPAGVQVSLDLMLQELADLGPKLKRAEAQLGSIAREDARVPLLRTIPGVGPRTAEAFCAYVDRVERFRRTSEVGSYFGLVPCEDSSAGRSRLGHITRDGPSTMRKLLCEAAWVAIRRDATLRAYYQRICRDDPDRKKIALVATAHHLTRVMAAMLRSGEVWRSDAALGMNGGRPSAGG

SEQ ID NO: 108604 - protein, 333 aa, unidentified
MSGISTAGIDVSAATLDVMRQGADGRRALEQFPNTAAGHRRLGRWLAAGGGPVRVVLEATGVYHRAVTRALARTAGVEVMVANPRAVAAFARALTLRAHTDRTMASVLCGYALHMTFRPWQAPSPAAQQLQVVARRLAQLTGAQTEEKNRLHALTTSGDAPPAVLRDVRQQLRGLKQRLLTLTREAQRLIDGAPQLRQAAHHLISIPGIAQTSAIQLLGELALLAPDLTVRQWVAHAGLDVRIVQSGTSVLARPRLSKVGNARIRAALYLPALTALQHEPHVRAFHQQLVARGKAPQQAVAAVMRKLLHAIYGMLKADTDWDGARFRRLPDAA

SEQ ID NO: 108605 - protein, 324 aa, unidentified
MFPVGIDVSKSTLDVCMLYDGIKGRIKTRNILNDRSATENIIRWLRLQHCGPQDVHLVMEATGVYHERLATDLHDAGFYVSLANPHRTREFARGMGIMTKTDKVDAYMLACYAFLKKPHRWEPPAPEIRHLSALLRRRDVLLGDAVREENRLEKYLSTDTPADVISSCMRMAQLLREEVDSIERQIKAHIQASPDLKQDYSLLTSIKSVGPQLRMHMLVVLRSHNFESAEQAAAFLGVVPVEKRSGTSVRSRPRMSKIGPPQLRAKLYMSALCGKIHNKRMRNMYDELCMRGKPKMVAIGALMRKLVHWCYGVLKTGTAFCDEI

SEQ ID NO: 108606 - protein, 339 aa, unidentified
MDTIRFLAIDLAKNVFQVHGVDAAGKLVLRRRVGRAQLTELVLRLAPCTIGIEACSSAHHWARQFLQQGHTVKLISPQFVKPFVKGNKTDGNDAEAICEALQRPSMRFVPIKSVEQQDVQSLHRARSRLVSNRTGLVSQMRGILAERGIVFAQSITRARREIPVIVADTSNALTPLAREMLADLMDQLRELDRRIAGFDRRIDLVFKASETCQRIAQIEGVGPKTATAIVAAVSDPKDFRNGRHFAAWLGLVPRQSSSGDRTHLLGISKRGDRHLRTLLIHGARAVLRTAPTKHDKKHAWALALKTRRGANRAIVAIANKMARVIWSMLATGQSYQKAG

SEQ ID NO: 108607 - protein, 339 aa, unidentified
MRLYAGCDLHAKSNYWGMVDEGGGRVVGKKLGNDGGLILRFLEPYRGELAGVVVESTFNWYWLVDLLMEEGYEVHLANPSAIQRYEGLKHGDDEQDAFWLAQMLRLGVLPEGYIYPRQERPVRDLLRKRGHLVRVRTSLLLSLQNIVDRNGGGRLRGGDLKQCRGDRIDALLEGNEDLVLAGRVSKEAIDFLTGQIKEVEAVVLGRVGIKEVYRYLLTIPGVGKILALTIMLETGPIDRFGQVGDYVSYCRKVPSQWLSDGKVKGRGNKRNGNRYLAWAFSEAAELARRFYEKPRAYYHRKMQRTNAMVAHNALAHKLARAAYYVMRDQVVFEEERLFS

SEQ ID NO: 108608 - protein, 360 aa, unidentified
MAKARSLVGLDVHATKVVAAVLDAETGQLQTFAMNGETAKVAAFCAGLPRPVRAAYEAGPTGYGLARELAKRGVECVVAAPSKIPRASGDRVKTDRRDAEHLVRLLLAGKLHAVRVPGDEEEALRDLVRARDSVRADLMRCRHRLSKLLLRHGIRFDDGAAWTQRHRDWLATVTLNWPAAQATLLDARGAIEALCHRREQLEREIVAMLPSSPWVVQVGRLRCLRGVDTLSAVGLCAEIGDFERFAHAEHLMSYVGLVPSESTTGQQRRLGQITKTGSGHARRLLVEAAWHYRSRPSIGRALTDRQHSQPPAAIAVAWSAQRRLHRTWTRLEARAKRRTLIAVAAARELAGFAWAITQIE

SEQ ID NO: 108609 - protein, 374 aa, unidentified
MEHHSEVFVALDTAKLRNAVAIADGGRNGEVRYLGEIDNSEAETRKLVTKLARKYARLTFCYEAGPTGYGLYRLIKSIGHDCIVVAPSLIPSKPGDRVKTNRRDAVNLVKLLRAGELTAVWVPDERHEAMRDLVRARDAAVKDYRIKRQNVSSLLLRLGRHYPGKKTWGRAHINWLTSLRLEHREQRIAYEEMLLAVRQVRERIDRLEQAMREAVADWTLSPVIEAVQAMRGIDMVGAIAFLAELGDLSRFESPRQLMAYLGLTPSERSTGESVNRGGITKAGNTRARRLLIEAAWSYRFPPRVSKDMQTRVGAAPRIAREIAWKAQMRLCGRFRTLTRKGKRPTIVVTAIARELSAFIWAINREVAGSQATAN

SEQ ID NO: 108610 - protein, 423 aa, unidentified
MKPLATHQFTAYVGIDWADTKHDVCLQVPGIESREFDCIAHQVAGIDEWAQSLRQRFGAPIAVALELAKGPIVYALQKYDFFVLFPINPSTLAKYREAFKPSRAKDDPTDAELALDLLIRHPERFSSLQPQSPDMRTLLSLTEHRRELVADKTRFTNRLTNALKQYYPQALDWFDQRDTVLFCDFLTRWPTLTQVKRARPASLKAFFYAHNGRRAQVISARLDAIRAATPLTEDLGVIAPCHLQVLVLTEQLRTTLHAIDRFDREIAQLAPRLPDYALFQDLPGAGPHLAPRLLAAFGEDRRRFQHADELQKYAGIAPVTERSGKKCWVHWRWQCPTFVRQTFVEWAGQTINKSFWAAAYYRQQRDKGSSYQAAVRSLAFKWIRILYRCWQTNTPYDESRYLNALSKRGSPLLKNLESNARNP

SEQ ID NO: 108611 - protein, 338 aa, unidentified
MKTTTLGIDVAKNIFQLHGVNERGKVVVTRRVTRGKFMEVMANLPPCLVGMEACIGANYWAREFEKLGHTVKLMSPKFVRPYVKTNKNDSRDAEGICEAVSRPTMRFVPIKTIEQQDIQALHRSRTLLMKNRTALINQIRGLLLEYGVVIGKSPGKVRRILPTLLEDEATALTPFAKETFGELYDQLVDLDERLEKIDGRLERFFDVHPVCQRIAAIPGIGPLTATALVAAIHDPKLFRNGRHLAAWFGLVPRQHSSGEKVSLGGISKRGNRYLRTLLIHGARAVISHVEKKKDGLSLWIKRLKERSGTAVAAVALANKNARVIWALLAHDDVYRKPV

SEQ ID NO: 108612 - protein, 348 aa, unidentified
MRIIGCDLHARQQTLAMLDTTTGEMVNLTLMHEGNGVREFYSQLPRPVLVGIEATGSMQWFLNLMDELGIECQVGHPASIRAAEPRKQKHDRRDADLILKLLAEQRFPAIWLPSKELLDLRALLLHRHQWVRIRTRLQNALQAIALANGLRLGPGLWSYDGQAKIAFLPLLPHASYRRSALQVMYRKMEEEIENLTQQVAEQAGQRSGARLLMTHPGVGPVTALATEVFLGDPKRFADGKALASYVGIIPREYSSGQRQRLGGVTKQGSPLLRFLWYEAGAHAVRRDPELKRFYLHKLIQKGLGKARVAVARKLGIRLWIMLRDEIDYQEFCRRGQMQQSGAACGGDA

SEQ ID NO: 108613 - protein, 458 aa, unidentified
MKSTLVLGVDVSKGYGDFVLLDAHKRVVEPPFRLDDNKQGHDILKKQLLEWKKNYRVSRLLLVTESTGGYEDNWLRISKDKALSFVESYRINAKIIFHEYQAQRRNSIDDGVSAITIAEHVVKNLENFTVTSSFEETPYTSSRSLIRHYVSLQEESSSHKNALVKLLYQYLPSLEALKPREWPIYWIEIFVRYGSRKSIQIAASKGFRQLKRVPPGKAKKIAEALANGIDMRETPAMVVYAIRSKARQIKRLMEEIKEVKKMIIEVAPVDAQQVSLLKSIKGMGDITPVILLSFIEEVGRFGDAKQMACFFGVQPRVKKSGDGAYRAKMSKQGAGLVRRELYLLAFRTLNKEPYLRAIYAKSRAKGMVHNAAIGVLMHKILRMIYGMLISNTPFNVGIDQLNQHQVADKPKEKRQKKETSRRFQPPSMAAPISGRQRRKRKKDYELQADGISESTESS

SEQ ID NO: 108614 - protein, 392 aa, unidentified
MARGVRLVGPKVSAAALQGATAEGAVEIVVILEPALAAFVLSMIPPSLSLGQELEQLPEPPKKRARIQGRVPTANNPIVIMIKSSVYLGVDIAKESLACFLAGEYFEVPNSAQGQRQLLARVRRRKGERVHVICEATGPYGRALVAALHQAQVLVTVANPRRVRDFARFRGQLAKTDKIDAQILAQYGELGTPEPTPEPSAAQLRLSELVTRRTQLCDLITAETQRLASLQEADLRRLAQGGLVSLEKQLSALEKLLQKHLAAERALGEKAERLQEAKGVGTLTAAALLAYAPELGTLSKREVAALAGLAPRNRDSGKYRGQRRISGGRAPLRRALYMASLSAIVHNPILKAFYDRLSARGKKFKVAITAVMRKLLIALNSALKNPNFQLAS

SEQ ID NO: 108615 - protein, 384 aa, unidentified
MLYVGIDVAKYKHDIAVIDEFGNIILEHMQIKNNHEGFYQLHTWLSHHVENPNDIRIALEDTGHYSRNIVMFLRANFYPTFSYNPYLIKEFAKSVSLRKTKTDKKDALTIARKLASDMPVMRQMPSQDMDDLKVLTRHRDRIKRKMTDFKVQYVKILDLIFPELAKIVSLHNQSTRHLIEKYPTPAKIIRANKTSIYNIKNLKADKAKSIIIAARTTVGNTSWALEFELKQTLQAIRYFEKLMTEINTEIQALMDKLDQVITSVPGISTTLGSIILAEIRNIENFRNPNQLLAFAGLEPSVNQSGESEHTGKMVKRGSTHLRWALLQAAEKVAIYSPTFKRYLALKRSQGKHYNKAKSHVAKKLVRVLFYLLKNHKYFDENLLT

SEQ ID NO: 108616 - protein, 416 aa, unidentified
MTLKIVYPICCGIDVHKSFVVACIATTNSNGITTFKKSRFSTFTGDLRRLARWLSENNCKDVCVESTGKYWIPVFNILEESCNVVLAHPKYVKAIRGKKTDVRDAKWIAELFKHDLISGSFIPPPEIRQLRDLMRYRVKLTNVSTAEKNRVQNCLTISNIKLDDVFSDVFGKSASAIIEQLLLHQNGDFDVTPFIDKRCKAKPETVQAAVDGFLSLEQIRKLRIIRSHLDDLSSRKCDLEAVITEIAEPFLPQIELLTTVPGIKLFSAIAIIAEIGVDMSVFPTSKHLCSWAGLVPQNNESAGKKKTTRISRAGAYIKPLLVQCALSVCKSDKHPEIKFRYLALKKRRGHKKAIIAICRMLLTAVYHILRKSEAYNPSLYRKEDAPTNRVITVKQALALVKRHGFFVVDSDDELAS

SEQ ID NO: 108617 - protein, 346 aa, unidentified
MSIVGGLDIHRKQLTFDYLDTDTGELGRGQLAPADRRHLAAWLGRFDGRGETTFAVEACTGWRYVVEELRRAGAVVQLAEPADTAAARGRKRRAKTDRSDAKLLRELAVGGRVPQCWIPPFEVLEYRALLECYHDLRREHTGWVQRLHAVCFHQGVAALGTGAISTVDGRVRLRRIAAAELSAAGQVQIAVGLSMLDAIEVHLEDLRRQLVGAARHQLGAKTLTDRLYGVGPITALALCCWLGGGDHRFRSSRQAVRFTGLDITVYSSDGKRSPGHLSRQGPPVLRWCVYEAGKTHARTSAPDHDYYAGVKDRIDGKRAALSEARKHVRQAHHILAELGDTAFDAV

SEQ ID NO: 108618 - protein, 456 aa, unidentified
MGHARARKIPAQLVEDEEYQLRYERVAGIDVAKAKADVCTRLPPARDGGRRASRLEEVPATARDILALGGRLLADGIELAVMEATSDYWRIWYYLLENCGLTVQLVNPAHARQLAGRPKTDRLDAQWIARLAEMGLLRPSFVPPPEIRALRDLTRTRLQLVRDRTREWQRLEKLLEGALIKLSSAVSRLARAKTARDILEALADSQRDPKVLAAMAAGQIKGGRAAVEQALDGMLLGEHHPRLIRLHLDHITFLDRAVAAVEDQIDAALAAIPAAWGISADGVPSPDPGPGAAALTAVQRLAEIPGVSPGLAMAIIAETGLEMTRFPTAAHLVSWAGLAPVARQSGPRNRKPKKGQGDAYLKGYCTQAANGAARTETFLGERLRRLSRRLGGNRAKCAVARSILVIVWHLLANPEARFTDLGPDWHNRTTDRDRKIRAHLRQLQALGLEVTITPAA

SEQ ID NO: 108619 - protein, 429 aa, unidentified
MNYNTQNAKIASITEKTLIIGIDVGSETHYARAFRWRNYEYSKKPFAFSNDEAGFPSFKDWMDDIAEKHGMETVIPGKEPTGHYWLNLGAYLQEQGMKPVHVNPHHVKKSKELDDNNPSKNDRKDPKTIAGLVNEGRFSYPYIPTGIYAEIRNLSNLRIQTQEEITRIKNRMARWFSIYFPEIKDVYRNPDAVSGLMVIKQAPMPCDIRELGVEGVNKIWRDARLKGAGIKRATTLVTAAEHSIGNTEAPRSSRKEIRNLLEDYEGYKKRMDELMEEIEKTLSEIPYIDKLMEINGIGIKAVSCFIAEVGDIGRFDNPKQVQKLAGYAIVADSSGKHNGESRISHRGRKRLRYTLYEAAISVIGKNKEFKEIHSYYRTREKNPLKKMQSVIAVACKLIRIFYTILTKGVDYDGQKMLNDIVRPEIQPAA

SEQ ID NO: 108620 - protein, 429 aa, unidentified
MRTESTPGARGPVFCGVDTHADSHWLCVLDWRGRKVLSRQFPADAAGYEALAGAIAAAGEPACVAMEGTSSYGAGLTRHLASLGMPVREALSPARMQRRRPGQGKCDEADAERAARAAMSGSRLGTPKSQDGWVDGVRCMLAARSGAVKARTSAINTARSLLTTAPEGLRSRFRGMGGPRLMEELPSVRAEGALGAALGALADLWGAARDAALDMERAIEASLEENCPALLAMYGCGPVSAAKLAVAAGDNPGRLRSEASFAAICGACPIPASSGKTVRHRLNRGGDRQANSALHEIARQRVMRDPETAEYAERARGRGKSDREVMRCLKRYVAREAYRALMHPHEIRRPGDASELVAARRAAKVSQVRAASILGTSEKYISMLERGQRELKPIRRAYEAWVEAGLPLDWDRRAFEAERKMDSKKHLAK

SEQ ID NO: 108621 - protein, 461 aa, unidentified
MVRKARRANQSQELPPSLKCVHLNAAGIDIGATSHYVAVPADRDEKSVREFSAFTPDLLKLADWLKTCKVDTVAMESTGVYWIPLYDVLDRRGFKVYLVSPKNLKRVPGRKSDVLDCQWLQQLHTFGLLSGAFRPEDQEIVLRSYMRQRAMLVRSAAQHIQHMQKALVQMNVLVHHAVEDITGVTGMRIIRAIIGGEHNPVTLAAMREEGCRKDAATIAQALEGNWREEHLFSLQQAVELFDTYQEKIHDCDRKIQDHLHTMEDRSDSTTGTPPKPEKSHSRKNELSFDGASEAYRICGADLTRITGIKGHTAMKILSEIGTDVSHWPTAKHFTSWLTLAPNNRISGGKRLSQRKTPPKQNKVAQTLKMAAFSQHNSHSYMGAYYRRMAARVGKAKAIQATARKLAIQVYYALKYGTDYVERGQNYYEENYRARVVKSISRRVKELGYHLVKDEQPVILSA

SEQ ID NO: 108622 - protein, 407 aa, unidentified
MDVVIERACGMDVHKDNITACIMTQEGKEIQTFSTKTVFLIQLVDWIKQHGCTHVAMESTSVYWKPIVNLLEAENIEFLVVNAQHMKAVPGRKTDVKDAEWIAKLLRHGLLKASFIPDRNQRELRELVRYRRSIIEERARQHNRIQKVLEGANIKLGSVVSDIMGVSARDMLNAIAEGEEDPEKLANFARRTMKKKKDELQLALRGYISDHQRLMLKTILKHIDFLTEQIEMLDQEVADKVSVYQEDVERLDSIPGIATRMAEQILSEIGTDIKKQFPSAAHMCSWAGLVPGHNESAGKRKSTKTKKGNKYLRSALTEAAHSVRGSKNYLGALYRRTASRKGKKRAGIVVAHAILRISYYLLTRKEMYIDLGEDYFDKQRQQSLVRHSLRRLESLGYTVTLQEPEAS

SEQ ID NO: 108623 - protein, 350 aa, unidentified
MKYYAGLDVSLEETSVCVVDGEGSIVAEAKVVTEPEAIAAYLAPWSGSLVYVGHEAGGLSPWLHGGLRGAGLSAVCVETRRMKAYAKASPVKTDRRDAELIGLALRAGLYRAVHVKSVDAHKMRLALTSRQALLRQARQLQGKIRGDLKVFGIKLGRVGSGGFAGRVKTRLAEHADLWALIAPLLAVRADHLAQVRAYDRALRRLAKDDAVCQRLMTVPGVGVLTALAYRSGIDRPERFRCARNVPPALGLTPRVDNSGELERNGAITKAGDKLLRSLLYEAANALLTRSRRWSALKRWGLAVAAKRGGKRARVAVARRLAVILFAMWRDGSDFRYGRYGRDDRAAATAA

SEQ ID NO: 108624 - protein, 323 aa, unidentified
MNKYSETFGIDISKDVFDCYGSTQGHLQFKNTESGFKKFQKILSKDSLVVMEATGYYHYRFAQFLYHQGFLVSVVNPLSVKRFIQMKLAKVKTDKSDAKAICNYGLSQEVPLYNALTEVQSECLQLFRWMDSLLKKRTATKNKIHGEKVLGIPSKYVYHSLNRTLKHLDRELQGIDKKLLSLVKQDQQKQLTLLKSIPGIGVKTALFLIVITDGFKKFETASQLCSYAGITPTIRASGSSVRGRSRISKVGNRKLRNLLFLCSFSACKHNKSCREIYERIVNKGKSKKLALIAVANKLLKQAFAIAKSGIPYDETFVSALMAK

SEQ ID NO: 108625 - protein, 418 aa, unidentified
MKKHSKSAQRSEPTLKRTKARGPVQRDAKEVLAEVLGKLTEKLDTPAVSTSAKENRRGNTVGPNRDRLTVGVDLGDRWSQYCILGLEGETLAEGQLRTTQEDIGEFFRALTATRVVMEVGTHSAWVQDVIRELGHEVLVANPRLMEGSKRRKRKSDRIDANKLARLGRVDPQSLHPIRHRSREVRQDLVVLRARDTLVSVRTELINTARGLVKSMGARLPRCSSPSFAEKVKDAIPDEVREALLPLVQLVERVKDCIARYDQKIEELGREKYGHTTLLRQVKGVGPITSLAYVLTLEDPQRFSNSREVGPYLGLVPKQEDSGDSQPQLGISKAGDRMLRRLLVGSSQYMLGAFGPDTDLRRYGLRLCERGGKNAKKRAVVAVARKLAVLLHHLWVTGDVYEPLHHTEAETRTAQATAA

SEQ ID NO: 108626 - protein, 416 aa, unidentified
MEIYPNTRAIQRYIALDIHKEYVLAGGMNTGQEWVLSPHKIEMGKFREWAKKNLCDTDAVVIETTTNVWDIYDIVQPLVGRAVVAHAGAVRQIAEARVKTDREDVKRLIRLLIAGIVPQVWVPPQHVRELRGLVSYRQGLVKTGSMIRNRLHSLLHRHNLLLPEEGLADGEWWTQQEKIPALEKLQIRQELSMLQQIETHKAEVDHELGRQSLGETWGKAAVRLMQLPGIGVVIAMTVLSAIGDIHRFESADKLVGYAGLGAGVHDSGKEHIEKRITKSGRKELRWAMVEAAWRAVRMSPYWKEQYEKFLRRMRRPNQAIVVVARKLLVAVWHVLSKDETDERATEEDLAYKMLLWSWSLSEDARQGLTHKQFAKYALMRLGVQTDLTRFVRGKVPRRIASREEVLVRMAELGLSG

SEQ ID NO: 108627 - protein, 332 aa, unidentified
MKTQHNREICHLGIDVSKAKLDAILLNGRRLHKVFSNDADGFNLLREWLKKNGVCELHACMEATGKYWKALGAFLNKAGYKVSVENPYRIKSFARSQLRRTKTDKADADVIADYCRAMNPKPYKFRSAHVNELQEMSRRLEELKSTLVQETNRLYTAESGRVRKSISQMILTIKKEIKSLENLIDKHFEKHADLREQKALLESIPGVGRVLSLIFVSEGGDVEDYKSARECAAGAGLTPEHRESGSSVHGRASISKKGNARLRRALYLPAVVAVRKNPVIKEFYERLLARGKAKKVAVVAAMRKLLHIMYGVLKNKKAFDPNFLACQAGISR

SEQ ID NO: 108628 - protein, 395 aa, unidentified
MLGEREFEHGGAGLTQMADWLLAFASDAAAVGVAVETPRGPVVESLMERGFAVHSINPKQLDRFRDRFSPAGAKDDRRDARVLASALRTDPHCLRRLKPTDPAIVELREWSRLSEELTRERIRLANQMREQLWRYYPQFLGAVDDDVAAPWALDLWRSLPTPRAGQRVREVTLTKVLKQHRIRRIDSASLRARLRVPAVRLTPGAAEAAMTHVRLVVERLALVNRQLDDVRRHLDGLVHRLTEADSTGDSDASMEDGPSPKTPPDAAILLSLPGVGTKVLATLLAEGNDAVGRRDYDALRCLCGVAPVTRRSGKSLIVRQRHAAHDRLRDAVYHWARIAAQRDPVSHDKYRSLRARGHGHARALRSVADRLLNVACAMLRDGTRFDAHRVKIVAT

SEQ ID NO: 108629 - protein, 359 aa, unidentified
MLEGKIDHVIGVDTHRDSHAAAILDPNGGLVAELTVTSNQAGSEALLGVVAQRAPGRRCWALEGTGSYGAGLASFLADQGEWVTEIDRPKRPRGRNGAKSDPLDAIRAGREALGRDHLASPRQRGHREALRVLQLTRSGAVKVAADSRRQLKALLVTAPEPLRAALCGGTWLAQARACAVLTAEASDPVEYRATVRALRLTAERALAAHAEAKQLAEELQMLVAVMAPALLAQPGVGPITGAQVLISWSHPGRLRSEAAFAMLAGVAPIPASSGRVVRHRLNRGGDRQLNRALHTIVMLRETWHEPTKRYVTRRTAEGKSRREIRRCLTRATARQLFRLLERKAGHPVAAGQPALPPTH

SEQ ID NO: 108630 - protein, 442 aa, unidentified
MPHATSSAPLEPDWAAFAGLDWGDEKHYWKLRDAHSQQSQEGVLQNTPEALDAWAAELNVRFGGRPIAVCLEQSRGAVVYQLSKYPHLILYPVHPTTSARFRGAFYPSGAKSDPQDGDVLLDLVEHHRDRLRRLDPDTPETRLLQMLVEQRRAWVDEKTRHSNRLTGWLKIYFPQVLDWIDDIDSPLGCDLLDRWPTLEELQKSHPGTLHTFFVQHNCRSEKRMQERIQAIYQATPAIRDTAMLEAGPAIVKQIVAVIRTLRANIDVLDKRIASLVSTHPERALFEALPGVGPALLPRLIVAFGTKRERYTCADQLEAYSGIAPVTQQSGKSKWVHFRWACPKFLRQTLHEFAAHSIAKSVWARAFYDMQIAKGKGHHAAVRSLAFKWIRVLFACWKNHTPYDEQIYLRALQNNGSRLSQILATQLTWKTVGGLQKLCSENA

SEQ ID NO: 108631 - protein, 392 aa, unidentified
MLYLGIDIGKNNHVATLIDSQAKPLFKGFSFANTTVGGESLVSKLLMHLKSTSDVEIGMEATGHYWLSLYSFLVSKGYVIHVINPIQTDGWRKGVEIRKRKTDKIDSFLIADLLRYGDFVETSLSDESIMSLRNLTRFRHYLVGSIGDLKRKAICVLDQTFPEYQGVFSDTFGQTSSELLLHFQTADDFASITAEQLEKALSGITMKSFAKNKLTQISELAANSFGLKFCRDSFSLQLKLLIEQIRFIEAQVSDVEAEIETMLTKLNSPITTIPGVGIVTGATILSEIGDISRFSNPSKLVAFSGIDATVIQSGESSGTYKMSKRGSPYLRKALFQAALIASNHDPVFKDYYQKKRAEGKHHLTAVGAVARKLCYTIHAILKNNVPYAVQKP

SEQ ID NO: 108632 - protein, 418 aa, unidentified
MKNDDYAALVALDWGDRTHAFARQIAGADGIENGTIEATAEALHAWLEQLRETCGGRPVALAVEAGRNALLHALLEHPWLTVYPVHPATSARFRKAFTPSGAKDDGPDAVVILTLLRVHRDQLQPLTLDTPATRELAALVAARRSAVDQRTCTSNQLCSVLKSYYPQALTLAGDDLTKPLALAFLRRFPELTAVQKVRPATLSAFYREHNARSAERIAARLELAARARALIQDRVLIAPALLEVAWLVDLLEVHARHIAGLEARIAEAFAAHPRAELFAALPGAGPTLAPRLLVAFGDNLERYPNAQSLQKYAGVAPVREKSGGKSWTHWRWAAPKFVRQSFVEWAGQTVVYCDWAHAYYDQQRRAGKAHHAILRALAFKWIRILWRCWHDQKPYDEQHYLASLRRHGSTLAVALKKT

SEQ ID NO: 108633 - protein, 337 aa, unidentified
MDIKVIGLDLAKNVFQVHGIDGSGRVQLRRQLKRAQVLEFFVNVPPALVGMEACGGAHYWAREIEKLGHAVKLMNPKYVKAFVRTNKNDRTDAEAIAEAAARHSVPSVPVKQPWQQDLQSLHRVRSALMCERVAVENQMRGLLAEYGIVVAKGSAALRRALPELLEDGQNALSGVMRELIAERYEHARLLQQKIADHDRRLRLAAREHQACSALMEVPGIGVLGATALVSQVADARSLKNGRELAARQGLVPLHSGTGGKERLGRISKRGDGYVRTLFIHGARSVLNHAPHKSDRLSRWATEVMRRRGRNIAAVALANKMARIAWVILARAQRYQPQ

SEQ ID NO: 108634 - protein, 381 aa, unidentified
MPSLKHRRRAVNQDTLFIGLDVHKEKIAVAAAEGHRDGEVHFHGTIINKLDAVRRLVEKHAKRHERLQFCYEAGPCGYAIYRQITKLGHDCTVVAPSLTPTRPGDRVKTDRRDAMTLARLHRAGELAAVWVPDEAHEAMRDLVRARTAAMESLRRSRQQLGGFLLRHNRTFTGGRNWTKRHRRWLTTVHFDHPAQQIVLQDYIDGVDDAGARLARLEAQIAELLPQWSMAPVIAAIQAMRGVGFIAAVTVAAETGDLRRFDTPRQLMSYLGLVPSEHSSGSRTLRGGITKAGSKDARRVLIEGAWTYRTNARIGPVHQSRLDGLPKAVREIAWKAQIRLCSRYRRLAARGKPQTVVTTAIAREMAAFIRAIARHVQPVEAA

SEQ ID NO: 108635 - protein, 339 aa, unidentified
MGLHCAVDLHGNNGFYGMVDEKGHRVFKKRLPNSLATVLAQLEPYRDDLSNGVVVESTYNWYWLVDGLQDNGYRARLANPAGMEQYDGLKNTDDETDTFFLTELSRLDILPEGYIYPKEERPVRDLLRRRLLLVQQRTAHVLSFKNLVARQHGENIASNKVQQLWPAEVGKLFDDDRLILMGETNIEMIRFLTKRIRAIEKKVLSEVELRAQYTKLLTVPGIGKILALTIMLETGDISRFKKVGNYSSYCRCVKSSRTSNDKKKGENNRKNGNRYLNWAYVEAANFMRRYSPEAKRWYQRKLRRSKSVVATKALAGKICKACYFVIRDQVDFDVKLMFG

SEQ ID NO: 108636 - protein, 335 aa, unidentified
MTSPSQTISINPKPTKTIRMNPQPNTINAPAPVYIGVDVSKATLALNFPGFSGEYPNTLKGHRAIIKRLPKQAHIVMESTGGYQRAFARALQAQSVAVSVVNARQVCNFARALGQLAKSDAIDAEVITRFAQSIKPEGDRELTQSELKLEEIMNRRQQLVELCNIEGNRLEHYFESEIAEDAKALIAHLQAKIKKLETMAKEIIEADAILKAKVERLTQVKGVGLITSASLIAFMPELGRLKRNKAAALVGVAPFVCDSGAERGKRHIWGGRAHLRKLLYMCALHAIGKNRLLKEFYQRLKSAGKPSKVALTAVMRKLICLLNHMLKNPNFSLAS

SEQ ID NO: 108637 - protein, 370 aa, unidentified
MTRGTTFVGMDVHKASISVAVLEPGKQVPTEWVVENRASLVAKLGQKLKRDYGEDVTCCYEAGPCGFAQMRDLSSMGINCKVIAPALIPKQPGNRVKTDRRDAQRLASLFQAGLLTEVHPPTAAQEAVRDLCRARDDARDERLRAQHRLVKFLLRHGLTFAGATQTRRFHQWLSKLTFEHAAAQATFDHYVRTLVAAQERQKSLDEKIEEIAGTPEYQAAVGMLRCFRGIDTTSAMIILSELGDITRFESPRQLMAFLGITPSEYSSGGKEKRGGITKTGNRHVRRLLVEAAWHYRHHSSVGKELQARRRGQPGWAVNLAEKCQLRLCRRHRRLVERGKAVNKANIAVARELAGFIWAGLMAHEERARAA

SEQ ID NO: 108638 - protein, 355 aa, unidentified
MNSIKYIGLDVHQSTSSVAVLNADGKLVMQSVIATHASTILDFMQGVRGTLHVTFEEGTHSAWLYDLLVQRVTKLVVCNPRQNALLKAGNKSDTVDARKLADLLRAGLLSPVYHGQNSTAAVKHLGRSYAALTEDTTRIMGRLKALYRSQAIACAGKKPYGARHREEWLAQLSESGLQRRARRLYQQLDLVQELRREARHDLILECRKHNETKLLRTIPWLGPIRVALLLGRVQTPHRFRSKRQFWAYCGLALETRSSADYQMVNGQLERRQKPVFIRGLNLNHNHDLKNLFKSAATTASGSNGPFRPFYENLLGKGMKPELARLTLARKIAAITLHVWKKGEPFDAQYLKSQAA

SEQ ID NO: 108639 - protein, 315 aa, unidentified
MTETSRYVGIDVSQQWLDLGIRPANGPAERVANDAAGIDALVRQLEALAPARIVLEATGGLERPLVAALAAAGLPVLLVNPRQVRDFARATGRLAKTDALDAAVLAHFAEAVPLQLRPLPDAETLHLRALLARRRQLLAMQVAEGQRRRAAGPALRAGIEAHIAWLKQERERLEAELQASIQDSPHWRAQDQLLQSVPGVGPQLARTLLAQLPELGQVDRRQVAALVGVAPYNRDSGHWRGRRSVWGGRATVRAALYMGALVATRYNPVIGAYYQRLLDRGKPKKVALTACMRKLLVILNAILKSNTPWQAPQHA

SEQ ID NO: 108640 - protein, 344 aa, unidentified
MDHFAGLDVSVKETSVCIVDDTGRIVREVKVASEPEALLSVLKNPAYHFKRIGLEAGPLSQWLFSALAEAGLPVICVETRHMRAVLKAQINKTDRNDARGMAQMMRAGLYRPVHVKTLRSQKLRMLLTHRKLLQSKAIAIDNDLRGTLRNFGLKVGMVGKVRFEARIKELVENLPDLAAMVEPLLIVRRTLREQFCVLHRRLLAIVRDDEVCRRLMTTPGVGPVVSLTYRATVDVPARFRKSKSVGAVFGLTCSKYQSGEVEWSGRISRCGDEMMRVMLYEAAQSMMRSKKWSWLKAWAMQIARRRGMKKAIVALARRLAVIMHRIWVDGTEFQWTREQAVAAA

SEQ ID NO: 108641 - protein, 335 aa, unidentified
MHYLYYVGLDVSKETFDASLVAFEDANEMAHRKFANSRKGICSCLHWVEKRHGIRLVDVIFCAEDMGSYISEMAVCASDRTLNFNFSLISPLVIKYSMGIARGKTDRVDARRIAEYAITHYRKIALYLPAEKELCQLRTWLILRAHLAKQRVAKLVLLEKLDYKEKFADVSIQRSMLQEEIAYAETHMKTIEREMKELIAADSNICRNYKLLTSIKGVGPITAIVMLCSTLNFTKITDHRKFACYCGLAPFEHSSGTSVCGGCHTSSMANRDIKVQLNRSALIAIRCDPQLKAYYERKVAEGKHKFSVLNAVRAKIAARCFAVVRRGTPYVALQI

SEQ ID NO: 108642 - protein, 402 aa, unidentified
MNAVGIDVSKGKSMVAIMRPFGEIVSAPFEIKHTASGINSLVELINSVEGESRIVMEHTGRYYEVLAHQLSEANLFVSAINPKLIKDFDNDSLRKVKSDKADAVKIARYTLDKWQNLKQYNVMDELRNQLKTMNRQFGFYMKHKTAMKNNLIGILDQTYPGVNTYFDSPARSDGSQKWVDFASTYWHVDCVRKMSLNAFIVHYQNWCKRKKYNFSQSKAEEIYGKAKELVPVLSKDAITKLIIKQAVDQLNSASTTVESLRTLMNETASKLPEYPVVMAMKGVGTSLGPQLIAEIGDVSRFTHKSAITAFAGVDPGVNESGSYEQKSVPTSKRGSSDLRKTLFQVMDVLIKTHPQDDPVYQFLDKKRAQGKPYYVYMTAGANKFLRIYYGRVKEYLSSLPES

SEQ ID NO: 108643 - protein, 375 aa, unidentified
MGENSEAFVAFDTSKLRNAVAIAEAGREGEVRFVGEIDNSGAATAKLVRRLAAKYQRLTFCYEAGPTGYGLYRQITSLGYSCIVVAPSLIPQKPGDRVKTNRRDAVSLARQLRAGELTAVWVADERHEAMRELTRTRGAAVEDLRRKRQQISAFLLRHGRHYAGKKSWTKAHMSWLLSQKLEHPEERIAFEEMLLAVRQAEERIVRLEEAIRAAVPDWSLAEVVAALMTMRGIDLISATGFLAEIGDLSRFRTPRELMAYLGLIPSEHSTGDKIKRGPITKTGNRRARRILVECSWSYQHPPRIGKEKQAKVAVAPQAVGEIAWKAQCRLNARYRALTRNGKLKTVAVTAIARELCGFIWAINREITGPRAAARQ

SEQ ID NO: 108644 - protein, 365 aa, unidentified
MQKISTMRTSGKNIFQGRLTIGLDLGDRFSAYCVLSEAGAIVLEHKLATTPEAMKQVFGSMPRCRIAMETGTHSPWVSRLLTALGHEVIVGHAQKVRLITKSRRKDDRLDARTLARLARIDPELLSPVKHRSAQAQLHLTEIRARAGLVSARTALVNAARGLVKSYGERLRKCGTQQFTREITSGLSAGLREALQPLLREVESLNEGIKEYDRRIDKMAKQTYPETALLKQVKGVGDLIATAYVLTVEDPHRFRKSRDAGCFVGLQPGRRNSGDSEPQMHISKEGDEYLRTLLVQGAHYILGPFGEDSDLRRWGQKLAARGGKNGKKRAVVAVARKLAVLLHRLWVSGEAYEPLRNSQKAMSAAA

SEQ ID NO: 108645 - protein, 356 aa, unidentified
MSSDIKYIGLDVHKEAIAIAVLNGAGKLVMESIIETKAATLVQFLQGLRGELHVTLEEGAWAAWLHDVLQPHGHELVVCNPRRNALLKEDSKSDKVDARKLAELLRAGMLRPVYHGENGLRTLRELARSDQTISKDLRRVMNRLKALYRSWGIPCAGTRVYAPRDREQWLNKIPHAGVRRRAELFYQHLDGLQVLRRQARGEFLVESRKHQAVKILRQIPCIGPIRAALLLALMQTPHRFRSKRQLWTYSGLGVKTHDSSQHCYVDGRLQRSKKPQQLRGLNQNHNHEMKEIFKSTATSASRCGGPFVDFYAGLLAKGMKPEMARLTLARKIAAITLTLWKKGGRFDAGHLKAQAA

SEQ ID NO: 108646 - protein, 359 aa, unidentified
MSTQSKPFSFKGQKIFVGLDVHLRSWSVTVLSEQAVLKKFTQDPSPAALNKFLTNTYPDAEYYSVYEAGFCGFWIHWELHNLGINNIVVNPADVPTMAGERLRKTDAVDSGKLARSLRSGELKGIYVPDSITTEIRSLIRLRDSLTKDQTRHKNRIKAHLRYFGIDIPEEFCRPGRTWTNRFVLWLKSLELETAYGKKTLDLLIAQYEDLRDQQLKMMKELRILSRTERFDEPLRFLMSVPGIGQLAGLTILSEVDDISRFKDAAHFASFVGLVPMCYSSGEHEGTGNITVRRHAKLRWLIVEAAWIASRKDPVLSAAYVEYCRSMKPSKAIIKIARRLVNRIYFVMKHQQPYVNCYVS

SEQ ID NO: 108647 - protein, 349 aa, unidentified
MTIVEDRPVITGGVDTHADLHVAAALDPLGGLLGVQEFPAAATGYAQLLDWLGGFGTVALVGVEGTGSYGAGLARHLAAAGVRVVEVDRADRQDRHRQGKSDPLDAVSAARAAQSGRASGAPKGRDGAVEAIRALMVAKRSARHERTQAINQARALIVTGPDELRARFAGHAPAALVEAIAALRPRPGDVPGYATRVALRELGRRAQFLDAQLERLDELVIPLVTARAPGLLSLYGVGPDTAALLLIAAGDHPERLRSESAWAHLCAVAPIPASSGKVSRHRLNRGGNREANHALWRIVITRMSSRPGHPATRAYVERRAKEGLSRKEIIRCLKRYVAREVYHQLRDGI

SEQ ID NO: 108648 - protein, 392 aa, unidentified
MVVSVGIDVSKDKHDCFIVSAEGEVLADVFTVPNNMDGFHCLLQRIRDCTAPQDKIKVGLEATGHYSYNLLGFLLDNGLTTCVLNPLRTNLYRKSLSLRKTKTDRVDARTIATMLLSDVGLKPYTSTAYHNEELKSLTRYRFDKVKERAKLKSSVSRLVCILFPELEKLVPTLHMVSVYALLEEFPSARKVAAAHLTRLKALLETASKGRYKRDMALEIRDTARNSIGSWMPAKSLELQHTIRLIRELDNEIAEIEGQIQAIMDELHSPITTIPGLGFRMAAMILAEVGDFTRFDSPDKLLAYAGMSPSTYQSGQLKNCYPHMEKRGSRYLRYALYNATKYVCHWDPAFADYLAKKRAEGKHYNVALSHAAKKLVRLVFAMERSQKPYFPTS

SEQ ID NO: 108649 - protein, 328 aa, unidentified
MEQELHFIGIDVSKAKLDVDVLRPDGRHRSKKFTNTPKGHGELLSWLRSHNVAPAHVCMEATSTYMEDAAASLSDAGFTVSIINPALGKAFAQSEGLRSKTDAVDARMLAEFCRQKRPAAWEAPHPLERALRALVLRHQSLTDMHTQELNRRETAREVQMPSIDAHLLWLEAELKRLEKQIKDLTDDDPDLKHRRKLLDSIPGIGEKTSAVLLAYAGLKDRFGQARQFAAFAGLTPRQHESGSSVNRASRMSKAGHVSLRRALYMPAMVALYKTEWGKAFRARLEKNGKGAKLIIGAMMRKLAQVAYGVLKSGRPFDATLHQENACVA

SEQ ID NO: 108650 - protein, 464 aa, unidentified
MNEDSKAASEQKGGKNEEGIAALGRRVAGVDVGSQGHWACAPVREGEGREVQVFGATTAQLEKMADWFLERKVESVALESTGVYWIPIHEVLEGRGLEVVLVDTRVLGRVPGRPKTDRRDCQWMQRLHSCGLLQGAFLSPEQICMLRTLVRDKGNLVAEQGDWVRRMQKSLEQMNVRVHRAVADLTGATGMALVRAIVKGERDPRQLAKLRDPRCHKSEEEIAEQLTGHWREDHLFSLGQALKMYEAIQERIEDYERAILEKLKAMEREECRGQEPPELKNQQKAKTILKRGQEPLRQALYRVSGADLTAIDGIGVEAVQAVTSEYGTDLSAFPKEKQFVKHVLLAPNQPTSGGKPVKKKKKAYSASSRVAAALRMAALSVRHSQTALGAYYRQIARHKGGDVAVFATARKLAVLIYRMLRWGKNYVDEGVEAYEKRYREARLRSLTSTARQLGYQLTPLTAQP

SEQ ID NO: 108651 - protein, 360 aa, unidentified
MFIERTSVGLDVHARSVVAAAIDGVTGEVVQERLVSDQQVVIGWLGRRPGPVAATYEAGPTGFGLARAITAAGFRCEVAAPSKLMRPAGDRVKTDARDAVLLARLLRLDEIVAVRVPTITQEAARDLVRAREDVRGDLMRARHRVSKLLLRHGHVYYDGNAWTGGHDAWLRRIRFDQPGTAAAFDADYEQVQLTLARRDRLDAAITAMAADSEFTALTRRLCCLRGISTLTGFALAVEIGDWHRLSGASIGSYLGLVPTERSSGDKRTQGGITKTGNTHARRLLTEAAWHHKPAYRRGKTILDRWAQAPAPVVARADAGNRRLHARWVTLDARKKKHTVACTAIARELAGWCWSLAVMDH

SEQ ID NO: 108652 - protein, 422 aa, unidentified
MKIVYPICCGIDVHKTFLVATIITSNGITPHYSKKRFSTFNNSILQFKQWLIDNNCFDVCMESTGKYWVPIYNLLEDTIRVTIANPKWVKAIKGNKDDTKDSKWIGDLFRLGLVPGSYIPQKPIRILREYTRYRSKLVSCKSSEKNRFQNAFTVCNVALDAVVSDMFGKSATYITDYLISSNTFDPEYCTSLLQKSLKKKASSVIESIEGYQITQAQKERIVMVRSHLNYINNSIDKLDQALYKMVEPYESTIELLCTIPGVDRQSAITIISEIGTDMSQFSNSKRLCCWAGLTPGNNESAGKKKSVRITRAGVYLKPALVQVAHAAVKSDKSPYYKIKYERIYKRRGKKRAIIAIARMILTAIYYMFTTGEEFNPCDLYKIDMPQEMQDKQKEKAVKEAVRFLIAQGVIKDSNISIQESNH

SEQ ID NO: 108653 - protein, 340 aa, unidentified
MDSLVEFWIGIDVSKRKLDVALLDARGKLKQRVFANDAAGCGELHQWLIGRGVTPLAGRICMEATGPYSETSATALVDAGWVVAVVNPARVKGFAQGELLRNKTDSADAALLARFCARMKPEPWQAPPPAVRELRALVDRLQVLRDMQQQERNRLEAHAANQVVSPSIREHINWLQACADKLQTQIDDHIDAHPLLAKDAELLNSIPGIGQVTTPKVLAFLGDVRRFANAKALAAFIGVTPRLKESGSSVRGRSMISRAGHAQMRKALYMPALVAARHNPAVRAFSERLRASGLAPKAVVGACMHKLAVLIYGVLRSGVPFDPRIAMPRLDLEDGIPLMP

SEQ ID NO: 108654 - protein, 412 aa, unidentified
MQTLVERGCGLDVHQATVVACLLQVMRDGRVQKQMRTFSTTTRELVSMRQWLLSEGCTHVAMESTGVYWKPVYAILEGAFQIVVANAQQVKKVPGRKTDVKDAEWIADLLCHGLLRSSFVPPKPIRELRDLTRYRRKLVESQAAERNRLLKLLESANIKLASVATDVFGVSGRLMLKALVEGKASLAEMAELAKGKLRNKIPQLELALEGKLEEHHRFLLQLQQDRLDAAGRDLATLEQRIQQKLEPYAAQIALLQEIPGVDWTLAAVIIAELGIDMSVFQSVSQLASWAGVCPGNNESAGKRKSAHIPKGNVYLKTALVEAANAAARTKGTYLRDKFYRLKARRGYKRAAVAIAHKILVSIYHMFSQQVSYNDLGDCYLDKLNKNHLTRNLVHRLERLGYSVTLTPQQIAA

SEQ ID NO: 108655 - protein, 326 aa, unidentified
MQYFLGIDVSKAKLDVALLLANDKFKSKVFANNASGFESLMQWLQLHVPQAHTSLHLCMEATGSYHEALACFLSDQTLVVSVINPLLVKRFAEANRLRNKTDGGDAKCLALFCKSTQPERWEAPSIAVRALQALVARLDTLQAMRQAECNRLEVAHRSVADSVQQVIDDLEKAIAKVKAQISSTIDDDPDLKQRAALLQSIPGLGDRTIPQLLAYVGRPERFKSVKALIAYAALTPLIRQSGTSLDKRRGTHPLGHQELKRAMYFPAMVAGRYNPVVAAFWAKLKAQNKPGKVIVVACMHKLLAIAYGVLRSGKPFDPNHLKPKGA

SEQ ID NO: 108656 - protein, 344 aa, unidentified
MEHFAGLDVSVKETSVCIVDETGKIVREVKVASEPEALLRVLKSPAYRFKRIGLEAGPLSQWLYSALAEAGLPVICVETRHMRAVLKAQINKTDRNDARGTAQMMRVGLYRPVHVKTLRSQKLRMLLTHRKLLQSKAIAVENDLRATLRNFGLKVGMVGTVKFEARIKELVENLPDLAVLVEPLLIVRRVLRQQIAILHRRLLAIVRDDEVCRRLMTVPGVGPVVALTYRATVDIPARFRKSKSVGAVFGLTCAKYQSGEVDWDGRISRCGDEMMRTMLYEAAQSMMRSKKWSWLKAWAMQIARRCGMKKAIVALARRLAVIMHRIWIDGTEFRWTREQPTATA

SEQ ID NO: 108657 - protein, 419 aa, unidentified
MSGGDNEKERIRIYQKRNTCFIGIDMHKDTHCAVVIDCWMNKFGEVSFENRPSKFPAFVEDVRRICGTKEFVFGLEDTRGFGRNLAAYLVGRRFEVKHVNPAYTSAVRLANPIIHKDDSYDAYCVARVLRDMADTLQDARHEDIFWTIRQIVKRRDLIVKSNVMNKNQLHSQLSYSYPSYRKFFALIDAKSAMCFWENYPSTEHVNATTPEKIYETIKPVHQALKMQRIREILAMIEKDGDTRKDYQPERDFIVRNIVKEIRHNKELIAEIDDELRKLLPLTGYKLHTMPGIDLATEAQLISEIGDINRFPDSDKLARFLGLAPVQFSSAGKGKDQRCRNGNRALNAIFHFMAIQMVAISPSGKPRHPVFREYFEQKVKEGKNKPQALVCVARRLVRIIYGMMKTKTEYRPFEKVDGKN

SEQ ID NO: 108658 - protein, 408 aa, unidentified
MSTPDEVEIWIGLDVGKEDHFADVLDDDGESLFARSVANNEADLVAVIERASKHGTPGLVIDQPGSIAQLAIAVANRHEVPVAYVPGLVMRRAADLYPGEAKTDRRDAFVIADTARTRRRSVHWLDAGSDELLDQLRVLNGFDVDLAADLTRLTNRLRDSLVSVSPALERAVGSRLHQAGVRDLLARFPTPTALRAAGRARINTAVKKRSPRVAAKVVDAVVAALDAQTVTMPAEAAVGRVIAELAVELDRIHTRRDALAAEIEEVFLAHPFGQVLVTLPGIGPRTGARILAEIGDGTRFANGSKLASYAGLAPVTRQSGTSIRGESQSRRGNHRLKNAMFLAAFASLRSTESKAFYDRKRAEGKKHNAAVICLARRRCDVILAMLRNLEPYRAPATPANDDTTSIAA

SEQ ID NO: 108659 - protein, 338 aa, unidentified
MAILYVGIDLAKTVFALHGVDEHGKPAFVRPSVARAKLLETVAALRPCTIGMEACSGAHHWAREFARFGHVVRLMAPKFVAPYRMSGKRGKTDAADAAAICEALQRPNMRFVPVKSEAQQARLCVHRMRQGFVEQRTATINRLRGLLSEFGIVLPQKAQTVRRQAAAHLEDLPGWADTAVGDALSEIHRLDERLAEYDRHVAHMAAEDESSRRLMKLSGIGPTTASALVATVGHARDFKNGRQLAAWLGLVPGQYSSGGKTRLGSITKAGDGYLRSLLILGARAVLVSAASKDDRLSRWAVALAARRGYWKAVVAIAAKNARLAWAVLVKGEEFKAMA

SEQ ID NO: 108660 - protein, 360 aa, unidentified
MAVKKNNIMKTQTTALIPKIYIGIDVHKKSWTFHYQTDLFDGKTITQPANPNTLVDWVQKNYPTHEVTCAYEAGFSGYSAARLFQKQNWNVLVLNAADIPRPQKQNVVKTDKIDCRNICKQLKNEALKSITIPEEQRESFRSLFRERNNFVMGLRHIKLQIKSYLMYCGITIPEEFDNASWSKNFMEWIRQQNQTYETGTLKINYLLKRYDFMYQETLSISNQLRAYARKHYKKDYDLLRSVPGIGGITASAILAELGDLRKYNRFDDLASIVGFVPGIYSSGDTTIVKGITPRAKKLLRSYIIEASWQAVRFDPVLQEYYRSHYGKQPNKIIVKVARKLLSRIHAVIKTETPYQIGVIK

SEQ ID NO: 108661 - protein, 402 aa, unidentified
MNAVGIDVSKGKSMVAIMRPFGEIVSTPFEIKHTSSDINSLVKLIKSIEGESRIVMEHTGRYYEVLAHQLSEANLFVSAINPKLIKDFDNDSLRKVKTDKADSVKIARYALDKWQNLKQYSVMDELRNQLKTMNRQFGFYMKHKTAMKNNLIGILDQTYPGVNTYFDSPARSDGSQKWVDFASTYWHVDCVRKMSINAFIDHYENWCKRKKYNFSKSKAEEIYGKAKELVPVLPKDDITKLIIKQAVDQLNSASITVESLRTLMNETASKLPEYPVVMAMKGVGTSLGPQLMAEIGDVSRFTHKGAITAFAGVDPGVNESGSYEQKSVPTSKRGSSDLRKTLFQVMDVLNKTHPQDDPVYQFLDKKRAQKKPYYVYMTAGANKFLRIYYGRVKEYLASLPES

SEQ ID NO: 108662 - protein, 318 aa, unidentified
MYYIGLDVHKRTISYCVKDAAGHVHQEGKIGSTRRELDAWIKTLPQPRTIAMEATIFTGWIYDHLLPHAEKVRVAHPLMLRAIAAAKKKNDRIDAGKIADCLRCDFLPECYMTSTAIRDRRRTLRYRNLVLKQMVQMKNRISGLLMETGVSYNKQRLHKLGYFTELMSGNEEVDESIRPLLKLSRETIVRSQRLDYALVSSLERDPLLAERLKRLRTIPGVGPITALTWALEIGDVSRFQSVKQAISYCGLCSAERSSADKLVRMPISKQRNKHIQQTLVEAAKLAPRYSHELALVYERERQRAGTTSREALLRNDGF

SEQ ID NO: 108663 - protein, 348 aa, unidentified
MERYIGLDAHATSCTFAVLSERGRRLDSAVVETNGRALVKFLRSVPGDKHLCLEEGTQSAWLYEVLQGHVRELVVTHAYERKRGPKDDQRDAFHLAESLRLGAVSPVYKDRGQLSELRAHADVYAKLVTDLVRAQNRLKALFRSRGVQVVGGAVYTQRDRQAYLDELARPYRGSALILYSELDALRAIKKEAEKQLIAQSHQHCISAVLQTCPGMGPIRVAETIPIIVSPYRFRTARQLWAYSGLAIVMRSSSDWVKTPHGWERAERLRTRGLNRNYNRRLKNIFKGAATTVITQRLEPMVGDYQRCLEQGTKPPMAKLTLARRISATVLAMWKNKEAYHPERYRPTP

SEQ ID NO: 108664 - protein, 406 aa, unidentified
MDGPIITVDVSKGNCHYQPWLTAGHSLRKPKVLNDTKDGFEALSETIEMVKEKSEADTVPVVFEATGVYHRCLQKYLDDIGNPYIVVPPLLSAAYRKTNLHGNKTDNADCAHIAKVYYQEEHLHCHQNESDTYARLRAKNRMYESELKILRQRKCTFRAMLDVIYPRMDKCFKGHASLYDSVPMEVLKKYPHPSLLLRHREETIVNAIQKPAGHKKGFTENIVHKMYQCAEECYSGVDADSVEVQQFPQMINELMEQMELCNTYLEELIEDASKFPSFVILLSIPGIGRNIAARIIAEIGDVTRFRNARGIVAYAGLNPKINQSGEKDGTHLAISKKGNRHLRCLLYLAATCNYRLKKGDSIYQFNQKKRQQAASPLKPKAANIAAADKLLVVIYSLMKNGSTFRS

SEQ ID NO: 108665 - protein, 323 aa, unidentified
MVKVKQFTGIDISKLTFDTGTPGNEQGKYTHKKFSNEINGFQAFEKLIPTGCTCVMEASGSYYLPLATYLYERGIEVMVVNPLAVKYFSRMRMTRAKTDKKDAALIAEYAKQENPKLWKPKADHLLELQQLQTALDGFIGRKTELSNQQESFVASGIKAKTALNIIKKEIDHMAGCIKKIETLMKEIIEKHHKALFIRLKSIPGIGKRTAMMLILISDGFTKFDTAKEVVAYIGLCPRIYDSGTSVKGKARICKMGMSQMRALLYMCSMQAKKYNSGCMIMFARLKAKGKNGKLILIAIANKLVRQAFAIAKGEVNYDKNLVV

SEQ ID NO: 108666 - protein, 352 aa, unidentified
MQHFIGCDVHTRNQVVAWIEEETGEIKKRRLEHEGKEVKEFYAEFPRGTVVGIEATFPAYWFERLMGELGHELWVGDAARIRASDVRYQKTDSRDAELLLDLLRTGRFPRIWIPSLGERDLRQLLVHRMKQVRARTQVKNQLHALAISQGVCRKGKLWSVKGRKELESLALLPWAARRRKELLESLDRLDEQVRELDRAVEEAGRAREEVALLRTHPGVGMVVSLAFVLTVGPIERFSNSRKLVSYWGLNPRENSSGGRQRLGSISKQGNTMMRWRLVEAAQTAARLDPQLRRIYQRLKKQKTSAVAKVAVARRLAVRLFWMLRTRHNYTQLVHMSGSPSSAVVPPKAEPTV

SEQ ID NO: 108667 - protein, 362 aa, unidentified
MLIIGCDYHPSGQQVFGIDRESGEVFADRWIAHTGNELEEFYSGLPAGAVVGVECSGNMLWFERRLAHYGHRLRLGDAAQIRSKETRKQKHDRRDAELIARLLLEDNFPDLKWVPTLAERDQRQLLMHRHKLVRMRAQVKNQLQHIALNQGQQKKRQLWTKAGRELLESLRLEPWTARRRDDLLRWLDLLNRDCESLEREVEQAAEARAEARLLMTHPGIGPVISLAFVLTIGSIERFQRSRELVSYLGLNPSEDSSGERRRLGGISKQGSSFMRLLLIQGAQTAVRGDEDLRRQYRRLASKKHRAVAKVMVARKLAVRMFWMLKTHKTHAELVRTRGSSSHPGVGKTDCLSERPASPRIQP

SEQ ID NO: 108668 - protein, 371 aa, unidentified
MKKFSKFVGMDVHKATIAVSVADANGGEVRYVGEIANTPEAIEKLVRQLRKGDAHLSFCYEAGPCGYGIHRQLSDLGWDCQVVAPSLIPRKAGERVKTDRRDSLMLARLHRAGELTAVWVPDDAQEGLRDLTRAREDMKHLQRQAKQRLCAFLLRYGKCYSGKSNWTQAHYRWLEAQKFGQSVQQIVFQEYVDTVKALSKRVDGLDTQLESAASESVFWPVIEGLMALRGVNLLTATTVVAEIGDLKRFASAPQLMAYLGLVPSEHSSGATKSRGAITKTGNAHVRRVLVEASWTYRHPARKTAHLQRRAERTSEAVQDIAWKAQKRLCARYRLMEGKGKLKVQACTAVARELTGFIWAIGQELPQPVPNR

SEQ ID NO: 108669 - protein, 326 aa, unidentified
MEHELHYIGIDTAKEKLDVDVLRPDGRHRTKKFANTTKGHDELVSWLKGHKIDHAHICIEATGTYMEPVAECLYDAGYIVSVINPALGKAFAQSEGLRNKTDTVDARMLAEFCRQKRPAAWEAPHPLERALRALVVRHQALTDMHTQELNRTETAREVQRPSIDAHLLWLEAELKRLEKQIKDLTDDDPDMKHRRKLLESIPGIGEKTSAVLLAYVGLKDRFAHARQFAAFAGLTPRRYESGSSVRGASRMSKAGHVSLRRALYMPAMVATSKTEWGRAFRDRLAANGKKGKVILGAMMRKLAQVAYGVLKSGVPFDASRHNPVAA

SEQ ID NO: 108670 - protein, 394 aa, unidentified
MLISQSIETPVTEEPSVTLYVAFELGKWTWLVGFFAPELGKGISRHKIAGGDLPKVMDLLATARARLEQPGRSVRVVSIYEAGYEGAWLHRALLAAGVESRVIDAASMAVDRRARRVKTDRLDLERLIRELLALERGERSGVCRVVRVPSAEEEDAKEQHRQRDFLVRQRTALVNRMTGLLMARGVRGLSPRRPDFLRNMETAVSGDGRPLLSGLRRALTLDYQRLQLIEQQIATIEAEQAKELKAAHGTEPRSAAEASAINAARLAELRGIGPIGGLLLSREVFYRDFDNRRQLASYFGLTPSPYYSGGSRTDQGISRSGNSRARAIAVELAWLWLRHQPASALSDWFRDYVGNHQGRVRRIAIIALARKLMIALWRYLTTGLVPEGAVAKAA

SEQ ID NO: 108671 - protein, 373 aa, unidentified
MNQNVIYIGIDVDDVQYHGSALDKCTGEVLDFRCRPTLKGLIGQLKKVREYFGDGKLALCYEASYVGFSLQRDLNDRGYDCEVVAPSSIPRRGGKAVKTDRIDAMELAQFYANGLLTIVTAPAVEIERDRDLLRSRQRLVQQQGSLRRHILSLLRRNGYHYKAESERKTHWQKHHYGWLDRTTDGCSGSLKMNLSLLLRQLESLDEILLAYGEEVEALAATPRYRESVEALVCYKGIKNLFALTMITEIGDVKRFAHPRQLVSWMGMDIREYASGGKSNRLGITRQGNRYLRTAFIEANQRGYRTARLSKAILTRRANSKPEYIAVADRCLRRLAKKGNHLLLAGKHPNKVKVACAREMVGFVWESLNQAAVA

SEQ ID NO: 108672 - protein, 420 aa, unidentified
MTVDLERGYKRRELCGPKQYLNLLLRSVLMIYVGIDVAKDKHDCFITDSDGEILFSVFTIQNNRDGFDDLFAKILSISSDFSNIKVGLEATGHYSYNLLGYLLDKGLHTFVINPLHTNLYRKSLSLRKTKTDKVDARTIAMMLMSDVNLKSYSDISYHNEELKSLTRYRFDKVQERARLKQSVSRLVTILFPELEKLVPTLHIASVYALLSELPSTGKIASCHLTHLTKLLENASKGRYSKEKAIEIREAARVSIGSNMPAKSLELKHTLHLISELDSEISEIESEIKQIMDQISSPILTIPGIGYRMGAMILAEIGDFSRFDSPDKILAYAGASPSTYQSGQLESSYSHMEKRGSRYLRFALINAAKYVCHWDETFGAYLQKKISEGKHYNVAITHATKKLVRLIYAMEKSGKPYIKTA

SEQ ID NO: 108673 - protein, 381 aa, unidentified
MKQDNKAKQNRGNEVSVEAPQDTGDLGRRRWKVPRVGLTVGLVVGDKISHYCVLQEEAEGVERGKLKTTPAALQPWLEALPAGTRVVLETGTHSSWISRLIEQAGQEALVAQPRKMPQMYAGKRKNDRRDAEKLARTGRLDPNSMGPIRHRRAEQQADLVVIQARDALVQVRTQLINTVRGLVKGTGERLRGCSAPSFARQVEAQIPQRWRGALLPLVSQIRSWSEQSERYDAEVEKLAQKKYPETELRRQVSGVGPVPWLAFVLTVGDRWRFRHSRDVGPFLGLVPAQDESGESSPQWGISKAGHTYLRRLLVGSAHYILGPFGPDCEWRRWGMKRSERGDKNARKRAKVAVARRLAVLLHKLWVSGEVYEPLPEKRAAA

SEQ ID NO: 108674 - protein, 344 aa, unidentified
MDHFAGLDVSVNETSVCIVDDTGRILREVKVASEPDALLPVLTNPTYHFKRIGLEAGPLSQWLFSALAEAELPVVCVETRHMQAVLKAQINKTDRNDARGIAQMMRVGLYRPVHVKTLRSQKLRTLLTHRKLLQSKAIAIENDLRATLRNFGLKVGMVGKVRFEERIKELVKSLPDLAVLIEPLLVVRRVLREQIVILHRRLLAIVREDEVCRRLMTTPGVGPVVALTYRATVDVPARFRKSKAVGAVFGLTCSKYQSGEIDRSGRISRCGDEMMRVMLYEAAQSMLRSKKWSWLKAWAMQIARRRGMKKAIVALARRLAVILHRIWVDGTEFRWTREQATAAA

SEQ ID NO: 108675 - protein, 386 aa, unidentified
MQRPNDLSQSRIVLKQDSTLIAVIEMSLSSWLVAGVVPGVQRQPLKKLAVDESALLKLLHRWREEAEKAGHKIERIAVAFEAGRDGFWLARWLRTRGIEAHVIHASSVAISREHRRAKTDRLDTELLKRAFLGWLRGERDHCKMVAIPTMEDEDAKRPNRERESLVGEQTRIVNRMKAALSRLGIRGFNPKMKKAAERLEHLRTPEDEPIPPNTLAELRRDMERRRVVSEQIRQIENARLERIEHAPGHGPHAMVRLLARVIGVGIETADMLVQEVLSRNMRDRRAVARYAGLTGSPDESGTRRREKGLARSGNARVRRGMIQLAWRFLMFQKDCALAQWFRARTENARGTRKTMIVALARKLLIALWRLVHEGIVPDGVVLRPAQ

SEQ ID NO: 108676 - protein, 401 aa, unidentified
MKEFNAKEVRIETASALETVKPARADRKYPAYIGLDVHKETIAVAVAQAGREAPESRGEIANKPKTVAKLVERLNREFGGEVLLFCYEAGPCGYGLYRQLLELGHDCQVVAPSLIPKKPGERIKTDRRDACKLARTLRNGDLTAVWVPDEEQEAMRDLTRARDDMKGQERKARQQLNAYVLRHGHAWPSNKTRWTQTHYNWLESLKFPHDWQQVVLQEYIDAVKATSQRVADITAQMERVLPQWSLSPVVDSLVALRGIDKLAAMVLLAELGDISRFDSPKQLMAFLGLVPSEHTSGGRRRQGAITKTGNRHARRMLVESAWSYRFPARQTAHLKRKAANASDEAKVIAWRAQKRLCGRYRTLLQAGKNTKQTTVAIARELVGFIWDIACHEMPKVQQAVR

SEQ ID NO: 108677 - protein, 355 aa, unidentified
MSKITRVGVDLAKTVIQVHAVDAAGRVLVRRALKRDMFIDWCVQLPAGCLIAMEACSGAHHWCRKLQALGFDARMIPAQFVAPYRLQGSSGKNDANDAAAVCEAASRAHMHFVRPKTIEQQGMLCVHRLREGLKEERHACINRIRGLLAEFGIVLPQSPEVLRRHLRDLMEDASNELASMARLVLQRAQQHWQELDEHLQWCDERIAAHKAADPQVQRAAQLLGVGPVTASALIASVGDFKQFKNGAQLGAWLGLTPKQNSSGGKARLGGITKRGDTYLRTLLIQGAKAVVLTGKGCTDNPIGQWAQRLRERVGWQKAIVALANKNARILWAVLTREAPFDAHHISVKPTAVAPL

SEQ ID NO: 108678 - protein, 460 aa, unidentified
MSQRRKCKKKKAPIQQLPVINPHVAGIDLGATIHYVCGPATEGDTANIRDFGTTTPELLKIADWLKGQQVTSVAMESTGVYWIPLFEVLDQAGFDVHLVNARQLHNVPGRKTDCQDCQWIQLLHSCGLLRKSFRPADEICRIRELTRAASELVQLRSQAVLHMQKALDQMNVLVHRALSDITGTTGQAIIRAIVGGERDPEVLAKLRDPRCKKSVDQIAEYLTGNWRDEHLFNLRQALARFDMFDRQIEDYASELRSKLESMVPEDRDDEAPPPHPKPNKLKAIVRAGDDALRDVLYRFSGIDLTVIDGISVKAGQTILSEVGPDISAFPDENHFVSWLRLCPNKPITGGRVKNGKSRNGHGSNRIATALRMGALTLNRADCALGAEFRRIARRHDRRVAIMAVARHMAKLVYRMLRYGQAYVDIGAEAYESQRAQMQKDRIQRQATRLGYELVPIPTEP

SEQ ID NO: 108679 - protein, 379 aa, unidentified
MEYCTTIGADVSDRTTKICIMTKADGGERRIVLETTCATTKADFEEAFAKFDRSWPVVFETGTHCRWMDRLFRKMGFKTIVGNPGKIPSITKSNTKNDRNDARELARLAIADPAMLHPVFLRDEVYQQMLRYHHARNVLISQRTQITNQIRGFAKSMGHRIKCSAEKFHEQSKADWPDELEECAWPLMGVLKTIALKIKAYDKLIERLAERPEFKTMVERVRVVYGVGIIGSTVFIAAIGGRPDRFDRTRDIGPYFGMIPKQDQSGDDDKQLHITHAGSEIVRTTLVECAGVVMTEKSKDTDLKLKGLRIAMHGGRIARKKAKVAVARGLAVTMLALLQHPEREYVPLSEEGKKGFERYRAEMEYLTMQKASRKEKKAA

SEQ ID NO: 108680 - protein, 337 aa, unidentified
MRSIGVDLHSNSLTVCYLSEDGTEQFRTFPLRELAGFQESLCAQDQVAVEATGNTRWFVNQVKSLVSRLVVVNPNQFAVIRQSVKKTDKHDARALALFLQKGLLPEARLKSEACAALNSLCQTRQKLVELRTTLINKLHAIHRSHGIESKKSEFGSEKGLEQALARDWSVVERVEIEVIASQIRSLNENLKKVDKQLSESGADLEGHQSLISIKGIGAKSAAILLSVIGDVKDFENEEKLSSYFGIVPRVSDSNQTQHHGRITKRGSKLGRTTLVQCTLVAIRYSDYLKSYYTKKKSEKGAGKAIIATARKFLGIIYRTLKNKWVFADFPNFVLAEG

SEQ ID NO: 108681 - protein, 345 aa, unidentified
MKTFFIGIDVSKEKLDATLIHYESKSDIEQQLAYTTVENNPKGFRSLVSWSKKNAGRGVKTDTMLFCCETTGGYDRALCDWLYGNGLDIWRESALQIKRSMGLRKGKDDKADSEMIAHYALRFRSQASLYKPMDGNMRSLRDLFLYRQSLVAERQAKMISSKEKQHISSKSKVDNFIYRDAQKAINLLTKSIKECERRMLEIIKADEEMYSNYLHLISCKGVGLVTSVMLIVYTDNFKGWNAKKMASYCGIAPFYESSGSSVFHKANTSGYSNRRLKGILTQAARSAITHNPTLRQYYLRMKAQGKPYGVILNNVNNKLVHILFSLVLNDCDFELDHEAKRALRA

SEQ ID NO: 108682 - protein, 493 aa, unidentified
MKTALSSSATQRRARNVKKLQRQSGRSVPVPPKSLEELAPVHRRAAGIDVGSAENYVAIPAEGLAAGETAVRVFGVFSAQQDALVEWLQQHQITTVAMEATGIYWLSLYDKLEQARIEVYLVDPHGVKAVPGRKSDWLDCQWLQKLHTYGLLAKAFRPDLPVRRLRTLTRQRAELVCCGVVHQQHMGKSLVAMNLHLGLVVSDVVGETALRIIRAILQGERDPKELVKLRDQRCRKSTVAEMEAALSGSYDEEQLFILRQSLESWEFYQEQMAECDQRIEKALAAMPKAPPAALAPPLRPIPADVQATGTKRRKAAQKGNNAPTLDFTQALIRICGVDLMKVCGLNLLSVLMLIGEIGVDMSRWRSARAFCSWLGLCPGTKISGGKVLSRRTRKVNNRAATILRLAAWAAGRTDTWIGRFYRRVKARRGSPKAVTATARKLACVIYHLLKYQEEFVLLDTKVYEAKAKTQRLSRLKKEAQVMGYELVELQEVA

SEQ ID NO: 108683 - protein, 433 aa, unidentified
MLKLNYMSTLFVGIDVSSKTNAVYAMDFEENKYISSSFGNNQPGADKLVNMIAECMHKHKNLNTILIVLESTSVYSVHISNFLSTSEVLMPYKPYVFCVNPKATSNYRKSYIGMEKTDPTDAYLIADFGRVGRTKKLEPWRGGQFIALKRLTRHRMHLSECITREKTYMVSNLYLKFSELQLLEGDDKPFGSLYGATSSAVLTEFLSPQEIIDMPEEELLTFLAGKSRNRISDLSKTSELLRKAARDSYRLDKCMYEPLNVSLASSFNCIHAYQKEIKLIEQAIEKCINGMNPNALIILQSIPGIGPIWASGILSEIGDITVFHSSDALAKYAGLYWPKGDSGDFTSEDNKMSKAGNPYLRYYLGEAANSVRKHIPEYADFYARKYAEVTKHQHKRALALTSRKFVRLVFGLLVKNQLYTGEKLDTEYNIESN

SEQ ID NO: 108684 - protein, 349 aa, unidentified
MKKLSKMTKPMQETIGIDLGDKVSRYCIVDHSGEVVEEGSFRNQASSIDKHFAGKPRRISLEAGAQSAWISRELKKLGHEVIVANPRQLKWITASDTKNDPVDARKLALLARADVRLLAPVEHRSAEQQAELAVIRARDAILRARTLLINSARGIAKGFGVRLPKSITGTFGERAVETLPEFLRWALAGLLEQIDAISLKIASYDQQIAELAGKHPELERLESIPGVGRLTAMTFVLTLGRAERFAHSRDVAGFLGLRPKQRQSGARDPQLGISKSGDPYMRKLLVQCAHHILGHYGKDSALRQWGLAKGEGGKKATLRAIVAVARKLSVLLHRLWVSGEFYKPFPKMA

SEQ ID NO: 108685 - protein, 428 aa, unidentified
MSKENCTRLEEFRQLRQEIRGSEEYLIVGIDVAKQRHTAFFGTATGRTLLKRLVFQNSREGFERLLVQAEAIGVRHGLGKVVFGLEPTGNYHKPLGEYLIKCGHGVVLVSGKSVKRNRELLDGRWDKHDVKDCANVADLISQGKCLYYEYPEMRLRELRSLLSFKRRLKRQEQGLKARIRNHLIAQYFPEFDRYFSRCESESLAIVRWCLAPSVIAGLGYEEFVRLVAPRKTTLGQQHRLRAVWQEASDSIGCDLSEGVRFEAKVMVEGLKQIRQSLGETEAQIKEVCVGFPEYSYLLTIPGFGPDISSKVLGAIGDPFRFKVGDQVLKIAGLDLCADRSGKRSDGVVPVISKSGKADLRYALYQAALIASTRNREFVVWLTNKLRDRQKEKGIQTKMRVKLSAKLLIIAWTLMKNKEPFNPNYLNLQ

SEQ ID NO: 108686 - protein, 426 aa, unidentified
MNEKTDFAATIGLDWADQKHDLWIQPAEGSKAEHLRLDQTPEALHEWVAKLRERFGNRPVAIGIETSRGPVISAFLAYDFIVLFPVNPKALKDYRAAFSVSGAKNDRTDSMLLEEFIRLHRHQLIAIKPDTELTRKLAGLVQNRRRLVDERTRIVNQLHSTLKTYYPLSETLLGGQLNSPMAAEFLARWPDLETLQKAQVKTLRSFFYQHNSRSAQLVEERLQAVAKAKALTLDEAIIAPARLLVSAWAAMLKPLHKAVARLDKEIEQAMDQHPDAAIFRSLPGAGPALAPRLLVAFGTQRDRFDSAAEVAQFYGLAPVVKQSGNSKTTHMRQRCPKFGRQTFHENAGCALKKEPWARCYYDQHKQRHDKKHHQACRALAYRLIRIYFACWKHRKPYDPDRYILALQKQHSPLHKKLESQISTACE

SEQ ID NO: 108687 - protein, 343 aa, unidentified
MGEVSTIGLDIAKSVFQIHGVDADGAVVIRKRISRAKLFEFFAAVPACLVGIEACPTAHYWSRRLQGLGHTVRLLPPSYVKAYLKRSKNDANDAAAICEAVTRPSMRFVATKSEQQQSGLMLHRSRQLLVCQRTMLSNAIRGHMAELGIISAKGRNGTAELLKIIANEDDDRIPAAARFSLGILARQYAAIREEILAIEKRIHAWHRSSEESRRLEEIPGVGPIVATALVAEVGDWKVFSSGRSLAAWIGLVPRQHSTGGKERLGRISKQGNRHLRWLLVAGAMAVIRYARQHGTKRLWLARLMDRRPIKVAAVALANKIARMAWAMMVRGERFKEPRLLPAT

SEQ ID NO: 108688 - protein, 360 aa, unidentified
MNSLPATVGDFYRYVVGVDTHAATHSYAIIEAPNGGLIDQNVFPTSPAGLRRAREWIARRTEGDLDGVLIAVEGTGSYGAVLSDVLQQVGYRVVEAPTPRRARARSKTDALDALLAARSSLVMPLTTLRDRRTGDLQSALQVLTGARDQQNADRLRCINALTALVRTHDLGIDARRALTGMQIATIASWRRREETLGTATARAEATRLAKQITTLERDLAENRERITHLVETTAPELLDLPGVGAVTAAVILTVWSHPGRIRNEAAFAMIAGVCPIPASSGNTTRHRLNRGGDRRLNRALNTIVLTRMRTDPATRTYIERRQSEGKTSREIRRCLKRYISRQIFRSLTVTHPVPDAAAAA

SEQ ID NO: 108689 - protein, 323 aa, unidentified
MEQKLPTTPEAMKETFSRIPRCRIALETGTHSPWVSRLLTPLGHEVIVAHAQRVQLITKSSWKDDRHDAQTLARLARVDPELLGPVRHRSVQAQIHLTVIRARAELVSARTALVNAARGLVKSYGERLPQCGTYQVSGKLAEGLSAELREVLVPLLREIESLNERIKEYDERMEEIAKEVYPQVSLLKQVKGVGTQIALTYVLTIEDPYRFPKSREVGCFLGLRPGRRNSGKSAPQKHIRKEGDRYLRTMMVQGAHYILGPFGEDSDLPRWGLQLAERGGKNARKRAVVAVARKLAILLHRLWVSGEVYEPLRNSQKAMRAVA

SEQ ID NO: 108690 - protein, 384 aa, unidentified
MDQTTSTLSASTLHCALELSKNSWLLAIQFRDREQPSLYPIEGGNTDKLMAKLAAARDCWAKVNGALPAITLCYEVGHDAFWLARFLKARGIECLVIDPGSLQVNRRARRVKTDRVDVKMLLRTLIAWCRGERHVWSLVRIPSVDEEDLRRSHRERSRLVRERTAHINRIKGLLFAQGVRGINIKSQYKTLAVDQLVTGDGHRLPPRLVCEVAREIQRLAMVQEQIAKIERERDTAPTHCEATERKRRLLLRLKSIGPAISALLSREVYYRQFANRRQVGSFLGLTPSPYSSGEEERCQGISRAGSGHVRAIMIEAAWLWIRHQPKSALTRWFLERTAGQSTRMRKTMIVAVARKLAIALWRYVEHGLVPQGAILNPPTTGNTR

SEQ ID NO: 108691 - protein, 424 aa, unidentified
MNCNQNFKISQVTEGTLVLGIDVGSNTHYARAFDWSGLELSKVFKFKNSFEGFQSFVLWVNDLCCKYNKSKVIAGLEPTGHYWFSLGELLKENNITIAIVNPYHVKQSKELDDNLQTKNDSKDPKIIAKLVIDSRYSFPYIPEGIYGELRVADKLKNDITQQIISIKNKIHRWLSIYFSEYEKIYSSIDSKSGFLLLKETPLPKDIVELGSEGIVERWKQTKLGAVGLDKAKKLEEAAKKSIGCKNITSSARFEIKLLIEDYEYKQNQLNSITEELNKLCEKIPMIKEIAEIKGIGIATAISFVAEVGDIRRFKSAKQVQKYAGLALKENSSGKHKGLTRISKRGRKKLRTILFRATIPLIGFNKEFSSIYNYYIERKDNPLKKKQALTAICCKMIRIFFTILSKGIKYDETKMLHDIKRPVAA

SEQ ID NO: 108692 - protein, 385 aa, unidentified
MGSQTFIPRDYDVFAGLDVDKRSISVTFTDHQGLLKSLHMPYSVEHLVNHVRKHFPNQKVAFAYEAGPTGYGLYDGLVAKDYRCLIASPSMIPKAPGQRVKTNRLDSQGLSRSLRGGQLKGIHVPTPLYRDLRHLTQLRDTFVSEMVGMKQRIKSLLLMEGIEFPPAPAGSQWSFMVKNKLRKLPCSSTVRFKLDQWLDSLEFNEKQVLKTTREIRRFCQNDPELSQCIKYVMSVSGIGWIVASQLLARIGDWRELTNIRHLGGFLGLVPTEHSTGERTDRGSITRTGDERLRSKLIQASWSAIRKDAELREFFRSICHRHPHRQGPRVAIVAVARKLSVRISVVLMKQRPYVVREKVHSAPLTQEETSPQGTTRRQAEPGEKDS

SEQ ID NO: 108693 - protein, 384 aa, unidentified
MLRGWGEGVKGKGDDRPQGSGSAGSEIAREREPSSSTKRVRARTVAGAAQVRARIKQEGARLAERRQGAMAEKLYVGIDVAKRSLEVALGAGGEVLSESNDVQGCARVRRRLSGLKPELVVLEASGGYERGLVGELGAAGLPVVVVNPRQTREFARALGRLEKTDKVDALMLAEFAQRIEPEVRQLPDEQTSALAALMARRRQLLEMLVAEQNRLGQAPQLLHHELRSHIDFLRKQLHHLDQELDQLLRNSPLWREQDDLLRGVPGIGPVTCATLLADLPELGRLSRREIAKLAGLAPLSRDSGSFRGQRKIWGGRSKVRPTLYMATLSAVRYNPVLKAFHERLRAAGKPPKLALVACMRKLLTILNAILKHRAPWKAPCPIPA

SEQ ID NO: 108694 - protein, 349 aa, unidentified
MRFYQQQHRFYCGIDLHARSMYLCILDQEGTIRLHQNFAADAKAFRQAIAPYRDGLVVAAECMFAWYWLADLCRAEGIPFVLGHALYMKAIHGGKTKNDKIDAFKIATLLRGGTLAQAYVYPKGMRETRDLLRRRCFLVRQRGLLVAHIQNEASQYNLPAFAKSLTCAANREELQVADHFADPSVKLSVQTDLALIDVYDQRIDELERHLQRHAQIDNGDTYRRLRTIPGVGKILALVFLYEIHDSRRFADVGQFLSYARLVRGSHESAGKKKAAPGKKIGNVHLKWAFGEAACLLARYSERGQVWLKRKQKKHGKAKAWAILAAKLGRTVYHLWHQDADFDEARFFAS

SEQ ID NO: 108695 - protein, 419 aa, unidentified
MRRRCFGLDVHREFAQVAVWEDGLVRQEGQIATTPEALRVFADSLGPGDEVALEATGNTFAIAALLAQTAGRVVVSNPRKTRAIAEAKVKTDKVDAAILAQLLAADFLPPVWMPDEATNVLRRQVARRTLLVRQRTRLKNQIHAILHRNLVPRCPASDMFGRKGRQWLAEQPLPPDEQAALTALLRQLDFHGEELAAVETDLARIALTSPEVARLMTVPGIDAMIALSLLAAIGDFGRFQTGEKMVAYLGLHPKVKQSGGAPASHGRITKQGRAQARGMMVEAAWSAAQVPGPLRAFYQRVARRRGMQIAVVALARKMTVLCWHLVVHEQDYAFAKPSLVAKKQRALELKAGLPPRRGRKGAAAAYSLKQVRAAEAHAALQAEAAYRVLTDRWQPARPERRASAPAEHGGVLAGVQATA

SEQ ID NO: 108696 - protein, 315 aa, unidentified
MAMRSPVFVGIDVSKDVLDVAVLGQRQVRQYANTRKGVGELGKVIRRVRPELIVVEATGGYERVVVKGLYAAGLPVARVSANRVRQYARARGLLAKTDRLDAQNLAEYGKAVRPRRFEAKSDLGERLSALLVRRRQLGEMLKAEKNRMRTVFPELGSSIERVIECLVEELRLLDQEIRTLLESDLEWQRREKLLESAQSVGVVTAATLLAELPELGKLDRKQIAALVGLAPLNRDSGKKRGYRKTGKGRLPVRNVLYMATLTGIRYNPVIKTYYQHLLSQGKEKKVALVACMRKLLTILNAMMRDQQPFRYATTT

SEQ ID NO: 108697 - protein, 349 aa, unidentified
MRNVTIGMDLGDKKHVITILDEDGVISKSCSLNNTRASIIKYFKKYQGSTVAIEAGTHSPWISREIKAVGCNVLVGNPRKLRAIWNSDDKADVHDSEMLARIARFDPKLLYPIAHRSKQAQTDLELLKARDMLVKTRTNLINHVRGAVKSFGERFPKCSTASFHKQCRDFLPENLKAVLQVILEMIEHITDRINKLNKRIEEINRENYPETELLKAIGGVGPLTALAYVLVLEEPERFGKGRQVGKFLGLTPRRDQSGETDKQLRITKAGNRFLRRLLVGAAQYILGPFGPDCHLRRFGLRLMERGNKSAKKRAVVAVARKLAVLMHRLWRNGEVYDPLYKSTMIKKAI

SEQ ID NO: 108698 - protein, 416 aa, unidentified
MTQPILPTVERHLAVDLHKHYLVIGGVDARQEVVLSPRRVDLDDWPTWAKANLKPNDGLVVEATTNTWWFYDQTYQSVGQLLVADPRKIAWIAQTKVKTDAHDVMKLARLSAAGLIPLVWVPPLAVRELRALLAHRRRLVRTQTVLKNRLHSLLHRLQIAPPEGDPFCAKHRAWWAALQVSPTERLHVRHDLATLDQVVGQLGEIDDELRRLSCSEPWSDVIPYLMHLPGVGLVVAMTILAAIGDITRFPTAKKLVGYSGLAVSVHDSGQTHRTGHITKEGRKEFRYVLVEAAWHAVETNDFWTAEFERLCRRMEKNKAIVAIARQLLVVIWHVLTERAADHHADPDMVAFKLMTWSWKLTDEQRGGLTTRQFVRYQLLRLGLGHNLTHVIRGGGKYLIAPPDEVLKLKPELHVSP

SEQ ID NO: 108699 - protein, 457 aa, unidentified
MPRKPKNPRIGGASSVHTIDPNAAGIDIGATEIYIAVPVDRDPHPVRCFSTFTEDLMAAADWLQRCRVATVAMESTGVYWIPLFQILEARGLKVCLVNARHVKNVPGRKSDVCDCQWLQHLHSAGLLRPSFRPSSQVCAVRSLVRYRDSLVQLSAVHLQHMQKALDQMNLQLHHVISDLGGKTGMAIIEAILAGERDPHQLAKLRDPRTHASEETIAKSLVGDYRREHLFTLRQSLTGFRQNSQLIADCDGEIESLLKEFSSGAGPGAGAVSEPQTELKRKPRRNELNFDLRAQLHRIFAVDLTEIPGIHTLTAHVLFTEVGRDLSAFRNVAAFTSWMGLCPDNRVSGGKILRAQTRRVNNRVARALRMAAQSLSRSYGWLGQYYRRMRAKLGGPKAVTATAHKLARIIYHLLTTGQAYDETVFAQQETQNKQRNENRLRHQARKLGFELTQIPMEL

SEQ ID NO: 108700 - protein, 411 aa, unidentified
MEAAVITAVGIDVSKSKSTVAVRRPGGEIVLRPFEIHHTNSDLKKLASTLKKLGGDIRIVMEHTSTYWRPIALTLKEAGFFVSVVNAMLIHDFSDNTIRKLKTDRADALKIANYALTFWDTLPPFNNEEETRLLLKMQSRANERITATATALRNGLIALADQTFPGVNIAFDPNTKNANGHEKWVDFFLRYWHKDCVCQYSMEAFTESYRGWCKRKNYKFRTDTAHKIYLLAQEGVATLPKCESTKMLITQACKSLNAVCEAKQSTQLEMQRLTVMLPEYEVVMQMERAGPITGPALMAEIGDVRRFKKKKALVAFAGIDAPPFQSGAFESKSRHVSKRGSPHLRRTIFIVSNIILTRSNPENAVYCFMDKKRSERKHYYVYTVAGSAKFLRVYYARVTEFLRSQPSPDAC

SEQ ID NO: 108701 - protein, 320 aa, unidentified
MIYIGIDISKDSFVAAYPTKSGYTTKTFNNDTKGVRQFIKSLPDESHCVMEATGNYSMLLLYLLQQAGILVSMENPQKIKHFSRAMMSVTKTDEIDAKLIAIYGEKMNPAPYKIPSESILLLKQKRTVLRQLKKHLAATINLQQSLAVLPKQDTTSKVAVEQTIKFLHKQISKMEEEITNLSNKEFKRQMDLLTSIKGIGNTLASALIVATGGFTYFTSAKQISRFLGICPTYQQSGTSVNIKGHINRNGDTHLRCQLYLAACSSLRCNTACKQTYDRLRANGKSGKSAIIAVANKLIRQAFAVVTSNRPYIDGYVSTFA

SEQ ID NO: 108702 - protein, 351 aa, unidentified
MSEYIAFDSHKRYTWVDREDHSTRKNSGHRLEHAPGAVREYLNGCEPGTAVAVEATGNWYWIIDEIEQAGLQPRLVHPRKAKLMMGLTNKTDKLDAQGLNRLQRNGTLPTVWIPPGPLRDLRELTRTRLVLVAQRTRLKNRLSATLAKYGTPASQCSDPYGKRGRAELEKHLEGLPEQTRWVSGQLLAQLDFVSAQVKQLEQRLQELVEVTPEMQWLLTLPGVGVILAATIALEIGEVERFPSAMHLASYSGTTPRVHASGGKVRYGPLRADVNRYLKWAFAEAANSVAVNHLRCPERHVSQLYRRLRQKKGHPKAIGAVARHLAEAAFHVLRGKQMYQDPSFGRGRTSQV

SEQ ID NO: 108703 - protein, 461 aa, unidentified
MQIIHRCCCGLDVHKKLIVACLISLNEAGEFQKEIRHFPTMTKDILALADWLTSAGCTHVAMESTGVYWRPIWNLLEGQFELLLVNAQHIKAVPGRKTDIKDAEWIADLLQHGLLRPSFVPPAPQRHLRELTRYRSTLLAERARLVNRLHKVLEDTNLKLTAVVTNIMGLSARDMLDALLQGETNPEVLAKLARGKLRKKREDLEQALVGRVDDHHRFLLTSLLTHIDFLDEQVADCNGKIEQFLSAPSDEKAELVSCASDDQPQEQALVSSTPVGTGSMLAQDQVPEEGPKVPLSYQQAIALLDSIPGVNQRIAEIFLAEVGTDMQRFPTAGHLASWVGICPGNHQSAGKQIRGTTRKGDRWLRHALIEAAQGAMRTKGTYLSAQGRRLTHRRGKKRAVVAVAHSILIIAYHVLQRQQPYQDLGSNYFDERERSAVARQSVHRLEQLGFKVTLEAAGEAA

SEQ ID NO: 108704 - protein, 345 aa, unidentified
MHTTITGVDLAKKEIQVCVCKHNKVLSNQAMTPTQFASWLASSKPMTIVFEACSTSNYWKQMALKYGHDARLISAKLVASVRQNQKTDKNDALAIAQAAQLIDVSFINGKSKEQQELQTLARLRELAVKHKVAIENQIKSLLLEFNIRISPRQGGLSGVVQAVLEDAENGFSMVFREALKTAWEQLMQRIDSVKKYDGYLETAANQHPVCKSLQALEGVGPLNAINLYIALGCGEMGQFKKGRDASACIGLTPAQHSSGGKVKLGSISKYVKNHIIRSTLVCGAMAVVNQTLRRIAKTKKDLWIQQMVARRGKRCTAVALANKTVRTAFAMITNGTEYKAELLAA

SEQ ID NO: 108705 - protein, 365 aa, unidentified
MDTIYIGVDFHARQQTICYLKTETGELVTCELKHQDKQKVRAFYAQFRGQVVVGLEASGYSPWFERLLEELGCEVWLGHATEIRRRARWRQKNDRRDAELILELMVHDEFPRLHRPAVQSREVLRMLRYRQKLIKIRTMSKNSLQALALQSGLAKGSRLFTKDGQQQLGTAEMSPVMHWQREHWLQLMEPLNQQLLETMAWFKTQSKDDVCITRLRTHPGIGLLTSLCLVHTLQPVSRFRNTRKVAAYAGFDPVERYSAERKCFLGISKAGSRLLRYLLVEAAQTAVRKDEDLKRFYKRLAERRGRPKAKVAAARKLLIRAYIMLRDEIDYAEFRHRAVAARLARRGQRPNVPEVLIGQPASPAQ

SEQ ID NO: 108706 - protein, 343 aa, unidentified
MNEVITIGVDLAKNVFQIHGVDGSGGVVIRRQLRRSRMLPFFKKQPPGLVGMEACASAHHWARQLMALGHAVKLMPPKYVKPYVKRNKNDMADAEAICEAVTRPTMRFVEIKTRDQQSVLMLHRTRQLFVRQRTTLINALRAHLAEFGIVAGVGRNGLERLLKVIEDGEDDRVPAAARDCLLALRDQLEMVKGQVLDADRHILAWHRSSEVSQRLDDIPGVGPLIATALVASVPDPHVFKSGRDLAAWIGLVPKQNSTGGKDRLGHISKAGNRYLRMLLVVGALSVIRRAKQVGYTRRPWLTKLLQRRSTKIAAIALANKIARTAWAMMAHGTFYQEPQSEVV

SEQ ID NO: 108707 - protein, 343 aa, unidentified
MQQYVGLDVSQKETAVCVIDDAGRIVFEGKARSEPGALAKVIRKRAPQAARIGFETGSMASWLWHELKRIDLPVVCIDARHAHAALSVRINKSDPNDARGLAELMRMGWYREVRVKSAESQVVRSLLIARARLVGIRRDLENQVRSLLKENGQLFPRAIGRQFRDRVREMLGEGHPLRDIIESLLAVHERVSEQQTALDTRVRALARTDQTTRRLMTVPGIGVVTALAFRHTIDDPSRFRSAASVGAYLGLTPRRKQSGELDLTGRISRWGDRFLRSYLFEAASVLIHRTKRWSPLQAWGLRLVKRIGLKKAKVAIARKMAIVLHCIWSDGTEFDWGKQPGML

SEQ ID NO: 108708 - protein, 417 aa, unidentified
MNPSPQTSPIQRYIALDLHKHYVAVGGQNQQREWVLRPRKVPMQRFRAWACKNLKPGDAVIIETTGNVWDIYDIVAPLVSKAVVAHARKVRQIAEARVKTDIEDIKRLITLLIGNIVPEVWVPPMQVRELRSLISFRWRLNKQITMSKNRLHSVLQRFNLSPPDGGLFADKNQSWWDDQEFTPLTDFQVQLDLDIIAHLEAQRDKIDQKLAQLSDTQPWADDMVFLMQIPGFGILIAMILLAAVGDISRFSHAKKLVGYAGLGAGVHDSGKKHQEKSITKEGRSELRWALVQAAWAAVRSDPYWKAQYRRLTKIKHPNKAIVAIARRLLVSAWHILTKREPYRHADDDTIAYKMVIWSQRMDQETLRGLTRQQFAKYGLLRLGVGRDITRIERNGVPRRIAPASQVLDLRPDLLPPT

SEQ ID NO: 108709 - protein, 389 aa, unidentified
MKKVSKRGPQMEAKHNSKPAMTVGLDLGDRFSQYCVLDTEGEVVEEGRIQSSEGAMRRHFEGELRLRVAVECGTHSPWVSRLLSELGHQVVVANARRIPVITASTSKNDRNDAEQLARLAGYDPRLLSPLQHRSPQRQQDLNLIRVRATLVRARTMLINALRGLVKSAGSRLPSCSTESLAVRALAHIPSALAAAARPLLEQIAALNGQIAGLDREIEKLREKYAEIGILRTVPGVGPVVAAAYVLTLDNCDGASNRAAGAWLGLRPRQKQSGDSHPQMRISKEGDRYLRSLLVQSAQYILGRFGPDSALRRWGLKLAQSGGKRGKKRALVAVARKLAVLLHSMWRSGKRFQPFPQPAATSAVAWNALPEPPPNHTAEGLEWQENLEPG

SEQ ID NO: 108710 - protein, 338 aa, unidentified
MRLYCGIDLHSNNSYLVVLDEQDRVVYRRRLRNDLGLILEALSAYSGQLVGIAVESTFNWYWLVDGLMDAGYRVHLANPAAMKQYSGLKFADDRSDARWLAHMLRLGVLPTGYIYPREQRSLRDLLRKRGRLVQQRTANLLSLQNLVHRNTGQRLSGQTLRKLELTELDPQHTDTNRTLAMESTRRVLECIDDEVRQLEQEVLRQLKPDPLLRLLKTVAGVGDVLAPTIRLETGSIDRFASAGKYVSYCRSVGSQHLSNGKSKGQGNRKNGNPYLAWAYVEAAHFAIRFHGPVRRFYERKQARTHRVVALKAVAHKLARASYYVMRDQVPFKIDLAFG

SEQ ID NO: 108711 - protein, 350 aa, unidentified
MIIIGCDYHPGFQQIAFVDTDTGELNERKLGHREEAEQFYRQLKVRGKKVRVGMEASGHARWFERLLTEVQFELWIGDAAENRTKRVRKQKTDRQDAELLLRLLIEDRFPRIWVADGENRDLRQLLWHRHRMVQMRTRIMNQLHVLALNEGVRRKKALWRPAGRAQLQSLVLARWASRRRQDLLELLDQLTLKIQELTRALEQEVEKRPVARRLMTHPGVGPLTALAFELVIGTPERFGCGKQIASYVGLVPSEESSGDRRRLGHISKQGNSLLRFLLVEAAQVTVRTDPDWRRRFLHLAMRRERRIAKVAMARKLAVRLYWMWRKEWDYEQMRKYGSHVGEPVHRQGAS

SEQ ID NO: 108712 - protein, 407 aa, unidentified
MFAGIDWAADEHVVCVIDADGRVADRFTIGHTAEGFERLIRRLARHGDPAELAVAIERPDGRLVDRLLDAGHPVVPVKTTAIKAWREAEVASGAKSDPGDAQVIADYLRLRRHDLRELRPFSAETRALRAVVRTRANLVDARVAAGNQLSAILAAFWPGAGELFADVWSEIALAFVERYPTPSAAAHLGEARMAAFLRKHGYSGRRSPTELLERLRAAPAGLADGPESEARRDTVLAMVRLLRALNRSIKDLDRSVVAHLDEHPDAVVFRSLPRAGQVNAAQMLAEWGDCREAYDGPEAVAALSGMAPVTRRSGKHLAVGFRWACNTRFRNALATFADNSLHASPCAATVYGDATGRGVDHPHAVRILARAWIRVIYRCWVDQVAYDPARHGAARRLENVGSAVVAA

SEQ ID NO: 108713 - protein, 381 aa, unidentified
MRSVALDLGVKKIAYCEVSAGEVIDRRMVSSLSSLEPTLGPGAKPARVAIEACREAWFVHATLTAWGNEVLVVDTTRSRKLGIGQHRRKNDRIDAEVMARAVESGGIPTAHVLSPHRQELRRQLSVRRTLVETRSQYVTTMRGLASALGTKLPSCDTEQFIAKIRKATLNQDVRTAIEPLLALLSPLQEQLAIVEHGLEELCALEPVVARLRTVPGVGPIVAAQFVSVIDEAKRFHNAHEVESYLGLVPSEDTTGGKRRLGAITKHGNTYLRALLVQSAWSILRQPARSDPLQKWALAVAERRGKRIAIVALARRLAGVLWAMWRDDTVYDGEFVARSGARGLRSAAQSIEFRAQALERAAAKLRQHRARPAKITEVTSSN

SEQ ID NO: 108714 - protein, 341 aa, unidentified
MKNLFIGIDFSKEKLDVAVITAVGLSETAQRECYEFKNSGSGFRQLVKWVERNSNGISTSSWLFCGENTGDYSKPLCNFLYGKGYDIWLENAKSIKDASGIRRLKSDRADALMIAEYAMRNYDKAFMYEPLSASLSQLRELFLYRQMVIRHRCSFQVRRGEKRLAMEKSPVKTMISQSGRHIVSELNKEIEKIDKRIAELIDSEEELKEIYHIVTSVPGIGCQNAVCLMVYTDNFRRFNYDARKIACYYGIAPFGKNSGASVHTDPHVHYLANRQIKAMLTQAALAAINHNPVLSQYYLRLVERGKKKQVAMNNVKNKLIHLVTAMVRNRQVFSPEYKISA

SEQ ID NO: 108715 - protein, 351 aa, unidentified
MDATTVGVDLAKNVFVACVADCAGRIVARREFNRAGFLTWLGTLPAGTVIGMEACGSAHHWGRTAQRLGLAPRLMAAEFVRPYRKRQSVKHDRADAEAILIALRSPGMRFIPVKTEAQQQRLAWHSLRIGWVEERTALLNRIRGLLAEFGLIVDPGPRHLRAQLAEREFDTALSPALRGLIQSVRDQLDALDARIGECDRQITAQQADDPLAKRARDLPGVGLITADAVTASVGDASMFKNGRQFAAWLGLTPSQSGSGGKTKLGRITRRGDDYLRTLLVQGARSVLAATMRKQRRESPEKLTRLQQWIVALSGRIGYHKTLIAIANKHARQLWAVLAKGEAYNPQAWQRA

SEQ ID NO: 108716 - protein, 403 aa, unidentified
MNVNCVGIDVSKGKSMIAVMRPLGETVIPPFEVGHTDAELCELSRRLGDLDSETRVVMEATGNYHLPIASFLYDSGFYVSVVNAMLVHGYGNNSLRWAKTDKKDAIKLANYGLDHWLTLPKYIPEDEVRLMLKTTYRQYQQCAKVQTMLKNNLISLLDTAFLDATRLFTSPARADGSEKWVDFVATFWHCECVCRLSEKAFTTKYQKWCKKHGYNFSQDKALDIYASACGHFSVMPKTDTAKLLVEQAVSQLRVASAALAALRNEMQSLAASLPEYPVVMGMFGVGPVLGPQLMAEIGDVRRFHSKKALVAFAGIDAPPYQSGQMEGRSRSISKRGSSALRRTLFLVMASLLRSSPADEPVYQFMDRKRAEGKPYRVYMMASANKFLRIYYATVKRHLDSLEA

SEQ ID NO: 108717 - protein, 334 aa, unidentified
MNFKNFIGIDISKGTFDLALIKDNNLLVVASDDFPNSSSGIVQLEAFLKNQGLNMEETLFCMEHTGIYCRLLSHYLTECKYYVWLEMPVKIIRSLGLQRGKNDKIDAKRIAEYACRKKDKAVLWAPPREVVMKIHDLLTLRDRLIESRKSLKQPIKELIDTGFKDAANLIESRCKITLNAIDKEIKQIEKDLNGLINKDSNLKRLFGLATSVPGIGKITSMYMLYFTNEFTLYLNPKQLACYCGVAPFEHKSGTSIRGKTRVSHFANKKLKKLLHLVAMSTIGKNKDLTAYYVRKVGEGKGKKLVINAIRNKILHRLCAVIQRGTPYQAEYVLA

SEQ ID NO: 108718 - protein, 361 aa, unidentified
MNTVIRVGIDLAKYLIQVHAVDASGKVVTNRALKRGKFLLWCADLPAGCVIAMEACSGAHHCSRKLIDRGFDARIIPGSSVAPYRIQGRTGKNDANDAAAVCEAASRPHMNFVPPKTLAQQGMLCVHRLREGLKEERTACINRIRGLLAEFGVVLPQSPEILRRHLIDIVEDASNDIAGVARLVLQRAHEHWRELNAHIKWCDQRITDHQKLDEQVQRAAELMGVGSITASALVATVGDFRQFRNGAQFAAWLGLTPKQHSSGGKTSLGSITKRGSVYLRTLLIQGAKAIVLTRQYDNPIFLWAHKLRERIGWQRAVVALANKNARILWAVMTREKRYDAHHVSCIPLLAAVTAPALVSVA

SEQ ID NO: 108719 - protein, 298 aa, unidentified
MMHPILNVGVDVAKDAVVVACAEHSFPSKSVPNQQAPLRAWLKSLPAGSRIGLESTGSYHEVLADLAQAQGLTVFLLNPLDTRHYAKAMGTRAKTDRVDAELIARLIAQEHTRLRAYTPPTVNQRQIDRLIRRRATIVGLKGTLKLTMRQLGGFAAELKAVVDKLDALLAKIDATMAAIAACSPQHQEAQQRIETIVGVGPLVGIGLTNTLERVPFRKADAFVAFIGFDPRANDSGHKAGRRRLSKRGPAELRRLLFNAAMSAIQTTVWKPIYEHYRTQGWSTTASSVIIARKIARAA

SEQ ID NO: 108720 - protein, 358 aa, unidentified
MKIIGCDLHARQQTIAMLDTDTGELEEKTLEHQGETVRKFYSALSGSILVGIEATGSMQWFLELMEELGIECRVGHPAKIRKAETRKQKHDRRDARLLLTLLAENRFPTIWMPSSEQRDLRTLLRHRHQWVRLRSRVQHTLQSMALNHGLRRGRSLWSQAGQGELRALPLAPHASERRKALMTLYPRLQESIDELDRQVSEQTQQRSDARRLMTHPGVGPVTALATEVFLGDPKRFSDGKALASYIGMIPSEHSSGRRQRLGAMSKQGNALLRYLWCEAAMHAVERDPELKRFYRRKLVQKGLGKARVAAARKLGIRLWIMMRDEIDYQEFCRRGKARQESGSVRAGMPDRNSGPAEQ

SEQ ID NO: 108721 - protein, 336 aa, unidentified
MPMYQLGIDVSKNTLDLCLLREGIKGRIKTRKLKNTADAAKVVAEWLKKQSCELGEVHIIMEATGVYHEPLAYGLHFAGARISLANPHRTREFARGMNILTKNDKVDAWMLACYGSLKEPEAWTPPPESVRYLRALLRRRDALVADSTREKNRLEKSVFTDSPDAVRASIENMLQELSNEIEHLDVLIQEHIKTHPELNQDFRLLTSIKSVGYLLGLNMLAILKSHSFESAEQAAAFLGVVPVERRSGTSVKGKPKLSKIGPPEIRTKLYLAALCGLRFNPVMKQMYTKLCQRGKSKMCAIGALMRKLVHWCYGVLKTQLPSDAEYNQQSHYKTTC

SEQ ID NO: 108722 - protein, 368 aa, unidentified
MSKQSHYKIGCDAHKHYSLFAVFDRQGKPVKRTRVNHEPGAIRAFLSQFPQGTPVALESVGNWYWIVDEIEVAGCLPQMAHPAKAKMMMGNVHKTDKLDADGLATLLHNGTLPSVWIAPGSLRDERELPRTRMALSKVRTMLKNRIHSTLAKYALSLDTDSDIYAPKWRPQLMQLICSLPDETRRCMEQELELLDQVQEHIHRLEARILERVRLTRTIQLIQSVPGPAQILSIVIDREVGSIDRFPSPHHFASYSGLVPKVKASGGKVHYGRMIKQANNYLKWAFIEAANVIVRQRHHPAWQSKHVVQIYERTRQRKGHSVAVGAVARYLAEATFWVLKKDGPYREPVARPPAGSKSAASSKQGQAPA

SEQ ID NO: 108723 - protein, 339 aa, unidentified
MSKRSILVQETIYCGIDVSAKSLTVAIQRVHQPVEQRSFPNASVGHKALIVWLRKTKSPVRVSLEATGIYSLDLAFALDAAEGIEVAVLNPKVANRFAQTIRRSKTDAADAEVLAEYARRMPFTAWVAPSPGSMRLRSIVRHIESLSVQSAQNQNRLHAAHGSTSTPSCIVQDLKRSVASLELRIHKLRREAMTLVRQDDLLRKRFELLVSIPGIAQVSGMQLLAELSTLPPDLTVREWVAHSGLDPAHEISGSSVRKASRISRAGNRHLRRALYMPALVASRCDPHAKAFFDSLLARNKARLQALIAVARKLLHAIYGIFRSGLKYEGTKLFPRITLS

SEQ ID NO: 108724 - protein, 396 aa, unidentified
MGRLSLCNLNEGCAEKAPILLHRRRTMNYSAYVGLDVHKTTIAIAVAEAGRGSEVRFFGEIANSPDALATLLKKLGARHGKLYFVHEAGPCGYGLYRQIIDAGHVCDVVSPAHTPRRAGDRIKTDRRDAIMLARLSRAGELTKVWTPDYAHEAMRDLIRSREVASKDVRQARQRVQGFLLRNGRRYAGAVWKRSHRVWLGNQTFDHPAQQIAFQTHLNAMDQAVERKLEIEKQIQALLPDWSLGPVVEALQALRGVALAVAAGVVAEVGDFQRFDNPRQLMAYLGLVPGERSSGETRRPTSITKAGSIVARKLIVEAAWAYRMPAKIGQAMQRRQEGATAEVRAIAWKAQVRLCARYRRMLARRKTPPVVITAIARELVGFIWAIGRSVKPRMIAA

SEQ ID NO: 108725 - protein, 328 aa, unidentified
MNHVGVDVDSQSLVCKIQRNGKDFPISIFANTPIGHRQFIKWATKYHKPARVCMEATGVYSLQFALALHQTQSIEVAVMNPKAIKHFATAYLQRGKTDALDAESILQYLLRMPFKEWQPPEEEYFEIQQISRRIVHLNTMLTRERNRHHAADRMGSMGRIVANDAAVTMRHYERRIKVMESELIKLMESIPELSERLELIKSATGIADKAGPRILAELSMLPEDMSGPQWVAFAGLDPRPYESGTSTNKPRRITKAGNRYLREALYFPALVAIKLDPNVKAFYEKLVAKGKKPMQAIVAVMRKMLLAIWGMFKHKTPWNGEKFYVLNS

SEQ ID NO: 108726 - protein, 417 aa, unidentified
MSSEWLPFTIKTHKGECIMNSVGIDVSKGKSTVAIMRPFGEIVASPFEINHTEEDFEKLVSQIKSLKGESRIIMEYTGRYYEPLANYLYNSGLYISVVNAILIHDYDNSSIRRVKTDKKDAIKIANYGLNRWLDLPEYIPEEELRQTLKIYNRQFTQYTKLKVALINNLISLSDQTFPGIDGLFGKTPRKDGHQKWIDFIKDYWHKDCITTKTIKSLERSYQKWCSKNGYHYQSNKVNDIYQLANQTVASMPANTNTKLIITETAKELISLIDALEKIRQEMNRIASQLPEYPAVMTLPGVGTTLGPQLIAEIGDIRRFHSRKALIAYAGIDSSPYQSGTIDIKSRGISKRGSSALRKTLFTVMDCILRHQQIDDPVYQFLDKKRAEGKHYYVYMIAGCNKFLRIYYARINAYLNSI

SEQ ID NO: 108727 - protein, 433 aa, unidentified
MKKFLECCAGIDVGKREVTVTILTGSHDEEPKAETRTFQTTVPALIELRSWLVEKGCSNAVLESTGSYWQPVWNVLSDKIAIIVANPEHVKARRGEKTDPADSRRLAERLRVGDVRGSFIPSAHIQQLRDLTRRRKRLLGAACSERNRIQKMLERSNVKIGSVASDVFGVSGQLILKALLENPEMTPEQMAELARGRLRAKLPQLTEALQQHRMDEHARWMIQHSVAQLLFLEQQLVELEERIHIMLKPFQKQYELLQTIPGVAASTAAVIIAETGGDMAQFPSAAHLASWVGVSPGNNMSAGKAMPAHIKRGNRWLIPALVQACWAAVRKRGSIFKKRFYRLQQHRGRKRALIAAARSLLTVIYNVLSEMCPYSEPTPEILLQHDKDKKIRHHFRKLRELGVDVMQFVPGILASNNKAPRPPRVGALGFHAR

SEQ ID NO: 108728 - protein, 402 aa, unidentified
MNAVGIDVSKGKSMVAIMRPFGEIVSTPFEIKHTSSDINSLVKLIKSIEGEFRIVMEHTGRYYEVLAHQLSEANLFVSAINPKLIKDFDNDSLRKVKTDKADSVKIARYALDKWQNLKQYSVMDELRNQLKTMNRQFGFYMKHKTAMKNNLIGILDQTYPGVNTYFDSPARSDGSQKWVDFASTYWHVDCVRKMSINAFIDHYENWCKRKKYNFSKSKAEEIYGKAKELVPVLPKDDITKLIIKQAVDQLNSASITVESLRTLMNETASKLPEYPVVMAMKGVGTSLGPQLMAEIGDVSRFTHKGAITAFAGVDPGVNESGSYEQKSVPTSKRGSSDLRKTLFQVMDVLIKTHPQDDPVYQFLDKKRAQKKPYYVYMTAGANKFLRIYYGRAKEYLASLPES

SEQ ID NO: 108729 - protein, 337 aa, unidentified
MSVYVGIDVHRKRSQVAVVTEDGTVQLNKNVVNGSEPFLRLIGDLPSGTPVAFEAAFGWSWLAELLEDYGFEAHLVHPLRCKAIASARLKNDKVDAAILAQLLRADLLPEAWLAPPRVRQLRALLRHRASLVRLGTQLRNRIHAVAADHGYDRSASYWTGPGRGWLAELDLPAASREIVGDCLAVIDGLAPLTGRIDGELHACARADPRVTVLRTLPGVGEFTALVMLAEIGDITRFGSARKLASWAGLTPTVRGSDLKVRHGHISKQGSAWLRWVMNQAAQTAKRSPEFAASYAAIAKRRGKKIATIAVARKLLTRAWHLLNEMQATDTNAPLRRP

SEQ ID NO: 108730 - protein, 417 aa, unidentified
MAEEVEWFVGIDWASQSHQVCLVDAHGECLGERAVAHGGPGIEELCDWLITRTGATPEVIGVAIEMTQGPIVEALLERGFCVYGINPKQLDRFRDRFTVAGAKDDRRDAHVLGDSLRTDRHAFRRLSNDEPVIVKLREWSRMADDLQQERNRLASRMREQLWRYYPQMLELADDLAADWFLDLWSRAPTPAMAVRLRETTIERFVKAHRLRRWQASEVLSILKQKPLSVAPGVVEAASDHIRTLTVRIRLVNQQLKAAHRKLDELCAQLIPSEEDEPGQQCEQRDVVILRSMPGLGRIILAVLLAEVWQPLRRRDYHALRSLSGVAPVTRRSGKTRVVVRRYACNKRLANALYHWARLATQHDALSRRRYAALRRRGHSHGRALRTVADRLLSVACTLLEQQTLFDPTYEVRDAASG

SEQ ID NO: 108731 - protein, 333 aa, unidentified
MDQVVIGKDPHKVSVTIEARDIREVLRATGRFGTDTGNYRQLLKVAHQWLERVWAVEGANGIGRPMAQRLLADGERVLDVPAKLAARARVFDTGQGRKTDATDAHAIVMVALRDKGLREVSLDPALMTLRLLCDRRDEISHSRAQALNRLHRLFLELLPGGAPVKKSTAQYKALLATVRPRDVVGKTRRRMAAEELADLERFDVKLKAMKVELKAAVNALGSNLMDIHGIGPAGAARILADVADVARFPDRNHFASWTGTAPIDPSSGEHTHHVQIAARHADPRTTETAAMPAAAIGRDRAMPGLPRGGYTIGYLPMGKGVDGEQCSKCRSAA

SEQ ID NO: 108732 - protein, 338 aa, unidentified
MKITTVGLDIAKSAFHLYAVNKMGRYMKKKQLKRKQVLPYLARLEPCVIAMEACGGANYWAREMKDLGHEVKLIAPQYVKPYVKGNKNDYNDAEAIAEAAQRPTMRFVPIKSVEQQDIQNLHRQRERIKKARTALVNQVRGLLAEYGIVINKGVAAVRKGLPGILEDAENGLTMRGRELFADLLEELRVLDERFKQSEKQIEASNRGNEVCQRLDEILGVGPITASAAYAAAGDGKDFVNGRHFSAWIGLVPGQHSTGGKSTLLGISKRGNAYLRTLFIHGARAVLRHSANKTDRFSLWAQALLERRGHNKACVAVANKMARMAWVIMAKGETYRAVT

SEQ ID NO: 108733 - protein, 347 aa, unidentified
MIIIGCDWHVRFEQIALLDTETGEVMEQRLEHENGEAQRYYAGLKEPALVGIESTGYAQWFAEMLAELGHELVVGEAAKIRRMEVRKQKHDRRDAAHILNLLVRGDFPRIWLPSAEERDVRVLLEHRHQLVEWRTRAKNGLQAIALNHGKRRGWKLGTARGKEELKKLPLREGRGRRRADLLALVEQLDGWVQELDARIEAEVARREDAQRLLTHPGVGPLTALGTVLILGPVERFPDAKHVTSYAGLIPQEDSSAGRQHFGKLTKQGNGLLRFLLVEAAQTASRLDPGLQRVYRRLAFRKGAASAKVAVARKLAIRLYIMLRDKIDYAEFCRRGSHAGMLVSEPLV

SEQ ID NO: 108734 - protein, 480 aa, unidentified
MPQLSDKSNRKARSTGFRPVETRRKTRAAKDPTKGLQVTNPNAAAIDIGCAEHWVAVPPGRIKEAVRKFGCCTADLETLADWLVECRVDTVVLEATGNYWMVLYDLLEARQLRPVVVNPRYAKNMSGKKGDIPDCQWMQKLHSYGLFANSFRPGEPLRALRTYLRQRESLVVAAGQCIQHMQKALTEMNVQLANVISDITGETGLRIIDAILAGERDPKSLARLKDWRIRATTATIARALEGHWKDEQLFALEQARLSYAHYQEQILQCEERIQQQMRAVEGRLPESPGPGDQGTQPVSSQAEPGAPQAQAATQPFNLQNELRRIVGVDLTAIDGIGALTAQVVLSEVGTDMKPWPSEKHFASWLGLCPDHRISGGKVLARSTRPVVNRARHALRMSAYTLEHSHSALGAKYRRLKRKLGAPKAIVAMAHHLARLIYRMIKFGQDYIDKGMEAYEAKYREQRLRWLEKQAKELNLKLVAA

SEQ ID NO: 108735 - protein, 349 aa, unidentified
MAEEQIVIGVDAHKRTHTMVATDAVGRRLAETTVEATTDGHLRALEWAARWPSRKWAVEDCRHLTRTLESDMLRAGEQLVRVPTKMMSGARRSAREAGKSDPIDALAVARAAWREPDLPSAQLAGPERELRLLVDHRDDLVRERTRVQSRIRWHLHEIDPCLHVRLRGLRSQRVVDRLVEQLADLEGTIAEIVREQLARVRELNQRALELERQITQLVIRLAPSLLAIPGCGALTAAKIVGESAGIERFHSKAAYARWNGTAPQPVWTGNTARYRLARTGNRQVNSALHRIAITQAREPTLGRHYLERRLAQGNTRKEALRLLRRRLSDVVYRTLLADETAARPHAALT

SEQ ID NO: 108736 - protein, 365 aa, unidentified
MKKLAYVGIDYHLDFLAIAVVIEGQKKIHETVRIANQDKVIRKYLKKLSKGFRIQACYEASCNGYAFHRKMKSWGYSCEVIAPSLIPKKRGDRRKNDTRDARNLAKLYANGLLTIVRPPTEQEESVRSLIRCRMSFKDNAKRIKQQINSLLLTQGARWESSKWTAHHLKWLRDLQLSDTYLQEVLQEHLAHLEYLQSRLDHFEQLIEQIANSDVYAPSVKRLKAFRGIGTLGAMVLIAEITDFARFPNPKALMAYLGLTSSENSSGGKEKGGSITKTGNQRCRKQLVESAQHCVKRPYLSAQMRAALAQLDARSAQIAIECMKRLHKRFWALSMKGKIRPVAIVAIAREFVGFIWAMMQPVALNA

SEQ ID NO: 108737 - protein, 413 aa, unidentified
MIFVGDDWSEDHHDVCLMDQAGKRLASRRLPEGLTGIRQLHELIAEHAEEPDQVVIGIETDRGLWAGALAAAGYQVFAVNPLAVARYRDRHHVSGGKSDASDAKLLADLVRTDRHNHRPIAGDSLDAEAIKVLARAHQSLIWARTRHTNAMRSALREYYPAALLAFEDLAHGDALGVLGRAPTPEQGAHLDLPAIQSALKRGGRKRNIAARARQIRAALRSEQLAAPAPVAAAFGATTRAAVGIIVELNRQIAELEAELATHFEAHPDADIYRSLPGLGDVLGARVLGEFGDDPNRYTSAKSRRNYAGTSPLTVASGKKRAVLARHVRNRRLYDAIDHWALCALTSSPGARAYYDHHRAAGDVHHQALRALGNRLVGILHGCLRHHTTYSEHTAKSPKPLDKLGPWDVYSCCC

SEQ ID NO: 108738 - protein, 455 aa, unidentified
MRIFIGIDIGKEYNYASFLNNEGIEIDKRFKFKNNHLGFLSFKDNIDKLTYDCNFSYDDVLIGFESTGHYWINTDWFLTEKLNIKAVMVRNDAVRHTRALNSQGKGKNDSLDSRTIAECLKNGYYFDVQGRKEDYTVLRRLTRERTELEKEIARYKNRYRAWLDVNNQIFLENFSNVFSIGAFSLLKVYPSPLDIIQDSYLEVREKLKEVGYKRTNNTFKIYYEEAKTYKNIINGITYADRLEINEYIETLEMYIKKKESLDEKIEALMNYLEGKVYNSLSQIKGMPKAQVASLLAEIGNINNFKSARHLISYAGLNVQGEGSGKNKGYSWISKTGNRKIRKELYVITFNLVRHNDYFRGLYCYYKSYKRANEKSNKEMLIALACKILRVIYGMLKYNMQFDLNEMLKNYDFRNINKEKFIDEFLGSSEKKQKIIPQEIEGIFLSNRKSNEKSDD

SEQ ID NO: 108739 - protein, 326 aa, unidentified
MQGKDASEQEATVKCNAGIDVSKNYLDVHVLPGGQSVRVVNTDDGIRKLKRWFARFDLALVVVEATGKWHRRLQRSLHASGFAAAVVDPYRVRMFAKAQGIFAKTDRLDARVLALFATVMTPTVRPPASEALQNLAELVAARDSAVAEGTALKNQLAATNGKFLQRHLERRIARNAKDVATIEREIMACIKADDGLARRYVILTSIPGFGPVVAATLVACLTELGSCSRTQIAALAGLAPIADDSGKREGVRVIWGGRPTVRRALYLAALSAARFNAALKPFFERLIAKGKPPKAVLIAVARKLVVLANTLISENRAWEPHAPKHA

SEQ ID NO: 108740 - protein, 338 aa, unidentified
MAIIAIGIDLAKNVFAVHGVDTTGKAVLVRPAVRRDALLELIAKLPPCLIGMEACSGAHHWARQFQQFGHEVRIIAAKFVAPYRLSGKRGKNDAADAQAICEAVQRPQMRFVPIKSEDAQGRLSIHRVRQGFIEQRTATINRIRGLLSEYGHVLPQRAEVVRREAGLCLEDLPGWANTAIGDLLSELHRLDERIAEYDRHISVMAKADERCLKLMAMPGIGDKTATALMASIGSAHDFKCGKQLAAWLGLVPSQYSSGGKQRLGRITKAGDRYLRMLLILGARAVVAAAKKKEDRLSRWVTELAERRGYWKAVVAVAAKNARMAWAMLSKGEAFKPMT

SEQ ID NO: 108741 - protein, 434 aa, unidentified
MSNAAAPVAAAPSEPEWAAFAAIDWADQKNFWRLTPAGSRQSESGELDNTPEAVEVWAANLQQRFGGRPIAVILEQTRGALVYMLTKYPHLVLFPVHPTTAARYRETFAPSGAKSDPSDTDSLLDLLLRHRERLRPLRPDTVETRLLHFLVEERRQTVDEKTRANLRLTDCLKLYFPQVLRWFDDVTSPLVGDLLERWPTLEQLQRVHPGTLRRFLHEHNCRSEEKNAERIAAIQQATSATQDQAVREACVLIAHSLVAMLATLRAQIGVFDQRIAELVADHPDGALFRSLPGAGDALVPRLIVAFGTQRDRYQSAYEMQCYSGIAPVTEASGNSQWVHFRFTCPTFLRQTFHEFAGCSIQQSEWARAYYDHLRNDKNKSHHVAVRSLAFKLIRVYFACWKNRTPYNSEQYAKALEISGSPYAPARLASAKNCE

SEQ ID NO: 108742 - protein, 345 aa, unidentified
MEHYVGLDVSLKLTAICIVDRTGNIEREGTVPSDPEAIATFVKTHAPHVARVGLETGATATWLWTELNKLGLPVICIDARHAKAALKMQINKSDRNDAVGIARIMQCGWYKEVRVKDLNSHAVKALLVSRALLVKIKRDLENQIRGLLKNLGFVIGRAKMNVFAVRAAELTEHRPELAAAVAPLLNARAAIELQIADLDRKVMRLARNNAQARRFMTAPGVGPITALCFLATIDDPTRFKRSRSVGAYLGLTTRRYASGEIDWTGRISKCGDKMLRSYLYEAANVMLTRVARWSALKAWGIRVAKRTGLRKAKVAVARKLAVVLHRMWIDGTEFRWSKEAANQPA

SEQ ID NO: 108743 - protein, 344 aa, unidentified
MIIIGCDFHPSWQVLAFVDTESGEVGERKLMHANGEARKFYEGLKGSVRVGVESTGNSHWFTDMLSELGHEVWIGDAARIRAAQVRKQKTDRRDAAHILDLLLKDDFPRIWMPTREQRDQRQLLIHRHKLVRMRAQVKTELQHLAMNQGMQKGRSLWSRENQKQFLELPLQHWAGVRRQNLLGLMKGMDQQIAVLDQAVKAAAEQDAQARLLMTQPGVGPITSLAFVLTIGDVRRFEHSKQVASYLGLIPTENSSAGKQRLGSISKQGNRFLRMLLVESAQVVVRCDPGFRREYLHRCHKKPKAVAKVAAARKLAVRLYWMLRTQTAYPEVVCIESSPRVPLAG

SEQ ID NO: 108744 - protein, 349 aa, unidentified
MRFYNGQHRFYCGIDLHTKTLSLCVLDAEGGKALEETIPARPRDLLDALAPCRDGLVVASECMFAWYWLADLCDQEGIPFVLGHALYMKAIHGGKAKTDKIDAHKIAVLLRGGMLPQAYVYPKGMRETRDLLRRRTFFVRRRAEALVHLTNTNSQYNLPPFAKKLAYAANRAELDLPERFADPSVRKNIELDLALIDTCDAQTRAVELYLTRAAKVDDPQAYARLRSVPGVGPVLALILLYEIHDIRRFPEVGQFLSYARLVRCAHESAGKKPGTGGNKIGNAHLKWAFSEATCLFLRASEQAKRWLARREKKHGKARALGALAARLGRAVYHLLRKEEVFDAQRFFAS

SEQ ID NO: 108745 - protein, 309 aa, unidentified
MKEELVYVGVDIAKAYLDAAIGNEKRRFANDALGHRQLINWIKQMPASVQVICEPSGGYERALVRALVAAQLKISLVPANRVRQFARAAGILAKTDRMDAKVLCAFEEAMQPGTISASQLEQEHLRELESQRRHLTHLLVMEQNRAARMSDLWVCKLNRRLITQIKKQIEQVDLLIQQQIKASRELSSKAEKLTAISGVGARTAALLLAQMPELGQLNRREVAALVGVAPFNRDSGRMRGKRAIYGGRRSVRHGLYMAALVAARHNPILRAFYLRLRAAGKPAKVALTATMRKLLIVLNSSLKPDLTYA

SEQ ID NO: 108746 - protein, 398 aa, unidentified
MSRIWAGTDCGKTHHHCLVLDSEGDTLLSRRVANDEPELLKLLGDVLDLADGRAVTWALDMTGGEPALLIALLVNHGQELVYIPGIAVNRASDSYRGQGKTDARDARVIADQARMRRDLLPIRPDDDATVELRLLTDRRVDLVAERTRTINRLRSLLTSMFPALERALDLGTSGALMLLTGYQTPAAIRRTGQRRMTTWLRNRKVRGSEALATKAVEAAERQHTAVAGETAIAKMVLTFTKEVMALSEKISETDKLIEGRFREHELAEVIQSLPGIGTVLGAEFLVAVGGSLDAFASPDRLAAFAGVTPAPRDSGKISGNLHRPQRYHRRLQRVFYTSALVSVQFDPNSRQFYDRKRAEGKRHTQAVLALARRRVNVLWALIRDRRCYQVALPVAATA

SEQ ID NO: 108747 - protein, 394 aa, unidentified
MPELFVGIDVAKDTSSAQGIDGSGKGLFSLTFAMDSEGFMQLWNAIAEHSKDISEVIVAVESTACYHINLYSFFTAKGVSIVVINPLLIANFAKLSLRKTKTDKKDAMSIAQFLLVHRKSISQLSLSQDLQDFRDIARERESVCNLLSAHKVEVKRLLQSTFPELERIADLSTRVMQEFIAAFPSARLVKMAKLKAIQKMLQRKGVGTRLTYTAEDLIQAAKQSIATISPAKELILQGKVRTLQHLQERYEELTKIMTEYCVSSMLEDFEIITSINGISKRTATTFLAEIGYIGNYASHKKLIAFAGIDPTVYQSGKFKGSSRISKRGNRHLRRIIWMMTTCVIQHSATFREYFMKKRREGQPFNKAVFATAHKLIRVIFAMLTQRTMFKEVCG

SEQ ID NO: 108748 - protein, 415 aa, unidentified
MEDIPKAIVCRYIALDIHKQYCVIAGVDRDGQVVLQVVRVEHEDLEVWLKRNLLSSDWVVIESTTNAWHVYDLLEPLVSRVLVANPIKVKQIACARVKTDKKDTLILARLLAANLVPTVWVPPKHVRELRQLISQRRKLVGMHTQVVNRMHSVSHRHHLGHPRGKRFQEKDMGWREKLEGMERFQLDLDLETKKYLKGQIDRITAELGRMSHEEPWAESMLYLMQIPGFGVVTGMTVLAAIGKIARFETPKQLASYSGLAPGVEQSGLKLRGKGITKEGRRELRWAMVEVAQRAVKADPHWKRLFASLERRMHRNQAIVAIARHLLTVVWSVLTRKTSYHHYSDERIAYKYYTWSWQLDETQRKGLTRPQFVRYYLMRLGIGSELQRVALDPKHPHRLASEAEVLALMPELKPPG

SEQ ID NO: 108749 - protein, 412 aa, unidentified
MSIPEPAAVRVTAGVDWAKEDHVVCVVDEQGEVIERFTVAHDAAGLARMCRRLLKAGVEQVGIERGDGPVVEALLRAGVRLFVIPPGQVKNLRSRYGSAGNKDDRFDAYVLADVVRTDARRLRPMVFDSEATTTLRASVRARRDLVAARVAVGNQLLAHVQGVFPAAATLFSGMHKGVTLSFLERYTTQEQADWLSVKRLGSWLKSVSYRGGVAPEVLYARLTDAPRGVVGSTAATHAVTTRALVGVLRSLNAQIQTLADSITGQLQAHPDAAVFTSLPRSGTVRAARLLAEIGDARGRFPTPDSLACLAGVAPSTRQSGKVKAVVFRWGADKQLRDALCDFAADTRHVHPWAAHLYTEAIARGHDHPHAVRILARAWAGVIWRCWQDNTPYNPAEHRALQQLLQQDQQKAA

SEQ ID NO: 108750 - protein, 420 aa, unidentified
MTPDQKAAFARTFPVHVGVDTGKRFHVLVARGPDGLRRKPMKVLVSREGFGRADAELQALFPDIERSRMLIGLEFAGHHGFTFAHFLASRGYPIMNVLPAHTKRTKELEDNSPLKADAKDAGVICRLVGDGTFVRFPFLETPYAELRVLVSYRHRLAVEATRFKNRLQGLLDLAWPEFVAQFSTLAKHTPIGLLERWPLPQDLLAAHKATVRAYARKISKGKFVTERFERLYTSAQQTIALPQATTERRMEIQGTLARWRLVRKQMLEAEARISELMARLPSAQALLTVPEVSAVCAATILAELGTPGDYAHPRQVLKLAGMNLIEKSSGSSQGRRRQSKRGRPMLRRQLFLLAGRWCQRRGLYRSYYEALLARNGGLKTKAVCAIARKLVPLVLAVLQRGEPFDKTRWQAARHQPALTH

SEQ ID NO: 108751 - protein, 357 aa, unidentified
MDGSKEHPKMTAGLDLGDKYSHLCLIDSQSGEVIEEGRLRTSPAAFRRRFASEQPMRIAIEAGTHSPWVSRVLEECGHEVLVANARKLRLIYANKRKTDEIDAENLARLARLDPKLLYPLRHRGEDSQAHLAIIRSRETLVSARTQLVNHVRGAVKSFGARLPKCPAVSFHNKAPEHIPEALWPALGPILETIGSLTRRIRDYDRQLETISKARYPETELLRQVEGVGPLTALTFVLTLEDPYRFEKSRSVGAYLGLVPAMDQSGDRDPQRRISKEGDEMLRKLLVSSAHYILGPFGSDSDLRRHGEKMASRGAKNAKKRAVVAVARKLAVLLHSLWMSAEVYEPLRNTHRSGGQAA

SEQ ID NO: 108752 - protein, 367 aa, unidentified
MKKVSTVGAKPSKKISQQKLTVGLDLGDRNSWYCVLDESGQIKLEQRVRSNAKALREVFGQLPHSRIALEVGTHSPWISRLLSELGHEVIVANARKVRLIGESRKKDDRLDAQTLARLARIDPGFLSPVKHRSAQAQADLMMIRARAGLVRARTALVNTVRGLAKSYGERLRGCNVRNMNPEKADGLSPELQSALEPLLAGIEELSEQIREYNQRIEKLAQESYPQVALLRQIKGVGTLIALTFLLTLEDPHRFRKSRDVGCYLGLQPGRRNSGQSEPQLHISKEGDPYLRTLLVQGAQHILGPFGVDCDLRRWGLKLAERGGRSGKKRAIVATARKLAVLLHHLWVSGEVYEPLHNSRRTAVAAAA

SEQ ID NO: 108753 - protein, 355 aa, unidentified
MTDAKYIGLDVHQATISVAVLDSTGKLMMESILETKAATILQFFQGLRGSVYVALEEGTCAAWLHDLLQPHVTKVLVCDPRKNSLLKAGNKSDRIDARKLADLLRTGLLSAVYHGDNGLRTLRELARSYLAVTQDLTRVMNRLKALYRSWAIPCAGQQVYAPRYRSEWLGKITAVGVRRRAELYYQQLDALALLHQQVRRDLLAESRKHSAVKLLRQIPLIGPIRAALLIALIQTPHRFRTKRQLWAYSGLALKTYSSGEYRFVEGQLKRSKRLLAIRGLNTNHNHDLKNIFKGAASRAAMVPGPFQEFYAALVARGMKPSMARLTLARKIAAITLLVWKKGVRFDAEHLKPQAA

SEQ ID NO: 108754 - protein, 418 aa, unidentified
MTVTNFTIATVLVAIDISKHRHEVLISIPGKKRRRRLTITNTLEDFERLATTLASYDLPVRIGFEATGNYHRVLAHHLGQAGFELKLVSSVGLARTREALHNSWDKNDPKDAQVILHMLEIGAVQFFHDPLVTGTADIQELSKTHEIVSRSKTELWHRILTHYLPLYFPEAERFHRNSRTDWFLAFLEKYPSPQMITAMSREAFVADAWQVVGRKVSKERLLSDIYATAVGSVGLPVHPDSDAVRMFRLVLAEGRSLVRQRNEIEVRAVELLSDLPDYQLLTTIPGIGPINAMTILAEAGDLRRFRHHRQFLKFCGMDLATVQSGMFRGQSRISKYGNARLRRTLWMAGQTAVLKRTNSFRDKFERYISKDRHNAHLRRKAYTAIAAKMARTVHAVVKHGKPYRPFFEGVSRGGRTSL

SEQ ID NO: 108755 - protein, 408 aa, unidentified
MNSLYVGIDVSSKNNVAYLMKPDGGKHSSFSVQNNLGGAKLLSERIVSALGSMQLSDVVIGLEATSIYGDSLVYALREDGGLVRFQRKIHVLNPKQVRKFKESYPDLPKNDWVDAFVIADHLRFGRIAKEVYMDDYRYKALQTLTRARFDVIQNLTREKQRFANYLFLKCSGMAQDKDIQNTSATTIALMERFETVDDLANADHEKLIAFVAETGRGRFADPAATAKAVQAAARGSYRLPKTVNDTVNQAMSVSIASMRALKEQVKVLEKAIEQQFEIIPNTLTSVPGIGKVYSAGIIAEIGDIHRFDSQASVAKFAGLVWTQHQSGDFEAEHSRMIKSGNRYLRYYLLEAANSVRRCDSEFRRYYDLKFKEVNKYQHKRALALTARKLVRLVFRLLKDNRLYIPPEG

SEQ ID NO: 108756 - protein, 275 aa, unidentified
MTIVAGFDVHRAQITFDALDRETGEVKRGRIAAAPEAVRRWAWRFAGEEVHVAVEACTGWLFVCEALVEAGAIPHLAEPVETSALRGRKRRAKTDREDARWLRTLLCEGRLPEAWIPPAHVREWRTRARLRKTLVDERTTWLQRVQATLFHHGVAGVPDKLLSAQGREFLAALELPDSARERVEVALAMIEALDRQLAPLERELRQLARRQTGCRALMAHYGIGELTAPTILCELGDVTRLSASRKAVRCAGLDIGVHRSDRRSRAGKLTRQGSP

SEQ ID NO: 108757 - protein, 456 aa, unidentified
MSTKQNKHSQNIVRLEALKQINFNAAGIDVGDSEMYVAVPEDADEQFVRSFGTFTRDLVSIAQWLKQCRVTTVAMESTGVYWIPLFEILVEHGLEVLLVDARKIKNVNGRKTDIQDCQWIQQLHTYGLLNGSFIPDQSIRALRDMIRHRANLLRFRASHVQHIQKKLQQMNLKLTNVISDITGTTGMHILRSIAEGKTDPAYLASFRDPHCKKSQHEIELSLEGNYRPEYIFQLQQMLKLYDYYSALIVELDAKTETMYSQLPSKIEPKDHPLKPLKRNAGKQTKNSPAFDLRTHLYRITGVDLIQIDGLNSSTVQDIITDIGTDMSKWKTSKHFCAWLRLAPNNKITGGKVFFSHTPKSKNRANRALRLAAFSLAKSNSALGAFYRRIKSKYGAPLANIATAHKLARIIYKMLTDKVDYVDPGVDYYNNKFKSRFINHLKLKAESFGFQLVPTPV

SEQ ID NO: 108758 - protein, 429 aa, unidentified
MNFRPIAGIDVGKFFSEIAVLSPSNEVVARMKIHHDSSADIERTVELLKKTEKDFASRPFVVMESTGHYHKILFHSLYKAGFEVSVINPIQTDSIKNIGIRKVKNDKVDARKIALLYRFQELKTTNIPDEDIECLRSLCRQYYKLNDELTAYKNRLTGIVDQLMLNFKDVFSNIFSKAAMAVLEEYPTPARILKANRNKLISLIQKNSRRSPKWSTAKYELLVSKARDFASLSIHNSSNIAMLGVYISMIRTLEENLKTILKAIHMLIAEDMAKDIPMLALTLELLQSLPGIGLLTAATILAEIGDFSAFSKPGKLVAYFGIDPSVMQSGEFTGTRNKMSKRGSRLLRRVLFTTALANIRTKRNKKACNPVIMEFYKQKCQSKPKKVALGAVMRKLVCIIFAVLRDRKPYELRSPQEHAQMIAAKHTAA

SEQ ID NO: 108759 - protein, 433 aa, unidentified
MKVKYEDRLKQKVIAITTDTLVVGVDIAKNYQWARFVDFRGIEHGRALKFKNSKGGFETILARIREICKKENFAKAVVGMEPTGHYWKAFANWLEKQEGITVVLVNPYATKQAKELDDNSQTKSDKKDALTIAKLVKDGRYFELYLPHDVYAQLRGLSTTRTGLNKRKNAIKNTITAVMDEYFPEYEEVFKCPLSGKASRHILKTCPFPKLILGLGEDGVTDEIKRAVKKTVGRKKAVQPVEAAKDSIGVDYGEEAARLKLRLMLEELELLEKQTEELERQMEDTLRQTDYADLLLSIKGIGIVTLATCLGELGDPTRFDDPRQMSRMAGYNLVEDSSGKNKSGTKISKRGRKNLRGVLYQMALTMVATNDEMKQLYHYLKTREKAPLRKMQALIVVSKKILTLIHTLAKKKESYDPEKVFGHVRREQLKAAA

SEQ ID NO: 108760 - protein, 387 aa, unidentified
MSQVSDLSRSLAPFDQNTTLTVVVELSEASWLVAGMIPGIERQPVKKQDPDPVALLRLLERWRLEAIKAGKTIGQIALAFEAGRDGFWLARWLQARNIAAHVVHSTSVAVSREHRRAKTDRLDTAMLMRVFVGWLRGERGHCRMVAIPTLEQEDAKRPSRERESLVGERTRIINRMKAALARLGIRGFNPALRKAPQRLAALRTPEGVPIPPNTLDEFRRDMDRLAVVREQIDGIERARLARLENAPAAGPHAMVRLLARVVGVGVETADMLVQEVLSRNLRDRRAVARYVGLTGSPDESGKRRREKGLAKAGNPRARRGLIQLAWRFLRFQSGSALAQWYRARTDGPKGARKTTMIVALARKLLIALWRMVTIGDIPVGVALRPTT

SEQ ID NO: 108761 - protein, 307 aa, unidentified
MIIPIGIDVSKRKLDIYFDNKLTTINNDEPSIKKYFSAVSKNSRIVMEATGKYHRLVHRTLMQLGLSVMVVNPYQSRHFARAMNVICKTDKVDAKILALFAEKMEFKPLAIASEQELNLQDLSRHLDDLQKIKKELGSRHRDSNGFIADSLKQLIDKVGKEIKETEKELEDSINQESHMKEKMDLLVTIPGVGKKLAISLISYMKELGTVTKREAAALSGLAPINNDSGTMQGRRRIRGGRHDIRSHMYMPIVGAATMHNKRLIQFYNHLVDAGKPKKVALTACMRKLIVWANAILANKQPWNEHSC

SEQ ID NO: 108762 - protein, 326 aa, unidentified
MTKHSMVCAGIDTGKDKLDAALEKCLERLQVDNTPAGHRALVDWLRRHRVRRVGIEASGGYEQAVVAELRRNGFVVIVFQPAQVRAYAKFHLQRAKNDKIDAALIAACTAAAQKIHAPPDPRLAPFAEHLTMIDQISEDIARHKNRLESCRDASIRQGWKEEIDRLKKRKRAALKALVVAIGQHRDLAERLALINTIDGVGLPTAVAILVRMPEIGRLTREQVAALAGLAPFDDDSGKRVGERHIEGGRERLRGAVYAAALPASMRWNAQLIALYQRLTAAGKLHKVALVACARKLLIFVNTVVARGTPWERHQNQRPGAHSLAVA

SEQ ID NO: 108763 - protein, 394 aa, unidentified
MPELLVGIDVAKDTSSAQGIDSNDKGRFSLTFAMDSEGFMQLWKAITQHSEDLSKVLVAVESTACYHINLYSFLTAKGVPTVVINPLLIANFAKMSLRKTKTDKKDAMTIAQFLLVHQDAISQLSLSQDLQDFRDIARERESVCNMLSAHKVEVKRLLQSTFPELERIGNLSTRVMLEFIAAFPSARLVKMAKPKAIQKILQRKGVGTRLTYTAEDLIQAAKQSIATISPAKEFILQGKVRTLQHLKERYDELTKILTEYCKSSMLEDFEIITSIAGISKGTATTFLAEIGCIGNFASHKKLIAFAGIDPTVYQSGKFEGSSRISKRGNRHLRRVIWLMTTHVIEHNTTFRAYYMKKCSEGQPFKKAVFATAHKLIRLIFAMLTQRTMFREVCT

SEQ ID NO: 108764 - protein, 374 aa, unidentified
MSDCTTYIAMDTHKKEHKVALHYPGDEQIVRLVVKNTARDIKKMVTRVTKQAPADVVFCYEAGVCGFTLKRRIEVLGCKCAVIAPSLTPIKPGDRVKTDRRDAAKLLAMLMAGLLTEVHAPDQKQEAARELTRCRQAAQENLKRVRHQLLKFLTRHGYVYTDGEHWTQKHLRWLRSLEFEQPLLRDVFDSYFTEMQHCIQRLDSLDKQVEQLAQSEPYKETVGLLRCFHGIDTLTAIGIITEIFDFGRFSSPGELMSYLGLTPSESSSGEKQNKGPITKTGNKRVRRLLIEAAWHYRHPYIARSKALRQRRKDQPQWVIDIADRAGQRLRKRYWHLINSGKIPCKATVAIARELAGFIWSVFREYQIRNQEKAA

SEQ ID NO: 108765 - protein, 387 aa, unidentified
MQASTVVTPTAGHCGTIFVAIELSQKSWLVTLHSPDKDKISRHRLEGGDHAGLLALIGRVRERAARALGAVPAVVSCYEAGYDGFWLHRLLMAAGITNYVFDPASIAVDQRARRVKTDRIDGEKMLRTLMAYLRGEPQVVRVVRVPAPEQEDVRRASRERGRLIKEQTAHTTRIKALLRLLGMAVGNPRRRDWLSWLATQRDWQGQAVPPRILSEIRHEHARLMLVREQLEGLAQASAQADPTPPAIQMTERSDLLLRLKCLGPAFTTTLTNEVFYKDFRNRREVASYFGLTPSPWQSGGIDRDQGISKAGNPRARCAAIELSWLWLRHQPESSLTRWFRSRTQNNASKRNKRIAIVALARKLMVALWRYLTTGLVPEGALLKAVKA

SEQ ID NO: 108766 - protein, 430 aa, unidentified
MEIVYPRACGVDVHKSFIVAVICISESIKPRYIKKRFSTFNNQLIQFRDWLIENNCHNVCMESTGKYYIPVYNALEGHIPNVVVANPKWVKAIKGEKDDNKDAKWIADLFKFGIVRSSYIPEKDIRILREFTRYQYKLVNIRSSEKNRFQNALTVGNCKLDLVFTDVFGKSASSIVDTILSDEPYTSEDILSKVHGRCKASSDDILSAVEGTNLNQYQKVRIKIVQKHMEYVDSLLDEVQHHIDMMVESYENYIQLLMTIPGVNRKSAIIIISELGIDVSQWSSAHKLAVWAGLAPGHNESAGKKKSVKISKAGIYLKPCLVQVAHAAVKDKTCSYYAEKFGRISKRRGKKRAIIAIARKILVAIYHILKTGEVFNPSDMADVETTKEQRIAYITNNFRNAFNQLSRTGLSEEEILSIIIKKSNNSPQTE

SEQ ID NO: 108767 - protein, 389 aa, unidentified
MYFVGIDISKYKHDCCIITDTGHVIFTPFTIKNNYDGFEELHSVLQSLDNPGEIRIGFESTGHYALNLKLFLEKAHYSFMEFNPVLLAKFSKSQTLRRTKTDAIDCTSIARWLMTVDYKPHPIGFYHTYSIKSLTRLRDSLVKQRSFYIVKITNVLDHIFPEFKPFLNNKFGATALYLLENYGTAEKMAHMNSLSYDNLRRISRGRFSMQKFLKLKELAKNTVGEDNEIFVTQLNSLLALYKQTAYEVDSLEKQIFTLIEEVKPRSLTIPGIGALSSAVIYAEYGDLVKFDSPSQMLSFAGLEPGYYQSGISEHGGHMVKRGSSHLRYTLMNLCIPLIQYNMVFAEYYAKKRSEGKTHRVACSHLVKKLIRVIFTLEKNGIDFDPNKLR

SEQ ID NO: 108768 - protein, 405 aa, unidentified
MLVGIDWADAEHTYCLMDDTGATLATRTIDHTAEGLERFMTLVRARAQDPQDILVALETSQGPLVGALLDQQFTVYAINPKAVDRHRDRFRVAGAKSDLRDAWVLANLLRTDRMLYRPLLPDSEVAQELRALTRDRAELVQTRTMLSNQLTSCLKAYFPEFLTLFADPDRPVALALLQAFPTREALQAVSPTRLEAFLRRRHCPHSHDRAVEIHTQMQARGFHIAAPLVRAKARLAGTLVSQLQTLAEHLEAYDREIQRVLRLHPDGELYHSLPGAGDFLAARMVGELGDNRDRYRDASSAQCEAGTAPVTRKSATVRTVHVRRACSQPLRSTMWQFAFASKRHCEWAQAYYLRARKRGKKHAEAVRMLGNVWLRIIIAMRRNRRPYDEALFLSRSSHPSLALCP

SEQ ID NO: 108769 - protein, 346 aa, unidentified
MKFYTETHEHFCGIDLHTKTMYLCILNESGEIVLHLNIPARPKPFLKAIEPFRTDVVIGVECMFSWYWLADLCIQENIKFILGHALYMKAIHGGKAKSDKIDSEKIARLIKGGTFPLAYVYPPELRPTRDLLRRRRTIVRMRSEMLAHIKLTHYQYNAEFFQKNINKKGNREGIAEQFSDPTIRKNIELDLSVADHLHAEIIQLENYIIRKTKAFDPRTFYRLQTVPGIGPVLALTILYEIGDIDRFPTVQSFASYARLVKCSKESAGKLYGYGGGKIGNPQLKWAFSEAMCLFMRESDRAKAFVAKLEKKHGKGKAMSILTHKLGRAIYFVMRRKDAFDEKYFFS

SEQ ID NO: 108770 - protein, 414 aa, unidentified
MLKIVYRICCGMDVHKSFVVACIASTNEQGVTTYKRKRFSTFTGDLRRCAAWLAQNNCKDVCMESTGKYWIPIYNVLESSCNIVLAHPKYVKAIRGKKTDKRDAKWIADIFKHDLVAGSFIPPADIRQLRDLVRYRWKLTNFTTGEKNRAQNCLTVSNFKLDDVFSNVFGKAASAITTRILENPAEKITDVSGFRTKGMKATDEQVLAAVDGEMCEEQAEKLRIIRFHMDSLERCKLNLESLILSTAEKYLPQLNLVMSVPGIQSFAAIGIISEIGVDMSVFPTSKHLCSWAGLTPQNNESAGKKKTTRIGRAGAYIKPLLVQCALCAIRAKQFPEVRNRYLALKKRRGHKKAIIAIARMLLTAIYNILKKNEPYNSELYRKSDRPPAHREVSVEEAIFILQRQGYLVAAPLTV

SEQ ID NO: 108771 - protein, 315 aa, unidentified
MQSGKTFKDFIGIDVSKDKLDSFDSRTGEIIQVKNSVEEISAFIQTLTFSEELLVVVDLTGGYEDICVKSFYKAGFHVHRAEGRRVKAFLRAMNQKAKTDMIDAIGLAKYGEKMQENLILYCPPKDAIKAPVERLCDLKNLLQAERNRYQAPAQKDSILDSIRRHIEFLEHEISELEKAVRRIIAADEVMVKQQEVITSVVGVGEKSSMLLLAYLPELGRINRRKIAALAGLAPFARDSGKISGYRTTKGRGGRPQVKKALFICALVAIKHDPKMRCFYERLCSNGKKKLVAITAVMRKILITINARAKFLLQVG

SEQ ID NO: 108772 - protein, 343 aa, unidentified
MDHFAGLDVSVKDTSVCIVDDTGRIVREVKVASEPDALLAVLTNPSYHFKRIGLEAGPLSQWLFSALAEASLPVICVETRHMRAVLKAQINKTDRNDARGIAQMMRVGLYRPVHVKTLRSQKLRVLLTHRKLLQSKAIAVDNDLRATLRNFGLKVGVVGTAKFEARIKELVENLPDLTILIEPLLIVRRAIREQIGVLHRRVLAVVRDDDVCRRLMTVPGVGPVVALTYRVTVDVPARFRKSKSVGAVFGLTCAKHQSGENDRPGAISRCGDEMMRMMLYEAAQILLVRSTKWSWLKAWAMKIARHRGMKKAIVALARRLAVIMHRIWVDGTEFRWTREAAAA

SEQ ID NO: 108773 - protein, 348 aa, unidentified
MLIIGCDYHPGFQQIAFVDTETGELGESRLTHTEEAEQFYRTLKERRVRVGMEASGHARWFERLLTELQYELWIGDAAEIRTKRVRKQKTDRQDAQLLLKLLMEDRFPRIWVPDAENRDLRQLLWHRHRLVQMRTRIMNQLHVVALNEGVRRKKALWRPAGRSELESLVLAPWALRRRRDLLDLFDQLTPKIRDLTRALEEEVEKRPIARRLMTHPGVGVLTALAFELVIGTPERFGCGKQIASYVGLVPSEESSGDRRRLGLISKQGNALLRFLLVEAAQVTARSQPQWRSKFFHLALRRGRKIAKVAMARKLAVHLYWMWRQGRDYGPFEKLGSHAGQPGNLHGVQ

SEQ ID NO: 108774 - protein, 451 aa, unidentified
MPTKRQKRVQDLPVLHRDAAGIDIGANEVFVAVPADRDPEPVRSFATFTRDLHALADWLQRCHIESVAMESTSVYWIPLYQILENRGIEVFLVNAQHVKNVPGRKTDVSDCQWLQYLHSVGLLRASFRPPGTICALRSLWRHRGSLIQMAAEHVLHIQKALDQMNLQVHRVLSDITGLSGLRILDAILGGERDPVVLARLCHSRVRSSRDIVAKSLDGDYRAEHVFELRQSLAGYRYYQGLISEVDEEIQRHLSEFKTAADIDSNPPVRTKKRALQRQHYDPRNFDLRSELYRIFGVDLTDVPGISAVTAHTILCEIGTDVSQFRNASAFASWMGLCPERQISGGRVLYTHSRHVRNRVALALRMGAHSLHHANNYLGEFFRRISRRLGKPQAVTATAHKLARIVFHLLSTREPYNESVFHSFDEQALKRAEARLRKHAAQLGFQVLPANT

SEQ ID NO: 108775 - protein, 343 aa, unidentified
MYYIGLDVHKKTISYCVKDAAGQVHGEGKIRSTRQELKAWVNALPEPRMIAMEATIFTGWIYDCLLPHAEKVKVAHPLMLRAIAAAKRKNDRIDAAKIADCLRCDFLPECHMASTAIRDRRRVLRYRNLVVKQSVQMKNRISGLLMETGVSYNKSRLHQRGYFKDLMWMHPEVSDSIRPLLKFCRERIEHSQELDHRLVGSLERDPLLKVRLERLKTVPGVGSITALTWALEIGDYTRFTSTKEAVSYCGLCGDEKSSAEKVMRMPISKQRNKHIQRVLIEAAKLAVRRNHELALVYDKELQRGNPNRATLAVARKLVAYLLAVDRRQQNFMPAEEFRSSSAA

SEQ ID NO: 108776 - protein, 347 aa, unidentified
MNYYAGIDVSLECSSVCVVDGTGKIAREAKVASEPEALIAWFGSLGLSLERIGLEAGPLSQWLYAALREAGLAVELLETRHVKAALSAMPVKTDRNDARGIAQLMRLKWFRPVHCKSAEAQEIRALLTARKLVQSRLYDVEMSLRGILRGFGLKVGRTTPKRFAERIRELVVGHATLEAVGAALLSVHAVLLREFNGFEKRVRAIARSDGRVRLLMSTPGVGAIVGLTYISAIDDPARFKSSKSVGAHFGLTPTKYQSGETDVTGRISKLGDSSVRTALYEAANVILTRPIKGGGLKSWAMKLAKRAGMKKAKVALARKLAVILHRMLADASKFIAEKASGCVRVAA

SEQ ID NO: 108777 - protein, 343 aa, unidentified
MQTITTIGLDIAKSVFQVHGVDAAGNVIIRRKLKRRYVVAFFQKLPPCLVGMEACATSHHWSRELQALGHTVRLMPPAYVKPYVKRQKNDAADAEAICEAVTRSNMRFVQTKTPEQQSCLMLHRTRHLFIRQQTAVINSIRAYLAEFGIVARVGRNGVEDLLDVIADPSDGRVPELARACLIALGAQLRMLKTQILQFDRHIMAWHRSSEMSKRLDEIPGVGPALATALVGSVADPRAFRSARHFSAWIGLVPKQHSSGGKDKLGSISKQGDRYLRSLFTTGALAVIRYAKIHGTKHRPWLTALLARRPTKVAAIALANKIARMAWAMMIKGERYKEPAALAA

SEQ ID NO: 108778 - protein, 413 aa, unidentified
MYFSGIDVAKKQHEACVIDDQGTTVLAMPVPNTQPGAARFLAAVRKRVGDDPHAVAFCLEATGHYWLSLYCFLTEQGYRVHVINPIQSDAIRNLYIRKSKTDRKDAFILADLLRMNQTEETFMASEAALKLQTLSRTRFAFVNQVSALKQRAIGVLDRIFPEYASCFSDVFIKTSRELLKNHSTPDEIAALDLNELTRFLESHSRGRLGQGHAERIQELARGTFGIGLAVDAFALELRLILNQIEFIEAQISDLESAIRLTMEELQSQHAPSSLEGEHHHVIETIPGIGTILAAAIIGEIGDIHRFSSARKLVAYAGIDATVRESGKFTGSRNRMSKRGSPELRRAIWLAAVSARRFNPELSAFYEAKRQEGKHPLVATGAVARRLVHLIYSVWTRNQPYDSDYKWKPAGSVD

SEQ ID NO: 108779 - protein, 347 aa, unidentified
MVTVGSDSHKRSHTLAAVDSNGKRLGSCTVAANSAGHLEALRWAGQWQERKWALEDCRHVSRRLEADLLRAGEVVLRVPPRLAAGARESGRERGKSDAIDGLAVARAALREPSLPVAKLEGREREAKLLLDHREDLVGERTRMQNRLRWHLHELEPGFEVAAGGLDRKRVLAKVTAQLERHRGVVAELARDLVGRIGNLTVDINELERRLRELMAELSPRLLNLEGCAALSAAKAVGETADVSRFRSSSAYAMNNGSAPIPVSSGNRQRFRLNPGGNRQLNAALHRIAVTQLRGNGAGRAYFERRLAAGATRREAMRSLRRRISDEVYRRLKQDFLERATCVSAEAA

SEQ ID NO: 108780 - protein, 414 aa, unidentified
MDILHPCCAGLDVHKDTVVACVRRLRPDHKASAQQTCTYPTTTSALGRLADWLAAEGVTHVAMESTGVYWRPVWNLLEGRFTVLLVNARHIKQVPGRKTDVKDSAWIAQLLQHGLLRGSFVPPAVQRELRELTRQRRQVVQGRTAVANRVQKVLEDANIKLAGVATDILGVSGRAMLEALVAGRADAAALAELARGRLRAKIPALREALHGRVTDHHRFLLRALLDQVDQHEAQAERLSRRIDVTLPPAYREARARLCTIPGVQEHIAECVLAEVGVNMAVFPTAGHLASWAGLCPGLKESAGKRQSGRARHGNRWLRTILVQAAWAASHTKDTYLAAQFHRLVGRRGKKRALLAVAHTQLVIVYHLLAEGTTYRELGAGYFDRLDADRAARKLVYRLEQLGHKVTLAPRDPGA

SEQ ID NO: 108781 - protein, 407 aa, unidentified
MPRTSRAVIGGVDTHKDVHVAAALDDHGVLLAATSFPTTSAGYENLRRWRAGFGPLQRVGVEGTGSYGAGLTRHLRAAGIDVVEINRPNRQLRRRRGKSDTVDAEAAARSVLAGQAAGIPKSSTGPVEGLRALRVARRSAVKARTQAGNQIRDVIISAPQELREQLGRLSLGAQVARAATWRPGPASDLLQATKRSLRHLARRHRALSTEITELDRDIAGLCAHTNPALLATDGVGPEVASTLLVAAGDNPDRMHSEAAFAALCGASPVEASSGKTIRHRLNRGGNREANNALWRIAMVRLAHHHPPTATYVRRRREQGKTDREILRCLKRYIAREIFNVLTNPNEVPRATELRQHRLAAGISLTAAANQLGTTAIRLSRLERGILHAAELATTYQNWLNAQPPHAA

SEQ ID NO: 108782 - protein, 346 aa, unidentified
MGMDISVLGVDLGKNVCSVVGLDASGAIVMRRKVRRETLIALAEKLAPCVVGMEACCGAHHLGRVFAAHGHDVRLMSPEYVHPYIKAQKNDDRDAEGIAEAATRPTMRFVELKSQDQLDMQTLHRSRDRLVGERTALINQLRAILLERGMVAPQGKRKLEQFLSVLMDEHGGEGLSPRMTLLVADARAQWAELDRRIAAFDAEFVRWVKDNEEACRLTTIPGIGAIVASALIAAVGQAESFDRGRDLAAWLGLVPRQFTTGGRPKLLGISKRGNKYLRRQLIHGARAALPYVVKRDTPLGRWAKDLSSRAHRNVAVVAFANKLARIAWAVLRRQERFAATGMPMAA

SEQ ID NO: 108783 - protein, 414 aa, unidentified
MQVVHERCAGLDVHKKSITVCRLVPNGEGGWKRETRTFDTKTPDLLELSDWLKQECVTHVAMESTGVYWKPVFNILESSFTVLVVNAKHIKHVPGRKTDVRDAEWIAELLQHGLLKASFIPDEPQRDMRELVRYRTHLIQERTREVNRVHKALEDANIKLSSVATDIMGVSGREMMQAIIAGKDDPAALAELAKGRMRNKIDELEKALTGHVRRSHRLLLRMHLEHIDELNERITELDGEIGNLMRPFDQEDLVERLDAITGVGKQTIEVVIAEIGTDMSRFPSHRHLASWAGLAPGKNESAGRNRSARTPKGNQYLRTALVEAALAAGRSKGTYLGEQYRRLARRRGKKRAAVAVAHSILVIMYHMIQDGTEYMERGSTYFDNLNPQRTQKWLVRRLEQLGFQVSLEPIAAAA

SEQ ID NO: 108784 - protein, 429 aa, unidentified
MEEVDDAELVVERIAALDLGKAGLEACVRVPHTHRPGRRMQELRGYGTTTAQLLEMVAWLGQWGVQRVVMESTSTYWKGVYYLLEAEGFECWLVNAREVKNVPGRAKTDRADAIWLAKVAERGMCRPSLVHPPEIRRLRDLTRYRRALVQDRTREQQRIEKLLEDAQIKISSVLSELHGVTARAMMEALIAGQRDPRALAQLAKGRARNKTAQLEEALRGFFTDHHAAILRMMLDNTDRISAQIATLDARIQEEIGPFSGPAARLVEIPGVDAVAAAELIAEIGVDMTRFPSDAHLVSWAKFCPQTHESAGKSRSKGRGRGNPWLAGTLGRIAFANSRAETFLGARYRRLARRRGKQKAIVATGNSVLTVVYHLLSNPEATFCDLGPGYYESRINKHRRARDLATQLQALTGQHIIIRDGKAVITDAAA

SEQ ID NO: 108785 - protein, 453 aa, unidentified
MEREVKRLEEFRRLRKEIRSSQDHLVVGIDISKDVHNALMRTVSGKTLYRRLTFNNTREGFETLVLQVEAVGVQHGLKEVVFGMEPTANYHKPLGEFLINQEHQVVLVSPEAAKQNRSLLDGRWNKHDGKDCANVADLICQGKCLYYEYPSSELRDLRNLLSLNRKLKKLEQGLRLRIRNHLVAQYFPELDQYCHWGANEGLAMVRWCLDPAVMAALSDIELMKRLGTEGKTIAQRRRLSALKEKAPSSIGCQFGSSVQFEGQSVVKLLKEVRQGVSDTQEQIEQVCQKFKEYSFLLSIPGFGPTLSAMVLGAIGNPWRFQNGAQVLKMVGLDLSASQSGKSQGAPIVSKKGKAEIRYALYQAAMVASSRDKHFVAYFTEQLRGREKEKGIKTKKRVKLAAKMLMIAWTLMKKQERFDPKYLSTQIEPIAAGKSAKNGNGGIPQVQPSANHRL

SEQ ID NO: 108786 - protein, 378 aa, unidentified
MTKIIRIGMDTSKSVFVLHGVDAAEQSVLRRKLRRKQVLEFFAKLEPTKVGLEACGAAHYWARELRALGHEVVLVPPQYVKPYVKRNKNDAADAEAICEAMSRPTMRFVPVKTAEQQAALMLAGTRDGLIRRRTQLSNTIRGYAAEFGLTAAKGLDKIEPLLGRVAEAALPKLAMELFATYAREYARLKVEITKIEARLMAWHKHNELSQRLEEVPGVGPIGASLAVMKVPDPHAFRCGRDFSAWLGTTPKDHSTAGKTRLGVITRAGDEALRSVLVVGATAVIQKVKQGKGQPSLWLVELLRRKPPKLAAIALANKNARIIWKLMVSGERYNPARVLMAKGDGGKGRGAARCGGEAAPRPSPPSPTTQGRIAVLTAG

SEQ ID NO: 108787 - protein, 409 aa, unidentified
MQVVHEVCCGLDVHKKGVTACVLWASGRRRQTRAFGTFTRELLELGDWLRACGVTHVAMESTGVYWKPVWNLLEGLFEVLLVNAQHIKAVPGRKTDQKDSEWIADLLQHGLLRASFVPPTPIRELRDLTRYRASLAQEINRIANRIQKVLEDANIKLASVATDTLGASGRAMLEAMVKGEQDSQRLAEMAQGKLRNKIPELQEALQGRVSRHHRFLLRELLDHLYFVESKMQRVEQEVAERLGPFQSEVARLCTIPGVDRVTAWGLLAEIGLSMKQFPDAQHLASWAGLCPGSHESAGKRKSGKIRKGSLWLRRCLCQGAWAVSTKKNNYLSALYRRLAARRGSKRATIAVAHKLLVIAYHILRDGTCYSDLGADYFDRLNPEGLRRRLTKRLEGLGFKVTLEPLPQVA

SEQ ID NO: 108788 - protein, 408 aa, unidentified
MYNAVGIDASKRKSTITIIQPAGVVIRKPFDVLHTSDELNTLVTYLKSLEGETRAVIECTGRYHEPVVKSLSEAGIFISAVNPKLIKGQKQNTLRKVKSDPADARKIAKYALDNWAELREYSSMDTTREQLKTLNSQFTFFMKQKVAAKTNLISLLDNTYPGVNKLFDSPTRDDGSEKWVDYAYSFWHVDCVRKIGLKSFTERYEAFCKKHHYNYQKNKPALLFEESKQLVAVFPKEKSYKLLIQQSIQQLRLASEHIEIIRKEMNELASTLPEYETVMSMYGVGETYGPQLIAEIGDVSRFTHREAITAFAGVDPGVNESGQFKQRSNRASKNGSTRLRKTLFQVMSTYLQNKPVNEPVYQFLDRKRAEGKPYLVYMTAGANKFLRIYYGKVKECLRNLEQSQIEES

SEQ ID NO: 108789 - protein, 412 aa, unidentified
MKQIRQRVGGLDIHRDSVVACTRVTAPDGSIEVAKGRFKTTQAGLAELTAFLMDAGVDTVAMEATGIYWRPIYYALEGLFAELWLCNAQHVKNVPGRKTDLSDAEWLADVAAHGMVRPSFVPPPDIREVRELTRYRKTQVDARAKEIQRLEKALQDAGVKITSVASSVWSKSSRAMIEAMIAGERDSVVLADMAKGVMRNKTDRLEEALEGNFGAHHAILCRQVIDHLDFLDASIATLSTEICARLLPFEPQVTLLTSIPGISVTTAQVIVAETGADMSRFPTAGHLCAWAGVAPASYESAGKKRPAGTRKGAPWLRRTLIEAARAGARTKGSYYSALYARIARRRGPNKAVVAVANSMLETAWHLLSTGALYQDPGADYFERRHDPAIEAKRLQRRIEALGFTVTIEEKAA

SEQ ID NO: 108790 - protein, 375 aa, unidentified
MKEKVRFLGLDVHAETIAVAVAEPDGSLRSLGTIANRGESIRKLVKKLGPVEQLRACYEAGPTGYVLYWQLSELGVDCKVIAPTLVPVKAGDRVKTDRRDAERLARSYRSDDLTAVWVPDEGSEALRDLVRAREAAKQDQLRARHRLSKFLLRTGQRPPQGMKAWTQAYMTWVGQIRFTQMAQESTRLDYVHEVEHMGERVVRLEQAIEEAVKLASPAIQEVVKGLQALRGIAKISAVTIAAELGNISRFEGARQLMGYSGVVPSEDSSGKRMKRGSITKTGNAHLRRIVVEAAWSYRLRPGVGPALRKRQQGVAEEIKEIAWKAQHRLHKRYQRLEAAGKDRRKIITAVGRELLGFVWAIGIKAEAATSQRMAA

SEQ ID NO: 108791 - protein, 381 aa, unidentified
MVYVGMDVHKESYSLCCFAMGDGSFFGETKIDARPELVKKYLEEMSKSAAVGKEDAKFICAYEAGCLGFSLQKALAKLGIECKIIAPTTLAKAPGSNAKKTDRKDARMLARNLAYGTCSFVHIPDEEDQETREYIRMRCAHKRELKRIKQCILSFCLRNGHKYEGRTYWTGSHVSWMKGLPFAEALKDILLEYLDTYEKLTDKLERLDCELLRISDKPRYKEATDRLACLKGITKQSALTIVSEIGDFHRFAAPSGYCSYLGLAPGESSSGEKTARLGITKQGNSIVRTLLVESSQSIVRGARGHKSKRLKSRQLGQKADIISYADRAADRLMLKYDSLAARLVPHNKAIAAVARELACFIWGIMTGNTQERPQAKKRCAA

SEQ ID NO: 108792 - protein, 352 aa, unidentified
MERYIGLDVHLQSCTLVVLGPSGRRLSSTVIETNGRQLIQAVKQVPGEKHLCLEEGTQSAWVYELLEPEVEDLAVVMPPKRQGTKSDRLDAWDLANQLRIGAAQRRVYKHQGPFRGLRQAVHWHLMITSDVVRAKNRLKAIYRSRGLHKAGDELYRAETREAWVEKLPVAHQTVARALGEELDGLEELREEAEKWLRVEGHQHPDTRLVATAPGIGPIRAAQIVATVVTPHRFRTKRQFWSYCGLAVTTHASAEYCRAGSGALRRWRHPRTVGLNSNRQPLLKSVFKGAAHQIVTHMATHPLAQQYCKAVEGGADPAVAKVAVARRVAAAVLSMWKHGEVYDPAKHQLRPSA

SEQ ID NO: 108793 - protein, 413 aa, unidentified
MEIVVPVCCGLDVHKASVAACLRRVGPTGRLHQEARRFGTMTADLLALGDWLVAGGCTHVAMESTGVYWKPVFNLLEGRVPHVWVVNARHVKAVPGRKTDQKDAEWLAQLLQHGLLKPSFVPPAPVRALREVTRYRSQCVAARADEANRIQKLLEAANLKLAAVATDILGVSGRAILAALVRGETDATVLAGLAKGRLRRKQAPLLAALAGRITPVQRALLGTQLTHVEFLDHTLAALDVQVATLLAPHAAALARLDTIPGVDRRTAEVLLAELGPDMTVFPSAEACAAWAGACPGLNETGGKRRSGKRRQGSPWLHTALVQAAWAASHTKTYLGAQYHRFARRLGVPKKAVVAVAHTLLVIAYHILKEETTYRELGHDYFSRQNTAQLQQRLIRRLAALGLRVTVEPLAAAA

SEQ ID NO: 108794 - protein, 372 aa, unidentified
MKEDSVIFIGLDTSKLKISVAVADGERNGEVRFFGDISSEPASVASMVNKLSKRGAKLHFCYEAGPTGYGLYRQIVELGHDCVVVAPSLVPKRAGDRVKTNRRDAVSLARLHRAGELTAVWVPDEGHEAIRDLVRAREAANGALKQARQQLQSFLLRHGRIYTGRTPWTRAHTRWLARQTFDHPAHHILLAEYCQAIEDAGVRLDRLTKLITETAASWSMAPVVAAYQAMRGVAYMIAVTFVVEIGDVRRFDNPRQLMAYLGLVPSESSTGERVKRGGITKAGNTRARRVLIEGAWTYRFPARVSPKIQARLKGLPRTVREIAWKGQVRLCARYRKLMAAGKPKVVAVTAIAREMAAFLWAIGQEVAPTARG

SEQ ID NO: 108795 - protein, 415 aa, unidentified
MALKIVYKICCGIDVHKTFVVACIASTNDKGVTSYESHRFSTYTSGLKTLLQWLLDRNCKDVCMESTGKYWIPVYNILEKDCSIVLAHPKYVKAIRGKKTDKKDAKWIADLFKHDLVAGSFMPPAGIRQLRDLMRYRFKLTCFKSSEKNRLQNCLTVSNIQLGNVVSDTFGKSAQAILDKILENPADTSFDLEPLVFKSLKKKLPELRDAIDGYITPEQAGKLKVIKSHYENLEARKAELEELILALATPYQQELAILQTAPGISSDFTAIGIISEIGTNMEAFPSAKHLCSWAGLTPTNNESAGKKKSVRVSKAGCYIKPLLVQCANAVVKSNKHPEIRNRYLRIKKRRGHKKAIIAIARMLLTALYYMLKNGENYNAELYRKSDLPPVDREITVEQALMIARNQGYKIKSATA

SEQ ID NO: 108796 - protein, 355 aa, unidentified
MKYYTSTTEFNCGIDLHAHQMYICLMDRQGNKLVHTNIRNNDFEFFLKLVEPYRHDLTVCAECMFGWYWLADACQAAGLTFVLAHALYLKAIHGGKNKNDRIDSEKIAHLLRTNLIPPAYVYPADKRPLRALLRQRTYFVWQRSDLLARIQSHQLAHNRPVLRQSRPNRDPWEQRLLAHEDHPVRQLALQNEMAMIRHFDAQISALEEQLHRLTKESAPRDYALLQSVPGIGEHLGMTILYEIGDISRFPTVKDFLSYCRLVKGTVASAGKIKGLRGAKLGNPYLRWSFGEAAVIAKRDHHLIAPMAQRLEAKMNGNKFKANTVLAIKLARAVYFMLKNHTVFDPERLAAVMMKN

SEQ ID NO: 108797 - protein, 340 aa, unidentified
MRVIIGIDPHKASHTAVAIGCDEQQLAEIRVRATCQQTAKLLAWAEPLGERTWAVESAGGLGYLLSQQLVEAGEHVLDVPATLASRVRVLGTGRSNKNDPNDALAVAIAALRSPGLRSVEPANHGEVLRLLGKRNHDIGRLRNIVVSRLHAALANLSPGGIAKELNASDAVRLLGDFNPKTAVEQTRYDLALELLDDVRRLDVQLKESHKRIKTAVQASGTTLTELYGVGPILACELIGYTGDVRRFTTRDKFASYAGVAPIELSSGGRIVHRLSRRGNRQLNHAIHMVAICQIRQTNSEGRAYFERKVAEGKTKREAIRSLKRHVANAVYRQLLVDTNK

SEQ ID NO: 108798 - protein, 420 aa, unidentified
MDQNTETWSTRAAFVGLDWARDHHDVVVVDREGRIVEDFRFEDTAEGWQLLRKKLSAYPHPAVVIETSSGATVERLLEGGYAVYPVNPKAAKRYRERKAPSGTKTDRLDAWSLADALRLDGHTWRALKPDDPLTVELRLLCRDEIALIEQRTAFVCQLRAALGEYYPLVLEAFDDWTLPSSWAFVEAFPTPEVLVKAGKRKWEKFLHAHKLYRPETYEKRLGLFAQAQTFCGGPAMTKAKSMLAVAVAGQLRVLQSHLDKFRARIQELFQQHPDHELFESLPGTGEKLAPRLLAELGDDRERFDSPEALQCHGGTAPVSFQSGQVNKVRFRKACHKILRHTVHLWANLSRAKCPWAEAYYRKKREQGQSHACALRCLGQRWFKILWKMWQTRKPYDAELHQRNQVRHGSWVIALTAPQAT

SEQ ID NO: 108799 - protein, 364 aa, unidentified
MKIVGCDLHARQQSIAMVDTETGEFTEKRLMHEGNAVRDFYASLEGPVVVGIEATGAMQWFLELLEELGIKCRVGHPAKIRAAETRKQKHDRRDAEVILDLLVMKDRFPDIWMPSTEQRDLRTLLRDRHQWVKMRTRLQHTLQAIALNHALREGRALWTAAGQGALQGLALPPYTDQRRDELLSLYTQLEKRIQQLDKQVETEAQQRPRARRLLTHPGVGPVTALATEVFLGDPTRFATANQVASYVGMIPCEHSSGKKQRLGKLTKEGNSLLRYLWVEATLHAVIKDAELKRFYRRKLIQKGMGKARIAAARKLGIRLWIMMRDQIDYEQFCRRGRLRQKGKAHAGMPDFNSGPARAVTGLTE

SEQ ID NO: 108800 - protein, 296 aa, unidentified
MNETTTIGLDIAKQVFQVHGVAVDGTVTVKRQLRRSEVIRFFDRLPRCRVGLEACGGAHFWARELTALGHDVRLIPASYVKPYVKRGKTDAIDAEAICEAVSRPTMRFVPIKTVDCQAGVMLLKTRYLLVKQRTQSINSLRGHLSELGIIAARGTGKVETLIAIIRDKTDERIPAVARRALEMLADQVEALVRRIATLENEIVSEVRRDDTMRRLATIPGVGPITAATIVALVPDPRAFNSGRHFAAWIGLTPKMHSTGGKERLGRISRRKLTNTDRATNSPCWQCHKHGSRRRAA

SEQ ID NO: 108801 - protein, 364 aa, unidentified
MALSTLAPPLQSTQTLEPAVFIGVDTHRDFHVAVALNRQGALLGEMHLPARIVGYEALLDWASELIDTHGSGLLFGIEGTGSYGAGLCHALQEAGCEVREVNRPNRQARRQRGKDDSIDAELAARALVAGTATAVAKTSNGEVEMLRILKGTRDSAVRCRTRAITQLKALVISAPAELRESLEHLATADLVLQFSLAETPDVTCPYTAASRALQALAARIHHLEQEIAGLGQELDRLTHLVAPDLRAAQGIGADNAAALLIAAGDNPERLRSEAAFAALCGAAPVPASSGNRNRHRLNRGGNRQANCPLFRIALSRLRWDPRTKAYAEKRTADGKSKREILRCLKWFIAREVFRLLAANRVQPV

SEQ ID NO: 108802 - protein, 417 aa, unidentified
MKAWKDITHYAGFDWARDHHAVVIVDAQGQIVADFEFEHSREGWKRFGDQTAGWPNLAVAIETNQGAAVDHLLQREYTVYPVNPVASESYRKRKAPSGTKTDHVDGWGLADALRVDGQGWKPLQPMDPLIQQLRLLCRDEVALIEQRTVLVNQLQQALVEYYPAALQAFDDWTLPSAWDFIIEFPTPKALVQAGKRRWEKFLHTHKLWRPETAPKRLALFAQADQFQGSDPVTRAKSQLALSLSKLLRTLQQQLGEYRKAIEALFKSHPDHDLFGSLPGAGKTLAPRLMGAIGTDPDRYGDSDVLQCLAGTAPVSYQSGQISKTKIRWACDKSLRHTVHLWADCFRKGSAWGQTYYQKKRDQGMSHACALRCLGQRLLKIVFKMISDKQPYNAELHARNQLKHGSWVLQLMDAKSVS

SEQ ID NO: 108803 - protein, 362 aa, unidentified
MTESTTIVAFDQHAATTVAGVLLPGQRTPATHSLTSDVTTIGRFVDRLRRTGPVQCCYEAGPCGFELQRFLAARQILCEIIAPALIPRRPGDRVKTDRRDAGQLAVLYRAGALTAIHIPTEQEEAARDLLRCREDIRADLLRARHRLSKFLLRHGRRFTATKKAWTKRHAAWLQAQRWPLPALEQTHCAYVRAVDEAVGRLQAVEVELRDLLMLDPLRDRVTCLRCFRGLDNLTALTVAAELGDARRFPTAPSTMAFVGLVPSEHSSGPKQARGAITKTGNAHLRRVLVEAAWHYRHHPFLGPSLRERQRGAPAAAIEQAWAAQHRLHRRYRRLAARGKPKQVIVTAIARELTGFLWAVLTQ

SEQ ID NO: 108804 - protein, 400 aa, unidentified
MLSIGIDVSKGKSTVCGMKPGGEIVYTPFEVQHTREGMSELVSLLRGSGEEVRVVLESTGSYHCPVVAALLENGIFVSVVNSLRMKRFCSQSIRRVKTDQIDAMQIALYGLAYWQELQPTRLPENTYRELQLLARQYYQMTSLLIKAKVDFNALCDQVLPGMQELMNDHAGRHKLSDFVLRYHHTTHILEMGETRFRKDYCKWAEKKGYRNHERMAALIFATAQNGIPVLPDAPSTQIVITEAIRVLHTVEASRDAILTQMQALAKTLPEYSLVREMPCIGDTLAPRLIAEIGDVRRFHSKRALIAYAGIDAPPYQSGKFCANNRHISKRGNRYLRKTGYEVMQSYVMHKPANDPIFTFIEKKRSEGKCGKLAMMAGLNKFLRIYYGKVTELYRSSSAIE

SEQ ID NO: 108805 - protein, 344 aa, unidentified
MQHYVGLDVSLSETAICVVDHDGIVIREGKVASEPEAITAWLIELDISVTRVGLEIGGLARWLYAELRAAGWPAICIDPRRLRGLTKTMPVKTDRNDARAIAQVMRVGWYNIVHIKSGVSQELRMLLTNRETLLVKQIDIENEIRGTLRVFGLKLAGRITQASFEERALDLVADEPRLAAMLRPMLAARSALSQQYAVLHKMLLEVVRVESTCRRLMTVPGVGALTAVTYLTTIDDPARFQRSRDVGAHLGRTPRKYASGEIDRNGSISKCGDTLLRTTLYQAALALLTRTQRWSTLKAWGMAVAKRRGLRRAVVAVARKLAIVMHRIWTDGSEFRWSREEAMA

SEQ ID NO: 108806 - protein, 352 aa, unidentified
MPQTLNAAIAVVGIDIGKNSFHIVGHDERGAIVLRQKWSRGQVEARFANMPPCLVGMEACVGAHHLSRKLNSLGHNARLMPAKYVRPYSKGQKNDFRDAEAIAEAVQRPTMKFVATKTTDQLDLQALHRVRERLVSQRTGIINQIRAFLLERGIAVRQGLRFLRGELPRILATPPDVLSPRMVRIIEDLAGDWRRLDERVEGMSNEIEAIARQDAGCERLMSVPGVGPIISSAMVAAIGAGDVFTKGRDFAAWLGLVPKQISTGDRTILGKISRRGNRYLRVLFVQAAWVVLIKPKIWERHGLKSWIEAAKKRLHRNVLAIALANKLARIAWSVLAHGRDFEARSIVTAQPV

SEQ ID NO: 108807 - protein, 313 aa, unidentified
MNQKEQERFVGIDISKQELVVAVRPTAELQSFSNTEEGLAALVRFLQPLSASSIVLEATGGFARAAVNALALAALPVVVVNPRQIRDFARSVGLLAKTDAIDAQIIARFAEAVRPEFRPLKDLETQKLEDLNNRRRQIVEMISAEKNRFGMAPPWSQKDIRAHIAWLEKRLKKVNDDIDDLIKQSPIWSQKEKILTSVLGVGPVVSTTLLCGLPELGSLSARKLSALVGVAPFNRDSGQYRGRRSCWGGRAHVRAALYMAALTASRCNPVIRAFYQRLRSAGKPAKVALVACMHKILVILNAMVKNNTCWQQA

SEQ ID NO: 108808 - protein, 326 aa, unidentified
MKNLVIGIDISKDTFDFCTLRKENHEIINRGIINNTKEDISKWLKGIDIDEVVFSMEHTGHYGALLAWSLSQVSTEYFLINPLELKNSIGIQRGKTDAIDAYRIASYTITNRHKLKAYTIPADSLRKLKVLMTARERFVRISVQLKNSLKANQIVNKTLDVKDLIRLEKKQIKAIEKSIQDLETKMLEIIKSNQELKKNYDKIGQVIGVGPITAIKCITETDNFMKFLNARKFSCHCGLAPFAYQSGSSIKGKTKTHYLRDKSLKAILFKAAGSAIQHDPQLKKYYNRKVLEGKHKLTALNAVANKLVLRIFAVVKRDEPFVKLSA

SEQ ID NO: 108809 - protein, 346 aa, unidentified
MLHAGLDLSRWRLDFHLLDEGGGTVEVGAAPPDADGLRSLAERVGGHGQPVRAAIESMNGARFVHDRLELAGWQVEIADAQKVKGLAPLACKTDRIDAWVLAELSRRDLVPAIWLPDPSVRAERERARWRLHLVRHRSSLKQRVHAVLLAHGRPCPVSDLFGIRGRQLLARLQLPEPWQGTIDASLRLIDELDREIAACESELRRLGADHRYVPLLLTVPGIGWVLAYTIAAELGDIGRFPTPRKLAGYSGLCPRVYQSGESDRRGPLSKQGPRYLRWALVEASTHACTHPLYRDRYQRTKTRLGKQRGAKVAQVDLARRLAEAIWHMLTRDQPFAPAGATDPLAA

SEQ ID NO: 108810 - protein, 406 aa, unidentified
MELKPIFQRVIGLDIHQAQVTACAIIGNPDGTVEVERRQFGSFKKDRRALADWCATWQPDAVVMESTGIYWKSPYAALEQVGIRAQVVNARHVKQVPGRKTDVGDAEWLAMLARAGLLRGSFVPPAPLRELRLIARQRQKLVGMLASEKNRLHKVLTDGGIRLGVVVSDIHGQSARAMIKALIQGATPQEVLSLASHRLKASREEILDALQGDLSACHRFVLDEVMHHIEALEAQIARFDTRLLDGLAPQQHALALLQTLPGVDTIGAALLLVEIGDDMKAFGSADRLASWAGLCPGNNESAGKRKSGRTRKGNPYVRRVLCECAHAASRTQCALPTKFQNLVVRRGHKRSIIALAHKMLRIIYFMLSRGTYYRDAATDYEALSVQRNAARWIKKLIKFGFLPDPA

SEQ ID NO: 108811 - protein, 348 aa, unidentified
MIIIGVDYHPEFQQIASVDTDTGEFLEKRLAHPEEAEKFYRALAGKKVRVGMEASGHARWFERLLAELQFELWIGDAAVIRTKRVRKQKTDRQDAQLILRLLLEDRFPQIWVPSGENRDLRQLLWHRHRMVQARTRIMNQLQAVALNEGLRCKKRLWRERGRQQLESFRLAPWASRRRRDLLELMDRLNPTIAELSQAIEQEVEKSPAAQRLMTHPGVGALTALAFVLILGEANRFHCGKQVASYLGLVPLEDSSGNRRRLGHITKQGSSILRFLLVEAAQVTVRSVPEWRSKYFHLTLRRGRKIAKVAMARKLAVCLYWMWRKGWNYEQVRKFGSHAGQPGNRHGVQ

SEQ ID NO: 108812 - protein, 412 aa, unidentified
MDILHTCCCGLDVHKETVVACLIHPAAQGQRPKEVRTFGTTTAALRELADWLRAAGCTHVALESTGVYWRPVYNVLEDEFTLLVVNAAHIKAVPGRKTDVKDCEWIADLLQHGLLRASFIPDQAQRELRDLTRTRTTLIDERSAAVCRLQKVLEDANLKLAGVATDILGVSGRAILQALVDGNTDPASLADLAKGRLRRKRAALEQALDGRLRAHHRLLITTHLAHIDFLDETIAQLSQEIAERLRPVEAELERLDTIPGVGRRTAEILAAEIGLDMSRFPSAGHLASWAGMCPGNYESAGKRKGGKTRKGSKWLRRALTEAAQAAARNTHCYLAARYRRLVVRRGKRKAAVAVGHTILLTAYYLLVRQDTYHDRSPAQLDALRRERARQRAVAQLQALGFDVSLTPTEPAA

SEQ ID NO: 108813 - protein, 337 aa, unidentified
MGEIIRVGLDTSKSVFAVHGVDGSERPVLCRTLRRGEVARFFAALAPTSIGLEACGASHHWARVLRAQGHEVRLLPPQYVKPYVRRGKNDAADAAAICEAMSRPQMRFVPVKTAENQADLMLHTTRRLLIKQRTMLANAIRGHASEFGVTAGVGMARLADLSARLAASADVPAAAQEAFALLLAQLADLDARIATVEARLRQWHRASPVSQRLAAVPGIGPILATALAMKLVDPHAFRSGRDFAAWLGLTPKNHSTAGRQRLGGITRAGDKAMRALLVTGAMAVIQRAKPGRTAPWLLALLARKPKKLAAVALANKTARIVWAMMTRAEPYRCPAAA

SEQ ID NO: 108814 - protein, 403 aa, unidentified
MGATCGIDWASDWHDVHITDGQGALLAAEQFSHDERGVIALIKLLRDQRVECCAIERPDGLLVGRLLAAGIPVLAIHPNQVKAARDRFRAAAGKDDRFDAFVLCELARTDRHRFPMLAPSSDETLALKTLVRTREDLVDTRVALANQLRAQLQAFWPGAEQIFAAIDSPIALAFLERYPSPTDTRGLGEKRLESFLARNAYSGRRTPTELLTKLRSAPNAIISRLEQDARRSAVIALTATLRPIVEQISQLTRQIASATRTHPDGAIFLALFRDPNSIITAAGLLAEIGDNRARYPTNDSLAADAGQAPVTIQSGKRNNATFRWACDKRLRKHMSVLADSTRHWHPWAHDVYQRARARGASHPHALRILGRAWTRILWRCWQDHTPYNATQHHALNTLLAQKG

SEQ ID NO: 108815 - protein, 343 aa, unidentified
MDHFAGLDVSVKETSICIVDDTGRIVREVKVASEPEALLQVLGNPIYRFKRIGLEAGPLSQWLFSALAEAGLPVICVETRHMRAVLQAQINKTDRNDARGMAQMMRAGLYRPVHVKTLRSQKLRMLLTHRKLLQSKAIAIDNDLRGTLRNFGLKVGVVGAVKFEARIKELVENLPDLAVLVEPLLMVRRILREQFSVLHRRLLAIVRDDEVCRRLMTVPGVGPVVALTYRATVDVPARFRNSKAVGAVFGLTPSKYQSGEINRTGAISKCGDEMMRVMLYEAAQIMLVRLAKWSWLKAWAMKIARHRGMKKAIVALARRLAVIMHRIWVDGTEFRWTREAAVA

SEQ ID NO: 108816 - protein, 389 aa, unidentified
MKGARGGGAKRSGAPAPRAGDARSSVTWHLDAVSKQDRRRLRGTSPNSRLSDGRRNAAADTISSHSQDRDVSMNDSPSYVGIDVAKDKLDVFIDSTNEYFTVENTPDGVRTIHQRLCGLNVKLIVIEHSGRYERRCALDLMDAGLPVALVNPRQIRDFARSRNWLAKNDRIDARLNCEFGKANNPRISERVPQNRAELDELVGRRRQLVAMRASEKPRLQQASSKSVRQSIEKVLRQLDVQIQDLERKIAKLIENDDDWRGQVQLLQSVPGVGPVMASTLVAELPELGKVNRQEIAALAGLAPFDHDSGKFRGTRSCFGGRAQVRCTLYMAALSARRFNPIVKALSERLLARGKSFKVMMVACMRKLLTILNTIATTGTTWRNELLQNS

SEQ ID NO: 108817 - protein, 357 aa, unidentified
MVTGLKHQKEKRSMDHFAGLDVSVKETSVCIVDDLGKIVREVKVASEPEALLMVLRNAGYHFKRIGLEAGPLSQWLFSELAEAGLPVICVETRHMRAVLKAQINKTDRNDARGIAQMMRVGLYRPVHVKTLRSQKLRMLLTHRKLLQSKAIAIDNDLRGTLRNFGLKVGVVGTVKFEARIKELVENLSDLAALVEPLLVVRRVLREQIGVLHRRLLAVVRDDDVCRRLMTVPGVGPVVALTYRATVDVPARFRKSKAVGAVFGLTCSKYQSGEIDRSGRISRCGDEMMRVMLYEAAQVMLHSKKWSWLKAWAMQIARRRGMKKAIVALARRLAVVMHRIWVDGTEFRWTREYAVAAA

SEQ ID NO: 108818 - protein, 311 aa, unidentified
MTEHTTVGIDIAKDTFDVFISPDGLFLHLENTPHGHQQLLDALASRTVVRIVMEATGRYHNLLAATLELAGLPVAVVNPAQVRHFARALGTLFKTDPNDARIICEFGRRMTPDVRPAPDEQTQRLAMMVSRRRQLVDNRTMEQNRYGSCTDELIRTGIKRHIDWLNAEIKDTDDDIDRQIKVMPLWQEKVKLLEEVKGIGRTTLAVLLSMLPELGQLSRRKISALVGVCPYAHDSGKMKGKRCIWGGRSAVRAALYMAAMSAVRYNPTIQAFFERLRGKGKAFKVAMTACVRKLVTILNAMVRDNKKWVAA

SEQ ID NO: 108819 - protein, 410 aa, unidentified
MEVLYPHCAGLDVHKDTVVACVRHMVNGSVRREVRSFKTTTKELLALSDWLAGEGCTHVAMEATGVYWKPVWHVLSDGDFTLVLANAEHVKNVPGRKTDVNDATWLADLLAHGLIRSSFVPDGQTQEMRTLLRTRKQLVRECSRHVQRLQKTLEDANIKLDSVISDIVGLSGRRMIEALIAGETEPGALAAMAHRRIKATPDELEAALRGRVTRHHRFLLQLHLQQIDAVNAAIDQIDQEVDAYVEPFRATVRLLTTIPGIDELSACVILAEIGRDMSRFPTAGHLISWAGLCPKNDESAGKRRSTRMRKGAPWLKTTLVQCAAAAARKKASYLQAQFHRLRARRGAKKALGALAASILTSVYHMLISGELYRDLGPHHFDQRAKAVNTRRLVVRLQNLGYAVQITPLAA

SEQ ID NO: 108820 - protein, 361 aa, unidentified
MKKTAQHLIAEVPARHSPTELTIGVDLGDVWSHYCTINQNGDVIDRGRFRTNPQGVEKWFKNLAPVRVAMEAGTHSIWISEQLQLLGHEVIVANVRELRAISHSDRKSDQVDAEKLARFARLDPKILRPIAHRTLQQQQALTLIRARDLMVRLRTAAVNAVRGLTKSCGHRMPASTTACFAKRGLAMLPAGLAPALGPVLEQIAEMTTKIKQYDRQIRQLTETEYVETQALLKVYGVGPITALTYVLTLGDKQRFQRSRDVGCYLGLRPRRSQSGDRDPQLGITKAGNGYLRMLLIECANHILRPPGKDSSLRRWGLALAARGGKKAKNKAVVAVARKLAVLLHRIWVTQEPYIPFYAEAA

SEQ ID NO: 108821 - protein, 358 aa, unidentified
MLYTGIDLHRRLIVLCTVNDNGSIVSRARIKTEPEALVTYFRQWADLHRAVVECTSNWYWLCDILRSIGVTVVLAHAKYLKAIAYAKVKTDAVDAHTLAQLLRMGFVPEAHQLPPEYRALRDLLRQRMVMEHHRTNLMVRITSMLAKFNITKLPCVVSQPKFADFLASCTIPEEYRMTMLLYHQQCIQVAEHKKHLEQYFKGELRPTRTLQLLVSIPGIGDITGAIVAMETGEISRFADDKHYASYCRLAPGAKDSGGKHRHRSGSKDGNQYLKYAFTEAALKAMRFYPEIRQFAARLEQRSNPSIARTVVAKELSKITYFVLSREEEFRTFKGIVIHKTRDWPRTCKPVRITGVHSL

SEQ ID NO: 108822 - protein, 350 aa, unidentified
MGQHDRPRVCDESAKDVIPDKEFENMIYIGIDISKATFVAAIPQGKSYRTETFSNDVKGIRRFISKLDPAIHQCVMEATGNYCFLLLYLLDKGGIQASLINPKKIKNYARVMMSVTKTDSKDACLIADFGERFKPGTYKFPSEQIMLLKQKKTVLRQLQKQLTATKNLLSSLEPLPVRDKKCVHSLKQTITFLKKQIKYMQQEMEAVVTDVFERQLKLLTSVKGIGVTLATALIIATGGFTYFDNAKQLSRFIGICPTIEQSGTSVNIRGHINRNGDETLRSMLYVAAWSASQHNKACKECYQRLRGKGKPGKVAMIAVANKLVRQAFAVVTSNKPYSDGFVSTKPDAPV

SEQ ID NO: 108823 - protein, 347 aa, unidentified
MKRTTIGLDIAKRVFQVHAVDPASGEVTRRKLQRAEVLQYFAQLQPLLIAMEACGSAQHWGRQFCKLGHEVKLIAPQFVRPFVKTNKNDVADAQAIWTAAQQPEMRGVAVKTEEQQAVLALHAIRERLKKARTAAVNQLHGLMGEFGIELLKGWRTMLPRAAAELDRADSAVPALLQPQLRRQIREVRSLTEQMTEVERQIASWKHRQEGCERIAAIPGIGLLTATAAVATMGEASTFRSGRQFAAYLGLVPRQSGTGGRVQLLGISKRGDKYLRMLLIQGARSVLARSRASKDPSTWLGRLTQRRPRNVAAVALANKMARQVWAILAHNRTYEPNYRLHERAATPA

SEQ ID NO: 108824 - protein, 343 aa, unidentified
MQITTIGLDLAMNVFQVHGVDATGQVVVRKSLRRSQMLPFFAKLPPCLVGIEACGTSHHWARELIRLGHEVRLMPPAYVKPYVKRGKTDAADAEAVCEAVTRSTMRFVPVKSPEQQAALSIHRARDLLVKQRTQLINMMRGLLAEFGVDIPKGLERALLMARQIVDGKAPEVPFEAAKVVGTLSQQALDTHVRLREIDRDLAVWLRGNDVARRLMTIPGIGPVGATALAASVTDPHQFRSGRQFAAWLGLTPLQKSSGGKERLGRITKMGDKYLRKLLIVGMTSRVRRARQNPTVDPRLADLLARKPTRVATVAMANKTARIIWAIMARGETYRAGHRPALAA

SEQ ID NO: 108825 - protein, 349 aa, unidentified
MNKRDDCGVEVSAKQLLVGLEREGAPRRRREFSNTPDGHDGLVRWLVVPERRVRLVMEATGLYGLDLALRLDTEPSVELMVANPRAVRHFAQALMKRSKNDPIDTDVLVEFAQRMPFQRWVRPSPAALALHALARRLESLTEMHAAEKNRLHAAQLSPALPAAVVRDLERSLRGLARALARLTRQALEVIGQDPDLNLRYQLLLSACGIGPTSAVQILAQLAVLSPDLDVRQWVAQAGLDPRQYTSGSSVHKKTRISKTGNRHLRRALYMPALVAIRHEPHLRAFYRHLLARGKAKMQALVAVMRKLLHAIFGMFKHQQPFDGARLFPLPGEPALPQPDFSTVEALCGS

SEQ ID NO: 108826 - protein, 340 aa, unidentified
MGYYVGLDVSLKSTHICVLDGERRVIWRGVSDTQIAMIAEHLARWGEQIVLVGLETGSLTPWLYHGLSDLGLPMVCMDARRASDALKARAEKTDKADARALAEMLASGWYSAVHVKSLESHQLKALLGARDQLVRVKRQLYGQVRGLLRPFGIKISQRVGAKSFDEAVRMACNKEDVLYIAVGALLDTLANVASQIAVLDKQVRTLTQKRKACWYLMSVPGVGPITALAFTAAIEDPHRFGSNRDVGAYLGLTPKRYQSGERDISLSISRQGDEMVRHYLYEAANCLLTTVTGASALKSWGLKMVKRCGAKRARTAVARKLAVLLLRLWKQESHFEAQSA

SEQ ID NO: 108827 - protein, 353 aa, unidentified
MRIIGCDLHARQQSLAMLHVETGEIEERTLEHEGEAVREFYAGLPGPVRVGIEATGSMQWFLELMDELGVECVVGHPAKIRACEPRKQKHDRRDALLLMKLLAEDRFPAIWMPSVEQRDVRALLLHRHQWVRIRVRLQNALQSIALSHAIRRGAGLWSHGGQQTLAELVLPPHAGARRSELMRLYQQLQREIEMLDKEVARTAEERPQARLLMTHPGVGPITGLATEVFLGDAARFADGKAVASYVGMIPSEFSSGGKQRCGGLTKQGNPLLRMLWCEAVGHAVRKDAELNRFYRRKLAQKGLGKAKVAAARKLGIRLWIMLREQIDYEEFCRRGRQRGEAHAEMPGREHGPA

SEQ ID NO: 108828 - protein, 353 aa, unidentified
MTMIIGCDFHPRFQQIEYVDEETGEYGDRRLLHTAEAEEFYRSLVGRAVRVGVEATGNFGWFRRLLGELGHELVLGDATMIRASNPRQQRTDKRDAQHILRLLVEDRFPAVWQPGAANERLRQLLLHRSSLVRMRTQVENQVDSLAKNEGLVSSRRWTAKRRREVEALELEGWYAERRRDLLALLDGLEIRIRPLEQAVRAAAEADAQARLLMTHPGVGPVVSLAFVLTIGDWQRFPRGKQVASCLGLIPAEESSGDKRRLGHITKQGNSMLRWLLVQAATIAQRYDAGWHRQYVRLSMAKHHGVAKLAIAHKLAVRLYWMLRSGQDYEQVMERGSHAGQSVCPSGRGSRPST

SEQ ID NO: 108829 - protein, 361 aa, unidentified
MHATTVAVDLAKSVFQIAVADDNWKVVEQHRLTRSQFERWFQNHAVDRVIMEACGSAHHWARWLNGLGIEVKLLPAAYIRAYVKRNKTDAADACALLEAARCADIQPVRIKSVEQQALQGLHRIRSRWMGTRTSRINTLRGFCREFGLVVPQGARTGIEVISRALADPHSAVPLLIREAMKLLVEEIRLLEQRIAQLEKELTSLARQSPACTELLTIPGIGLLTATAMVAATGGSVSHFKDARHFASWFGLTPKEHSSGSHRQLGRISKRGDRYLRMLLTHGARALLRAAELARRSGKSLDALRTWATEVQARAHHNKAACALANKLARVCYAVLRDHTPYGNPQPRQERKPSRQTFAIAA

SEQ ID NO: 108830 - protein, 332 aa, unidentified
MGGALLATASFGADREGYRALIEWAAQFGTVLRFGIEGTGSYGRGLASAVRRHGHEVIEVARPTRQDRHRRGKSDLFDAENAARAVLAGQAEAIPKTADGAVEMIRHLKVAKDAAVKARTAAMQSLKAVLITAPAELRETLQPLPDTALLRRCAALRPGQLTSVTAAAKYSLRAIAQRWHNLHAEITAHEQLLGRLVDQLAPRLTATIGIGPDNASQLLLALGDNPARLHSEAAFAKLCGVCPIPASSGKTVRYRLNRAGHRQANAALHRIVIVRMKYHHPTRAYVARRTTEGKTKPEIMRCLKRHIAREVWTHTKHLRQQPHAHPPTTCHL

SEQ ID NO: 108831 - protein, 387 aa, unidentified
MAQVNDLSRSLTAFDPISTLVVAVEMSKANWLVSGAVPGVERQPLKKLEPDATALLRLIERWRNEAVRAGRPISRIALAYEAGRDGFWLARWLIARGIEAHVIHSASVAVSRERKRAKTDRLDTAMLMRVFLGWLRGERGHCGMVAIPTMEEEDARRPSRERESLVNERSRITNRMKSALARLGVRGFKPHLRKAPERLAGLRTAEGTGLPANIIEEFRRDMARLALVREQIGSIEKTRAERLERAPDTGPHAMVRLLARVIGIGIETADMLVREILSRKLRDRRAVARYAGLTGSPDESGLKRREKGLAKAGNARVRRGVIQLAWRFLMFQKDSALARWYRMRTEGPSGARKTTMIVALARKLLIALWRLVTTGEVPDGVELRPAA

SEQ ID NO: 108832 - protein, 329 aa, unidentified
MQQTLIVGVDVSKSTLDICFKPSGLTTRISNETIGFNQWYKQLKPLCPGFQAVMVIMEHTGHYSLRFEKFLRSKNIDYCKVPALQIKRSLGITRGKTDKLDAERIADYGWLRRDILTADAEVLQEIRQLEMLISLRQKIVRDRSGYMSRVKSMKATGMCGSSNSLVKMQQDIIRSLTTKIKTIETEIKSVINSNAKLANTCRLLMSIKGVGLIVGAYMISCTRNFTRFNNFRKFNCYAGLAPFKHESGSSIKARSRISHLANKQAKTLLNLSASCSIRCDREMKQYYQKRVAEGKRKMSCLNIIRSKIVSRMFAVVKRQTPYRELLIAA

SEQ ID NO: 108833 - protein, 400 aa, unidentified
MLSIGIDVSKGKSTVCGMKPGGEIVYTPFEIQHTREGMSELVSLLHNSGEEVRAVLESTGSYHCPVVAALLENGIFVSVVNSLRMKRFCSQSIRKVKTDRIDAMQIALYGLAYWQELQPTRLPEDTYRELQLLARQYYQMTSMLIKAKVDFNALCDQVLPGMQELMSDHAGRHKLSDFVLRYRHTTHILEMGETRFRKDYCKWAEKKGYRNRERMAALIFATAQNGIPVLPNAPSTQIVITEAIRVLHTVEASRDAILTQMQALAKTLPEYSLVREMPCIGDTLAPRLIAEIGDVRRFHSKRALIAYAGIDAPPYQSGKFCANNRHISKRGNRYLRKTGYEVMQSYVMHKPANDPIFTFIEKKRGEGKSGKLAMVAGLNKFLRVYYGKVTELYRSLSAIE

SEQ ID NO: 108834 - protein, 523 aa, unidentified
MATRFRSRTRRSGRFLTVAKPSGSLHPRVQKVGPEHFGIVAVDCAKARSKWMLADFYGRILIEPTVVEHNKRGFDSAIAQIRRARESHALGDIIVAIERTGIYHLPVKRVFSSNSFETRIVHPLTTRQYRLPADPGNKTDDTDLLAIHRATTNGFGLIEPQLDEVHGPLRLLARYRRTLVRKNASSRNQLITLLDVVLPGYTGLFHDIFNNPAALAIARTVTSAAEVQALGVDGLAQVLKTLEVRSQRRTLEKILAWTKGIENTADYAAMSNTIIVSLDDDRCARLQQIGMMEQKMAGLLARTPYVVLLSIPGIGVVTAGEFAGEMGPIANYASDQAITGRAGIYPSRYQSDKVDRCDGPLVRRANRSLRGVIMLIADNLLLINRFFQGLKMRWQAEGMDYRDMCVHAAKRFCRIAFQMVAGRQVFRHPSCQKRDAILRKLTCFHVDHGTSMAQVLTDLQAAIDHIPKSEHTPEAKSLFDAMQPRNRRQQTGLRRLGEILPGVLAKVGVTAVELSSKGENDLT

SEQ ID NO: 108835 - protein, 479 aa, unidentified
MAVGRMNRKQRKELTRQLRSEDPGLDVVHPRAAGIDVGNGAHYVAVRPDQDREPVRRFECFTADLHRLADWLQACGVATVAMQSTGVYWIPLYEILEERGLEVYLVNARHTKNLPGRKSDVQESQWLLKLHTYGLLNNSFQPTAEIRTVRTYWRQRAEHVRAASTCIQRMQKVLTQMNVQLANVISDLSGLTGQTIVRTILAGERDPKKLAELSHPRIQASREEIAKSLEGNWRPELLFVLKQEVEMYDIYQQRIGECDRELKAHLKRFADNVHRKPAEAGPVSEEQKDKKVPAKLPRSGKRAQGNAPCFDLRSELYRISGVDLTRIDSINVVVAQTVISEVGLDMSRWNTEAHFASWLGLCPDNRISGDKVLSKGTRHVINRAATALRMAATTLLRSRSYLGAQYRRLRARLGAPKAITAMAHKLARIVYRMLKYGQDYVDKGMQYYEDRHRRQQIELLQKTAAKLGLHIVEIQAVGG

SEQ ID NO: 108836 - protein, 412 aa, unidentified
MTEKDQFAAHVGLDWADKKHDVCVQFKNGDRIFHVIEHTPEALDIWLNELHQRAKGRIAIAVELKKGPVVYALQKYPFVSVFPVHALSLARYRQAFWPSGAKDDPQDAELALDLMLRYPHKIKAIEVDNPDIRLLQQLVEQRRLLVEDKRRFVNRLINTLKQYYPQPLEWFSHRDSSLFCELIIRWPSLQQLKRARSDTVRHFMNAKGGPAVAYTEQRVASIASAIPLTTDKTVIEANALMATALASQIKLTGDLIRTYDERIESLFDTLPDAELFKSLPGMGPCMGPRMLAALGDNRDRFNSAEEIQNYAGIAPVTERSGQKSWVHWRWQCAKFVRQTFVEWTAKTVNSSYWARLYYQSQREKGKSHQSAIRALAFKWIRIIYRCWKTRTRYDEAKYLLALEARKSPLLKP

SEQ ID NO: 108837 - protein, 408 aa, unidentified
MVVQAVPVTSSTVVVAVDVGKTEFAFSVTDSTRRLLLKPRVGCLMTGSSLARVVADIEQVLPVDAVVKVGIEAAGHYHRRLLNAGWPVGWEVLELNPGHVTEQRRVLGKRTIKTDVVDLQAMTELLLAGRGQPVRDRSLVLSELTAWSAHRTSRVVLRTATKNQLLGQLDRTFPGLTLALPDVLATKVGRLVAAEFADPARLAGLGSSRFIRFGTSRGVQIRKPVADRLVQAARDALPTADAAVARAVLAADLVLLADLDAQVGQATDQLARLLPLSPFAPLLTVPGWGQVRAGNYGGALGDPARFDNHRQVYRTAGLNPIQYESAGKRRDSVISREGSVELRRALIDLGVGLWLNDPAAKVHGAQLRARGKQGLVIACAMANRANRIAFALVRDQADYDPNRWIRED

SEQ ID NO: 108838 - protein, 342 aa, unidentified
MSGMIIGLDLAKSVFQVHAVDAEGKVVITRKVRRSQMLEFFTRLEPCLVGMEACPSAHHWARELSALGHEVRLMVASYVKPYVKRQKNDMVDAEAICEAVTRPTMRFVPIKSESQQAILMVHKTRALLVRQRTMLVNALRGHLTEIGVVAPKGIRRHADLVERVLAHGADEIDVPPLVRDIVLSSARQIGSLNAEIKELERKILEWHRTSDASQRLATIPGVGVITASAMAATVVDPAAFRSGRDLAAWLGLTPRSNSSGGKERLGRITKAGNRYLRTLLVIGATAVVGFSRRTTEGPLINWVRKLLQAKSARLTTVALANKMARICWAVMAHKTVFGEAAA

SEQ ID NO: 108839 - protein, 347 aa, unidentified
MNFYNNTHPYYCGIDLHAKLLYVCILDDKGNTCLHKEISASPEKLKALLEPYLGHIVVGVECMHCWYWVSDFCEDLNIDFILGHALYMKAIHGGKAKNDKIDSYKIAKLIRGGNFPLAYVYPKEMRATRDLLRRRTKMVKQGGNLKAHTTNTTSQYNLPPIKVNLKNKEAREQVRSAFPDPVVQKNMDLNMALLECYAKELSQIEWFLEQQAKQHNPVHLYLLKSISGVGRILSLTIIYEIGDINRFPSVQNFASYARLVKCKAESAGKTYGTSGNKIGNAHLKWAFSEAAVLYLRGNEKAQKYLLTLQKRMSKAKALSVLAHKLGRCVYFMMKNKTVFDESRFLKS

SEQ ID NO: 108840 - protein, 360 aa, unidentified
MQVEQTVTKCFVIGGVDTHKDLHVAAVVDEHDRVLGGQCFPTTRHGYKQMLAWMRSFGELRRVGVEATGTYGAGLLRYLQNAGVEVLEVTSPDSGDRRKRGKNDDLDAQNAAHAAFAGKRTVTPKTRDGMIESLRVLKACRKTAVAARRVALQMIHNTVVCAPDELRDTLRKLTRMQLVRTLAAWRPDMTDYRTVASAYRIALKSLARRYLELHDEIADLDAMIAAIVDELAPALVTRNSIGHASAAQLLLTAGDNSERLRSEASFAALCGVSPVPASSGKTTRHRLNRGGDRAANSALHIIAIGRLRTDPRTQSYIAKRIAEGHSKLEAIRCLKRYIAREIFSLISQRRQEINQAQIAT

SEQ ID NO: 108841 - protein, 380 aa, unidentified
MKKELYLGLDVHKDCIATAVAEEGRRGEVRDTGVISNDLHALEKWISRLRKAHGSDVILRACYEAGPCGFGMARRFKQLRVECEVVAPSLTPKRSGERVKTDRRDARKLARLLRAGELTAVYIPEATDEAMRDLCRARSDAVDDRRRSRHRLKGFLLRHGYRYQGKSSWSAAHERYLRELVLPHPAMKVILEEYLQGIATAGERIERCEEAMGDLLEQWRLAPAVRALMAMKGFQSVAAMILVSELGEVHRFGHPRQVMAYLGLVPTENSSSDRRRQGHITKCGNAHARWLLVECAQHYASPPKVSKELSRRQQGQSHEVRSISWRAQNRLHHRYTRLLARRLQRNKAMVAVARELCGFIWELLRTQPCYQTQSQIGLKS

SEQ ID NO: 108842 - protein, 421 aa, unidentified
MRGVRSIKVKAVKKDTLMVTVDVGMANNMGYCTTADGRDIKPFKFGNTREGLDKLWSLVVVNKKRFRCNEVIVGYESTGPYAEPFVHYLRDKPVTIVQVNPMHTKRVKEINNNSPLKTDEKDPRVIADIVRLGHALSVVVPEGDAAYLRRLNNARERHIRERTALLNQLQQLVFIMFPEFKLVIKDIKVKTARRILRNYTTPDKIGGLDKDKLGEEMRKQSRGKFGIQHADLLISLARDTIGIKEGVAGVAMDIHHILMQLEVADGFVAEIESEMKITLTRIPYSARILSMKGLGTVTVAGLIGEVGDFTKFRTQSEIMKLAGLDLYEISSGKRKGQRRISKRGRSLLRKILYYAAISTIRKNGIMCSYYIRLIGRGMKRTSALVVIAKKLLRIIHAIVRDDRDYVSDCGSPKRMVIQKAA

SEQ ID NO: 108843 - protein, 425 aa, unidentified
MRLVYPVCCGVDVHKTFLVATIITTTNSILPKYQQKRFSTYYSGLLDFKQWLLANNCKDVCMESTGKYWVPVWNVLEAASINVVIANPKWVSAVKGNKDDKKDSKWIGDLFRMGLVPPSYIPVRDIRILREFTRYRSKLVSMRSSEKNRFQNAFTVCNLTLDAVASDMFGVSATAIENYLLDTDDVDPNHCVYLLRGSLKKKASDVVEAVKGFNMTAEQKERVRIIQGHFDDIDKRIAQIDYVILRLTADYEAQISLLCTIPGIDRRLAITIISEIGTDMSVFGSSKRLCRWAGLTPGNNESAGKKKSVRISRAGVYLKPALVEAAHAAVKATQKSPYFRIKYERIMKRRGKKRAIIATARMMLTAIFAMLQSGEVFHPCDLLKFDMPDELKRKQTLSSAKDAVKLLVSLGLVPEGSISLDPLAG

SEQ ID NO: 108844 - protein, 359 aa, unidentified
MIVIGVDPHKQTHTAAAVDRQTGELLGELTVRGNEEGHARLLEWARELGGERGFALEDCRQVSCRLERFLIGRGEPVVRVPPKLMAGARRSARSRGKSDAIDALAVARAAIREPDLPEAHLEGASRELRLLVDHREDLVCERTRIQNRLRWHLHEIDPELEPSRRSLGTLKVLDGLGRRLARRPQSVQVRIARELVAHCRELSRQADRLEREIETLVRREAPQLLALPGCGALTAAKLVGEVAGIERFRTDAQLAMHAGVAPLDVSSGRQQRHRLNRAGNRQLNRALHTIAIVQKRTYAPAKAYIARRQADGKSNKEALRALKRQLARRVFNILHLIAARANNPQRIQTSTPPQVPCLT

SEQ ID NO: 108845 - protein, 310 aa, unidentified
MVKPYVGNDVAKATLDVAIGSDGEVVQVENNEAGVAQLTERLVEVVPALVVLEATGGYESVVAGAIAGRGIAVAVVNPRQVRDFAKATGVLAKTDRIDARVLARFAEAVRPEPRPLPTEEAKELDELLSRRRQIVDMLTMEKNRLGIAATDRMKKGIKKHIAWLEEALRRSNDDIDTAVKNSPAWREQEDLLRSMPGIGPVSARTMLAELPELGRLNRRQIAALVGVAPLNRDSGTLHGTRICWGGRATVRQVLYMAATTAIRCNPAIRRTYAALRERGKKHKVALVACMRKLLTILTAMVRDQRRWSPS

SEQ ID NO: 108846 - protein, 369 aa, unidentified
MTVYIGVDLHKTQFTVHERTEETVESIEQIKQYPTTEVGYAAFLARITEYKIGGFTVKIGVESTGNTRFFKAQVEKVGAHVTVINTLKFKVINESTKKTDKHDASTISEFLSKDMLPESYLCSKETENLRRLLKSRERLVHSIVGQKNEIHALLVSMGLQDESRSLQSKKGRQEVLDTLSSRSDLVLEAQSVKLMIEIIEQMSQSVKLIEKQLSELTKDDEMVSRLMTIRGCGKITAWIIRSYTEDIGRFASAKKYAAFCGLVPWVQDSNETVRHGRITKRGPQELRTAYVQLVLGIRRCKDTSGWRIMQRLDYMKKNKGSGKSIVAAARKMAEIVWALLTEKQDFDSTKMMGRYKPMSLAEQALVAMN

SEQ ID NO: 108847 - protein, 364 aa, unidentified
MFTERTSVGLDVHARSVVAAAIDGVTGELVQSKLTPSYDHIRSWVQDLPGPVAVTYEAGPTGFGLYRALSSAGIRCEVAAPSKLQKPSGDRVKTDAKDALHLAKLLRLDQITSVAIPSVDQEAARDLVRAREDCRGDLMRARHRLSKLLLRHGIVYYGGDAWTGKHDTWLRNEACHQLESRATQLTFDSDYDNILTVKARRDRLDLAIGEMAADSEFTPLVHRLGCLRGVSSLTGLALAVEIGDWDRFTGNTIGSFVGLVPSEYSSGATRAQGSITKTGNTHVRRLLVEAAWHHRARYRVGKTMRDRWDLAPAAARARGDEGNRRLHQRWVKFIERRKRPTIANVAIARELAGWCWSLAVLEGA

SEQ ID NO: 108848 - protein, 343 aa, unidentified
MAKTPIAVLGIDLGKNSCSLAGLDAAGAVIMRRRMTREGTIKFVATLPACVVAMEACCGAHFLGRTFACQGHTVRLMSPEYVAPYVKAQKTDNRDAEAIAEAATRPTMRLVTLKSEAQLDLQVLHRARERLVAGRTRLTNQLRAMLLERGVILPKRRAPLIKRLDELMAGELPISQRARQLLLDLRDEWMDQDRRIKAYDDELMALTREDGAARRLATIPGIGVINATALLAAVGDASAFAKGRDLAAWLGLTPRQHSTGGKTKLLGISKRGNKYLRTQLIHGARAAMAHFANKATPVGTWVRQLLTRAHPNVVVVALAAKLARIAWAVLRHGSNYDHRTATV

SEQ ID NO: 108849 - protein, 345 aa, unidentified
MTEAYDGRQVVGMDLHRRRSVLVRMTEDGRKLETVRIENSPAALRSVLARAGKDPRVVVEATYGWYWAVDVLEAAGAEVHLAHPLGVKAFSYRRVKNDERDCADLADLLRLGRLPEAWIAPEPVRALREVTRYRHKLVGQRTSCKDQVHAVLAKAGIPVTRSDIFGRGGGIWLDGLPLPQPYAGKIASLRALIAVLDGEIARLEEQAAAMLAGERGYAAIRQLPGIGPVLGAVIAAEIGDITRFRNPGQLASWAGLTPRHYESDTRVIRGRVSKQGSRMLRWALTEAIQRAPAGTRPRQVKDAIIARRGAEARGIAKTAAARVMLTQVFYGMRDGHIRRAISQAA

SEQ ID NO: 108850 - protein, 367 aa, unidentified
MALKIVYKTCCGIDVHKTFVVACIASTNSKGVTAYKNHRFSTYTKGLKELSQWLEDNNCKDVCMESTGKYWIPVFNILEYSCNVILAHPKYVKAIRGKKTDKKDAKWIADLFKHDLVAPSFMPPSDIRQLRDLMRYRYKLICFISSEKNRLQNCLTVSNIQLGNVVSDTFGKSSLKILDKILENPIDTSFDIESLIHGSMKKKLPELELAVDGYVLPEQAAKLKIIKKHIEDLETRKLELESVIKSLAEPYQKQIDLILSIPSFKNLFTAIGIISEIGVNMEVFPSAKHLCSWAGLTPTNNESAGKKKSVRVSKAGCYIKPLLVQCASAIVKGKNNPEITNRFLRIKKRRGYKKAINAVARMLLKER

SEQ ID NO: 108851 - protein, 349 aa, unidentified
MDRYIGIDAHATSCTIAVIGPSGRKLDEHVVETKASALVECIQSIPRPRHLCLEEGTQSAWLYQVLSPHVDELVVAGLTERRKDQKNDRRDAFARAQELRLGAIEKLVFKAPDRFALLRQLASSYDLITRDVVRTQCRLRALYLSRGLHSPSQTLYGAAHRDEWMGKLPASCQPSAEMLYAELDAQRELKTSAEKQLITESHRYPISHMLETCPGLGPIRVALMIPVVVTPDRFRTARQFWSYCGLGIVMRTSSDWVRQGDRWIRAQVNQTRGLSRSFNRTLKYVFKGAATTVITKLPDHPLRQHYDRMLAAGIKPNLAKLTLARQIAAIALAMWKHEEEYDPARHRKS

SEQ ID NO: 108852 - protein, 347 aa, unidentified
MNKPEYFVGIDIASATFTSAVGQMGQKWQLVVKPATFDNTLDGFSRYLAWLKAAGASPENAILCMEATGVYGEMLAHFLAANHYPLSIEPPLKVKRAFTPEGHKSDAVDCGQISEYAYRFFDELTLWTARQEVLEQIKTLLTTREEFVVEKAAHQHSLAALKRKAIRTPLAEQLHETAMTQLKTHIHQIEVEIRRLIEGDPTIGHTVALLMTIPGVGLLLASHLLLTLQSAPKPLSPKDLAAYVGICPYENSSGTSIHHTPTSRHYGPPGLRKLLFLAALSLRTHNQTFRTYFLRKTQTGKPAMLVINNIANKLLKIVVAVVRSDVAFIPDYRSVNPRLLKPALTKS

SEQ ID NO: 108853 - protein, 323 aa, unidentified
MDPVMTMFLGLDVAKAKVDCALLLNGKVKSKVVPNNQEGFETLKQWLTKQGATHVHACCEATGTYSDAIALYLHDHGHTVSVVNPAQIAAYAQSQLVRAKTDALDAKLIARYCERERPMTWTPPPAAERLLLALLRDLQDLQSMHQAESNRLDTAHPDVRERIERHLEFLGREIEQLHKKIERHINDNDQLRGRRDLLDSVPGLGEHTIPWLIAYLGDGQRFPGSKCAVAFCGLSPKPHQSGSSVRGKAHISKTGHADLRHALYMPAVVAYSRCKAFASFVQRLKAAGKPPKVIIVALMRKLVAIAQAILKSGKPFDPSLHCT

SEQ ID NO: 108854 - protein, 357 aa, unidentified
MPAHSKTAKPSAGIAVIGIDIGKNVFHLIGLDRSGTIVMKAKLSRGQLENRLANVPPCLIGMEACPGSHHLSRRLIALGHDARLMPAQYVKPFLKGHKNDYRDAEAVAEAVQRPTMRFVATKTEEQLALQALHRVRARLVAERTAAVNQIRAFLLERGITVAQGIQRLRKALPDILAKAADALLPRMIRIVEALAADWRRLDERVEEVSTEIETLARKEEPCQRLMTVPGIGPVISSATVATIGTGDMFAKGRDFSAWLSIVPKQLSTGGRTILGKISKRGNKYLRTLFVQAARVVLLKQVNWERYGLKSWIEAAAKRLPNNKLAIALANKLARIAWAVLHHGRNFEVSHEHTPQPA

SEQ ID NO: 108855 - protein, 459 aa, unidentified
MSTKKPTGKGSVNKRVDWRALEIVHPDAGGIDVGGSEHWVAVSPDRDPEPVRRFGCFTADLREMGRWLVEKGVRSVAMQSTGVYWMPVFEVLEQQGLEVYLVNAQHTKNVPGRKSDIQECQWLLKLHAFGLLNNSFQPTDEIRIARTLWRQRGNLVAEASSVIQRMQKVLTEMNVQLSNVLSDLSGMSGMKIIGAILEGERDPWKLASLVEPEVKATPADIAKSLEGNWREELLFVLRQQVELYRIYQEKISACDLQLRRHLKSLGSKVDLKTQPIGPRPKGKKNSKNAPGFDLRTELYRITGIDWTQINGMDVLTAQTVIAEAGVDLSAFPSEKQFTSWSGLCPTNEQSGGKILNRRTRKVVNRATVAFRNAALTLLRSQSYLGAQYRRLRTRLGAPKAITAMARKLACLFYRLIKHGQPYVDKGTEYYDAKYREQQIRSLAKRAQKLGLQLVIPKAV

SEQ ID NO: 108856 - protein, 394 aa, unidentified
MDLGDKHSCYCVLNGQGEVIQEGKVGTTKKAVAHVFGGMSRCRIALEVGTHSPWVSRLLWALGHEVVAANPRQVKLISASSRKDDRMDAQTLARLARVDPQLLRPIQHGSEKAQADLMVIRVRAALVEARTSLVNTARGLAKSLGERLPLCDTDQMGVEQAESLPAALQQVLEPLLQEVVSLTEKIKESDRKVEQIAREDYPETRLLQQVKGVGPLIALGFVLTLEDKARFPKSRDVGCYVGLRPRRGDSDESQPQLRITKEGDAYLRKMLVQGTHYILGYRGPDTDLRRWGLKLAARGGKRAKKAAIVAVARKLGILLHRLWVTGEVYEPLYNVNRRQSCAGASGRIFLRRDPGFTSWRPQFHLMGSPVSPKRTPVSFQTFTHILLFLLWVYA

SEQ ID NO: 108857 - protein, 331 aa, unidentified
MEEVKRFVGIDVAKVALDVFIGSAGGAFSVANDEVGIQELLRQMKPADFVIVEATGGLETPVASALAAVGIPVAIVNPRQVRDFARATGKLAKTDRLDAEVLARFGEAVRPEARPLADEQAQALEALVTRRRQLVEMLTAEKNRRARAPKVLHRSIDEHIRWLEKRLSEFDDELGELIRTTPLWRERDELLRSVPGVGKVLSSTLLAQLPELGMLNRKQIAALAGLAPFNRDSGNMRGSRSIWGGRAQVRRVLYMATVAGVRSNPTIRTFYLRLRTNGKHAKPALTACMRKFLVILNAMLHNKTRWQTPAPTFLTSSLSPLLGAVCEHGCC

SEQ ID NO: 108858 - protein, 371 aa, unidentified
MDSPFLYGIVMCQIGSVFRPITKKEESKMKIMRIGVDLAKVVFQVHGVDGRGRVVARKRLSRAQMVAYFSALEPCLVGMEACASAHHWARTLKALGHEVRLMAPQFVHPYRKGGKNDGNDADAICEAVGRPNMRFVAVKSVEQQAVLTLHRARELLVRERTALVNQVRGLLAEYGVVLKLGVTAVRRGLPEVLESEEHDLPSLARETFAELYERLVELDGRVAFYDRRLLTLANEMEAAKRLMQMPGIGPVTATALVASVGDGRHFANGRQFAAWLGLVPRQHSSGGKIRHGRITKRGERYLRTLLVHGARAVVCRSRRREDGISRWARAVWARRGFNKATVALAARHARMVWVMLARGEDYRPLAEASSP

SEQ ID NO: 108859 - protein, 346 aa, unidentified
MDQIARIGMDTSKHVFQLHGVNFAEQPVLRKKMRRREMLDFFERCPPTVIAIEACGASHHWARSLSAYGHEVKLIAPQLVKPYVKRGKNDAADAEALCEAVSRPTMRFVPAKTTEQQAALMLVGMRERLVVAQTQLVNTIRGYAAEFGLTAAKGVSHVSVLLERIMMDKTVPALAKDLFASLAHEFAGLDERKRDIEAKLKAWHKGNEASCRLAKIPGVGPIGAALLVMKAPAPKQFASGRQFAAWMGLTPKDHSTGGRVRLGIITRAGDEILRSTLVQGATAVLQQLRIGRGSNASRWLTELLKRKPPKLVAVALANKIARIAWKMMVTGESYRAQGSEAAMNAS

SEQ ID NO: 108860 - protein, 425 aa, unidentified
MRFFGLDVHLDFCEVAVAEGGRVSRVGRIASTPEAIREFAGSLNGSDQVVLEASCGAMMIARLLAEGSVGRVVVCNAAETRAISHARVKSDRFDAAMLAKLLSAGMLKAVWVPDEATSALRRRVARRAGLVRARTRVKNEVHAVLARCLIGRPPVSDLFGKKGRVWLLEQQLPEEEAETVRSCLRHIDFLGGEITGLDQRIAQQALAFPGFQRLLTIPGVDVGTAAAVIAAIGDITRFQSPDQLVAYLGLDPKVRQSGSEPARYGHISKRGDPQARSMLVEAAWISIRSPGPLKAFGERVRARRGAQIAAVAVARKLVVLCWHLLTKDQDYAFARPSLTRQKTRRLELLAGAPPLPRRHGGPPVSPTSSQRAAERQLQAQAELAYRRLVDDWRSTASPKGGAGATPGRASNKPSKGKAARQATSP

SEQ ID NO: 108861 - protein, 482 aa, unidentified
MKPKPEEKNKRATNHPTQHHWHEMNRKQRREAMRKIQSEEISLEVVHPNAAGIDIGNESHYVAIPPSRDSQPVQRFGCTTAELKAMAAWLKQCGIRTVAMQSTGVYWIAVYDILEQAGLEVYLVNARDTKNLPGRKSDVQESQWLMKLHTYGLLRNSFRPAQQIRTMRTYWRQRNDLVQSTGRHIQRMQKALTQMNLQLANVLSDVSGVTGQAIIKAILGGERDPHKLAEFRDPRVKASEEQIAQSLEGNWQEDLLFVLKQEQDGYEFCRKQMAECDRQLAQYLQQREDRSQGAPLPEEKRKTRLKKKKGNAPQFDLREGLFRLIGTDLTQIDCIDVMTAMTVISEAGWDMSKWKTEDHFVSWLRLCPDNRISGDKIIGKGRLPTNNRVSIALKMAASSLRLNNTYLGAQFRRLRTRLGAPIAIKAMAAKLARLVYRMLRYGMKYVDRGAAFYEVQNRQLQIKRLKSKAAKLGLQIVQAPAA

SEQ ID NO: 108862 - protein, 430 aa, unidentified
MKSNTQNAKIEAITEKTLVLGIDVGSETHYARAFDYRGVEYSKKPFKFSNTEAGFVTFKAWVLDIKEKHGKDKVIPGMEPTGHYWFNLGKFLQDNEMKPVLVNPHHVKKSKELDDNNPTKNDRKDPKVIAGLVREGRYMIPYLPDGVYADLRTASNIRFQLQAELTRIQNRISRWFNIYFPEYKTVYGKPDAKSGILILKEAPLPEDILTLSIDGVNQIWRDAKLRAVGKARAKTLIEAAEHSVGSKEGAVSARMEIRMLLEDYESRNIRLQEVMGLIEGLVNQIPMAEKLLEIKGVGIKTVSGFLAEVGDIRRFNDPKELQKLAGLALVENSSGKHKGKTTISRRGRKRLRYLLFEVAMSLVAKNPEFRELHNYYTTRRLNPLKKMQSLMAIAAKLLRVFYAILTKGVGYDPKKMVNDIRRPAAYAQAA

SEQ ID NO: 108863 - protein, 404 aa, unidentified
MKTYILRDSQTVEPQKSVRRPRPQTTSPAPAQGPLLFVGLDVHNDSIAVSLAPSDSTEVRRYGIIGGEHDDVLKLAKKLQAAHPESTLKFCYEAGPRGFALCRCLRTHGLDCILVCPSKVPRKPGDRVKTDRRDADQLARLYRAGELTGIYVPHPEDEAMRDLIRARFQVGKAQHRARQQLKMYLLRHNIRYGGKSSWTAAHLRYLSQIKMPFPVQQIVFQEMLEVITEATERLARYDREIERAVPNWRWEPVVRALMSLRGMALLHAATLVAELGDFRRFEHPSQLMAYLGLVPSEHTTGNDRQQGGITKMGNGPARRALVEAAWQYVAPARISPPLRKRQEGLPKALTDIAWKAQCRLHHRYQHLTRVGKKKSQVAVTALARELSGFVWAIGCRVEPRVVIP

SEQ ID NO: 108864 - protein, 411 aa, unidentified
MENVFACCAGLDIHQKSVEACVRRLEPTGQLHHQTRHWGTMTRDLLAMADWMAAQGVTHVAMESTGVYWKPIYNILESRFTVLLVNARHLKQVPGRKSDVRDCQWIAQLLQHGLLKGSFVPPRAQRELRDLTRHRAQLVEEKTRTVNRLHKVLEDGNIKLASVATDILGVSGRAMLEALMEGQEDPVKLADLAQRQLRGKIPELEKALEGHLTEHHRFMLRLLWKELGQQEELIAELDRKIEEQTRPFANEIERLDAVPGVDRRVAEVALAEVGSDMKPFPTHSHVASWAGMCPGNEESAGKRRRQRLTPGNRWLKRSLVQAAWAASHTKHTYLASQYRRLAGRRGRKRALVAVGHSMLVIFYHMLKDRTTYKDLGGDFFDRLEPERLTRYYVKRLEDLGHKVTLESSVPA

SEQ ID NO: 108865 - protein, 346 aa, unidentified
MLADDVAYVLGVDTHAETHALAIVETRTLRMRRQLTIPASRRGYRQALRLARRQAPGRRAWALEGSGSYGAGLARFLAERGEQVLEVERPARAGRRGRLKSDALDAERAARSVVQGACGATPRLGSETQDLRALLVAREGAVCACTAALNELRALVLTAPPELRERLQGASQGALVAACARLRPGRGEGERAALALALRSLAQRVRHLRSEAETLERELARRVQALAPALLARRGVGPICAAALLVAWSSPGRLRSEAAFARLAGVAPIPASSGKVVRHRLDRGGDRRLNRALHTIVLCLRRVDPETKAYIARRVSEGKSEREAVRCLKRYLARSLFRLLEAMPRT

SEQ ID NO: 108866 - protein, 345 aa, unidentified
MPIVGGLDIHRKQITFDYLDTGTGQVQRGQIAPADRVHLRAWLARLAGRDDVAFALEGCAGWRYVAEELAAAGITAHLAEPADTAFARGRKRHAKTDKTDARHLRMLLAEGRLPECWIPPGRILECRALLEACNDLRRERTAWAQRIHAVLFHQGAPALGEGALRTDKGVAGLREAAAVHLSPAGQLQVATALAVIDALEARLHVVRHQLLDAARHLAGAKALAARLYGVGPVTALAITCWPGGAGRFSSSRQAVRFAGLDITVSSSDRKGPPGRLSRQGPPVLRWAVYEAGKAHARTSAPDHRYYAVVKDRKNSKRGCLSEARKILRQAHHILAELGDDALAAA

SEQ ID NO: 108867 - protein, 316 aa, unidentified
MFVGIDVAKAELVVSILPSAERFTVDNDERGVRTLVERLREIVPTLIVLEATGGYELLSVAALAATALPVVVVNPRQVRDFAKATGQLAKTDRIDADILARFADVVRPVVRPIADDAAHELDALLTRRRQLLEMLQAERNRTGQVFGKGKRVVRKSLKNHISYLERELRITDTDLGAMIKASPVWRERDELLQSVPGVGPVLSRTLLADLPELGRLSRREIAKLVGVAPLSRDSGTMRGRRFVQGGRATVRAVLYMAALVATKRNPAIRAFYLRLVAAGKPKKLALVACMRKLLTILNVMVRTAQPWSTESALIPA

SEQ ID NO: 108868 - protein, 420 aa, unidentified
MSKTLYVGIDPHQKENFCCLLDQEGNKIINVFSVANNLEGAKELENRIDLIMKEHCFTELKAATEAVSFLDLHIVDYLASSKLLSKYSPSIYQFNPKITSGFKKAYPDKDKTDTIDAFVVADRLRFGRLPEPYEDSQPYFPLKRLTRYRYHLVSNISREKNYFLTHLFLKYSSFSDVKPFSNVFGKAGIAVITEFFSSDELASMDIEELVEFLIKEGKNRFSDPEAVAQKVKQVARESYRIRPALANSVNLILSSTVENIRALTSSLKEVNEAIANEFKAFPNTLESVKGLGPVYSAGIFSEIGNIKRFPSHAKLAKFTGLTWRKSQSGNFAAEETYMTKTGNEYLRYYFIEAANSLRMHNEEYRLYYESKYKEVPKHQHKRALALTARKLVRLVFALLTKNRLYQENEAFSKNGVSFSL

SEQ ID NO: 108869 - protein, 398 aa, unidentified
MKGQDIMIYVGIDVASQKHDCFLLKDTGEVFSKTSFTIKNDFEGYKKLHNSILQFVESTKDSNVRIGLESTGHYSKNILLYLIKQGYQTTLINPILTNMDRKASTVRKTKTDKIDAEAICKFLDKNRFDFKPYTLLSYHIDALKSLTRQRFSLVKQMTQQKLIFQRLVNVIFPELLSHFSNDYGESVLNILYSYPTPKKLAKAHKESITKLLHSRCKITSSEILELAKNSIGQSEEYLGFELKHTIDIILFYQSQIEIYNKQIEIELNETEYGKIITSIPGVGIITGAMIISEIGDINNFTTSDQLLAYAGLDPSVYESGKFESSHNKPSKRGSKYLRWAIHQASSVIWQHDNTFKDYYLKKIKESKHHYVAIGHIDKKLIRVIFSLLKNKSMFIPQK

SEQ ID NO: 108870 - protein, 338 aa, unidentified
MNIFKQAFGIDVSMDTFDARYGFIDFNQTFSSTKSQSFKNSTAGYKKFLKWALTNILSDSLPFVFVMEATGVYYENLAHFLFNNNLQVAVILPNKIRNFAKSLEAKSKTDPIDSSAITRFALERKQSLWQPPNPQIKVIRELTREYHSIKKISTEIKNQIHAKKHAFSSDKDSIKRKRNIIALFDRQSKQILKQIKDIIKTIPNLNQKINNLDTIKGIGFITIVTVFAETNGFELTSSAKQLTSYAGLDVVLNNSGKRIGKTSISKKGNKFIRKALFMPALSAARFNHNLKELYNRLIKKGKNKKLALIAVARKLLILMFSLWKNNTVFIPNYKHSLK

SEQ ID NO: 108871 - protein, 344 aa, unidentified
MNIASIGIDLGKTTFHLVALGERNKILLRRKFSRSQLLAYTANLPASLIGLEACAGSHFIGTVLREQGHQVRIIPAQFVKPYRKSNKNDFIDAEAIAEAVTKQNMRFVQIKTQEQLDWQAMHRVRDRLMQRRTALINEIRGFLLERGLTFAARPIYLRKNLPTVIEDAEQNLSPRLRWLLDRLWQEWKQTEIDIKAITDEIERISNDDARCRRLRQIPGFGPLVSTATVAAIGNGSAFRRGRDFAAWVGVVPRQYSTGGKQKLFGISKRGNIYLRRMLIHGARAVLLRVKYNTEGFGQWVHRLAQRAPRNKVVVAIANKLARIAWAVLSSGKEYRHQPLQLAAA

SEQ ID NO: 108872 - protein, 318 aa, unidentified
MSHGYDKFVGIDVSKDGLDVHGLPDGSPSRFDNTAAGRAKLLSLLPPAGACLSVVEATGGYERDLVAEAVTAGHHIAVVNPRQVRDFAKALGLLAKTDRIDASVIARFAETTRPVPKGYDERQEQLRELIVRRRQLLDHRTAEKNRSEMAHSSLVRKSVLKLIETLNKDIQRIEKAILQLVESNDDWRERFEKLKGVPGVGGQTAATLMAELPELGHLNRQQVAALVGVAPFNRDSGQFRGRRAIWGGRQSVRNALYMAALSAKKHNPVIREFAARLMAKGKPPKLVLTACMRKLLIILNAMLHSGDSWSPRMATLTP

SEQ ID NO: 108873 - protein, 351 aa, unidentified
MLIIGCDFHPRFQQIAYLDKETGEYGERRLTHPEEAARFYRSLARSQARVGMEATGNFRWFRRLLGELGHEALLGDPARIRAASVRKQKTDKRDARHILSLLMEDRFPAVWQPPAENEELRQLLLHRCRMVRLRTKVKNQLDAVAKNEGLLIARGWLEKRRQIEALPLPGWYATRRTDMFALLDELDKRIRPLDEAVKKAAGENAAARLLMTHPGVGPVVSLAYVLTIGDWQRFPRGKHVASYLGLIPSEESSSDKRRLGHISKQGNELVRWLLVEAAITAQKHDASWRRQYLRLSMSKHHGVAKVAIAHKLAIRLYWMLRSGQDYEQVMERGSHAGQSVCPSGSGLTPRT

SEQ ID NO: 108874 - protein, 341 aa, unidentified
MEQATTIGLDIAKHVFQVHGADAAGHVLFRKRITRAKVLGFLAAQAPCVVAMEACAGAHYWAREIAKLGHHVRLIAPVYVKPFIKRQKNDAADAEAICEAAQRPSMRFVSVKTEQQQANGIVFRARDLLVRQRTQCVNALRGHLMEYGYVFPKGISHVETLVAVIEDLQSSLPDSVRVILKLLVDTFTALEAQITALDAEIRQRSKSDPTARRLMTIPGVGPIVSTAITALVPAAEGFPAGRHFAAWLGLTPLQKSTGGKQKLGAVSKRGERTIRRLLIIGASAVVRQASRRGAPKGSWLAQMLARKPKMLVTVALANKMARIIWALLVKGGTYRTPAAAA

SEQ ID NO: 108875 - protein, 405 aa, unidentified
MNAVGIDVSKGKSTVAILRPYGKVVASPFDVAHTGSDLRALADLIKKLPGETKVVMEATGNYYESIARCLHEQNIFVSVVNPVLISDFGGNTLRKPKTDKKDSVKIASYALNYWLDLREYTPQEDLRKSLKLLNRQYQQSIKLKTMMNNNLISLLDLTFPGINKLFTSPSRESDGHEKWVDFVLEFPHCDMISKLTIKSFTRKHMKWCSNNSYYFTESSCEKIYAFAKECVSSVSSDEAIVFSVVQAAKMLVSATENCHAIQTEMNRVASKLPEYDTVMNMYGVGKAVGPQIMAEIGDPRRFHSRKAITAYFGYDSENNDSGQKTTRSNPMTKKGSGVLRRTLFIIMQVLLKTKPQDNPVYDFLIKKQSEGKHYYSYMNAAANKFLRIYYAKVKEVLHTTETPLT

SEQ ID NO: 108876 - protein, 340 aa, unidentified
MNKVAIAAIDLGKHSFHLHAQDDRGHELYRKKFTRVTLAQHLANLEPCTVVMEACGGAHFMAQEVAKLGHTPKLIAPHLVRPYVKSNKNDFADAEAICEAATRPTMRFVPPKNQAQQALAMLNSTRDSFIKDRTATANRIHAALLEVGISLAPGFKSIKELPARLEASSLSERFKILMKLHEHFNHLDEQVKTLDKDVESQAAEDDLAARLMTMPCVGPITSSALAAELGDGKQFKCGRNYAASIGLVPKQHSTGDKTVLLGISKRGDRNQRRLLIQCARVYLMQLERQRGWLADWVRQLLAHHHSNHVVCALANKMARIAWAIAAHHTEFDAGPAAMNT

SEQ ID NO: 108877 - protein, 320 aa, unidentified
MLSPLYGGIDVSKAFLDLRVRPTSERRRSANTPEGIAELVAHLKTLAPVRIVVEATGGYERAVVHALKAAGLRVVVVNPLRARRFAHSQGYLAKTDRLDARALAHFAESLSDAERPDPEEGVEELNALVTRRDQLLGMRTAELNRQGTAHPSQQDSLKKHLEWLNEEIQTVERQLHDRLQQSETFQAKDRLLQSVPGVGPLTSLALLASLPELGHLNRNQLAALVGVAPLNRDSGTFRGTRSIHGGRANVRKALFMAAFAGLRHNPWLRAFCDRLCQAGKPKKVALVACMHKLLSLLNALLKQQQPWSPPPLPTASSTRT

SEQ ID NO: 108878 - protein, 465 aa, unidentified
MKRQRRRHAPKPRVSPSVLDHITPDAAGIDCGSAEHFVAVPPDRDPTPIRSFTTFTSDLQRLADWLAACRVTSVAMEATGVYWIPLYEILDARGFTVLLVNARHVKNVPGRKSDVSDCEWLRDLHIVGLLRGSFRPTDGIVALRAYLRHRQTLIETAGSHVQRMQKALVQMNVQLPLVVSDITGVTGLRILRDIVAGHRDPQQLAQLRDYRCHASEAEIIAALTGNYRDEHVFVLQQNLELFDTYQQQLTVCDDAIERHLTQLAAATAPPETSLPPARRRQKPRNNEPRFDVRTPLHQLTGVDLSQLDGIGPYNALRLLSEIGTDMTRWPSDKHFTSWLTLAPKNKVSGGRLLSSRTQPSANRAAAILRLAAMNLGRTQTALGAFYRRLAFRVGKAKAVTATARKLAILVYRTLKEGLVYADPGADAYDAHHRTHVLRRLRQRAGNLGFALVNASTGEVVDGTVS

SEQ ID NO: 108879 - protein, 367 aa, unidentified
MADPLRSEKDLHEMQVSLQELEEVLMRIVGGLDIHRQQVTFDWVDLDTGEAKRGRITPADRVGFRKWLAQFDGEVEVVMEGCTGWRFIAEECAAAGAKVHVADPAEVAARRSAKRRAKTDPIDARQLRQLLERGEVPESWIPPQIVLEVRERVRLYLDLLEDKQAWQHRIHATLFHHGVPKVDGKLLAGGRAEHGRDDPDLSDAGREAVETALRIIAALDADLTRIRAELVAFGRRHPGPRELAHEYGLGALLATAVWEELGDTRRFSASRHAVRHAGLDISVYDSDGKHKGRPTLTRQGPPALRWALYEGAVHAHKKTSPDHAYYTRLARRIGSGRARLSVARKLARRCHHRLRALGDQAWVDLPG

SEQ ID NO: 108880 - protein, 342 aa, unidentified
MDSIGIDLHKRESQLCTITEHGALLEQRIITSRERFTAVLGSRSPARILLEASTESEWVARHLETLGHTVIVADPGFAAMYATRSKRVKTDKRDARTLCDALVLGAYRAVHRASDAQRHLRAQLAVRDALVRTRTRYIAIIKAAVRREGLRLPSGEAERTVAKLAALNVAPHVRAELAPLVALWAPLQAELTAADARLTAIARTHPVVTRLATMPSVGPVTALAFVAALDDVTRFHSAHQVQAYLGLVPSEYSSGDRRARGHITKRGDARMRWLLVETAWRILRSPNPQLAELRAWALQIAARRGKRIATVALARRVAGILYAMWRDDAPYHAQTTTHRTAA

SEQ ID NO: 108881 - protein, 409 aa, unidentified
MEVVITRCAGLDVHKATVVATVRVPGADGRRRIVTETFGTMTPDLIALREWLQAYGVTQVALESTGVYWKPVYYVLEDAFELWLINMRDLQHVPGRKTDVKDSEWLAQLLECGLLRSSFVPPPPIRELRDITRYRVQQTRDRSQEVNRLQKVLEDAGVKLTSVLTDVMGASGRAMVEALVRGTTDPQVLADLARGQLRKKLPALQRALVGRFRPVHAFLLEEILAKIDYLDEALERLTAEIDRRVAPFEPTLTALDTIPGIDRIGAISLVAETGGDMERFPSAAQLCSWAGMCPGHEESAGKRRSGKTRKANRYLRTTLIQAGVAASHKKNSALRALYARVKGRRGHKKAVVATGHQILEIAYYVMRDRVTYRELGADYFQRRDRERTARRHVKQLEALGYVVTVQPAA

SEQ ID NO: 108882 - protein, 295 aa, unidentified
MRYIGVDLHKTNFVVYFLNQDDTFQVETFPLSKAGISRFTSQLSKDDAVAVEVTQSIYYFYDQIKTYVGRIVLIDTYRFAIIAASKKKTDKADAQALARFLKLDHLPEVSIPSEKVRQLRHLLQARETLVGLRTKLKNLGHAALTRNGIALSRSAFASGAARERLRKRDDLSAADKVILESALRQIAELDKEIEQLENEIVRLGKTLAGVKRLLQLHGLNLLSAISLLAEIGDIHLFETSKQLVAYSGLATSVRQSNQTTRQGHITKQGRKRLRTVAIRAVLSMVNRTNTPLMDF

SEQ ID NO: 108883 - protein, 422 aa, unidentified
MKPQPAGNEFAAFIGIDWADVKHDICLQAANAARRESSVLPHRPDAIDAWAGALRQRFQGQPIAVCLELAKGPLVYALQKYDFLVLFPVNPATLAKYRQAFTPSQAKDDPTDAELQLDLLLRHRDKLKPLHPQGVAIRTLQYLVEQRRRLVGDKGRITNRLIYALKQYFPQALEWFKDKDTVVFCDFLSRWPTLKQAKHARKATLEAFFREHNVRYPRIIEERLQAIKTATPLTEDLAVITPHRLLVQALVEQLRVSLQAIERFDAETTTLAQTLPDYSLFRALPGAGATLAPRLLAAFGEQRERYQNAAELQKYTGIAPVTERSGKKQWVHWRLQCPKFLRQTFVEWAGETIPRSFWAAAYYRQQRDRGGSHQAALRALAFKWIRILYRCWQDRTPYDESTYLNALKHRGSPLLRSIAASP

SEQ ID NO: 108884 - protein, 418 aa, unidentified
MFETGDALLFVGDDWAEDHHDVELMDAAGRRLVKARLPEGVAGIARLHALIGAQLGDEAEDAEDAAGQVKIGIETDRGPWVQALIAAGYTVFAVNPLQAARYRERLGVSGAKSDAADAHMLADMVRTDSHQLRPVAGDTAEAEAVKVVTRMHKTLIWERTRAGQRLRHALREYFPAALAAFEDLDAADTLELLAKAPDPASAARLSAAQISAALKRARRRDIAAKTATIQAVLRGDHLGQPAVVTAAYAASVRALVAVLGTLNEQVKILQGQVEAHFGRHPDAELFLSQPGLGPILGARVLAEFGDDHDRYTSAKARKNYAGTSPITRASGKKKVVAARFVHNDRLIDALMTQAFASLRNSPGARAYYDQQRARGASYNAALRQLANRLVGILHGCLKTGTPYNEATAWSHHLTEAAA

SEQ ID NO: 108885 - protein, 410 aa, unidentified
MEDGTLWVGIDLGSKSHQVCVLNAMRQVILEREVAHEGAALTALADELIALAGGVSQRIRAALETPQSAVVEMLLERGIDVFTLNPKQLDRFRDRHSAAGSKDDRRDAFVLGDSLSTDQRLFKQVLLGPAQVVELRALTRIREELVTEDNALSNRVDAELLRFYPEIRALGSVQCDPWLLDLLDLAPTPAQARTIRLPQLRLLLKRNRIRKHTAEGVHAVLQRCSVRVAPGVSESSSRHIKLLIPRIRLVREQARECERDLERMLESLSEPEAGTQGQRDAAIVQSLPGVGTIVSATLLAEAWQPLAERDYGRLRVLSGVAPVTKQSGKMRLVSMRKACNPRLRQCMVYWAISSVRLDARAKSQYAQYRARGHSHGRALRGIADRQLNLLMALLRRGELFDPARWTLKVA

SEQ ID NO: 108886 - protein, 400 aa, unidentified
MRAVFGIDVSKASSEVPILVNGEKVHGYTMSNDALGFARLLGDLKTVHKPEIIFEATGVYSRRLQAFLDEHGYAYTRLNPLEAKKQLDSLRVRKTDQIDAEKLAQSQFVLNRKPTYVQEEVYQELRDLSRFYQNLTEDIVRAKNRLHKVLQVTFPEIETVLSKPTGEQYWNLVTAFPCKDFVLDLSKDELLESIRQSTSKRISDKRVAYLAEKLIALANQSYCAVKKTSPMLEEVRYYGKELLRLSEQRQTVLDQMVELAQPLPEYDILLSIPGIAETTATSIIGELGDIRRFQSTNQINAFIGIDLRHYESGNFLAKEHITKRGNPYARKILFKCIHNIASASHTKPCHIADFYEKRKRQSQTTSTKPHTIASIHRLIRTMYYLITHNKLYDYTSTQNR

SEQ ID NO: 108887 - protein, 462 aa, unidentified
MMNIQEQREMVEKANRILSEMRSFTWRDLETQGKFSKNEKLSFISDDMLIVGCDIGSETHYVRAIDTRGRELSKKALAFENDAEGFQKARDWAVQLAAANDKKQIVLGLEPTGHYWFCLAAWMISNGISVVQVNPYAVKQTKELEDNSQQKDDRKDPKLIANLVKDGNYGMPYLPEKVYAELRRLSMFREQLMEDRNRHMNRLHREMKIYFPEYKDAFGKIDGAFCIAVLKEAPFPEDILRLGAEGLRDIWHKAKLRGRGYSRAEEIVKYAETSIGLEEGTAAGKEAVRWFAEKITELDEELAEIENKLNEKCREIPHAENVLEIPGIGGKILSGILAEMGDITRFDDVKEIQKLSGLGLVSCSSGKHKGETRISHRGRKRLRYWLFQAARSAVAHGEEYKWIHAHYTTRAGNPLQKMQSLVVIACKLLRVIYTMLKTGKKYDPEKLLKDIRYPESVQSTAA

SEQ ID NO: 108888 - protein, 347 aa, unidentified
MQVSTIGLDTSKRVFQVHGVDANHQVVVRKQLKRPQVLKYFAELPPCLVGIEACAASHYWAREIRVFGHEVRLVPPVRVKAYIKRGRKNDAADAAAICEAVTRPSMQCVPIKTVAQQEALVLHRGRDLLVRQCTQLCNSIRGHMAEFGIVAAKGNAGFKTLLVIVANQEDTRLPTAVRGVLALLAEQWEMAARRLDGIERQILAWHRGNNDSCRLATVPQFGPIIASALVAKVGDATRFQRPRDLPAWIGLVPSQHSTGGKERLGHITKAGDRYLRRLLMLAAMGMVRRAKAGREVPPWFKELLGRKAPKLAAIALANKLARIAWVILVRKETYKTPQQLEAAIAAA

SEQ ID NO: 108889 - protein, 422 aa, unidentified
MLEETHDSEELIQRVAALDIGKAQLVCCVRVPNPDQPGKRLQEVRTYPTMTRSLLVLADRLRELGVTRVVMEATSDYWKPPFYLLEAHGLEVWLVNAKDVKHLPGRPKTDRLDAVWLCKVAERQMLRPSFVPPPAIRRLRDLTRYRADLVATRTAEKQRVEKLLEDAQIKLSVVASDIFGVSGRAMLAALMSGERDPKVLAQLARTRLRAKRSQLEEAFCGRFSDHHAFLLETMLGRVDQASADIAELDRRIEEELVPFAAAADRLDEITGVGRTAAQVIIAEVGVDMSRFPTAGHLVSWARFAPGVKESAGRRKGNATTGHGNPYLARVLGEAAVAAGRTNTFLGERYRRIARRRGTKRAIVAVGRSILVIVWHLLSDPTVRYQDLGPGFYDTRINAERRKRNHIRQLEALGYKVTLEPAA

SEQ ID NO: 108890 - protein, 342 aa, unidentified
MNKVYVGLDLGSSSFQQAAINQDGVTIMNRSYPTSEANLRIAFTGLRGEIHVHLEAGELAPWAAAVIAPLVKRVVCSHPRDNAWIAKDNDKCDRVDAYKLADLLRLNRFKQVHYAPDQPRRNFKQLVQHYDELTAHQARWKTKLKARLRMQGVIVTGERLFSGGGRTAVLARVESRDVRTAIKQLYEVLDQSVAAQEQARLLMLRAAQAFPEIKLLRTVPGVGPIGACRFSAYIHTPQRFSSKRKLWKYCRLSVSHRSSNGKPLRRPKLDYSGCGRLKDVSRKAFEVAMRSRTDNGFKRTYQRALETTHDKTHARLTVQRKILSTLRAIWLTRTPYREELSR

SEQ ID NO: 108891 - protein, 333 aa, unidentified
MATFNARAETVETKPLLREKLIRGRIAARLANVPKCLIGIEAGMATHCVARELIALGHEVKQVPPVYARPFRQGHKNDFRDAPAVAEAVQRPSTRCVPVKTDDQLDLQALHRVRSRLISERTAVTNQIRGFLLEHGIPVRQGLRFLRQQLPDILAKRIDVLSSRIIRIIEDLGGDWGRLDERIENVTEEIEELAHGTEGCRQLMTVPGIGPIIASAMVAAIGSGTAFARGRDFAAWLGLVPKQMSTGDRTILGRISKRGNRYLRTLFMQGARVILLRPANWAKHSFGPWLAAAAKRLHHNVLATAVANKLARIAWTVLVQARSYETRVTSEMA

SEQ ID NO: 108892 - protein, 344 aa, unidentified
MIIIGCDYHPSFQQIAWVDTDTGEVQERKLMHGDGEAERFYRQLSGPARVGLESTGNCHWFLDMLAEMGHEVWVGDAARISAKQVRQQRTDRRDAAHILDLLMKDDFPRIWTPSRSERDHRQLLIHRYKLVTLRVRVKNGLQHLALNQGMQKGRSLWSREGQKRLQELPLAFWASTRRQDLLELLKKLDGQITVLDQAVKKAAEENEKARLLMTQPGVGPITSLAFVLTLGDVTRFRRGKQVASYVGLIPREYSSGGKQRLGGISKQGNRFLRMLLVEAAQTVVRYDPKFRKEYLHRCHHKPKAVAKVAAARKLAIRLFWMLRTNKTYPEVVRIESSSRVPLAD

SEQ ID NO: 108893 - protein, 373 aa, unidentified
MIAGIDTHKDTLAVAVVDEAGRLVAGGDVPNTERGFAQLVDLFNTHHVQRVGIEGSGSFGRAVAVHLVVCWQPDREVAVVEVPTLMTSRERHGQLGKGKTDPVDALAIARITAREQQLPPVRLTVGAAANLRALLDYREDLVRERGALVNRAHAELGGLRPGYQRQIPILTTRARVRAALELLGDDTSIRAALCRRRLERVIAIDTETADLKRQITGLVAAADTTLTDLYGVGPLVAARFIAEVVDIRRYPNRNAFAAANGTAPLPASSGRTVRHRFNPGGNRQLNRSLYTIALTQIRGDTEGRAYYERKRAAGKTKREALRCLKRRLSDIVFATMRHDAASAAAQPDRPSQPAWSIPAGMGAVDANEARLTA

SEQ ID NO: 108894 - protein, 412 aa, unidentified
MVTCGIDWAQDHHDVALVDADGRLVARRRIPESVAGFAELTAMLADADDDPEDPIPVAIETPRGLLVAVLRASGRPIYPINPMSVARYRERTSMSGKKSDHGDAVTLANILRTDIDQHRRLPADTELAQSITVLARAHQDATWRRNRAGNELRSLLREYFPGFLHAFADRPGGITAPEARAVLAIAATPAKAARLSKPQITAALRRAGRQRGLTTLAATIHQQLRLPQLRHPAPVEDAFGIQAVALLATLDAECANVDRLGEATAATFAQHADHRIITSFVGVGDLTGARLLAEIGDDRTRFADARALKAFAGSAPVTKASGPSIRITHRHVKNNRLAAVGFVWAFIAAGCEGPTRAHYLTRRDHGDRHPAALRHLYNRMLGQLYHCLQTSQTYDPIKAYRPPPTHPTRAAA

SEQ ID NO: 108895 - protein, 322 aa, unidentified
MDILYARCAGLDIHRDTIVACVRLAEAGGVVRFVETFATTTTELERLSEWLTGHGVTAVAMEATGVYWKPVWAVLAGDFELVLANAHPVKAVPGRKTDVNDATWLADLLAHGLIRPSFVPTMPEQALRDLTRARKQLTREKARHVQRIDKTLQAATIKLGSVLSNIMGQSGRILLEALAAGESDPERLAGLVRTKIRASHAQVVEAVRGRLAAHQRLLLRLYLAQVDALAAAIATIDRELGERLEPVQETVQRLTTMPGLSPLSATVVISEIGLDMSRFPSAAHLISWAGLCPKNDESAGKRRSPRLRPGAPWLKALLVQSA

SEQ ID NO: 108896 - protein, 367 aa, unidentified
MEKSSTAVIGMDVHKESIDVAIAAESEARHYGRIGGDAHSVDRLIRKLRSAHRAPLFVYEAGPCGFWLYRKLAAQGLRCMVVSPSMTPRNAADRVKTDRRDAMKLARLARAGELEPIYVPDEKDEAMRDLVRAREDAVCMQRQARQRLQALLLRNEIRYVGRSSWTQAHRRWITHLKLPHPAQQIAFEEYVQAVEEAEQRLARLALAIGAQLEHWHWRPVVEALQGLRGVSAIHAVRIVAELGDFRRFESPRKLMGYLGLIPSEDSSGPRRRQGSITKAGNSSARRAMIEAAHAYAHPARVSWVIARRQTRLSKSVCDIAWKAQLRLCSRFRRLAARRVPRNKVVVAVARELSGFVWAIAKQLKPIA

SEQ ID NO: 108897 - protein, 371 aa, unidentified
MGKHRLAFVAFDSAKNKHAVAIADGGRGAEVRYLGEIDNSPDAVRKLVAKLTRQYERLHFCYEAGATGYGLHRQLTELGHVCDVVAPTMIPKRSGDRVKTNRRDSVALVKLLRAGELRAIWVPDSVHEAVRDLTRARATAMVDLKTKRQQLLSFLLRHGRGFPDGRNWTKTYERWLAKQTFAHPAQQIVFQDQLEAITTAQARLAALEQQLREIVPTWTMAPVVAAYQALRGVSFLVAITFVAEVGDVRRFATPQQLMAFLGLVPSERTTGDTIRRGSITKTGNHRARRVLIEGAWTYRFSARVSETLRTRLKDLPSSVRAIAWKAQVRLCARYRRLIARGKKTPVVTTAIARELSAFLWAIGQQVAPQTG

SEQ ID NO: 108898 - protein, 286 aa, unidentified
MQKKVFKGQLTIGLDLGDRSSSYCVLDENGEILLEQKVATTPEAIQQAFGKMPRYRIAMETGTHSPWVSRLLEALGHEVIVAHAQKVRLIVKSRRKDDRLDARTLARLARIDPELLSPMQHRSAQAQLHLTEIRARAGLVSARTALVNAARGLVKSYGQRLRKCGTLQVSREITVGLSPGLREALEPLLREVESLNERIQEYDRRIEKMAKETYPETALLKQVKGVGDLIATAYVLTIEDPHRFRKSRDAGCFVGLQPGRRNSGESEPQMHISRVENLCDHAGWPA

SEQ ID NO: 108899 - protein, 386 aa, unidentified
MQKLNDLSRSLTALEPDGTLIAVIEMSLSSWLVAGIAPGVERQPLKKLAVDESALLKLLHRWREEAEKAGRRIERIVVAFEAGRDGFWLARWLKARSIDAHVIHAASVAVSREHRRAKTDRLDSELLKRAFLGWLRGERDHCKMVAIPSIKDEDAKRPNRERESLVGEQSRIVNRMKAALVRLGIRGFNPKLKRAAGRLEDLRTPEGEPIPPNTLAELRRDMERRRLVSNQIRQIEEARMERLEQTPSDGPHAMVRVLARVIGVGTETADMLVQEVLSRNMRDRRAVARYAGLTGSPDESGRKCREKGLARSGNARVRRGMIQLAWRLLMFQKNSALAQWFRARTENARGTRKTMIVALARKLLIALWRLVREGVVPDGVVLRPAQ

SEQ ID NO: 108900 - protein, 350 aa, unidentified
MQYLGIDWAYRRAAWCARGEGGAISGEGVVPADEDGLIRLVLACGTDVKACVEMMSGAVWVRDRLAAAGWEVQVAHAGKVRDVAPLACKTDKVDARVLSELCRRDLVPALWIPSLDDRALRERLRRRMHLVRLRGSAMNRIFGLLTQWGLRMSLKRLREPDAMDLLAARGVEQTWRRSIAEALAVIELLDERIAPLHEELRPFAAADRRVLLLRTIPGIGELLGLTIAAEIGDISRFGSPRKLIGYAGLAPRVNQSGDRSRTGALSKAGSRTLRWAAVEAAHQAWRPTNPWHELYSDLTKRHGKNPAKSAVARKILIAAWHVLSRDQPFKPSRPRGDIPVPASSRCFLAA

SEQ ID NO: 108901 - protein, 334 aa, unidentified
MDTETGEYDERQLNHSDREAEKFYRNLKQRGVNVRVGMEATGHARWFERLMAELGFELWIGDPAEIKAARVRKQKTDREDARLLLRLMSENRFPRIWVPNPENRDLRQLLWHRHRLVQMRTRVMNQLQAIAMGEGVRLRKSLWSRSGRAKLESLQLAPWAAKRRKDLLELLDHLTPKIEELNVAFEQEAWNRPEVRHLMTHPGVGPVTGLAFVLIIGTPQRFGCGKQIGSYLGLIPCEDSSGGRQRLGHISKQGSSLLRFLLVEAAQQAVRFDADWKRQYLHLAMRREKRIAKVAMARRLGVRLYWMWRTGWDGKQALQFGSHAGQLVRSHGLT

SEQ ID NO: 108902 - protein, 340 aa, unidentified
MKNTKYFIGLDVHKEKTSYCVRDKRGNILLENQTATLYSELEPRLKPYLNTAKIGLEASTSYYTLYRMFLTNGYDISVANTIQLRQLIAKNDPLDAQRLSEMLRLGTFPCSYIPDENIQHLRSLVQVRHSLMEEKVRCNTRIQAFLDKNGAVMPSCEAFSKHWRQTLMEHLSKGAVSGELQYEYDHFLFLEKKQRQVEQEMKHYTRMNWKKEYALIQSVTGFGPVLACYVIAHVCPIERFPSNRKLRRYAGVIPVTKQSGQTISKGHIPKGSSRKQLRWALVQAANTAGKTDTPLGRYYRKKKKQKKITAIAKIAVASSMIDILYKVLTTKRPYQALSAE

SEQ ID NO: 108903 - protein, 412 aa, unidentified
MEVLHPRCAGIDVSKKDAKVCVRIQGSTRRKTSSTVTTWGSMTNQILALKDHLLGAKVTVVVMESTSDYWRPFYYLLEDDFEVMLVNARDVRSLPGRKTDVSDAAWLADLGAHGLVRASFVPPEPIRRLRDLTRTRTHITRERTREIQRLEKLLEDSGIKLSSVASDITGVSGRLMLQALIDHQGNSDPAAIADLAKRRMRSKIPVLTEALNGHFTEHHAFMTRLFLDRIDAHTKDIELLSQRIDELMTPFLPARALLESIPGFSQVLAEIFIAETGGDMTQFPTAAHLASWAGVSPGSNESAGRVKSTKTRPGNRYLKGALGIAALNQARSKRTYFSAKFRHLAPTRGPMKAIVAVERAMLVAAWHMLTNGDSYRDPGADYYTRRDPARTKARAVRQLEALGYTVTIQQAG

SEQ ID NO: 108904 - protein, 337 aa, unidentified
MVQDSAGKTLRSGRVKNDRQSLGGFLERYRENSHAVVEATRNWMVMYDWLDDICDDVVLAHPWKVKAIADAKIKTDKIDATVLAHLLRADLVPEAWAPGERARELRVALRERMFYVRLRTMTKNRIVTVFDRYREQTARLKKLGDLFGKAGRIQLAQVNVSEIDRVQIDRGLDFIGDIDVRIEQSEATIRTMTKANANVRLLKTIPGIGEFFARLIDAEIDDISRFRTPNKLAAYAGLVPSTYSSGGKTFHGTIIKQGNKWLRWAFVEAVGPAIASDAQLRAQYEHLKFRGVNKARVAIARKLLTIAFQILRDQRAYEPRGIGTTTTEGASTISRLS

SEQ ID NO: 108905 - protein, 349 aa, unidentified
MRFYNCQHRHYCGIDLHVKTMYLCILNATGQVLLHRNIKTTPEAFLDAVAPYRDDLVVAVECMFTWYWLADLCAAQGITFVLGHALAMKAIHGGKAKNDKIDAHKIAVLLRGGLLPQAYVYPAAMRATRDLLRRRLHLVRKRGQLLAHIQNTRAQYNLPAFEHRLAYPANRDGVSLHFPDPSVRKSVEVDLALIDQYDTLIADLEQTLVREAKCDDGDAFHRLRSVPGIGPILALTILYEIHHIGRFDRVQEFASYARLVKCAHQSAGKTLGTGGAKMGNVHLKWAFSEAAVLFLRHAHTPRVQKLLARLEKQHGKAKALSILAHKIGRAVFYMLARGTVFSMDKFLAA

SEQ ID NO: 108906 - protein, 324 aa, unidentified
MKKLFIGIDFSKEKLDATIILACGMNEIGSREYGCFPNNTTGYRKLCNWVKTNAWNTIAEEWLFCGEDTGSCSIGLSKWLYGKGYDIWIENAYAIKHSSGIQRVKNDKADSAIIAEYAWRQQDKVVPFEPLNESLAQLREIFLYRHKPVGQRVAMELRKEDKSQSNKSKAISFINRKSKHLIAEINKTIAECDKAIDSIIEADEELKENYAIITSIKGVARQNATCMLVYTNNFKKFGYDPRKIACYYGVAPFGKQSGTSVNTPAHTSHFANKLIKSLVGQAAHIAKIYNPEIRDYYQRLISKGKKPQVALNNVKDKLIRIIVA

SEQ ID NO: 108907 - protein, 464 aa, unidentified
MGSMTLGIDVALRAAHQATLADVGITRWKGRRFTTRPAELERLWADLDLEDPAELTVVLEPTRNAWIVLAHWFRSRGARVVMVPTTQSADLRRYYSRHAKNDRLDSEVLAKLPLLHPEGLREFTGPGSADPLRRLVKQRSTMVKRRTAVYARIDALVELLGPAWYAVLGSDYGRAALEFLAHYADPNTVLRLGRARLSRFLQTRSRGQYGATQAEGLIAAAKETLALWGPDGMDFTELGADIAAEADQALFLTAQIKDLDERIANLYAEADPHGIVASAPGVGPVLSAIIAGRIGDPHRFTTLAAIRAYSGLVPKTSQSGTSDPDLTITKAGDPLLREALFMAADHARKSDPQLAAKYVRLMSGDRHRDSAICHLATNLLTRIATCMRTGQPYILRDVDGRQITETEGRQIVRERYHVDHKHRLTAASRRMRTRRQATDRESQESQSAPTSRPVNTTITSPQVA

SEQ ID NO: 108908 - protein, 388 aa, unidentified
MQTVADRPEAPTAIRTDLGAIFVSLELSRSTWLITSLSPGGGEKMSKQVVRGGDVAGLLERFARLREKARARTGKVFPFVVIQEAGLDGFWIDRALQNEGIESHVVDPASIATSRRRRRAKTDGIDGEGLVRALLAYKRGEPRVCAMIKAPTPEEEDRRRLCRERKVLIVERVRHVNRVKGLLFSQGISGYEPLRRDRRRRLDTLQTGDGRLLPVHLKAQVCRELDRLELLLEQIKAVEAERDVLLAAQQVAAPAPAAMLLDIKGIGPEFAAILWSEGLFRHFDNRRQVASYAGLAPTPWQSGSVDREQGVSKTGNPRLRTTLIQLAWLWLRHQPQSALTLWFEERVRRNGGRLKKTTIVALARKLLVALWKYVTAGVVIEGAVMKRT

SEQ ID NO: 108909 - protein, 400 aa, unidentified
MISVGIDVSKGKSTVCILKPYGEIVSKPFNITHTQKDLSELSSMLFRLNDEVKIVMEATGIYHLPVLTYLQEKGFFVSVINPYLMKSYRNESLRKAKTDKIDSRIIANYGIDHWFKMKEFQTSGEIYEELKLLGQQYRHYMKLHLLSLAELTHLLDLTMPGIKNLLASWNETNRKDKRSDFVERFWHYDVITSMSEQEFTEEYILWAKEKKYVPSQEKAKVIYTLAQESIPTLPSETSSVKMLVTEAVRVLKEVDATLGLILSRMQEIAKTLPEYSVVREMGGVGNTLAPKLIAEIGDVRRFRNGKALVAFAGIDPPPYESGQFVGCNRKISKRGSASLRKVGYETMRSLKMRSRPEDPVYRYVVKKESEGKSKKAAKIAGLNKFLRIYYARVTELYKNI

SEQ ID NO: 108910 - protein, 502 aa, unidentified
MSKKKRSVAGLQALYGRVCGLDVHKKVIVACVRILDPKDGTVQSTLRQFGTMTADLRELRQWLVELKVTHVAMESTGVYWQPVFNVLEGHFKTWVVNAQHIKKVPGRKTDMKDAEWIAQLLQCGLLRPSFVPDRPQRELRDLTRQQTKLVQQRNAVDNRIQKVLETANIKLGSVASDVLGVSGRKMIEGLIAGEKDVAALAELAQRQLRGKIPELQRALEGELNDHHRFLLRQLLGQYDFLEKEIASVSERLGAVAPPSFRAAVEQLDAIAGVGERGAQALLAETGTDMSRFPTHKHFTSWAGQCPGNHESAGKRRSGKTPAANRHLDAVLTEMAHAAVRTKNSYFKAQYHRLAGRRGKKRAIGAVKHSLLVTVYFMLRDDKPYKDLGVDYFDKLNPQQRIRYHVRKLQDLGQQVELSPMADASLRRVSTLFAEERQIWKASQSGHFQDAVRSGKTRAGGSVFQTPRLKGRPLTGIRGARNLFSRRSKLPWSRQNSAFFCSI

SEQ ID NO: 108911 - protein, 371 aa, unidentified
MKSIVYVGMDVHSSNYTLSCYMVENDRCFATVQIEPDYMEILKYLAKVQENIGEPCEFRCGYEAGCLGYSLYHQLTDHGVDCTILAPTTMPIYKKNEIKTDKRDAMKIARCLAFNTYRAVYIPTKEDSNTKEYIRMRDAHKRALKTVKQQITAFCLRYDFRYTGGKTYWTLKHIAWLRSLEMDALMREILDEYIQTYQSLMNKLERFDRRIEELAGGTSYADKVKKLSSLIGIRTHTALALVVESGDFARFAKANQYAAFLGLVPGEKSSGEKQNRTSITKAGNSHLRRLLTEAAQCYGRGRIGYKSKALKARQYGNTTETIGYADKANERLRRKYYHMVLKNNKKHNVAVTAVARELACFIWGMMTEHIA

SEQ ID NO: 108912 - protein, 350 aa, unidentified
MRTSQKTPDTIATIGIDIGKNVFHLVGLDKGGAIVVRQKLSRGQLARRLANIPRCLIGMEACSGAHHIGRELVALGHAARLIPAQYVKPFLKGHKNDYRDAEAIAEAVQRPTMHFVTIKTPDQMDLLALHRVRSRLVSQRTGVINQIRGFLIERGITVRQGPMPLRKALADILSCGAVSPRIVCLISDLAEDWRRLDDRIATVSAEIEALAGQDESCRRLMSVPGVGPIISSAVVAAIGNGAGFKQGRDFGAWLGLVPKQESTGDRTILGKISKRGNKYLRTLFVQAAHVVLARRPSAAMQRLWPWIEQASRRLHRNMLAIALANKLARIAWAVLARGRDYQPTITANAA

SEQ ID NO: 108913 - protein, 349 aa, unidentified
MILVGCDLHARDQQVAVLDTATGEIQEQRLTHDGPSVEQFYAALPGPVTVGIESTGYALWFHALLHRLGHEVIVGDAAKIRAMVVRKTKTDRRDAAHLLDLLRHDRFPTVWLPDPAVRDQRTLVAHRMRLVRMRTMVKNGVHAIALNYRLALGPSLFTRAGVAQLQALSLPPHTSCRRSESLELLRWLDTHIKGLDDQIEEAAHAHPEAQRLMTHPGVGPLSALATVLVLGSVIRFPTSKHVVSYVGLAPAIESSAGKHRLGRITKQGNALLRYVLGQAGQAAIKRDPDLRRLYYAVLHRRGRSRAKIAVARKLLVRLYVMLRDQIDYQTFLDRAPAAARRKELMPITP

SEQ ID NO: 108914 - protein, 465 aa, unidentified
MKTKARNSKKQKKKVSIDQGWETINPHAAGIDIGSREHFVCVPPGSAQTTVRSFGTCTADLEALADWLKQCAVTSVAMEATGVYWIPVFQILEARGFEVLLVNPRQTKNVAGRKTDVQDCQWIQRLHTYGLLQGSFRPADPYCVLRTYTRYRDELVGARTTQCQHMQKALQQMNLQLAQVLSDVTGVSGLAIIGAILQGERDPVKLAKLADCRVRATPAAIQKALVGDYRKEHLFVLAQAFALYHTYEEKIDACQQQMVLEIAKLPDRVDLSLQPLPPRKAGRKPFQDRMAGQDLREGLYKKFGADLTAIEGIGVTTSLVLLTEVGPEVSRFASEKRFCSWLGLCPDNRISGGKVLSSRTRRVVNRAADALRMAAVTLETSQSALGAFYRRMKARLGAAEGVTATAHKLARIVYRLLKYGGAYVRQGMEDYEKRFRQRKLLALKRAARTMGFELVESQTVPSGVS

SEQ ID NO: 108915 - protein, 361 aa, unidentified
MEDNRMSMLAERVDGVIGVDTHRDTLAAAVVTHLGGVLAKTSVNADAAGYQQLLDFARAHLPGRRCWAIEGAGSFGAGMAGFAAQHGEQVVEVGRPKRPARRTGAKSDALDAVRAAREALGQDRLASPRRRGEREALRVLLTTRRCATLARVAAIGQLKALIVGAPEELRTELRGRSTRSQILYCASLRERPARSLEHRMTVRALQATAQRIGCPQAEADQLQAELTALVGAVAPWLLEVPGVGPLSAAQVLVSWSHAGRFRSEAAFAALAGTSPIPASSGQVTRYRLNRGGDRQLNRALHTILLVRLRIDPDTRAYIARRAAEGKSRRDAKRCLRRVIARQLFRLLERYDRPGVEILRAT

SEQ ID NO: 108916 - protein, 325 aa, unidentified
MQGKDRSEQETKTKSTVGIDVCKSWLDIHILPSEEAFRVPNTKAGSKEINRRLRRYDVQLIAIEATGKWHRDLHRNLVHHGYAVRVVNPLRARLFAEAMGLLAKTDRLDARMLAIFAASLTEARPPAPEIIEALKELVQARRGAVDEQTSLTNQLKSAATVFLRRQLKLRLTQIAKHIKALETESLKRIKADPGLARRYDILVSIPGFGDIVAMTLLAWLSELGSCTDKQIATLCGLAPWPDDSSDRVGARHIRGGRQLIRNILYLAAITAKSFNHPMKAFFQRLTANGKVKKQALVAVARKLIVLANTLVRADRLWQTEAPKCA

SEQ ID NO: 108917 - protein, 324 aa, unidentified
MQQIQQLVSVGVDMAKYKFDAAFVYGDNDSKVDTFENTNVGIKKFVRLLNKQKTARAVPCVLESTGLYHLNMALRVHQAGYVVSVINPLITKKYQHSSIRNAKTDTIDALRLAEIGLKEPKLPVFSGDIQSIEAKKLMCYMSKLEDIKKQMKASMHFVKMTQEITGLDIDLDHSEEAISELDEQILVLTEKIKSLAPVEAKTLADSVYGLSHEKVAVILAALGDKQFTSRDQLIAFVGLDVMPRQSGTWRGKGRLSKRGNSYLRKVLYQIAWGLKQNNAVFKKRYEELRAKGTNYVTALIILARKFLRGLYAYYWQKKYPQFSF

SEQ ID NO: 108918 - protein, 346 aa, unidentified
MTIVEAARSVTGGIDTHGEVHVAAALDELGSLLATESFPANPDGYSALVAWLRGFGEIVKVGVEGTGSYGAGVARYLARAGIAVVEVDRQNRQARRQSGKSDPLDAVEAARAVLSGRAHGKAKSRDGSVEAIRVLVVAKRSARAARIKALTQMRQLTFSAPDQLQSRLKGLPIAQFVAAAQGLRPTRSPDPVTAATKASLFSLAHRVADLEDEITELDAMITPLLEATAPELLDVYGVGIDTAAALLVAAGDNPERLRSEAAWAHLCGVSPLEASSGKVTRHRLNRGGDRQANRALWHIVITRLASDPKTQAYMERRVKDGRSKREAIRMLKRYVAREVYRYLPRP

SEQ ID NO: 108919 - protein, 400 aa, unidentified
MLYLGIDQHKAQITVNLRNEQGDVVLQRQVSTNHVKIDDFFAKLKKQAAKTKGFMAILEVCGFNHWLIKKLEDYDCKEIVLMQPEKTSNKKTDRRDANVLCELLWNNRKRLQNNERPNGIRRVVWPTSEDAEVRQLASLRQHLVRQRTRCIVKIRGCLRKHNLEQDCPAKSYKTKKAKEWLKALELPSVDRLEVNVHLAVWETLDIELLKVEKELATRSETDKNVLLLVSIPGITHLGAKTLLSRIGDIARFPTPDSLANYFGVTPGCRNSGEKTQHHTPITKAGSSLARSILNAAVNHVVRKDKAMKDWHKNIKKRKGSKTARVAVMRRLATIVWHILKRQTTYQFRYDPIAAVQTKTTPHKKSRSGFRRHDSGVQCVVKENVKKNLPSDKCRTRGKVP

SEQ ID NO: 108920 - protein, 441 aa, unidentified
MVLERLQPQSPCKVVDQLDTARRFMWNEVTSARSPVVPSSIKFSHEGVIVMICVGIDVAKDKHDCFIISSEGEVLQDVFTIPNTMTGFNDLFQRICSASDASGKIKVGLEATGHYSYNLLGFLLDKGLPTFVINPLHTNLYRKSLSLRKTKTDKVDARTIASMLMSDVNLKSYTNTAYHNEDLKSLTRYRFTKVKERAQLKQSISRLVTILFPELEKLVPTLHMVSVYALLRELSGAHQVAASNLTHLKTLLSNASKGRYGREKAIEIRDAARCSIGSRMPAKSLELRHTIRLIEELDAEIAEIETEIKSIMDELQSPILTIPGISYRMGAMILAEIGDFSRFDSPDKILAYAGLSPSIYQSGQLMSSYSRMEKRGSRYLRYALFNAAKFVCHWDETFATYLAKKRSEGKHYNVAVSHAAKKLMRLIFALEKSKKPYSLNA

SEQ ID NO: 108921 - protein, 344 aa, unidentified
MKILKQVAGIDVAQKELVVSLGRMHEDLTTEIYGFKTFRNTDKGFTELVAWATRFTTAEVAVSYVMEATGVYHESLAYYLTDNGNKVSIVMPNKMSNYQKTLQIKTITDKTASQAIASFGLEKKLDIWQKPKQIFRELRQLTRERDQLIDQRTVLKNQLHAERSEAFPNQRSIERMEAHIKLIVKQEKEIMKEIRDIIKQDKEVCKSVSLLCSIPGIGLLTAAIIIAETHCFNLIRNKKQIVSFAGLDVREKDSGTSVKKKPKISKKGNRHLRKAMYFPALTAIRHDERYKAIFERLVSKHGIKMKAAVAVQRKLLELVYIVYKTNKPYDKEYLKNQVINKEAA

SEQ ID NO: 108922 - protein, 415 aa, unidentified
MALKIVYKICCGIDVHKTFVVACIASTNDKGVTSYESHRFSTYTSGLKTLLQWLLKWNCKDVCMESTGKYWIPVYNILENDCSIVLAHPKYVKAIRGKKTDKKDAKWIADLFKHDLVAGSFMPPADIRQLRDLMRYRFKLTCFQSSEKNRLQNCLTVSNIQLGNVVSDTFGKSAQAILDKLLENPADTSFDLEPLVYKSLKKKLPELRDAIDGYITPEQAGKLKVIKAHYESLESRKAELEELILALAAPYQQELAILQTAPGIRSDFTAIGIISEIGTNMEAFPSAKHLCSWAGLTPTNNESAGKKKSVRVSKAGCYIKPLLVQCANAVVTSKKHPEIRNRYLRLKKRRGHKKAIIAIARMLLTALYHMLKNGETYNAELYRKSDLPPVDREITVEQAIIIARNQGYKIKSATA

SEQ ID NO: 108923 - protein, 410 aa, unidentified
MWHHAILALPSRLLLLGATVNSEPSVLLDSAHAIITEQIAALRALHQGAQQRLTTLENDVRATERQLDELVVQQRFAAERGLPAAAALTEPYKDRITTIAVESTFNWYWLVDGLQDHGYHVVLANPAGMQPYSGMKYTDDVSDAYFLAELLRLNLLPTGHIHDRQTRPVRDLLRRRLLLVRQRTMLILSFKSLNERTLGQRVSLARVKAMKVEEAQARFSAPADQLLSGTEIELMGHLSAAITKLEQHLLGVSGQWPAYQRLQELPGIGKILGLTIALETGAAQRFADAGHFASYCRCVKSRRTSNGKKKGENNRKCGNQYLAWAFVEAAHFAGRYDDQCRRFYDRKKQQTNPVIATKSLACKLAKAAWHVMKEDVPYDATRVFGPARKTDIGETGREPAKGSGHPGQRD

SEQ ID NO: 108924 - protein, 412 aa, unidentified
MTAKDQFAAHVGLDWADKKHDVCVQFKNGDRIFHVIEHTPEALDIWLNELHQRAKGRIAIAVELKKGPVVYALQKYSFVTVFPVHALSLARYRQAFWPSGAKDDPQDAELALDLMLRYPHKIKAIEVDNPDIRLLQQLVEQRRLLVEDKRRFVNRLINTLKQYYPQPLEWFSHRDSSLFCELIIRWPSLQQLKRARSDTVRHFMNAKGGPAVAYTEQRVASIASAIPLTTDKTVIEANALMATALASQIKLTGDLIRTYDERIESLFDTLPDAELFKSLPGMGPCMGPRMLAALGDNCDRFNSAEEIQNYAGIAPVTERSGQKSWVHWRWQCAKFIRQTFVEWTAKTVNSSYWARLYYQSQREKGKSHQSAIRALAFKWIRIIYRCWKTRTRYDEAKYLLALEARKSPLLKP

SEQ ID NO: 108925 - protein, 450 aa, unidentified
MTRYIGLDLHKRVLEVCILDQGGHVEARMRLPVDRDSLASFAKSELRLDDRVAVEATTNTWPVVELLRPYVADVTVSNPMATKAIAQAKVKTDKIDARMLAQLLRADFLPSVWQPDADTSRLRQLTNQRASLVADRISIKNRIHAVLHQRLIPPPSARLFNEHGRQWLDQLEIDPDGRAALRRDLHLLDELEHAVAEVDRMLFRLAGEDPRIKLLITLPGVDVACAQTILGALGDLSRFADGDHAASYLGLVPSTKQSAEHAYHGPITKAGNTHARWMLVEAAQHLGNNPGPLGAFFRRLEHKKNRNVAVVATARKLVTIAYLLLTRGEPYRYAMPARTGDKLRNLRLRSGGARRPTGCPKGTRPIAKLPDGSSRTIKPLATLYADEAVPGLLPPTAAEQSMINRNPAVAAFVASLAEPQVRPRQYRKPQIHAPSVDTGGSTDRARRPAR

SEQ ID NO: 108926 - protein, 353 aa, unidentified
MDLYVGLDVGLEETSICVVDQDGRNIREAKVSTEPSAIRSALEGFADRFSRIGLEASSLGMWLYRELHAAGLPVIVVEARHMHVSLSTMRNKTDRNDARGIAQMMRLGWFRAVHVKNIEMQKMRTLLSNRKLLKRKLVDIENHIRGALRTYGLLVGPISRGRFEARVRELIERADYVFTTMVETMLDVRRAVFDGYEKLHKVLLQVIRHDGVCRRLMTVPGVGPVTALSFKVGVDDPLRFTRSRTVGAHFGLTPRRHQSGTSIDYDGRITKQGDVTVREALCEAAASLLLRVRTWSALRAWGLRIAKRTSMMCAIVAVARKLAGILHRMWIDESDFKVGFGAKVTRKLKLKPA

SEQ ID NO: 108927 - protein, 418 aa, unidentified
MNQLTDTEYTAYVGIDWAAAKHDICVQAADGGRREFFCISSQPEGIDAWAQALYRRFGGPIAVALELSKGPIVSALQKYDFFVLYPINPSTLAKYREAFTPSGAKDDPTDAELAVDLITRHPERFSPLKPQSVGMRKLIGLVEQRDKFLGDRGRLVNRLGHALKQYYPQVLEWFSEHHTVVFCDFVSQWPTLNQAKRARKASLERFFRSHHVNSAELIERRITAIKAAMPLTADAAVIDPHRLQVEVLIQQLRITIKALKRFDDEIAATAHKLPDYDLLFSPLPGAAKVLAPRLLAAFGEDRQRYDALQKYSGIAPVTKRSGKTTWVHWRWQCPTFVRQTFIDWSAQTINKSAWAGAYYRQQRAKGCSYQVAVRALAFKWIRILHRCWQDRTPYDESKYLDALRRKGSPLLKYLAQAA

SEQ ID NO: 108928 - protein, 368 aa, unidentified
MTSLKHSGNVWLGLDVHKDSIAAGVLGTQESSPRIELIGPGPDAVRRLIKKVSGSPERVRACYEAGPTGYELHRLLTGLGVRCEVIAPSLIPKAAGDRVKTDRRDAGRLARLLRAGELTAIRVPTPTEEAVRDLCRARADVVEDQRRARQRLGKFLLRHGVVYPGGRAWTVSYYQWLDQVRFAERALIETFRHYRAILAERDAALTAIDADLRPWCARDPFAAQVRRLACYRGVAELAGLTFATEVCDWRRFPSAPSFMAFTGLIPSEYSSGGSQHRGHITHAGNEHLRTQLVESAWTYRYCAQIGRGLARRQAGNPPQTLARSWAAQRRLCARYRRLAARKHVRTVVVTAIARELAGFLWAEMIAAD

SEQ ID NO: 108929 - protein, 419 aa, unidentified
MKCFVGLDISSTKLEVCIMTNDIEMKVLFSATFGNDIIGASEIKEQVLRFNDIYHFERIVIGMEATSLYSFYPAIFFHEDSELKQLRVEVMIEQPAKIKKYREAFEENKNDTLDAFYIADYFRIERFTKSYLKEEKYNALQHLTRTRLQLIEQLVRTKQHFIENIYYKCNTLSIELKNHQLSTNIWSATIMTLMVEDYTLDELASLPLEKFVELIQKLGRGKFKAPDKLAKAIQAAITGSYRLSHVQQDSVNTVLSLLAREIRSLEKMIKEIDRAIEDMVEVLPEYQCLTSVPGIGKVFAAGIIAEIGQIDRLKDHPQVAKYAGLNWKENQSGNTSSQNTSLVKRGNRYLRYYLVEAADSVRKHNVEYAEFYKKKKDEVPKHKHKRAVVLTARKLVRLVDVLLRNHQLYTPPRRFMEDN

SEQ ID NO: 108930 - protein, 316 aa, unidentified
MEVVHARCAGIDVSKRDAKVCVRVTGKGRVKTQETVTTWGSTTNRILALRDHLIVEQVTCAVMEATGDYWKPFYYLLEDAGCEVVLVNARHVKNLPGRKTDVSDATWLAQLGAHGLVRGSVVPPEPIRQLRDLTRTRTVVTRERGREVQRLEKLLEDAGIKLSSVATDIIGVSGRAMLEALIAGQRDPEVLANLALRRLRSKIPALTEPLIGRFTDHHAFLTRLHLELIDRHTQAIDELTARIEVVIEPFRAFRDLICTIPGISTRVADVVIAETGADMTRFPTAGHLASWAGTCPGSNEPAGRVKSTKTRPGNRI

SEQ ID NO: 108931 - protein, 366 aa, unidentified
MKKNNTVATGRKQIFKQAKLTIGLDLGDRTSYYCILDEAGNVILEGNLPTTSNGIRQAFSRIPRCRIALETGTHSPWVSRQLAQMGHEVIVAHARNVRLIGESSRKDDQFDARTLARLARIDPGLLGPVRHRSAQAQIHLTVIRARAALVGTRTALVNAARGLTKSYGQRLNKCGTEQMNRDSSQGLSQELRDALDPLLREIESLNERIAEYNGRIEQIAKEVHPEVARLKQVKGVGTLIALTYVLTLDDPQRFRHSRDAGCYLGLRPGRRNSGKSEPQLQISKEGDRYLRTLMVQGAHYILGPFGQDSDLRRWGRKLAERGGKNAKKRAVVAVARKLAVLLHKLWVSGEVYEPLRNNHKVVSAVA

SEQ ID NO: 108932 - protein, 347 aa, unidentified
MTEQQIHIIGIDLGKNWFHIVAMSERGKPIYRKKLNRSQLAEFIPTLTQCIIAMEACPGSQFWGRRFENAGHIVRIIPAQFVKPYLKSNKNDFNDAEAIAEAGSRGTMRYVALKSTDQLELQAMHRIRQRFIVERTAVVNQMRALLLEHGIVVPTGRALFARRLPTILEDVENSLSVRFRALIARLRRRWLALDDELVSMTAEITQVAGDSELCRCARTVPGVGPLVSTAIVAAVGNGAAFHRARDMSAWLGLVPKQYSTGGKSKLGAISKRGNGYLRMMVIQGARALLIHMKRDKSRMGLWLAEIEKRSHPHVALIALANKIVRICWKVLTTGSEYQAFPTQHNVA

SEQ ID NO: 108933 - protein, 348 aa, unidentified
MTMVGGFDVHRKQITFDYVDDDGLVRWGQIRPATRKTLRAWLGEHCPDGDAEFALEGCTGWRYVSEEVASAGVGVHLGDPAEIAGLRGPKKRAKTDRADARLLRTLLLEGRFPESWIPPAHVLEVRTLGRLYCTLMDERRAWQQRIHAQLFHQGCPPITALLSAAGREALARAELSATGRQYADTALRRIDELSTEIGPLRTQLVNFGRRQVGCQALQAHYGIGWLCAAIIWAEIGDARRFTSSDQLVRFAGLDVTVYSSDGKRSPGHLSRQGSPELRWAAFEAAKCAARRGSPDYAYYHQLAAKRDGHNGKNPTLAVERKILRRCYHTLRELGDAALALPIPEEVAA

SEQ ID NO: 108934 - protein, 311 aa, unidentified
MQITIGIDISKETLAAYRLPDNQHIQVANDRAGHKTLVRWIGKQNRTLVVFEATGAYHRNLEAALAAYGTAFAKVNPRQARRFAEATGRLAKTDRVDAVMLAKMGAVLGLKAHAPKSEVLHILRELITARRALMKDKVAAKTRLQTTRQTLLKNQTNARLKQIEIQIRQVDAAIAEKVALDEALSNRLAILISIPGIAETTAFSMLIEMPELGTLEGKQAASLAGLAPMSRQSGKWQGKERIQGGRAFLRRAIYMPALVATRCNPGLKAKYDQLIRAGKSGKVAITAIMRKLIVMANALLRDGRKWSELRP

SEQ ID NO: 108935 - protein, 359 aa, unidentified
MQRNKISFKGQKIYIGIDVHAKTWEVCVLTESGYKERHPQQASAKTLFDFLKKHFPDGEYHAVYESGFSGFSTYYALKEYGINCVVTHAADVPTTQYEEVMKTDKVDAAKLARSLRAGDIRPIYIREKENIDDRSVIRIRKTIQKQLSGYKARVKHLLHCNGVEIPEQFARPGTHWSRAFIKWLKEDVVLLSSSRLSLDLLVKQVETIRQTLLDATKSIRRLAQTNRYRNNYELLMSIPGIGVSVAMCILTEIYDVKRFRNENQFASYLGLIPTCHNSGEKTASGEKTFRGNKHLGPMIIEAAWIAIYRDYGLGMAYARYKQSMKPQEAIVKIARKMSNIIFSVLKNSRKYEPYRWDKE

SEQ ID NO: 108936 - protein, 322 aa, unidentified
MSVTVLGIDIAKQKLDAALLVDGKTKHKACQNSAEGFETLMVWLEKQGIQKVHACLEATGNYGEDLAIYLHEAGHIVSIVNPARIKGFGQSELIRTKTDKIDAALIGRFCLAMKPGPWIPPTPAIRSLRALVRRVDSLIDMRSQEKNRIGTAHESVIFLIKEHIAYLNQEIEKIRQQIADLIGQDPNLKRKHDLLDSIPGIGKATIPHILAELDDLEKFDHVRQLVAFIGLAPKETLSGSSIKGKPRLCKIGHARLRKALYMPALVSIQCNPVMIAFYNRLKDKGKNGKVIVCAIMRKLVHVIFGVLKSGKKYDPNYKPAFA

SEQ ID NO: 108937 - protein, 387 aa, unidentified
MTQVNDSSRSLVSFEQNSSVTVVVEMSESSWLVAGQVPGLDRQPLKKLEPDPAALLRLVERWRDEAVKAGRTIKRVALAFGAGRDGFWLARWLRARDIEVHVIHSTRVAVSREHRRAKTDRLETAMLTRVFLGWLRGERGHCGMVVIPTLEEEDARRPSRERESLVGERTRIINRIKAILAWLGIRGFNPKLRKAVERLDALPTPDGVPLPPNTIDELRRDMARLTMIREQIKVIEEARLARLEQAPATGPHAMVRLIVSVVGIGVETADMLVQEVLSRNLRDRRAVARYAGLTGAPDESGSKRREKGLAKTGNARVRRGLIQLAWRFLRFQNDSALAQWYRARTEGPSGTRKTKMIVALARKLLIALWRMVKIGEIPVGVTLRQPA

SEQ ID NO: 108938 - protein, 355 aa, unidentified
MESTKYIGMDVHKEATSVAVMNSAGRVVMESILETKAATILQFMRGLRGNLLVTFEEGTWAAWLYDLLKPYVTQVTVCDPRKNALLKSGNKSDRIDPRKLAELLRNGSLSAVYHGENGLRILRELSRSYLTLSKDLTRVMNRLKALYHSWGIACSGTQVYAPRHRSEWLSKITEAGVRCRAEFTYHQLDGLQALRQVVRRNLLAESQKHGATKLLRQIPGIGPIRAPLLVAILQTPHRFRTKRQLWGYSGLAIETHGSGEYRYVGGQLQRSQKAPLLRGLNKNHNHDLKAIFKSAAVRASSAAGPLHQFYEGLLAKGMKPSMARLTLARKIAAITLSVWKKGARFNAEHLKPQAA

SEQ ID NO: 108939 - protein, 338 aa, unidentified
MKITTLGLDLAKNVFQLHGVDEKGKVVLRKKVMRSRLMAFMVQLPPCLIGMEACAGSHYWARKFQEMGHTVKLMHAKYVRPYVKTNKNDARDAEAICEAVGRPEMRFVPVKTVEQQELSALLTVRALLVKNRTALINQIRGLLMELGIVFPRKAERVLPMLAELVDPEHPDLTPFSKTNFEGLRAHLSDLTTRIKEIDQKVEQLAKDHPIAQRVDAIPGVGPLTAVALIALLPDISFFENSRHLSAWLGLVPRQHSSGGKNSLGRISKRGNQMLRTLLIHGARSVVRTAGMREDSLGAWIRKHEIRGGMNKTVVALAHKNARIVWALLARDREYKVPA

SEQ ID NO: 108940 - protein, 375 aa, unidentified
MNLKVRFLGLDVHAETIAVAIAEPDGEVLSLGTIANRAESIRKMVKKLGSVEELKACYEAGPTGYVLYWQLAELGVACEVIAPTLVPMKAGDRVKTDRRDAERLARSFRSGDLTPVWVPNEESESLRDLVRAREAAKQDQLRARHRLSKFLLRTGQRPAVGVKAWTLVYMTWVKQLRFTQVARESTRLDYLHEVEHLGERVARLEQAITEAVKMASPAVQEVVKGLQALRGIAQISAVTIAAELGNITRFENARQLMGYSGMVPSENSSGGRTQRGRITKTGNAHLRRIAGEAAWSYRMRPCVGPALRKRQEDVPEQIKEIAWKAQVRLSKRYAKLAAAGKDQRKIVTAVGRELLGFIWAIGIKAEEAAMQKIAA

SEQ ID NO: 108941 - protein, 314 aa, unidentified
MPQLVQSAGIDCGKRFLDVAVHPGGEQIRLENEPADHQRLVVWLKERGVTRVGLEASGGYERAVRDVLCAAGLEVHILDPARVRHFAKAKGRRAKTDPIDARVIAEFTATLVDTPPVTVEPAREDLAKLIRMRRLLVDKRADMTKAIKDLPDAARTVVETALASLATAITELEELIDRQAGADAALAKRVEALCSAPGIGQTTAVAVAVLLPELGRISGCAIAALLGVAPFANDSGDRKGERHIAGGREDVRQLLYMSVLRAATQGQGVLRAFYLRLTGHGKPAKVALTACMRKMIVRLNAMLATNQTWKEEPA

SEQ ID NO: 108942 - protein, 356 aa, unidentified
MKQLENIKKFVTNKMVYCGIDIHKKHWSLCYFCDGMVIEKITLAGIADKLFSHTERFYGTARKVEFVYEAGFSGFYLYRKLKARNYDCIITPPNRVPKSQNKVKTDKRDAQKLAQYLASGILKKVYVLPPSAEADRQVLRLRKSFQKKLTRVKNQIKSYLNLHGINWATENGNKWTNKYIAWLKSLEFEIPNQRVIIEEYLNEYRFLRDQIAKLTRQLRVMSKQKTYSKNFNRLVACKGVGLITAMTFLLELHDLLRFSSAEKYCSYLGLTPSQFSTGDHKRLGHITREGNAHVRCVLVESAWTVIRHDPFLRDKYNRIRAKGTNGKKAIVATARSLAVRLRRCLLDETEYVIGVC

SEQ ID NO: 108943 - protein, 457 aa, unidentified
MTRRKHSRPARDIAPVHPHAAAVDIGATLHVAAVRPGCDPEPVRTFGTFTTDLHRLADWFEQCGVETVAMESTGVYWIALYEILDQRGFEVVVVNARDAKHVPGRKTDVSDAAWLQRLHEYGLLRASFRPKGEIATLRSYLRQRERLLEGAAAHIQHLQKALTEMNLQLHHVVADVTGVTGLRILRALVAGERDPDTLAAYSDPRCKAPAETLRAALVGNDREEHVFALAQALELYDIYQAKVTACDQRIEAVLERLKADSPPPAAALPPARPRRRQANEPGFALREALHAILGADPTQIDGIGPSLALTLVGECGTDLSAWPSAKHFTSWLSLAPHNKISGGKVLSARTRRSGSRAAALLRLAAVAVGRTATALGAFYRRLAARVGKAKAVTATARKIGVLFYNMLRHGMDYADPGASAYAARYRQRVLSNLRRRAKSLGYVLQRADPASAAIAVS

SEQ ID NO: 108944 - protein, 359 aa, unidentified
METKVNKKLFEGQSIYVGIDCHKKNWTVTILGEEYEHKTMSQNPDPDILSSYLKRNFPGAEYQAVYEAGFNGFESCRKLREAGIKCFVANAADVPTSHKEKIQKLDPVDSRKLARSLRSKEFKPIHIPDQWLEADRALIRQRFRMMKDLSRTKSRIKSILFQFGIQIPDRFTAAQTRSWSRNYMKWLETLSVNHESLRQTITNYLSIGEAQRKELLLINRQVRALSQSEKYRFNFGLLISIPGIGLITAMMILVQIGDIKRFDSLDDLCNYIGLVPSMHGSGDKLQTGKMIHRGRKELKILLIEAAWEAVRLDPVMMSTFNRLKLRMNKYKAIIRIARKMISRVRAVLLTQTQYQIGFN

SEQ ID NO: 108945 - protein, 357 aa, unidentified
MRIIGCDLHTRQETMAMLDTETGEVLEKTLQHEGEKVREFYSALPRPVQVGIEATGSMLWFLNLMEELGIDSQVGHPAKIRAAEPRKQKHDRRDADLLLKLLMENRFPSIWMPSKELRDLRALLWHRHQWVRTRTRVQNALQAIALTNGLRRGKSLWSQEGQHAIASLPLGPHAAHRRTALQALYRELDADINALDKRVLEQALERPEARRLMTHPGVGPVTALATDVFLGDPVRFENAKALASYVGMIPSEYSSAGRQRLGGLSKQGNPLLRFLWCEAAIHAVRRDPLLQRFYRRKLVQKGMGKARVAVARKLGIRLYIMLRDQIDYEEFCRRGQMRQKSGAARAGIPEVGYGPSL

SEQ ID NO: 108946 - protein, 411 aa, unidentified
MNPVVGLDIAKGESQVQAFLDRKKPFKSSFKVSHNLEGLDTLHQFLREIENLTGVKPPIVLEATGHYHSPVVQYFEDRDYLLIIINPLISYRAKSSSLRKVKTDKIDAYHLCELYYKEDLEPYKKRGIQLLNLRNLTRQYENLTGIFVQAKLQFQAVLDQVFPEYRGVFGDLYSVVSLQTLLEFPTSDDILETSEETIAARIKEYCSSRSRGWANTKAKELKAAASRNPFQKTLYQSHILTLKMYINMLLEYKKHLSVFEVEIDALAKELIEYKIIQSIPGIGEKIAATIISEIGEIDRFNHPKKLVAFAGIDPSIFESGRFKGTVNRITKRGSSRLRRALYLAVKCAIRDCRKKKTTKEIIPRNKRLREFYDKKREEGKPYKVAVIACANKLLQWIYAILKSNSTFQDVA

SEQ ID NO: 108947 - protein, 361 aa, unidentified
MTNTSREQQLTAGLDLGDKYSYLCVLDTDSGELVEDGRLRTTPEDLRRRFDFEKKLRIAIEVGTHSPWVSRLLEACGHEVVVANPRKTRLIYGDKRKTDELDAQKLARLARADPELLYPIEHRGEDSQAHLALIHSRDALVRSRTQLINHVRGMVKSFGARLPKCSAESFHKKVADALPSELAEALGGVVETITSLTERIRDYERRIERACKESYPQETGLLRQVPGVGAITSLTFVLTLEDPDRFEKSRAVGAYLGLVPGKDQSGESDPGRPISREGDKMLRRLLVSSAHYILGPFAPDCDLRRHGEKIAERGGKNAKKRAVVAVARKLSVLLHRLWITGEAYEPLRNARLSRALGEEVA

SEQ ID NO: 108948 - protein, 348 aa, unidentified
MALTIVETRAITGGVDTHADVHVAAALDPIGGLLGVAEFPATPAGYARLLGWLGGFGTVCLVGIEGTGSYGAGLSRHITTAGVRVVEVDRSDRQDRRRQGKSDPLDAVSAARAAQSGRARGAPKGRDGAVEAIRALMVAKRSARSERTQTINQARSLIVTGPDDLRTRFARHTVAALVAETASLRPRPGGTVGYATRIALRELGRRAQFLDGQLERLDELIVPLVTAHAPGLLALYGIGPGTAALLLIAAGDHPGRLRSEAAWAHLCAAAPIPASSGKRTRHRLNPGGDRQANHALWRIVITRMSSHPPTRAYAERRTAGGLSKTEIIRCLKRYVAREIYPRLRAAAD

SEQ ID NO: 108949 - protein, 315 aa, unidentified
MVDVPCFVGIDVAKAQLDIAVRPSGERWAVPNDADGVVTLVDRLQALHPTLIVLEATGGLERIATAALATAGLPVVIVNPRQARDFARATGQLAKTDALDARALAHFADVIRPTPRPLPDTQTQELRALLSRRQQLIGMRTAEQNRLAGTSERLTQDIEAHIAWLNARIATLDDALETMLRASPLWRENDDLLQSVPGIGPVCARTLLLELPELGPRTRQQIAALVGVAPLNCDSGTLRGRRTIWGGRAHVRTVLYMGTLVATRFNPRIKVFYQRLLAAGKLKKVALTACMHKLVTILNAMLKHRTSWQAQEVQN

SEQ ID NO: 108950 - protein, 385 aa, unidentified
MKEQNFVPREFDIFGGLDVDKKSIAVTFMNHQGVLQSFSMPHRAEHLLSYVAKHFEGKQVAFAYEAGPTGWGLYDKLTGGGHLCVVAAPSMIPKVPGQRVKTNRLDSKKLSEHLRGGQLKSVHVPSESYRQLRQLVQLRDTFVQDMVAMKLRVKAMLLFEGLEFPPAPAGSQWSLIVRGKLKKLSCSSAVRFKLDQLMESLEFSEKRVLQTIKEIRRFYQQDPELSQAMTYLKSLPGIGEIVASHLLARIGDPQQIGNVRQLAGFIGLAPTEHSTGERVARGHITRSGDGRLRSKLIQAAWSAIRQDPELREFYRSVYQRHPRDRAARKAIVAVARKLTTRIYAVLKQQRPYVVREIVHSAPLTQEETSPQGTTRRLIEPGEILS

SEQ ID NO: 108951 - protein, 345 aa, unidentified
MTPLTNRPPYQLFVGIDIAATTFTAVWTTDGPPRERARPFAQTPAGFAALQDQLRATGVAPAHILIVVEATGSYWVALAVCLHQAGYVVSVVNPAQAHNYAKSLPRRAKTDVLDAPVLAQFAAERKPAPWTPPPAVYHELRQRLVARDALLEMRQQARNQRHALLQWPIVIESVKTHLDGVIMELDQRVAALDAEVAQVLVDGAWAESATLLLSITGIGLVTTAWLLVGTLNFAGCASVASAAAYVGLVPLAHESGSSVRGRAQIGHGGHKRLRTALYLATLTAARFNPIIKAHYERLRAAGKPMKVARCAAARKLLHLAWAVVTKRQPFDPAYRERMMEERLAA

SEQ ID NO: 108952 - protein, 353 aa, unidentified
MIIIGVDPHKTTHTATVLEGATSTELGTLRITASLEDYQRLLAWADAWAPRQWAIENAEGLGHHLAQWLLAHGEEVLDVPPTATARFRSLSRGGRRKNDRIDAAAAAGSAAVHGDSRRVFPEGHADALALLAERRQSLSQHRTRLLNQLHALLRELVPGGAPRSLTATRAAQLLRRVRPISTADRIRRQLARDLIAEVRHHDRLVATNTEQIQELLSEQPTTLTEIVGIGPVLAARILAGTGDPRRFPTAAAFANYSGTAPIQIASADHSRHRLSRYGNRDLNSAIHSVAIIQIRTRSSAGHAYYAKKRAEGKAPREAIRCLKRQLASTVWRTMIKDCSARSTQVPETVALAA

SEQ ID NO: 108953 - protein, 387 aa, unidentified
MIYYVGIDISKYKHDFCIISNTGEVIVENSSFENNKKGFQLFLDQLKPYNKQSVQIAFEATGHYSLNLELFLTNQDYSFMKVNPLVVHQFLKARSLRRTKTDKADSFTMASYLMSIQYKPNSYLLYNIYTLKSLCRSREQLIKERSKFEVLLTNELDKSFPELKPFFNNMISNTLLFILDKYKNIKHISLMKDYDSIRCVARGKFTYAKFAQLKELAKNSIGHHDENTDLLISTYVSIINNFNEKIDPINKQISTIIKDLNPRMLTIPGLGEISAAIILSEYGDISNFSNPNKMLAFAGLEPSIIQSGTLEHNGKMVKHGSGHLRYAIMNIAMSILRYSPTFYDFYLKKRSEGKCHRVALSHVCKKLIRVIYTLEKNNLDFDPSLLK

SEQ ID NO: 108954 - protein, 385 aa, unidentified
MLKIVYPICCGMDVHKSFLVACIASTNECGVTTYKSRRFSTFTKDLRLCADWLSANNCKDVCMESTGKYWIPIYNILEASCKIVLAHPKYVKAIRGKKTDKKDAKWIADIFKHDLVSGSFIPPADIRQLRDLVRYRWKLNNFIVGEKNRAQNCLTVSNYKLDDVFSDVFGKAATQITSYLLEHLNEPLSDVSNFRTKGMKATDAEIRDAADGNICAEQAEKYTSQLSLVMSVPGIQTFSAISVIAEIGVDMSVFPSSKHLCSWAGLTPQNNESAGKKKTTRISRAGAYIKPLLVQCALCAIRAKRNPEIRNRYLSIKKRRGHKKAIIAIARMLLTAIYNILKKNEPYNAELSHKVDVPPAHRSVTIEEAVFILQRQGDLITPCTS

SEQ ID NO: 108955 - protein, 367 aa, unidentified
MSITKFIGLDVHKETIAVAVAEDGRAGEIRFYGTIPNTPDAIRRLVCRLAVPEVTLHFCYEAGGCGYGIHRQLLRLGVDCSVVAPSVIPRKPADRVKTDRRDAELLARLLRSGELTPIWIPDPAHEAMRDLVRSRRQVRQDLVASRQMLLGFLLRHGRKFTGRSNWTKAHWRWLGSQAFEIPHQQYILGESIRRIEEAQQRCDRLDAMLVEALPRWSLAPIVRALQASRGVGPIVAITLAAEIGDLSRFETPKQLMGWLGLVPSEASSGTRTRRGAITKTGNRETRAMLVEAAWSYRLPAREERRYRARVEDLPEEIRAIAWKAQVRLCQRYRTLAASGKALPKVITAIARELVGFIWDIGRRMQPT

SEQ ID NO: 108956 - protein, 355 aa, unidentified
MSDINYIGLDVHKETISIAVLNGRGKLVMESIIATEAATILQFIHSLRGQLHLTFEEGTWAAWLYDLLKHHVHKLVVCNPRRNALLKEGSKSDKVDARKLAELLRAGLLRPVYHGENGLRTLRELARSYSTLGKDMTRVMNRLKALYRSFGIPCGGVQVYDPRYRQQWLEKIPEAGVGRRAEIFYEQLDALRPVRQRARRELLRESRRHQAAALLRHIPCIGPIRAALLVALMQTPHRFRSKRQLWAYSGLGIETHGSAQYRYVSGQLQRSKKPQQLRGLNQNHNHDMKELFKSTATSATRCRGPLQDFYANLLAKGMRPEMARLTLARKIASITLTVWKKGERFDANQLKAQAA

SEQ ID NO: 108957 - protein, 349 aa, unidentified
MAMTIVEPAGRAVTGGVDTHLDVHVAAALDEIGGLLGVESFEASGAGNDKLLAWLQSFGAVAQVGVEGTGSYGASLARSLRAAHVKVVEVDRPNRQARRRTGKSDPADAVEAARAALSGRAQGAGKTRDGNVEAIRALVVAKRSARSTRIQSLNQIRHLGFTAPDELRERLRGVSRDHLGAVAAALRPRADGDPVMRATKTSMRILGRRVRALDDELATVDALLAPLVATTAPSLLKLHGVGVDTAATLLVAAGDNPERLRSEAAWAHLCGVAPIQASSGKVTRWRLNRGGDRHANGALWVVVITRMGSDPRTRAYVERRLKEGRSKPEIIRILKRYVAREVFHQLPRA

SEQ ID NO: 108958 - protein, 387 aa, unidentified
MSVIIGMDPHKRSATIEVLDERGAVLAKGRFGTDKSGYRDLLAEGRRFADRVWAVEGCNGIGKHIAHRLVHDGETVLDVPPKLTAQVRVFATGNGRKTDPVDAHSVAMVALRTATLNRVVVDDDLVVMGLLADRRDELGRARTQTVNRLHRLLLELFPGGAKTFLSAQQARALIATVKPRDLPGKTRRRLAVELISELEAIDRKIKTVKKELTTLVTARGSTLLELHGIGPSSAARLLADVGDIHRFADRDRFASWNGTAPLDASSGNQQRHRLSRAGNRRINRALHIMAVVQLRNATEGRAYYDARKAGGMPSMMAMRALKRRLSNVVFARMLDDQKRREAAGPGGQPGNDSVSNAADSHPDIDSSDKPLPGPATAKPRTTLPAAS

SEQ ID NO: 108959 - protein, 425 aa, unidentified
MNVDSIDEPRFAAYVAIDWGDSKHVWSLQPADSDRREHGEIEHNPEAVAAWAAMLSARFGGQPVALAVEQSRGPLVFMLGKYEQLHVYPIHPRAAAQFRAALFPSGAKDDPSDAELLLDLLVHHRARLRQLKPDTEQTRLVQHLVEGRRKLVNERTRQTNRLTAQLKLYFPQMLDWFDAVDSPLVGALLKRWPTLEALQKARPDTVRSFFTAHNCRSQELIERRLDQIRQAVPAVRDKALIEAAQAMTKVLVELIATLREGIASFDRQIAQAVAAHPDFAIFDSFPGAGPALAPRLLAAFGSQRERYQSAADLQTFSGIAPVTERSGKSQWVHVRWACPRFLRQTFHEWAAHSIGFCDWARAYYQQQRGRGKDHHAAVRALAFKWIRIAFRCWKDALPYDDARYMQSLRRRGSPLIAALAKPELP

SEQ ID NO: 108960 - protein, 394 aa, unidentified
MFFVGIDVAKRKHEAVVIDDKGRIVQKSFSFPNSLSGYNSLISCVKRITSTRKDIVFGMESTSHYWLALYSHLIKDGYTAHVINPIQSDAFRGLFIRQTKTDPIDAVIIAEVIRFGKYSSTHFPQHKILALREMCRNRLYMVDAISDLKRKTIALIDQVFPEYDQLFSDTFLVSSIEVLYRYPTPKKLLHIRRNTLTNLLIKTSGGHFGSAKADEIIHAAKNTFGIDDPYDVYADLIQTFIKQIKFIQKNVAEIDQKITAIMDEIASPITSIPGIGATLGAVILSEIGDISRFKSADKLAAFAGIDPSLKQSGDYSSIRNHMSKRGSPYLRRALWMACIPATQVDPMFRAYYLKKRSEGKSHMKTMGHVAKKMICVIYAVLRDNKEYQPVLTAA

SEQ ID NO: 108961 - protein, 428 aa, unidentified
MPQGSGMQGATLAHVTTSTIDPTLTEAAATEVFAGIDWGGSFHQICLIDEDGKVLRQQRVPHDAAGFDELDRLLTCHRARLRVAIERAEGLLVEHLHLLGVEIFCVSPKISARARERYRMAAAKSDAFDAFVLADTLRHEHRHWRALTPPSPVLAELRAISRDRDRIVIAQQATENRLRAVLEAYHPAPLHLFSTLDRDITLDFITDYPTPEQAGRVGTARMDGFCRRHGYSGRTQPEVLVERLRPHLLSAGEGTAAGKAFSANLFTEQLRMLNTHLRAYDKRLDELLERHPDTPIFTSFPGVGPVVAATLISEMGEDRHRFPAPGALLAEAGLSPVTRASGRTRQVRFRYASNRRMRHMIDWWMFTAIREDDWTRQAYDHARARGQGKYRALRGLGSRWTRILWRCWTDHTRYDPAIHHRNPEPTTA

SEQ ID NO: 108962 - protein, 405 aa, unidentified
MNSYSYNAFCGIDISKDTFDYCFINQNKQILEQGKFPITQESLNFIKDFALSDVNQNTAFLLESTGKYHYRVSNFLISAGFDVFVVQPLLIKKYYESKDLRKTKTDKKDARLIAEYGVDNHNTLYLYNPEYDPLKELLRFRSNLIREMTAKKNALKLRMISTFPELVGVKKDFIFTKTILSLLRECCLPNELCKKRISTIEKMLKRHNPVRLSITAFGLKEMAKTSIGCNNVNSQLIITEIVDGITETMTRISKVDAEIEKQAKDRYENEIKILTSIKGIGKVMAISFLIESKDIRLYSDWKKLSAYAGIDPSVMQSGSSVNKPGKISKRGNRYLRYILFLMADSVRKFCPRYNQYYEKKLNEGKKYKVRIIAVANKLVKLIFVLLQKGECYEENYENNLSLAKP

SEQ ID NO: 108963 - protein, 346 aa, unidentified
MLHAGLDLSRKRLDFHLLDEAGETVEVGAAPPDADGLRGLAARVSRHRQPLQAAIESMTGARFVHDQLELHGWEVEIADAAKVKGLAPLACKTDKIDAWVLAELSRRELVPAIWMPDPQVRAERERARFRLHLVRHRSSLKQRIHATLLTHGKPCPVSDLFGVRGRELLARLGLPEPWASDVEASLRLIDELEREIEACERELRRLGAAHPYVPLLTTIPGIAWVLAYTIAAEIGDIARFGSPTKLAGYTGLCPRVYQSGESDRRGPLSKKGPRYLRWALVEATSHASKHPVYRERYQRTKSRLGKQRGPKVAQVDLARRLAEAIWHMLTRNRPFAPAGAPAPMTA

SEQ ID NO: 108964 - protein, 451 aa, unidentified
MPKQHNKPVSLPVIEPNAAGIDIGATEIFVAVPADRDPEPVQCFPTFTIDLERLADWLQQCRIRTVAMESTGVYWIPLFQILEKRKIDVRLVNAHHVKNVPGRKTDVSDCQWIQHLHAVGLLRGSFRPDDEICAIRSLWRHRDNLIQLATLHLQHMQKALDQMNLQIHHVISDLDGTTGLAIMDAILAGERDPHKLAQLRHPRIRASEETIIKSLVGDYREEHLFTLRQSLKAYRYYQELIQEVDAQVKQMMQRLPSKVPEDSTPPMGNKRRARKVPWRNEPPQLRNDLYRAFGVDLTEVPGINSLTAQMLLTAVGPDLARFPSAAAFCSWLRLCPDPKISGGQVLSSRTRPTKNRAALALRVATQALNRSDSFLGDYFRRMKARMGTPKAMTATAHKLARIIYHMVTTQQEYDATIFQKQEERRRHQKSARLHVQARELGFQLVPIDVVP

SEQ ID NO: 108965 - protein, 323 aa, unidentified
MNKYNETFGIDISKDVFDCYGSTQGHLQFKNDELGFKKFHKLLSKNSLVVMEATGYYHYRFAQFLYKKGVAVSVVNPLSIKRFIQMKLAKVKTDKSDAKAICNYGLTQEVLVYNALTDTQSECLQLFRLMDNLLKTRTATKNKIHGEKVLGIPSRYVFRSLNKTLKHLNNELKGIDAKLLSLVKKDQQKQLTLLQSIPGVGLKTALFLIVVTDGFKKFETASQLCSYAGITPTIRESGSSVRGRARISKVGNRKLRNLLFLCAMSAYKHNKPCIEIFERITNKGKSKKLALIAVSNKLLKQCFAIAKSGIPYDANHVSVLKTR

SEQ ID NO: 108966 - protein, 362 aa, unidentified
MENIFIGLDIGKKNVDVAVPVGNGGFSCFRVNNTPEGFAKLQADLEKRKKDLANKKMKVLFWLVSEATGIYYVPIHTYFVSKGYNFTVVNPLSISKFREEQLKINKTDKEDCKLISKFGYQNAVRLGSTPAPDLEIRKLTQLQVLRRCLQQNLQRLGGVMENLKFAQIKENYVDSFVQKSITDTKNEFLEVQGKLIEVIKLVYPKEYKCLESIPGVGPNLIIEIITETENLQKFNNLKAFRSYAGVVASNHESGTSVYKKPKLAKTANRNLRRALYLSSLTAARHNKECRELHDRLPPHLLPKQKLIHVANKLATQIWFCVRNKELYKPESQRTKAPLPPKGGSKRRGFGFSKPKRHHYCSF

SEQ ID NO: 108967 - protein, 345 aa, unidentified
MDSMYYIGLDVHKKTISYCVKDASGQVRQEGKIGATRWELDSWMRTLPQPWTVAMEATIFTGWIYDHLLPHAAQVKVAHPVMLRAIALAKKKNDCMDAGKIADCLRCDFLPECHMVSTEIRDRRRTLRYRHLLVRQMVQMKNRVSGLLMETGVSYNKQRLHKVGYFRELLSSNEEIHSSIRPLLKLSRETIVRLQKTEYALVSSLQRDPLLADRIQRLRTVPGVGPITALTWALEMGDVSRFRSIKQAISYCGLCGDEKSSAEKVLRTPLSKQRNKHIQRVLVEAAKLAPRQDHQLALVYETEKQKGNANRATLAVARKMVAYLLAVDRGERDFVPAEDHRGAAA

SEQ ID NO: 108968 - protein, 320 aa, unidentified
MENIALIGIDLGKNSFHIHCQDHRGKAVYRKKFTRPKLIEFLATCPATTIAMEACGGSHFMARKLAELGHFPKLISPQFVRPFVKSNKNDFVDAEAICEAASRPSMRFVQPRTESQQAMRALHRVRESLVQDKVKTTNQMHAFLLEFGISVPRGAAVISRLSTLLEDSSLPLYLSQLLLKLQQHYHYLVEQIKDLESQLKRKLDEDEVGQRLLSIPCVGTLTASTISTEIGDGKQYASSRDFAAATGLVPRQYSTGGRTTLLGISKRGNKRSELCWFSVPGYSYKNWNTSLASWPTGSGSCCVGKATLSSPVLWQTSWPE

SEQ ID NO: 108969 - protein, 344 aa, unidentified
MKFIRFIGIDVSKKTLDASIFVADEVINKFPHIQVRNDRQGFKDLLRWTKDQGVKPKDALFGLEFTGYYSDELEQFLTKKQISYTMLPTTVVKHYQRGTRDKNDKIDSAKIADYLFRFNGTECIKLRVLPSKAMQQLKALKSERKFLVQHRVACENRLQVAKSKSEEKHLQKLIDLCKEEIEQVEKQIADVVTSDEEIYTTFRLLNSIPGIGFVNAVNTIANTQNFTAFETARQYAKYLAVAPSEHSSGTSVHWRRRPSPHADLQAKADLSMAALHAIELSAEMRQLYERKLGNRPKDKDMQKKALNAVKFKLIREMFAVVKQARNFELRGLDKAQAETHSTGK

SEQ ID NO: 108970 - protein, 406 aa, unidentified
MRGPVITVDVSKGSCHYQPFLENGKPLRKPKVLHDTIEGFNQLMETIEMTREKSSGEKVPVVFEATGVYHRCLQKYLDDNGISYYIISPLLSAAYRKTNLHSNKTDPLDCAHIAKAYYCEGNLLPFPQQEDIYVKLQKMNRYYETELIHLKKRKVSFRSFLDIIYPRLDKCFGSNASLYDPIPMEVLKKYPHPSLLLKHREETIVKAIEKKVNHDKRFIEKIVHKMYECASHCYSGAEIEDIEVIKLPEMIEELQDQIKLCDSILDGLICEAEKIPYFNCIVSIVGIGRNLAARIIAELGDMSRFPNRRAISAFAGLNPKILQSGDVDGTHLKISKKGNRHLRCLLYLGATCNFRFKKHDPLYEFNQKKRQQANFPLKPKAANTATAHKLLIMIYAMSQSGESYRF

SEQ ID NO: 108971 - protein, 350 aa, unidentified
MDKELYIGVDVSKQTLDLAYYDGESIDWKKAHIKVSNNNAGFKKIGSWVAKVSKGFDIVLFCMEYTGLYTQNFRLWLEEKHYIYRMVEPRKMHRFEPDLDDGLRSLDRIKTDELDSFRIAIYCEQNHRKILRNPSKLPPPVYFKLKRLLAERKQTVKQSVLYKQQLHDICAYDTDLSVERKNGQLKTLNDALKGIDNEIDMYIKEDADISKNFSLLTSIPGIGRVVALETIVLTENFMAIDNPRKYACYIGVAPFKKESGTSVRKGSSVSKKGFKQAKADLSIACLVCMQHIPNIRDYWERKRKEKCSGIVFNAIKFKMILRMFAVIKRGTPYVETDNYRNGKNKQPGVN

SEQ ID NO: 108972 - protein, 403 aa, unidentified
MSHYLGIDWSDKKHDLCLLNQEGRILSQFTITHDMKGFQVLAATLKTLNDVQINLERSDGLLVDWLSSQGWPVYVTPPIVLAHRRPRRSKDDRGDAYLLAHLLRMQDLECRPLILHSEIVHHLKQLAQAYDGVLQEQRRLSNRLTYLLKQYYPTAVRAFSMPNKLIALTFLERYPTPEAAEATTVKELHDFLKAQHYPGNAERKSVQLYAHLHTPMPTSRMQAGLVEHVQVLIPLLRSLYHSRSGLDKRMLQVFDSHPEADWWRQFPGAGPLTAARLLAWIGDNRDRFPSAQVLQAIAGTAPITRRSGKQHSVEFRSACCHPLRKAMDDLARESLPKSGWAQAYFQEQLAAHRKPARAYRALANRWLAIIWKLWKTGEQYDEAIHLANRSRRGREPVGEQQIA

SEQ ID NO: 108973 - protein, 355 aa, unidentified
MSQEKYIGMDVHQATISVAVMDAGGKLIMECLLETKAATIVEFVRGLHGTLSLTFEEGTSAAWLHDLLQPHVSRLVVCDPRKNALLKDGSKSDRIDARKLAELLRTNQLKPVYHEEHGIRALKELGRSYLTITKDVTRVMNRIKALYRSWGIPCGGTRVYAPRHRAEWLAKIVEPGVRVRAEHLYQQLDSLQPLRLQARRELLRESSQHPAVKLLRQIPSIGPIRAALLVALLQTPHRFRTKRQLWAYSGFAVETHDSGEYRYVRGKLQRNRERITVRGLNPNHNKDVKNLFKSAAISASTRPGPLHDCYVARVEKGMRPTMARLTLARKIAAITLTIWKKGVSFDPKHLHRQAA

SEQ ID NO: 108974 - protein, 363 aa, unidentified
MMASSVAGIDPHQDSITVGIVDANGVEIAHRTFPASAAGYLDAIELLHAQSVELVGVEGSASWGAHVAVALSAAGFDCREVPPLRSAAQRRARRADKTDAIDAVAAARALLAEPTLGPVQALQVYDPLVAKIEAVVEHRRMLVAVRTLILHHVQDQITKLPIEIRDQLTPTGKIEGRLRRLEQIDTTVVTSDAGEYRLGWLMPLVDQDRQARQQIRQLEVYLDELLDEHGTTLRDEPGIGTIAAATLLVEVGDPFRFSRESKFARWCGTGAVALSSGEGSGLPVKHRLDFRGNRRINSVLFVASVVQQRDTDEARTYIDRKLKEGKTAREARRAHKRHLANRVIRRMWKDETRRKNQPLTLVA

SEQ ID NO: 108975 - protein, 469 aa, unidentified
MKRKSRRAKCQKVSPFSGDLQLIEPDAAAVDVGSRSHWVAVNPQRDPNPVREFGTFTADLISLADWLAQCEAKSVVMEATGVYWVSLYELLERRGFKVYVVDAHTVRHLPGRSKSDVKDCQWLRRLHSYGLLRGSFRPPAQIRQLRNYLRSRTKIVEAAAQQQLRMQKALTLMNIHLHHVISDLSGLTGLAIVRTIVGGERDPIRLARLRDPRIRASRETIQKSLEGNWQEELLFDLKIALESYDHFQGQIAAYDEQIRQELKEVESKVDLANEPLPATRLRACRKRPGMSQQNQLDLREELYRISGVDLTRIDGISLQTAQKVFFEIGTDVSPWSDEKKFSSWLGLSPNHRISGGKVLKRSSRKVVNPLSVALRLAARTLRNSHSALGANFRRLIAKIGMPKAITAMARKLAVLVYRMLKYGTQYVDKGMQHYESKYQETKLQYLRAQAAKFGMILLPRQAAATGVAS

SEQ ID NO: 108976 - protein, 419 aa, unidentified
MSFKILKNNCCGLDVHKTWIYACIGITDSFKRTEYKQARFSSFTKGLQELCLWLAKYNCIDVCMESTGKYWIPVFNVLEKNNIFVTLSHPKYTKPQKGNKTDRKDAKWICDLYMCGMVKPSFIPPADIRQLRDLVRYRFKLTCMITGEKNRAHNCLTVSNLKLDDVFSDIFGKSSRSITEQILQHPGEVFDVAPFVDSRCKTPIEEIQAAVDGAISHEQAVKLRQCLKHIDELEMHKAEIEREIFRLSDKYEEVLNLIRTVPGFDKNPMTAIQVLSEIGGDMSVSPTAKNLVSWAGCCPRNDQSNQKIKSTRISRAGSYFKPVLVQIANALIKSKKHPEFTTRYRRIKARRGHKKAIIAICRMILTAIWHILTDLKPYTPEGFLESRPVNKEKVLTISQALNLIKQRGYIIKDDVGPVT

SEQ ID NO: 108977 - protein, 403 aa, unidentified
MTAHAVLGLDAAQAGVAFHLQTPDGRRLARGTAATTTAGWTQLHQRLAAHGLAPRDCLVAIEATGVHHLPWCEAFTAAGATVLALNPLVAKRTTPVRNAIRDHKADPIDAEGLAQTAAREAAQLDRFRYQSTPAQFGLRKLLAVQASVRTALTNLKKTAGALQALSFPELAATKLSDLRQRQLLQAAPTPAAVLALDTAALRRLAGAKAAAVLAAAHASFAPAALAAAAAPALRALLGVVAQLDLALRALDRDVTGAAPQAVPADRLALARTLPGFGAKTTPVVLACVPAQLWTRAQSRKKKVARLQALFGTDPRLRQSGKWHGKIKLSKRGCRPARTALYQIAFCSCLHDPQMLAYYRRLTRVEKKPHKVALFDLARKHLRRLVAVLESGQPYQPVALPAAA

SEQ ID NO: 108978 - protein, 418 aa, unidentified
MSEDRSHLGQDDIAVGVDLGSQGHQVVILASDGRRLTSFRVAHSQAGLAELMRRATPARWHARRSVYAFEATGHLWEAVAHVLRTHGLPYVVVNPLATFRVREARQMGRDKRDVTDAEQIAHLLRTGLITRTQLEPEAYLVLRRAWGAFLRLRRERARLKTLVSHQLYGAFPELLGVWSDVFAPGALAVLRVGLTPFEIAALPFGDFAAQVSAARRGRRVWRFKVAQVHAYAQGTVALPHGAVPMMRELRRITARVDLLTDQMAELEAEIRALLPTLEEALHLMTMPGVGWTTVAGLIAEIGAIDKYRHGRQLVKLAGLNPSHHESGTMRGRTMLSRRGRAGLRTVVYLATLAALQHNPRLRAHYDRLRQRDVRPLETMPAMVACMNKWLLYAFAVMKRRQAFQVDHVWQSHTLAAAS

SEQ ID NO: 108979 - protein, 350 aa, unidentified
MTTQLETITAVTAGVDTHRDVHMVAALDQRGAELGVQAFGTDPAGHHSMLAWLERFGPVELVGVEGTGTYGAGLTRFLQRNDIVVVEISRPDRQERRSHGKSDEVDAIAAARAAQSGKATAQPKTRTGNVEAIRALRMVRRSATRDRTSAINQMRALVVTGPDDIRETFRGLTTKKLVSVAARLRPSDPTTVHGATKFALRELARRVQFLNAEIKQVNDILSPLVTATAPELVARHGIGIETAATLLVTAGDNPNRLHSEAAFAHLCGSAPINASSGLIKRKRLNPRGDRLANEALWRIVMVRMSSEPRTRAYVQRRTIEGKSKREIIRCLKRYVAREVFKDLKRPLDNQ

SEQ ID NO: 108980 - protein, 412 aa, unidentified
MDLPYNLAGIDVHKRMLAVVVANARDTELRFECRRFGTTVSELHHLLAWLQERAVKEVVMESTAQYWRPVWIALEGHCRLHLAQARSNRGPRGRKTDFRDAQRAVSRLLSGDLILSYVPEAEQRSWRTLTRTKYQLTRDKVRLQSQLESLLEECQIKLSSVVSDLLGASGQRILRALAKGETNPAQLAKLGDKRLHATEAEMQDALNGQLQGIHRQLLSLYLARLDLIESQMESLDGMIVAAMKAHEQIIIRLAELPGLGIDSAQQIIAEIGPQAAAFPSAAQLASWVGVCPGRQESAGVSSSDRSAKGNRSMRRLLNQLAHAAVRKEGCQLQIVFKRLSSRLGYAKAVWAIAHRLCRLIWKVLHEGVSYIEHGPTPTPLALKRRRQRLVTQLKKLGYSVQLIPVTSTPPVQ

SEQ ID NO: 108981 - protein, 411 aa, unidentified
MSDQPVAGIDIHKDFLVVTVLGKDTKKTKEYQTHETDLNHLKRWLARMKVDKVAMEATGIYMIPCCDKLKDRFELYLVNAADVRMLPGKKTDILDSEWLAVLLQKDLLKKSYIPPKEWRDIRELFRQRKGFVHTKSRVKNKVTKILTQEGFNLSRAFSDVFGKTSRMIIDQLVSQKSLKQILRDHAENRYVKPNIEVLSCLPRSKSLSDAICFVLTLLLDELDQSQQRIDLLDQQLAYMTQEVFQKQSDLEILKSMPGISDKIAIGIITELNSVDRFPSAKHLVSYAGLSPAVYESGGKRRNKGLNKRGNKYLRTLFIEAAWGASRTKTSRLRQYYHTKRSQKGKKKAIVALAAKMMRIAYHLLKYQEMYVEDHFRKNLRNVLLPNNQTSISLGELDRILRSRGLRIATSR

SEQ ID NO: 108982 - protein, 339 aa, unidentified
MELYAGIDLHSNNNFLGISDKDGRHHYGKRLPNDGEVVLSALEPYRDDLLGIVIESTFNWYWLVDLLMDNGYRVHLANPAGIQKDKGLKHSDDKHDAFWLAQLLRFGILAEGYIYPKEMRPVRDLLRKRGHLLRLRTSLINSLQGIISRNCGCHLTGQKIKQVRTNHITPLLESQEDLAMSGAVSKDCIDFLSKKIREIEISVEGRVELLKPYAGLQTVPGIGRIIALTVMLETGDIGRFDKVGNYSSYCRKVPTAWTSNGKKKGHGNSKNGNKYLAWAFSEAAEMFRRYDQLARAFYNRKSSKTNFMVAHSALAHKLCRAAYFIIRDGVDYDPEKLFS

SEQ ID NO: 108983 - protein, 337 aa, unidentified
MNKTHLSFTPCGIEVSFQTLVVDRAGKAPREFPNTPVGHRALLAWLRRSPLPLRVCMEATGLYGLDLALHLTAAGLALLVANPRAVRNFARALMQRSKTDLLDAAVLREFAARMPFEPWPPPSPQALKLMALAHRIQGLTRMMAAEKNRLHAASLSRAVPDLVRRDLGRSIQGLERARARLTRAALLFIADDPQLARRTELLVSIPGLGVTSALALLAELLRFGPDSDVRQWVAYAGLDPRHHRSGTSVAKKPAVSKTGNAHLRRALYMPALVASQHEPHLRAFYQHLLQRGKTKLQALVAVMRKLLHAIFGMFKHNSRYDGSKVYVLQSKPELLCA

SEQ ID NO: 108984 - protein, 410 aa, unidentified
MENNYILYVGMDVSKGKADAAILKVSDRRSVKPKFLRKKLSFKFVKSEVASFLETVRSYSDVNCTSICFALEVTGIYSTNVYDYIKANLYENESIKFLNTDFVNQWRIAHNIAKSDPLDAQTISTIIGTDSDVQFVNDNVFENKNGYQDLKALVHRHYQIKKIYSQEINRLIAQCDCLFPELQYVFEPKSAAFIAVLSSYPTTHDIINASRVEVFDVVYEATKHRCSMDKVDKLFELCQDTLVPNDISSYGKSIILDLVENIKNIKGQLKSIERYIKDIASLNPAYKLLLTITGCGPITAATVIAETGNIRRFKNADCFVSYSGTSPRNKRSGTSVETMGKISKKGSRYLRHAIYMIAEFARRHNPVLKHQFERIKNGNKKRHKLANIAIANKIARYIYSITLNLRKLLF

SEQ ID NO: 108985 - protein, 395 aa, unidentified
MEDPIIACDVSKGSSHIQGFIGLSNPVGNPFVVRHLKCDLKLIKELAKSLEKQAHKKPKFIFEFTGIYHECIAKYVQSLGLDLYAISPLESAKVRKSQIRVTKTDSKDCLNIATVYYTRNIRKFESDNNDIKALSRSKRNIRKELIEQRCVYRRYMDLIWPCFDEYFNADSKTCDIIVGTYKHPYVIKRRSVNMIVEILLNNGHYSKNRAYDLAYKIKEYASDCVSGVDEKSEYVNALMNSFSKIQNLKNEIENINIRLDNLLRESIPYQLLKTVPGIGANLLIQMSAEIGDYTRFKSAKQFVAYIGLDPSILQSGKDDGEHYSITRKGNGILRSCLYLAVSQMLTQKLDNQITRFYFKKKSSGLSHKVAAVASCRKLACCVFGMLKNGTCFETI

SEQ ID NO: 108986 - protein, 419 aa, unidentified
MYSSWLEVTEGREEEVIFVGIDWSEHHHDVCVIDDEGMVLAKSRVPDGVVGVRELHEMLATHAEEPDEVIIGIETDRGLLVAALVADGYRVFAINPLSVDRYRDRHRASGAKSDPGDAKVLADIVRTDRGNHRPIAGDSELADGVKLLARTHQNFVWERQRHVNRLRSALREFYPAALVAFGTQLASPDAVAILSIAPTPELGRRLSRSKIAARLRRAGRRRNIEARTERIQAELRSEQLRVGAHLEETYGVITASLVRLITGLNDQVAGLEQDLHGAFEQHPDAEIILSLPGLGSTLGARVLGEFGDDRTRYPDARARRNYAGTSPITKASGTHRVVLARFAPNELLYDACHLWAFASLSASPGARGHYDAKRARGKTHSQALRALANRLVGILHGCLMRGELYQEHLAWPVRETDAA

SEQ ID NO: 108987 - protein, 345 aa, unidentified
MPIVGGLDIHRKQITFDYLDTVTGEVKRGQIAPADREHVRAWLARFAGCEDAAFAVEGCCGWRYVAEELAAAGIAAHLGEPADTAALRGRKRHAKTDKTDARHLRALLAEGRLPECWIPPAQILEYRALLETYHDLRREHTAWVQRIHAVFFHQGAPPLGEGALRTDQGLAGLRAAAAAHLSPAGQQQVATALDMLAATEAQLGPLRRQLRQAAAHLRGAKVLAERLYGVGPLTALALTCWLAGKDRFSSSRKAVRFTGLDITVHSSDRKGPPGKLSRQGPPVLRWAVYEAGKTHARTAAPDHGYYATVADRKNTKRAALSEARKIVRQACHILTELGDDALTAA

SEQ ID NO: 108988 - protein, 320 aa, unidentified
MEVTHGNYVGIDVAKDRLDVVLRPTGEYLGTTNDERGIKAVVRHLRKQEEIALVVLEATGGLEQPAAAALALAGVPVAIVNPRQVRDFAKAVGRLAKTDRIDAAVLAHFAQAIRPEARPLANEQARELAAVLLRRRQLLAMITAEGNRVRTAPKTVGKRIEAHLRWLRKELTRANEDLARTVRESPVWREKDDLLRSVPGVGPALSATLLAELPELEHLDRRQLAALVGVAPLNRDSGTLRGIRTVWGGRSGVRTTLYMATLSATRHNPAIREFYGRLCAKGKPKKVALTACMRKLLAILGAVLRNRTPWDAEHLTQEAT

SEQ ID NO: 108989 - protein, 417 aa, unidentified
MIRKVMEVIHQCVGGLDVHKKTVAACRRRMLGDGQVESEVLEFGTTTLQLRALSKWLSAWGCTHVAMESTGVLWIPVWNVLEEDFKLLLTNAQRLRKVPGRKKDVTDAEWIAQLMQCGLLKGSFVPSREIRHWRTLTRQRMKLLDQRTGVVNRMHKVLQQGNIKLSSVATDVMGVSGRAMIRAMIEGESDAETLAKLAKGRLKSKHEQLVESLEGRLDQDDRWVMKELWEQMEYLEEEIARYDDQIKEKMSPYEGSLGRLMTIDLIERRSAENILAEIGPEMSFFPSDSDLVSWAGLCPGSEESAKKNRSGKTPKGNRWLRRALVEPAWGAARRKDGYLGAMYRGIAVRRGEKRAVVAVARTILQAAWHVLSKGVEYKERGGDYFDRINSEQTKKKLIRRLERLGYEVELKAKQATI

SEQ ID NO: 108990 - protein, 354 aa, unidentified
MSSFIRPKKGIFIMKKNLFFIGLDIAAVDFAASIYQTPDQPIVTKEAIPNNPEGFDLFLLWLKKHHIDKTNSHICMEATGVYSQAIAYYLLFAGFPVSVEPPLKVKRAFDPVGHKTDPVDSKQIAEYAYRFQDELTSWQPRDEILEKIRQLLSVREQFTKQKVALKNAIQAYAKQRVQVVLIKKAHQETLAQIEKQITRIDQELAKLIKQDPEIFQKANNLDSIPGYGMLLAAHLLVITENFTKIQKPKRLAAFIGIVPYQHQSGTSVFKRAKIRHFGPGPSRKLLRLAAQSVATHDVIFRRYYLRKLAQGKAKALVLNNIANKLLKVACAMIQNNTRYIKDYRSIHPMYLKSA

SEQ ID NO: 108991 - protein, 390 aa, unidentified
MEVRLENTASATTNNDPAHCFVAIELSKSSWVLGFQTPLAKQTSRYQVKACDAKALLELIERVRSRTARELGRPVEVMSCYEAGYDGFWLHRVLEAHGIHNHVLDPASLQVNRRARRPKTDRIDADRMVRALIRHLRGEPEACSVIRVPSPEQEDARRLHRERDRLIAERVAHVNRVKGLCATQGIYDYEPLRSDRLKRLEKLRTGDGRALAPRLKAEIVREIKRLEIVLEMISTVEAERDAILTEKKSTHLNADKIKMLAKLKAIGAEFSTTLVGEVFYREFANRRQLGSYVGLASSPFCSGSLDRDQGISKAGNPKARVMMIELAWTWLRYQPESALSRWFRERVGNLKGRPRRIAIVAMARKLLVALWRYLQTGVVPTGAELKAQSN

SEQ ID NO: 108992 - protein, 348 aa, unidentified
MPLYGGIDLHSNSNQSAILDEDRKRIMRRKLDNDPDLILRFWEPYKPDLAGIVVESTYNWYWLVDLLQDNGYRVHLANTAAIQKYSGLKHADDNHDAFWLAELLLLGILPEGYIFPKEVRALRDLLRKRLHFVRVRTALILSLQNIITRNCGTKVSSNHLKALKEDRAQGYLQDNEDLLLAGSASKAAIDALTRQIRRIEGAVVKKLNLQAPYTQLLTLPGVGQVVASTVTLETGPIERFSKVGCYASYCRKVDSRWTSNEKVKGHGNKKNGNKYLAWAFGEAAERARKFHKASREFYQQKLRQKKHPALAHGALAHKLARAAFYILRDNVPFDHEKMFGYPEEPLDN

SEQ ID NO: 108993 - protein, 347 aa, unidentified
MRFYTKQHRYYCGIDLHARSMYLCILDTQGEILLHRNMPCAPESFLKAIAPYREDIAVAVECIFTWYWLADLCNQQNIPFVLGHALYMKAIHGGKAKNDKIDAHKIAVLLRGGMLPIAYVYPPAMRATRDLLRRRMYLMRKRSELLAHVQNTNSQYNLPEIGKKIAYKANRDGVAERFSDPGVQRSIEVDLKLMDHYDQLLTEVELYIVRSAKQHDANAFYRLRSVPGIGKILALVILYEIHDIERFPTVQDFVSYSRLVKCAKESAGKRHGTSGKKIGNVHLKWAFSEASVLFLRANPKGQSFVEKLSPKHGKAKALSILAHKLGRAVYYMLKRKQAFDVNKFFSS

SEQ ID NO: 108994 - protein, 420 aa, unidentified
MSLNVVGGSSCYVGIDWAAATHAICVLDPAGKRVAAFTVEHTAAGMAALTQRLARLGAPETMPIGIERPDGRLVDALLEAGHPIVPVKPNAIKAWRDGEVLSGAKSDAGDAEVIAEYLRLRQHRLSLVTPYSVETKALRTVVRTRSDLVDMRVAATNQLAALLDAHWPGAKAVFADVESPIALEFLTRYPTARHAAHLGAKRLTAFCAKHGYSGRRTGEQLLTRLRAAPTGVTDETLCEAIRDAVLALVAVLRAVVAALKDLGRSVVAPLGEHPDAEIFTSLPRSGQINAAQMLAEWGDVRQAYDGPDSVAALAGVTPVTKESGKHRAVHFRWACNKRFRVAVTTFADNSRHASPWAAMVYADARARGHDHPHAIRVLARAWIRIIWRCWIDRTPYNPSRHGNAVRLNQSGQTELVAARG

SEQ ID NO: 108995 - protein, 340 aa, unidentified
MVHVGVDLHKRMSQIAVLTEEGEIAQRRLANDPARLEAFFAQLPPRTPVAIEASGTWWWLVDLLERAGHRPVLSNPKQTKAIAAARLKNDRVDAERLALLLRGDLLPTVWIPPAALREARELIRHRVSLVWLRGEVRNRLLAMLARRNLQPTSGKSWLTVRGQRELHALPLTPIAVTIREDCRALLPLLDEQIRRLDDDLRQRWGEDPRVRRLMTLPGVGAFIAIVLVMELGDIHRFPSAKHVASYIGLTPRVRASADRIRSGHISKEGNRLLRWVLVLAATQAARQPGPLRAWFRAMKQRKGTKIARVALARRLVEIVYHVWKHDCDYFTVLRRGAVRG

SEQ ID NO: 108996 - protein, 340 aa, unidentified
MSPNYVGIDVGADTFVCSIFSATDVVPQTSGEFANTPEGFIALEKWLNDRQSPDDSIVCLEATGVYGEMLCYWLAAKGYRLAVEPPLKVKRAFKVKGHKNDRIDSRQIAEYAYRYQDQLNFWQPRSELVEQMAVLLATREQFVQQRTASINARKALKRKVVQTQLANQLYDDNIEHLSENIAAIEDEIKTLIAKNPDFRQLVAWLDSIPAVGLLLAANTLVLTNGFAHREHIQYRKMAAHIGICPYEHSSGTSVHGRTTALNQGPARMRKLLHLAARSLRTHHSEFRAYFERKRAEGKDPQLILNNIANKLLKIMCAIIRTQKPYIKGYVSINPIFVKNA

SEQ ID NO: 108997 - protein, 416 aa, unidentified
MNAAGIDVSSSKSTVAVLRPLGEVVKLPFDVRHSAEELASLAKQLKSIEGETRVVMEHTGRYYESIAKVLHEAGLYVSAVNPLLIKEYGNNSLRKVKTDKADAMKIAKYALDNWSELRDYTPMDTIRYDLKTMNRQFQLAIKQKTATANNLIALQEQSFPGIRKLFDSPVRSDGTQKWVDFTHDFWHVDCVRSGSLNAFTERYRKWCKRNRYQFSTEKAAEVYALAKSAVVLVQKTSVTKTLVQEAANQLTAISRSAETYRSEMNKLASQLPEYSVVMEMYGVGESLGPQLMAEIGDVRRFERKQSLVAFAGIDPAPSESGDYCSRSNRTTKRGSPYLRRTLFNIMKVHLQRAPADEPVFQFMDKKRAEGKPYYVYMIAAGNKFLRRYYGKVMAYFSSLEDLPPVDMESTGLHLTK

SEQ ID NO: 108998 - protein, 356 aa, unidentified
MKLSYVGVDLAKNVFQLHGVDRSGKAVWRRRLRRHQWLGALMEAADPSCVIGMEACTGAHHWARQLQARGYTVRLIPPQFVKPYVKSNKNDANDAEAICEAMTRPHMRFVAVKSVQQQDIQATHRIRAELKDQRNAKTNQIRGLVAEYGLVAPQTLLALRRAIPDWLEDAENGLTDYFRALLHGLWGDLLALDDRIKELDKQIEQLANGNEVTRRLQQLRGVGPMVATALVATVGTGEQYRKGRQMAAALGLTPRQNSSGDKHRLFGISKRGDAYLRTLLIHGARAVVSQAKHRDDRLSRWVTDIAKRSHPNVAAVALANKTARMAWAMLQHGTDYDPALAVSRVRTQGDPPRRLQ

SEQ ID NO: 108999 - protein, 410 aa, unidentified
MILDPMIAFELAGLVVSPASFSFEGCAGLAGAEPQEWGRDQLQNIMFVGLDVHKATISVALAQGGRGGEVRHWGTIPNRADHIRKLADKLGGDGRQLHFCYEAGPCGYGLHRQLTELGHDCVVIAPSLIPVKAGDRVKTDRRDALMLAKLHRAGELTAVWVPDTAHEAMRDLVRARATSVRVTGKARQHLQGFLLRHGRVYPGKKGWTKAYRRWLTTVRFEHPAQQIVLQDCIHAVTDAEARIERLTGQIAALLPSWSLAPVVEAIQAMRGVAFIVAVTVVAEVGDFNRFDNPRQLMAYLGLTPSEHSSGVSVRRGGITKAGSSLARRALVEGAWSYRMQARVSRKLLDRIEGLPQAVRDIAWKGQLRMCQRYRHLMAAGKPKVVATTAIAREMAGFIWAIARTVTPAST

SEQ ID NO: 109000 - protein, 345 aa, unidentified
MPSIAGGLDIHRKQITFDYVDLDTGAVQCGQIAPADREHFRSWLAGRFEHPENVAFAVEACTGWRYVAGELAAAGITAHLAETADTATQRGRKRRAKTDRADARLMRDLLAAGRLPECWIPPPQVLECRALLEAYHDLRREHTAWIQRVHAALFHQGAPVFHDLSRAGAPAELAALARARLSPAGQQQVMLCLRMLEATGGELDGLRRQLLAAARHLHGAKVLADSIYGVGPVTALALTCWLGGAGRFTSARKAVRFAGLDITACSSDGKRSPGHLSRQGPPVLRRAVYEAGRTHARPAAPDHGYYAAVKDRKDGKRAALPEARKIIRRACHILAQLGDDALATV

SEQ ID NO: 109001 - protein, 377 aa, unidentified
MSKIRFVGLDVHAETIAVAVAEPGGELRSVGIIPNRLESIRKLAGKLGPVQHLKTCYEAGPTGYVLYWQLTALGIACEVVAPTLVPTKAGDRVKTDRRDAEKLARCYRAGELTAVWVPDAAHEALRDLVRAREAAKKDQLRARHRLGKFLLRHGRRPTEAGKAWTKKYLEWIKTHVRFDQPALEATLAHYLQEVDHAAEQILKLEKTIDEAVAQSSPEIRSVIEALQALRGVAQMTAATIVCELGSLSRFQSPRQLMGYSGLVSREHSSGNRIQRGAITKTGNAHLRRVLVEAAWAYQHRPNVTGFLLRRQKSLALSDEVKQMAWKAQYRLHKRYQAFAVRGKNKNQIVTALGRELLGFIWAIAVHTEAQLKLAKAA

SEQ ID NO: 109002 - protein, 347 aa, unidentified
MAYIGVDLHTNTFTICRLDDEGGESFETYQLAAADLDRFCRGLDADDEIAVEATGNSAWFREQVLPCVGRVVVVNPKQFQVIRNSVSKTDRNDARALAFFLSKDMLPETRAKSVAESELGSLTQTRDLLVKQRTRLLNKIHAVFNRHGIKLRKESLGSKRALAKLETGRFSSLEQIELTVVRDQALSLSASIATLDKEIEAAAKKLDGYDGLVSIKGIGARAAAVFLSTIGRVEDFETADKLAAYFGIVPRVSQSNETDNRGRITKRGNKLARTTLVQSTLIAIRYSGYLNAFYRRIKERRGAGKAIIATARKLLKIIFDTLANKWVFEDFASFKIAGKSIPAGQTS

SEQ ID NO: 109003 - protein, 329 aa, unidentified
MQHYIGVDLHKASFQACAVDGRGACVWEAAFPTTEVGLDAFLSRCSLEVAVAIEASGPTWSFADRIVGHVGALHVVDAARTRLKAGYAAKTDRLDARRLADALRRDSLVGIYYPPPGIRDLRELCRYRASLVRTRVALKQRVQALLLRQGVAGPPVSDLFGVRGQQWLETVTLPGWAGESLRGLQTVLRYLSAEIARAEAAVTAAADRDPIVTALRTLPGIGPVLGLLLRAEIGVIERFPDAAHLASYAGLVPRVDASGRRVRYGPLTKKGSVWLRWALIEAATHGLTRRDPVGRWARRLAVRKGFLKARPAIARALCREIVRVWPRSG

SEQ ID NO: 109004 - protein, 346 aa, unidentified
MQSSPQLYIGIDVHKKSWSVNLRTDLFDHKTFSMTPDTAQLIRYVDQHFSSHQVKCCYEASCCGYMPYRELSKVGWEVLVVNSPDVPVINKHQQNKNDIVDCRHLCKQLQAGQLRGIYVPDEKQEQLRSLFRQRNNLTMALRKIKCHIKGELLYYGIGLPGQYNNNNWSKEMLGWLESQSWKHETGRCSLHSKLRHLNFAYYEWLRVSNELRAYVRKEYKNDYYLLRTVPGIGPLTAIGILAELGDLRRFKKFDKLCSYVGLVPSVYSSAEKIQTRGMTPRSKQLLRSYLIEAAWTAVRKDMVLQEYYRSHAGKPSNKIIVKVARKLLSRVWYVIKTNSPYRCEVK

SEQ ID NO: 109005 - protein, 412 aa, unidentified
MQDILTCAMGLDVHRDIIVACLVKGAVDAEPEAETRTFSTLIPEMQKLRDWVIESECRNIAMESTGIYWQPIYEMLESCFDGEISILVVNARHMKNVPGRKTDMKDAQWIATLLRAGLLKGSFIPDKAFRELRHLTRYRKSIVRDITAQKNRIDKFLQSSGFRFTAFLSDTFGASGRNIIRHLIEHGSIDREALDKCLKTKTRNRIDEILVALNGSLSEHQRRFLNMVFRHLEDLEAHKHTVEDEITEEVLKHTDTLNLLCSIPGIDVTAAAAIIAEIGTDMSSFPDSQHICSWAGLSPGNNESAGKRKSVHINKGNPYLKSMLCEVAWIMASHRKLYLSGWYWKVKQRKGAKRATIALARKILSIIYTMLKTGTPYNEECFEQRRLRCERKRANRLVNELQKLGYVVVAPD

SEQ ID NO: 109006 - protein, 341 aa, unidentified
MAKFIRTAIDLGKNYFQVHALESEGGRSISRKVKRSKLHEVFSQIEPCRVGMEACGSAHYWARQLAAMGHEVVLIPPAYIKPYVKRGKNDVVDAAAICEAMSRPDMRFVPIKSADQQAVLMLHKTRELLVKQRTMAVNALRGHLAEFGIVAAKGIGRVDELLALAKADAALPPIAMAAVACMAQHLEGLDLSIATMEEEIARTHRQNPTSRVLDEIPGVGTLIASVIAASVPDPGVFKSGRDFAAWLGLTPRQNSSGGKEKLGAITKQGNRYIRKMLVTGATSVLRVAGKRKGAFADWINALRARKPERLVAVALANKLARICWAIMTTGEGFRTDTYVKA

SEQ ID NO: 109007 - protein, 343 aa, unidentified
MTEAYDGRQVVGIDLHRRRSVIVRMTDDGRKLETVRITNSPAALRREIAKAGQHPRLVVEATYGWYWAADVLEKAGAEVHLAHPLGVKAYTYRRVKNDERDAADLADLLRMGRLPEAWIAPPEIRELRELTRYRDKLVKLRTSVKAQVHAVLAKLGIPVTCTDIFGTWGNTWLDGLDLPQPYAGKVASLRQLNTELTGEITLLEQVIGDLLAGHEGYAAIRQLPGIGPVPVAVDGIGDIRRFRRPEQLCSWAGLTPRHRESDTKISRGHVTKQGSRILRWALCEAIQHQPAGTRPRQVKDGIIARRGPQARNIAKTAAARDLLTLIFYALRDGRVRRAASPAA

SEQ ID NO: 109008 - protein, 332 aa, unidentified
MENFYFIGVDVSKKKLDFCVMFEGKVVHEEATVNHQTAIMSLLRHLEEDYGITSDRMLVCAEHTGQYTFPLACACKSVECKLWLENAAEIKYSSGVQRGKNDKVDARRIAIYAGRFQDKVRYYERPTEDIERLKQLESERTLYVTDLAKYKGQMKDQKDYMPKALYERKMKRLQALMDDLEEAIQAITDEMDEVIASCPVLFRQRELLMSIDGVGRVVATNMIIATEAFTRFDDPRKFNCYAGVAPFSYSSGSSLHSKARVSHRADKVMKRLLHLAAVAVTHRIGGELKKYYERKVAEGKNKMSVINALRAKIVARMFAVIKRNEKYKPILS

SEQ ID NO: 109009 - protein, 336 aa, unidentified
MGITTVGLDLAKHVFQVHGVDETGQVIVKRRLRRAQVITYFASLPPCLIGMEACATAHFWARELRSLGHEVRLIPPQYAKAYVKRGKNDAADAAAICEAVTRPSMRFVPVKTEEQQSALTMHRARDLLVRQRTQLINAVRGHLAEFGLVAAQGPWNVPLLLASMQEDRRVPELARQVLQLLAAQLDEVGKRIAEVETRIMAWHKTNPVSRRLVTIPGIGPLIATAIAATVPDPDVFRGGREFAAWLGLVPRQTSTGGKPRLGRISRLGDKYIRQLLIVGAQTVLLRSKAARSNTWIQGLLARRPRLVVAVALANKTARVVWAVMAKGQSYRQAVPA

SEQ ID NO: 109010 - protein, 341 aa, unidentified
MPIVTVGIDLAKNVFAVHGVDEAGKAVLIKPRVSRDQLVALIAQLPPCLIGMEACSGAHHWSRVFQQYGHTVKLMAPKLVAPYRMSGKRGKNDAADAAAICEAVTRPSMRFVPLKDEHQQATLCLHRTRQGFIEERTAIYNRIRGLLSEFGVVLPQSPERLRREIPAHLDALPGWARRCISDLLEHAGSIEDRLTEYDRAIREIAREDERSKRLMLLRGIGPTTASALLASIGAGHDFRNGRQVAAWLGLTPGQHSSGGKARLGSITKAGDAYLRSLLVLGARAVIASLGEKQDRFSRWVRSLVERRGYWRAAVAIAAKNARMAWAMLNYGDDFKHEPAAA

SEQ ID NO: 109011 - protein, 303 aa, unidentified
MTNLARSVTGGVDTHLDVHVAAALDERGALLGVESFSTTEAGYKKLLGWLSDFGPVELVGVEGTGSYGAGLTRHLQDERVRVVEVDRPNRQRRRRKGKSDPEDAISAARAALSGDACGEAKTRDGNVESMRVLRVARTSARKARTQALNQMRSLISTAPEPIRDELRGLNVFHLLERASSYRPGAKRDIVSLTKLSLRMLARRAITLEEEITELDAILKPLVKETAPDLVATLGIGTDAASALLVAAGDNPERLRNEAAFAHLCGASPIEASSGKQHRHRLNRSGDRQANSALWHIVITRMVY

SEQ ID NO: 109012 - protein, 356 aa, unidentified
MTISTKYIGMDVHKESISIAVMNAAGKILMECVIETKASMILQFIDGLRGDLHVTFEEGTSAAWLYDLMKPHVTKLVVCDPRKNKSMREGNQSDKIDARRLAELLRVDHLTPVYHGEHGLRTLKELVRSYLAITRDSTRVMSRVKAIYRSWAIPCSGKQVYAARHRAEWLGKINEPGVRRRAEFYYQQLDALRVLRQGVRRDLLGESKKQKVWKQLCQIPSIGPIRAAVLLGILQTPHRFRTKRQLWTYSGLGIETQSSADHRSADGQLQRFRKQVLVRGLNRNCNHDLKHLFKGAAVVASAKPGPFEEFYAALLAKGMRPEMARLTLARKIATIVLIVWKKGVCFDAQHLKPQTA

SEQ ID NO: 109013 - protein, 410 aa, unidentified
MPTKYDWYVGIDWGSEKHRACCLDASGKVLDWRWVEHNGDGLAGLVDWLMGRSEGHPDRFAIGIEVPRGAIVETLVERGFTVFSINPKQLDRFRDRYSPAGAKDDHRDAMVLADALRTDQHCFHQVRLDDPGVIRLREISRLEENLSQDFHRLTNQVREQLWRYFPQLLQLAASPEEPWIWELFELAPSPQKAAKLSPSKITKVLKKHRIRRFDAGEVQAILAGAPVFVVAGTAEAASEHILILLPRLRMLHQQLRDVAQRMERLLEEMVAAGPDCQPGEHRDAAILLSLPGVGRKVSATVLSEASQALADRDYHGLRCLAGAAPITKQSGKKKVVLMRYACNQRLRNAMHYWAGGSMQYDLRSKQMYQDMRDRGLNHNRALRGIADRLLEMIISMLRHRAMYDPQRRAA

SEQ ID NO: 109014 - protein, 350 aa, unidentified
MKAFIRIGVDLAKNFFQVHGIEHEGGLALTRKLTRAKFREFCSRLAPCRVGMEACGSSHYWARELRAMGHDVVLIAPAYAKPYVKRGKNDAADAAAISRRMHSIRPGEAMSRPEMRFVPIKSADQQAVLMLHKTRDLLVKQRTMGANALRGHLQEFGLIAAKGIHRIKELVALALADEGLPEEAKQAAILLAAHGDELDEKIDALEKKIARASAKNPTSRLLDEVPAIGPLIASAMTASFPDPSAFKSASDFSASLGLTPSQHSSGGKERLGGITKKGNRYLRKMLVVGCTSVLRVAHKYKGALADWIAAMKTKKPERVVAVALANKLVRICWAIMSTGESFRTELYTRA

SEQ ID NO: 109015 - protein, 320 aa, unidentified
MSNIVQICTVGIDVSKDSLDLAVRPSGEHWSIKHDPQEFPALVEKLTQLAPSRIVMEATGGLETLVATHLAAAGLPVCIINPRQARDFAKATGQLAKTDLVDAHLLAHFGEALQPQLRELPSPEAQLFEALLTRRRQLVQMRTAEMNRLATSGHLRKIAKGLEAHITWLNKQISKCDDELKTALQASPVWRTNDQLLRSVPGIGQVVSRTLLAELPELGRLSSKKIAALVGVAPFANDSGGFHGKRHIRGGRTSVRSALYMATLSAIRSNYRIRAYYERLLATGKPKKVALTACMRKLLIILNAIIKQQATWRTFTLLNA

SEQ ID NO: 109016 - protein, 370 aa, unidentified
MQEISKFHVGLDVHKDSISVGVAEPGRAAGRLIGKVLHDVSKLLKLLSKIGKPEQLHLVYEAGPTGFGLQRALSAKGYCCEIIAPSQIPRRAGDRIKTDGRDSIELAECSRAGQLSAIWIPDPEDEAIRDLSRAREDAVNARVQARHQLKGFLLRHDVRYTGKTSWCGAYYRWLATLNFGAGPAQTAFTEYWLAVTSADERVERLSQSLQACITNWRFAPVVASLQALRGVAEITAIGLVAEIGDLTRFEHPRKLMGYLGLVPSEHSSGARVSRGSITKTGNSHARRLLTEAAWNYRFKARIGKEALQRQQALPEQIRTMAWKAQLRLTQRFAALSARGLQVNKTCIAVARELAGFVWAISQQALHINKT

SEQ ID NO: 109017 - protein, 368 aa, unidentified
MQFIGVDLHTNKFTCCYRDEKSVPDGKKATETFELSPYGIAQFYSTLTEETHVLIEATITTFCFARLIQPMVKQVIVANTYELKQISLARKNTDKIDADILCRILKMQVLSGEQTISPVVIPPLEIQELRGLFTTYRLYRKQTTQIKNRIHSLLKEKLYGFTQEEIFTQGQRKTIRALEKGSVMSFQVNELFDMLEIMEARVESLQGKIKEYAEPFMKEIEILTSMKGISVFIAIAVIADIIKVERFRNSKAFTSYLRSAPKVANSDTSVNIGKTNKKGRKLSSSLITQSLNHVLDASEKLSEWYSRLSEYKKAGLVRGGLRRRVFAEIYQMLKKGEYHYGRDAKKHEAKMRQYKKFLEKRKNLVKTA

SEQ ID NO: 109018 - protein, 454 aa, unidentified
MAKDKSSKSTPSVSPTGEIINRHAAGIDIGAREIVAAVPSDPEDEPVRSFGTTNPDLAAIRDWLKTCGITTAVMESTGVYWMALFGVLRDAGIEVLLVNASHVRHCPARKTDVRDAQWLMQLHTAGLLRGSFHPPEDIRRLRGLVRERADLVRDSSRHLQRMQKTLTEMNVQLHHVLSDIDGVSGLRIIEAILSGNRDPESLWSLRDGRCKTKREEALKALSGNWDEDLVAKMGRSLGTWKHLQSQILEVDGRIGQLLGRLEESERGPASRPPGSKARRGRKGEMACDVCGQARRIYGVDLETIPGISTQFLATLLSEVGTPGAMRTNFKSAKHFSSWLGLCPDNRKSGGKVLSSKTRKVANRLSTAFRLSAQALWRNESELGAWSRKMKARLGKAEGITATAHRLARIVYHLIATGEAYDDTKTAGVNAAAKARSIARLRKQAENLGLRIVAV

SEQ ID NO: 109019 - protein, 355 aa, unidentified
MERYIGMDVHAASCTLAVISEKGRRLKDFPVETNGQALVEAIRMIPGHKHLVFEEGLQSAWLYETLSPHVDELVVAGITTSRGPKSDKRDAYGLAEKLRVGNLDKYVFKAPRQFTRLREFSRTHMTLVTDVVRTQARIKSVYRSRGVLVTGVDVYGSRRREEWLKQLPSSSKIRATRLYAHLDFLLEQKKQAEADLLREAKKHPIVKILETAPGFGPIRAARLVPIVITPHRFRTKRQFWSYCGLGIVTRSSSDWVQTADGAWIKSRVPQTRGLSRQHNHFLKSIFKGAATTVVTQRNKDPIHARYERLLDGGTKPTLAKLSLARMIAATVLRMWKNEEEYDPGRAGLPAKTRKG

SEQ ID NO: 109020 - protein, 414 aa, unidentified
MTFRWYVGIDWGSEQHVACLLDQTGAQRATCAVAHTAVAVTGFLDGVLAQTGAQAGDVAVAIETPRGLLVETVLARGFSVFAINPKQLDRFRDRHSVAGAKDDRRDALVLADSLRTDGPLFRRVDPEDARVIELREYSRLLDDLETESRRLGNQLREQVARVTPTWLALSPGADEPWFWALLDAALTARGPRRLRESRVTRLLRVHRIRRLTADGVLTVLNAPQFSPAAGTAPAVAAHVALLLPRLRLLRDQRTTCERALDRLLQRLAEDDTSSEPGEHRDVRILRSLPGVGRKIAATMLAEAAPALAARDYHTLRAYGGAAPVTAQSGKRYRVVKMRRACHPRLRQALYHWAFVSISLDGGARQYYQRLRARGLTHARALRSVADRWLRILTAMLRSQTLYEPGRVNAVTALV

SEQ ID NO: 109021 - protein, 405 aa, unidentified
MLFLGIDLHRKQMTVSLRNEDGDVVLRRQVSTRWPKLEEFRGQLHEALAPDEKYVAVFEVCGFYDWLVKWLQQDPRCHQVLLIQPLGRSANKTDRRDANALSELLWVNRERVLRGDRIHGVRTVLLPSVEQQLDRRLTQMRERLVWRRTQTLNQIHKILRRHNLEWEQPTKSFQTRKVTQWLKSLPLEPLDRLAMNQLLVQWRLWEEQLVVVDDRVAERFQANPDAQLLSTMPGVSMFIAVAIVCRIAPIGRFPHGRSLANFLGLTPGSRSSGEAERLGSITKQGSRMVRFLLAQVILHLLRRDGSVRAWYQRIKRRRGSKIARVAVMRRTATIIRRMLSTGEPWSPGAANSEASAAADKPRQMRPWRPRRTVLSALSVGESEAVGSCTGSSSLSPGEEATRCPA

SEQ ID NO: 109022 - protein, 348 aa, unidentified
MEHYVGIDVSLELSSLCVLDVAGKVIREAKVASEPEALVAFLRGLDLPIARVGLEAGPLSQWLYDGLHEAGLGPVLLETRHVKAALSAMAVKTDRRDARGIAQLLRMGWYRPVHRKSVSSQEIRALLGARKQLQIKVIDLEQTVRGLLRGFGLKVGDVSRGKLPARIRELAAGHFMLEKIVEPLLAAREAMWREFARLHREVLVIVKEDQVCRRLMTVPGVGALVSLTYRAGVDDPGRFAKSKSVGAFFGLTPRRYQSGETDVTGSITKVGDAAVRTALHDAANALLTRATRFSTLKRWALDVAKRRGMRRAKVALARKLATVLHRMWADGTEFVWGKDPAAAAAPAA

SEQ ID NO: 109023 - protein, 355 aa, unidentified
MSQEKYIGMDVHQATISVAVMDARGKLIMECLLETKAATILEFIQGLRGTLALTFEEGTSAAWLHDLLKPHVSRLVVCDPRKNALLKDGNKSDRVDARKLAELLRTHQVKPVYHGKHGTRALKELGRSYLTITKDVTRVMNRIKSVYRSWAIPCAGTSVYTPRHRAEWLAKLVEPGVRIRAEHLYQQLDSLQPVRLEARRELLLESRKHAAVKLLRQIPSIGPIRAALLVALLQTPHRFRTKRQLWAYSGFAVEIHDSGEYRWVRGKLQRNRERITVRGLNDNHNKDVKSLFKSAAISASTRPGPLQDFYVARVESGMRPTMARLTLARKIAAITLTMWKKGVSFDPKQLQRQAA

SEQ ID NO: 109024 - protein, 392 aa, unidentified
MRISVGIDIAKEIHWVTAIDAGGVVQVDRKLLNTPAGIATLVDELTALRGTVRIGLDVIGGIAGLAEAMLADAGFALVHVPGIAVNRARQGTVGGENKSDPRDARTIAEQVRTRSDLRPIEPATELDLEIRLLVGRRSDIVQAQTQRLSRMRDLLVGIFPGLEACLDLKTKGPLHLLTKFVTPAELRDAGKKRLVRHLQAAGGVPKVEDLADRVQTVATEQPIAVPAERMTARLIRELAVEALASRTRLIELDRELEALLARHPDAALIRSLPGMGAVLTAELIAEAGNLARFRSADALASAAGMAPVLRQSGRSRFLRRPSGGNKGLKRVFYQSAFCSLAHDDSRAFYERKRREGKRHHQAVIALARRRVNVLWAVVHSRTPFQTAFKTAA

SEQ ID NO: 109025 - protein, 523 aa, unidentified
MSAIRVRQRYRSRHQEVLQKPSGVIHPRVQKVGPEHFGIVSVDCAKARSKWMLCDFFGNILIPPTVVEHNRADLDAAVDCLREAKQKYALHDLIVAVERTGRYHHVVRQAFAAAGFEVRIVHPFTTKRYRQVSDPGNKTDDTDLAAIQRAAVNGFALLERPVDLIWRELQLLIRHRRDLVFKSSAVATQIREHLEAVLPGYAACFDKLWESAAAWTFVRHFESPPAIHEAGIVKLIEVLQGDQVRFQRPTVERVLAWAGQAAPSDQAAAWHRRIALALHDDHIRKTHEILERERDIAGYLTQTPYVLLLSFPGINVVSAADFAGEMGPIANYANSRCITGRAGLCPSRHQSDQVDLRNGPLRRCANRKLRAAILSIADNLAVCNHHFSAMAVKWRAAGKDPRHTRIKIAARFCRSAFQMVAGGQVFRHPALQQRHYILDKLLAFHREHHTPMPQTLIGLETALGHIPSSAHADEAKPLAAELLRIHAGRRRGPQLLGDILPLVLARLGVATLQSEESGERDST

SEQ ID NO: 109026 - protein, 411 aa, unidentified
MRIVGFDVSRSVAEIAYLEDGTLHAGGRTGLRRDELERFAEKLRATDHVVLEATGNTAAIVNVLRQHVARVAIANPLQVRLIAEARVKTDKIDAAVLAQLYASGFLPEVWMPDEHTLALRRQISRRSQLVRQRTRLKNEIHAVLVAHLIERCPATDLFGKKGRAWLGVQPLPLDERLGVEQRLRELDRLGEDLREVEQALAQATIDDARLRVMLTITGVNTTVAIGLLSAIGDIERFPNPEKLVSYFGLNPSVYQSGPTPARHGHITKRGRSYARAMLVEAAWGATQAPGPLRAFFLRVRDRRGQQIAVVATARKLAVIVWYVLTRDEPFAWDRPALTAHKLRALELQAGMPAQHGSRKGSAAAYSLKSVRQQERAVAEQSERTYQRLFNRWKQSRPKSDSAPIRWPEART

SEQ ID NO: 109027 - protein, 442 aa, unidentified
MAMRKREDSPEVFPNAAGIDIGGSSHWVAVPKGAAEEPVPEFGTMTDDLHEMAEWLLACGVDTVALESTGVFWIPVYEVLEQRGLTVWLVDARQMKYVPGRKSDVMDCQWLQKLMSLGLLRAAWRPGDEVCVVRAVARQREVLLTEQAGWVQRMKKALVQMNLQLTEVLTDVMGLTGQAIVRAIVAGERNPKVLASHRHGRVRASAAEIERALTGNWRDEHVFVLGQALAMFDSLGERILECDAKIEALLKPLGVHEVELSGPGKRGGKNTPHFDARTALARWAGVDLTRINGLSVTTVMTILSEIGPDLSRFANVKHFCSWLGLCPGTKISGGKVLSARTRRSTNRVRQALKLAAMSLSRNDSALGAFYRRLCARMDKPRANTAVAHKLARMVYFMLTRGEAFIDEGQQRYEEQQRQRNIAALRRRASALGFEITPAGQVA

SEQ ID NO: 109028 - protein, 430 aa, unidentified
MHQSRTLSIGLDVHKESIAVAYVAQEHHAEGVSLGNIGTRQCDLDQLIRKMQSKSTHPICVYEAGPCGYWLYRYLTTKGQVCWGVAPALIPKKPGDRVTTHRRDALKLARLMRSGDLTPVDVPQVEDAAIRDLCRAREETLRALKAAQCQLNAFLLRHDIRSTGRATWSPAHLRWLSEVVCPTPAQQSVFQAYVRAVTDHPARLARLAQALTDHVQTWRLAPVVDALQALRGGPCTVAVTTVAALGDLPRFENPRQLMPSLGFTPAAYSTGERRPQGGITKTGNSPARRALVEGAWASRSPATIRRHLQRRLEKGPQAIQALSWQAQGRLCKRYRQLSARGKNPHQVGVAIARELRAFMWAMAQEVPRTPSSETVKRSPFVVTRLCLSIGRDAAPVWGNPRWREEAATNPRASSEAGPRRTQGRWEPTHG

SEQ ID NO: 109029 - protein, 347 aa, unidentified
MNYIGCDCHISSMDCAVVNERGQETKKQRVSTGVKGLMEFVRSIPKPSTIIIEEGILASWLLEMCTAYGEKLVITDPKTNRWIGRAGQKSDEIDATKLAQLARGGYIKEIHHPIGHRRRFRELVMSYHDTVKSQTRIKNKLKAKFRQNGIKCSGETVYSAKYRTKWQKRLPQDKVVQVMVEGLWRQLDQVHEVQEELLGHIRKQSRQYAEMKRFKNIPGIGTVHAATISAIVENPHRFANKKKLWMYAGLALAEKASGEKVYSRNLTRSYNRILKNALKQAAEAAIIAKDNQFRRQYLRLTIEQGIPSHRAKLTVARSMLATVYGIWKNGEDYDSAIDRKRVASDTT

SEQ ID NO: 109030 - protein, 340 aa, unidentified
MEHVAGADLHKRVTQLALLRDGRPPCQTRFANDRTAVEGALTWLPAGTTIAVESMGSWWWFVDTARRLGHHVVLSHPKLTKAIAAARLKSDKVDAVMLARLLKADLLPMVWIPAERERHIRELVAHRGRVVRTRTAVINELHALYSKRNLEVPRYLWHRAQPVPWRPEELGGYGPQIVRENVALLKALHEQIRGLDQALKAVAQEDPEAKRLMTHPGVGAITAVAVRAWVGDIRRFASAKHLVSYFGLAPRVRQSADTERHGHISKEGNRMVRTLLLQAALSAMRHTGGPVRRQYLGVLKRRGKKIARIAATAKLLGVLFQMMKQGLTYEELHQCGGSTQ

SEQ ID NO: 109031 - protein, 412 aa, unidentified
MEVFCGIDWAEDHHDVALVDATGNVVGKRRIGDDAAGFTQLLQLLAEAGDSAENPIPVAIETSRGLLVACLRATGRSVYAINPKAVDRYRDRHGVTGKKSDAGDALVLAHILRTDRAAHRPLPADSELAQAIAVLARAQQDAVWERTCAHNKLRSLLREYYPALLAAFAAKRGGILRPEARALLAAAPTPRTAAQLTHSNLCELLVQAGRQRGVDAEARRLLEVLQATYLHHPPLVEDAFGAQARALLRQLEVACANADELATAAVTHFGQHPDAEIITSLPGLGSLTGARVLAEIGDDRSRFADARSLKAYAGSAPVTRASGKSLVVMHRRVKNQRLAAVGYSWAFSAITASPGARAHYNRRRAAGDRHTAAQRNLFNRLLGCLHHCLRTLQSYIEHAAFTPMLAANKALA

SEQ ID NO: 109032 - protein, 370 aa, unidentified
MLYLAIDQHSKQITVCVRNEEGDTVLGRQVSTRPEKVKAFFQQLIEMDPEFMALLEVCGFNDWLIEELKRWNCCEIVLIHPEKPSKKKTDRRDARKLADLLWLNRERLAAGQAVHGLRRVYIVTQLERENRQLTALRKTLGQRRTRTLNKIHRIVNRHNLIWDYPTKTFQTQLGRRWLEQLELPEIDRLEMDVLLQEWKAWDEQIGRVDNKIVERANQPDPGEVLSATQILMTAPGVSHYSALALASRIGPIERFPRPRSLANYFGLTPGCRNSGNNQDRLGSITKEGSKIARFILGQLVLHFLKQDPTMRAWYRRIKTRRGSKIARVAVMRRMTTIFWHMLTYREAYSIGGPPARLRRSRSPIASSDAA

SEQ ID NO: 109033 - protein, 310 aa, unidentified
MDALHIGVDVSRDRLDVAADPPVVAPFHVARSHEGLADLVERLGPLGACRIAVEATGGFETIVAAALAGAGLPVVVVNPAQVRAFAQALGKRAKTDPIDAAVIARFAGATKPPVRALPDEETQALADLVTRRRQIIAMIGAESQRLKRASKRMARSVNRLLKALEKELADIDQDIDDQIRRSPNWLEKVALLKSVPGVGDQIARTLIAELPELGTLERRQIAALVGLAPWTRQSGQWRGRSFISGGRAHVRGALFMGALVAGRRNPTLKAFRDRLVARGKPKMVALIAVARKLITILNALIRDKKQWRTA

SEQ ID NO: 109034 - protein, 347 aa, unidentified
MSEYIGIDLHKAKSFVTRVDRHGRVLEQVELRHATGALQQYLERVPADTRIAVEATGNWMWLYELIEDRHPDLVLAHPLKTKAIASARIKTDKIDATTLAHLLRADLVPAAYIPPRAVRDTREILRYRASLVRLRTQVKNKIAAILSKNGIVTPTKTAFGVKSRQFLATVAVRPCYRLALDGYLRQLAHLTDEITQAAQTIEAQAQADPQAQLLCTMPGIGAYSALLILSEIGNVHRFPDSRHLCSYAGLVPSVHASGGKTRLGRLTKQGSTWLRWILIELSMHAIKGAPQFRQLYQRVARKHGRNAGRTAVARAMLKTIYAMLKHQEAFRPIEQGSTGQRLGAMAG

SEQ ID NO: 109035 - protein, 321 aa, unidentified
MTYVGIDVSKTTFVVAYSSDKASKTKTFRNTVKGVHEFIQTISSAGHHCVLEATGNYSSLLVYLLSQAGITVSLENPLKIRNFARVMLSVTKTDETDALLIALYGEKMQPAPYRLRSDAILTLKQKRTVIRQLKKQLIATRNLKGSMEALPFFDPKCRKTIEKTIAFLEKQIKGLEEELSSLAQSEYKKQMDLLTSIKGIGITLAAALIMATGGFTYFDNAKQLTRYLGLSPTYQQSGTSVNVKGHINQNGDSNLRSQLYVAAFSSLRCNAECKACFDRLRSNGKPGKVAVVAVANKLIRQAFAVVTQGKPYVDGFKSEKP

SEQ ID NO: 109036 - protein, 469 aa, unidentified
MVLQEKLAEVSKKKLLVGIDAAKDTHWAVIGDIRGRELMRPFKFNNNQEGFNLLQERINSLGNFSHSEVMLGLEPTGLYWKPLGTYLKDKNYRLVLVNPSHTHKTKELQDNSQTKHDKKDARLIQTLVREGKFLEPIILKGDYACLRRLVKARESLVKRSRAIQNRIKGVISEYFPEISLVSRAIKGKTIMALLKEYPFPEDIRRLGKESLLAKLKLYGNNRFGKAKAEKLWNLANASIGIREACAEAKLELRQLIEEYALLDKQKKELELPIKTITLRLPETKYIVQLPGIKYLSIARLLSETGPLKNYTNSKDIEKLAGLNLVENSSGKHISGKTISKRGRKLLRYTGYQIALSSIRNNPAIKYEYKYRIETLKQNKMQALIAITAKMLRIIFCLATKQREYDQNKVSKHYYLSRIRPKNRLKDIYEWVRPVEPPSGSPIKIGDDTAYENIGHPLSVTLNEVMSGSR

SEQ ID NO: 109037 - protein, 352 aa, unidentified
MMIIGCDFHPRFQQIACLDTKTGECNERRLMHTGEAERFYRSFAGCQVRVGVEATGNFAWFRRLLGELGHELMLGDATAIRASNPRSQKTDKRDARHILRLLVEERFPVVWQPGVENERLRQLLLHRSSLVRMRTRIENQLDSVGKNEGLVESRRWTAKRRSAVEGLKLDGWYGERRRDLLALLDGLQERIKPLDQAVRTAAEADPLARLLMTHPGVGPVVSLAYVLTIGDWQRFPRGKQVGSYLGLIPCEDSSGDKRRLGHISKQGNPMLRWLLVQAATVAQKYDADWHRQYVRLSMAKHHGVAKLAIAHKLAVRLYWMLRSGQDYKQIVERGSHAGQSACPNGCGKKPRT

SEQ ID NO: 109038 - protein, 391 aa, unidentified
MIYIGIDVAKDKHDCFITNSDSEVLFKAFTIFNNLDGFNDLYQKIESVMDDVTKVKVGLEATGHYSYNLLGYLIDKGLPTYVINPLHTNLYRKSLSLRQTKTDKVDARTIASMLMSDVNLKSYSDTSYHNEELKSLTRYRFDKVKERAKLKTSVSRLVCILFPELEKLVPTLHMASVYALLSKFPSAKHVATAHLTRLTNLLSESSKGRYCKDTAITFRDAARASIGSNMPAKSLELKHTIKLIQELDSEIDEIENEIKIIMDGINSPILSIPGINYRMGAMIIAEICDFNRFDSPDKILAYAGFSPSTYQSGQLDGAYAHMEKRGSRYLRYALYNATKYVCHWDPTFAVYLAKKRAEGKHYNVAISHAVKKLVRVIYHLEKTKQQYIKAT

SEQ ID NO: 109039 - protein, 344 aa, unidentified
MDHFAGLDVSVKETSVCIVDDTGKIVREVRVASEPEALLAVLNNPAYHFKRIGLEAGPLSQWLFSALAEAELPVVCVETRHMQAVLKAQINKTDRNDARGIAQMMRVGLYRPVHVKTLRSQKLRMLLTHRQLLQSKAIAIENDLRGTLRNFGLKVGMVGKVKYEARIRELVENLPDLAVLVEPMLIVRRVLREQIVILHRRLLAIVRDDEVCRRLMTTPGVGPVVSLTYRATVDIPARFRKSKAVGAVFGLTCSKYQSGEIDRSGRISRCGDEMMRTMLYEAAQSMLHSKKWSWLKAWAMQIARRRGMKKAIVALARRLAVIMHRIWVDGTEFRWTREQAPAAA

SEQ ID NO: 109040 - protein, 403 aa, unidentified
MTKYHVGVGVGKDRHYIYVRDLSKDAYCKVFSIANDRNGFIEMIAAVERLSPEKSDFLIGVEACSYALNLSYFLMGVGYDLVEVNPFRAGQFRKAQGKKAKTDRIDARTIAAILSLGDHKPLSVPDPILDNLKDLTRFRASLVDERATMIIHLREALSVLFPEFEKVFRQLDSAGSLALLAAFPGPELIIAAGEETVGKTLSLASPRRMSRGMARRIIEAAKGTVGVVQKQPAVGIKISILAKRIAGLQSTIRELEGQITALFNGLPCKPQGFPLGRTHTLAAIVAEIGDIHRFATLKKFLSHLGWCPQSFQTGNFRLEHPRMSHAGNKYIRRLVWMLSILAIRMVPRCREYFQRRVMEGKAKMHILVAVGRKLLSTLYAMLKRGAPYDPNWEDNSRIALARP

SEQ ID NO: 109041 - protein, 335 aa, unidentified
MKKIYVGIDISKEKCNLCFRSGLEIVREEECSNDVKALKKAFKVALKVLGASVDEVLVCAEYTGRYIYPLTVACQELDIFLWLDDPTRIKNSMGLTRGKNDVIDAARIAEYAFRYSDKAVRYCIPDAALVSMKNLLADREFLLIDRKRYQSQLTDQKKYMAPGDFKHKSGRWKKVIKSIDEQIAAIDTEIETLIAADPVLTRQKELLVSIDGIGERIAINMIAITGGFTRFQNARQFCSFAGLTPYKYDSGTSVHSKAKISKRANQTMKALLHLAAVNAATHMKQGEYKDYFERKTKEGKHVMCVLNVIRAKLVHRMFSVIKRDTEYTKEYKPAC

SEQ ID NO: 109042 - protein, 349 aa, unidentified
MELAKIKSKYYCGADLHSKTTYIKVMNGEGDILLKRNLPNNFAVFKSLVKSFLPDLVVGAESTYSYYWLYDGCRESGIPFYLGHALYMKAISGNKKKSDPIDAETISNLLRSNFFPIAYPYPKEMRATRDLLRRRHRLVRIRAEGYTHIHLIFHQEGLGDITSEAVKNKSTRRELISRFSNQSLQHTITADLDIIDMLDPYIKQLELEIRNQAKSHNHRDYALLQTMPGIGEMNALIILYETHDINRFPTVQKYSSYCRVIRCERESNGKNTGNKNQKMGNPYLKWAYGQILHSAKRYNDRINRHYQKLESKHGPARARSIMAHKFAVAVYSMLKHHQAFDEERFVQNN

SEQ ID NO: 109043 - protein, 348 aa, unidentified
MQIVGALDVHRRQITFKTLDLVSGESRRGRISPAARGPLREWLEQFGGVEGEFVLEGTTGWRFVVEELERAGHVARLADPAETAARRGRKQRAKTDDGDCELQLRLLLGGELPEAWIPPAHIVELRTRVRLRKTLVDQRTAWLQRLQAQLFHQGVPPGLKPRTTAGRRELATLELSPAGRDVVELCLRMLDQLDRELAPIDRALRSFARQQPGCRALTGQLYGVGAVTATAILAELGDARRFTSSDDAVRHSGLDVTVWQSDRKRASGHLSHQGPALLRWALFEAAQCAARRSSPDHAYYLQVAKRIDHNRACLSVARKLCRRAHHTLRELGDDALAPTRTRLVDSAA

SEQ ID NO: 109044 - protein, 328 aa, unidentified
MYLCILNQDGEILVHRNMPAGPEPFLKAVAPYREDLVVCVECIFPWDWLADLCAREGMPFVLGHALSMKAIHGGKAKNDQIDSQKMAVLLRGGMLPQADVYPAAMRATRDLLRRRMHLMRKRAELLAHVQNTNSQYNLPGMGKNIAYKANRDGIAERFPDPAVQKSIAVDLALIGHYDPLLNDVEFSIVHTAKQPDPQTLSRLQSVPGIGKILSLVLLYEIHTIDRFPRVQDFVSYCRLVKGAKESAGKRYGTSGAKIGNAYLKWAFSEAAGLLLRTNPAGQKYLARLEKKHGQGKALTVLAQKLARAVYSMLKRKTAFDMPMFLQSS

SEQ ID NO: 109045 - protein, 388 aa, unidentified
MIYVGIDIAKLNHFAAAVSSDGEILIEPFKFTNDYDGFYLLLSKLAPLDQNSIIIGLESTAHYGDNLVRFLISKDFKVCVLNPIQTSSMRKNNVRKTKTDKVDTFVIAKTLMMQDSLRFMTLDDLDYIELKELGRFRQKLVKQRTRLKIQLTSYVDQVFPELQYFFKSGLHQNSVYALLKEAPTPAVIASMHMTHLAHILEVASHGHFGKDKARDLRVLAQKSVGVNDSSLSIQITHTIEQIELLDSQLFHTELEMANLVTCLHSVIMTIPGIGFINGGMILGEIGDIHHFSEPKKLLAFAGLDPSVHQSGNFQAQRTRMSKRGSRVLRYALINAAHNVVKNNATFKAYYDAKRAEGRTHYNALGHCAGKLVRVIWKMLTDEVEFNLE

SEQ ID NO: 109046 - protein, 384 aa, unidentified
MASMKDCCCGVDVHKSFIVAVIAKLKGKDVIFTGYKRFSTFKKGLLEFKEWLGMHDCYEICMESTGKYYIPVYRTVADETFHVDVVHPKYVKAPRGKKNDKKDAKRIADMYMRDHIAEYSIIPTAEILAIRDVARYRRKTVYAITAEKNRMSNCLTVSGIKLDEVLSDLYGKTGQALIGETIQRGSCDFNPEPFIDKRVKATPEEFREALDGDITPATLIKMKMIQERMGFLCNQKTELELSMTSLSKDFSRQLEILDSAPGVDSISAISIISEIGSDMKVFGSVKKCLSWVGVVPQNDESAGKKKTTRIAKGNSWLKPVLVQCANAAIKDKKHPEIREKYLAIKKRRGHGKAIIAIAKRLMTAIYFMLLRDQMYAPRLGKDTA

SEQ ID NO: 109047 - protein, 329 aa, unidentified
MKVPFIVGADLSKKTIDVAIHQSAIHLKITNDTNGFQELMLWVQKQSIDQSDILIVMEHTGLYSYRFEQYLHKQNVSFSKVSGLAIKRSMGMVRGKSDKQDALRIARYGFEKLDQLIINRPESGSLQCLQRLYSVREKLVRNRAAYMASVKEMQAACQLKKSDIIIASQLTLIKTLSQQIEKLQKEIQTIIDAEKELKQNYQLLLSIKGVGEVLALATIVKTGNFTRFTNARKFACHCGTAPFENTSGTSVRGKTRVSHLADKRMKSLLDMAAKSSIQYDKELREYYLKRTEKGKPKMSTINVVRNKILYRIFAIIKRQTPFQPHPLAA

SEQ ID NO: 109048 - protein, 309 aa, unidentified
MSSWVGIDVSKNTLAVWVRPSGVNFIVCNSSEGHQALLLNLAEIQVERVLLEATGGYERAVMGCLVQAGHSVVRINPRRARAFAQAMGKLVKTDPVDAGVLAHLAQVIEPSACQPVSLARDELQELVRRREQVVKLRDDERRRLTLARSGVVQESLQTNISQLNEQIARLNSAIEAAAQRTDSQLVKQLGAIAGIGPVTVASLLAYLPELGQLSRRQIAALAGLAPYNNDSGQHSGKRCIKGGRASIRRVLYMATWSVIRCHSSFGTRYASLRARGKCAKVALVACMRVLLIRLNAMVRDHSSWRAEAV

SEQ ID NO: 109049 - protein, 393 aa, unidentified
MRKPKQQMKPLNDLSRSLTPFAPNHTLIAVIEMSKESWLVAGIIPGVERQPLKKLAADENELLKLLGRWRAEAEKAGHKIARIAVAFETGRDGFWLARWLRARGIEGHVIHAASVAVSREHRRAKTDRLDTEGLKRAFLGWLRGEREHCKMAAIPTTAEEDAKRPHRERETLVGEQTSIINRIKATLVRLGIRNFNPKLKQAPERLEHVRTPEGEPIPPNTLAELHRDLARKQLVGEQIRKIETARLEQLKEAPKAGPNLMVLVLMRVIGIGIETADMLVQEILSRNLRDRRAVARYGGLTGSPDESGSHRREKGLARSGNARVRKGMIQLAWRFLAFQKDSALAKWFKARTANARGSRKKMIVALARKLLIALWHFVRDGVVPEGILLRPAH

SEQ ID NO: 109050 - protein, 314 aa, unidentified
MEQIYIGVDVSKDTLDISAYPSKQIWQYKNIPKGIAKTVAKLKLLNPKLIVMEATGGLEKPLSEALHESGLPVAVINPRRIRDFGRAMGLLAKTDKLDAQAIAYFAAKIEPAPRPGADETSQKLERLVTRREQLSEMVTAEKNRLKQSKEELIRCQIKEHIAWLEFEIKGLERGLKENLQQNPAALAKFNLYRSMPGVGHILSYSLVAELGELGCLNQREIAALVGLAPFNRDSGHYRGKRTIWGGRARVRKALYMPVLAAIRCNAVIRSVYQRLIARGKLHKVALVACMHKMLTILNSMAKNNNPWRCAETMT

SEQ ID NO: 109051 - protein, 406 aa, unidentified
MRLFVGDDWAEDHRDVELMDAAGRVLARKRLPEGAAGMARLHELTGQHLGEDGDDAEVVIGIETDRGPWVAALVAAGYVVFPVNPLQASRYRERRGVSGAKSDGADAHMLADMVRTDWHQLRPAAGDSAEAGAIKALARMHKTLIWDRTRQLQRLRHQLREYFPGALEAFDDLAAPDALELLAKAPDPARAARLTRAQVSAALKRARRRNIADKTVAIISALRSAQLGQPPAVTSAYAATVRSLIAVITALEEQVTVLQVQVEAHFGQHPDAEIYLSQPGLGSLLGARVLAEFGDDPHRYASSKARKNYAGTSPITRASGKKKTVMARYIRNDRLIDALMAQAFTALNVSPGARAFYDQQRAGGAGHNDALRRLANRLVGILHGCLKTQTLYNEATAWSHRRKLAA

SEQ ID NO: 109052 - protein, 341 aa, unidentified
MKVSTLGIDLAKNVFQLHGVDHEGHTILRKKLTRAKFVQFVIQLEPCLIGMEACSSSHYFARLFTRYGHEVKLIPPQYVKPYVKTNKTDAADAEAICEAVTRPNMRFVQIKTEEQQAVLALHTERGILIRERIACANSLRATLAEFGITIAAGQSHLTRELPAILEDGENGLSPFVRTSIYRQSKHIRELEEQVKQVEEALVSWYRTQEACQRMAKIPGVGMLTATYVVAAVGNARQFSTAKQFASWLGLTPKEHSSGGKQQLGGISKRGDGYFRYLLVHGARALTAWVNRNGAVEENSWLQGLLERKHYNVAVVAMAAKTARIMWSMLSHNTEYQPRQLA

SEQ ID NO: 109053 - protein, 319 aa, unidentified
MRIGIDVAKAELVVAARPSGAPWTVTNDDAGVRTLVARLQEAAPTLIVLEATGGYELLAVGALAAAALPVVVVNPRQVRDFAKATGQLAKTDHVDAAILALFAERVQPAVRPLPDAAAQELDALLARRRQLLEMLQAERNRLGQVFGRGKQPVRKSLKTHITFLERELRIADTELGQMIRQSPAWREQDDLLQSVPGVGRVVALTLLAELPELGRLSRRAIAKLVGIAPLSHDSGTLRGHRFVQGGRASVRAMLYMAALVATKRNAVIRAFYQRLVATGKPKKLALVACMRKLLTMLNAMVRSKTPWQPAVALATPVGA

SEQ ID NO: 109054 - protein, 349 aa, unidentified
MVTLGVDAHKRTHTIVAVDENGAELGQRTVVATSAGHLEGLRWAGQWAERRWAIEDCRHLSRRLTTDLLVAGEAVLRVPPKLMAGARRSARTWGKSDPIDALAVARAVLREPGLPVAQLDGPARDLRLLVDHREDLVAERTRIENRLRWHLHELQPGEEPPARSLNRHATLAALETVLAVQPGVVARLARDLVARCRDITAAINSLEREIRERISGLAPRVLALLGCGALSAAKIVGEVGRISRFRSRNALAMHNGTAPIPVWSGNHERFRLNRGGNRQINCALHRIAVTQMQHPGPAQDYLARRRAAGDTKTEAIRALRRRISDEIYRRLRADEASTAVRDPGLPAAA

SEQ ID NO: 109055 - protein, 387 aa, unidentified
MQKPHDNSKVCRAAFVQDSTLVVVIEMALTSWLVAGMIPGVDREPLKKIAPDPEELLQLLYRWRDEAIKAGKEITRIAVAYETGRDSFWLARWLRARGIDAHVIHATSVAISREHRRAKTDRIDTAMLRRGFLGWLRGEPGHCSLAIVPTVAEEDAKRPHRERESLVQERTGTVNRMKSILIQFGVRNFNPVLRKASEKLDAVRTPEGIPLPPNAAAALRRHMERLRVIKEQIKAIELTRLQRLQRDPADKMNAMVFLLVRIIGLGVETAEQLVHEILFRDLRDRKAVARYAGLTGSPDESGSKRREKGLSRSGNGRVRTILIQLSWRLLKLQPGSELVLWYQKRTADAKGSRKPMIVAFARKLIIALWRYVNTGLLPEGFELKPAA

SEQ ID NO: 109056 - protein, 349 aa, unidentified
MYYVGVDYHKRYSVATVLNSDGVMLARQRLDNRLEAFRELLESYDKAEIEAVVEATRSWGIPVDILEQLAGRVILANPGEVKLIAKGRIKTDKVDSLALAKLLRVGWVPEAYLRPRTNREHQLILRVRCFLVQLRTRVKNRIHDLIDRQDEPIWETAASFSDLFGKKGMVWLKGLDLSHPCGTLLCRLLTAYDALDAQVRQSDRLVAELFAADDDCQRLAKTPGIGTFFSVLIKTEVGTIERFASSARFCSYAGVVPSTESSGGKVWHGRIIKQSNRWLRWALVEAVIPATVADAGLRVHYEYYRRTKGSKVAKVVTARRLGCIVYRVLKEKQPFYERPVPSRGYRQAG

SEQ ID NO: 109057 - protein, 363 aa, unidentified
MKIMTGIDLHSNNALCGLMDESGQRLVHKQLPCDLPAILQLLDPYKERIATVAIESTYNWYWLADGLRDHGYNVVLANPARMKPYDGLKHTDDVSDAFFLTELLRLNILPTGHLYDRKTRPVRDLLRRRLLLVHQRTSLILSFKSLNERTLGQRVALARVKAMKAEEARALFTDPADQLLSGTEIELMGHLTQAIHKIEAHVLNVAGKWSTYQRLQELPGIGKILGLTIALETGDAKRFADAGNFASYCRCVKSLRTSNGKKKGENNRKCGNTYLAWAFVEAAHFACRYDDQCRRFYDRKKQQTNPVIATKALACKLAKAAWHMMAEDVPYDNERVFGPGKKTDFGETGREPAKGSGHPSQKN

SEQ ID NO: 109058 - protein, 338 aa, unidentified
MTTIMENIALIGIDLGKNSFHIHCQDRRGKAVYRKKFTRPKLIEFLATCPATTIAMEACGGSHFMARKLEELGHSPKLISPQFVRPFVKSNKNDFVDAEAICEAASRPSMRFVQPRTESQQAMRALHRVRESLVQDKVKTTNQMHAFLLEFGISVPRGAAVISRLSTILEDNSLPLYLSQLLLKLQQHYHYLVEQIKDLESQLKRKLDEDEVGQRLLSIPCVGTLTASTISTEIGDGKQYASSRDFAAATGLVPRQYSTGGRTTLLGISKRGNKKIRTLLVQCARVFIQKLEHQSGKLADWVRDLLCRKSNFVVTCALANKLARIAWALTARQQTYVA

SEQ ID NO: 109059 - protein, 310 aa, unidentified
MSEEKYVGVDVAKAHLDVCVLPEGESWRTSNDESGIAELSGRLQSLEPEGIVLEATGGLEQALVASLMAADLPVVVINPRQVRDFARATGRLAKTDKIDAAVLAHFGQVVRPELRPLPDEASQALKGLVARRHQIQEMLTAEKIRRHMAKDRIRSSIDANIEWLKRLLKDIEDELDKTIRSSPVWREKDDLLRSVPGIGRVVSSVFVSRLPELGRAARRKVSALVGVAPFNRDSGLMRGRRTIWGGRADVRVALYQATLVAIRHNALIKAFYQRLLAAGKPKKVALVACMRKLLGIVNAMLRTGQPWQPA

SEQ ID NO: 109060 - protein, 299 aa, unidentified
MAHRNLPRPAAVYGIDIGKNLFHVVGLSCDGTPVQKVRFRRDTLLQFFARAQPSIVGMESCAGSQWLAQKIQALGHKVRLIPVQFVRPYVKSIKNDTIDAEAIAEAATRPTMRFVAVKEEGQVDLQALHRIRDQMVGSRTRLINQMRAFCLEYGVPLRQGAGIFKLELPRALNDEGNDLSPVMRRLVGDLFADLRRLEERIREVTKEIEAVADREDVTRRLMTIPGIGALGATAVLAAIGDGLQFRKARDLAAWLGLVPRQYSSGGKQTLLGVSKRGNRYVKKLLVHGARLSIGPLIAV

SEQ ID NO: 109061 - protein, 313 aa, unidentified
MNDKKVAGIDVSKSTLDVALLPSGEMLQFGNEVAGIGELVKQLKSSGLDLVVMEATGGYETAVASALVAAGLRVAVVNPRQVRDFAKATGRLAKTDRIDAQVIAAFGVAVEPHILQLPDEQARELDALLVRRAQLVAMRVQEVNRLGLSQGAARKQIKLHIAWLDNAIDKLDVDITAGLRSSPAWRAKDDLYRSFKGVGPVTSSNMIIALPELGRIDRRAITALVGLAPFNRDSGTMRGRRCIYGGRGRIRNLLYMAATSAIQHNPVIKAFYERLKSRGKPHKVAMVACMRKMLIILNAMARDGTPWTPEKAV

SEQ ID NO: 109062 - protein, 384 aa, unidentified
MNNDTTLFIGLDTHKSFTQAALLKDNRGETPISYGRIDTSKSALIKLAQKIQSQFPKATIHFIYEAGPCGYWIYRLLTSLGYHCYIVAPSLIPKKPGDRVKTDKRDAAKLARLFRADELSTIYVPEAEDEAIRDLSRSRETAMKDLKDAKLQLKGFFLRNNINTVVKDNWSKKHLRWLTELVLPHHSQQIVLQEMIQIISERMQRLQRLDNELIHQVKNWRYYPVVKAIQAMRGIRLLVALGTIAELGDLRRFDHPRKLMSYLGLVPSESSSGQKRRQGSITKCGNSRARRLLIEGAHSYKHKANISSELQIRQEGLSKEIIDIAWQAQLRLCRRYQRLMFLGKHRSVVVTAIAREMVAFIWAITREVGIPPIDPRQRIARLPA

SEQ ID NO: 109063 - protein, 403 aa, unidentified
MNAVGIDVSKGKSTVAVLRPFGEIVISPFDVFHTPKALGELVALLKSLDGETKVVMEYTGNYYLPIAQFLQNNGFFVSVINAILIHDYGNKSLRKAKTDKKDALKLASFALDRWLDLPSFSVSPDTRNLLKTYNRQYNQYNKLKVMLKNNLISLLDQTFPNANSLFTSPARKDNGHEKWIDFALKFPHAECISKKSLSAFSKAYLSWCHKNGYRFSENKVKDIYESACSCSPSLPLNESSVLLITNAISQLNCIAETLSILASEMNHLASTLPEYNIVMNMFGVGSILGSQLIAEIGDVSRFHNKRALVAFAGLDAPPFQSGNFNAQSRSISKRGSASLRKTLFQIMSIVLQKEPVDNAVFQFMDKKRFEGKHFYVYMTAAANKFLRIYYARVTEYLNSLQVA

SEQ ID NO: 109064 - protein, 326 aa, unidentified
MTRIICGVDISSATLAARIGRDGSASTFANTSDGIGQLAAFCQSHAVELVAMEATGGYEQRSFAQLSEHGVPVAVLNPRAVRQFAQSMGALEKTDAIDAGMIAWYAETKRSQPTCLAPETQLELRARVTRLRQLTEVRTAQSNQQRLVTNAAVRKGFSAMLKFLDQQIEELEVAIAALIDADPLWHQLNRVFRTIKGVADRTVSRLMAEMPEIGTLSNKTISKLAGLAPLANDSGKRQGRRAVRGGRSAIREILFIVGSVVARYEPDFVEFQQRLRAAGKPPKVVRIAVAHKLLVRLNAKAREVRQQISSRNVKPAHSTETLVQCA

SEQ ID NO: 109065 - protein, 312 aa, unidentified
MSTPTKIHVGIDVCKLQLDVAWPGQRRRLTNNPQGHQALLAALPAGTHVYLEATGGYERALVDTLQRAGRAVSVLNPRQVRAFARAQGQLAKTDRLDASVLADFGRAMDTPATAPVDPSIRQLAELCAVRDQFVHLRAQLLQSAEHWSLPQTRRGLQAQLRSLTTQIDKLEALLAATIAQDPALAARNDTLQSQYGIGPTTAAVLLALLPELGHASRRQIGALAGLAPYNDDSGPRSGHRHIRGGRSRVRRALYLAALSVVRSHTPLAAFYQRLRQTGKPAKVALLATARKLLCFLNHQLKSSPSSIPLSSS

SEQ ID NO: 109066 - protein, 391 aa, unidentified
MSMYFVGIDISKYKHDCCIISAADQQIVSKFTLTNDKDGFEQLLISLNSLSNPEDIKIGFESTAHYALNLELFLENAHHSFMEVNPVLIKEYKKSATLRRTKTDSVDCESIARWLMTVEYKPHSKGFYHAYSLKSLTRLRDRLIRQRSFYLVKITNVLDHTFPEFKPFFNERLSKTALYLLENYGSAEKMARMNSVSYDKLRCISRGKFSIQKFLRLKELAANTVGVNNSIFDLELNSLLTLYKSLSNEINTLESEIIKLIEEVHPHYMSIPGIGPISAAVIYAEYGDISNFSNPGQMLAFAGIEPGIDESGTESHGGRMVKHGSSQLRYVLLNACLPLIRFDLTFATYYAKKRAEGKKHRVAITHVAKKLIRVIYALERQDIDFNAQKLR

SEQ ID NO: 109067 - protein, 336 aa, unidentified
MFQLGIDVSKKTLDLCLLREGVKGSVKTRKLQNNINAVNAVIAWLSKQHCKPEDVHIIMEATGVYHESLAYGLHKAGGRISLANPHRAREFARGMGMLTKNDRVDAYMLACYGALKAPEPWLPPPEEVRHLSALLRRRDALVADSTREKNRLEKYLATDTPSVIAESVEAMIGQLNAEIKRLDRLIRSHLNQHPELKKDFDLLTSIKSVGYQLGLNMLVILRSHDFATAEQAAAFLGVVPVEKYSGTSVRGCPKLSKIGPPEIRAKLYLASLCGLRFNPLMKAMYERLCLRGKGKMCAIGALMRKLVHWCYGVLKTQKPFDVGYLSSYARSACKAA

SEQ ID NO: 109068 - protein, 320 aa, unidentified
MHKDSTYATILNVEGKVINQTRMSNEQVLSYLTHYKVNRVAMESSTAVAPLYRQLESKGFEVVVSHPKKTRYIAEAKIKSDRVDSKAIAELARLDALPLSYVPDTETSRLREKVRRRAFLVRQRTKLKVKIKSVLLYEGIKPPSDHGLFTLKGVEWLRSLKFESIDSHLRIMSTFNREIKLLSKQLVGLAEEDEDVKLLMTVPGIGYYSALLMKSEIGDVNRFTFPERLCSYAGLVPSTYASGGRVRHGGIIKEGSRWLRWVMVQAAQTHVRSFDSNVTRMYHRVAEKKGNRVGLTAAAHKLLLVCYSVLKNRRPYYDQA

SEQ ID NO: 109069 - protein, 451 aa, unidentified
MRYIGMDVHREFAQLAVVEDGLLRDEGRIGVTPEALREWAAGLGPDDQVALEATGNSEAIAMLLTPLVARVVVSNPLKTRAIAEAKVKTDKVDARILAQLLAADFLPGVWLPDERTQMLRRQVVRRAGIVRHRTRVKNQVHAILARNLCPTPPVSDLFGKAGRYWLGQQALPPDETAAVAALLRQLDFAGQELHRVDRELAVEALADPVVARLMTIPGIDAIAGISIVAAVGDFTRFDDPDKLVCYLGLNPRVRQSGNSAPVHGRISKTGRAQVRGVLVEAAWSACRAPGPLRAFYRRVQARRGFPKAIVATARKLTILAWHLAVHNEDYAFARPGLVAHKRRKLELAAGQPSRRGFHGTPRAAYNDKDRRDAETAIAEQAEHAYEVLVAGWQAHRPANRQGSGADHLDAVLAGVKAEPAGALRAALTPAPGGFLRQPTSPADWSSPHYTP

SEQ ID NO: 109070 - protein, 342 aa, unidentified
MTAIGVDTHKATLAACAIDELGRVVGEATFGNDPAGHLSFIAWARSIEPEATIGIEGSSSFGAPLARAAQSAGHCVREVPPHLSRFERRRTRRPGKSDPGDALAIARVTARETNLPPIRLPDRTNEIRLLLEAREDLIGETTRARNRLHAHLRVLLPGYGGKVANLVAARHRTMVRRLLRGNATVQGELARSLLDRLLRLERECDVLTRRIEALVDGHPLLALPGAGPITVARLVAEAGDMRRFRTPDAFAALAGVAPIPASSGQIQRMRLNRGGNRQLNRAMHVIAVTQSRFHPPAKAYITRRIETDGKTRREAIRALKRQLVRPVFRLLVEGSEVRLDAA

SEQ ID NO: 109071 - protein, 388 aa, unidentified
MFFLGIDIGKNTHVASLLDEKAKVIFKAYSFANTLDAAEALVVKLEPYKASLEIGMEATGHYWLSLYSFLTEHNFIVHVLNPIQTDGWRKGIEIRKRKTDVIDSVLIADLIRYGDFLETSLADEDILSLRNLTRFRSYLVNSVSDLKRKAIAVLDQIFPEYASVFSNVFGQTSKELLKSLSLPSDYENLSATKIEEVLSNITQKKKASETISTLSDKASRSFGISFCKDSFAFQLKLIIEQICFIEEQIASVELEIEQLMSKLGTNIKTIPGVGNVIGAVILGEIGDIERFDNPSKLVAYAGLDASISQSGEYEASSGKLSKRGSPYLRKALYMAAQRAEFCDPVFHAYYEKKRNEGKHHLVATNAVARKLCHTIYAILKKDIPYEVQ

SEQ ID NO: 109072 - protein, 367 aa, unidentified
MLYVGLDLSRKRLDWLALDQEGQPAEIGAAPPDRDALAKLGQRLGDTPVLAVIESMSGARFVHDQLELAGWDVRIADAAKARGLAPLACKTDRIDCRVLAELARLNLVPEIWLPDPQVRAERERSRFRLHLVKHRSALKNRVHAILFQHGIANPHRDLFDAGGRALLTRLELAEPWASTVAASLALVDQLDEQIAACERELRRLGANPPSIPLLTTIPGVAWVLGYTIAAEIGDIARFPSPRKLVGFTGLTPRVDQSGERDRRGPLRKNGPNYLRWALIEAAHTAGRNPRYRPIVERMRARHGRSRGSKIAAIEIGRRLTEAIWHMLTHDQPFAPAGAPTPVAAWRLAKELRYRSSPDPTDRRTTAP

SEQ ID NO: 109073 - protein, 370 aa, unidentified
MLDTTTFIGLDVHARSIKAVSLDVMTGEVRAATFGYDAGAVAEWVRSVDPRARCVYESGVTGFDLQKRLSGLGVDCVVGAVSKMIKPSADRRRKNDRNDAEFLARMLSVGNVVEVWVPDDECEAARDLTRALEDARDDLSRSKQRLSKFLLRHGLAFDERTPTGRRKGNWTRAHWSWIESIRFAERADNDVLAYYVDAVRRAAEEKARLEGLVEAEARKPRWRRRVDSLRCLKGVDTASAADLVFEAGEFSRFRNARSFAAWVGLTPSEHSSGESDRRGAITKAGNKHLRKTLVEAAWHYLTCSGRPKDLAKGQAPDRGARRHAAKGVRRLVERREALLARGVHGNKANVATARELACWVWAVGLMAEEA

SEQ ID NO: 109074 - protein, 342 aa, unidentified
MNKELYFGVDVSKNWLDVAYYNGVTIDWKGGHIRVDNNLHGFIQIGKWLKKLNAEKDCALFCMEYTGLYSQGFRLWLEKEGIKYGMVQPRKMHRFEPDLGENERAIDRIKTDEVDSFRIAMYCEKHQRKIKTSPSKLPGEAYLKLKRLLSERKQYTKQSTLYKQQLHDISEYDTEGSCKRKQYGLDFVKNQIHQTDKEIQKVLEQDPNLATNYNLLRSIKGIGLVVAVETIVLTENFTSISNPRKYACYIGIAPARKESGISVKGGEHVSRKGFTQAKADLSIVCLVSIKWDPNIKAYWERKKAEGKCTGIVLNAIKFKLVLRMFAVIKRQQPYVIIDGHKK

SEQ ID NO: 109075 - protein, 403 aa, unidentified
MNMNAVGIDVSKGKSMVAILRPYGEIVSTPFEVKHTVSGIRSLIEHIQSIDGESRIVMEHTGRYYEPLVRELSQADLFVSAVNPKLIKDFGDNSLRKVKSDKADALKIARYTLDSWTELRQYSLMDEIRNQLKIMNRQFDFYMKHKTAMKNNLIGILDQTYPGVNTYFDSPAREDGSQKWVDFANTYWHVDCVRKLSLNAFIDHYQKWCKRRKYNFSQSKAVEIYEASKEIVSVLPKDDLTKLIIKQAVEQLNTASQTVEQLRSMMNEAASKLPEYPVVMAMKGVGKSLGPQLMAEIGDVSRFTHKGAITAFAGVDPGVNESGSYEQKSVPSSKRGSGTLRKTLFQVMDVLIKTKPQDDPVYLFMDKKQSQGKPYYVYMTAGANKFLRIYYGRVKEYLSSLPK

SEQ ID NO: 109076 - protein, 313 aa, unidentified
MDAIFVGIDVSKDRLDVALRPTGEHVAVARDAHGLAELIARLRPLAPAMIALEATGGYETIVAASLAAAGLPVVVVNPAQVRAFARAIGKRAKTDPLDASVIAHFAEATKPPVRPLPDTDTQRLADLLARRGQIIEMMGAERQRQKRLTETRIQKSIVRLLAALQKELSELDTEIDGAVRNSPAWRDKEDLLASVPGVGKIIARTLIAELPEIGTLDRHRIAALAGLAPWTRQSGQWKGRSFIGGGRSRVRAALFMGAMVAARHNPVLKAFHDKLLAAGKPKLVALIATARKLLTILNAIIRDATSWQEIKHV

SEQ ID NO: 109077 - protein, 296 aa, unidentified
MTSTKYIGLDVHKESISIAVLNSAGKVVMECVIETKASTILQFIHGLGGDVHLTFEEGTWAGWLYDLLKPHVTELVVCNPRKNALLKEGSKSDRIDARKLAELLYMSKLSSVYHGEHGLRMLKELSRSYLTITKDLGRVMNRLKALYRGWAIPCAGTQVYAPHYRSEWLAKIHEAGVRRRAELYYQQLDALRLVRQQARKELLAEAKKHRATKLLRQIPGIGPLRAAHLVAVMQTPHRFRTKRQLWNYSGLGLETHDSAQYRVVEGQLQRSKKPVTLRGLNDNHNHDLKDIFKVRR

SEQ ID NO: 109078 - protein, 353 aa, unidentified
MENQVNHAEIILGVDTHIDVHVGVVIDTAGRVLGTLSVGTHNEGYRQLLCWAQTFGMLRRAGVEGTGSYGSALTHVLQSNGVTVIEINRPDRSRRRGRGKSDATDAESAARSVLAGDAKAIPKTHNGLAEALRTLNLVRRSAVKAKTQAINQIRALLVSAPQAIRDAVYKTDAAKCVAACTALSQGVASAALASLHTALRLLAKRWTAFNEELRELDAELARLTKKAAPRLLGRFGVGPQTACTLLVTAGDNPTRLHSEAALAALCGTSPLQASSGKVQRHRLNRSRDRQANNALWIIAMVRMRSDPRTRDYVAKRTGEGLSKKEIHRCSKRYIVRELYPLILADLKDSASSA

SEQ ID NO: 109079 - protein, 337 aa, unidentified
MDVHKKSWTCHFKTDLFDYKTVTMPADSACLQDYVQKQFAGHEVTCCYEAGCCGYWIARQLQQSNWKVLVVNPADVPRTNKQDWQKTDKIDCRNLCHQLQQNNLHGIHIPEQQQEQLRSLFRRRIHLARQLRTIKNHIKSQLLYYGIKVPEAFDNPNWSHDMKTWLRNIEWKFTSAAQAMQSRLKHLDFLWYEELHISTELRAYCRKHYKKDYYLLKSVPGIGGITAAALLAELGDLRRFKRLDELASLVGLVPGIHQSSDNKICLGLSKRSNRCIRSLLVEASWVAVRTDMALQAYYRKQVAKEPNKAIIKVAHKLLSRIRAVVISGVPYQSGVVQ

SEQ ID NO: 109080 - protein, 357 aa, unidentified
MTSMTMVTGPVTGGVDTHGQTHHAAAIDQVGRQLGDREFPATPAGYRTLLAWLCGHGRVERVGVEGTGAYGAGLARHLRAADIRVVEVDRPDRQGRRSHGKSDPLDAYAAARAALAGTASGAPKTRDGRVEAIRALRVARCGAIKARTQSTNQLKSLLVTAPAELREQLRQLSTTALIATCSRLRPTSELSDPEQATKTALRRLARRHQHLNEEITEADAELRALVTTAAPRLLALTGVGVEVAGQLLTSAGDNPDRLRSEAAFAHLCGVAPIPASSGRTHRHRLNRGGDRAANSALYTVVLVRLRHHERTRAYAARRTQEGLSKREIMRCLKRYVAREIYTALQPASQQEDLVETA

SEQ ID NO: 109081 - protein, 371 aa, unidentified
MKKQTKTTPSVVLTPTPTPVITGGFTIGLDLGDRSHYVCVLDVPGQIIHEGPMLNERVALAQLLTKYPAATVALEAGTHSPWISRYLTGLGAAVIVANPRKLHAISRHERKCDRRDAVMLARLARADVALLHPLQHGSAQAQHDLLGLKLRDSLVRTRVNLINTVRFTLKSLGHAVTNPSSEAFHKSILTAVPADCLPVVAPVLAVLTLITDQIKTLERDLVARSKKAYPVTQRLQQIAGVGPLTALCFVLKIGEPTRFGRSRDVGPYLGLCPGRDQSGGTDKQLRISKCGDGLLRRLLVSAAHYILGPFGPACALRAYGQHLVGTSVREKKRAVVAVARKLAVLLLSLWKHGTDYEPRVPAAPTLVMMPA

SEQ ID NO: 109082 - protein, 400 aa, unidentified
MLSIGIDVSKGKSTVCGMKPGGEIVYAPFEVQHTREGMSELVSLLRGSGEEVRVVLESTGSYHCPVVAALLENGIFVSIVNSLRMKRFCSQSIRKVKTDRIDAMQIALYGLAYWQELQPARLPEDTYRELQLLARQYYQMTSMLIKAKVDFNAICDQVLPGMQELMSDHAGRHKLSDFVLRYHHTTHILEMGETRFQKDYCKWAEKKGYRNCERMAAHIFATAQNGIPVLPNAPSTQIVITEAIRVLHTVEVSRDAILTQMQALAKTLPEYSLVREMPCIGDTLAPRLIAEIGDVRRFHSKRALIAYAGIDAPPYQSGKFCANNRHISKRGNRYLRKTGYEVMQSYVMHKPANDPIFTFIEKKRGEGKSGKLAMVAGLNKFLRVYYGKVTELYRSSSAIE

SEQ ID NO: 109083 - protein, 342 aa, unidentified
MEVDILGIDLAKRVFQLHGADVRGRAVYRNKVSRAALIETVRVLHPRMIAMEACGSAHHWARRFQEAGVEVRLISPHYVSPFVKTNKNDRNDAEAIVEAASRPSMNFVAVKSVEQQDMQAAHRVRELLVQQRTAIINQARGLLGERGIAIAQSPAAFRRAIPEILIQSEGELTSFCQSLIMTLVQHLRALEEEIAVADGWIRSFMNRSALCQKIAAVPGIGPITATAIVAAVGRADGFRNGRQLAAWLGLVPRQHSSGRKSQLYGISKRGDKYLRTLLIHGARSVLIRVSAKLDARSRWLQKLIERRGFNRACVALANKNARIIQVLLSTEATYQPVALVDA

SEQ ID NO: 109084 - protein, 371 aa, unidentified
MEATTIGIDLAKSTFHLVGMDRRGKVVWRKALARRQVLEFLARLKPAVVGMEACATAHYWGREIQKLGHEVRLINPSFVKPYRKGGKNDFNDAEAICEALSRPTMRFVEVKSLAQQDMQSLHRVRQLVLKQRTQTANQLRGLLAEYGLVTRRGITALRRAVAAWSDEPQRLTALMGQLAAANLEMLAGLERQLKELDRRIAQACRADERCRRLAEVNGIGPVTATAAVAKIGNARQFPNGRALGAFWGIVPGQHSTGGKTVLGGISKHGDRYMRTLLIHGARAALRVAARQRDPRSLWATRLKLKSGANVAAVALANKNARVIWKLLTSGERFRPQPPATEAERAQTAQRLASEKRAGRRVAVRLEHELKI

SEQ ID NO: 109085 - protein, 402 aa, unidentified
MVETIWVGIDVGRHAHHAAAVDDAGTVLWSRRVPNDQAAIEAIVDQACRVESVVWAIDMTAPESALLRGVLSRRGQHIRYVPGRVVHSMTGAFAGEGKTDARDAVVIAQTARLRGDLATVAVPDDVAIELDLLTGHRRDLVTERTRGINRLRGPLTRIFPGLERCFDYSTLTGLAFVTRFTTPSAIDGVSDEEIYDHLRGQGVRRPTIPKMISKARAAAAAQTVALPGEATTALLVQQAATSLMALTRQITYLDKQIAEVFRRDRHARILESVPGIGTRSGAELIAFTGGDLTSFGSAAKLAAYAGLAPVPHDSGNRRGTLRRPQRYHRGLRKVFYMAALNSSQRDGPSREFYQRKRRENRSHVHALISLARRLIDVVWALIRDGREWTPRGAGPPIAEAAA

SEQ ID NO: 109086 - protein, 345 aa, unidentified
MEPMYYIGLDVHKRKISYCVKDSGGKIYAEGSLPATRMDLDLWMKTLPHPWSGAMEATMFTGWIYDHLKPHAAALKVAHPLMLRAIAAAKKKNDRIDANKICDCLRCDFLPECYMAPTAIRERRRTLRYRNLLVRQMVQMKIKISSLLMEAGVSYNKQKLHKAGYFRELLASNPDIDEGLGSLLRLCRETVVRLQKTESAMVRSLERDSLLIDRVERLMTIPAVGPITALTWALEVGDVQRFSSIKKAISYCGLCGAEKSSGNTVQRTPLSKQRNKHLQTTLIEAAKMAPRNSADLAMLYDKEKQKGNANRATLAVARKLVAYLVAVDRRQKEFLTVERENRTAA

SEQ ID NO: 109087 - protein, 415 aa, unidentified
MALKIVYKICCGIDVHKTFVVACIASTNDKGITSYESHRFSTYTSGLKTLLQWLLDRNCKDVCMESTGKYWIPVYNILEKDCKIVLAHPKYVKAIRGKKTDKKDAKWIADLFKHDLVAGSFMPPADIRQLRDLMRYRFKLTCFKSSEKNRLQNCLTVSNIQLGNVVSDTFGKSAQAILDKILENPADTSFDLEPLVFKSLKKELSELRDAIDGYITPEQAGKLKVIKAHYENLESRKAELEELILALAAPYQQELAILQTVPGISSDFTAIGIISEIGTNMEAFPSAKHLCSWAGLTPTNNESAGKKKSVRVSKAGCYIKPLLVQCANAVVTSKKHPEIRNRYLRIKKRRGHKKAIIAIARMLLTALYHMLKNGENYNAELYRKSDLPPVDREITVEQTLMIARNQGYKIKSATA

SEQ ID NO: 109088 - protein, 346 aa, unidentified
MAISVVGVDLSKSVFQLSLADADHHVLERKRLSRAQFHRFLAQSEPVRLVMEACGTSHYWARFAESLGHEVKLLHAKYVKAYVRRTKTDAADADALILADRDDSLHPVPVKPEELQALQGLHRIREQWKRARTARICEARALLAEFGITLPQGARGIGNKLAEGAEHVPVLMQSTLQELIQEIEELAQRIKQIDRELSAYANTNKDAQALLSIQGVGIIVATALVARVPNIHNFKRGRSFSSWLGLTCREYSSGQTRRLSGITKQGDRYLRMLIIHGARAALMAARRKAANGKQLTRLETWAINTQARVGHNKAAVALANKMARIIWAVWTRTEVFNGDDALRFAA

SEQ ID NO: 109089 - protein, 447 aa, unidentified
MPRGRRRPTRPVTMPILHPDAAGIDIGAPEISGCVPLDRDPEPIRRFGTFTADLLALAMWLRQCGVTTVAMEATGVYWIPLYQLLESRKFQVCLVNARHVKHVPGRKSDVQDCQWLQYLHSVGLLRASFRPPETVCAVRSLWRHRETLVRLAAAHPQHIQKALNQMNLQLHHVLSDITGVTGLAILDALLAGEREPHVLAQQSDRRIKASRETLAKALVGDDRPEHLFTLRQALASYRHYQRLLGECHAEVQALLGHFASAGEAPPPLPPSPPALRFDLRAELTRVLGTDLTQVPGLHTATVHTLFAELGADLAKFPSGKHFASWLGLCPDNRISGGKLLSVKTRHVKHRVAHALRLAALSLTRSRSALGAFFRRMRATLGAPKAITATAHKLARILYHLLTTRQPYAETRLAAAEAQHRQRTEARLRAQARALGFQLVPVIEQSVS

SEQ ID NO: 109090 - protein, 432 aa, unidentified
MERIREKTAGIDIGARKVFVSIEAQEVRCFFTFTEDFEKLRDYLLENSIETVAMEATGVYWSILYDMLEEAGMDVWLVDGAQTKQVPGRKTDVKDCQWIQQLHSYGLLNRCFVAESDVKDLRIYQRLREDQIRSASMHINHMQKALTEMNIRLTEVLDQIHGASGLAIIEAILKGERDKEKLLRLCHSKIIKNKKDEVLKALNGRYTKAGLFALQQAFDSYFFYQHQIEQCDKMLEDVLKRMSKGKPNQTISSHRKPIRHNKPDIDNLGTEMMKIFDGKDATTLSGITDYTWMQLLSETGTDLSRWPSEKHFTSWLGLAPGQHTSGKMKKNKRKSGRPKAGQIFRQIAQSLLTSKRIALGAFGRRLGSRKGSPVAIKATARKLAVLYWRIMVKGMEFVEKGINDYEERLLAQKQRSLNRLARELKVQVVYNV

SEQ ID NO: 109091 - protein, 351 aa, unidentified
MIIVGVDYHPSVQQVAFLDTETGETGERRLNHSDGEAERFYRDLQRRQVKVRVGIEATGHARWFERVLAELKFELWIGDPARIKAARVRKQKTDRQDAQLLLKLLVEDRFPRLWVPSPENRDLRQLIWHRHRLVQMRTRAMNQIQATAMNEGVRRKKALWSKSGRQQLESLLLAPWATRRRQDLLELVDRLNGTIAELTTAIEQEAHKRPEVLRLMTHPGVGPITALAFVLVIGSPDRFACGKQIGSYLGLIPCEDSSANRQRLGHITKQGSSLVRYLLAESAQAAVRWDSDWPRRYAHLSMRRDRRIAKVAMARRLAISLYWMWRKGYDYQQSLKFGSHAGEPGYVHGVK

SEQ ID NO: 109092 - protein, 359 aa, unidentified
MRGQRNEISFRGQKIYIGIDVHLKSWSVTVLSETSVLKKFSQHPSPEALHGFLARSYPGAEYHSVYEAGFCGFWIHERLTALGIDNIVVNPGDVPTKSSEKLRKSDAVDSSKLARSLRANELKGIYTPDSASLEMRSLIRLKNSITKDTTRQKNRIKSQLRYLGIGIPQEFLEPFSNWSKRFIAWLKEVETLTPSGRQAFDIQIRHLEELRRQKLEMTRALRTLAKTDRFREPLRLIMTVPGFGQATGMAFLSEICDIARFRNAEQLAAYIGMIPMCHSSGEKDGTGDITVRRNAVMRCNLIEAAWVAVRQDPAMNLFFTEQCKRMPKSKAIVKVARKLVNRLYFVLKHQTDYVNSVMS

SEQ ID NO: 109093 - protein, 468 aa, unidentified
MSIYSSFCSLSPSRTKEPEIAAAGSTAASAQRRISPICATPASQPRKDTHTMIRKVMEVIHRSVGGLDVHKKMVMACRRRLVDEAHAELETRPFKTTTAGLRQLANWLAEWNATHVAMESTGIYWVPIWNILREQFDLILVNAHELKKVPGRKDDVLDAEWIAQCMQCGLLRASFVPSVEIRQWRHLTRQRAKLTDHHTAVVNRMHGLLHQANIKLSDVASNIVGVTCRRILTAVTKGVSDPETLAALGMGRLKASPEDLAESLDGCVEDHDRWLLRRMMRQLEILEKEIAIYDERIRVQMKENEHQIELLDTITGIGRRLAENLLAEIGPNMAQFPTDDDLVSWAGLCPGRNESAGKKRSSKTKNGNKWVRRALVEAAWAAVRSKNTYIAALYKRLAPRRGKNRAIIAVARTILQSAWHMLSKNTEYKELGGNYFDNLNRDKTRNYFVKRLQHLGYHVELKERDNAA

SEQ ID NO: 109094 - protein, 424 aa, unidentified
MSKKKSSLAGLQALYARACGLDVHKKLVVACVRILDSKDGTVQSTLRKFGTMTADLLELRQWLAELKVTHVAMESTGVYWQPVFNLLEGHFKVWVVNAQHIKKVPGRKTDMKDAEWIAQLLQCGLLRPSFVPERQQRELRDLTRQQTKLVQQRNAVDNRIQKVLETANIKLGSVASDVLGVSGRKMIEGLIAGEKDVTALADLAQRQLRGKIPELQRALEGELNDHHRFLLRQLLGQYDFLEKEIASISERLGAVAPPSFRAAVEQLDAIAGVGERGARALLAETGTDMSRFPTHKHFASWAGRCPGNHESAGKRRSGKTPAANRHLDAVLTEMAHAAVRTKNSYFKAQYHRLAGRRGKKRAIGAVKHSLLVTVYFMLRDNRPYKDLGVDYFDKLNPQQRIRYHVRRLQELGQEVELSPIADAA

SEQ ID NO: 109095 - protein, 516 aa, unidentified
MTLKEPTPPDAILVAIDVSKARNDVLIEKPGSARRRRLVVPNTRIEHDRFIALLTSLGASVIAGFEATGNYHRPLAFRLLEGGISLRLVSSVALARTREALHNGWDKNDPKDAQVILHMLKIGATQTYADPLVSGINDIQELSKTHEIISKAKTELWHRLLTHYLPLYFPEVARFAGNSRSDWFLAFLEAFPTPASITALSKEAFIDAAWAVVGRKVSKARLLGDIYETAASSIGLPVALDSAAIGMFRVVLAEGRSLIRQRDLIESQAHAMLAGHPDYQRLRQIPGIGPIIALTVLAEAGDLRRFGHHRQFLKFCGLDLATYQSGQFRGQTKLSKFGNARLRRAFWVAAQVAIRQTDNSFRAKYERYIARDRDNADLKRKALTAIAAKMARTAHAIIKSGSDYRPFVEGPVPGGRTSLSRSRGPTTSSRIAPRMVERFACSWCSTSSRADAWPSSSPVSPTASRRRRSRPPSTRCRRSWPSLGAVETTARRRRLHRGYRRMAHYHGLRRRIGLAA

SEQ ID NO: 109096 - protein, 334 aa, unidentified
MKQVNDIGVDVDSEKLVCAMQRAGERRPLATFANTAAGHKRFIRWVSKGARAARVCLEATGIYSLQFALALHEARNVEVMVVNPRAIKDFARACMQRAKTDAVDAGGILEYLERMPFIAWQPPAPEILQLQAINRRIVQLQTELTREKNRCHASEFAGASGDAIANDIEVNIRHLERRIERMHDSGIHLVRSVSSLATKLAHLISTKGIGEASAMRLLAELLVLPDDLAAPQWVAHAGLDPRPYESGTSVHRPRRITKVGNRYLRAALYMPAVVAIQHEPNVKAFYNKLVAAGKKPLQAVVAVMRKLLHAIWGMLKHDQDFDGNKFFKLAEKTA

SEQ ID NO: 109097 - protein, 412 aa, unidentified
MNIVYERCAGIDVHKRNVVVCAITPDVQGQRQKEQRTFSTMMPDLLRMRQWFQSLNMTHVAMESTGSFWKPIFNVLEGHMEVLVVNAQHLKAVPGRKTDLKDAEWIADLLQHGLLRPSFVPPAFQRELRELTRYRTSVIEERSRTINRLQKILEDTNIKLSAVASDLMGQSAREMLAALVAGEADPAVLAQLARGKMRAKHDLLVQALQGQFKSHHRFLISEQLAHIDTLDEEIERLSAEIAQRLRPYEAQLKRLETIPGIKRRLAEVILAEIGPDMQRFPSARHLASWAGMCPGNRESAGKRLSGKTRKGSPWLRTALVEAAHAATHCKESYLSAQYHRLVLRRGGKKATIAVGHTLLVIVYHVLADEKDYQELGGNFFDEHDRQAVQKRLVHRLEKLGYEVTLAPTSPAA

SEQ ID NO: 109098 - protein, 403 aa, unidentified
MKRIKRIKRIIAVGIDVSKDKLDVSIYDGKNHITKVYTNKEEGIENLIRDSKEASKKIIDSELHFVMEATGTYHTKVLFTLTNNNYPVYVLNPLISKRYSEEQLRRTSTDKIASKLLAEYAYSSISSHLLGIQNERYNILVSSKFDKSNEDRLNLKILLRTLEGLKKTKTRILNQLEALNQYPDQLGIDAIKSLKSILEEIDKEIKNLENKISEIVKKEENRNLYEKLKTIPGIGDRAASAIIAYFGSFSSFDSPKQAPSYAGLTPLIKKSGKSVGAKEIYHISKIGSPYLRQILFMASLSAARYNDQCHILYERLLKEGKAKKLIYVAISCKLLRQTFGIIKNGRVYDPNFGLMDVEKGNNSNNNDNESIKDNKVNIPFPKNPCLYNPLINKQGTSRCVAGF

SEQ ID NO: 109099 - protein, 459 aa, unidentified
MQDNIETQENRRRQLAGLPVIRRGVAGIDLGSEHHWVCAPTEDGAGREITDFGSTTSELVRMAKWLKDRKVESIAMESTGVYWIAPHEVLEAAGLEILLVDTRQLAQVPGRDKKTDPTDCEWIQRLHSCGLLRGSFRPPEQVCMLRTLVRDKANLVAESGDWLRRMQKSLDQMNVRVHRAVSDIDGVTGLAILRAIVNGERDARQLAKLRDKRCRKTEEEIAEQLNGHWRQDHLFSLKQALKMYDDIQQRIGDYEQEIIGQLGAMQRTEFREQAAPKPQNPQKAKTMKQRGQESMREALYRMSGVDLTSIDAIGVETVEVVLSEYGPDLSRFPTEKQFVSHVKLAPYTPRSGGKPLQKKRRNTSGTRVAAALRMAAVSLRNSATALGAYYRKIARGIAGDVAVFATARKLAILIYRLLRWGQPYVDEGEEAFEKRYQERRITALKSKARELGYALVQKA

SEQ ID NO: 109100 - protein, 315 aa, unidentified
MQTPLDIGADISKDYVRVSCATGSLPSIGLANRRASLLAWLKRLPAGSRIGMEATGTYHELLATLAHRLGLVVYVLNAKHVHHYAQATAQRGKTDRVDAELIARYVAKEHSHLHIWHPASPAQRQLQRLMRRRGKLTRARAALRSTLQGVPSLRTDVRVLLKHFDALIAKLDTQARALLKASVEREQAFQRLDAIPSVGSAVGIGLLAALERWSLPRADSFVAFIGLDPRPDDSGKRSGRRRLSKDGDPELRRLLYTAAMSASRTHVWAPVYQRALARGLSRIQALVILARHIARTAWSVYTHKTQFDPARVHSS

SEQ ID NO: 109101 - protein, 341 aa, unidentified
MKNKSFIGIDISKNVIDVSIFCEETPIKDFSHDVFNNSRKGFGEMCTWLKKNHVVLSNCLFGMEFTGSYSMELEKFLYARNYQFCMLSTHVVKHYPMGPKDKSDKIDSAKIADFLYRYNGTECVKPYKMPDKTMQRLKALMNERKFLVEQRTCFMNRRQLCTTKEDTQLYDGYIKKLSRDIENIELEEQKLLATDESLLTTYKNLLTIPGIGSVNAINVIVITRNFTAFETARQYASYVGVAPHSHTSGTSVRWRPRPSARCDGQAKADLSMAATVAVQYDAELQSFYNRKLGGKQDSDTKRKALNAVKFKLVLRMFAIGKQNRKWEPLDSKSSNEKLAIS

SEQ ID NO: 109102 - protein, 414 aa, unidentified
MDQIHDRVAGLDVHRDSVVACVRQLGPRGGVVREKERFTTTTAGLKVLEAWLADRQVELVAMEATGVYWKPVLYALESRFTVWLCNARHVKKVPGRKTDLSDAEWLADVAAHGMVRPSFVPPLPIRELRELTRYRKTQIEARAAEKQRLEKVLQDAGIKLTSVASRVLTQSGRLMIEALSDGEQDPTRLAGLAKGKMRPKIPALTDALTGHFGPHHAVACRRILAHIDFLNETIAALTEQIDARTAAFEAVYTSLQPVPGFDRLTIDVIIAETGADMTRFPTAADLASWSGVCPGSHESAGKRRNVSTIPGNQWLRPALIESARAAVRTKGSYFGAQYRQIARRRGPNKAAVAVAHSLIELVWHLLSTGEVFKDLGDDYFKTRQDPQRQARRLVAQLEELGYAVTLEAPSAISA

SEQ ID NO: 109103 - protein, 290 aa, unidentified
MPRYSTAFGMDVHLRTTTVCALDADTGEAVTRRFPGNPWGEIAGWMDGFPGPSLAAYESGYLGFAPQRELAGLGVECVVAAVSKIPRSAADSASKNDRNDAARMAKAILAHDISPVWVPSPEVEGIRDLAGAYDGATARLATAKQRLLAFLARRGFVYGGTTPAGNPRKYWTYDFLRWLDKVRPEDDGGARALAALRNEVEAAAEARADLLSEYRAAVDASPIAAEVAALQSIKGCAFALAAAFSAEVGDFTRFRSGRQVTAYFGLAPSQRSSGGSVRLGGISGAVLASI

SEQ ID NO: 109104 - protein, 339 aa, unidentified
MKLYTAFDLHSKNSYLGIKDENGNRVFKRKLQNDPEVVIESLKPFKADIVGIVVESTYNWYWLVDLLMAEGYTVHLANPVEIQKYSGLKYADDQHDAFWLAEMLRLGILPEGYIYPKEDRPIRDLVRKRSHLAKVRTSLIISLQNIISRNNGIRLRANDIKVIRTDRVTPFLEHNEDLALAGKVSKESIDFLSRKITSVEAVVEKKIELKEPYDRLLTVPGIGKILGITIMLETGPISRFAKVGNYVSYCRKVSSKWVSNDKKKGKGNKKNGNKYLAWAFSEAAEMARRHDENARAYFNRKAQQTNRMVAHNALAHKLARAAYHIMRDGVAFMPEKCFG

SEQ ID NO: 109105 - protein, 493 aa, unidentified
MSEHRLVGIDLGIASAHTVRVLREDGSEVCRRRCWPRLDSLLEVEAAALAGAPPDLRLEVVIEPTGPAWLPVAVFFTGRGHTVYRVSSAQAADLRRFLSRHAKSNGIDAQTLARLPLVDPGGLRPLRLPDRDAAGLDRRVRATDRLTRLAAEHKRRIKDLVRQQLPMTPLQGDLGKADLAVLERTGAHPRRLLDMGKARLTRLIARVSTGHLGGERVQAWLDAAHCALELYGDHPALAFDDRAAEVVTEVRLLHATEAELPAHESARERAYRQVDPDQLARSLPGVAIIGGPALAALVGDARRFPDGARFRSFTGLAPRASETGETDRKGQPMSKAGPRLLRTTLLRAADHARHLDPQLARLYYVQVVERGACHLKALCVVAAHLGERAWAVLSRGTPYEFRDVDGTLVTPEEAKSLAADWKVPDEVRQRRRSRKSRRQGGGGKAPHQVHQGHATRARGAHTRRPSPQPILTSDLTHIKQVLSNIRERIHVPS

SEQ ID NO: 109106 - protein, 339 aa, unidentified
MFMIGIDPHKGSHTAAAVDRNESVIDTIRVDADPHQRARLLEWAARFEPRTWAVEGATGMGALLAQQLVAAGEHVVDVPAKLSSRVRLLERGRIDKTDPNDARSAAIVGWRTPALNVVCGLDQHRVVLRLLADRDHQVTANRTRTICRLHALLCLLIEGGTTRSLTVDKAEQLLASIHIDGPITRQRVIAARQLLDEIRVLDTARTELRKRTNDAVIASATTVTNIHGIGPLTAAIIIGRVGDVRRFPTSGHFARHNGTAPIEASSGPRKRHRLNPRGDRQLNHAIHMAAVTQVAHDTPGRVYYLRKQAEGKTRKEAMRALKRHISDAVYHRLITDTHH

SEQ ID NO: 109107 - protein, 466 aa, unidentified
MKKAGESSKTKRRGVPTALQAIRPMVAGIDVGSREHWVCGPARADGEPNVRVFGTTTIQLKEMVDWLAEQGTESVAMESTSVYWIPLFELLESRGIEAVLVNARQLHNVPGRKTDFQDCQWIQLLHSCGLLRGSFRPGNAIVAMRAIHRQWANLVEERTRCVQWMQKALDQMNVQVHRAVTDLTGTTGMAIVRAIVAGERDPVRLSTLRHHHCKKSVEDIARYLTGTWREEHLFNLKSALQFFDAVEALIATHESRLFEAMAVLQPDERKDAAVQPHPNPAKEKAIKNRGDQPARTALWRFAGIDLTRIDGIGIGAARIILTEVGLNLSVFPSEHHFVSWLRLCPRRPISGGKPLKTRRNALGANRISGALRMAASSLQRTKTALGAAYRRIARHKGAYVAIFATARRLAQLVYRMLRYGQDYVDAGEEVYDRQFEARRLAGLREAARAMGFSLTAQPATTPAKSG

SEQ ID NO: 109108 - protein, 377 aa, unidentified
MKAPSTRPAAVLGLDVGKSSHWARLVDRDGEVLASAPVRNREAELDALFASAPAGTLVVVDQFRNIGSLAVRRARAAGLGVAHLPGLAASRAAGLFAGEAKTDERDAEVIARTALGVPDSLSGVPGRGEALEAARALSSQRDHVVACATRDKNRLRAVLLESCPALEAAVDLSDRRWLELLAGFGGAWGIARSGAGGPRAEAAGEAAAASTAPPPALVEAENRQVRFLVARISEALDEAGALEAETAALLEGDETYACLLTVPGIGPRTAAQLAVSVDIARFPDHDHLASYCGIAPRVRSSGTSVRSVRASRRGDARLKSLLIFSCNSLVRSSGRYGEYYRACRARGMGHGRALKAVARKRLRAIYAVMRDRVPYRE

SEQ ID NO: 109109 - protein, 412 aa, unidentified
MTEDVHWLVGIDWASQKHQVCLLDLDGRVVGEREFDHEGTGLSQLCSWLIEHTKALPGQIAVAIETSHGPIVEMLLERGFQVYAINPKQLDRFRDRFTVAGAKDDSRDAHVLADALRTDRRAFRRLSVENPLVIELREWSRMVEDLQQERTRLSNRIRQQLWRYYPQMLEIADDLAANWFLDLWQQVPTPAKAARVKPETIEGILKGNRIRRIDAVEVLRILRQKPLVVAPGTTDAACAHIRAVAARIRLVNQQISEANCKLDELCEKLEQQAEDAPGQQCEQRDVTILRSCPGLGRITIATLLAEAAEPLRRRDYHGLRAFCGVAPVTRRSGKQHIVLRRYACNKRLQNAVYHWARVASQRDPISQRRYAALRSRGHSHGRALRGVADRLLSVMCTLLTRQTLFNPNHVRA

SEQ ID NO: 109110 - protein, 345 aa, unidentified
MELHTIGIDLGKTVFHLVGLDLRGEVVVRKKFSRTQLLRFTANVHVGLIGMEACGGSHFLGRALREQRHEVRLIPAQYVKPYVKTNKSDYIDAEAIAEAVARPTMRFVPIKTDDQLDMQSLHRVRERWVMRRTAVINQIRGLLLERGITLRKGRHHVDAALPLILEDADANLSGAVRLLLTQLKLDLDQLSVRIDEADAVIQKTAQENEACRRLVAIPGIGPVTATALIAAIGNGGAFHKGREFAAWMGVVPREHSTGGQQKLLGISKRGNSYLRRLFVQGARAVLQQRTKQSSGLSAWLAQLTSRTHRNVAAVALANKLARIAWAVLAKNEQYRPSVVADVAAA

SEQ ID NO: 109111 - protein, 362 aa, unidentified
MQTKPKTSNRCKKAHPSEPVYAGIDLHSNNLVIALTQGDGTRLSCTKLPCDLPLVLDHLEPFRPMLRGLAVESTFNWYWLVDGLRENGYPISLANPAGIQQYNGIKHADDKNDAWFLAELLRLDILPRGYIYDATMRPVRDLLRRRSGLVKQRTALILSVKNLHQRTYGRTLGLAELKAMEAGELKETFVHSADRMIADLQQNHIHALTESIVAIEKEAVKGAIALGYHQPLKTMPGVGPILGMTISLETGDIGRFKSAEDFASYCRTVQSKRLSNGREKGRNNQKCGNKYLAWAFVEASNFARRFDPQCQQWFDRKCAKRGSIIATKALACKLAKAAWHIMRSGNPYESDRIFPSRMRAIS

SEQ ID NO: 109112 - protein, 346 aa, unidentified
MEHYVGLDVSLKLTSICIVNRTGKIEREGVVASDPEAIATFIKLHAPHVVRIGLETGATSTWLWTELNKMGMPVICIDARHAKAALKMQINKSDRNDAVGIARIMQCGWYKEVCVKNLDSHATKALLVSRALLVKVKRDIENQIRGLLKNLGLVIGRAKMNMFAVRAAQLAENRSELFAAVDPLLKAREAVEQQILDLDRKVLRLARNNVQVRRFMTTPGIGPVTALCFLATIDDPARFKRSRSVGAYAGLTTRRYASGEIDWTGRISKCGDKMLRSYLYEAANVLLTRVAKWSSLKAWGIRLAKRSGLRKAKVAVARKLAVILHRMWIEGTEFKWSSKEAADQPA

SEQ ID NO: 109113 - protein, 471 aa, unidentified
MPRRKPASSPPDPATAALLQTLNPHAAGIDIGATELWVCVPPSAVASPSTPSAPAVLPPHVRRFGSFTADLHAIAPWLRQCQVTTVAMESTGVDWIPLYDLLESAGFQVLLVDPRQVQRAPNRPKTDVHDCQWIQRLHSLGLLTAAFRPEEPIRVWRSYQRHRASLIEDAGRHLQRMGKALEQMNVKLPEVVSDITSLTGMSIIRAIVRGERDAPALATLRDPRGKESAETIARALQGTWQPEPLFALQQSLALYDYSHEQIRDCDRVIEAHLQGMALPEVPPLAPKRRGRRRKDNEVTFDARQRLHQVAGVDLTAIEGIEESTALVVLSEVGTDMSRWPSEKHFGSWLGLAPNPKKSGGRVKSSATRPGSNRAAQALRLAAKNLQRSQSALGAFFRRIAARRGVAKAMTATAYKLARIVYAMLKHGMAYVAQGLEAYETAYRERVVRQVKRKAAALGLMVVERDAGAQPS

SEQ ID NO: 109114 - protein, 397 aa, unidentified
MYIVGIDIAKRKHEAAVIDGEGTVIIKPFSFTNNCSGYNRLLAMLAKAKLPLDEVSFAMEATGHYWLALFTRLQKEGFRVQVINPVQTNSIRSFYIRQAKTDPRDALLIAEVIRFGHFSESTLHPENIYELRELCRGRHAIVSMQADVKRKVVALLDQVFPEYETAFTNLFGDTSMAILQTCPTPKELSETPLEELCHLIEVSSHKRFRMAKAQELQALARNSFGFAMAGDVFSTMIRLYAKHLDFLKQQVREMDRKIAEIMETLDTPITTITGIGPTLGAYILSEIGDISRFSSAAKLAAYAGIDPTMRQSGEYNGVRNRMSKRGSPYLRHAIWLAASSAVLHDPALKLYFQKKRDEGKPYMASVGHACRKMVSIIYAVMRDNKAYTPYIPNEISA

SEQ ID NO: 109115 - protein, 354 aa, unidentified
MPERAKARVTVVGIDIGKNSFHVVGLDRRGAIVLRQRWSRGQVEERFANMPRCLIGMEACVGAHHLARRLRALGHDARLMPPKYVRPYSKGQKNDFRDAEAIAEAVQRPTMRFVVTKTPDQLDLQSLHRVRERLVSQRTGVTNQIRAFLLDRGVAARQGLRFLRCQPPIILATRSDVLSPRMMRVIEELAGDWRRLDERIDGLSQEIEALARQDPACERLMTVPGIGPIISSAVVAAIGNGAVFTKGRDFGAWLGLVPKQISTGDRTILGAISRHGNRYLRALFVQAAWVVLVRIKDWDRYGLKAWIDAAKKRLHHNVLAIALANKLARIAWAVLNKERVFECVRTRATASQPA

SEQ ID NO: 109116 - protein, 350 aa, unidentified
MVTIGADLHKRWHTAVAVDELGRSLAQRTVRATPAGHLELLAWAQDRYPERRWALEDCRHLSRQLERDLVVAGESVVRVPPKLMAGARRSGREPGKSDPIDALAVARAALREPDLPVARLDGPERDVRLLVDHREDLVAERTRAQNRLRWHLHELVPGDEPVPRSLDRRHVLDALEAQLGELSGTVAGIARDLVGRIRELTGAIDSLERQLGALVATLAPTLLALQGCGPLSAAKLVGETAGVGRFRSAAAFARHNGSAPVPVWSGNQVRHRLSRGGNRQINAALHRIAITQLQRPGPGQDYLAKRLAANDTRTEAIRALRRRISDEVFRRMRLDEAVRATRQGSLAMAA

SEQ ID NO: 109117 - protein, 332 aa, unidentified
MTGFAWLGIDIAKQKFDVALTWSTRRRAKVFRNDGEGWQALLRWLKDLGVGHVHACLEATGRYGDGLAIALHEAGHRVSVVNPAQIKHFGRVKLGRNKTDRADAALICDYCRLFEPAAWTPPSAALRQLRDLVRTREALSASRVEWANRRASGQETAVADAAMAKVIAQLEAEIAALDQAIDDALGQDDDLQAKHDRLVSIPGIGTHTAAVVLCELPGPDVLRTAREAAAYAGLNPSHRQSGSSLDAPARISRIGNATLRAALYLPALAALRWNPLVAAQRQRLKDQGRLKPKQIIVAAMRKLLHLCFGVLKTGKPFDPEHTTSTEEAASTV

SEQ ID NO: 109118 - protein, 340 aa, unidentified
MSEVSIIGLDIAKSVFQVHGADASGRALLRKKVSRAKLLPFFAAQPRCQVVLEACGGAHHWARELVKLGHDVRLIAPAYVKPFVKRQKNDAADAEAICEAAQRPSMRFVPVKSEAQQAAALVFRARDLLVKQRTQLSNAMRGHMTEYGWIAPQGLAQMKKLAALLDDPDAVPQAARQVLRTLLDQMTVLNERIAELDREIARRAREDETARRLMTIPGIGPITATAITALAPPPGTFAKGRDFAAWVGLTPRQHSTGGKQKLGAISKMGERTLRRLLIIGSSAVVLQACKRGAPKGSWLEQMLARKPRMLVTVALANKTARIVWAVLTKNEDYRAPVATA

SEQ ID NO: 109119 - protein, 392 aa, unidentified
MYIVGIDIGKNHHEASIVSPEGKQIGRSLRFATTHKGADSLMSFIFKNIGNSPCVFGMEATGHYWYPIYSFLKAKGYTICVINPIQSDSLRKMYIRQTKNDSIDSFLIAEVIRFGQFGTTSMADENILAMRQLCRYRDSVISSRTEIKLRIGTIMEQIFPEYEKQFSSLWVSTSMGILEKYLTPENIENAPIDELFEIIKDKSHNRLTKAKAISIKEAAADTFGIKIAQDAFSFQLKQLIDRMNFLDKQIEALDIEIMKYYEQFDCYLHTIPGIGIIGAATILAEIGDISRFKNSSALVAFAGIDPTVRQSGEFNSTHNHMSKRGSPYLRHAIFLAATTCSFHNSPLNAYYKKKRDQGKHHLTATRAVARKLTTVICAVLRDSKPYEPKKFC

SEQ ID NO: 109120 - protein, 350 aa, unidentified
MRRPTDKVIAGIDLHSNNLVIGLMNQDGKRLSHQKLDCELKEVEEFLRPYKQQLQSMAVESTYNWYWLVDGLQAKGYPIDLANPAKIEQYSGIKHADDKHDAFHLAELQRLNILPKAYIYDAELRPVRDLLRRRTNLVHQRTALMLSFKSLYSRTTGGQMALAQLKQMSPKEGPKLYEHPANQLIAQIQLEHIEALDQSIQRVEKAVLSCAREIPLYAKLLTLPGVGRILGMTMTMEVGDIKRFKTDGDFASYCRTVDSRRLSNGRQKGENNQKCGNKYLSWAFVEAANFAKRFDPHCRRWYDRKKARTSTVIATKALACKLAKAAWHVMAHNTDYDPKRMFPELASGQK

SEQ ID NO: 109121 - protein, 306 aa, unidentified
MLTAEADKRKTKVVVNTAAGVQALLAWCAKHGAQPAQLHAILEPTGLYHEQAATALPQVRVSLVNPAQARDFAKALALRSKNDALDSYVLARYGQTLSPALWHPAPLHARQLRALLTRREALSKDLLRELNRKEKSQFSPSAPLVDGSIDKAIAFLREQIKQIERAIDQHIDNHPDLKQDCELLNSIPAIGPQAGNAILAVMHNRHIDSAQSLAAYLGVVPVQRQSGSSLNSCARLSKAGPSQVRATLYMAALVGTRHNPHIRALYQRLLKAGKSKKAALGAAMRKRCICASGSSKTASPTSPITP

SEQ ID NO: 109122 - protein, 366 aa, unidentified
MSRVPRSENVVHIAFDTSKNTLVAGILQPGEESPHVQRICNDEPSIRRFVKGFGEPARLHTCYEAGPLGYELQRLLVSLKVHCEVIAPSLIPVAPGDKVKTDKRDARRLVRQLRSGELVAIRVPTPAEEAVRDLCRARADALEDLTRARNRLGHFLLRHGRVYRGSTPWTFKHRNWLGQQTFDDPALTKTLVRYRATVECREADLEGIEGDLAPYYDEEPFASPVRRLAAYRGIDFLGALVLHVEVCDWRRFSGREAAGAFCGLVPSEYSSGDKTWRGSITRAGNAHLRYQLIESAWAYRNGPSLGVTLRRRQEGVAAETQSRAWATQVDLCRRFRQLDHRKSVRGVVVAAIARRLVGHLYAEMVA

SEQ ID NO: 109123 - protein, 387 aa, unidentified
MVVIGVDPHKSSHTAAALEPGAGAALGTVRVEAALPGYRRLLAWGRGFGQRRWAVENAWGLGRHLAQWLVARGETVVDVPATATARVRQLSRGRRKNDALDAAAAAGVAALQGDGGLVAAEGASTVLGMLDERRSNLARQRTRTVNQLHALLRDLLPGGAPAGLTAGRAAGILAGIRPASPAQRARKDLARDLVEDLRALDGRLKTNRKRMQDAVAESGSSLPGIAGVGPAVAARLLGRTGRASRFPTAAAFAVHAGAAPVEIASADKTRHRLSRRGDRRLNNALHTIALTQARMPGTRGRVYYDAKIAEGKTRNEAMRCLKRRLADHVWRVMTADERREAPAAGPGGHTGTTLTSSAAGPTPTADSSDKSLPGPATHNPTAPNHTP

SEQ ID NO: 109124 - protein, 337 aa, unidentified
MKFSGIDLHSNNSVVVISDETDRIVYRRRLPNDLAQIMAALAPYRDELAGVVVESTYNWYWLVDGLQTEGYRVHLAHPAAIKQYEGLKYSGDFADAAHLAHLLRLGLLREGYICPSEERAVRDLARKRLQLVRGRTTQILAIESMLSRHTGSRIASNEIKRLSVEQVDAMALPADVLLALKAHLAVCHALTQQIEMLEERLQERVGLRQEYRLLKTVPGIGTTLATTIMLETGTLARFAKVGNFSSYCRCVDSKRESNGKKKGEGNAKNGNVYLAWAFVEAAHYAVRFCPEAKRFYERKKRQKNGIVATKALAHKLARACYHMLCEQKPFDVKRCFA

SEQ ID NO: 109125 - protein, 313 aa, unidentified
MAETVVTAGIDVSKEWLDCAVWPGKAELRVERNAVGFDQLAAWLVEHRVSRVGLEASGGYETAVMDALQARGFAVIRFNAKRIRMFAKAKGRLAKNDRADARVIAQATLVLDENTPPERRRDLDPLVEHLAYRRQLRDWLGDCANQLEHLRDASLRRQILVRQVGLNKALAALDAKLAKLVAAHKDWHALEQRLRKVPGVGPVLAQTLIALLPELGQVSRRAIASLVGVAPFDDDSGKRAGERHITGGRDAVREVLYMAAVAARRWNPVIAAFAKRLVGKKPKVIIVACMRKLLTILNAMVRDGQDWNPGAAA

SEQ ID NO: 109126 - protein, 321 aa, unidentified
MAHILGIDVAKAKLDVAVCRPDGKWRNKVVENTPAGFSVLGEWLVQHGVESVHACLEATGTYWEAVAEFLVDAGHTVSVVNPAQIKAFGGAGLVRSKTDRIDARLIADFCAAQCPPPWQAPPASVRTLRALVSRREALDGMRTQERNRLLVSEAAVQAGIEAHLAHLEQAIKDIDAAIRQTIDDDPGLRGQGELLVSIPGLGDRTVAALLAYYGGPLRFESAKQAVAFAGLDPRQHQSGSSVRGKPRLSKVGHARLRKALYMPAMVATTRTAWGRALKQRLAAAGKPPMLILGAMMRKLLCVAYGVLRSGRPFDPTLHQLA

SEQ ID NO: 109127 - protein, 409 aa, unidentified
MQVVHERCAGLDVHKKSIYACALWWDEKGERHQQIRSFGAMTAGLLRLGDWLQQHQVSHVAMEATGVHWRPVWAVLEGRFELMLVNPHHVKAMPGRKTDVKDCEWLADLLQHGLVRGSFVPPTDIQDLRDLTRYRAELTQAQNRVTNRIQKVLEQANIKLSSVASDTLGVSGQRMIEAIIAGEDNPESLADMAQKRLRQRIPELQMALTGRVRDHHRFLLREHLDEWKALANRIRRVEQEIDRRIVPFEHAVTLWKTIPGINHVTACSLVAEIGVNIGQFPSAQHLASWAGLCPGQNESAGKRMSTRTRAGDRWLRRALCQASWAASHKKNCYFSGQFKRIAARRGIQRALIAVAHALLIVVYTMLKTGSSYQELGGDYLERIRKDQLQKYYIRRLQRLGLSVSVQPAA

SEQ ID NO: 109128 - protein, 319 aa, unidentified
MKSPQLFVGIDVSAKRLDVAVLPAGTHFTVAHTDEGIVSLVRRLRELGPHIVVLEATGGYEIPVAYAMSEASLPVVIMNPKCLRHFAKSTGQLAKTDKLDARVLAHYAQAIQPPVRPLKDPEQAELATLMSRRRQLRDMIVMEENRRRTSTPKVRGNIDQHLAYLRQLLKDLDQEIHDAIRCTPLWHEKSVILQSFNGIGPKVSASLIADLSELGTAKGAQISALAGLAPMNRDSGQWRGKRTIQGGRPAVRQALYMAALVASRRNPVIREFYQRLRQAGKPAKVALTACMRKILVILNAMLKNRTFWNPQLPLCSLTK

SEQ ID NO: 109129 - protein, 407 aa, unidentified
MEVICPRCAGLDVHKQTVVACVRIAGESAPIQEVRTFATTTSGLLALADWLESFDVQHVAMEATGVYWKPVWHVLEGHFELILANAAHVKNVPGRKTDVNDAMWLADLLAHGLIRASFVPPMAVQELRTLTRTRKQFVRERAAHVQRIDKLLEDANLKLGVVLSDILGKSGRAVLQALIDGQTDPQRLASCVTTRVKASRAELLEALRGHASAHHRFMLKLHLSHIDALDRAIADIEKEVGLGLEPFRQSAKLLSTMPGMSAVASNVVVAEVGIDMSRFATPGHLLSWACMCPRNDESAGKRRSTRLRRGGKWLKTTMVQAAWSAIKVKGSYLQAQFHRIRARRGAKKAIIAVAASMLTAAWHMLRDGTQWQDLGAAHFDRADAHKTATRLMRRLEHLGYAVQLTPV

SEQ ID NO: 109130 - protein, 418 aa, unidentified
MDVIVERCAGLDVHRDEVVATVRVPGQGRRRWDQQTRTFRSTLAGLAELAGWLAEAGVTLVGMEATGVYWKTVFQALEERFECWLLNAHHMRNVPGRKTDVKDSEWICQLVQHGLVRPSFVPPPEIRRLRDLTRLRRAQTNERGRSIQRLEKVLQDAGIKLSSVASHTYSKSARAMLEALLSGVTDPGQLAELSKSRMRAKIPQLREALQSRFTIEHHGVMVAQLLAHIDTLDAALENLSQRIEFVLAPHQRIVELLCTIPGVQVHAAQVLIAECGLDMTVFPTIGHFASWAGACPGHHQSAGRRKSGRTRPGPSWLTAQLTECARAAVRTKGTYLAAHFAQLRGRRGEPKAIGAIRHDLLVAYYHIVRDQVPYRDLGPDWQRKRYSPEHRARRLQRQLEALGYTVTLEQTEPSEQAA

SEQ ID NO: 109131 - protein, 354 aa, unidentified
MKRTMKYVALDVHQATTSATVREENGRVVARTILPTAAPTLVEFFRGMRGAIHVAFEEGTQAQWLHDVLVPLVDRVIVADRRGTAQQGNKGDQTDADQLSELLRRGALRAVYHSSPHRDTLRELARTYTNVVEDSTRVMQRLKALFRARGIRTPGTQVYQPAHRAEWLARLASEGVRFRAAALYAELDVLRNLRPRARAALLAEARRDPAWRVLRTIPFLGPVRVALVLATMQTPWRFRTKRNLWAYAGLAVVSRSSADYQLVHGHPVRRRRAPMTRGLNRNHNRVLKNVFKSAATAATARPGALQAFYHAMVAHGMREDLARVTLTRKLAALTLRLWKTGDHYDPAKLTVQVQ

SEQ ID NO: 109132 - protein, 373 aa, unidentified
MEHNITIVGLDVHKNSIEIVTAETAGNQEVRHYGKILGDMTSLDKAIRKLRSVRSNGAELRFVYEAGPCGYEIYRHLTKQGFQCVVVAPSMIPKKSGNRIKNDRRDAENLVRLERAGELTKIYVPREEDEAMRDLTRAREDAVKAQRAARQLLGAFLLRHGHRYPGKQSWTPAHMRWLSDITMPHPAQQVTLQEYIHAITEGTGRVTRLTDQIQKLLPEWHMAPVVNALQALRGVAPIVATTSVAEIGDMNRFERPKQLMTYLGLIPSEHSSGESIKRGGITKTGNGHVRRAIIEAAQAYSFPARVSRHILKRQEGLPQSVREIAWKAQVRLCGRFRRLMARGKQRNKVVTAIARELAGFMWAIAKEVQVPSV

SEQ ID NO: 109133 - protein, 362 aa, unidentified
MTINAGVDLHKTQFTVFVKQSGNQFEQYSTEEDGYKKFLTRIQRWKKNGMTVRIGVESTGNTRHFKNRMEQAGAEVVVINTLKFKVVNESVKKTDRHDAATIAEFLEKDMLPESRLCSEESEQIRRLLKVRTTLVRTMITVKNQIHALLTGHGMKDSRATLQSKRGRQKILDALRKADSELVVQPLFETIEQLEKSVKSIESELEKLTEGDRTVELLMTIPGCGKIGAWTIRAFTDDINRFTSAKKYSAYAGLVPWVQNSNETVRHGKITKRGPEELRTALVQLVMGMRRCRSTVSWRLMERYTEMKRNKGSGKSIIATARKLSTIIWCMLSTGQEFDPSLMIDRQLIRKADSMRTTASQSA

SEQ ID NO: 109134 - protein, 321 aa, unidentified
MNKYNEIYGVDISKDVFDVVNTKGVHKQYQNTFQGFKKFSKELSSQALVVMEATGYYHYCLAQYLYKQDHLVSVVNPLSVKRYIQMKLSKVKTDKSDAKAICEYGCLNEVPLYTAKDENQAECLQLLSLIEIYVKQSTALKNKLHGEKILGFPSKAVYHSLNRSLKSLQREIKILELRLTQLVKEHQQQQLTLLKSIPGMGHKTAMLLVILTDGFSRFDNAKQLCCYAGITPTIRQSGSSVRGRSRISKVGNKKLRNLLFLCSFSACKYNKGCRKIYERIVAKGKSKKLALIAVCNKLLKQAFAIAKSGLPYDQEFVSKLV

SEQ ID NO: 109135 - protein, 401 aa, unidentified
MAGGFGEGAPAFAGVDTHKGSHTLALLDALGRSLGAREFPADAAGVAALVAAAGGAGVPAGVEGARSYGAGVADALEAAGHEVYEVVRPGRARPRGGKSDAVDARLAAEAVAAGRGLARKRLDGAAGELRLLSGLRDLLVRRCADQANWARSALVLAPERLRRRWEGEGTEALMEGLRSLPGRGALERTLRECARSWHETRRRADALEAEIAAAVREGWPSLLAAPGVGPVTAAWIICAAGSNPGRCGSEAAFSMLCGTSPVPASSGMTERHRLNRGGDRRANRAIHEIARCRMASDARTRAYVARRVSEGKTRREAVRCLCRYIAREVYRLLTGPQEPLPAPAAARAAREAAGLSRAAAERGSGVPARRIALLESGELVDRRALDALDALYAETIAGLIE

SEQ ID NO: 109136 - protein, 326 aa, unidentified
MQSYLGVDVSKAKLDVCLLLPTQKVRSKVFANDPQGFQQLLQWLQTHAPDGPGSVHVCMEATGSYHEALALILDERGVFLSVVNPLLVKRFAELSRQRNKTDRADARGLAEFCRNQRPERWEAPSPGLRALQALVARLETLQAMRQAECNRLEVAHDSVAASIRSVLVDLDEAIDQVKAQIARTVDDDPDLRRRAQLLQSIPGLGDRTIAQLLAYIGRPERFSSVKALAAYASLTPLIRQSGTSLQQRRGTHPSGHRQLKRSLYFPAMVAGRYNPLVAALWQRLKAQGKPGKVIVVACMHKLLAIAFGVLRSGKPFDANHLRPQQA

SEQ ID NO: 109137 - protein, 312 aa, unidentified
MTTLCAAGVDVGRDYLDVSIAPIGRTFRVSNALTGIRTVVERLQRAGVTRVVLESIGTYGMRLVRALADAGFEVGIVDPKRIKALRLAEGKRAKTDRLDAELIARFALLMNDAARPIPSAAALEIRALSTRRRQLVEMAAMEKVRLKQALDPEVMESCRLLIDQLMVERRRIEQKLQQFLLAEPGNTDRAALLQTIPGIGPAVAMTLLADLPELGRMDRKAVASLSGLAPHANESGTRAGPSHIQGGRPCVRTALYMAALTAARSDKGFKHEYETLRASGKPAKVALIAIARRLVVAANAILKTEQPWSRSA

SEQ ID NO: 109138 - protein, 393 aa, unidentified
MKQQVSEAGQNVETDHSTQPKLYAGYVGLDVHKDTIAVAIAYAGREAPESWGTIPNTKKAIAKLVDRLYAEKKAILLCYEAGPCGYTLYQNLTAMGMDCQVVAPPRNEKIKTDRRDALRLARLLRAGELVEVWVPNQEQEAVRDLCRCRADFKAQQQKLRQQLNAFVLRHGHHWPTNRKRWTQKHLEWLESLEFPYEYQAGVRDEYIAAVRMSSTRMVDLDQKLDQTLQDWSWAPLANSLMALRGFDRLSAVTLLSELGDISRFGSPNQLMGYLGLVPCVYSSGAHRRTGGVTQAGNRHARQVLVESAWCYRFPARQTAYMNRKAEDASAYAQAVAWKAQKRLCGRYRKLIKEGKNQKVVCVAIARELVGFVWDIVCHEKHRVARVGQSSTVS

SEQ ID NO: 109139 - protein, 344 aa, unidentified
MTYFTGIDVSLRSVSICVVDDRGEVRHEGKVSAQPEAIAECLRRFSAEVKAVGLEAGTLTQYLTYGLQAAGFEVICMEARQVKNTLAAMRNKTDRNDARGIAQILRTGWYSRVHIKSMHSHRVRALLASRKAILKKCVDLENELRGLLRVFGICLPPRVGHGGFDALVRQTYASDEMLACALNPLLDARTVLYKTYLKLDNAIRGLAKVDPVCKLLMSVPGVGPVTALSFKAGVDDPCRFKSSRTVAAHFGLTPRRFQSGESDNPGHISRAGDADVRSALYVAAHSLLTRNEQWSALKAWGTRLAKMRGHRRAVIAVARKLAVILHRMWSDGTAFRWGAQEVAA

SEQ ID NO: 109140 - protein, 398 aa, unidentified
MTESSDYESVQVFIGVDVGKDTHHAVAINRSGKRLFDKALPNDENKLRSLISDLKQHGQILLVVDQPATIGALPVAVARSEGVLVGYLPGLAMRRIADLHAGEAKTDARDAAIIAEAARTLPHALRTLKQADEQIAELSMLCGFDDDLAAQTTQASNRIRGLLTQIHPALERVLGPRLDHPAVLDLLQRYPSPEKLASLGEKKLAAQLCKLAPRLGKRLAADIAQALAEQTVVVPGTNAAAVVLPRLALQLITLRKQRDEVALEVEQRVLAHPLYPVLTSMPGVGVRTAARLLTEVACRAFASAAHLAAYAGLAPVTRRSGSSIRGEHPSRRGNKALKRALFLSAFAALRDPLSRAYYTRKMSQGKRHNQALIALARRRCDVLFAMMRDGTFYTPQAS

SEQ ID NO: 109141 - protein, 338 aa, unidentified
MGQYVGIDLHRRSTTIYRMAEDGEVLGIERIASQAYELTQAMAAAGPEPEVVLESTYGWYWAADVLQDLGAHVHLAHALGNNWGYRRVKNDVNDARDLAAMLRIGRLAEGWIAPPAVRELRELVRYRYSLTRHRTSAKAQIHAVMAKNGILPVVAELWGPIGQAQLDGLELPEAYALRLESLRQLLAHIEREITKIDAQLHHRLKDDPGYRALVRLPGVGKVLAAVFVAEIGDISRFDSPKKLCSWAGLTPKHKESDEVVHRGSITKQGSGLVRWAAIEAVGNYRAKGNEKLRADYRRIAERRGKYKARVAVARKQLTLVFYALRDGEVRCLATPAAA

SEQ ID NO: 109142 - protein, 301 aa, unidentified
MKKISRLRVEKSKKKEESASKVYTIGLDLGDKKSQYCVLDGAGEIVAEGSVSTTRTALEQQFKSYAGSVVALEAGTHSGWVSRVVKQIGLEAVVANPRKVRLIAESTQKSDPEDARMLARLARVDRKLLFEIHHRSEAAQLDLTVIRARAGLVEARTKLVNSLRGLTKTLGSRLRKCDAGGITVEVLEGLPEAVKEALTPLAVQIQALSMGMEEYDQRIAAGGKQYPEIERLKQVRGVGDVIALTYVLTLGDKARFERSRDVGCYLGMVSKRRNSSESQPELSISTEALGFAAGPAWRPEE

SEQ ID NO: 109143 - protein, 346 aa, unidentified
MKYFAGLDVSLEETAICVVDESGRIVKEGRAASEPQALLHALRNVGLPLERIGLEACSLAAWLYDGIRVEGMPAICIETRQANVAMKTMPNKTDRNDARALAQIMRTGWYRQVHVKSQQCRLWRSLLVSRRTVLNEMRTIENVVRSILREAGLKLGRPSRAAFADRVRELIGADKVVMALVEPLLAIVATMLREFGRLTKQVLDITRKEQVCRRLMSTPGVGPITALAFRATIDQPDRFRRSRDVGAHLGLTPARYQSGETDIQGKVSRCGDELARTALYEAAHSLLVLSKKWSSLRAWGMNVAKRRGMARARVAVARKLAVILHRMWSDATVFRFGKEAGGPASA

SEQ ID NO: 109144 - protein, 384 aa, unidentified
MNKHNILFIGLDTHKEFVEVAYIEDQRGAKPVHFGQISSAKIAIKKLARQFESKYPNATLHFVYEAGPCGYWIYRLLTSLGHCCYVVAPSLIPKKPGDKIKTDKRDALNLAKLLKSEDLTPIYVPEPEDEAVRDISRARETAMKDLKDAKYQLKALLLRNNINYAGTANWSLKHLRWLTEIILPHPAQQIVLQEYLQTINERLARLKRLDNELEHHVKTWRYYPVVKAIQAMRGVRLLVAAGVIAELGDLTRFDHPRKLMSYLGLVPSEHSSGGKRNMGAITKCGNGRARRLIVEGAHAYRYQANISTELQKRQEGLPKEIVDIAWKAQLRLCRRYQRLMHKGKHYNVAVTAIAREMIAYIWAISREVVLSPVNPQLRIARVPA

SEQ ID NO: 109145 - protein, 340 aa, unidentified
MKKFLFIGIDFSKSKFDVTVLKSIDQQDFTQAIFLNEKKGFTDFLKWVTKQSNVPKQDWLFCGEHTGLYSRELTDFLIKKNLFIWLENPLQIKCSWGIKRAKTDKIDSLEIARYALRFEDKAVACKPANKDIESLRLLFAYRGRLVKNKVSLEVSAKETRRVISRDTTSRFIFENSQHDIDRIKKEIEVIETKMHNIIVSGELKENYLLVVTIKGVAMITAIALIIHTNNFEAFKTARQLACYCGVVPFEKSSGTSINKGNHISQLANKEIKTLLTQCARCAVQYDKELSAYYIRKIAQGKKDRIVINNVRNKLIHRIFAVVNNRIPYRENYLNPFLDCA

SEQ ID NO: 109146 - protein, 307 aa, unidentified
MNKAVVYVGVDVSKAYLDVAWAGRSRRFANNKSGLSALMKWIKQSPVHLICEASGGYERGLLDAAEQNAIKLSLVQANRVRQYARAAGILAKTDEVDARVLCAFGSAMQPKPLAPLSAQQKQLRELETQRRHLSRILVAEQNRLAQLNDKELQRLTGRLLAALKKQMAAIDARIAALIAQDQTLNEKVQKLTTIVGVGTRTAVLLLAQMPELGTLNRAQAAALAGLAPFNRDSGTLRGKRTIFGGRRALRCGLYMAALVATRHNRLLRDFYQRLRTKGKPHKVALTAVMRKLLLALNHTVKPSACCA

SEQ ID NO: 109147 - protein, 407 aa, unidentified
MSNNIRYVGLDVHKSYVMAAAVNADQQVVLKPRRIDLVRFEAWAAKHLRATDQVVLESTTNAWTLHDLLEPIVARVVVAHPYHIKLIAAAAVKTDKRDTLALARLLSAHMIPEVWVPPQHVRDLRALIAHRQRLVSQRTAAKNRLQSVLHRHQLVPPQGALFAKKNNDWWASLPLPASERLRITQDQAIIAYLNPMIDEVEAALKKLSISDLWADQVLFLLQLPGIGLVKAMTILGAIGEIERFPSAKKLVGYAGLGSRVHSSGQTHHTGAITKQGRRELRHALVEAAWTAVKVHAHWKDEFNRLKLRIGKKKAIVAIARKLLVTIWHVLSKRQADIHADPELLARKFSIWAWQLSDLRPHQLSPGQFIRFQLARLDLGHDLDHFFLGKVKRLIPSLEDVAHLLPAR

SEQ ID NO: 109148 - protein, 355 aa, unidentified
MNSVRYVGLDVHRDTISVAVLDESGRLMMQSVVQTRAAAILDFIHGVRGTLHVTLEEGTHSAWLYDLLVRRVAKLVVCNPRKNALLKSGSKSDAIDAQKLAELLRADLLSPVYHGETSALEVQHVARSYTLLTEDTTRVMGRLKAVFRGQAVACAGKKLYGKRHREEYLAQLGTGGLRRRAECLYQELDALQGLRREARRALVVECRQHAAAKWLQSVPFLGPIRAGLLIGRVQTPHRFRTKRQFWTYCGLALETRDSGEYRVVNGQVERKRRPAQIRGLNWNHNHEMKNLFKAAATTASMRAGIFREFYVGLLAKGMRPEMARLTLARKIAAIALKIWKKGEAFDAEYLKLQAA

SEQ ID NO: 109149 - protein, 414 aa, unidentified
MDVIHTHCAGLDVHKKVVVAALIVADGAGGLLRETQSFRTMTADLLALSDWLISQGVTHVAMESTGEYWKPIFNILENNFEVMLVNAQHISKVPGHKTDVSDAEWIADLLRHGLLKASFIPPEGQRELRELTRYRSTFVKERSTLVNRVQKVLESANIKLASVASSVVGVSGRAMLEAIITGTATPAQMAELSKGRLRSKRTELSQALEGRVKPHHRFVLTELLCQIDSLDETIARFNQEIEEYCRPFEEAVVLLDTIPGIARETAEIIVSEIGTDMSRFPTANHLASWAGVAPGNHESAGKKRSGKTTQGNKSLGVALNQAAHAAAHTKNTYLSAQYHRLAGRRGKKRAIVAVAHSILVIAYHMIIRKEPYRELGGDYFDKRRPEATAKRLVRRLEQLGFQVSLEQLMVPVSS

SEQ ID NO: 109150 - protein, 392 aa, unidentified
MTKEDFIYVGIDLHKETHTAVMIDCYNNKLGEITFPNRPADFPKLVTKVKKCNTDAKEVVYGLENAYGYGRALAVWLIDKGYFVKDVNTAISHRQAKHRGAMYRKSDSDDAEAIALATLNMLDKLPDACPNDAYWSLGQLVHRRDNIMKQRTRLVNQLHEQLCIAYPSYKSFFNDISRPTALYFWEHYPSKKYLKGKSVEDLRAELVPVSHNKCSTKTCEKILDAVASDKVKNNAYQDARDMVTLSIVSDLQHYDSQLTEVDKMLEQMYKMLGCTLTTIPGVNVITAVKILAEIGDIKRFSNANKLAQFAGIAPLHLSSSGKGKDVATKQGNRRLQVTIYFLAIQMVQVSSKGTPRNSVVRAYYEKRKAEGKTSQQALICISRRLISIIYGM

SEQ ID NO: 109151 - protein, 355 aa, unidentified
MEKSRIDITLAEPGGEVRRLGQIGGDRGSLLKMVRRQQSKGRKSIFVYEAGPCGFWIYREITALGQACMVVSPSLIPRRAGDHVKTDRRDSERLASLARAGELEAIHVPDIRDEAIRDLVRGRDDAVIAQRRVRQQLKALLLRNDIRYVGRTSWTGAHRRWLSELKLPEPVQRIVFEEYVDAIVVATARIERLTRAIETEVAGWRFAPVVGALQAMRGIQFVHAVTLVAELGDLTRFGSARQLMGYLGLVPREDSTGERRRQGSITKAGNSYARRALVEAAWAYRHPARVTRIIATRQAGIPKAVCDIAWRAQLRLSAKYRRLAARHVNHNKIVVALARELSGFVWAIGQSVKPQ

SEQ ID NO: 109152 - protein, 379 aa, unidentified
MEVFIEKCAGLDVHSETIVACVIKGSREDDVYTETETFPTLTKDLFRLLKWLENHEVTHIAMESTGVYWKPVFNILEDFFDITLANAQRIKNVPGRKTDVSDAEWIAKLLRHGLIEKSFVPPVDIRELRDLTRLRKKWIGHLTSEKNRIQKVLESSNVKLSTVISDVFGVSGRKLLNRLIEQGYVDEADVEKDIHGKLVPKKQRITDSLFGTINEHQIFLIRQSWQHIEYLESLILEIEERVDQLLINYHDELQLLITIPGISKDTAAVIIAEIGVDMGQFPTSQHLASWAGVSPGNHESAGKRKSTRTVKGNPHIKSAMCEAAWAVSRSRNRWLANKYWSLAARRGKKKALVAISHRMLRVIYSMLLNKEPYKEPQMS

SEQ ID NO: 109153 - protein, 372 aa, unidentified
MQKILYIGLDVHKASISVTTAEEGRDGEVRFIGTIPNTPTDVAKLAKRLANEGRRLEFCYEAGGCGYGIYRQLVDLGHGCTVAAPTLIARKPGERIKTDRRDSQKLALQHRFGDLTAVWVPDPVHEAIRDLVRARMDAVMQLMRARQQCLAFLLRRGRSCGPGKKNWTLRHRRWLATQTFDQTVHQIVFQDYVEAVWSAQDRRDQLEARISVMLSDWSMAPLVEALRTVRGIDLISSVIFVAAVGDLGRFESPRQLMAYLGLVPSEQSSGSRIRRGGITRAGNGEARRMLVEAAWSYRYQPRVSSGKTDVVERQPKPVRDIAWKAQVRLCGRYRKLAAAGKKPTVVVTAIARELSGFVWAIGQTVRSPMPMV

SEQ ID NO: 109154 - protein, 340 aa, unidentified
MTEIATIGLDLAKNVIQVHGADETGAAVLRKRLRRREVLAFFTSLPRCLIGMEACATAHHWARELIAVGHEVRLMPPQYVKAYVKRNKNDLADAEAICEAVKRPSMRFVPVKTSEQQSALMMHRARDLLVRQRTMLVNALRGHLAEFGLIQAQGLHRVAGLTAIVMDDTDELVPGMARQVLKVIAGQIGELQGRIAALEAQILAWHKSNPVSQRLVTIPGIGPIIATAIVATVTDPSVFHSGREFAAWLGLVPRKNSTGGRARLGGISKRGDGYLRRLLVSGAHTVLLRSKTAQADPWLISLLGRKPRLVAAVAVANKTARVAWAIMNRGDTYRRVAAAA

SEQ ID NO: 109155 - protein, 358 aa, unidentified
MVDKVTEAAVVGGVDTHKDLHVAAVVDQNNKVLGTQYFSTTRQGYRQMLAWMTSFGTLKRIGVECTGTYGSGLLRYFQNAGLEVLEVTAPDRMERRKRGKSDTIDAECAAHAAFSGIRTVTPKTRDGMIESLRVLKTCRKTAISARRVALQIIHSNIISATDELREQLRNMTRMQLIRTLGSWRPDASEYRNVTNVYRISLKSLARRYLELHDEIADLDVMIAAIVDELAPELIKRNAIGYESASQLLITAGDNPQRLRSESGFAALCGVSPVPVSSGKTNRYRLNRGGDRAANSALHIIAIGRLRTDAKTKEYVARRVAEGHTKMEAIRCLKRYISREVYTLLRNQNRRINSIPITA

SEQ ID NO: 109156 - protein, 391 aa, unidentified
MEPLCSLLDIGQNQRKKVFKKGEIMSIKRILVNQIDTNLEYEVIGIDLAKNCVSAILLTTDGEIFGIDRLDYQELEKSAQELSPTIFAMEPCTEMNYMVQKLEDWGHHCVVISGKNVKDYVESHFSNQKTDLNDAQALAFLTKDTQLRTVKAKDPEQLKYASLTTLREQYVKQYRQTMVSLKGICQVWGLSISKGISGKARLKDMIEHHAAFPAELRTALVGMVAHAQAVQKDLKSVTKILEELAKKDKACQLIQTVPGLGTICSCRLRATVGDIKRFKHPKDFPAYYGLVPRSMATGHNEKKGKITHRGDKTMRSLMVQGAGIVINQATKGNLNSKQLTKWILKKQKEKMPWGKLVCAVAAKLLRIVRAILISGKPYNPKIAGVAKCSLP

SEQ ID NO: 109157 - protein, 355 aa, unidentified
MKYYKNIEKFVENKQVFCGMDVHESHWNICFYSDSTVLEKQRIPAEYQRLKICLEKYSTARNIQFVYEAGFSGFWLYRLLTHDGYNCIVTPASKMVLTGDKVKTDDRDAEKLALYLAADLLKSVYVPADYVESDRRVVRRRAQLVRKQTRAKNEIRSFLYLHGITRPEHLSKNWSKAFLAWLERLDFKQSSDKFTMTQLLQTYRMIRDSLAAVTRYIRQLSQDTKYVSAYKRITSLRGVGLITAMTLLLEINDFSRFKNSDHFGSYLGLTPSQYSSGGHVRLGHITRQGNAHLRRVLIESAWTVIRHEPVLRAKYERIKAKGNNGKKAIVAIARSLAIRLRRCLLDQTDYVVGVC

SEQ ID NO: 109158 - protein, 387 aa, unidentified
MVQINDLSRSLAAFDPASTLVVVVEMSKASWLVSGVVPGVERQPLKKLEPDATALLRLIERWRNEAVRAGRPISRIALAYEAGRDGFWLARWLIARGIEAHVIHSASVAVSRERKRAKTDRLDAAMLMRVFLGWLRGERGHCGMVAIPTMEEEDARRPNRERESLVNERSRIVNRMKSALARLGIRGFKPHLRKAPERLAGLRTAEGTGLPANIIEEFRRDMARLALVREQISSIEKTRAERLERAPDTGPHAMVRLLARVIGIGIETADMLVREILSRNLRDRRALARYAGLTGSPDESGLKSREKGLAKAGNARVRRGLIQLAWRFLMFQKDSALARWYRTRTEGPSGARKTTMIVALARKLLIALWRLVTTGEVPDGVELRPAA

SEQ ID NO: 109159 - protein, 361 aa, unidentified
MAKAMTLVGLDVHARQTHAAVLVLETGELRSCRLQMAPEEVVGFLTGLPGPVVAVYEAGPTGFGLARAGTERGIDVQVVAPGSIPKGSGDRVKTDRRDAIRLVRLLAAGELSFAFIPSVADEAFRDLIRCIEDLRGDLMRARHRLSKFLLRRGYRYRDGRAWTEKHARWLRSLSFEGVAQTPFADYCASVDLLAGRRGTLVQTLEQTVPGCSHAQVIGRLRCFRGIDTLTAAGLCAEIGTFGRFPRPAMLSGFLGIVPSERTSDLKRRQGSITKAGCPHARRLLVEAAQHYRHEPVIGQTLACRQQGQDPRVIEIAWRAQRRLHHGWAHLHYQRRKPAGVVAIAVARELAAFLWEAATFDA

SEQ ID NO: 109160 - protein, 381 aa, unidentified
MKHATTRVSVPISVPTPVLTIGIDVGDRRSHACVVDGSRTVLEEFSFETNEVGLCEKLRREPCQIILEVGPHSRWMQKSLQRLGHTVRVVDARKIQLISRSNNKTDRRDARTLAQLGAGVPELLGDIKHRSDAAQADLALLLTRDHFVGQRTATINRMRGVLKSVGVKVPRMSTKVFHGRVGELVPEALRPALLPLLAELSWLHQQLRSLDKEIDKMAERYPAVAKLKQVSGVGNLTALAFVLSLDDPSRFKKSRDVGPFVGLTPRKHASGEKDPQLSITRSGNPYLRRILVQAAHYILGPFGPECLLRRQGLRIVERGGKHAKKRAAVAVARKLAVLLHRLWVSDAPYEPWYRTEAPPVELEPKARRSKKKPHRSPVVST

SEQ ID NO: 109161 - protein, 386 aa, unidentified
MQQLNDLSRSLAPFNQGETLVAVIELSLSSWLVAGVVPGIDRQPLKKLEPDEAGLLRLLQRWRDEATKSGYIIDRIAVAYEAGRDGFWLARWLQLQGIDVHVIHSSSVAVSREHRRAKTDRLDTAMLLRVFMGWLRGERGHCGMVAVPTIEEEDAKRPHRERENLVGERTRIINRMKAALIRLGIRGFKPELRRAPKKLDGLRTPEGLPIPPNTLEEIRRDLARLAMAREQIDLIEQARLVRIEQAPETGSNAMVRLLASIVGVGVETADMLVQEVLSRNLRDRRAVARYAGLTGSPDESGSKRREKGLAKAGNARVRRGLVQLAWRFLLFQKDSALSQWYRTRTGIQGVRKTVLIVALARKLLIALWRMVTTGEVPHGVVLRTAT

SEQ ID NO: 109162 - protein, 473 aa, unidentified
MFTALISNLQVRLGSLTNTQGAPRNRLSILSSQNPCMHVRICNLPLVEVIMNTQTTPSVSAFVGIDWADRKHDFCIQASGSDQRVFGTLEHSPESIAKWAYSLRDQFGGPIAICLELAKGPLVYALQRFEFLVLFPVHPSTLAKYREAFTPSRAKDDPTDAEIALDILLRHPEKLQPIKLQSVAMRELATLVEERRCLVNEVTGITNRMTSTLKQYYPQVLDWFEARDTLIFCDFLERWPTLKQVKHARRSTIEAFFHQHNGRRAHLIEERIQGIRAATALTEDESVIRPSQMVVQVLVEQLRVLLQAIDRFDAEIGIVTKNLPDYDLFAALPGAGHIQAPRLLVAFGEDRERYASAAELQRYSGVAPVVERSGNKCWVHWRLACPTFLRQTFVEWAGSTIPRSFWAAAYYQQQRSKGCSHRVAVRALAFKWIRIIYRCWKTRTPYDESIYLKALKNRGSPLLANATESPKMT

SEQ ID NO: 109163 - protein, 429 aa, unidentified
MRTESTPGARGPVFCGVDTHADSHWLCVLDWRGRRVLSRRFPADAAGYEALAGAIAAAGEPACVAMEGTSSYGAGLTRHLASLGMPVREALSPARTQRRRPGQGKCDESDAERAARAAMSGSKLGTPKSQDGWVDGVRCMLAARSGAVKARTSAINTARSLLTTAPEGLRSRFRGMGGPRLMEELPSVRSEGALGAALGALADLWAAARDAALDMERAIEASLEENCPALLAMYGCGPVSAAKLAVAAGDNPGRLRSEASFAAICGACPIPASSGKTVRHRLNRGGDRQANSALHEIARQRVMRNPETAEYAERARARGKSDREVMRCLKRYVAREAYRALMRPHEIRRPADASELVAARRAAKVSQVRAASILGTSEKYISMLERGQRELKPIRRAYEAWVEAGLPLNWDRQAFEAERKMDSKKHLAK

SEQ ID NO: 109164 - protein, 385 aa, unidentified
MQKLNDLSRSPSPLDPDGTLIAVIELSLSSWLVAGIVPGVERQPLKKLAVDESALLKLLHRWREEAAKAGHRIKRIAVAFEAGRDGFWLARWLSARDIEAHVIHASSVAVSREHRRAKTDRLDTELLKRSFLGWLRGERDHCKMVAIPTTKDEDAKRPNREHESLVGEQSRIVNRMKAALIRLGIRGFNPKLKKAAERLDGLRTPEGEPIPPNTLAELRRDMVRRRLASDQIRQIEDARLERLKQAPSDGPHAMVRLLARVIGVGVETADMLVQEVLSRRMRDRRAVARYAGLTGSPDESGRKRREKGLTRSGNARVRRGMIQLAWRFLMFQKDSTLAQWFRARTESARGTRKTMIVALARKLLIALWRLVREGVVPDGVVLRPA

SEQ ID NO: 109165 - protein, 357 aa, unidentified
MRSIQSVPHGEQAVQQDDLFMSLELGDKRWKLSIGHARHGVSRYDVAAADTAAIAKCVAKTRERFQTPRAVVHSCYEAGRDGWWLHRWLTQVGVDNIVVDASSIEVNRRARRAKTDRLDADKLRTMLVRHHGGEHVWSVLREPTEQDEDARRVHRELQRLTHERTSHINRIRALLVLHNVRPDIVLAGRDWPAWWQKNSGQVSPKLRAEIEREVARLTLVKDQVRSIELARRRELASGMHPMVSQLTRLAAIGPTGAWVLVHEVFGWRRFSNRRQLAGCLGLAPTPYASGDTETEQGISKVGNKRVRALLVEQAWGWLRRQPTSALTLWFNRRFAHSGARMRRVGIVALARRLAIAL

SEQ ID NO: 109166 - protein, 351 aa, unidentified
MQTQSKRIDFSRQNFYCGIDTHKKSWAVTIDTDDIVLKTFSQEADPELLVKHLRKNYPGGNFIAGYEAGYFGYGIQRQLESLGINCVVLHPADIPTSDKDRDQKRDPRDSRKIAKAIKNNEVSPIWVPPVSLEQDRQLLRTREKLSRDKTRIKNRIKAFLQIYGIKYPLTFSQPGSHWSARFIKWLETIQLNEPTGTEALRSLVRCLRFQRGEILTVSRQIRKLSQNDKYEQQYLRLIKKPGIGMITAMTILTETGDINRFKTADHYRAFFGIVPRAHDSGDKEHPGKITKRANTHLRYLLVEITWTAIRYNPYYLNIYKSYRQRMKENKALVRTAGKLTNEIYYCLKKEA

SEQ ID NO: 109167 - protein, 418 aa, unidentified
MQTELSQFAAIIGLDWADKKHDVCVQATETRQRKTYQIQHKADKIDEWARSLHRRYGGPIAVALELSKGPIVSALQKYDFFVIFPIDPTTLANYRKAFTPSGAKDDPTDAELALDLLLCHPDRFQALKPQSVEMRTLMTLVEQRRRLMNDRVRLTNRLRNALKQYYPQALEWFDRIDTLLFCDFIKRWPSLAQARRARKATFEKFFHEHNMNRKALLERRVTAIKSAMPLTTDEAVIVPYRLQALTLVAQLEVALESIRIYDEEIAGLAPQHPDYGLFNTLPGAGPSLAPRLLVAFGEQRERFTSAAEVQKYGGIAPVTQRSGQTTWIHWRWQCPTFLRQTFVEWAAQTINKSYWAGLYYYQQRAKGCSHQAAVRALAFKWIRILYRCWVTRTPYDEAKYLKALQERGSPLLKIAEAA

SEQ ID NO: 109168 - protein, 357 aa, unidentified
MNVTHYIGFDVHKKSVNWCAKTADGQIVAEGRLRADRDALRQWAGARPEPWRGAMEATLFSGWIYDTLKPYAGRLDIAHPAMMRAIAAAKKKNDKIDARTIADMVRCDWLPVCYVAPPELRELRRLWRYRGLVVRESVRMQNKIAGLLMEVGASYNKQRLHGRQYFTALLEELEEVPESVKDLLRLTRGALEMFEATQKQLVRRLVAAPLLAERVERLATIPGVGPITALTWALEVGEPERFHSSAAAMSYCGLTAALQSSAGKEQRGPISKQRNAWLQTALIEAAKLAPTWNPQLQAVHERELARGHRNRATLAVARKLAAYLLAVDKSGQAFQLRTPPPGETAAPTPAAESQEAA

SEQ ID NO: 109169 - protein, 348 aa, unidentified
MAMTIVEATRPVTGGVDTHLHVHVAATLDSIGGLLGVESFPTTPAGYRKLLGWMSSFGPVERVGVEGTGAYGAGLARYLHRRGVTVIEVDRANRQARRQAGKSDPVDAVEAARAAQSGRARGVAKTRDGNVEAIRALMVTKRSARTVRTKTMLQIRHLCFTGPDELRQRLQPLSAIMLAREAAALRPRAGGDIVAYATKVSVQTLARRVLALDEEIVRIDELLADLVERTAPSLLALYGVGVDSAATLLAAAGDNPERLRSEATWAHLCGVSPIEASSGKVVRHRLNRGGDRQANAALWRIVMVRMNSHPPTRAYVERRSKEGRSKLEIMRMLKRYVAREVYRHLPRA

SEQ ID NO: 109170 - protein, 414 aa, unidentified
MKTYILRSTKTVESQKPVRAPRRKTATVTTTVVLGRPPAPTNARVLFTGFDVHTDSIAVSLAPSDTTEVRRYGIIGGTHDDVLKLLTKLQAAHPGTELRSAYEAGPHGFSLARCLHRHGYGCILVAPSKIPRPPGDRIKTNRRDADQLARLYRAGELTAIYVPDPADEAFRDLIRARAQVGDQQHRSRQQLKMFLLRHNLRYTGQSAWSPAHLRYLAKLKLPFPVQQIAFQEMLDGITEAADRLARYDTEIARAVPGWRWAPAVRALMALRGFALLHAATLIAELGDFNRFAHPAQLMNYLGLVPSENSTGDQRCQGGITKTGNAIARRALVEAAWQYRSPARLSPHLKKRQAGLPKAVTDIAWEAQRRLHHRYVHLTRTGKKKAQVAVTAVARELAGFVWAIACQVQPIAPKS

SEQ ID NO: 109171 - protein, 409 aa, unidentified
MKMAGIDVHKKVLMVVVVDASTPEEKPVRRRFITLPKELHRLLTWLREQGVEEAVMESTAQYWRSVWLELEPHMRLHLAQAFSNRAPRGRKHDFKDAERLVRRLIAEELILSFVPSGEQRIWRSMTRMKLQLTRDRVRLQNQIECLLEEMRIKLSIVVSNLLGASGLRILHALAKGETDPRKLAQLGGERLQCTEEQLVDALTGRAQPVHGEMLALQLERLQLIDQQMERLNHMIAAAMKVHQDAVMRLAEVPGLGVDSAQQIIAEVGAQASTFASAAELTSWVGTCPGKDESAEQNHSSRSAKGNKYMRRVLNQAAHAAVCKKGSHFQALFRRLLPRLGYKSAIWAVAHRLCRLVWKILHEGVRFIEQGVEVAPREKKKRAQMLARALRKLGYEVTITPINQLAPKLV

SEQ ID NO: 109172 - protein, 311 aa, unidentified
MKQSVVYIGIDVAKAHLDVAWAGASRRFPNDQRGRAALVSWIKQSSNAGAVQFICEASGGYEQALLESLEQNNLKATLVQAARVRQYARAAGILAKTDKIDAKVLAAFGAAMQPKPTQPHSAEQKRLRELEAQRRHLSRVLIAEENRLAQMSSAELRRLSRSLMSKIKKQIETIDARIVALITQDQALCAKAQKLTAISGVGARTAALLLAQMPELGQLNRRQAAALAGLAPFNHDSGSIRGKRAIFGGRRALRGGLYMAALSAARYNPILSSFYRRLRAKGKPHKLALTAVTRKLLIALNYTLKPIPCPA

SEQ ID NO: 109173 - protein, 323 aa, unidentified
MAVIDDADRVVAQKRLPNDITKIVGFLARWQDQLAGVVVESTYNWYWLIDGLQDAGFHMHLANTAAIKQYEGLKHSGDETDAQHLAHLLRLGILPTGTILPREHRVVRDLARKRMQLVQSCTTHVLAVENIMARQLGGRMTSNQIKRLTGDTIDSLPLAADVGLAIKANVAVIATLQSQIEVLEKRLQERVRPLPQYVLLTTVPGIGQTLATVIVLETGPIDRFAEVGNFASYARCVDSLHTSNRKKKGEGNVKNGNKYLAWAFVEAANFARRFCPEAKRFHERKKARTNNIVATKALAHKLARACYHILKEGKPFDVTRCFA

SEQ ID NO: 109174 - protein, 399 aa, unidentified
MLAVGIDISKSKSVAAILNQDGSMRTSPFEFHHTQPELDAFIKYILNSNQSATILMENTGHYHYPVLKAFQEAGLPVCMVNAYQIKKFGDMDLRKAKTDKKDAVRIARYALEKSYSLVPYTSMEQKYEDLKFLARQYNQRMLTLKTNKVFLLNLLDETMPGITNILPLTTRTPETSLSVLFINRFKSYDRIKKMGKSRFLDAFEKIARKSRNRQTKTYGLAIYEAALRNITTRGENEYTLAAQDQCLELVCESQKAADSIIPKMQTLAETLPEYAVLRSMAGVVDRLGPLILAEIGDIRRFHSGKALNAYAGNDAPPYQSGTFESYNRHISKRGNAALRKYCFEVMQALKLTRPQDDPVYLFLLKKEQEGNPYNVAKMAGVDKFLRIYYARAMETLKQQ

SEQ ID NO: 109175 - protein, 423 aa, unidentified
MENTAARKRKQVPEGYLIIGIDPHKKRHAAVAITQDFTIRDKFKFDNTREGLETMLRRTRTEMVKADCRGVMFAIETGGHYWRNIAYFLDEQGIPFRFINQYTLKRRREGKDLNHKKNDYRDSEVAAQLLCTGEFTESTIPQGVYAELRTAHNAYRRLVKERTRITNLVKGLLDGLFPEFTQVFKDPCGLTSLSVLSACAIPGVIAGMMEDEFVAAIEAKHQGRLMRKKLRELHYKAKASIGIAAGARSASSEISFLVEKHELIRRHIRIIEGTLVNLVDETEEGKYLLSIRGLNYIAVAGLLAELGCFKSYRSAKQMIKMAGSNPTESESAGKRGAHTPMSKQGRPVLRYCAWTSVIPMLRFNSDFRAWAKQRRERPAHANPLNGREVVGAALNRLLRLSFAMVKNRTYYQVSKPELTLIAV

SEQ ID NO: 109176 - protein, 459 aa, unidentified
MRPKANKAKPKSRPPCNSPPVLRPNAAGIDIGAREICVAVPRDRDPEPVRAFETFPASLPKIADGLVSLGIDTVAMESTGVYWIPLYQILEARGIEVFLVNARPVKNVPGRQSDISDCQWLQYLHSVGLRNGSYRPARHVGAARSLFRHRDSLIEMAASHVQHMQKALDQMNLQIHHVSSDITALTGLAILDAILAGQRDPVVLAKLRDRRIQASPETILQSLEGDYRPEHLFTLRQALAAYRHYLQWIAACDLEIQSHLRQFESLYEPPPQPAPPPAQRRRGRPCGSHTPGARMEREFHRIFGVNRIEVPGRNVSTVGTLATEVGPDLSKFRSAGAFSSWLALCPDNESSGSRILAGKTRRSKSRAREAFRMAAYSLHSSTSFLGEYYRRLRARLGAPQAITAAAHKLARIFFHMVTTKQAYNETIFAEQEAIYRQRLHNRLQAQARQLGYQLVPVAG

SEQ ID NO: 109177 - protein, 336 aa, unidentified
MVQIYGIDLGMSSFDVSFLSESGGVRHLSGVKNTVHGISKFLLSLPSSAVLCAEHTGVYGDLLLRLCTLNRTCLCFVPGYQIKHSLGLQRGKSDPLDACRIREYAERFYDLLRPCFYPGEEMSELQELYRTRSLLVDSRKRLDTLNIGDNCKSSVSLAAGHARRAVLAELNTQISGLDHEIEALIQNSSEFSRNYQILTSIVGVGPVTSCELIIKTENFRKLDTAKKCAAYAGIAPYPKESGKMKCGHKISPMGDKQLKTLLFLCARSAKEHNKEIRLYFLKKHKVEKKHFFVAMNNIANKLLRLIYSLIQKQQTYDRDYIQRDPRCVVISDTNKC

SEQ ID NO: 109178 - protein, 348 aa, unidentified
MQIAVLGIDLGKNSCSAVGLDKAGRVVLRRRLSRHSLIKLATQMPSCVMAMEACCGAHHLGRVLRAHGHHVRLMPPEYVQPYVKAQKNDERDAEAIAEAATRPTMRFVDLKSEDQFDMQTLHRARSRLVSERTALVNQLRAVLLERGITVAQGRRRLARYLTQALDADDTEGTQLSSRIRVLIEDMRAQWHDLDQRIAAFDIEFAAAARSEESARRLSTIPGIGAINATALVAAVGDARGFARARDLSAWLGLVPRQATTGGRPRLLGITKRGNKYLRTLLIHGARAALPLLLTVESPLGNWLRGLSARAHRNTVIVALASKLARIAWAVLRSSTTYNAATGSRLVGA

SEQ ID NO: 109179 - protein, 342 aa, unidentified
MEYYVGLDVSLKQTSICVVDQAGLVVREGVVDSDPEAISVYVRSKAPDAVRIGLETGPTSTWLWTELKRLGLPVICIDARHAKAVLKMQINKSDRNDAIGIARIMQTGWFKEVHVKDIDSHSVRALLASRALLVKIKRDLENHVRGLLKNLGLVIGRAKFNVFAVRAEELIEGRPELIATIRPLLEARNAVGQQVSELDRKVMKLARHDAQVRRFMTVPGIGPITALAFKATIDDPTRFARSRSVGAYVGLTSRRHASGEVDWSGRISKCGDAMLRSYLFEAVGVLLTRVPKWSAVKAWGVRLAKRNGLRKAKVAVARKLAVILHRMWIDGTEFNWSKEIAA

SEQ ID NO: 109180 - protein, 466 aa, unidentified
MKNNYILYVGMDVSKGKADAAILKVSDRRSVKPKFLRKKLSFKFVKSEVASFLETVRSYSDVNCTSICFALEVTGIYSTNVYDYIKANLYENESIKFLNTDFVNQWRIAHNIAKSDPLDAQTISTIIGTDLDVQYVNDNVFENKNGYQDLKALVHRHYQIKKIYSQEINRLIAQCDCLFPELQYVFEPKSAAFIAVLSSYPTTHDIINASRVEVFDVVYEATKHRCSMDKVDKLFELCQDTLVPDDISSYGKSIILDLVENIKNIKGQLKSIERYIKDIASLNPAYKLLLTITGCGPITAATVIAETGNIRRFKNADCFVSYLGTSPRNKRSGTSVETMGKISKKGSRYLRHAIYMIAEFARRHNPVLKHQFERIKNGNKKRHKLANIAIANKIARYIYSIMKNKSSFVILHDHIMRLPEETRDTFFNSISLDFPKNTRKQIYQYSDINGELHRFVYIKTDEMIPA

SEQ ID NO: 109181 - protein, 336 aa, unidentified
MYSGIDLHSNNSVVAIIDDADRIVAQKCLPNDITKIVGFLARWQDDLAGVVVESTYNWYWLVDGLQDAGLHVHLANTAAIKQYDGLKHSGDETDAQHLAHLLRLGILPTGTILPREHRVVRDLARKRMQLVNCRTTHVLAVENIMARQLGERMTSNQIKQLTADTIDSLPLAADVGLAIKANVAVIATLQSQIEVLEKRLQERVKPRPQYGLLTSVPGIGQTLATVIFLETGPIDRFADVGNFASYARCVDSVHTSNRKKKGEGNVKNGNRYLAWAFVEAANFARRFCPEAKRFHERKKARTNNIVATKALAHKLARASYHILKEGKPFDATRCFA

SEQ ID NO: 109182 - protein, 313 aa, unidentified
MDNPIPQTIGIDISKATLDVYAHPAGCERQFTNTAKGHRELIDWLGQWQIDRIAYEATGAYHRQLEQALSDLPCVKLNPARARRFAQAIGTLAKTDKIDAVILARMATTLQPPVRPANTPKQAKLAELISARDGLVRDKIALQNQAKNLTLPLLKRQHKKRLDQIEQHIKQVDVELATIIAADAELARRHEIISSIAGVGTRTADQLVATMPELGALDPKQVASLAGLAPVARQSGQWKGRSFIQGGRANVRRALYMPALVAARYNPDLKAKYQSLIASGKPAKVAVVTLMRKLIVMVNALIKADRLWVEKPA

SEQ ID NO: 109183 - protein, 354 aa, unidentified
MIIIGVDFHPAYQEIAAVNTDTGEYQEKRLAQPQEAEEFYGSLAWVGQAVGVGMEASGQAQWFERLLEGLRWELWRGDAAVIRAKRGRKQKTDREDARHILKLLLKDAFPRIWVASWENRDLRQLLWHRHRMVQARTRVMNQLQAVALKEGLHCKKRLWRASGRQQLECLQLAPWSSRRRGELLELLDRLNPTIAELSQAVEREAEKCPEAQRLMTHPGVGALTALAFVLIIGNAERFGCGKQVASYLGLVPLEKSSGNRRRLGHITKPGSSLVRFLLVEAAQVTVRSVPEWRSKYHHLVLRRGRKTAKVAMARKLAVRLYWMWRKGWDYEQWKKFGSYVGQPGNRDGVQSIIE

SEQ ID NO: 109184 - protein, 423 aa, unidentified
MKYALVRVLPEVPPGGVCAGIDWASADHAVCVVDLAGQVADRFAAAHDRAGIAGLIARLRGRGAAEVAIERGDGVLVDALLAAGLTVVVIGSRQVKNLRSRYGSSGAKDDRFDAFVLADTLRTDRARLRPLVPDSPATLALRAAVRARRDLVAHRVSACNQLRAHLQVAFPGAVGLFSELDSPLSLAFLAAFPGQQAAARLDEQALAAWLATIPRRGNTAPAGVLAARLAAAPRGAAGADAAQAAVTAELAAATAGLAGRVRALEAEIAAQLAAHPDQHIFTSLPRAGTLRAARLLAETGDCRARYPDPWSLAGLAGVAPVTRRSGTYISHEFRWNVNRQLRDAICDFADGSRHASPWAATVYAAARDRGKDHPHAVRITARAWVLIIWRCWQDGTSYDPAKHRALQDILTRQAAAGTPQPHR

SEQ ID NO: 109185 - protein, 315 aa, unidentified
MGKNTAQGINVGVDVGKHQLDVFIHERNIHFTEENTPEGVRRVVSRLNRYTLARIVAEATGRYERLLVDEALRRSAPIVVVNPLQVRRFAGAIGQIAKTDRIDAAVIAQYAALVQPEVRPINQNTCKIKDMLVRRRQLIEMATMEKNRLLIMPKNQRTDIRRHVLHLQKQIEKVDVLLDALIESETAWQDKRTVMLSMPGVGPGVVNTLLGDLPELGDLSNKQIAALTGVAPFNRDSGSMRGKRRIRGGRHSVRTVLFMAVMSAVQHNPVMRHFYQRLVKEGKHKKVALTACIRKMIIILNAMVRDGAMWKPNMA

SEQ ID NO: 109186 - protein, 352 aa, unidentified
MNEITTVGVDLAKDLIVACAADAAGRTQFYKRFGLPGFAAWAANLPPCTIAMEACSSAHYWARTLSALGHQVKLLAPDLVKPFRKSQAAKNDRNDAQAILITALQPDMRFVSVKSLEQQSILAVHRMREGWKSERTALINRVRGLLAEFGFWLGRSPQTLARRLPQLMQEEELPARVRALLAQAHGQLLQLEALMQQCELDIQAHARHSEAAQRLSALNGIGPITASAIVATVSNAADFRNGRQMAAWCGLVPKQSSSGGKERLGKITKRGDPYLRGLLTQGARSTLNAALARPLDQRSPLEHWIVALRQRVGYHKSLVAIANKHARICWALLVRGERYHPHAASRHVRAAA

SEQ ID NO: 109187 - protein, 340 aa, unidentified
MLNRNVPQSKARGKSTNEYDHYIAIDWSLKNMAIAHMSCRDSKPRIFERPAELKELKAYLATLKGRTIVTLEESGTAHWLYLELFDYAERILICDPFHNRWLCHGPKTDKIDAGKLCELLRAGLLKEVFHSDSTLYDLRSLVSAYEDVVKAGVRAQNQKKAVELGHREEGKSATFIEEILQENIDLYRRSKEQYEKRFHDFAKRNKLVRFQREIPGIGTIGAIKILSCVVDARRFSCVGKYFSYCGLVKHEKQSGGRNYGWRKPRYSHCLKSVYKTAAITAIRGENPIREYYDHLMAQGVAEHNARHAVARYIARTSYGMLKSSTRYEPYRWRGKEKKVE

SEQ ID NO: 109188 - protein, 413 aa, unidentified
MHPHSELTHFAGLDWARDHHDVVIVDAAGRIVADFRFEHTAEGWRLWQEKIAAFAKLGVAVETSFGAAVEQLLASSATVFPVHPASAKRYRERKCASGNKTDHQDGWALADALRLDGHTWRALAAQDPIVAELRILCRDEVALIEERTALLNQLQQALTEYYPTALEAFADWTCPGAWAFVETFPSAAALSKAGQRQWEKFLHAHRLYRPQTYEARLAAFARAGEWKTSAPLVAAKSLYAVARCKQLRVLASQLEVYRARIEALFASHPDSGLFGSLPGAGPKLAPRLLSEIGSDRERYEDAQGLQCLAGTAPVSYQSGQIDKVHLRRACNKNLRAAMHLFADHSRAQCCWAETYYATLRERGKTHAHALRCLGQRWLKIISKMWQTRTCYDGELHLRNQLAHGSWVLQVQAQ

SEQ ID NO: 109189 - protein, 336 aa, unidentified
MVYVGVDLHRKVAHVVALDQRGEPVLNRRVAARPDEMLRVFGELDHQPLEVAFEATLGWGWFADLLADAGIPAHMGHPLATKAISSARVKNDSVDARTLAHLLRTNLLPEAWIAPPEAREARRLARMRTSLVRIRSQLRCQIHAVLADHGVHSEVSDVFGKAGRIFLEELRLPPISSDRLETNLRLIDALTDEVAEAERQLRQLFRGDERIRRLMAIPGVGFITAVVVVTEVWDITRFASPDRLCSWAGLTPSEHSSAEHTRRGHISKQGSRWLRWVLVEAAARPQTDPSLRAFIDRIASRRGTKIARVALARRLLTLCYYALRDEGGCRAFPLAG

SEQ ID NO: 109190 - protein, 318 aa, unidentified
MSKTNTKSLVCAGIDIGKAKLDCAIAERGAELCCDNSQDGRGQLIAFLKGHGVRRVGLEASGGYEIEVVDDLRAAGFEVIMFQPNQVRAYGQFKRKRAKNDRIDAILIAECTAAQDGVRAAPDPRLAAFAEHLTWIEQIEEDVARAKVRRERYRNPRLKAEIEGEIKRLGARKREEIRLLLKALRAHADLAHKIELLVSIEGIGERTALALVVRMPELGTLSREEAACLIGAAPFVHESGRYKGQRRTGGGRARARTSLFAAAQAAARQWNPALIAFYDRLVKAGKPHTVAIVACVRKMIIYANAVLQRDQPWKMITA

SEQ ID NO: 109191 - protein, 325 aa, unidentified
MNTEKNYCGIDVSCDTLDICYQTTEGSKAQLQVKNNRSGFAQILKVCNNNYHFVMEATGVYHLALVFYFYEKCVPFSVVNALQIKRYIQMHLERNKSDKKDAKRICEYGIDRNPPLYEMPDRAYFECRSLNNAIADMTKEITKLSNQIHSLRKAPYHTQSIIKAYTSIIQKMKKEQQKMEQELAGKLKEWQPELLQQVQSVKGVGKRAAAELIIYTKAFKGMKSYKQLISYAGLSPVEYSSGSSIKGRTKICKQGGKKLRHILYMGALNAKTTNYACKELFDRLVAAGKNKKAAVIAVCNKLLKQVFGCIENGTLYQDNYAQILS

SEQ ID NO: 109192 - protein, 356 aa, unidentified
MSRDIKYIGMDVHKEATVIAVLNGSGKLVMESIVETKASSILQFIHGLRGELHVSWEEGTWAAWLYDLLQPQVAQVLVCDPRRNALLKEGNKSDKIDARKLADLLRTGMLRPVYHGEHGLRTLRELGRSYQTLSQDLNRVMNRIKALYRGWSIPCAGTQVYAPRYREEWLHKIEHVGVRRRAELLYQQLDGLQALRRTLRPELLAESRKHKASKLLRQIPCIGPIRAARLLALMQTPHRFRSKRQLWTYSGLGIETRDSAQYRYVHGQLQRTKKPQQIRGLNRNHNHEMKEIFKGAATRASCGVGPLRDFYLSLLDKGMKPEMARLTLARKIAAIALTLWKKEERFDAEQLKPQAA

SEQ ID NO: 109193 - protein, 355 aa, unidentified
MNDSKYIGLDVHQATISVAVLDSAGTLVMEAILETKAETILQFIHGLRGSLHVTFEEGTCAAWLHDLLRPHVAQVLVCDPRKNALMKAGNKNDRADARKLAELLYLNKLNPVYHGETGIRALKELARSYLALTRDTTRVMNRVKALYRSWAIPCAGQRVYAPRYRSEWLGKITEAGVHRRAEIYYQQLDALRSLREQVRRDLLAEGRKHGAMKLLRQIPSIGPIRAALLIALMQTPHRFRTKRQLWAYCGLALKTSTSGEYRIVQGQLKRSKKFLAIRGLNANHNHDLKNIFKGAATRAAAVAGPFQEFHAGLVARGMKPTMARLTLARKIAAITLIVWKKGVCFDAEHLKQQAA

SEQ ID NO: 109194 - protein, 456 aa, unidentified
MKVMKIKDESDSSNGVLKKKHGQGLPVFNPFAGGIDVGDTMFDVAISDGIAGYEVREYSTFTEDTVNLVNWLVAENITTVAMEATGIYWLNLYLMLEEAGIEPYLVNAKHVKNVTGRKKDDTDAIWLQKLHTCGLLKKSFQPDSDIRELRTYMRQRKNLINIASDSVRRMQKAMELMNLKLHVVISDILGKTGLQMVCAILKGERNPDELIKLKDPRIKATDQEIKKSLTGIWRQEYLFMLKQAYEEYSFYQSQIASCEEKIKECLLKQVAQITRGDITDIGLEKKKRKKNQFNVEIRPVLKIIAGVDLCDIDGINEISALELISEIGVDMSKWENNKHLSAWCNVAPNTKITGGKIISSKMQKKKNRAGQVLRMSASGLYRSKSGLGDYARKMRSRLGKRAAVVAIAHKLALIIYTMIKEKRPYNPQVTSNNQEQWKAKRIKYLEKQLLRLKNVA

SEQ ID NO: 109195 - protein, 337 aa, unidentified
MKYCGIDLHSNNSVVLVSDEEDRTVLQKRLPNELGQIRAALEPHRDELVGVVIESTYNWYWLVDGLMDAGYRVHLAHPSAIKKYEGLKYSGDFADAGYLAQLLRLGLLAEGYIYPREERAARDLARKRMQLVRYRTAQVLSIENILARQTGARLSGEAVKRLTAKQVEGLGFVPDVTLAVEANRAVSQALGQQIEALERRLKERVRLRGEFKLLKTTPGIGDTLATTIMLETGTVARFAKVGNFSSYCRCVDSLRESNDKKKGEGNAKNGNKYLAWAFVEAANFARRYCPQAKSFYERKKRKTNGVLATKALAHKLARACYHMLREQKPFDVSRCFG

SEQ ID NO: 109196 - protein, 358 aa, unidentified
MDKIKNSKLDCTGQPVYVGLDVHKKSWSVSVFSRYGEFKTFTQPPQPDKLVDYLKRNFPGGEYHSVYEAGYCGFWIHDQLKERGINCTVVNPADVPTKQKEEQHKRDRVDCRKLARGLCNGAMEGIYVPSRQMREDRSLVRTRQAFVKKRTRCKNQIKGMLLFYGIHLSEEQILAPWSGALIKWIESIRMERDSGNIALKAHLEELAYLRHLTARVNRSILNLARSAEYAIPVKILKSVPGISTLTAMILLTELCDMARFASLDSLCSYVGLIPSIKNSGETEYVRGITPRRNAHVRWILIQAAWVAVRKDPALMMTFAQYCKRMRKNRAIVKIARKLLNRIRYVLKHQTPYVPCITE

SEQ ID NO: 109197 - protein, 477 aa, unidentified
MVINRVEEILDEPYEQVVQRVCAIDVAKDLGKVCVRTPAESGSGRRVSRVWDVQARTNAIIELGDHLACQSIEKVTLESTSDYWRIWFYLLEARGLDVQLVNARDVKNVPGRPKTDKLDSVWLAKLTEKGLLRPSFVPPRQIRVLRDYTRLRVDLTAERVRHWQRLEKLLEDALIKITSVASRIDTLSVRDMIEALIAGQRNPKVLAGMARGRMRLKHADLVEALTGQFDDHHAELARMLLDQIDALTAQIDTLTDRIDTVLADVPVSPPPDGPEPDPDDHQPGRRNRVEQAPQVRGNGSGTAPAPGAAPRPVTALSLVDILDEIPGIGRHNAQEIIAEIGLDMSRFPTPEHLVSWAKLCPRTIQSGSRSSAGKTGKGNRYLRAVLGDAAAGAAKTQTFLGDRYRRLIKRRGKIKTLVAVARSILVIIWHLLANPGMRYQDLGVDFHTKRIDIARRTRNYVRQLEAMGYTVTITAAA

SEQ ID NO: 109198 - protein, 339 aa, unidentified
METYVGLDVSQKLTSICVMNEGGQRVWQGQVPTDAGTLAKTIQEHAAGVRRVGMETGPLAVWLYHALRERGVQVDCIHARHVHAALSVQLNKTDRNDALGIAQLVRSGWYRPVQVRSLASHEMRLLLTARSQFVSMRTAISNQIRGILKTFGVVLGAGKRRKFESGVEAADPGLCGVKATVEALLQTWKHLTEQIRLLDRRIETEARQDPVCRLLMTAPGVGTITAVSFRTAVDDPTRFRRVGDVGPFLGLVPIKYQSGEVDRSGRISKHGNRQTRSMLYEAAGVILFRIQASSTLKSWAEQLSRRVGPRKATVALARKLAVVLLSMWRSGCSFEAAAR

SEQ ID NO: 109199 - protein, 372 aa, unidentified
MLSIGIDVSKGKSTVCGMKPGGEIVYTPFEVQHTREGMSELVSLLRGSGEEVRVVLESTGSYHCPVVAALLENGIFVSVVNSLRMKRFCSQSIRRVKTDQIDAMQIALYGLAYWQELQPTRLPENTYRELQLLARQYYQMTSLLIKAKVDFNALCDQVLPGMQELMSDHAGRHKLSDFVLRYHHTAHILKMGETRFRKDYCKWAEKKTQIVITEAIRVLHTVEASRDAILTQMQALAKTLPEYSLVREMPCIGDTLAPRLIAEIGDVRRFHSKRALIAYAGIDAPPYQSGKFCANNRHISKRGNRYLRKTGYEVMQSYVMHKPANDPIFTFIEKKRGEGKSGKLAMVAGLNKFLRVYYGKVTELYRSLPAIE

SEQ ID NO: 109200 - protein, 350 aa, unidentified
MNVKHYIGFDVHKKSISYCVKLADGTIVEEGKLRANRVSLREWAGKRLEAWQGAMEATLFSSWIYDTLKPFASKLEMGHPAMMKAISAAKKKSDKLDARKVADLLRCDLLPVCWVAPPEIRELRRMLRYRNLVVRQAVQMKNKISGLLMESGAEYSQRRLHGERYFAELMEKLEEIPESVKDLLKLSRGSLETFQATQQQLLKQLQKHRKLAKRVKLLRSIPAVGEVTALSWALEIGEPQRFASIADAVSYCGLTSALISSADKQQRGPISKQRNPHLQTVLIEAAKLAPRWNRQLAALHKKEKQRGDSNQATIAVARKLVAYLLAVDKSGKEFEVRTPLEPGSEIQPAA

SEQ ID NO: 109201 - protein, 412 aa, unidentified
MVEVLHPRCAGIDISKKDAKVCVRVQGTGGRKTSETVSTFGSLTRQVLQLREYLIGAKVTCVVMEATSDYWKPFYYLLQDAPFEVMLVNAHQARNMPGRKTDVKDAVWLADLAAHGLLNASFVPPAPIRALRDLTRARATVMRERSREINRLEKILEDTGIKLSAMISDLTGVSGRAMLQAMVDGQRDPQVLADLADHRLRATREELVDALTGRFTEHHAFMVGLHLDAIDQATARAGRLDERIEEAMTPFRDARDHLTTVPGISKTTAEVIIAETGGDMTRFPTAGHLASWAGLAPGHNESAGKRKSSRTRPGNVYLHAVLGTAVMSIARSNKTFLAARYRRITARRGPLRANVAVQRTILTAVWHMLTEDIDFNDLGPDHYDHRRPDRAVSRAVRTLETNGYTVTLQRAA

SEQ ID NO: 109202 - protein, 330 aa, unidentified
MKKYNYFFGVDISKKTVDITCIVNGEMIHWQFTNDPDGMQHLLQWLKELNISFEQTVFCMEATGLYCFPLTEFLTINEIDIWIEHAAQIKKSTALSRGKNDKVDSKRIAVYATKNLDRLRLWRPVGATLQKIKHLASMRERLVDTKKRLITPIKEFEDLGNLVMAKLLSKTIRSSLAALDKDLKNTEAKIIEIINEDDKLKQLYKLITSVVGIGFVTAVNLLIYTNGFTVMKDARKLACYCGVAPFEYSSGSSIRGRTKVHFMANKKLKCNLHMASLSAVKLDADLKTYYEKKVAEGKSKLSVLNAVKNKLLARVVAVVNKQEVYVKKVA

SEQ ID NO: 109203 - protein, 410 aa, unidentified
MEVLIACCAGLDVHKDSVEACVRKRETEGKLSPQIRHWGTTTRELMAMADWFKAEGVTHVAMESTGVYWKPIFNVLETNFEVLLVNARSIKHVPGRKTDVQDCQWIAQLLQHGLLKGSFIPPRWQRELRDLTRQRAQVIGEHSRITNRIQKVLEDANVKLASVASDVVGVSGRRMLDAIIAGVDDPQQLADLARRSLRSKIPQLQEALYGRISEHHRWMLRLLRDQLLASEQFLARLDERIGELTRPQQPVLEKLDAIPGIDRRVAEVLMAEVGPDMSPFPSDAHLASWAGLCPGNDESAGKKRSGKTTKGSRWLRQALVQAAWAASHKKDSYFQAHARNLMRRRGRKRGLVAVAHSLLLVIYHILQRGSDYHDLGGDFLDRLRADHLVRYHMQRLQQLGLTVNVAPATA

SEQ ID NO: 109204 - protein, 412 aa, unidentified
MPYTIAGIDVHKKVLMVVVAELDTTEADLRFERRRLGATTSELLAVVAWLQQRTAQEVVMESTAQYWKPVWLALERHFQLHLAQAQSNRAPGGRKSDFRDAERLVRRLVADELFLSYVPEPEQRLWRTLTRSKVQLTRERARLQNQIEALLEEGRIKLSSLVSDLLGASGKRILHALSDGQHDGSILAQLGDRRLQASEQALADALNGDLAPLHCEILKLFLKRVELVDEQIAKLDQLAADQLQAHQKAVARLAVVPGLGVNSAQQILAEIGPQAQAFPSPEQLCSWVGVCPGRNESAEHNRSGRCAKGNRSLRRILCQGAQAAVKKNGSYLQTLFRRLMPRLGYLKAIWAIAHRLCQIVWKILHDGAEFIEHGQLGTPEQQKRRIRRHLAALRKLGYTVPLNPIASAPVAG

SEQ ID NO: 109205 - protein, 356 aa, unidentified
MPKIKQLDFAGQTIFCGIDVHKKSWRVNIRNEQFELEDYTQDPCDELLMKRLHKNYPGASFQVAYEAGFSGFGLMRSLTSSGIHCIVVNPADIPSTDRDKKRKTDQIDARKISRHLSKSTLRPIHVPDLEMEHARTLVRQRSKLVRDQTRCKNRVWHLMMFSGLKLNMDKPKDYWSRRFVESIRKLPCPTPYLRQALDTALEEYLLIRKLVGSTTIKIRALSEQKTLVNTQKLIQGIPGIGLLNSMIIITELQDMKRFKTLDKLCSYAGIVPDTGSSGENNIIKGITHRSNLHLRTAIVESSWVIIRKDPAMLYLYKKYCTVMVPNKAIIKIARHLLSRIRYVWTNQVEYEVGLVG

SEQ ID NO: 109206 - protein, 371 aa, unidentified
MKEFIKYVGMDVHKETIAVSVAPCNAAEVRFVGEISNTPQAIEKLVKQLRRDGADVKFCYEAGPCGYGIHRQLMELGWECQVVAPSLIPKKAGDRVKTDRRDSLMLARLYRAGELTAVWVPDGAQEALRDLTRAREDMKHLQRQAKQRLLAFLLRHGRSYSGKSNWTQAHYRWLEEMRFEQPVQQIVFQEYVETVKALSKRVDALDGQIESAASESVFWPVVQGLMALRGVSLLTATTIVAEIGDLRRFASAPQLMAYLGVVPSEHSSGGTKSRGGITKTGNGHVRRVLVEAAWTYRYPARKTAALQRRAEHAPEVVQEIAWKGQKRMCGRYKLLEGRGKLKVQVCTAIARELTGFIWAIGQALLQPPVKA

SEQ ID NO: 109207 - protein, 368 aa, unidentified
MHELITGFVGLDVHAESTAIALAEAGRAAPRFVGTVGPRTSELTKALGKLGELRSLCVVYEAGPCGYALARELTSLGYRCEVVAPSRIPRRPGERIKTDRRDALKLAGLARAGELVPVTIPDARDEAIRDLSRARVDAVRARLKARQQLKALMLRHGRRYSGKTSWSAAHERYLATMSFAYPAQDIAFNEYRQAISEGEARVQRLSESLRQEVEHWRMHSLVSAVMSLRGLDLVAATTVVAELGDLRRFAHPRQLMGYLGLVPSEHTSGSRRRLGTITKTGNTHVRRVLVEAAWNYRYPARISRPLQLRQERQPPEIRAIAWRAQLRLNHRYRRLKARGLQHNKICVALARELAAFVWDVGRHVVPST

SEQ ID NO: 109208 - protein, 341 aa, unidentified
MYYIGLDVHKKTISYCVKDASGQVHREGTVGATRNELDCWIRTLPQPRIMAMEATIFTGWIYDHLLPHAEQVKVAHPLMLRAIAAAKKKNDRIDAGKIADCLRCDFLPECHMASTEIRDRRRTLRYRHLLVRQMVQMKNRISGLLMETGVSHNKQRLHKVGYFGELLSNHQEVQENIRPLLRLSRETIVRCQRTEYALVSSLQRDPLLAARLKRLRSVPGVGPITALTWALEVGDVSRFRSVKQAISYCGLCGEEKSSADKVLRTPISKQRNKHIQSVLVEAAKLAPRQNHELALIHEREKQKGNRNRATLAVARKMVGYLLAVDRREREFVPAEGRGTAA

SEQ ID NO: 109209 - protein, 341 aa, unidentified
MEQATTIGLDIAKHVFQLHGADAAGHVLFRKRITRVKLLGFLAAQTRCVVAMEACAGAHYWAREIAKLGHHVRLIAPAYVKPFIKRQKNDAADAEAICEAAQRPSMRFVPVKTEEQQANGIVFRARDLLVRQRTQCVNALRGHLMEYGYVFPKGITHVEALVALVEDLQSSLPDSVRVILKLLVDTFTALEAQIAVLDAEINQRSKSDPTARRLMTIPGVGPITSTAITALVPAAEGFPAGRDFAAWLGLTPLQKSTGGKQKLGAVSKRGERTIRRLLIIGASAVVQQASRRGAPKGSWLAQMLARKPKMLVTVALANKMARIIWALLVKGGTYRTPAVAA

SEQ ID NO: 109210 - protein, 352 aa, unidentified
MTQLSNTFPRTIGMDLGISKSAYCAVGPDRTRVEEGLIKTTKEAMENYLRSQPASRVVIEASSPSHWVKAVAESCGHEVVVSNPREFRLISESHRKTDRKDARILADFGQIRPDLLHPVNLRGQESQLARATLALRDHVVKQRTRIINLIRSQVRNLGESLDGCKAATFHKTAPERIPSVLEPIVAPLLEVLIKLTESIASYDKQVSRLCKQHEATSILLQVQGVGPVTALSFVTTIEDPARFARSRDVGAYVGLVPKTRSSGSSSPELRISKRGDRQLRRLLVIAATYVLGPRSEESDLKRYGEKIRARGGQTSRAKARIAVARKLSVLLHRLWITGEDYEPLRNSQKSAA

SEQ ID NO: 109211 - protein, 340 aa, unidentified
MDHVAIDLGGINSQVCVMSSVGELLLERKVARRKLGDFLARREASVVVLETCSEAMAVADAAKACGHDVRVVPATLVRSLGVGARGIKTDERDARALCIASCRVELRSVHVPSPRARELKHLLGSRDALIQARTQLCNHVKGFLRQKLLRVRATPSKLPEATRLLLSDKPGGVPGYIERVLLGLEATTAQLAEANKEAARLAKSDPVCVRLMTVPGVGPITSLRFVSTVDDPTRFPDVHRLQSYLGVTPGENSSSMTVRRTGITKAGCSSLRWVLVEAAWCLCRLRPEDPAVLWCKEIAKRRGKTVAIVALARKLIGILFAIWRDGTTYEAHRGARALAG

SEQ ID NO: 109212 - protein, 402 aa, unidentified
MNAVGIDVSKGKSMVAALRPMGEVALLPQEFLHTEVGLEQMAYAIIALGEDTRVIMEATGRYHEPVAAALHEYGIYVCVLNPLFIKQSGGGSIRKVKTDKADAMKIAKYGLDNWVDLREYTPMDTVRQQLKLCSRQYNLYMKTVVSLQNNLISLTDKTFPGVNELFSSPERADGHQKWVDFVMTFYHCDCICRVSENAFAERYQKWCKRKGYHFSAEKAQDVYLGSCGHFTTLPKNDNTKLLITTAAQQLLAGKMTLAALRTEMTRLAKQLPEYDIVRAMYGVGETTAVQLMAEIGDVRRFPRRSSIVGFAGVDPAVDQSGKHSAKSVPTTKRGSPHLRKTLYQIVCTYLKKSPVDEPVYQFLDKKRSEGKPYFVYMTAAQNKFLRIYYASVKAYLESLEHD

SEQ ID NO: 109213 - protein, 402 aa, unidentified
MNAVGIDVSKGKSMVAIMRPFGEIVSAPFEIKHTASDIHSLVELINSVEGESRIVMEHTGRYYEVLAHQLSEANLFVSAINPKLIKDFDNDSLRKVKSDKADAVKIARYALDKWQNLKQYNVMDELRNQLKTMNRQFGFYMKHKTAMKNNLIGILDQTYPGVNTYFDSPARSDGSQKWVDFASTYWHVDCVRKMSLNAFIDHYQNWCKRKKYNFSQSKAEEIYGKAKELVPVLPKDAITKLIIKQAVDQLNSASTTVESLRTLMNETASKLPEYPVVMAMKGVGTSLGPQLMAEIGNVSRFTHKSAITAFAGVDPGVNESGTYEQKSVPTSKRGSADLRKTLFQVMDVLIKTHPEDDPVYQFLDKKRAQGKPYYVYMTAGANKFLRIYYGRVKEYLSSLPES

SEQ ID NO: 109214 - protein, 412 aa, unidentified
MDVYCGIDWAEDHHDIALADRDGKLLARRRIGDDAAGLAQLLELLAGHGDSAGDLIPVAIETPRGLLVACLRATGRKIYPINPMAVARYRDRHSVAGKKSDHGDSVVLANVLRTDIGMHRPLPDDSELAQAIAVLARAQQDAVWDRTTAHNKLRSHLREYFPGFLVAFADARGGITRPEARAVLAAAPTPAAAAALTLTQLRALLKKAGRSRGIDIEATRLRDAFRIPQMRQPRLVEDAMGRQAIALLRQLDAACVAADDLEHAVTESFNLHPDAGIITSFPGLGILTGARVLAEIGDDRTRFSDAKGLKAYAGAAPITRASGKITSVTFRRVKNNRLCAAGYSWAFSALTASPGARAHYDRRKDAGDRHAAAQRNLFGRLLGCLHHCLATDQHYDEHTAFPSPAKKIRKAA

SEQ ID NO: 109215 - protein, 315 aa, unidentified
MLYDGIKGRIKTRNIQNNRHSVENILRWLRLQHCSPEDVHVVMEATGVYHERLATELHDAGFRFSLANPHRSREFARGMGIMTKTDKVDAYMLACYAFLKKPHRWEPPAPEIRYLGALLRRRDVLLGDALREENRLEKYLSTDTPADIISSCRRMAQLLREEVSNIERQIKAHIKASPALRRDYTLLTSIKSVGPQLGMHMLVVLRSHNFVSAEQAAAFLGVVPIEKRSGTSVRSRPRMSKIGPPQLRAKLYMSALCGKIYNKRMRNIYDEMCLRGKPKMVAIGALMRKLVHWCYGVLKTGTVFNDEDLKPVLST

SEQ ID NO: 109216 - protein, 310 aa, unidentified
MATKVFVGVDVCKDNLDVAIGAAKDIDTFTNDQKGVDALVKKLSRIHPALTVFESTGGYELLAASCCAEAGLPVVIVNPRQVRDFAKSAGILAKTDAIDARVIAQFAEAVKPEVRELKDRQTSELTALVTRRRQIIEMIVAERNRLRLANKRNKKDIEEHIRWLQKRLDKIETDIGKMIQSSPIWRCKDDILQSVPGIGPVTSASLICDLPELGVLSPKKIAMLVGLAPLNCDSGKYKGRRRIWGGRACVRSGLYMATMAAIRCNPAIKGFYQRLTAAGKCHKVAATACMRKLLIIVNAMLRDQTLWQQN

SEQ ID NO: 109217 - protein, 424 aa, unidentified
MKVTYQTCCGVDVHKSFLVATIVKTTGGIEPSYQKKRFSTFNNSILEFKQWLLDNDCHDVCMESTGKYWVPVFNLLEDEINVVIANPKWVKAVKGNKDDTKDSKWIGDLFRLGLVKGSYIPCKKVRILREYTRYRYKLVSCRSSEKNRYQNALTVCNVALDSVVSDIFGKSSTSIIDYLLEQSGTSINHEEIASKLLRSLKSKEDAVIESVEGYQMTDAQKYRMRLVRAHMDYITAEINDVDKMIENMISSNPDFENAVQFLCTIPGVKRDSAITIISEIGTDMSQFSSSKRLCCWAGLTPGSNESAGKKKSVRITRAGVYLKPALVQCAHAAVKSDKSPYYKKKYESLVKRRGKKRAIIAIARMILTAIYQMLSTGEQWNPSDLYKIDMPEALVEKQKAKAIKQAKKLLQREGLLPPDEPLAS

SEQ ID NO: 109218 - protein, 351 aa, unidentified
MPRRSTVRAVTTIGIDMGKNTLHIVGLDSLGAIVLRERVSRGRITSRLANLPPCLIGIEAGMATHYVARELAALGHDVKQVPPAYAKPFRQGHKNDFRDAHAVAEAVQRPTTRFVPAKTNEQLDLQALHRVRSRLVSQRTAVINQIRGFLLERGIIVRQGPRFLRHLLSDILARRTDVLSPRMVRIVSDLAGDWRQLDERIETVTDEIETLAKSDDSCRRVMTVPGIGPIISSAMVAAIGSGAAFARGRDYSAWLGLVPKQMSTGDRTILGHISKRGNSYLRMLFIQAARVILVRPANWPKHGFGAWLLRAIQRLHPNVLVAALANKLARIAWTVLTQERSYEARITKAAA

SEQ ID NO: 109219 - protein, 316 aa, unidentified
MTDNSMICAGIDVGKSHLDIALHPGKARLRVTYDTAGLKALDAFLREHDVSRIGLEASGGYEWRLLAHLRAGKRPAARLQPAQLRFFAKSRLKRAKNDRLDAVLIALFTASLEQLPALPDARFDKLAAELTYLEQIEQQIALVKTSAETALSEAIKRRHLREVARLETCRKAHLLRLEKTVRDDCDLAQRLDLLISIKGIGLRSALCLIIRLPELGHASRAEIAALAGVAPYDDDSGKYHGRRRIPGGRERLRKSLFMCAFTATRHNPDLAAFYTRLRQSGKEHLRAVIAVARKLIVLANTILFRKTEWTPQHRKN

SEQ ID NO: 109220 - protein, 345 aa, unidentified
MMVIGIDAHKRSHTAVSVDDMGRQGFVKTVGTTTQDHLRLLKWAVGLAGERLWAIEDCRHLTRRLERDLVAAGESVVRVSPKLMARVRDSARSYGKSDPIDDLAVARAALREPDLPIARLDGIEREIRLLVDHREDLVAERTRIIARLRWHLHELDPSWTAPTKLERHSAFDKVKAHLSGHNDGAMVRRLALRLVEHLRLLTDEINELTAEITVRVTTIAPSLLAIVGCGALSAAKIVGETAHAGRFRSKDAYARHNGTAPLPVWSSNKQRHRLSRTGNRQLNAALHRIALTQARCYQPARELLERRKNGGDGGMEGLRVLKRRLSDVVYRAMLTDETVPLRRTA

SEQ ID NO: 109221 - protein, 311 aa, unidentified
MTSQFAGIDVGKDSLTGNLYGQDAVKEYPNTSRGIQRLSTWLQKHEVHLVVMEATGGYEKMASLKLERAGLAVAVVNPTYVRRFAQGMGTLAKTDPIDARMIAWYASVKQPKPRPPRSEAAEALSACVDRRDQLVAMRTMEKNRLGSAAAYVQPSITAHIESIDEQIKQMEVEIDHLIDQEEEWQSYIACMTSCKGVGKVTAVTLLAEMPELGHEKREQIAALAGVAPMNRDSGRKSGRRKTRGGRSKLRRVLFMAAMSAAKFNPVIHAFYQRLIEKGKPKSVVMVACMHKLLTILNAMLRKNEMWRPDFA

SEQ ID NO: 109222 - protein, 332 aa, unidentified
MKGNSRMSRIQGKTSSQQLTTSQVYVGIDVSKSYLDVYVHPSGIARRVTNDKSGLASLARFLRPHAPETIVLEATGRYHRLCHRHLHDDGFCVAVMNPYRTRKFSDVLGQLAKTDEIDARMLAQFGAMVQPAASTPPAPAIAALRELLTARRQAGAEKTALQHQLNEVESNLVKSQIRARLKMCERHQVVLEKAIRTTIQQHTELKSRFDILTSIPGIALITAATLIAELDELGAANASQIAALVGVAPMNCDSGIWRGQRRIRGGRHNVRTALYMAALAASRASPDMARFYGRLRKNGKPFKVAITAVMRKLAILANTLITENRKWTLNHT

SEQ ID NO: 109223 - protein, 351 aa, unidentified
MSRSSSSSAIATLGIALGKNSFHLIGQDERGAIVLRIKLSRPQLMQRLANIPPCLIGMEACAGAHHIGRQLQALGHDMRLIPAQYVKPFLKGHKNDYRDAEAIAEAVQRPTMSFVAIKTPDQMDLLALHRVRSRLVSQRTGVTNQIRGFLLERGITVRQGLVPLRQALPGILGSYSDALSLRIVHLIADLAEDWRQLDARIADVSAEIEALAAQDEHCQRLMSVPGVGPIISSAVVAAIGTGSGFKQGRDFGAWLGLVPKQEATGDRTILGKISKRGNKYLRTLFVQAAHIVLVRRPHGARLGLWPWIETAGRRLHRNMLVIALANKLARIAWAVLARGHTYQPRSASHAM

SEQ ID NO: 109224 - protein, 471 aa, unidentified
MTIRRLVGIDLGIASAPTVRVLDESGQIIAKRKAWPTAESLGEVETAALAGTAAGTRLEVVIEPTGPAWLAIAVFFSDRGHVVHRVSSAKASDLRKFLSRHTKTNGIDADTLARLPLIDPAGLRALALPGVERAALDRRVRACDRLTQEASRHKVRIKDLVRQLLPMTPLSGDLGVADLAVLERWADPNDLLKAGAKRVTTTIAKASNNHQGTDRAAEWISAAEASLELYGTNSAVAFADLAAEVATEVRLLRAVQSELAGHAAEREAAYRWVDPAGLARSLPGLAEVGGANVVAIMGDPARFERGKQFRAFTGLVARTSQTGDTNRKGQPMSKAGSSLLRTTFVRAADHARKQDPQLARIYHVQMVERGKDHLGALCVVAANLAERTWVVMRRGMPYVICDTNGRPVTPTEAKAIIADHFTVPAEVRARRRSKKMGKAPQAARTGRQKRGDLPHQPSFTATLDQVNRRTP

SEQ ID NO: 109225 - protein, 324 aa, unidentified
MSSHEIVGIDVAARKLVMIGERLALAEYENTAAGRSKLAKALSRSPRPVRVVLEATGIYFLDLACELAAAGIAVMVVNPKATHHFAEAILQRRKNDPVDAAMLREFGRRMDFVPWQPPRHELFAFRALTREAQALSKAVAAAKNRLHAITATQLAPDTLIRALERQIAQNQALVDELVAAALAETKTNRELARLVARTDSAPGFAAKAAVLVVGELAVLPPMTARQWVAQAGLDVREECSGTSLARRPRLSKRGNKRLREALFYPALTAARCCPLAGAFVERLVAAGKTRLQAIVALMRKLLHGLHAMWRNDEDFDAEKLFAPA

SEQ ID NO: 109226 - protein, 320 aa, unidentified
MQIPFALLNIGADVAKDTIVVACSEGGFPVREIANQRAAVLTFLKSLPAGCRIGVESTGTYHELFAEAAHQLGFLVFVLNPKDTRHYAKAVGLRGKTDRVDAALIARMIAHEHTKLHPWTPPTAQQREIARLIKRRATLIGLREAVEMSLHELGGFADELKALRRRFNQLIARLDLRVQALVEANPERKQNFARMCTISGVGPVVGTALVNTLERVPVKSADAFVAFTGLDPRPDDSGQHRGKRRLSKRGPAELRRLLYLAALSAVKTKPWRSLYEHYRARGLSSTAALVILARRIARTAWSIYTHKTEFDPARLTRSLT

SEQ ID NO: 109227 - protein, 459 aa, unidentified
MARKKRAPEEIPDQEFEQVFERVCAIDVAKEFGQVCVRTPRADGQHASRVFEVDAITGDILNLGELLLEQGIEMITLESTSDYWRIFYYLLEGCGLRVQLVNARDVKHVPGRPKSDKHDCVWLAKLTERGMLRPSFVPPGEIRVLRDYTRTRVDLTRDRTRHWQRLEKLLEDALIKVTTVASKITAVSVRDMVDALIRGERDPEALADLARGVMRDKRRDLVRALDGRFDEHHAELATILLGQIDSLTAEIDRLTTRIEQLVDQLPTPEHPVDPDRGATPAPSHDNPQPATAPSQPRPALQRLAEIPGINLDAAQVILAEIGPDISRFPTPEHLCSWARLTPQLIQSGNKRRGGKTSKGNPYLKGALGTAAASASRTNTFLGERYRRIVKRRGKGKALVAVARSILVIIWHLLANPDADYQDLGANFYDSRIDKDRRKRQLIQQLEALGLQVTLTPAAA

SEQ ID NO: 109228 - protein, 348 aa, unidentified
MAHFVGLDVSVKETSVCVVDDVGKVILEQKVPTEPADIIALLSSLDATFSRIGIEAGPLSQWLANALTAADLPVICVETRHMKALLTAQQINKTDRNDARGIAQMMRVGLFKPVHVKTLVAQEKRMLLTSRKLLQRKLLDLESDLRGTLRKFGLKVGVVSRSRYEARVRELVGGFPRLAAIAEPLLKVRQVMRQQLAVLHKMLLDTVRDDPVCRRLMTAPGVGAVVALTYRATVDQPQRFVHSRAVGAHVGLTPKRYQSGEIDYDGGVSKCGDALLRTMLYEAAQVLLTHGSKWSWLKAWGVRVAQRRGMRRAIVAVARRLAVVLHRMWVDGSEFRWRKDSAAVPTAA

SEQ ID NO: 109229 - protein, 350 aa, unidentified
MRRPKDKLIAGIDLHGNNLVIGVMNQDGKRLMHRKLDCQLEQVLDFLKPHKAQLQSMAVESTFNWYWLVDGLQAQGYPIDLANPAQIEQYSGIKHADDKHDAFHLAELQRLNILPKAHIYDAELRPVRDLLRRRTNLVHQRTALFLSFKSLYTRTTGQPMPLSQLKSMEPKEGKDLYEHPANQLIAQVQLEHIEALDRSISRIEKAVLGCARQIALYQKLLTLPGVGKILGMTITMEVGDIARFRTDGDFASYCRTVDSRRLSNGKQKGQNNPKCGNKYLSWAFVEAANFGKRSDEHCRRWYDRKKARTSTVLATKALACKLAKAAWHVMAKETDYDARRMFPELALKQP

SEQ ID NO: 109230 - protein, 345 aa, unidentified
MMVTLGTDAHKRSHTIVAVDTAGAEIGSVTVAATQEGHLRAVQWAAQFAHRQWAIEDCRALSRRLEGDLLGVGERVVRVPPKMMARDRATARQSGKSDPIDAAAVGRAALREPDLPVAQLDGPSREVRLLVDYRETLVHQRTRLQNQLRWRLHELEPGYDPPPGSLNRYCTLDAIDELVTTHESIVADLARRETARIRELTREINQLERDITRRVTDLAPSLIAMPGCGALTAGKLVGEAADITRFKTRDTYAMWAGVAPIPVWSANNTRYRLNRGGNRQTNAALHRIAITQARIHPDAQAFLKRRIETGSTKREALRLLKRKLANVVYRNLLADTQTTPLAQAA

SEQ ID NO: 109231 - protein, 361 aa, unidentified
MHATTVAVDLAKSVFQIAIADDKWKVIEQQRLTRSQFERWFHNRDVGLVVMEACGSAHHWGRWLNGLGIEVKLLPAAYIRAYVKRNKTDAADACALLEAARCADIVPVRVKSVEQQALQGLHRIRSRWMGTRTSRINTLRGFCREFGLVVPQGARTGVEAMSRALADPNAAIPLLIRESMKLLIEEIRLLELRIAQLERELTSLARQSPACTELLTIPGIGLLTATAMVAATGGSVSHFKDARHFASWFGLTPKEFSSGSTRKLGRISKKGDRYLRMLLTHGARAVLRAAELARRAGKPLDGLRTWATEIQARAHHNKAACALANKLARVCYAVLRDHVPFGSPQPHQEKKLNRTAFAIAA

SEQ ID NO: 109232 - protein, 325 aa, unidentified
MHITTLGIDLAKSVFQLHGVDARGRAVLSRRVKRDQLVHTVASLPPCVIGMEACGSAQHWGRAFEPLGHTVKLMHPKYVKPYVKTNKNDGRDAEAICEAVTRPTRRCVSIKTVEQADLQAVHRTRLLFVKHRTAVINQIRGLLAEYGLVIAPSPGKVRPALVRFLDDTASGLTVFARDTFSELYAQLTELDARIERVTQRVERVYRAHPVCQKLAAVPGIGPLTATALVATVGRPQAFHNGRHLAAWLGLVPRQYFSGGKERLGGISKRGSRYVRTLLIHGARAVVQRAKRRTDTQGRWLCALNHHNGTNVAAAAFFFTPYEQTG

SEQ ID NO: 109233 - protein, 424 aa, unidentified
MHESSKTLFVGLDVHKDAIAVAYASEERGAEVVSLGSIGTRQSDLDTLIRKLQAKGATLVFVYEAGPCGYWLYRYLTRKGLSCHVVAPSLIPRKPGDRVKTDRRDAITLARLMRSGDLSSIYVPGIEDEALRDLSRGREAAMEDLKRSKRRLKSFLLRQDIRYEGRASWNAAHLRWLSEVVCPTAPQQIVFQEYVRAITEQQERLQRLERELHEAVTGWRLYPVVEAIQALRGVELTGAVILMTELGDLTRFETPRQLMNYLGLTPSEHSSGARRRQGGITKAGNSHARRALVEGAWAYRYPAKVSRHLQLRLEKLPAEVQAIGWKAQVRLCKRYRQLTVRGKHVNQVVVAIAREMAAFAWAIARPCQWPPDGRAPRGRRSPGTLIMISSHRRRRGPGIGAIFDRVMRPQPSPLERSRRRDGHQ

SEQ ID NO: 109234 - protein, 354 aa, unidentified
MQQFVGIDWATRRARWCAVTRAGALIDEDWSPADEDGLASMVARLGPDAVACLEMMSGAAWVRDQLQAGGWTVQIADARKAKAVGSLAAKTDKLDARVLAELARRDLVPQVHVPTFADRELKERLGRRMHMVRLRTAAINRAHGVLSQFGVTLAFKRLREPDREELLIARGIPEVWRRSIAEAVAVVAMLNQRLIPLEQELQPLARADPRVQLLITIPGVGDLLGLTIASEIGDISRFPSARKLVGYSGLTPRVYQSGQKARTGKLSKSGSTMLRWAAIEAAQQAWRPNNPWNQLYLDVKQRCGGKGNPAKAAVARKVLIATWHVLALQQPFNPSRPRGASAPVPANSSCVLAD

SEQ ID NO: 109235 - protein, 429 aa, unidentified
MNYNTQNAKIASITEKTLIVGIDVGSETHYARAFSWRNYEYSKKPFAFSNDEDGFASFKAWMDDIAEKHEMEKVIPGMEPTGHYWLNLGAYLQGQGMRPVHVNPHHVKKSKELDDNNPNKNDRKDPKTIAGLVNEGRFSYPYIPTGIYAEIRNLSNLRIQTQEEIIRIKNRIARWFSIYFPEIKDVYRNPDAVSGLMVIKQAPLPCDIKGLGVDGVNKIWRDARLKGAGIKRAKTLVTAAEHSIGNTEAPRSARKEIRNLLNDYEIYKSRMDELMEEIEELLSEIPYIDKLMGICGIGIKTVSCFIAEVGDIERFDNPKQVQKLAGYAIVADSSGKHNGESRISHRGRKRLRYALYEAAISVIGKNKEFKEIHHYYRTREKNPLKKMQSVIAVACKLIRIFYTILTKGIDYDGQKMLRDIVRPGMQSAA

SEQ ID NO: 109236 - protein, 397 aa, unidentified
MYIVGIDIAKRKHEAAVIDGEGAVIIKPFSFTNNCSGYNRLLAMLAKAKLPLDEVSFAMEATGHYWLALFTRLQKEGFRVQVINPVQTNSIRSFYIRQAKTDPRDALLIAEVIRFGHFSESTLHPENIYELRELCRGRHAIVSMQADVKRKVVALLDQVFPEYETAFANMFGDTSMAILQTCPTPKELSEMPLEELCHLIEVSSHKRFRMAKARELQELARNSFGFAMAGDVFSTMIRLYAKHLDFLKQQVREMDRKIAEIMETLDTPITTITGIGPTLGAYILSEIGDISRFSSAAKLAAYAGIDPTMRQSGEYNGVRNRMSKRGSPYLRHAIWLAASSAVLHDPALKLYFQKKRDEGKPYMASVGHACRKMVSIIYAVMRDNKAYTPYIPNEISA

SEQ ID NO: 109237 - protein, 347 aa, unidentified
MLHVGLDLSRKRLDICAISDQGELVDELAAPFDEEGLCRLSERMAEKHAGRVHAVVESMNGARFVHDTLEAQGWDVLVADAQRVKGLAPLACKTDKIDARVLAELSFRDLVPAIWLPDPQVRRERELARFRLHLVRHRSSLKNRIHSTLITFGKPCPVSDLFGVAGRKLLERLDVPEPWRENVEASVVLIDQLDRQIDAVASELKYVGADHPYVPLLVSAPGVGWLVGFSIACEIGDISRFSSPTKLCGYTGLCPRVIQSGESDRRGPISKHGPKYLRWALFEAALNACDHPLYKERYERTKKRRGRQRGPKVAQIELSRKLAEAIWHMLTRNQPFAPAGAPFRLAA

SEQ ID NO: 109238 - protein, 317 aa, unidentified
MLCAGIDVSKPHLDLALVSTTAKPTRLRFPNTPEGRQALLAALAHHRPTWVALEPTGAYHLPLLQLLAEKGLQVALVNPYHLAAFRRATGERHKTDRQDALLLARYAQVCGESLRAYTLPPKALQELKALVGYREDLAQRERAILNQLEAARWAGSEEILVLLQRELACVEGLLGEVEARIQALLAALPEAEVLMGLPGVGPQVAAAVLALLPPHLWGRAKAAAAYAGLIPEREESGKSLERSRLSRKGPPLLRRKLFMGALVAVRHDPEMGAFYRRLLSRGKRKKQALVAVAHKLLRRMMGRLREYYAGQSLQGVA

SEQ ID NO: 109239 - protein, 475 aa, unidentified
MSRVGEEFEDVLLMSLSGSSPIDIEEDVVSKGSGLSRGDKRRNARLAELRRLVPVEHAIVGIDLADRKQAVVVTDHDSRVLDRTTVKATAWDLGPVLDWAHRVGRKHGFAGVTVGCEPTGHSWMVLNQVAAQRDMPLVCVHTMLVSHAREAEDYTRDKSDDKDAMLIARLVAGLHCYAPERADETWARLRQLGARRERLITEATACVAQLRDLLKCAWPGVLEAAADPFESSNWCAALAVVLERCDGRPQRLSRGGLARFEAAVVRELGRWGGQRRRRAIIEAVHTALVDPRAVWTQRRGALQRACYVLADWRLAKTRLAEVESRMVEVLDELGLTAWVTSIPGVSAIGAAAMLADTGDPTRFDSPRAVVKHAGLAPRDNSSATYAGRCRISRRGRPRLRLAAWRAAWGALPHNPVMAARYRYLTTRQHNRLTDGQARAAIAAALLRWLHVVVTQRVRWDAAIAGARVDTLPAAA

SEQ ID NO: 109240 - protein, 417 aa, unidentified
MITIGIDPHSRTHSAAALDEGGRVLAEITVGSDAGELDRLVRWIKGVGPERIVAIEGARGFGLALCRRVLAAGETVLDVAPALTASERRSSRRPGKDDRGDAVAVARVALREQGLPRASAEVGGSDLKLLVDARDQLVAEATRTRNRLHALLLTIAPGYHEQIRDLTTSAALLVARRLASRARGTDRVRSSLACSAITRLRSLSGEIGVLEREITFLLDEAAPANLLSICGVGPLVAAKILGEVRDVGRFSSAAAFASYSGTAPIPASSGTIIRHRLHRGGNRQLNRALHTVALTQARRDDRAKLFLTRKRAEGKTPREARRALKRHLASAVYRALLLDAEEVRSRSHAGRGDSELLRYRAGSGVQPNLLWPGRDSRCLTGAATMVVVHATSPPERAIPSGPVTDLGRDSLRGRPSE

SEQ ID NO: 109241 - protein, 379 aa, unidentified
MHAITLHLGLDVHKDSITIAIAQAGLKGEIRVFGTITHDLHALEKALTRIRKAHRGAPLEVAYEAGPCGFGIARRLQQLAVPCLVAAPSLIPKQPGAPFKTDQRDARSIARLLRAGELTGVYVPEPTDEAIRDLCRARTDAVDDLRRCRLRLKSFLLRHSYRYHGKANWSQPHMRYLRELVLPHPAMKAILEEYLQGIDAAHQRVQRIEASMLTLLETWRLKPAVHALMTFRGFQLVAAMITVSELGDIHRFAHPRQLMTYLGLVSVEHSSGPRQHLGAISRCGNGHARWLLVECAEHYLAPPKVSKELSRRQEGQPPEIRALSWKAQNRLHLRFTRLLARRLQRNKAKVAVARELCGFIWALLRTQDCYRQATGGAAS

SEQ ID NO: 109242 - protein, 466 aa, unidentified
MTPHKDYCLDPRPPATPTLPQSPVLADALQVCHPHAAGIDIGEAEHWVAVPPGCDPQPVRRFGTFTVDLDALADWLIDCGVTTVAMESTGVYWIPLFELLEARGVQVLLIDPRQAKRAPGRPKTDRLDCKWLQRLHAYGLLAGAFRPEDQVCVLRSYLRHRQMLLTSAAHHIQHMHKALQQMNLKLPQVVSDLTGVTGMAILKAIIAGERDPVTLAKLRNPHCHHDEDDIAKALQGTWRAEHLFALQQAVALYDFSHQQLALCDQQITSHLATCADQSEGKPLPPKARRHKKTNEPRFDARTPLYRLAGVDLTTIEGIEENTALIILSEIGTDMHRWPSVKHFCSWLGLCPQHQISGGKILSRRVRPGAHRVTVALRLAARSLHHSQSALGAFFRRMKARLGTPKAITATAHKLARLVYSLLQHGSAYVHQGLDAYEAQYRERKVTTMAKQAKALGYTLVPLPAQG

SEQ ID NO: 109243 - protein, 353 aa, unidentified
MEYIAFDAHKHYTLASVARPDGQLVREERVEHDRGALRHFLERCERGSPVAVETIGNWYWIVDEIEAAGCLPKLVHARKAKLMMGMINKTDKLDARGLNQLQRNGTLPTVWIPPGELRDQRDLPRTRMVLVRQRTQLKNRIHAALAKYALHDLEVSDLFGAQGRALLRQRLDLLPPHTAYATQQLLEQVEELDRRVRGFEQRMRTAFKVTPEIQLLMTVPGVGLILAVVIALEVGEVARFATAEKLAAYAGTTPRVHASGGKTRFGRLRPDVNRYLKWAFVEAANSICLMRGRKPHRHVSRLYERIARRKGHPKAIGALARHLAEATYWILSKQEPYREPKPSAVSSTRDQRA

SEQ ID NO: 109244 - protein, 361 aa, unidentified
MVQSMSLVGLDVHASQTHAAVLDLSTGELRGVKLRMAPGQVVEFLATLPGPVRAVYEAGPTGFGLARSAVARGIDVRVVAAGKVPRASGDRVKTDKRDAERLARLLAAGELRFAFIPSVADEHFRDVIRAIEDCRGDLMRARHRLSKMLLRREIRWTGPGSTWTVTHMRWLRSLRFDDPCSQAVFVDYLSGVEMLVARRTALIVALERVIPDSRHAATIAALCCFRGIDTLSAAGLCAEVGDWQRFRPKQLSGFLGIVPSEHTSDAKRRQGSITKAGSGHARRLLVEAAHHYRHRPAVGDGLARRQHGQDPRAIEISWRAQRRLHQRWQVLAGQRRKPAGVVAIACARELAAFCWEAATLS

SEQ ID NO: 109245 - protein, 424 aa, unidentified
MKVTYQTCCGVDVHKSFLVATIVKTTGGIEPSYQKKRFSTFNNSILEFKQWLLDNHCHDVCMESTGKYWVPVFNLLEDKINVVIANPKWVKAVKGNKDDTKDSKWIGDLFRLGLVKGSYIPCKKVRILREYTRYRYKLVSCRSSEKNRYQNALTVCNVALDSIVSDIFGKSSTSIIDYLLEQSGTSINHEEIASKLLRSLKSKEDAVIESVEGYQMADAQKYRMRLVRAHMDYITAEINDVDKMIENMISSNPDFENAVQFLCTIPGVKRDSAITIISEIGMDMSQFSSSKRLCCWAGLTPGSNESAGKKKSVRITRAGVYLKPALVQCAHAAVKSDKSPYYKKKYESLVKRRGKKRAIIAIARMILTAIYQMLSTGEQWNPSDLYKIDMPVALVEKQKAKAIKQAKKLLQREGLLPPDEPLAS

SEQ ID NO: 109246 - protein, 321 aa, unidentified
MIKNKNYVGIDISKLSFDVAFKNEKDKYLHFKFSNDNKGFKDFTKLINQGLDICVMEASGPYYLKLASYLFDSGISVCVINPLVIRRFSQMRMSRTKTDKKDALIIAEYGKTEMPDLWRPEADYVLEIKQMQAYVDQMNKSRTGFLRQREAFKQNPAECFLVNESLEKMITLLETEIAQVEDKMIAIIKCHHDQLFKQLTSIPGIGKKTAMLLIAISGGFTKFENARQLSSYIGISPRIFESGTSVKGKSRICKMGMSRIRAMLYVCSWSAKKSNLGCRELYNRLVENGKAKKLALIAVANKLLKQAFALASKNEYYLQNN

SEQ ID NO: 109247 - protein, 377 aa, unidentified
MSKFNNIHVGLDVHKDTIAVAVAREGRGEPEYRGEIAHNSASIRKLLQRLSPNGEVLNFCYEAGPTGYGLYRYVTEQGHACDVVAPSLIPRKAGERLKTDRRDALMLARLHRAGELTPVWVPGEEQEAIRDLTRAREDMKAIELKARQRLGAFLLRHGQVYQGAGKKWTQAYWRWLEGVKFANPVQQIVLQEYIEAFKDAQRREAGLEREMQKALAGWSLQPVVEALMALRGVKLITAMTMLSELGDLTRFDSPRELMAYLGVVPSEHSSGRTRRQGGITRTGNGHVRRLLVESAHNYRYPARKTREIEKRAEKTSPRVQAIAWEAQKRLCRRYQTLLQTGKQKKVVITAVARELVGFIWAIACEVNGKPHGSRALA

SEQ ID NO: 109248 - protein, 405 aa, unidentified
MDARPSVGPRHAGVDWSWDRQAVCVIDEEGAVLDRFDVKHQAREFTAMTERLRRWGVERVAIERPDGPVVQALLDADVPVVVISPRQVRAFRLRHGTAGNKDDRFDAYVLADAVRTDGHRMGSLVPDRDDTRALRALVRARKDLVGHRIAVHNQLLANLQHAFPGAVGLFAQLDSPISLTFLERFPTVDKAAWLSERRLQAWLRSVGYCGNKTPASLIAHLREAPVGLEEEAGVGHAVVTIQLVGLQRTIRVQIDELDHRIAEALNLHPDGDIFRSLPRAGTNRAALLLAEIGDRRGRFPDEASLAAAAGVAPSTRASGKRHSVSFRRGCDKHLRSALVDFAQDSVKASPWARDIYDRARSRGCRHPHAVRIVARAWVRVIWRCWTQGVPYDPTIHGGLNKLEAA

SEQ ID NO: 109249 - protein, 391 aa, unidentified
MLKDIPRPAQAAIHTDLGAIFVSLELSRRAWLITSLSPGAGEKMSKHSVPASDVSGLLHRFAELKRKAAARTGRDFPIIVIQEAGLDGFWIHRVLQSEGIESHVVDPASILTSRRRRRAKTDRIDGETLVRTLMAFKRGEPRVCAMARAPTPQEEDRRRVCRERRTLMGERVRHVNRIKGLLFAQGVFGYEPLRKDRRERLEELRTGDGRPLPVHLKAQIIRELDRLEVVLAQLKTVATERDALLKPAPDEATSPPAMLVQLKGIGPETAAVLWSEGLFRRFDNRRQVAAYAGLAPTPWQSGSIDHEQGVSKAGNPRLRTTMVELAWLWLQNQPTSALSLWFHERVQRLGGRMRKTIIVALARKLLVALWRYTTAGVVIEEAVMKPAPATI

SEQ ID NO: 109250 - protein, 363 aa, unidentified
MEHMFATLGGIHMLICIGMDVHAKKLTCYGIPFDEGDVEAEEFCTEFNREFKVMSGEKKDMIRLSKWLKDVDHSILIESGSKTHEVFWTLTDNGCTVVVANANDLFRITMSVKKTDFHDCRELASYMRRRMLGEKEFSVCLMVDSVWLNRRQMCRLYAAAASDLSDLRRRIRSYMLVRGITIEDLGRDIVSEASLKKLEEVADVPMGFLIEEARWKTAEQKRILKAIEKEFADVPYYNLLKSIRGFGPVTSSYLTAMIIDIKRFDSPAAFAAYFGIVPKQRESAGHSKHCGITRRGDDVARQMLLTATMVHVGNDRDRVSSITNMYYRLRARGMPNKKAMTACTNKMTRIIYAILKDGREYRE

SEQ ID NO: 109251 - protein, 359 aa, unidentified
MQKRLTKKDYFFNNINLTADDEVYVGIDVHKIKCHIAIWLNNGIALTFVTPSDNLAIAQMLHKLTPGLKQIVYEAGPTGFSLARRLEAFSLPVAVIAPSKTLRPSAQDSKSDRLDCRKLAEFAAKDLLTEVAVPTEQQEADRQVVRLRNQLGDKRVRIKQQIKSLLLQHHITEPDGLARWTIKSITGLKKLKLCPQMRFSLDVMLDELKYINKQIKLVDAQLRKIFKEDHHIRQMEILQSHPGIGPITARQFRGEVFSHDRFEKSTQLTRYLGLCPRVSQSGQKRIEGRLMKAGQIKLRSNLVEAAWSWIRLDPAAKETFKRLLSNTGEPNKAITAMARRLAVHLWKMLCDDKMYRKAA

SEQ ID NO: 109252 - protein, 401 aa, unidentified
MQQRLWAGIDAGKTAHHCMVVDADGQRVLSRRIDNDESALLELIRAVTSLAEGGHLTWAIDLNAGGAALLITLLLAHDQELLYIPGRTVHHAAGSYRGDGKTDAKDATIIADQARMRRDLHPLRRGDELVAELRILTSRRNDLSADRTRTINRLRDRLGEYFPALERAFDYSNNQAALILLTGYQTPAALRRIGTARLETWLQNRHARKVSSVAASAVAAAHTQYTAVPGEQLAADLVARLTQEVIDLDAALKEIDVMIEDRFRRHRYAEIIVSLPGFGPRLGAEFLAALGGDIALYDSADRLAGVAGLAPVPRDSGRVSGNLHRPRRFNRRLLRASCLAAQLSIRHDPASKHHYDRKRAEGKRHTQAVLALARRRNNVLWAMLRDRTHYQQPTGDPATAA

SEQ ID NO: 109253 - protein, 391 aa, unidentified
MDKRFFGLDLHKKYATICGISQQGEVVVKEDRLPLEQLPAWVADTLTGEDAVALEASTNTWWAYDCLAVRAGRVVVVNPIKTRLIAQARINTDELSAEALARLLQSNFICEVWVPEERTRRYRQVISHRIRLSQEGTRLKNRIHATLHRQQIRSPYGNLFSRAGRAWLRRLELPELERLLLRQNLDLLESSEQALAEVDQVLARLAQQDDRVPILMQIPGISVFSALAILAEIGEIGRFPSAKKLSSYAGLVPCLHRSGQKHSSGGITKAGRSRLRWILVEAAHVAARHDPQLGRFYHRLRARKGTNVAVVATARKILVVIWHLLRGDGVYRGRQVQMIAGKFLEWGWKLGQKDRCASNKEFVLKQLQQIQINNLTHIRAGRRAYALRGPD

SEQ ID NO: 109254 - protein, 344 aa, unidentified
MEYYAGIDVSLESASICVVDDKGDIVREGKVASEPAVLVKWLKDVGVEPTRIGLEAGPLSQWLFAGMAKAGLPVELLETRHVRAAFRTMPVKSDRKDARGIAQLMRLGWFRPVHCKSLPAQEMRALLTARKLMQSKQHDVELSLRGILRGFGLKVGATSPRTFEGRVRDLVADHPTLLVVAEALLVGRAALGEQLSRLEKRVRSVARDDRRVRRLMSAPGVGAIVALTFVAAVDDPARFRSSKAVGAHFGLTPKKYQSGETDVTGRISKIGDAGVRTVLYEAANVILTRPVKGSLLKSWAMRLAARAGMRKAKVALARKLAVVLHRMLADETTFAADKAATAAA

SEQ ID NO: 109255 - protein, 363 aa, unidentified
MLYLGIDLHRKQMTVNLRGEDGEPLLRRQVSTWGDEPQKFLTDVQRRAGSGGWVVILEVCGFHDWLLELLPQYGCREIVLIQPTKKSSRKTDRRDANQLGELLWVNRARLLAGRKVQGLRRVVPPQPAERDDRRLTQLRCNLTADLTRTINRVKYILRRLNIEQHCPTKGVQTQKAKTWLKTLSLPAIDRLEMDQLLSRWTDLARQRDQLDRRVVERAALDPRVPLLRSTPGASHYTALALACRIGAIGRFPTPRSLANYWGLTPRCGSSGETERLGSITKEGSTLARYLVGQIVLHVLRKDAAMREWFRRIKKRRGVKIARVAVMRRLTVFFWHMLSKQQPYSIAASTVGPRRRTTSTPRTD

SEQ ID NO: 109256 - protein, 344 aa, unidentified
MGEVITIGLDIAKSVFQVHGVDGAGAVVIRKRVSRAKVLTFFADLPPCVIGIEACPSAHHWGRELEALGHTARLMPPSYVKAYLKRSKNDANDAEAICEAVTRPSMRFVALKTKAQQAALMLHRTRQMLVRQRTMLSNAMRGHLAELGIVSAKGRNGTSELLRIIADGADSRVPRMARGILEVLGRQYSAIGAELGSIQKGILAWHRSCEASRRLEEIPGIGPIVATALVAEIGDWKAFGSGRDLAAWIGLVPKQHTTGGKDRLGGITKQGNRYLRWLLVTGAMAVIRYAQKHGTRKQPWLGRLMERRPTKVAAVALANKIARVAWAIMVHGDRYKEPELPVAA

SEQ ID NO: 109257 - protein, 346 aa, unidentified
MSHKTAATAAQTIGIDTGKNTLHLIGLDDKGAIVLREKIARGRIAARLANVPRCLIGIEAGMATHYVARELSALGHDVKQVPPAYAKPFRQGHKNDFRDAHAIAEAVQRPSTRCVPVKTDDQLDLQALHRVRSRLVGQRTAVINQIRGFLLEHGIVVRQGLRFLRQQLPDILAKRSDVLSPRMIRIIEDLSGDWRHLDERIQHVTEEIEVLAHGNESCRQLITVPGIGPLIASAMVAAIGNGAAFAKGRDFAAWLGLVPKQMSTGDRTILGRISKRGNRYLRTMIMQGARVILLRPANWAKHSFGTWLTAAANRLHHNVLATALANKLARIAWTVLMQARSYEARV

SEQ ID NO: 109258 - protein, 346 aa, unidentified
MLHVGLDLSRKQVEVCLISGQGELIDRFTATPDRDGLYGLACRVAVYEEPVRGVVESMNGARFVHDELVSHGWEVLVADAQKVKGLAPLACKTDKIDARVLAELSFRDLVPAIWLPTLELRREREISRWRLHLVKHRSTLKNRVHSTLITFGHQRQMSDLFGVSGRSLLKRLDIPEPWRSHVDASLVLIDDLEARITQIARELRRSGADHPYVPVLMTAPGFGWITSFTVACEIADISRFTSPVKLTGYTGLCPRVKQSGQMDQRGPLSKHGPKYLRWGLMEAAIAASSHPLYRERYQRTKRRLGRQRGPKVAQIDLACQLTEAIWYMLTRNQPFAPAGATFRLAA

SEQ ID NO: 109259 - protein, 386 aa, unidentified
MSPEHSIDIFLGLDVGKSEHHACALDRDGNKVFDKPLPQLESELAGVFHQLQKLGTVLVIVDQPNTIGALPIAVARDCGCEVGYLPGLAMRKAADLYPGRAKTDKRDAFIIADTARTMPHTLRAVDRNDEVLSALKMLSGFDDDIARDCTRTVNRLRSVLTQIYPSLERVFAGSTLTRTPILELLIHYKGPQGLKRAGYQRVLNWMIKRTRKDPTPLVDDIFTALKAQTVTVPGSDAAELVIPQLAANIQALKEQRNTIAEQVEEMLADFPLCEVLMSMPGVGIKTAAQILLAIGDGSDFASAGHLAAYAGIAPVTRRSGSSIRGEFPARSGNKRLKTPCSTPHSQLSAATNRHGGITNANALKENATTQQSSAWHDADAMSSTRC

SEQ ID NO: 109260 - protein, 433 aa, unidentified
MTPSSVSMENPMVAYVGLDWADQQHVMCWRAADSTQAHTAVVRQSPEELQAWVAQLRQRFPQGLIAIALEQSRGPVIAALMHYDFLRLYPINPKSLARYRETFSTSGAKDDPHDAALLLDLLVKHREQFAPWVPDDVLSRQLALRVQHRRQLVDLRTALTHQLSSHLKLYFPQALDWAGALDSLQACDFLQRWPTLPAVQKARPAQLEQFYHHHQCRRRQLIQQRIEQIQQARSLTEDRALVEASSHMVLALVAQLRVLIATLHQWEAEISQLFAQHPDAFIFASFPAAGPVFAPRLQTAFGSRRDRFSAAQDMVQFSGVAPVTQRSGKSLQVHRRWARPKFLHQSLVEYAALSIPHCGWARALYHQLRARRHRHWAAIRVIAYKWVRILFRCWKERVPYDESKYLQALQRRNPRLWLASQQPPPPRCKKPAA

SEQ ID NO: 109261 - protein, 396 aa, unidentified
MHKEKHCAVVIDCWMKKIGEVNFENKPSKFPAFVEEIRKICGTKDFVFGLEDTRGFGRNLATYLTGRKFKVKHVNPAYTSAVRLSNPIVYKDDSYDAYCVARVLRDMVDTLQDAKHEDIYWAIRQLVKRRDMIVKNNVMNKNQLHSQLSYSYPSYKKLFAQVDGKSALCFWENYPSPEHIWSTTPEKIYETIKPVHQAFKIERIHAIIDIVKKDGNTQKGYQEERDSIVRNIVKDIKNNQELIKDIEEQLRKLLPQTGYKLQTMPGIDLITESKIVSEIGDINRFPDSDKLARFMGLAPVHFSSAGKGRDERCRNGNRELNAIFHFLAIQMVAISPSGKPRHPVFREYFEQKVKEGKNKPQALICIARTLVRLIYGMMKTKTEYRPYEKKEKEGSN

SEQ ID NO: 109262 - protein, 397 aa, unidentified
MYIVGIDIAKRKHEAAVIDGEGTVIIKPFSFTNNCSGYNRLLAMLTKAKLPLDEVSFAMEATGHYWLALFTRLQKEGFRVQVINPVQTNSIRSFYIRQAKTDPRDALLIAEVIRFGHFSESTLHPENIYELRELCRGRHAIVSMQADVKRKVVALLDQVFPEYETAFTNMFGDTSMAILQTCPTPKELSKMPLEELCHLIEVSSHKRFRMAKAQELQALARNSFGFAMAGDVFSTMIRLYAKHLVFLKQQVQEMDRKIAEIMDTLDTPITTITGIGPTLGAYILSEIGDISRFSSAAKLAAYAGIDPTMRQSGEYNGVRNRMSKRGSPYLRHAIWLAASSAVLHDPALKLYFQKKRDEGKPYMASVGHACRKMVSIIYAVMRDNKAYTPYIPNEISA

SEQ ID NO: 109263 - protein, 378 aa, unidentified
MPDVTASIAPADVRLWVSLDVHKFSIVAATLAPSGAKPEVCRIETTERAIRRFIDRLGGPGGLAVCYEAGPGGFALWRLLTRIGVACDVVAPSLVPVRAGDHVKTDRRDAKKLVALHRAGLLRYVFPPTAETEGLRDLLRCRDDLRCARTAARQRVLKQLLRHGRIFRDGKTTFSLKHRRWINAQRLDDSLAQEALEQMLIHLDGIERQLDTLDARLERIATSERWGEQVAILTRFRGIQTLTALGLIAEIGDFARFSHPRELVSWLGIVPSEYSSGDQQHRGHITKAGNRHARRLLIEAAWHYRHAPRLPASGPQPDERAWQAQLRLHHRSRHLLEHGKRPTVVNVAIARELAGFLWAAMTNQPLTSRDQQPEEVAA

SEQ ID NO: 109264 - protein, 355 aa, unidentified
MSQEKYIGMDVHQATISAAVMDAHGKLLMECLLETKADTIVEFIQGLHGTLSLTFEEGTSAAWLHDLLKPHVSRLVVCDPRKAALLKEGNKSDRMDAQKLAELLRTNQLKPVYHEEHGIRALKELARSYLRITKDVTRVMNRIKALYRSWAIPCSGADVYAPRHRAEWLAKLAEPGVRVRAEHLYQQLDSLQPLRLQARGELVWESYQHPAVKLLRQIPSIGPIRAALLVALLQTPHRFRTKRQLWAYSGFAVETHDSGEYRCVRGKLQRNRERITVRGLNDNHNQDLKSLFKSAAISASTRPGPLRDFYVARVEKGMRPTMARLTLARKIATITLTMWKKGVGFDPQNLPRQAA

SEQ ID NO: 109265 - protein, 320 aa, unidentified
MGRWWRYKWITFHPSLTHTGEVVDKQLRSKDFLTFFSNREPCLIGMEACGGSQHWARELKKLGHEVRLLQARFVKAFVMGNKNDVMDARAIWMAVQQPSKEIAVKTEEQQSVLVLHRSRRQLVKFRTAQINALHGTLLEFGETLHKGRAAMDRELPVALERMKTKLPPYLITVLEDQYTRLSELDMLIDDLEKQLNSAARQSETCKRLMEIPGVGPLIATAAVATMGKASAFKSGREFAAYVGLVPKQTGSGGKVRMLGISKRGGYLPPDIIYSWGKVGSIADQRARSMDHGAEKTAADRCGYRGNGEQAGTDSVGNSRS

SEQ ID NO: 109266 - protein, 352 aa, unidentified
MQYIAFDAHKHYTWALVQDKKGKVMAEQRIDHIRGALAGFLETFEPGSPVAVETIGNWYWITDEIEAAGMVPQLVNARKAKLMSGSINKTDRLDARGLNRLQRSGTLPTVWIPPRELRDLRELPRTRMVLVHQRTQLKNRIHSNLAKYGVRIDEVSDIFGVTGRRLLDQRLTLLPLHTQYATERLLDELDHLGELINRFEKRMNNLFTPTQALARISTLPGVGLILGVVIVTEVGDVGRFPSASHLASYAGTTPRVHASGGKLRYGRTRCDVNRYLKWAYVEAANATVLHRRGHPTRHVSRLYARVRSRRGHPKAIGAVARHLAESTYWMMNKKEVYQDPSLAYQVVSTREA

SEQ ID NO: 109267 - protein, 443 aa, unidentified
MSEPPIAPAPAPAPAVAPATCGPGERFARLTHFGGFDWGGAEHQFVAVDPGGRIVLSLRFANDAQGWALFREKIAAFPCLGVAIETCCGPAVERLVDAGPAVYPMNPKAAERYRDRKAPSGAKDDALDAWSFADALRTDGHGWRPLLAQDPLTTELRLLCRDEIKLIEQRTALVNQLRAALCEYYPAALAAFDDWTAEGPWRFVIAFPDPPALAKAGRRKWEKFLHAHKLYRPQTADRRLAAFADALKFASPNPAVTRAKSLLAVTVAKQLCLLESQLEEYRRRVVQLFADHPDHDCFGSLPGAGAKLAPRLLAELGANRAVFATAEALQNYAGTSPVTRQSGRSRVVVLRRACNKTLRATVHLWADLSRRTCVWAEAYYQQKRAGGMNHTAALRCLGQRWVKILWKMWQTGTPYDEALHTRNQTAHGSWVIRLLPPPAPAKT

SEQ ID NO: 109268 - protein, 407 aa, unidentified
MITVGIDIGKEKHAVAAINSAGEVLMPPRFFDQTAAGFAALLAQLGKLGKAADIRIGMEATGRYWIPLRHALAEKGCRVESVNPIITSAEIAKDVRGRKTDKADALAIATALLRNRHNPAPAEDAATDALKSLTRHRTFLVRQRSNAKRCLHAALDVTFPEAGKVFGQLFSATALAVLEAFPSARLLARANLKTLSAIVSKSSRGRLGAERARLFRDAARASVSVSIANEGDEAALVSLIAQIRFADAQIEQAEEKIRSMPAPETAELLASVKGLGTLLPRVIACEIGDMERFRHPPSGKPPRDMDKRILAFAGCEPRLRESGKWKGRTRISKRGSPALRTALWQASAMCRLHNPLFAAVYERQKSRGKPHSVALFYVARKLVEVMCGMHKTGRPFSLQTAGGAICL

SEQ ID NO: 109269 - protein, 364 aa, unidentified
MLIIGCDYHPGFQQIAFVDKETGECGERRLAHREQAEQFYRELKPQNLLVRVGMESSGHSRWFERLLHELGFELWIGDPAEIRTKRVRKQKTDRQDAQLLLRLLMEDRFPRIWVPDAGNRDLRQLLWHRHRLVQMRTRVMNQLHVVPLNEGLLRKKALWRPAGRKELESIVLAPWASRRRQDLLDLLDQLTPKIQELTRALEEEVEKRPVTRLLMTHPGVGPLTALAYELVIGTPERFHCGKQLASYVGLVPEEKSSGDRRRLGHISKQGNVLLRFLLVEAAQVTVRSQPEWRSKFFHLAMRRGRKIAKVAMARKLAVHLYWMWRQGCDYGQMHKLGSHAGEPGNRDGVQSITDVMIEHPAPSK

SEQ ID NO: 109270 - protein, 419 aa, unidentified
MSFKIFRFNCCGLDVHKTWIYACIGITDSNGRTDYKQARFSSFSKGLKELCDWLAKYNCSEVCMESTGKYWIPVFNVLEKANNSVILAHPKYTKPQKGNKTDRKDAKWICDLFMCEMIKPSFIPPADIRHLRDLVRYRFKLTCMITGEKNRAQNCLTVSNLKLDDVFSDVFGKSSRSITEYMLAHPGEIFDVAPFVDSRCKTPMEEIQAAVDGAISPEQAIKLRQCLNHIDELEKHLEEIEREILRLSDKYQAALDLIRTVPGFDKNPMTAIQILSEIGGDMSVFPSAKHLVSWAGCCPRNDQSSRKIKSTRISRAGSYFKPVLVQIANALIKSKKHPEFTTRYRRIKARRGHKKAIIAICRMILTAIWHILTDLKPYTPEGFLESRPVNKEKVLTISQALNLIKQRGYIIKDDVGPVT

SEQ ID NO: 109271 - protein, 341 aa, unidentified
MKNSTTITIDLAKDVFQIAVFNKFGKEITNKAVSEKRILPTVIQHPEACIYMEACGSAHYWGRRLTQLGHDVRLIPPHLVAKYRNGNKSDKNDAVAIYEASKNPSIYFVSIRTLEQQDLATQHKLRDGYVKQRTQLSNRIRGFGMEYGVKFSPGITRLRKQVPCALEDAENELTTVARACLRHLLDQLLSLDELIAETTATLVNHAKQIDACVRLEKVPGVGWLVASMLYARLGNGSAFRRGRDASASLGLVPCHSGSGGKNRLGKISKRGDKYLRCLLVHGARSTLHRTQNKTDGLSCWVRNQQVTKHANNTAVALANKIVRMAWSILKTGNEYQVPVAQ

SEQ ID NO: 109272 - protein, 357 aa, unidentified
MAKRVIQVHAVDATGRRVVARALKREQFMAWCVQLPAGCVVAMEACSGAHHWARKLQRLGLDARLIAAHFVTPYRMEGAGGKNDMTDAAAICEAASRPRMRLVPIKTCEQQGVLSLHRVREGLKEERTACINRIRGVLAEFGLVFGKSPKILRAVLADVIEDADNELSTVARRVLAHAFDHWRELDEHLHWCDQQVGQHVRNSPAAQRAATITGIGELGASALVAGVGDFTQFRSGHQFSAWLGVVPRQHSSGGKTTLGRITKRGDDYLRTLLIQGAKAAVMSAERRDDPISAWLVPLVKRVGWQKACVAMANKNARILWAVMTRDQGFDPHHVSVKPAAKRPAQTSGAAIPSSAAC

SEQ ID NO: 109273 - protein, 349 aa, unidentified
MRIIGGLDVHRSQITYDWIDTDTGQHQRGQLAPAHREHLRVWLEQFRDRPAAFALEGCTGWRYVVEELQRAGIAAHLAEPADTSTLRGPKRHAKTDRTDARHLRGLLAAGRLPESWIPPAHVLEARTQVRCYKALTDEHTAWLQRVHATLFHHGVPAQRNLLAADRRARLERGSGLSPAARQLVAVALGTLDHLDAELDRLRAELTWFARRQPGCQALDGLYGIGPVTAVAIWAELGDPARFTSSRHAVRHTGLDITVYSSDGKRTPGHLARQGPPVLRWALFEAAKCAARPSSPDHAYYLQVKGRLGGNRATLAVARKLARRCYHTLGTLGDLAYAPPSDTPDLGRVA

SEQ ID NO: 109274 - protein, 350 aa, unidentified
MIIIGVDFHPEYQEIASVDTDTGEYQEKRLAHPKEAEEFYRSLSCVGQVVRVGMEASGHGRWFERLLEGLGVELWRGDAEVIRAKRGRKQKTDREDARHILKLLLKDDFPRIWVPNWENRDLRQLLWHRHRMVQARTRVMNQLQAVALNEGLRCKKRLFRANGRQQLESFQLAPWASRRRRELLELLDRLNPAIAELSQAVEREAEKCPEAQRLMTHPGVGALTALAFVLIIGETERFQCGKQIAAYLGLVPLEKSSGNRRRLGHITKQGSSIVRFLLVEAAQVTVRSLPEWRSKYIHLMMRRGRKTAKVAMARKLAVRLYWMWRKGWDYEQWKKFGSYVGQPVHRDGVQ

SEQ ID NO: 109275 - protein, 322 aa, unidentified
MTHTTTTIGIDVSKQYLDAFCRHDQHTVRVPNHPQGITALLAWIGQRTARPLIVIEPTGGYEHTLQAMLLEQGLSLAKVNARQVREFARAKGRLAKTDTIDAAVLADYGQVMTPRTLVGPSPEQRELAQVVKRRRQVVELATIEKNRLEKATDDLAIESIQRLLRILKEEIQEMDARMAKLMKSHRSLSNAHDVVKPIKGIGPLTLATLLAELPELGRIGNRQISSLVGVAPHNVDSGMRRGTRHIHGGRVRIRCALYMAVLSAIQHDPGMKRFYQHLVEHGKKPKKVALVAVMRKILVRLNAKMREYYLQVDGAPWQRQAV

SEQ ID NO: 109276 - protein, 412 aa, unidentified
MKRIYQRCCGIDVHKATLTACVRVHGAARKLSQEIRSFGTTGDELLSLHDWLMTHRVSHVAMEATGVYWKPVFYVLEQGFTLLLVNPADIQRMPGRKTDVSDAAWLAQLLENGLLRPSFIPPRAIRELRDLVRYRSELKHDHTRVANRLHKVLQDADLKLSSVMSDILGVSGRQILRQLAAGHSDPAALAELARGSLRAKRPALRQALTGRFSEHHAFLIGQALTELDNLEESMSALAARVEQHLVPFAPQIEQLTTIPGIKRVAAAVILSEIGTDMSCFPDTAHLASWAGMAPGNHESAGKRRRAKARHGNRWLRTILVECGHAAGRTRDTALAAIYRRMIIRAGRKHAAFVTGRHILNIAYHLLTQHDTYRELGPSYFEQRRAEQLKRRCLDQLRNLGFQATLAPLPTAA

SEQ ID NO: 109277 - protein, 406 aa, unidentified
MNMNAVGIDVSKRKSTVAILHPGGKVVVKPFDVPHLSTDFQALIKLIRALDGETRIVMECTGHYYEPVVRELSQAGLFVSAVNPQIIRNFQGQDNPLRKVKTDKADSVKIARYTLDSWANLKQYSLMDELRSQLKTMNRQFNFYMKHKTAMKNNLIALIDQTYPGANACFDSPVREDGSQKWVDFIDTYWHVDCVRRLSLTAFTEHYQKWCSRKKYNFSKAKAEEIYGKSKELIPVLPKDSFTKRIIKQAVEQLNAASQTVEQLRSLMNETASRLPEYPAVMALKGVGPSLGPQLMAEIGDVTRFTHKGAITAFAGVDPGVNDSGDYSQKSVHASKHGSPALRKTLFQIMDVLIKTRPDDAVYLFMDRKRAQGKPYYVYMTAGANKFLRIYYGRVKEYLAALPTSD

SEQ ID NO: 109278 - protein, 403 aa, unidentified
MNSVGIDISKGRSTVAVMRPFGEVVISPFEVRHTDSELSELARQLKSLNGETRVVMEATGNYHAPVAKLLHDAGLYVSVINAKLVHGYGNNDLRRVKTDRKDAVKLANYGLDRWLTLPRYVPEEDTRLLLKNCYRQYRQYSKVQTVLKNNLISLLDMVFPNVNRLFSSPIRGDGSEKWVDFVAEFWHCRCVSEKSQKAFTNKYQRWCRKHGYNFSEAKAHTIHAEACGHIDVIPKSETTKLLVEQAVAQLRATSAALAALKHEMQALASMLPEYPVVMDMFGVGPTLGPQLMAEIGDVRRFYSKKALVAYAGLDAPPNDSGDVTGRHKSMSKVGASSLRRTLFLVMSVYLQNAPLDESVYQFMDKKRAEGKPYRVYMMASANKFLRIYYATVKAYLESLEHTA

SEQ ID NO: 109279 - protein, 410 aa, unidentified
MQYFVGLDWASREHAVCVVDERGTVTVRFTVAHTDAGMTELVTRLTQVGAPAELRVAIERPSGLVVDTLVERGFAVVPIHPNAVKSARPRYSAAQGKTDLGDAYLLGDLLRTDGHRFRVLSPLSDETKALRGLVRTRDDLVERRVALANQLRSLLSEFWAGAAEIFADVDSPIALEFLDRYPTPQSATSLGEKRLAAFLARHAYCGRRSAADLLARLRGAPRSVAGELEADAKGDCVRALVAVLRPLVAQIATLTATIEHAVEAHPDGAIVTSLFRSGRVCAAQLLAEIGDDRARFVSDEHLAAEGGVAPVTRESGKHRAVTFRWACNMRLRAALTTLADTTRHTMPWARAMYQRARERGKEHAHAIRILARAWCRVLWQCWQKRTPYDPTKHRAARQFNLHLADGKEAA

SEQ ID NO: 109280 - protein, 408 aa, unidentified
MSQNIIFGIDVSSRSSTVCVVIDRVKQGNPFTITNDSFGYQDLLDHLNQYLITPLVVFEATGVYSLSLQAFLEDHHIKYLRLNPLQAKKLMDNNLRHNKTDKLDAYHLALIQFSAPQKLQAPQSREYHELQAASRYYEELTRALIVNKNQLHRNLQSTFPQIEHILSNPSGKIYWTIVSLFPHAQYVLDMNEDQVKQRLLSISGIGRQRAQYLTARLYAFARQAYPYDRKDGITVRAIQRTISNLLSLSNERDQVINYMEKLTKVVNARALTIYLSIPGIARTTALRLIAELGDLRRFNTSAQVDAFVGIDPGRSQSGDKDSRLGITKHGNHIARKILYRVITQMETVRATQPCHITDYYDKKKQSSHSPGYKKIAIASVHKLIRTLFALIKHNQLYDYNIATKNQRL

SEQ ID NO: 109281 - protein, 400 aa, unidentified
MMTPDDIDVWVGLDVGKSAHHAHALDHDGNTLYDKPLKQDEKAIRTMLGKLSKHGRVLLVVDQPNTIGSLPLTVARNMGIAVAYLPGTAMRRTAQLLPGDAKTDRRDAHVIAWAALKLPETLRDAGPDDETLAALKLLAGHDEDLAHESTRHVNRLRSLLLQTHPAFERALKGERITRDATLALLERYGGPMGVKRAGIEDVKDWAKSNGLRAGRIIDDMFKAIGEQTVTVPGTLMAETIIPSIAHDIKTIRDRRREVGRQVEKLLEDHPLLTVLTSMPGIGVRTASNILLGIGGDIANFKSSAHLAAYAGISPVTGQSGTSIKGEQPSRRGNKRLKNALWQTAFVASTKHPPSVAYYKRKREQGKHHNAAIICLARRRCDVIYSMLKNGTLYQEPALVA

SEQ ID NO: 109282 - protein, 421 aa, unidentified
MKPSNAEFTAFVGLDWADAKHDVCVQAAGCEEREFDRFAHHPEHIEQWAHSLHQRFGGRIAVALELAKGPIVYALQKYHFLVLYPINPTTLAKYRQAFKPSRAKDDPTDAELALDLLLHHRDRFQPLKPQSVPMRKLCLLVEQRRRLVGDKTRCVNRLCYTLKQYYPQALEWFEQRDTVLFCDFISRWPTLKQVRGARQTTLIIFFKAHNVRFERVIEARVCAIKAATPLTQDAAVIEAHQLQAEVLVEHLRLTLKSIARFDQEIAATAAKLPDYALLFEPLPGAGPALAPRLLATFGEDRQRYASAGQMQMYSGVAPVTERSGNKTWVHWRWQCPTFLRQSLVEWAGQTINKSFWAGAYYRQQMAKGSSHQAAVRALAFKWVRILYRCWQTRTPYDESKYLEALRRRGSPLLKQLGETMQ

SEQ ID NO: 109283 - protein, 361 aa, unidentified
MANSMNFVGLDVHANQTCLVALDQGTGELKKARLRTPPLGVLGHLQALAPMRAVYESGPTGLGLARQGAARGLDVRICTPASGARRPTDRVKTDMRDAERLARLLAAGELRFARVPTIEEERFRDLVRAREDIRRDLMRARHRLSKLLLRREIRYPGKGRAWTRAQMDWLRSLRFEDEASVSVGADYLAAVELLLQRRSTLNEAIERLWPQSPHAEVITRLRCFRGVDTLTAAGLCVEIGDFGRFAKPSLLFGYLGIVPSEHTTGEQRRLGAITKAGPTHARRLLVEAAHHCRRVPRVTEQLNRRQRGVDPRVVAIAWRAQRRLHERWVAMRLERKKPAGVVSVALARELAGFLWEAAMLD

SEQ ID NO: 109284 - protein, 388 aa, unidentified
MTQTPVPCPVPAAPDYDRTLVLAIELSNTSWVLAAQVPGLPRVKAKRTIEPTAAALLAAIQGYRERAKTAGRRVERVVAIYEAGWSGFWLARWLATHGIETHVVQPSSVPVDRRARRAKSDGIDAELLLRTLLAWLRGEPRVCSMVPIPAEADEDARRCVREREELVAERVALVNRIGAVLATLGVGEYNPLLRNRRERLDALRTALGTSLPPHAHAKISRMLDRLDLVRAQIAALEQERDAVLEDEVPDRAGGMIQQLATLRGIGVQSATVLVREAFVREFANGKALGSYAGLCATPHSSGGTEREQGISKAGNRRLRTVMVELAWLWQRYQPGSAEVTWFRARASGTGARMRKVMVVALARKLLLALWRFATQGVVPEGAVIKPAT

SEQ ID NO: 109285 - protein, 413 aa, unidentified
MEVLHAKCAGLDVHKDVVVACARIAVDGKLTQEVRSFATTTTALFELSAWLEHQGCTCVAMEATGVYWKPVWHILEGSFELVLANAQHVRNVPGRKSDVNDATWLSDLLAHGLVRSSFVPPIAIQALRDLGRTRKQLVREVIQHTNRIEKVLEDTNIKIASVISDVLGQSGRAILDALVAGQTDPEKLVALCSGRLKASRKVLIEALRGRVTEHHRFLLKLHLAQVDLLRQGIRDLEARMGESLEPFRQDIENLTTIPGVSDVAAHVIAGEVGLEMTRFPTASHLISWAGLCPRLDESAGKHRSTRIRKGAPWLKTTLVSAAWAAVRTKGSYLQAQFLRLRARRGPKKAIIAVAASMLTAAYHILRNHVPYKDLGSQHFTRRNKDHVAKRLQKRLEALGFAVEVRPASAVVST

SEQ ID NO: 109286 - protein, 412 aa, unidentified
MEVVHSHCAGLDVHKKTVTSALQVPEPQQGWYQETRTFDTMTADLLQLSDWLMLHGVTHVAMESTGEYWKPVFNILEHNFEVILVNAQHIKAVPGRKTDVNDAEWIADLLKHGLLRASFVPPEGQRELRALTREQSNFVRGRSTLVNRIQKVLEGANIKLSSVASNVVGVTRRAILEALIQEGVSPTEMAELAKGKLRKKREQLVKALTGYVKPHHRFMLTELLCQIDALDETIAHFDAEIQRYCAPFEEAVELLDTIPGVARQTAQVIVSEIGIDMNRFPTANHLAAWAGVAPGNNESAGKRRSGKTRKGNTPLTTALIQAAHGVAHTRGTYLAAQYHRLAGRRGAKRAAVAVAHSILVIAYYLIKRKEPYREMGGDYFDKRRPEASAKRLIKRLENLGYRIAVEKTPVTT

SEQ ID NO: 109287 - protein, 357 aa, unidentified
MLSSNVKYIGLDVHKEAVAIAVLNSAGKLVMESVVETKASTLLDFLRGLRGELHVTLEEGTWAAWLYDVLRPHVVELVVCNPRRNALLKEGSKSDKVDARKLAELLRSGMLRAVYHGEHGLGILRELARGYLTVGKDQRRVMIRLKALYRSWGITCSGKQVYTPRHREQWLNKITQPGVRRRAELMYQQLDGLSAVRHTVRGELLAESRKHEATKILRQIPLIGPLRATLLLALMQTPHRFRSKRQLWTYSGLAVETHDSAQHRYVDGQLQRSKKPQQVRGLNQNHNHEMKEIFKSTAMSASRCAGPLQDFYEGLLAKGMKPDMARLTLARKIAAITLTLWKKGECFDAEHLKSQSA

SEQ ID NO: 109288 - protein, 407 aa, unidentified
MRYYIGVDWADEEDVVWVANDAGDKVLSRSIPHTVAARGEWGRWLRERQAEGIEIWAAIERPHGRIVDFLLDHAVVVYPINPKSLDRARDRFRVGGAKSDPFDAQVLALFLRSDHAQLRPLYPSSEAAQELKGLTRDHRRQVKLQTRLLNQLTVTLKEYYPRALELCEDLTASWARDFLATYPTPAAAAALTKANWQAFARAHRLGATRAAALWEILQQPQLPLPAHVVRIKARLLQALLRELTPTLATVAEYRQAIDDFFAGMPGADIARSLPVGKSGTTVPSVWAELGDNLDRWTSFRDLQGYGGSVPETVRSGKHLVIHFRFACNTTLRAAIHQLAFLSLPHSTWARAYYDSYRERGHTHHEALRALGAKWLKIIFVLWKRQVPYSETHHLANIGRQHLRQKAA

SEQ ID NO: 109289 - protein, 334 aa, unidentified
MQHEPLIDVALPDSGLPDSGLPVAGIDVAKKQLDLFADTVGRRLRVGNDDAGFAQLLAELREHKVRLVVIEATGRYHRRVAAALLQAGVGVAVVNPQHVRAFAKAAGKLEKTDRIDAVVLAHFGRAMNPRGAVKTPENQAVLSDLVSRRRGLIQVRVAEANRAHEQLPKLAAGQSRKLLRLVDQQIEDLDREIARLIEADDDWGGKAKVIDSVPGIGPGTANQLLVELPELGKLNRQEIAKLAGVAPLNCDSGKFRGQRRIRGGRADVRTCLYMAAFNARQKCARFKQYFDGLMARGKLYQVAMTACMRKLLVVLNQMVKNKTHWDQNFSGALA

SEQ ID NO: 109290 - protein, 322 aa, unidentified
MCKIIGIDISKQTFDVGFNDGSNWHHLVLDNNEKGFKRLLKELSNNDWIVMEASGPYYLKLATFFYGKGYNVCVLNPLIIKRYSQTRLIRAKTDKKDAQTIAEYGAQYRLKQWKPEPTNISKIKQLYTVLELLNKEVHQSERQLEALTATGIMDKDLKSILKGIVSYLTCKRNKVEKQIEEIAQSVYKSTLDRLKSIPGIGTKTAIMLTVITGNFENFETHKQLIAYVGFSPRIYQSGTSVKGKGHICKMGKSQIRKLMYLCSWSAKRCNKDCVDMYERLLEKGKPERVIKIALANKLLKQAFSIAKNKTYYDENFNKKTCF

SEQ ID NO: 109291 - protein, 360 aa, unidentified
MAKMQQNLSAGVIGGVDTHKDLHVAAVVDHNNCVVGNEFFPATRQGYRQMLSWMKSFGPLIRVGIECTGSYGAGLLRYLQAAGIEVLEVTAPDRMERRKRGKSDTIDAECAAHAAFSLIRTVTPKTRSGMIESLRTLKVCRKTAVAARRIALQMLQMTIVSAPEELRDQLRKLTRMQLIRTLAASKPDMTRYRHIEGAYCIALKSLARRYLELQDEIGELDVMIAAIVDDLAPELLKCKAVGYECASQLLITAGDNPERLHSESGFAALCGVSPVPVSSGKNQRHRLNRGGDRAAHSALHIIAIGRLRTDTKTQEYVAKRIGEGHSKLEAIRCLKHYISREVFTLLRNRNRQINSIQIMT

SEQ ID NO: 109292 - protein, 350 aa, unidentified
MDSLSEIFDVVIGVDTHVETHSAAVVNAHTGGVLGEITVEATPQGYDELVEFASEHEGLRAWAVEGTGSHGAGLTRRLAKTDELVVELDRPERQKRRNGAKSDPLDAIRAAREALSRAKLGTPRTTGERQALSVLLAARRSAVAAAIEARQQLFALVIAAPEPLRAKLRGKRTLAMAQTAARFRVQAEWDLETRTTAGVLRDLARRAIELWAEADRHEKEILGIVRAWRPDLLERKGVGPIVAATVLCAWSHPGRVHSEAAFAKLGGVAPIPANSGQVTTHYRLSRFGDRQLNLAFHTVVLSRIRWDEETQAYVKRRTAEGKTPREIKRCLKRYVAREFFRLLESVPSVT

SEQ ID NO: 109293 - protein, 417 aa, unidentified
MSEYAALVSIDWADQKHAVCLLDQTTGRREQAIVKHTPQALQEWALGLRQRFCGQPIAVCLEQSRGPLIYALLQYDFFVLYPINPATLAKYRQAFSTAHGKDDPSDADYLLDLLEHHRNRLRPWHPDDQKTRTLRLLVEQRRRLTSDRTRFSNRLTALLKGYFPQVLDWFEDIRTRLVCDFLERWPELSSLQRTRPATLNQFFRSHHSTSNSTNQRRLAEIKTAIPLTTDEAVMTSSVINVKVLVAQMRTVIAAISEYDRQIEALCLTHDDYHLFAALPGAGPVHAARLTAALGSDRNRWRTVDELLRFSGIAPIIERSGKQFRIRWRYFCPKFFRQTFHEFAAQSIQDSFWARAYYSSQRAKGKDHHAAVRALAFKWMRIIWKCWQTRTPYNEVIYLESLMKKGSSLLKFAADYQA

SEQ ID NO: 109294 - protein, 326 aa, unidentified
MQGKDVSEQATECKSYVGIDVCESWLDIHILPAAESFRLANTSEGHKQLKRRLKAHDVELVAIEATGKWHRALHRSLHAGGWRVAIVNPLRARLFAEAVGLLAKTDRLDARMLALFAASLAPPARPPTPAAIEELKELVQARSTAVAELTGLKNQRGTAETAFLRQLLKQRISRLAADIRALEREILSRIKTDDSLARRYAILLSIPGIGPVVAATLLARLDELGHATEKQIAMLVGLAPVADQSGNRDGNRVIRCGRSAVRRALYLAALTATRHNPAMKLFYERLIAAGKPPKPALAAVARKLVVLANALLGQDRLWQPVAPNQA

SEQ ID NO: 109295 - protein, 368 aa, unidentified
MKMNAIKAAPAASAIALKNEKSAKAKRILIGTDVHLRGYQAARKVDNGVIGVVENFRSEEALLLHVEKQCERAEQVVVVYEAGPLGYTLYRKLTARGVLCYVCAPDSSEQKRKRRKNNKIDARNLTSKLFNYLNGDEGALQLARVPTEAQEQLRLASREHDQMVEERKRLGAKGNALLLTQGFGSWSNWWRPKAWAQLSSLVPEWLLERLKIWVDVLKMLDEKICLAKVALARACSGPRPKGVGALSQIQLQSEVLDWSLYTNRRKIACLAGMVPSEWSTGDTERRGSITKVGVPAIRRIIVEMVWRIVLFQPQYKPVQKWQKVLQGTNPALKKKAVVAIGRQLIVDLWRLQTGRVTAQELNLVMVGA

SEQ ID NO: 109296 - protein, 343 aa, unidentified
MDEISMIGLDLAKNVFQVHGVDASGKVVLQRQLRRNAVEKFFAKLSPCTVGMEACGSAHHWARVIGRFGHDVKLMPPAYVKPYVKRNKNDGRDAEAICEAVSRPTMRFVAVKSVEQQAMLSVHTTRALLVKQRTMAANALRAQLSELGIVAPQGHKGLHELIARLQAPSEEIPEMMRSALLLLVGQWQSLDANERALEKQIVKAARCDREARQLMEAPSVGPIIASMVLAKVSDAKVFRSSRDFAAWVGLTGRDHGTGGKHRPGRISKQGDRVLRTLLINGASAYLRQQKRRGVSDPWLRELLARRPYKVAMVAFAAKTARIIWAMLAKGEAYRDRTSASAAA

SEQ ID NO: 109297 - protein, 408 aa, unidentified
MNPLFVGIDVSSKNNVAYLMKPDGSKHSSFSVQNNLGGAKLLSERIVSALSSMRLSDVVIGLEATSIYGDNLVYALREDGGLGRFRRKIHVLNPKQVKKFKEAYPDLPKNDWVDAFVIADHLRFGRIAKEVYMDDYRYQALRTLTRARFDVIQNLTREKQRFANYLFLKCSGMAQDKGIQNTSATTIALMERFETVDNLANADLDDLTAFVAETGRGRFADPESTAKAVQAAARGSYRLPKTVNDTVNQAMAVSIASMRALKEQVKVLDKAIEQQFEIIPNTLTSIPGVGKVYSAGIIAEIGDIHRFASQASVAKFAGLVWHKNQSGEFEAEHSQMIKSGNRYLRYYLLEAANSVRRCDSEFRRYYDLKFKEVNKYQHKRALALTARKLVRLVFRLLKDNRLYIPPEG

SEQ ID NO: 109298 - protein, 322 aa, unidentified
MEAQAKFVGIDVSKARLDVGVWPGAESFSTSNDERGIAQLVERVLRLAPRAVVLEASGGLESVAAGELLAAELKVAVVNPRQVREFARSLGRLAKTDRLDALVLAQFAQSADSNGRLTTMRMLDPAQAELKALVARRRQLMQMLVAETNRHERAPKIIRKSVVQSIKGLKRAIAVVEKQVAEVIANSPVQQAKAKLLRAVPGVGPELTAGLLADLPELGELGRRAIASLVGVAPHAHESGIFQGRRMIWGGRAHVRTKLYMAALSAVRFNPLLRAHYVALLERGKARKLALVACMRKLLLILNAMLRDQQPWRPPLELQHSR

SEQ ID NO: 109299 - protein, 361 aa, unidentified
MDRKGFEKLKGHLAAVSISSVLLGMESTASYHVNLFSYLVSEGYRVLLINPLLISNYVKMQLRKTKTDKKDAVVIAKFLLANGDTLVQRAPLSLISDLRDLSRQRESLVDEMTSLKIEIKRLLNITFPELEHMVGIFTKSILKLLQQYPSAFTLRDANLGQLSQMLIADSYGHKREAFAAGLIKAAHSSIGSKSPAKEMILKQKIALLLHLEDALQEITDMLIEMSRRLMEEDINIMTSIKGIGDKPAAHFLIEMGGDINQYERSGKIIAMAGLDPAVYQSGQHEGKGRITKRGNCHLRRIIWVMTTRVIQYSDIFKVYYLKRRKEGLPYKMAVLATAHKLIRVIYAMLTQRTTFCPQVNS

SEQ ID NO: 109300 - protein, 482 aa, unidentified
MQPKPQEKTTKDTCRTEPGHWHEMNRKQRRETMRKIQSDDLSLEVVHPDAAGIDIGNESHYVAVPPTRDSQPVRRFGCTTAELKAMAQWLKQCGIRTVAMQSTGVYWIAVYDILEAADLEVYLVNARETKNLPGRKSDVQESQWLMKLHTYGLLRNSFRPSQQIRMMRTYWRQRNDLVQAAGRHILRMQKALTQMNIQLANVLSDVSGMTGQAIINAILAGERDPHKLAEFRDPRVKASKHEIALSLEGNWQEDLLFVLKQEQDGYEFCQKQMLECDRQVEQYLQQREDRSKGTPLPEEKRKGRLKKKKGNAPQFDLRGELFRMSGVDLTQIDSIDVMTATTILSEVGWDMGKWETEDHFVSWLRLCPDNRISGDKIIGKGRLPTKNRVSISLKMAASTLRRSNTYLGAQFRRFRTKLGSPIAIKAMAAKLARLVYRMLRHGMKYVDQGAKFYETQHRNLQIKQLKWKAAKLGFQVLQAPAA

SEQ ID NO: 109301 - protein, 343 aa, unidentified
MNSSIVTLSTTKNNSPTYYDHYIAVDWSQVNMAIATSTRKSEQIHAVDLRSNLRDMKDFLGNLKGSKILTIEECPAAQWLYVELTEYVDKVLICDPYRNRLLSDGPKNDPIDAQKLCLLLKNGLLREVYHTHSSLFELRKYVSAYEDIIKAGVRLKNQRSAIFRSEGKNFRKESVKSDINNFVVGIIDKNIETYEQDRKLYQSLFTQIKQHNSKLKNLCMIPGIDTISAVKILAEVVEAHRFPEKGNYLAYCGLVKYKRISGQKMYGFRKPRFSRTLKSVYKTAAVVAITMSENPIKEYYESLLEKGIEVHNARNAVARHIAIITYGMLKSGEKYKPYKKKNK

SEQ ID NO: 109302 - protein, 312 aa, unidentified
MVNVGIDVSKEHLDVAVRPTGERLRVTNDESGHRELGERLTKLGPERIVLEPTGGYEAAIVQVLVTAKLPVVVVNARQVRDFAKASGRLAKTDTIDADVLAHFGEALRPEIRPLPDAALRELEALVSRRRQLVEMRAAETKRKQTAPKVVHPSIDEVIRFLTKQINDVDKDLKKLIRTTPAWREADDLLQSVPGVGPVLSSTLTALVPELGALNRREIASLIGVAPFNKDSGQGERKRTTWGGRAAVRAILYMAASTARRFNPAIRRFYDRLLVTGKPPQVVLVACMRKLLTVLNAMARDRRHWNQQLAEQG

SEQ ID NO: 109303 - protein, 422 aa, unidentified
MLQETQETEEIIERVAALDIGKAELVCCVRVPQEGRPGRRLQEVESYPTMTRSLLVMADRLRCLGVTRVVMEATSDYWKPVFYVLEAHGFETWLVNARDVRHLPGRPKTDKLDAVWLCKVAERQMIRPSFVPPPQIRRLRDVTRYRIDLVGVRGAEKNRVEKLLEDAQIKLSVVASDIFGVSGRDMMAALIAGERSPKALAQLARTRMRTRISALEEAFTGHFTDHHAFLLAKMLARVDGINADIAELDAKIEEMIAPFASAVERLDEIPGIGPVAAAVIIAEIGIDMSRFPTAQHLASWAKFAPGVKESAGKKKGKGSTGHGNSYLARILGEAAVGAAKTDSFLGERYRRIARRRGKKKAIVAVGRSILIIIWHLLSDPEARYADLGAGFYDQRIDPERRKRAHIHQLEALGYKVTIEPAA

SEQ ID NO: 109304 - protein, 341 aa, unidentified
MKEVSIVGVDLAKRVFQVHGAAVDGSVVFRKKLGRGQFLAFLAKLPVCTVAMEACATSHFWGREIEKLGHVVRLIPPIYVKPFVKRQKNDAADAEAIAEAASRPTMRFVAVKTEDQQAGAMVFRARDLLVRQRTQLINALRGHLAEYGIVAAQGAAHLKTLKAALGAPEVELPATVRDIARLYLDQIARCAEKVAELETSIRSKAAATEMATRLRTMPGIGPIGALAIEAFAPPMQEFRRGRDFAAWLGLVPRQKSTGGKQILGRTSKMGQRDIRRLLIIGAMAVVRAAVRKAPPEGSWLARMLARKPRMVVAIALANKMARGVWAMQTKQENYRDPIAAA

SEQ ID NO: 109305 - protein, 348 aa, unidentified
MQSMYYIGLDVHKRTISYCVKDGSGTIHAEGTIPATRFDLDRWMKTLPQPWTAAMEAAVFTGWIYDHLQPHAAALKVAHPLMLRAIAAAKKKNDPIDANKICDCLRCDFLPDCYMASTTIRERRRTLRYRNLLVRQIVQMKNKIGMLLTEAGVSYNKQRLHKAGYFRELLATNPDIDEGLVSLLRLCRETVVRLQRTESALVRSLERDALLLDRVERLMTIPAVGPITALTWALEVGDVKRFSSIKKASSYCGLCGAEKRSANTVQRTPLSKQRNKHLQTTLIEAAKWRRAIARSWPCSMTRRSRKAMPIARRWRWHGSWWPTSWQSTVGSAIFRCWKRTASLSRTWR

SEQ ID NO: 109306 - protein, 340 aa, unidentified
MGYYVGLDVSLKTTHICVLRADRSVVWQGLVDTQVGMIADAVERWRCDLALVGLETGSLTPWLYHGLCAKGLPLVCMDARRAADALKARPEKTDKADARALAEMLCCGWYSAVHVKSLASHRLKALLSAREQLVSVKRQLYGQIRGLLRPFGIKISSRSGAKGFDEEVRMACQKEEILYAAVSALLGGLCGIVGQIAALDERLRDIVRRSQACWHLTSVPGVGPVTALAFVATVEDPRRFKQGRSIGSYVGLTPRHYQSGERDITTSISRQGDAMLRHYLYEAANCLLTTVRQSSALRSWGLKLMKRVGAKKARTAVARKLAVLLLGLWKRGEHFEARPA

SEQ ID NO: 109307 - protein, 403 aa, unidentified
MNSVGIDISKGRSTVAVMRPFGEVVISPFEVRHTDSELSELARQLKSLNGETRVVMEATGNYHAPVAKLLHDAGLYVSVVNAKLVHVYGNNDLRRVKTDRKDAVKLANYGLDRWLTLPRYVPEDDTRLLLKNCYRQYRQYSKVQTVLKNNLISLLDTVFPNVNRLFSSPIRGDGSEKWVDFVAEFWHCRCVSEKSQKAFTSKYQRWCRKHGYNFSEEKAHTIHAEASGYIGVMPKSETTKLLVEQAVAQLRATSAALTALKHEMLALAAQLPEYPVVMGMFGVGPTLGPQLIAEIGDVRRFYSKKALVAYAGLDAPPNDSGDVTGKHKSMSKIGASSLRRTLFLVMSVYLQNAPLDEPVYQFMDKKRAEGKPYRVYMMASANKFLRIYYATVKAYLESLEHTA

SEQ ID NO: 109308 - protein, 333 aa, unidentified
MNNYAVYVGVDVSKHSFTTTLLFDEIRKTFNVPSKPEQFENRLRPFLEELGVDKSNVLIIMESTSNYHLPLAEYLAEKEYNVGLANPFSMKRFMDAKMSRAKTDKVDSYFIAEYGRQIFKGPLFKPKTEAQKEIEAMVKTLEGFNKQLTMLKNQREALSLIPMKGLKKILGYYDRIIEAIEKEIKMLKKEIMELCKKYFPEEYKLLKSIPGIGERAIAVVVSILRKFEGFKRAKDVGSFVGLCPSPVESGSSVRGKGSIKKRGNPYVRQVFYMCALSAVRSNPYCKDLYERLLERGKSKTEALVAVAHKLLRQCYGVLKSRTPFRVVDKEVTP

SEQ ID NO: 109309 - protein, 346 aa, unidentified
MKILALDLGKYKTVGCTYESESGAHQFQRTFTTPADLRRLVQEVRPDRVVIEVCSIAGWVCDLMGQLGTEVQVANTSDDAWRWRKVKQKDDRRDALKAARLSAVNQLREVYIPPREVRQWRALITYRQHLVGRRTKIKNHIRDLLVREGQLLPRGRSCWNQLGQAQLNTMARPFAEVEAAELWRGELWEELQQLQMIQERVASVEEKLNAMGAADKRVQLLRTIPGVGPRLSEAIVALLDQPQRFRKASQVSSYIGMVPKAFDSGESERRGRITRQGNRLVRSLLVEVAWVGLRHNSWLRQTYQRLSGGKKARKKIAIVAVGGKSLDRCWAMLRDNCPWRWQPQIT

SEQ ID NO: 109310 - protein, 377 aa, unidentified
MKKELYLGLDVHKDCIPTAIAEEGRRGEVRDMGAISNDLHALEKLIGRLRNAHGKEVVLRACYEAGPCGFGLARRLKQLGVECQVIAPSLTPTRSGDRVKTDQRDARKLARLLRAGELTPVYIPDARDEAIRDLCRARSDAVDDRRRSRHRLKGFLLRHGYRYQGKSSWSAAHERYLRELVLPHPAMKVILEEYLQGIAAAGERIARCEAAMGDLLEKWRLAPAVRALMAMKGFQTVAAMILVSELGEVHRFTHPRQVMAYLGLVPTENTSSERRRQGAITKCGNAHARWLLVECAQHYALPPKVSRELSRRQQGQSALVRAISWRAQNRLHGRYRRLLARRLQRNKAIVAIARELCGFIWELLRKQPCYQAQSTPV

SEQ ID NO: 109311 - protein, 320 aa, unidentified
MMMLGIDVAKAKFDAALLREGTFMHKTFANTAEGFEALRHWLHAQDVAQVHACLEATGSYGEALAQWLFDAGHVVSVLNPAQVKDFARSLLTRNKTDTVDAAVLARFGAALRPAPWQPPAPEVRVLRALLRRLVALEEAHQQEHNRLGVADAEVRDSIQRHLEYLEAALAQLRGRIQEHIDQHPGLKHKQALLQSIPGIGTVVSQNLLSWITRIEAFDSARQLAAFAGLTPKRHESGSSVRGRTRLSKIGHADLRKLLYFPAMSAIRHNPLLKAFAERLRQNGKPPKLILAAAMRKLLHIAFGVLKSNVPFNPHILDKNI

SEQ ID NO: 109312 - protein, 334 aa, unidentified
MKQVTQVGVDVDSEELVCAMQRAGQRQPLARFANTAAGHKKFIRWATKGGRPARICLEATGIYSLEFALALHHAKNVEVMVVNPRAIKDFTRACMQRAKTDAVDAGGILDYLERMPFVAWQPPAAEVLQLQAINRRIVQLNTELAREKNRRHASEFAGACAHAIAHDIEVNIHHLERRIERMHDSGLKLVRGVPALATKLAHLVSTKGIAEASAMRLLGELLVLPDELAAPQWVAHAGLDPRPYDSGTSVHRPRRISKVGNRHLRAALYMPALVAIQHEPNVKAFYDKLVAAGKKPMQAVVAVMRKLLHAIWGMLKHDQDFDGNKFFKIAPETA

SEQ ID NO: 109313 - protein, 337 aa, unidentified
MEYFAGLDVSMAETHVCVMHRDGAVVYEVRVPSTPADIAAALAKAPACGRIVFETGRMAPMLYHGLRRLGLPIICIESRQAYQALKSLATHKTDRNDARGLAHLARTGFFKPVHVKSLPAHALRSLIIARKKLVGQRVTLENQIRGLAVVFGVRLPRALTAAFIRQALRASEGITGLSAAMRGLVAARAAVLAAVTAIDADIRKVARASAACRRLMTIPGVGQLTALAFTATIDDPSRFRRSRDIGAYLGLVPRRYQSGEVDYTGSISKCGDRRVRTLLYEAANVMLTRYKSPLKLKDWAFAIAKRSTMRKARIALARRLAIIMHAMLRDGTEFHPV

SEQ ID NO: 109314 - protein, 343 aa, unidentified
MQKVTTIGLDIAKSVFQVHGVDTAGNVIIRRKLKRRYVVAFFEKLPPCLVGIEACATSHHWSRELQALGHTVRLMPPAYVKPYVKRQKNDAADAEAICEAVTRSNMRFVETKTPEQQSCLMLHRTRHLFIRQQTAVINSIRAYLAEFGIVARVGRNGVEDLLDVIADPSDGRVPELARACLIALGAQLRMLKTQILQFDHYIMAWHRSSEMSKRLDEIPGVGPALATALVGSVADPRAFRSARHFSAWIGLVPKQHSSGGKDKLGSISKQGDRYLRSLFTTGALAVIRYAKIHGTKHRPWLTALLTRRPTKVAAIALANKIARMAWAMMIKSERYKEPAALAA

SEQ ID NO: 109315 - protein, 423 aa, unidentified
MDILYERVAGLDVHKDTVVACVRIMTEGKAQRECRTFLATTEQLMELRRWLEESRCTHVAMEATGVYWMPVFRILGEGAFELIVANAAHIKNVPGRKTDMNDAMWIADLLACGLIRGSFVPDEQVQELRALTRTRKQLVREQTRHVQRIEKTLAEANIKLGSVISDIMGASGRRIIQAMIDGVRQPNKLAALAGKQIKASPKALYDALHGRLTDHHRFLLALHLRQRDGLDETIRKLDAEIAERIEHMEAQVDGRKIPFRHLIGLLTTIPGVNAVAAPSVLSEIGADMSRFQTAGHLVAWTGLCTGQNESAGKRKSSRLRKGAPWLKTMLIQCAWAAKRSKNSYYRAQFFRLQAKRGPQKAICAVAASILTAIYHILKDGTEHHDLGADYFDRRPTEVKASRLVARLKRLGFNVQLQPIAEAA

SEQ ID NO: 109316 - protein, 386 aa, unidentified
MKRNDLSRSLVAFDQDSTLVAVIELSLKSWLIAGLVPRLARQPLKKQSADAEAIVKLLYRWREEAVKAGGKIERIVVAFEAGRDGFWLARWLRERGIEAYVIHPTSIPVSREHRRAKTDRLDTALLMRAFLGWLRGEAKHCSMAAIPTLAEEDARRPNREHEHLVGERSRIINRMKATMIRHGIGNFNVKYRKAAERLEEVRGREGMPLAENTLAELRRDMARLALVRVQIKEIEKTRLERLKKAPQEGSHPMVLMLAKVMSIGIETADMLVHEVLSRGLRDDRAVARYGGITGAPDESGSKRREKGLARAGNARVRRGMIQLAWRWLMFQKASGLAQWYRARTQSARRDVRKTMIAALARKLLIALWRYVTTGEIPMGARLRPAQ

SEQ ID NO: 109317 - protein, 339 aa, unidentified
MKLYSGIDLHSTNSYLAIIDESGKRIFKEKLPNEIVSITERLSLYSGTLEGVVVESTYNWYWLVDGLMAAGLTVHLANPCAIQKYSGLKHADDKHDAFWLAEMLRLNILPTGYIYPKDERPIRDLLRKRSHLVSLRSSLLISLQNIITRNCGMKIKTNDIKRLRENRVHPLLADNEDLALAGQVSKDSIDFLTRQIRAIETFLEKKLELKDAYKKLVTIPGIGKILGLTIMLETGPVARFEKVGNYASYCRAVSSQWTSNGKSKGKGNKKNGNKYLSWAFSEAAEFARRYDDKARAYYNRKSRKTNFMVAHAALAHKLARAAYYIMKDQVAFMPEKIFT

SEQ ID NO: 109318 - protein, 347 aa, unidentified
MRFYKHSHAFYAGVDLHARSMFTHILDNDGKTVFEADLPASPDAFRNAIAPYRAGLVVGCECMFSWYWLADLCEDDEIPFTLGHALYMKAIHGGKAKNDRIDAAKIAGLLRGGMFPMAYVYPRAKRDTRDLLRRRCFFVNQRSQLTAHIVNTNSQYNHPPLTKKLCYASNRSDDLAERFTQPSTQASIRADLALIDAYDAQIDEVERTVLKNAKINDPVTLNLLRTIPGIGKILSLVLLYEIDQIARFPEVGNFLSYSRLVRCEHESAGKKKGSGGKKIGNAHLKWAFSEAACLMLRAEADAKKWLDRQARKRGKKKALSVLEAKLGRAVYHVWRKQQAFDLQRFFA

SEQ ID NO: 109319 - protein, 311 aa, unidentified
MDYAGIDTGKHQLDAALHKGGEELQVKNSPEGHRALSAWLRKHGIKRVGIEASGGYEMDVVAHLRREGFAVIVFQPAQVRAYAKFHLQLAKNDKIDARLIAACTAAKANIHAPPDPRLAPLAAHLTWIDQIGEDIACNKTRLETCRDPRAQAYWKQEIVRLEKLQKAEIALLEKAIRLHRDLAERLDLIASVDGIGLKTAVVILVRMPEIGRLSREQVAALVGLAPYDDDSGSRHGHRHISGGRKRVRWGVFAAALPASFLHNQQLMAMYQRLRAAGKQHKVALVACARKLVIFANTVVARGTPWQPQGAL

SEQ ID NO: 109320 - protein, 339 aa, unidentified
MKKKYFIGIDVSKHTLDVAFIINELSSFSKPVWKQFNNTVQGLQQMKKWLAEIQVPLSEQTIVVIENTGIYHRLLWQFFSSLNVDICIENAAQVKWSLGIARGKSDKVDSRRLALYAVRNADRLKPTPALHCAVMPLKDLLTIRNKLLVQTRSLETALKELKHVSTSAADTAALKKLLQPALKGLQQSLKQTEQKIKDVLKQDDIVYKTYKLLNTIPGIGHITAIYLICCSNLFTMCTNGKQLACYCGVVPFDCQSGISIKGKHHVHKMANKELKRLLHMCALTSIKNHKEFKDYYERKKQEGKHAMSILNAIKNKLVLRVFAVVKNERPYVNNYAEAA

SEQ ID NO: 109321 - protein, 377 aa, unidentified
MTEFAVSTSNEQSIFAALELSKNSWLLAIRVPGRDNPSLHPIKGGDAEGLIAKLDAARDRVAKVTGQAPAVTLCYEAGYDGFWLARFLEQRGIECLVMEPASLQVNRRARRVKTDRIDVESILHTLIAWCRGERHVCSMVVVPSVEEEDLRRSHRERDRLIRERTAHINRIKGLLFGQGIRGINVKAHYKTLTPSALVTADGRPLPERLGRKITREIERLAQVQAQIVAVEHERDKAPTPCVATERQRHQLLRLKGVGPALSSTLTREVYYRRFVNRRQVASYIGITPSAYDSGEGRRSQGISKAGNRLARVAMIEAAWLWVRHQPDSALTQWFHDRTRGQKGRIRRIMIVALARKLAIAFWRYLEIGLIPEGAVVK

SEQ ID NO: 109322 - protein, 355 aa, unidentified
MVKLMKYAVGIDVSKDKFDVCFCEINTVQQINIKSSGRFCNTDKKFKEFDLWLGKNQKEKIPLILMMEATGVYYDKIALYLYKKGYSVSVVLPTKAKKYMQALGLKSKNDKIDAKGLARMAAEQRHDLWQPMGDYFYKLRQLTRYHEQLQQSKTHFANQIHALEHGSFQVKEVVRHQRKMILLIEKQIVETLKFIKEHVKQKVDNICLVKGIGLLTVATIIGETNGFEMFENIRQLVSYSGYDVVENQSGKHFGKTKISKKGNAHIRRILHMPSFTVVRYDQKPFADLFERVYERTNIKMKGYVAVQKKMLIYIYTLWKNNQPYQPRVNNISGNDESKSLFLLVSEGNIIDSKKK

SEQ ID NO: 109323 - protein, 421 aa, unidentified
MRGLRGRGLRAVKEGTLIATVDIGATTNTGYCTTVDGRDIKVFKFGNSREGFEKFWHMVVAARNRFGCHEVVMGHESTGPYAEPLVHYLMGKPVRIVQVNPLHTKRLKEVNDNSPGKTDDKDPRVIADIIRLGRALTVVVPEGDAAYLRRLNNARERHVCEHIALLNQMQQRVFLIFPEFKTLIAPMRGRTVRFILKKYTTPESIGALAKEVFGEEIRKKSMGKLGIKEAELLVKAAQHTVGIKEGVAGIALDLRHIIAQLEVVERFMSEIEVEMVATLERIPCSARLLSIKGMGVVSVAGLIGEVGDFSKFKTQSELMKLAGLDLYEVSSGKRKGQQRITKRGRSLMRKILYFAVVQMVKKHGIMHEYYERLTGRGTLRMRALVAAMRKLLRIIHAMMRDQRDYVGQYEAPKRRVIKKAA

SEQ ID NO: 109324 - protein, 307 aa, unidentified
MWEKIYFGVDVCKESLAFCGPGVAGQVANNAPGQRRLLARLPKGAHLIIEASGGYERELVRMAQQSAVPVSVVNPRQVRDFARGVGRLAKTDPIDAEMLARFGATVNPPPDAVPTAAELALQELLSARQQLVEQRTVLLQQQAQHLNSIVRRLDRARLKLLQRQIAQLELAIGSILEEQSALKQKVERLQQVKGVGLITALTCVALCPELGSLSRGQTAALVGVAPYDDDSGARKGWRHIAGGRPRLRRALYMAAISAIRSNPILRRFYQQLRQRNKSSKVALVAVIRKLAILLNQLLPNPSFLPAS

SEQ ID NO: 109325 - protein, 415 aa, unidentified
MRLFVGDDWAEEHHDVEVMDSAGRRLVKGRLPEGVAGIARLHAMIGEQLGEDADDDDAGQVAVGIKTDRGPWVQALVTAGYTVYAVNPLQASRYRERHAVSGAKSDAGDAHVLADMVRTDSHQLRTVAGDTAQAAAVKVVTRTHKTLIWERTRHAHRLRHALRDYFPAALEVFEDLDAPDALELLARAPDPASAARLTTAQISAALKRARRHHIAAKANQIQAVLRAPHLGQPAIVTAAHAASARALIAVLATLNEQITTLQGQVEAYFWQHPDAEIIMSQPGLGPVLGARVLAESGDDPRRYAIAKARKNYAGTSPITRASGKKKTVAARYVRNDRLIDALMAQAFTALHASPGARACTTTSAPAEPATTPPSASSPTASPASSTAASKPAPSTTRQPPGRRPLPSRRKPQLDI

SEQ ID NO: 109326 - protein, 405 aa, unidentified
MMQGENNMQSRIIMSQEKKKGISYLPTKVLKYSVGIDIGKLEFAACISSIDLEQRVKVIATRQFKNTDKGFNLFQEWTKPKIKQETKVVFSMESTGVYYENLAYFLFESGYFVSVVLPNRSKKYLMSIGLKSKNDKIDAQGLAQMGAEQNLEQWHKPKKNFVELRSLTRQRQSLQENKTVFNNQLEAIMHSKYASSIIVESLNQLILALDGQIEVMNNEIEKVMSEDDEIREKMKNICAIKGISIITLATILSETLGFSQFKNLRQLTSYAGYDVVENQSGNHVGKTRISKKGNSRIRRVLHMPAFVTVTCKEPIFFNLWNRVYDRTKMKMKAYVAVQRKMLALIYTLWTNGEIYEPEHLVMQSRSSSFRMASQKPKKVGGTNPPTLDELPYKAFAGSSLSALQM

SEQ ID NO: 109327 - protein, 417 aa, unidentified
MNPEWTTQTYFAALDWATEHHDVIVVDRVGTIVADFQFAHTAEGWSQFTQQMQPYGCGPISIETSCGMVVDQLLQRGFPVYPVNPKAAKRYRERKAPSGTKTDHHDVWSLADALRTDGHAWPALHPQDEATATLRLLCRDEIVLIEQRTALVNQLQAALRDYYPLALDSFDDWTKPFTWAFVRAFPTAEALRQAGQRRRENFLHLHKLWRPETAPERLAAWARGQLLNASPAAVKAKSLLALSLATVLEALQRQIAQYRRQITSSFEQHPDHDIFGGLPGSGTKLGPRLLAEIGSIREIFPDAARLLCFAGVSPVSFQSGKIRKSHIRWACNRVLRATVHLWVNETRKTCAWAQAYYQAKREAGHSHASALRCLGKRWLKLLWRLWQDRVCYQESKYLDSLRQHGSFVWNQLQSQSA

SEQ ID NO: 109328 - protein, 403 aa, unidentified
MNSVGIDISKGRSTIAVMRPFGEVVISPFEVRHTDSELSELARQLKSLTGETRVVMEATGNYHAPVAKLLHDAGLYVSVVNAKLVHGYGNNDLRRVKTDKKDAVKLANYGLDRWLTLPRYVPEEDTRLLLKNCYRQYRQYSKVQTILKNNLISLLDTVFPNANRLFSSPIRVDGSEKWVDFVAEFWHCRCVSEKSQKAFTNKYQRWCRKHGYNFSEAKAHTIHAEACGHIDVIPKSETTKLLVEQAVAQLRATSAALAALKHEMQALASMLPEYPVVMDMFGVGPTLGPQLIAEIGDVRRFYSKKALVAYAGLDAPPNDSGDVTGRHKSMSKVGASSLRRTLFLVMSVYLQTAPLDEPVYQFMDRKRAEGKPYRIYMMASANKFLRIYYATVKAYLESLEHTA

SEQ ID NO: 109329 - protein, 461 aa, unidentified
MAKQLGKRKKDGAKADATEGLPPLNLHAAGIDVGSAEHYVAVPPDRDAEPVRKFGSFTADLHRMARWLKDCRIKTVVMQSTGVYWMALYDVLESHGLEVNVANARHTKTLPGRKTDVQECQWLQKLHTFGLLNNSFRPPDEIRVLRGYLRQRENLVAAAATCIQHMQKALTEMNIQLANVISDISGTTGLAILYDIVRGERDPYKLAMHKHSRIRASRQEIARSLQGTWRQELLFVLEPSLDLYQTYQQKIQTCDERIDGQLRSMEPRIDPLSEPIPEPRRGKDARGHQSGFDLRGQLYRITGVDLTRIAGIEVQTAQTIISEVGVDMSRWKTEKHFASWLGLCPDNRISGGKVLKRGTRHVVNRASTALRLAASALLRSQSALGAKFRRLRSKLGAPKAITAMAHMLARLLYRMLKFGHDYVDRGIAFYENKSREQQLKRIAKQAAALRMQLVPLAEVVS

SEQ ID NO: 109330 - protein, 376 aa, unidentified
MKQFNDIYVGLDVHKDTIAVAIVRGLRSKPTCFGEIPNTPAAITKLLHQLSPDGEVLNFCYEAGPCGYEVHHQLTKLGQSCSVVAPSLIPRMPGVRIKTDRRDAMSLAKLHADGSLTAVWVPGKEQEGIRDLSRAREDFKQTETKARQRLGAFLLRNGKIFTGKSKWTVAHWRWMETLTFETPMQHIVMQEYVEALKEASRRLLGIEKQILLAVRGWSLEPVLNSLLAMRGVNTITAVTLLAELGDITRFDNPKQLMSYLGLVPSEYSSGSKRQQGSITKTGNGHVRRVLVEAAWNYRFPARKSRTIEMRAEKTSDRVQAIAWEGQKRLCGRYQKLLSLGKLKQKVCTAVAREMVGFVWAIACEASGRVHGSRATA

SEQ ID NO: 109331 - protein, 441 aa, unidentified
MSVLKARIPDCPHCATLPITIKPHRGEGTLYSRVNISCGLDVHKSSISGSILKSDGTFETHQFSTTIDGLLAMKEWIVANHCERVLMEATGVFWIPVYSVLEPYVEVHVVNPLFIKYVPGRKTDVLDSVWIAEIALNGMFKASYIPSKNIRELRELTRTYRKLIEERTNHKNRIHKILVRNGIRLSDVLSDIFGKSGMIVINGLIEGKPIDQTLKMIHNSRILKKKDEIKRAICGELSENDLFVIQQSLECIGQHDCQIAQYENKILKNMFPDNGNIEILVSIPGIGFTIGSSVLAEIGNIGQFDNPKQLVSWAGLSPAVYESAGKTAHGHITKRGSKYLRTMLIEAAQSIARGKSNRLKHFFSRIQSRKGYKKAIVALARKVLSIIHHLLSNHEKYVESPGKEKKIKLPDICPDPVMDHDEMIHILTQAGYIVHKSNPVR

SEQ ID NO: 109332 - protein, 350 aa, unidentified
MNVNHYIGFDVHKRSVSYCVKIADGQIVEEGKLRATHEALRHWARKREEPWCGAMEATLFSGWIYDTLQPFAVELQMGHPALMKAIGASKKKNDKLDARKIADLVRCNLLPACYVAPVEIRELRRMLRYRNLVVAQATRMKNKMSGLLMEVGAGYNKQRLHGKKYFGELLDNLEEVPESVKDLLRLSRGTLEMFEATQQQLLGRLRQEPLLAQRVILLRSICGVGEVTALTWALEVGDPQRFSSVGRAVSYCGLTSALDSSADKQQRGPISKQRNAHLQSVLIEAAKLAPRWNPQLAALHARELERGNRNRATLALARKLVAYLLAVDKSGQPFQIRGSRAAASEKEEAA

SEQ ID NO: 109333 - protein, 362 aa, unidentified
MEEAHIITHSVLKSNYERSPIMAKNVYFVGLDIACDDFVASIYQSPKQSVITKEGIENTLDGFNVFIPWLKEHGLSKTNCIICMEATGVYNEAIAHYLASQGFRVSVEPPLKVKRAFDPVGHKTDPVDSRQIAEYAYRYSDELRFWQPKDEIIEKIKHLLTAREQFTKQSTAIKNAMKSYEKHIVQVPLIVKAHRQTLREIKKHITEIDKELDRMIRQNPSISNINNQLKSIPGFGLLLSASLITLTGAFSDISHYKTLAAFLGICPYQHQSGKSIYRQPHMRSFGPAYPRKLLTLAARSVATHNDVFKKYYARKLAEGKAKKLILNNISNKLVKIACALIKNNSRYTVTYRSINPMFLNIS

SEQ ID NO: 109334 - protein, 468 aa, unidentified
MAMKEPEEIPDEAHEQLYERVAAIDVAKDSGKVCLRLPAESGSPRRVSRVWDVRARSRAVSELADHLAELGVEKVTLESTSDYWRIWFYLLEARGLDVQLVNARDVKNVPGRPKTDKLDCVWQAKLTEKGLLRPSFVPPKPIRVLRDYTRLRVDLTAERTRHWQRLEKLLEDALIKVSAVASGIDTLSVRDMLEAMIAGERDPRVLADMARGRMRVKHADLVEALTGQFDDHHAELARMLLDQIDGLNRQIEDLSARIDALLADMPLPPGPGGGAAPADTARSTDPSPAAGGPEPSGPAPAKVLTARDLVDILDEIPGIGRHVAEVIIAEIGLDMTTFPTAEHLVSWAKLCPKTIQSGSKHTTGKAGKGNRYLKAVLGDAAAGAGKTKTFLGERHRRILRRRGKLKAVVATARTTLVIIWNLLNDPGSRYTDLGEHYYVDRVDQGRRIRNHVRQLEALGFEVTLVVAA

SEQ ID NO: 109335 - protein, 337 aa, unidentified
MTEFNTIAIDLAKSVFQLCVISNQGKSIKSLRLNRTRFQDFMANRERSRIVMEACYSSHYWGRYFEKAGHEVLLIPAQHVTPFVRGNKNDKNDALAIYEASLRPNIRFVPIKAEYQQDIQCLHRMRERLVANRTSLCNQLRGLLADYGHIFPVGINAIIKGVREIIRDSSLSGSLLSELESSIVEYDYQTKRIDKINKVLKSHSDKNPHSQRLMQIPGIGAHIATAITSTVGKAEVFKNARDFAAWTGLTPRQSASGNKSVMGGITKRGDQYLRKLLVQAARHTVRWAVKESDSKLAKWINEIIVRRGLQKGVVAVAHKLARIIWCVLTREEGFKPA

SEQ ID NO: 109336 - protein, 358 aa, unidentified
MSGASSDQEKITVGLDVSDKHVHACFLDSQGNIVEESRLAATAVALRRRFGGAERYRVVIEAGLHSPWMSRLLLDLGHELYVANPRRLRAIYQNENKSDRVDAEYLARIGRLDPTLLYPLRHRSAEASADLAVLRSRSALVKARGTLANYLRGVVKSAGGRIPHCDTRRLARKAGEYLPAELVPALAPIVETIADLDTRIRAYDLQIEEMARSRYPQTELLRQVVGVGPITATTFVLTVEDPTRFTRARSIGSYLGLRPRQDESGSLKPQLHITKAGDASLRTMLVQCCQYILGPFGPDTDLRRWGLKLAERGGKNAKKRAVVAVARKLAVLLLRLWVTGEIYEPLRMARVRGELTPA

SEQ ID NO: 109337 - protein, 286 aa, unidentified
MDHYAGIDVSLECSSVCVVDASGRIVREGRVASEPEQLIGWFGALGLRLSRIGLEAGPLSQWLYAAMRDTGLVVELLETRHVRDAFRAMPVKSDRNDARGIAQLMRLGWFRPVHCKSLAAQEVRALLTARRLVQAKLHDVEMSLRGLLRGFGLKVGRTTAKRFAGRIAELVAGQATLQMIAASLLSVHAVLLREFNELEKRVRAMARADERTRLLMSAPGVGPIVGLTYVAAIDDPTRFKSSKGVGAYLGLTPRKHQSGEKDVTGPSARSAMAAPAPRSMKPPTSS

SEQ ID NO: 109338 - protein, 356 aa, unidentified
MSKVTCFVGLDYHQHSVQVCVLDRQGRQLLNRACPNDWRAIAQSVAPLGRVKGAAIEACCGAADLGEELSRHAHWPLELAHPGYVAKQKRSPDKSDFSDGQLLADLTRVGYLPKVYLPPAYERDLRQLVNHRQALADHRRAVKLRIGAILRQSRVRFPEKISRWSKAWISHAQGAVEFSDHARWILQDLLEELAHLNYKVGIADARLREATAGDPLVDRLMEEPGIGEVTAWVLRACVGSFKRFATGKQLSRYCGLSPCNASTGAKQADAGLINGCNKLLRATLIQAAHRLVRTEARWRRLNDSLRKRGKPACVAVAAVANRWMRGLHHRIVEWTSGGARRREKKLPAKEACRELP

SEQ ID NO: 109339 - protein, 310 aa, unidentified
MATHVGIDVSKHSLEWCVGSEGAIQHTRNEPRPIAQLARRLVEIDPDRIVVESTGGYERAVVGKLAEAGLPVVVVNPRRVRSFGEGMGFLAKTDAIDARLLALFGEKARPPLRPILQGPERLLADLVARRRQLVSMIVAEKNRRDLATREVRRTIDPVLRMLSKLVRDLERRIDQALHHDLDRAELLGLLQTVPGVGPGVARTLLIDLPELGHLGRREIASLVGVAPFAHDSGTQRGLRRIRGGRASVRTALYLAAMTASRFNPLLTDLYQRLRRAGKPPKLAFVAIARKLLTILNAIARERIAWKPHTP

SEQ ID NO: 109340 - protein, 417 aa, unidentified
MSRFIGLDVHRDFAQIAIVENGVVSDAGRVDCRPEALREWAAQLTTADQVALEATGNSDAIATLLSQHAGRVVVSNPLKTRAIAEAKIKTDKVDARILAQLLAADFLPPVWLPDDRTAMLRRMTTARAHLVRQRTRIKNRVQAVLHRNLMPRPPVTDLFGKTGRAWLEILPLPEDERASVTSLLRQLDFLGGELADADRAIAQQALGDQAIRRLMTIPGVDVIVAVSIVAAVGDFSRFESPDKLVAYLGLHPKVRQSGNSPAIHSHITKTGRASTRGMLVEAAWIAAKAPGPLRAFYHRIKQRRGFQIAVVATARKMLVLAWHLVTKDEDYAFARPSLVAFKRRKLELTAGAPKAHARRGTGYDYNDKQLRRFERDLVEKSEQAYERLVASWQPSRPAGADRIDFHPTDKEQMPTKA

SEQ ID NO: 109341 - protein, 443 aa, unidentified
MPLGIGHSAKRCLVFYPGRALLFWSRKTTMENSYRVAGIDVHKKMLAVVITDAAVIGEFRFERRKFGTGADELRSLGNWLTEQGVKEAVMESTAQYWKPVWQGLEDSFRLHLAQAHSNKAPKGRKRDFADAERLVRRHIAGELILSFVPDQEQRLWRTMTRTRQQLVRDRVRLQNQLEGFLEETRIKLSSHVSDLLGLSARRMLQAMADGETDPAKLATLATSGLRATSGELRDALSAATTLRQMQRQILRLFLERLTLLEAQIDTLEKSAAEGLRQHQDSVRRLSEVPGLGADSAQQIIAEVGPQAATFPSPEQLSSWVGCCPGREESAEVSTSDRSPKGNRHMRRILTQAANAAVKAKGSVFELLYRRLVRRMGHAKAIWAVAHRICRITWKILHQGVIYEERGQRTNPQAVRQRTNRLVRDLRRLGYQVQLTPLNQVATA

SEQ ID NO: 109342 - protein, 426 aa, unidentified
MQNCLFIGVDVALKGNQFCVMNFDQHIYFNLKFPNNPEGNEMVINKIKDIEDKFFFEKVIIVMESTGMYSFHPACYFSSNEYLNNYHTEVYQINACDFDKYKKSFHDLEKEDGIDAYVLADFARVGRTKGLYPFKGSQYIALQRLTRQRYHICKELIREKTYILTNLYLSFSGLMSLNKNEMPFSDLFGATSSAFLEEFESPDQIAESSVEELINFISEKSKNHSSDLDGKVTALNKAIRASYRLDQTAYEPINVAIACSLNTIKFYQQQLKNIDKAILTTALGLDSNTYNILLSIRGIGKVYAAGIMAEIGNIERFPHNSKLAKYSGLYWKRNQSGEFDSQDKKSSKKSNKYLRYYLVEATASCVRQNFPFIKDFYNLKYNEVTKHQHKRALVLSARKLERLIFGLLRKNQYYKPINSVQNSKNN

SEQ ID NO: 109343 - protein, 354 aa, unidentified
MPRKSIRLEAVATLGIDIGKNTFHLIGLDRKGAIVLRQKLSRGQVQARLANIPACLIGMEACVGAHHLSRQLKAHGHEARLMPARYVRPYSKGQKNDFRDAEAIAEAVLRPTMKFVATKTVEQLDLQGLHRVRERLVCQRTSVINQIRAFLLERGIAVRQGLRALRTEMPIVLAMTDKLSPRMIHMLEDLCTDWRYLDERIETVSNEIETLSEQDVGAKRLMTVPGIGPIISTATVAAIGSGDVFSKGRDFGAWLGLVPRQMSTGGRTVLGPISKRGNRYLRMLFVQAARAVLLRPQSWEKHGLKSWIEAAARRLNRFKLAIALANKIARMAWGVLHGGRNFEVRPMKPAPQAA

SEQ ID NO: 109344 - protein, 631 aa, unidentified
MKVNSFPVLELLAFRRAKAMAENPHYARAFENDLTDKIYNEIRTRMLHNLNFIVEIIGETGSGKSEAGFHLNWRCQRELGYDFLTRDNYAFTFTEAQNIVKKYNDKWTIQIDEQVRNYFGEGARKELASMQDLEDTQRANQINFIFVSPTTRPFHTGLHYILRTWMIDYVQQTNYLLIFEPTDTTLKMPLGYVAVSRLKSPQYLHFLTEYQKYKKEFNSLVKNKGTRVMYYEEKVKDAERIVEVLQKSGIKNNKKNILAFITMKLPEYASKYTIKELSSVADIVKILMDEKGKVVKQAKFTNAPEGLEEFMEDIDLAQVAMEAGYCWQPLYDRLEETGCDVRLAHPLKVKAIAQAKVKTDKIDSETLTHLLRADLLPESYVPPRDIRELREVVRRRAFLVGMRTMLKNRIHSELAKRGISLGSPPFSKTGKELLQGLGLEAVDQILPVMDVLDRQIGEISRCMRRMCGEDPNAGLLTTIPGVGYYIALLLVSEIGDVRRFPDAEKLCSYAGLVPGEASSGAQTRHLGITKAGNAHLRRVLVEAAWSYRHPPKVGEVLAKRQSGQPPEVVAISWRAQTRLHGRYRRLLARGKERNRVIVAVARELLGFVWEVWQTVAPADAPAEGDGAGVAA

SEQ ID NO: 109345 - protein, 304 aa, unidentified
MKVFYLGVDVSKKKLDLCLRSNGKDILYDVIPNDLSSIKSWLTRTFEKFFLSEDSLVVCAEHTGQYTYPLVCATKSIGVYLCLEDAAKIKYCHGIPRGKNDKIDACRIAMYAERYNDCLQPYTASELIIQKLKNLSTERSMLVADRAKYQSQLKDQVDYMEHSIYIAKCNRVEGIINTFTDYIAQIDLEIKELINQAPVIAHQMDLLMSVDGVGERVALKMIMETDAFTSFTDPRKFCCHAGVVPFVYVSGSSQRSKNRVSNRADKSIKHLLHMAALSVSQVKNSPLKKYYDRKVEEGKIRCRF

SEQ ID NO: 109346 - protein, 366 aa, unidentified
MKIMVGIDLHSNNALCGLMDENGRRLVHQKLPCDLAVILKLLEPYKDRIVTIAVESTFNWYWLVDGLQDHGYHVVLANPARMQPYSGMKYTDDVSDAYFLAELLRLNLLPTGHLYDRKTRPVRDLLRRRLLLVRQRTTLILSFKSLNERTLGQRVPLARVKVMQAEEAQARFTDPADQLLSGQQIILMGHLTDSIMKLEQHILGVVGKWPAYQRLQELPGIGKILGLTIALETGDAQRFADAGNFASYSRCVKSLRTSNGKKKGENNRKCGNKYLAWVPPCGMEAAHFACRYDDQCRRFYDRKKQQTNPVIATKSLACKLAKAAWHVMKDDVPFDAARVFGPARKSDFGETGREPAKGSGHPSQQD

SEQ ID NO: 109347 - protein, 350 aa, unidentified
MIVQNYVGCDISKQWLDFFDEASGRFRRIDNQADAIAAYVAGLRPGQDFVVMEATGVHDRLLRHALAKAGVPFSRHNPAHTHHYAKSTRRRAKTDRLDARMLSDYGRRYQPEAEPAPCEQNEQLQSLARHRDHLVDMRATLKKHLAEAFDAIVIADLEETIADFDTRIKALESRIANVIGQAEDTARDHALMISVPGVSKVGALSLLAHLPELGHRSPKAIAALAGLARSTTRAASSTAGARSRAADRACAAPSTWRHSAPFESATASELSTPTSQPARAPRNSPSSPSQGSSWSSSTPSFETKKPSHEHSCHSVPSERRYRPEFCTAAPHGKVMEWILGSPRPLRSARG

SEQ ID NO: 109348 - protein, 419 aa, unidentified
MSFKIFRFNCCGLDIHKTWIYACIGITDANGRTEYKQARFSSFTKGLQELSDWLAKYHCSDVCMESTGKYWIPVFNVLEKNNLFVTLSHPKYTKPQKGNKTDRKDAKWICDLYMCDMVKPSFIPPADIRHLRDLVRYRFKLTCMISGEKNRAQNCLTVSNLKLDDVFSDVFGKSSRSITEHILAHPGELFDVTPFVDSRCKTPVEEIQAAVDGAISPEQAVKLRQCLNHIDELEKHLEEIEREILRLSDKYQAALDLIRTVPGFDKNPMTAIQVLSEIGGDMSVFPTAKHLVSWAGCCPRNDQSNKKIKSTRISRAGSYFKPILVQVANALLRSKKHSEITDRYKRIKARRGHKKAIIAICRMLLTAIWHILSDLKPYTPEGFLESRPVNESKVLTTSQALNLLKQRGYTIKDDVIPAS

SEQ ID NO: 109349 - protein, 374 aa, unidentified
MCFAGLDVDKRSISVTFSNHQGFISSLHMPYSTEHLIKHVRKHFGDQKVAFAYEAGPTGYGLYDGIVAQGYRCLIAAPAMIPRAPGQRVKTNRLDGVSLSENLRGGQLKSIHVPTPIYRELRHLVQLRDTVMSEVVATKQRIKSLLLFEGLDFSTAPAGSQWSLKVKRQLQKLACSKGVRFKLDELLDSLEFLEKKVVRSTREIHRFCKDDPELLQCIKYMMSVSGIGWIVASQLLARIGNWREIQNVRQLAGFLGLVPTEHSTGDRIRRGSITHSGDGRLRSKLIQASWSAIRQDGELRDFYRSVCRTHARHLGPRVAIVAVARKLSARIAVVLMQQRPYVVRKKVDTAPLTQEETVPQGTTRRLAEPGDTNS

SEQ ID NO: 109350 - protein, 302 aa, unidentified
MNVGVDISRSRLDVAVGDDLSQWPNTPEGIAALIARLPSSSSVVMEATGVYYRPLAYALHRAGFAVYVVNPLQVRSYARSLLTRNKTDKADARLLARFLAQYRADLTPYEPLPEALYLASLLVRFAEGLTTQRTASLNRLHAWAYAHPRVHGLAQAVPQVLQDYRESLYSEARAVVEAYPVGASWLTSLQTLPGVGPTLALKLLAYSGDFRRFRSARAYAAYTGLTPRVYQSGELDTVARISRIGPPALRSSYYLAAVSATRTDTAQAAFYRRLVGSGKPKKLAIVAVAHRLARAAWAVCVR

SEQ ID NO: 109351 - protein, 399 aa, unidentified
MEKFAGIDWASEEHAVCVVDADGMRVREHLTDHSEAGIAALCRELIGLGVARAAIERPDGILVDRLLEAGITVIAVHPNQAKAARDRYSVARGKSDRFDAFVLAELARTDSHRLWAIVPDSDATKALRALTRTREDLVQTRVELANQLRAQLQAFWPGALIFRDVDSPISLAFLRRCPSPADAKGLGPKRLGAWLARQGYSGGKSAEERMAQAPTGRAGEAETAARRAAVLGLVAALEPIVVQIAELTSQIRSALASHPDAAIFRPLFRDRRTTICPATLIAELGDARERYPTEGALAADAGTSPVAVESGKHRVAAFRRACDKRLRDSWAVLADSTRHWHPWARKVYADAIARGQDHPHALRTLGRAWARVLWRCWQDRVPYDPALHGNLRRLETAGG

SEQ ID NO: 109352 - protein, 481 aa, unidentified
MTIRRLVGIDLGIASAHTVRVLDETGTTLAKRRAYPTVESLMEVEQAALAGCSEGTRLEVIVEPTGPAWLPIAVFFIRRGHVVFRVSSAKASDLRKFFSRHTKTNGIDADTLARLALIDPAGLQRLQLPGTERATLDRRVRACDRLTRAAAEHKVRIKDLVRQLLPMTPLTGDLGAADLAVLERWADPNTLLKTGVTRLTALIAKASNNHQGPDRAEQWIDAARASIDLYGDHPAVAFADLAAEVATEVRLLRAVQAELAHHANERENAYRRVDPTGLARSLPGLAEVGGPALVAVMGDPSRFPKGKQFRAFTGLAPKASETGDTDRKGQPISKAGSSLLRTALIRAADHARKQDPQLARIYYVQMVERGKDHLGALCVVAANLAERAWTVMNRAMPYIICDTDGRPVTANEAKTIIAERFTVPDEVRARRRSKKTGKAPQTTQTGRQARGDLPRHKHHRPTPPARATSPSPKDRLTADPL

SEQ ID NO: 109353 - protein, 345 aa, unidentified
MKKRIVGVDLAKKVIQVCVVKANKIVSNDEVSSAQFTSWLAMAKPAIIVFESCAMSNYWKQVAKDKGHDARIISAKLVAQIRQNQKTDKNDALAIVQASQLVDVQFLNGKTFEQQELQSIMRMRELSVKHKVALRNQIEALLLEFNIRISPRSGGLCGTVQGVLEDAENGFCMPFRQALNATWKLYLQTVEDIAEKDKFLVQAIKLHPECEKLLALEGVSTINAVNLYIAIGCAEAGTFKTGRDASACIGLTPLQHSSGGKTKLGSIGKSMKNVALRSYLVNGAMSVINHVDKREPRTKKEKWLKQLLERKSKKCAAVALANKTVRTAFALLTQGTEYKAEPLVA

SEQ ID NO: 109354 - protein, 388 aa, unidentified
MNLGADKSEPLTAVHTDLGAIFVSLELSRSSWLITSLSPRGGEKMSKHSVPGGDFPGLMERFAQLQEKARRRTGQSFRIIVVQEAGLDGFWIHRALQNEGIESHVVDAASIATSRRRRRAKTDKIDGETLVRALLAYKRGEPRVCAMVKAPTPGEEDRRHLCRERKALTAERVRHVNRIKGLLFSQGISGYQPLRRDRRQRLEELQTGDGRAFPQHLKALVNRELDRLELLLKQIKTVEAARDALLAVGQTAKPAPAAMLLDIRGIGPEFAAILWSEGLFRHFENRRQIAAYAGLAPTPWQSGAVDREQGVSKAGNPRLRTTLIQLAWLWLRNQPRSALSVWFHERVSRNGGRLRKTTIVALARKLLVALWKYVTAGVVIEGVTMKVA

SEQ ID NO: 109355 - protein, 316 aa, unidentified
MTIKLEEYIGIDVAKDKLDVAVLGQKATSEAFNTKKGVAALVKKICQLNPKLIVVEATGGYEEELVLSLFEAGMPVALVSPQRVRQYAKARGLLAKTDKLDAQNLAEYGKNIQPRLFVAKSEEGRRLSAIIGRRRQLGDMQKAEKNRFRTAYVEMRHSIQRVIDCLEVEIKSLDAEILNFMKAHENFGEQEKLLRSAKSIGPVTAATLLADLPELGKLDRKQIAALVGVAPMNHDSGKKRGYRKTKGGRPEVRSVLYMSALSAIRYNPVIKAQYAQLVKRGKEKKVAITACMRKMLTILNAMMRDQKTFHTTVLMS

SEQ ID NO: 109356 - protein, 295 aa, unidentified
MMDLQGTIIDEFTFTNNYDGIASLASRLTMDDRVVMESTGSVWTNLYNHLDDAHIPVVLANPLKTKAIASARIKSDEIDARILAHLLRTDLIPESYVPTKEIREVRALIRHRTSIVKIRTMVKNKVHAIVDKNGLEHDELFSDLFGKAGMQWLGTIQLPSLDKLMLDNHLDHLESLKKQIHAVDQEIHARASRDEDVRLLLSMTGVDIFTALLVRSEIGNISRFPEYKKLISWAGLAPSLHQSGSIEYHGSITKQGSKMLRWVMVEAARVAVNHDEEPYLSRNQRRYEEKLNRIE

SEQ ID NO: 109357 - protein, 359 aa, unidentified
MQTQSNKIDFHGQNIYVGFDVHLKSWKVTIMTEKLTHKTFSQSPSPEVLHHYLVKTFPGATYHSAYEAGFCGYWIHNKLVKFGINSMVVNPADIPTTEKEKVQKNDARDSVKIARSLRNGDLKPIYVPSLKTLEDRGLVRTRAMLVKDMTRYKNRIKSFLYFHGIEFPAIFSEPGTHWSNRFMKWLEGLEMPTPSGKASLTILLAQSKNLRVSILQVTKQLRDLAKMDCYEKQIKLLRSIPGIGFLTAMIILAEIETIDRFATFDQLCGFIGLVPSTNTSGEHEVIGDITPRGHSALRSAIIESAWVAARLDPALNKSYHDYCKRMEPNKAIIRIARKLTSRIRFVLKNNQPYVCSVVK

SEQ ID NO: 109358 - protein, 354 aa, unidentified
MKGQIQNKKVLVRGKEVYIGVDVHKESWHVTARTEGEEVFHGGIPSQYHALRRFLDRFKDRRIKVAYEAGPCGFWLHDNLSRDGIEVLVVPPSLIPIESGNKVKTDKRDSRKLAKLLESNLLKRVYVLTEEERIDRELLRTRRQMVEHRNDVARQIKSKLLFYGVTSPFAPRHGWGQSYLRWLKGLDLKREELRACFESLIELYEYLTEQLLRMNQRVKELSQSLKYRERVRLLCTVPGIGTLIAMEILVELQDMERFKRADELASYIGLTPSEFSTGQYVRQGRITRCGNKRVRTCLVESSWILIQKDPLMRLKYNQLKQFKGAKRAIIAIARNLMIRIRRILLDKEPYVIGA

SEQ ID NO: 109359 - protein, 341 aa, unidentified
MEQATTIGLDIAKHVFQVHGADAAGHVLFRKRITRVKLLGFLAAQAPCVVAMEACAGAHYWAREIGKLGHHVRLIAPAYVKPFIKRQKNDAADAEATCEAAQRPSMRFVPVKTEEQQANGIVFRARDLLVRQRTQCVNALRGHLMEYGYVFPKGITHVEALVALVEDLQSSLPDSVRVILQLLVDTFTALEAQIATLDAEINQRSKSDPTARRLMTIPGVGPIASTAVTALVPAAEGFSAGRDFAAWLGLTPLQKSTGGKQKLGAVSKRGERTIRRLLIIGASAVVQQASRRGAPEGSWLAHMLARKPKMLVTVALANKMARIIWALLVKGGTYRTPAVAA

SEQ ID NO: 109360 - protein, 417 aa, unidentified
MEPNRYRRYIGIDWATAAHRICLLDQEGQVLGKISVPHSGTGLAQLLEWLAHHGVVPAQAAVAIETPRGAVVETLVERGYAVFAINPKQLERFRERYSTAGAKDDDRDAWVGASALRTDPVAFHRVNLDAAEVIQVRELYRTHDELQGDAQRFANRLSEQLRRYYPQMLALCPAGDQPLLWDLLELAPLPEVAHQVSAGQIATVLRRRRIRRLTAEQVLTQLCTTPLHVAPGAAAAASAHALVLIAQLRTVHELRKQTLKQLILALRQMRTRRTDPLRPSDAEIVDSLPGAGTLTVAAMISEASQAVAERNGTALRTHSGVAPVTRQTGKHRGVGMRYACSQRLRNAFYHFAMTSLQADPLARHHYDELRQQGHTHARALRGVADRWIAVLMAMLRAGELYDPTRRKAWRAAPEQTP

SEQ ID NO: 109361 - protein, 328 aa, unidentified
MEQLYIGVDLHSRFFQACAVTGSGERRWEERFMRTDPGFEQFRGRCHGVDAVAVEASGPTWHFVDTITASVGRVVVVDAFRTRLKAGFAAKTDRLDARRLADALRRESVVGIYVPPSAVRELRELCRHRQTLVRTKRALIQRLRAVLLRQGVVEAARLRTPKQLAALAIGALPPRAGEAVAQLRTLLVQVHEQVVITDTAVAQEVAQDPVTQALMTIRGIGPVLGLTIRSEVGCIARFARASELASYAGLVPRVDASAGRVHYGRITHRGSPWLRWALVEAAIHRITATDRRGAWGRRLAVRKGALKARVAIARRLCEEIVSVWRRIG

SEQ ID NO: 109362 - protein, 426 aa, unidentified
MRRAGRAIGLDVHRDFCEVAIAQDGEVRSAGRVDTTPAQLELFGSSLDPRDRVALEVSGSAWEVARILERHVARVIVVSPADTQIRQARAKTDRLDARTLARLLAAGELDGVFSPDERCRVMRRRLARREQLVRARSRSKNEIHAVLVRRLVGRPPVVDLFGVKGRRWLAGLELPLEESETIGACLRHVEFLDSEIAAVEHQIATQALHSPEIRRLMTVPGVNLICAATFMATVGEIGRFPTQRQLVGYLGLDPRVYQSGSAPATSGHISKQGSASARWALVEAAWSTVRQPGPQHAFYQRVRARRGHGIAIVASARKLACLFWFLLTRGEDYAHQQPSLTAKKLRLLQIRAGARTLKGTPTGVWATRQAMREGERRLAEQAESSYKRMVRDWQAATPKKAGASVTPGRASQKPSRGKVARQTTSP

SEQ ID NO: 109363 - protein, 321 aa, unidentified
MPTFYLGIDVAKAKLDCALRLPNGKFRTKVIANSQDGFATLVTWLTGPEARNVHVCMEATGVYWEDVAQCLATQGFTVSVINPAPIKAYAASRLTRTKTDAVDARLIAEFCAERHPPPWQARSEAEIALRALVLRLDALQALRTQESNRLEVARDAVRTNIQEHLNWLDQQIKSLIKTINEHIDSNPDLKGKRELLESIPGIGERTIAILLAFYAEPSRFANSRQAVAFAGLDPRRQESGTSVKTKPRLSKVGHAFLRKALYMPAMVILYKTAWGQPFKNRLALSGKPAKLIIGAMMRKLLQVAFGVLKSGKPFDPALHGT

SEQ ID NO: 109364 - protein, 413 aa, unidentified
MQVVYEHCCGIDVHKQTVVACAIVPGPDGQPLKETRTFATMTGDLEALANWLAGLGVTHVAMESTGVYWKPVYNLLDERFAILVVNAEHIKALAGRKTDVQDAEWIADLLRHGLLKGSFIPSEVLRELRDLTRYRTKLGDERKSEVNRVQKVLEDANIKLASVASDVMGVSGRAILAELVNGQTDAATLAELAKGRLREKQDLLLKALSGRVRPHHRFMLAQHLSHIDFLDEAIGQLDQQIAEQMRPFAAALATWDSLPGINQRIAEIIVAEIGADLAPFEDAERLASWAGMCPGNNESAGKRKSGRTRKGSPWLRRALIEAAHGAAHTKHKYFQALYRRLAARRGKQRAAVAVGHSLLVTGYHLITRQTKYEDLGGNYFDERDREAVKRRAVKRLEKLGYRVDLAPFATPAG

SEQ ID NO: 109365 - protein, 359 aa, unidentified
MRAHDWTPGPSIEWRTAMEEYIGLDVSMKETAVSIRRAGQRIWRGKCASDPSVLAELIRKRAPAVKRVVFETGPLSVWFYHSLRTEGLPAICIDARHAKAALDMATNKTDANDADGLAQLAEVGFFREVRVKGFDSMLTRTLVAARTRLVRITTELSNQIRGVMKTFGLLVPAGKGSTFEKNVRSLLADQDRLASIVLPMLEAWRGIRVRAAELGRQLVRDARQSRACRILMSIPGIGAITATSFTTAIEEPGNFRKSRSVGAWIGLTTRRYQSGEVDYDGHISRRGDHHLRGLLYEAAAVVLTRSSTHSTLRTWGLQLRERIGFKRAAVAVARKLAVIMHTMLKTGELFNPNAGAAAA

SEQ ID NO: 109366 - protein, 364 aa, unidentified
MSKINQYVGLDVSLKETSICVIDEAGKIVWRGRTDTTPEAIASAVKQHAPHAVRIGLESGQLSTWLFHELKAVGLPVICVDARHAKAALSLKVSKTDANDALGLAQIMRVGWYREVSVKGLDCQAVRTLLVVRAQLVSQVTTLKNCVRGVLKTFGLVLPKGLRSQFPARVRAAIDGHPVLGAIIEPTLQVLEATRAQLLVYDKAVIQLARSDDTARQLMSAPGVGTVVALAYMTGVEDPARFKRSSSVAAYFGMTPRRYQSGEVDYAGRISKCGDGMVRGLLFEAAKVLLSRSARPSALKTWGEALGKRIGAKKATMAVARKLAVILHRMWTTGTTAECCPCWDGPRRPRDSSCADLLLSAFGT

SEQ ID NO: 109367 - protein, 356 aa, unidentified
MDKVIREGAVRVGVDLAKRVIQVHAVDGAGRVLSARALARDRFIEWCVHLPAGCVVAMEASSSAHHWARKLVALGLQARIISAQLVEPYRSQGASGKNDANDAAAICEAASRPTMRFIPVKSIEQQSMLCVHRLREGLKEDRTACINRIRGLLTEFGLVFPQSPRELQAVLSDVLEDASNELGSLARLTLQRAQSQWHELDEHLAWCDERITAHGHTNAAVKAAATLLGIGPVTASAVVATVGDFKQFKNGAQFGAWMGLTPRQRSSGGKNNLGGITKRGDTYLRTLLIQGAKSAVMTAHRRQDKISTWAAALRERSGWQKAVVALANKNARVLWAVMTRGVSFDPNHLSVKPTAA

SEQ ID NO: 109368 - protein, 329 aa, unidentified
MAELDAARHRVAKVTGRTPQVTLCYEAGYDGFWLARLLERHGIACLVMEPASLRVNRRARRVKTDRIDVENILHTLIAWCRGERHVGSMVVIPSVEEEDLRRSHRERQRLVRERTAHINHIKGLLFGQGIRGIYVKSRYKTLTPGDLVTGDGRPLGQCLVREIAREIGRLALVAEQLAEIEGERDDAGTACAETERKRLDLLCLKGIGPTFSSVLAREVYYRRFTNRRQVASYLGLAPSAYDSGDAHRSQGISKAGNGLARYTMIQAAWLWLKHQPQSALSRWFRSRTEGHRGRIRRVMIVALARKLAIALWRYLETGLIPEGAVLKAG

SEQ ID NO: 109369 - protein, 355 aa, unidentified
MKKQKKILNFQGYKLFIGVDVHKKQWTVTFRLRELELLTLSMNPSPPELFNYITKHYPNAEYHSVYEAGFCGFWIHRQLCDLGINNIIVNPADVPTTHKEKTQKRDKRDSRKLARELAEGSSLEAIYIPTKRQESLRLLSRLLVQVTKRTTQSKNRIKQFLHTQGIQLPKRAEISHWSRHFINWLKAIAFEYDFSKYYLDKLLRDLERERREKLNLLRQMRTIIKGNQIISYLRTAPGVGTITAFTFYAEIMDISRFQKLDHLISYIGIIPSVEASDKKEKILGLTNRCNRYLRYLIIEAAWIAVRTDPALTLAFKELLKTRSSQKAIIRIAKKLVNRMRYLWINQTEYVMAVVE

SEQ ID NO: 109370 - protein, 375 aa, unidentified
MEEHSTAYVAFDTAKLRNAVAVAEGGRGGEIRYLGEIENTGVATARLVHKLSKKYGTLRFCYEAGPTGYGLYRQVTSLGYECTVAAPSLIPRKPGDRVKTNRLDALSLARQLRAGDLTAVWVPDARHEAMRDLTRARQAASEDLRRKRQQVSALLLRLGRVYPGKTTWGKAHTSWLASQKLDHLEQRLALEELLLAVRQAGERMRRLEQAIGEAVPSWSLAGLVTALMALRGIDLIAASTLLAEIGDLTRFRTPRELMGYLGLVPSERSTGDRVRRGGLTKTGNRRARRILIESAWSYRHPPRVGMAKLAKLEAAPPAVRDIAWKAQTRLSARYRALTRAGKLDVVAIAAVARELAAFVWAVAQAVSAPSATPTA

SEQ ID NO: 109371 - protein, 446 aa, unidentified
MAQRTRVKLEIANPNAAGIDVGSASHFVAVPPNRDDEPVREFKSFTEELERLADWLIACGIDTVAMVSTGVYWIPLFELLESRGLSVYLVNAQHVKNVSGRKSDVLDCQWLQQLMSYGLLSGAFRPKEEICALRSIMRQRGMLLSYQGQHVQHMQKALAQMNVQLANVIADVVGETGQRILRAIVAGERDPMKLAELKHGRIRASKEQIAMSLHGNWREEHLFELTQAVELFDAYSQALQRCDLKLEAMLARLSRNQDQPGPSKRRRYSKVKNAPKFDVRTYLFRICGVDLTAIDGIDTTTALKVIAEVGPDLSRFKSAKHFASWLGLCPGTKISGGKLLSGSTKRTANRVAQALKMAAISLRASQSALGAYFRRMCARLDKGKAVTAVAHKLARLIYAMLTKGAAYVDQGQDYYEERYRQRVLFHLKRKAAALGLDLVPVQTHPA

SEQ ID NO: 109372 - protein, 327 aa, unidentified
MQGKVSPEPNAQTRVYVGIDTCKEWLDVYVHPIGLWFRVPNSREGLKQLKRRLAGLLVVLIVMEATGKLHREAYRNLHDSGFAVAVVNPLRSRLFAEATGQLAKTDKVDARMLALMGAVLEPKAKSPAPEILETFQELVRGREAFVAQRTALLNQLGDAKTTFLKQQIRRQIGTLEAAIERLEKEIGRIVKADPALARRYEILLSIKSIGPITAVVILANFPEIGTCNAKQSAMLAGLAPIANDSGDRTGTRSIRGGRAELRTGIYMAAVSAASSNPGLKAFYDRLVAKGKLPKIALTAVMRKLIVLANTLIREDRLWEPAHAPARA

SEQ ID NO: 109373 - protein, 342 aa, unidentified
MHKTKVTQQTIIGKVDVAYDHYIAIDWSLKTMAIAHASCRDRIPRVFERPTDLKELKTYLGTLRGRTIITFEESGTAHWLYLELMDYADRILICDPFQNRLLFHGAKTDKIDARKLCELLRAGLLKEVYHSDSTLYELRLLASAYNDVVRSGIRVLNQKAALTLGHRDTGKSAAFIDTILKENIELYRRSKEQYERRFHELARHNKLVRLQREIDGIGTIGAVKIVACVVDARRFQSVGKYYSYCGLIKHEKWSGGRSYGRRKPRYSRVLKSVYKTAALAVLKGNNPIRRYYDVLLARGVAEHNARHAVARYIARISYGILKNGTRYNPDLIGRKDANGTRV

SEQ ID NO: 109374 - protein, 354 aa, unidentified
METKTKQAVPDLMAIGMDIGKEVFHLVGFGRDGKVAFRKKIKRLGLADVFRKLPPCIVGMEACLSAHFVSRTLRALSHEPRIIPAIYVKPFLKGQKNDYNDAEAIAEAALRPNLHFVREKTQNELDLQACHRVRDRLVSRRTATVNQIRAFLIEQGIAVRAGAKALRTSLFEIQKNRAEEVSSRMSNLIVGLHEDWLRLDERIETITGEIEEISRQEANCQRLMSIPGVGPLISTGVVAAIGAGDAFERGRDFGAWLGLVPRQYSTGGKTILGRISKRGSRHLRTLFIQAAKVILMRPQNWDRHSFGPWLKAAAERLHHNKLATALANKLARIAWSVLRHGKQFDSQDREAFAV

SEQ ID NO: 109375 - protein, 442 aa, unidentified
MTTDKETRLERRSDRRLLVMPRVVTTQTRGRWEQVLLVGIDWADKEHVYCLMDDAGTTLATGTVEHTAEGLERFMNAVRARVQTPNDILIALETSHGPLVGALLDQGFTVYAINPKAVERHRERFRVAGAKSDLRDAWVLAALLRTDRALYHPLTPDSDVAQELRALTRDRADLVRTRTMLSNQLTACVKAYFPEFLTLFSDPDRPVALALLQAFPTREHLQAAPRAELETFLRRHRCPHSRKRAAAIHERMQAPGFHIASPIVRAKARLAATLVAQLQTLGEYLDAYEREIQRVLRLHPDGELYLSLPGAADVLAARMVGELGDNRDRYRDPNIAQCEAGTAPVTKKSGSTRTVHFRRACIHPLRETLWQFAFSSLRRCGWAQAYYNQARKRGKKHAEAIRMLGNVWLRIIIAIRRNRRPYDEEVLQKARLRHGTPGLCFA

SEQ ID NO: 109376 - protein, 385 aa, unidentified
MSGTTFIPLEYDVFAGLDVDKRSISVTFSNHQGFIRSLRIPYKVEHLVNYVRKHFAEQKVAFAYEAGPTGYGLYDGLKDEAYSCLVVAPSMIPKAPGQRVKTNRLDSRILSENLRGGQLKSIHVPTERYRELRHLTQLRDTFVSEATAMKQRIKSLLLFEGIEFPAAPRGSEWSLKVKTQLRELTCSSTVRFKLDQLLDSLAFAEKQVLNTTREIRRFCREDGEVFESIQYLMTIPGIGWIVATQLLARIGDWHEIKKVDQLGGFVGLVPSETSTGERSDRGPITHSGHGRLRSKLIQAAWSAIRQDGELREFFRSVCRTHPRNYGSRIAIVAVARKLTTRVAVVLMQQRPYVIREKVHSAPLTQEEIKPQGKTRRQAEPGETNS

SEQ ID NO: 109377 - protein, 433 aa, unidentified
MSFTLESIPIQRFIGIDSHKHYVMVGGMNQQRKWVLRPRKISMARFRDWAAKNLRPDDAVVLETTSNVWDIHDVISPLVSKTLVANAYKVRQIAEARVKTDKEDVKRLLTLLIANIVPEVWAPPIHVRELRSLISFRSRIGKQLTMSKNRLHSVVQRFNLIPPDGELLADKNQSWWLEQDFSELTALQLQLDLEIITHLEAQKNKIDQKLALLSNSQPWANDVVFLMQIPGFGLLTSMTILAAVGDISRFSHPKKLVGYAGLGAGIHESGQKHQQKSITKEGRKELRWALGQAAWAAVRSDPYWKEQYKRLSQHKHPNQAIVAIARRLLVSAWHILTKREPYRRSDDETIAYKMMTLVPMRDLVSTHGRNRTPRPHSPAVYQIWLASPRRWTSAHSYCSQRQTQTDCSLQRYCFPLTSAQFARVGLLLRPVYN

SEQ ID NO: 109378 - protein, 366 aa, unidentified
MSDDTATHLPVAGLDVHAASIRLAVVLRDELLDERTLPFDCRLVERELRRLGATRVCYEAGPTGFGLARQLRDAGLHCDVVAPGLVPRRSSDRVKTDKRDARKLALLYQGGMLAPVWVPSVEQEAVRDLIRAREDARQDRARARQRLGKFVLRRDLRMPGKSWTLARRQWLGRQAFEHAAQQAAFDDYLLACDLLDRRIETLEREIDEWATHDDFRELVGRLRCLRGVDTLTAIGLVAEIGDFSRFKTAPAFMAYLGLVPSESSSGERRRQGSITRAGNNHARRLLIEAAHNQRRRPTRSAHLARRQAGQPAVVVARAQQAQLRLHKRWQRMGARGKHSNKIAASVARELAGFVWAIATEQPLRAA

SEQ ID NO: 109379 - protein, 420 aa, unidentified
MKSASTTPQHALPEFPPNEVTAGVDWARDDHALSVVNDRGREVFRCSVPHTSAGLHDLVKALSRHGVGEVAIERPDGPVVDTLLAAGLTVVVISPNQVKNLRGRYGSAGNKDDRFDAFVLADTLRTDRARLRPLTPDTEATIALRRTCRARKDLVKHRVAAANQLRAHLRNALPAAVGLFAELDSAISLAFLTRFDTQDKVDWLSPKRLGDWLAKQGYSGKADPAVLHDRLLAAPRGATGANAAAQASITASYVALLRTLVSQIKALQAQIDQQLSAHADAPIFTSLPRSGRVRAARLLAEIGDCRARFPTPESLTCLAGAAPSTRQSGKLRTVGFRWSCDKQLRDAVTDFAADTRLANPWAADLYNRARDRGHDHAHAVRILARAWLHIIWHCWQDGVPYDPTKHRALQRITTHQNQAA

SEQ ID NO: 109380 - protein, 341 aa, unidentified
MKVSTLGIDLAKNVFQLHGVDHEGHTILRKKLTRAKFVQFVIQLEPCLIGMEACSSSHYFARLFTRYGHEVKLIPPQYVKPYVKTNKTDAADAEAICEAVTRPNMRFVQIKNEEQQAVLALHTERGILIRERIACANSLRATLAEFGITIAAGQSHLTRELPAILEDSENGLSPFVRTSIYRQSKHIRELEEQVKQVEEALASWYRTQEACQRMAKIPGVGMLTATYVVAAVGNARQFSTAKQFASWLGLTPKEHSSGGKQQLGGISKRGDGYFRYLLVHGARALTAWVNRNGAVEENSWLQGLLERKHYNVAVVAMAAKTARIMWSMLSHNTEYQPRQLA

SEQ ID NO: 109381 - protein, 354 aa, unidentified
MLIIGADYHPSFQQVAFCSQDTGECGERRLNHSDGEAERFYRDLKQQGISVRVGMEATGYSRWFERLLAELGFEVWIGNAAEIKTQRVRKKKTDREDARLLLKLMREDRFPRIWVPSPENRDLRQLLWHRHRLVQMRTRVTNQLQALAMNEGKRCKKLWNAQGRAELEKLALAPWASRRRQELLELLDRLHPTIQELTAAVEQEAGKRPEVLRLMTHPGVGPLTALAYVLIIGTPERFPCGKQLGSYVGMIPSEESSGDKQRLGHISKQGNSLLRFLLVEAAQAAARINDEWRRRYIRLAIRRHRSIAKVAMGRRLAIRLYWMWRNQCEYSPKMECGSYVGQLGTGHGVKAPCN

SEQ ID NO: 109382 - protein, 356 aa, unidentified
MSTCVRSQTLFVGVDVHKETHTAVGVSPFGEKLFEIKIGNYPKDFDSLASKVEKLKGSLSPYFGLEDCHGYGERLAEYLVAKYPVIHVPSVMVDRLRQKTTHPEKTDSLDAYGVAKVMMNSMDSLPAFTLTEEVKRTKQIREISLDREYLVLERARLKNHLHTLLYRIWNGKYQTEFKSPFTLKAMRHWMKAKPACDPLLLRTMKRKVKRLIDLHYEIDELEKEMAVLLETGGYTLQTASGCGTAIASAIIGEVGDISRFTSPASLAKYAGCSPRECSSGKTRRHKKTWAGNRRLNCAFHRMALSQISRMGNEKAHTYFARKVSEGKSKSQALVCLRRQLINLAWCMLKNKTVYHN

SEQ ID NO: 109383 - protein, 347 aa, unidentified
MDLVYPRCAGIDVHKRTAVVTIGWVDEQGQRQRKTRTFGTMTAEIEQLAAWLVEHGITHVAMESTGVYWRPVFNLLEPHVEVELANAAHVKAVPGRKTDVRDSEWLLDLMQHGLIRGGFIPVAPIRALRDLTRYRTSVIEERTRALNRIQKVLEDTNIKLASVVSDILGVSGRAMLEALIGGETDPAVLAGLARGTLRKKHDALVQALRGRIQDHHRFLLRTLLAHVDQLTESITQLSTEIARRLEPYTAALDLLCTIPGIKRRVAEVVLAELGTDLSRFADARHLCSWVALCPGNHESAGKRRSGRMRHGNRWLRGVLLQAAWAAIKVRGGYFGAKFRRIAKRRGD

SEQ ID NO: 109384 - protein, 364 aa, unidentified
MDEVKVYVGLDVHKESIAIAFAQAHTRDEPHFVGTTRYSVISLTKALAKLGAPSELSLCYEAGPCGYGLVRALQERGYHCEVIAPSRVARQPADRVKTDRRDALLLARLHRAGELTAVVIPEPADEAIRDLVRARDDAASDQRRVKQRLKSFLLRHGHAYTGKRWGPKHELFLSKVKFEDPAQHIVFTEYRLAVRFATERVERLVQALHDQTASWRWMPVIKGLMTLRSIDFISALTIVAEIGDLRRFPHPRDLMSYLGLVPSEHSSGNSTRRGGLTKTGNTHVRRILIEAAWNYRLPARIGESLQPRLEGQPQRIIDIAWKAQLRLCHRFRRLRARGLHQNKTCAAIARELSGFIRTYAQSRA

SEQ ID NO: 109385 - protein, 391 aa, unidentified
MIYVGIDVAKDKHDCFITNSDGEVLFKPFTITNNLDGFNELYQKIESVTEDATKVKVGLEATGHYSYNLLGYLIDKGLAAYVINPLHTNLYRKSLSLRQTKTDKVDARTIASMLMSDVNLKSYSDISYHNEELKSLTRYRFDKVKERAKLKSSVSRLVCILFPELEKLVPTLHMASVYSMLSEFPGAKHVASAHLTRLTNLLSEASKGRYSKDTAITFREAARASIGSNMPAKSLELKHTIKLIQELDSEIDEIENEIKVIMDEINSPILSIPGINYRMGAMIIAEIGDFSRFDSPDKILAYAGFSPSTYQSGQLDGAYAHMEKRGSRYLRYALYNAAKYVCHWDPTFAGYLAKKRAEGKHYNVAISHAVKKLVRVIYHLEKTKQQYIKVA

SEQ ID NO: 109386 - protein, 372 aa, unidentified
MPTNLRYLGLDVHAETIAVAVAERDGEVRPLGILPHRPDAVTKLIRKLGPREHLRACYEAGPCGYVLYWQLTKLGVHCDVVAPTLVPTKPGDRVKTDRRDAAKLARCYRAGDLTPVWVPDAAHEALRDLVRAREAAKGDQLRARHRLGKFLLRHGIRPPAGAKPWTQGHRRWLDTLHLELPALAATLADYLHEVDHAAARLDRLEQALDAAIQAAPAPLRAVIAALQTLRGVRQVTAATIVSEVGPLSRFTHPRQLMGYSGTVPSEHSSGTSVHRGAITKTGNAHLRRVLVEAAWAYRFPPKCTKALRSRQRGQPDAITAIAWKAQHRLSTRYRRLLGRGKPTPHVITAVARELTGFIWAIGVAVERTAPAA

SEQ ID NO: 109387 - protein, 390 aa, unidentified
MTRHSIVRSLLLAGWKVTATSKGAWDVTMIDAQRKETKLEVILGVDTHLDVHVAVVVDHLLGRRLGELSVPTTAKGYERLLCWAEGFGPVRCAGIEGTSSYGAGLARHLRARGIEVLEVERPKRRGRSSRRNVEKSDPLDAESAARAVLAGETSGVPKSGEGCVEMIRALRAARRSAMKARTQAANQLQGLRVTAPEELRHRLRGLSTKELVAVTARFRLRDVPHDVAAATKFALRSVARRYEALSAEIAELDAQLDRLVRQVAPELVALAGLGTDHAATLLIAAGDNPQRLRSEASFASLCGVSPVEASSGKVVRHRLNRGGNRDANRALYMICLARMRRDCRTKEYVARRTAEGKNKREIIRCLKRYVAREAYRVLISRAACSSPIGP

SEQ ID NO: 109388 - protein, 313 aa, unidentified
MVDEVVCVGVDVAKSTLDVSVSNSEETRQFTNNDKGINLAVHYIANLNPIGITLEATGRLEIPLAAALQAAQLPVAIINPRQVRDFARATGVLAKTDAIDARILALFGVRVRPEIRPLPDKKACEMGGLLARRRQLVEMLTAEHNRLLQADKDVRPNIQAHIKWLENALLKINTDIEDRIKRSPSWREKDILLKSVPGVGKVVSSTLLIELPELGKLNRRKIAALVGVAPLNRDSGTIRGKRTVWGGRAKLRATLYMAALVASQCNPIIAAFYKRLLDAGKAKKVALVACMRKLLTILNSMMRTMTIWQPQTA

SEQ ID NO: 109389 - protein, 396 aa, unidentified
MYEQFCGIDISKDSFDFTLLESSGEVKLQEKLTMDRDGFNTFLEYLSSYSKDKLLVSMEATGIYHLPLLSFLLENSFKSVVINPILIKSFIGSTTLRKTKNDKKDATSIALFSLKSYQSLHLATSDTIESVRPLIRERETLSKDIARLKTEIKATLVQLFPELLKNTNIFTKSILNLLLQAPSRKAIRNLKKQKIQKLLDSTSGNKVRISADEILSLAKDSIAISDKYLEKVLTSKIRRLITIQDELSILDEELQNSLEDTDINDDIELLQSIPGIGSVTSKNFMVEVSSINKFNSVKQLCAFIGIDPSVRQSGTSVNYRGKISKRGNANLRRTIWQMAIGTIRSCEKFNTYFNKKREEGKKFKQAVIAVANKLLKTIFILLKNKAMFDEKPHPTT

SEQ ID NO: 109390 - protein, 374 aa, unidentified
MFSFPVERHGFEAAVTFLERYREKEDILIGVEASGPYNLTFSYFLLEQGYTVVELNPYKASQFRKAQGTKAKTDRIDARSLADFLAIGSYQPLGADNPALENLRELTRFRADLITDRTRQINRLKETLSVSFPELYQHLANLDSPTALKLLSTYPGPQALVDAGIENIKVLLSETSRGHFTRAKAEAIFQTASNTVGLVRRQRSLALKLQVITQIILNLNAQINQIEAEIEKIFGSFPYNPSDFPVGGIQGLAAILAEIGDIKRFPTIKRFLSHFGWCPKTFQSGEFSLAHPRMSHAGSPYLRRMIWMLSIHALATVPTFTEYFNKRTANGKKKLHTIVAIGRKLLSIIYAILKTGSPYKTRMQESCSLTPVES

SEQ ID NO: 109391 - protein, 405 aa, unidentified
MSQEQRSVIGGVDTHKNVHVAAVIDDRGKILDTSSFETTNAGYRHLLTWLRSYGDLQRVGVEGTGSYGAGLAHHLAAAGVEVVEVNRPNRQLRRRRGKSDPVDAEAAARAVLNGEATIVPKAGESLVESIRVLRVAFTSARNSRTRVALQIRDLIVTAPDQLRSVLGPLSTKERVARCARFRVCGDLADPTEANRRALRTLARRYLALSEEMDDLRLALDDLTARANPALRAMKGVGPDVAAILLVAAGDNPERLRNEASFAAMCGVSPIEASSGMTVRHRLNRSGNRQANHALWRITTNRLITDDETRAYAARRTSEGKSRREIIRCLKRYIAREVFRTLTRPEAIPCGADLHDARITAGFNLNEVAAVLRVDPTRVSRLERALDFDRDLADRYAAWLTAQNAA

SEQ ID NO: 109392 - protein, 348 aa, unidentified
MNTTTVGLDIAKSVFQVHGIDERGHTTLQKRVRRAQLVTFFANLPRCLVGIEACASAHHWARELSKLGHEVKLMSPQFVKPYVKTNKNDARDAEAICEAVRRPNMRFVAIKTVAQQELLMLHRVRQRLVLERTAKANQLRGLLAEFGIVLPQGFPALERGVPEVLADAENGLSDRLRERFSQLFSQLRELCTTVRQWEQQILAWHRENLLSRRLDQIPGIGPLGASALLASIGDIRTFKNGRQLAAWLGLVPRQDSSGGKTRLLGISKRGDRYLRTLLILGAQSVLRQMKRNPARAAHSWLGRLTARSHPHIAAVALANKNARIAWALLAHEREYQADYRARVAPAPV

SEQ ID NO: 109393 - protein, 356 aa, unidentified
MRYLGMDVHAKSTVWCLLNGQGEVLERGRVATSTAALMELTHELTATEELLVGQEVGTMAYLVHDAITAAGVRILSFNAYQLRMIVASRKKTDRRDAYWIAKALQAGMYPHPVYIPSAPVRELRVLLSQRRVLKAEQNRWRYRARTVLRAAGCPAPTSPAALDAALGMPVGSGPTSIPLLPETLALYAQQERATRRGLREVEARLQASSAPHNAIARLMTIPGIGPLAAATIYAWVGDVRRFPNAKALGAYAGLVPTVRQSGSTQQVGAITKEGAKPLRATLIQAAHVVLHRCRSAEAVPLQRIGERLLGARSKRRKIVVVAMARHLLRLAYYLLRDGTTYDATRVSANSPTPVAA

SEQ ID NO: 109394 - protein, 356 aa, unidentified
MDSTKYIGMDVHKEATTIAVMNAAGKLVMESIVETKAATIVQFIEGLRGELYVTFEESTWAAWLYDLLKPHVTKVVVCNPRKNALLKSGNKNDRIDARKLAELLRAGLLSAVYHGETGLRTLKELCRSYLAISKDLARTMNRIKALYRSWSIPCGGVSVYAPRHRAEWLSKIMEPGVRRRAELFYQQLDGLQKLRQEARGDLLAESRKHGGTKLLQRIPYIGPIRAALLIALMQTPHRFRTKRQLWAYSGLALETHTSGEYHYVQGQLQRSKRPVALRGLNQNHNHDLKSIFKGAATKGGSAKGPFHDFYSALLAQGMKPTMARLTLARKIATITLLVWKKGVCFDAQQLKRQVSV

SEQ ID NO: 109395 - protein, 429 aa, unidentified
MKIIYPRVCGIDVHKKFIVAIICISESVEPVYLKKRFSTFHNDLIRFRDWLIQNDCQNVCMESTGKYYIPVYNVLESHISNIVVANPKWVRAVKGEKDDDKDAKWIADLFKLGIVKSSFIPQKDFRILRELTRYKYKLVNMRSSEKNRYQNALTSGNCKLDMVFTDIFGKSASNIIDLILSNNPYTDEDILSKVHKNCKASPDMILNSINGTDLTSIQKSRIELVNNHIKQLSSNIQRLDKLIDLMIEPYEDYISFLCQIPGVSRNSAIIILSEIGVDMNQFTSTRRLTSWAGLTPSSNQSAGKKKSVRISRAGVYLKPCLVEVAHAAVKDKNHPYYTNKFNTISKRRGKKRAYIAIARKILVAAYHMLLTGEIWNPADLAEVETPVEQRIKYVKNNLKSDIKQLLDIGLTVEELTLMIQQNANNIATQ

SEQ ID NO: 109396 - protein, 320 aa, unidentified
MMAQNDLVVVGIDVAKDKVDACIRSLALRRTYPCTAKGRRELISWLRRHKAGKAVMEASGGYERGWAKTLRAASIEVRVVDPKRVRSFARSAGRLAKNDTIDAEMIAWFAETFDQAPSQAYDAAREKLAEMVNARQGLLDLQTTLQSRDEHSDVQEVHQMHARLLKKIIGEVVRLEAAIAALIKATKDFAELAEIIESVPGLGEITSAGLIAAMPELGQVSNRIAAALLGVAPYDDDSGKRRGERQIKGGRRRVRNLFYMACLGAATRHNPVLKAFYRRLIAKGKEPKVALVACMRKLIVILNTMIARRQKWDAGLYATG

SEQ ID NO: 109397 - protein, 452 aa, unidentified
MEEPQEVQDEEYERVYERVAAVDVAKASGVVCTRVPDESGPGRGRTKVWTVIATMNAVTELAGHLRCHQIEVVTLESTSDYWRIWWVVLEAAGLKVQLVSARAVKNAPGRAKTDKKDAVWLAKLTERGMLRPSFVPPPEIRRLREFTRLRADLVHERTRYWARLEKLLERALIKISAVASSLDTLSVRAMIEALIAGQRNPKALADLARGRLRIKRAQLAEALDGRFEPHHGELARIILDQIDALTAQIDQLTARITELIAATPAAQGIDADGTTGPDAGADPGAPVLPAVARLDEITGCGTVAAQAIIAEIGLDMTVFGTPGRLVSWARRCPQTRQSGTKTSAGKAGKGNPYLNGVLGEIAASAGRTDTFLGERYRRLARRRGKRKAVTAVARSVLVVIFHLLADPQARFRDLGPDYHDNRISRDRKIANHVRQLQALGLTVTLTPAEEAA

SEQ ID NO: 109398 - protein, 409 aa, unidentified
MDVLYARCCGLDVHKKTVVACLITPGPQGAPQKEVRTFETMTADLLALADWLTGAGCTHVAMESTGVYWQPIYNLLEDQFTLLLVNAQHVKAVPGRKTDVRDCEWLAQLLEHGLLRGSFVPPVPIRELRDLTRYRHVLVQDRTREANRLHKVLTDAGIQLASVASNVLGTSGRAMLAALIEGTSDPETLADLAQGKLRRKLPALRDALAGHFRGHHAFLVSQLLAHLDYLDEALAVLTAQIQEALGPFQSEAARLDAIPGVGPRTVEVVIAEIGVDMRQFPTARHLASWAGLCPGTHESAGKRRPVRTRKGNRWLRAALIEAALATINVRDSALAARYRRLVRHCGHKKAIVAVAHKMLTTAYVLLADGRTYQEPGAGYYDAQRKDRVIRRALQTLERHGFRVSLEPAA

SEQ ID NO: 109399 - protein, 375 aa, unidentified
MSKVRFIGLDVHADTIAVAVAEPDGEVRSFGVIPNRLESIRKMVAKLGPAQNLKACYEAGPTGYVLYWQLTALKVACEVIAPSLVPVKAGDRVKTDRRDAAKLARSYRAGDLTPVWVPDADHEALRDLVRAREDAKQDQIRARHRLSKFLLRHGQRPPAEIKKGWTLKYMIWIKEKVHFDLPALEATLLDYVHEVDHMAERIQRLEKALDVAIENAPAEMRAVIGGLQALRGVAKITAVSIVAELGSLSRFPKPTKLMGYSGLVASEFTTGNRVQRGPITKTGNAHLRRVITEAAWAYQRRPWVGGALLKRQQGLDQEIKDIAWKAQWRLYHRYSKLTAHGKNKNQAVTAVGRELLGFIWAIGVRTEARAAARAA

SEQ ID NO: 109400 - protein, 325 aa, unidentified
MIAVVGIDVAKHTFDIATLQANGKYRTRSKLANNLDGFAQLGEWLEKHAGPEAWIVMEATGIYHEALATWLFEQGYRVSVVNPAQTAAYAKTQLSRGKTDRTDAKLIAGFGQDQLDKGRLRPWQPEPPAQKRLRALVRRLADLREMEQMERNRLESADANVQDSIHTVLRHIEEEIRRTLKAIEDHIDSDPDLRQRKELLVSIQGFGEQTAALLLGELGDPLEFRSAKAVAAFAGVTPRPDQSGEHRGPTPISRIGSGFLRSRLYMPALVALRHNPAIKALAERLRSRGKSGKQIICAAMRKLLHIAYGVLKSGRPFDPELALAR

SEQ ID NO: 109401 - protein, 429 aa, unidentified
MNNETFFRINQFRQFKEEIRGSEEYLIVGIDISKDKHHAFFGTANGKALLRRLIFENNLDGFSKLLSRADAIKAQNGLSKIVFGFEPTSNYHKPLGMHLIRCEREVVMVSGVAVKRNRELLNGRWDKNDTKCAANVADLISQGKCLYFDCPTSEISGLRELLSLRERMKKQHHSLRMRIRGNLIAKYFPEFDRYFGQSPRESLAIVTFCLDPDKIAAMDLEQFMRTVTTTDRGVAQQRRLKKIHDLAHESIGCSMNRFAEFEAAMLVDQVNQTKQLIEQIDAQIDQAASAFIEYHCLITIPGFGPYVSAVVLAKIGDPYRFENRGQVLKMAGFDLSAKRSGKSSDKAIPVISKKGSNALRYALYQAALIASARNNNFIRYFTNTLKGREKERGIKTKMRVKLAAKMLIIAWTLMKKRIEFNPDFLLTEE

SEQ ID NO: 109402 - protein, 396 aa, unidentified
MDGPIISFDVSKGSSHMRGFLDHGKPAGKATVIRHDLEGFAKLDALRGRIREETGSDPVAVYEFTGVYSHTLERYLDSIGMRRYGVSPLESAKVRKAMIRPTKNDSLDCRTIAEVYYLRPLREGRSADEIHVGLRDMGRFYHYLLEVKIVEKGRYRRCLDDVWPCFDKVIEPDSPKSLAIISHYGHPSKIRSKEQVKNFLMKLPRRGRASTDELAEKIAAYAKTHVSGASPNSYKTEEVKLMSARVKGIIDESERVMDSMISTAENLLEFASLKTIPGIADVTAARLIAEIGDISAYPKADSLIAYAGLDPAVMQSGQMTGEHMHITKKGNPHLRATLYVAVTNMIMSKAENMITRYVLKKKNSGLSYKAAVIAGCSKLLRLIHAMLRNGTCYSDK

SEQ ID NO: 109403 - protein, 391 aa, unidentified
MIFVGIDVAKDKHDCFILNSEGTVLADVFTIANNRIGFETLLSRIQSCSQGESKIKVGLEATGHYSYNLLGFLLDNGLATYVLNPLCTNLYRKSLSLRRTKTDRIDARTIAMMLMSDVDLKSYSNTAYHNEELKSLTRYRFDKVKERAKLKSSVARLVNILFPELEKLVSSLHIAVVYALLSNYPGASYIANANTEELAETLCTASKGRYTKSKTAEIQVAAGVSIGSKMPAKSMELKHTIALIRELDKEISEVESAIDKITSQMDSPIFTIPGIGRHMGAMILAEVGDFSNFASADKLLAYAGLSPSTYQSGQLQNCYAHMEKRGSRYLRYALFNAAKYVCLWCPTFSAYLEKKRSEGKHYNVAISHAAKKLVRLIFAMQRSGKAFLADY

SEQ ID NO: 109404 - protein, 472 aa, unidentified
MVLPPKKCQPLAEQKKKPLVVACETALKEQQVRAQLQRLNWDAAGIDIGATSHFVAVPADRDAQPVREFPAFTADLERLADWLEQGGMRTVAMESTGVYWIPLFELLESRGFEVLLVNAHHVENVPGRKTDVLDCQWLQELHTFGLLSGAFRPEEPMCVLRAYLRQRANLVRYAGMHIQHMQKALNQMNLHLHHVVSDITGVTGMKIIRAILAGERDPQVLAQHRDRRCRQCVETIAKALHCSWREEHLFVLRQAVELFDTYQQQIERCDEEIAQVLARLDSATDPEAPPPVRKPKVDRNTPRIDDLREQLFRLVGVDLTRIDGLNAQTVLKILSEIGTAMSRWPSVKQFCSWLGLSPGNRISGGKRIGKSKTTPSANRAAAALRIAAQALSNSQSALGGYLRRQKARLGAPKAITATAHPLATILYSMIANKTEHDPPEVNYYDVQYRKRVLANLKRRADQLGFDLIERPA

SEQ ID NO: 109405 - protein, 506 aa, unidentified
MKVQASKPTFTIGYYPIGQYGSNICRQDIGRKRPYRSLLRQRYWAWSFTSKLITMAKVAKRKQTSKGLRLEVVNPNAAGIDISPKEMQVCVPSDRDGECNRTFGVYTEDLHYIAEWLKVCCIDTVAMESTGIYWLPVFRILKESGFEVILVNASDVKNFSGRKTDASDAEWLMMLHSYGLLKPCFQPENIARTMRNLVRHRDNLIRSASREVLHLQKAMEQMNLKLDNVFSDILGKSGQSVIKAILNGERDPKVLADLADPRCRTSKEEIEKSLQATWDEEHLFEMRQSDSLYQFYQQLIAECDAKINEIAMQYSATVDAPETELLRSEKYNAKKNRIGFDVEKVAFELWGVNVMRIPGMSRGALLRLVGELGADFTTKFVDVKHFVSWANLVPNNKISGGALLSSKVPKKKNPVGMIFRQAANTLKVAKNSLGDYFRHMRAKGGHLQAMVATGKKLASIFYCMVQRKVEYNEKVYCNHRKQELQNKVAYLHKRLQRMESELANCG

SEQ ID NO: 109406 - protein, 318 aa, unidentified
MLIHYIDIAKRNFVIAVSSLSKTKTETNNPKGIAHTIEYLKKHKVALVVTESTGGLEIPAAKAIRRAGIAVIIANPRQTHQFAQSQPLTKTDAKDAKMPAFFAQMTAQKEDSQTMPYQPPTEAEEVLEALVNRRNQPADMRTAEKNRLHQVHETQVGSVKQLIAHFDRLIDESDKQIDDHTRTHFDGKAQVAEQIKGIGSITTATLMAMLPELGRLSHKRIASLAGIAPHPRESGETKFKSRCFGGRSTVRKALYMATVAATRFEPLIRDFHQRPLSEGKPYKVAVTACMRKLLTISNARMRDYFAENDTAENGIRTA

SEQ ID NO: 109407 - protein, 394 aa, unidentified
MGKLYVGIDISKDKSSANGIDDHGKSRFEISFDMDGAGFAELLKAIEANSEDNEGVVAAMESTACYHINLYSFLSAKSIETIIINPLLIANFAKLSLRKTKTDKKDARTIAQFILTHRNSVTQLAISQDLQDMRDMARERESLCHQISAAKVEIQRVLQTTFPELAAMTNPLTKVMLHFIQQFPSARLVSMSRPSAIEKTLKEKPCSCRLRFTPEELIEAARTSIATVSPAKELILSGKIETLVHLQKRRDELTKALIEYCESTIVDDLRIITSIDGINNETATTLLAEIGYIGNYPSHKNLIAFAGIDPTVYQSGKYEGASRISKRGNRHLRRVIWLMTISVIHHNPLFRNYFLKRRNEGQPFKKAVFATAHKLMRVIFAMLSKKTYFQEKCV

SEQ ID NO: 109408 - protein, 536 aa, unidentified
MLLATIAGRGKQYTDAPLVLNMFVSPSVSMVPGRVRKSLVRPRRFSRLMAIPLRRVPALSHDRGRLPAMAFPLTKETAMPRGRRRTTRVATLPILTPHAAGIDIGATEIYACVPLDRDPRPIRRFGTFTEELRALASWLAQCRVTSVAMESTGVYWIPLYQILESQGFEVCLVNARHVKNVPGRKTDVQDCQWLQYLHTVGLLRGSFRPPETICAIRALLRHRDSLVRLAACHTQHMQKALNQMNLQLHHVLSDITGVTGLAILDAILAGERDPHVLAQHRDRRIKASRETIAKALVGDYRSEHLFTLRQSLASYRHYQALIAECDAQVQARLAAFDSAIDPAVHPLPPATTSHRKPQGNAPRFDLRAELYRILGIDLTQVDGLNTSTVYSLFSELGADLAPFPSSKHFASWLGLCPDNRISGGKILSVQTRHVKHRVAQALRLAAQSLYRSHSALGAYFRRMRAKLGAPKAITATAHKLARILYHLLTTREPYAESRLAQAEVAHRRRMEIRLRTQARALGFQLVPTPQPVGEVS

SEQ ID NO: 109409 - protein, 408 aa, unidentified
MNTLYVGIDISIKSNVVYMMLPNGDKHSNFSVASSHEGSIQLVKRIYSALTSHSLDTVLIGLEATSVYGDNLVYFLREDATLAPFNSRIHVINPKQVKRFHDAYNDLPKNDYVDSFVIADCLRFGRINKEVYSGDYRYQALRNLTRARFFTVQNLIKEKQRFMNVLFKKYSTMTQEKVFSNTFSATALAVYEEFDSAEALANMDLHELTDFIIEKGKNRFQNPDAVAKAIQKAARSSYRLPKTVNDSVNQVFSISITSMKALESQIKEFDKAIKAQTELLPNVLISIPGICPVYSAGIMAEIGDINRFDNQAALAKYAGLAWKQYQSGGFEAEVTRLIPSGNRFLKYYLCEAAFSLVRCDKEYSDFYHLKYKEVNRCQHKRALALTARKFVCLVFRLLKDNRLYCPAK

SEQ ID NO: 109410 - protein, 339 aa, unidentified
MKLYAAIDLHSNNSVLVILDEKDRVLYERRLPNDLRLILGAIEPYREQVQAVAVESTYNWYWLVDGLMEAGYELRLVNTAAVKIYEGLKYTGDEHDARHLAHLLRLGILPTGYIYPKEERAVRDLLRKRAQLVRCRTAQALSIQNLISRNSGQGISMGELRPLRDDTVAQLCGGNAFRMLAIQSNRAVLKCLDEQILILEKNVVSQAKLKPAFERLLSVDGIGKILGLTIMYETGAIERFEKVGQFASYARCVGSERFSNGKKKGEGNRKNGNKYLAWAFVEGAHFAVRYNERIRTFYQRKKAKTNGLIAIKAVAHKLARACYHMLKDQTSFDVTRAFA

SEQ ID NO: 109411 - protein, 406 aa, unidentified
MLRTLVWTGLIKKHDVCVQFKNGERVFDVIEHTAEALDAWLTELHQKVKGRIAIALELKKGPVVYALQKYPFITVFPVHALSLARYRQAFSPSGAKDDPQDAELALELMLRYPQKIKAIEPDNADIRLLQQLVEQRRQLVEDKRRFVNRIINTLKQYYPQPLEWFSHRGSLLLCELIIRWPSLQQLKRARRDTIRNFLNAKGGRAMALTEQRVASIDNAIPLTTDPSVIEANALMAAALATQIKVVSEIIKTYDERIETLFDTLPDAGLFKSLPGMGPCMGPRMLAALGDNRDRFNSAEEIQNYAGIAPVTERSGQKSWVHWRWQCAKFVRQTFVEWAAKTVNSSYWAKLYYQGLREKGKSHQSAIRALAFKWIRIIYRCWKARTCYDEAKYLLALEARHSPLLKP

SEQ ID NO: 109412 - protein, 369 aa, unidentified
MPFDILEKIDVQIADRMSVETKITLGVDTHKDTHVAVALDGLGRHLGTLSVPTNTTGYRELLGWARELGIIEQVGVEGTGSFGAGLARLLKAEGIPTREVIRPKRRDQYRSSKSDPIDAEAAARAVLAGTATGKPKDADGQVEMIRALRATRRSAVKARTQAANQMKALLVSAPEELRAQLRDLSTARLVCRASRFRLGENPHSVMAATKLSLRSVARRYQHLCEEIHELDEQLDRLVAEAAPELMAVDGVSTDTAASLLITVGDNPERLNSEAAFANLCGVAPIPASSGKTIRHRLNIRGNRDANRALYVIALGRMGRDERTKAYVAKRTAEGKSKREIIRCLKRYIARELYRILVRPLSPPPSVSAP

SEQ ID NO: 109413 - protein, 347 aa, unidentified
MKIIGCDFHPSFQQIAMVDTETGEETEKKLTPQEAEQFYSQLEGEVVVGVEASGNMLWFERMLAKHGHRLRLGDASQIQAGEVRKQKTDRRAAELILKLLLEERFPEIWVPGLPERDGRQLLLHRYKLVGMRRQVKNQLQHLAMNQGLQLKRRLWTQVGRQRLQELPLEGWTARRREDGLRWLDQLNHEVAELDAAVEKHAQQNTVARLLQTHPGVGPITSLAFVLTLGNIERFSHSRKVVSYLGLNPSEHSSGVRRRTGAISKQGNPMLRSLLVEAGQSASRGDMELKRAYQRLKQKKHSAVAKVMVARKLAVRLYWMWRTQQPYSATRMQGNLSHPVARTMRPVA

SEQ ID NO: 109414 - protein, 388 aa, unidentified
MYLVGIDISKYKHNCFIATDSGVPLKEFVFENNSEGFKLFHKVLSELDQDQEIRIGLESTGHYGTNLKQFIVASGYTYLEFNPYLTHQFSKAMSLRRTKTDKVDAKTISNMLGSVDYKTLHTQFYHINELKQLVRDRDDILTNRSKTLVKLTNLLDIIFPEFKPFFNNKLGATAFFILKKYKSPVRISKLTMKDFDELKSKSKGKLTYPKFSRLKSLAKDTVGVQSDIYNKRIQALIKDYEYFDQSLDEIDQEIIYLFKETKTMLTTIPGLGIIQAATIYAEIGDIHLFSNPQKLIAYVGFDVSINQSGISEHRGKIVKRGSPLLRKAIWTYALPSLRFIPALNDYYHKKKAEGKHHKVALTHVCRKLIRMIYHIEYNHIVFDDREIK

SEQ ID NO: 109415 - protein, 381 aa, unidentified
MRQVCGLDVHKDSVFVCILNEKGIVFQEKFGVLTTELEQMLEVLMQHEVSEVCMESTSVYWMPVWRVLENYIPKLMLVNPYFIKQLPGKKSDVKDAEWIATCLLKDLIRGSYVPEDRIQQLRQYDRRIYDLNKEISYKLTKLDMTLQRCNIRISNYVSTTDGKSYQEVVRLISEGVTTTEELVKVIHPRTINRCGLATIAGALTGIISEADIDIIRQLREEVVIDLKHKDECQSKMDTLCREWFPVQLSNLQTIPGVKSRSATAIIAELGTDMSSFEDAAHLVSWCGLKPRNEESAGKIKSRSITHGNKYLRKTLIECSWASSKTQGCFYNKFSYIQSVVRRKNRMKVQVAIARKMLSAIWFILHDNVPYKDYSPDITPAE

SEQ ID NO: 109416 - protein, 344 aa, unidentified
MKYFVGLDVSLKETAICLVDADGIIISEGKTLSEPDAIGAWLTERDVPISRVGLEIGGLSRWLYIELKACGWPAICIDPRRLRGLTKTMPVKTDRNDARSIAQVMRIGWFSIVHVKSTGSQELRMLLANRKMLLTKQIDIENEIRGTLRVFGLKLSGRIQQSTFERQAMELISDRPQLVAMVRPMLVARAALREQCAVLHKMMLKAVRLDDTCRRLMTVPGVGSLTAVTFVTTIDDPARFERSRDVGAHLGLTPRKYASGEVDRNGAISKCGDSLCRTTLYQASLALLTRTQRWSSLKAWGMGVAKRRGMRRAVVAVARKLAIVMHRIWSDGAEFCWARNEATA

SEQ ID NO: 109417 - protein, 318 aa, unidentified
MDQEPIYVGIDVAKAQLDLAVRPTGQEWQSPNTPEGIAQIVGRLQALAPTLVTLEATGGLQLPLAAALAVAGLPLAVVNPRQVRDFAKAIGRLAKTDRLDAQVLAHFGEATKPQPRPLPDVQSQALRDLLARRGQLIGMLTAEKNRLGTTSAPVRPRLQAHIHWLQEELASLDQDLGDAIRQSPLWRAKDNLLQGVPGVGPKVSATLLAHLPELGILTRQQISALVGVAPLNRDSGLMRGRRRVWGGRARVRAALYMAALVATRHNPTIRTFYQRLLAAGKPKKVALVACMRQLLCILNSMLKHGCPWNPKFVPQQIS

SEQ ID NO: 109418 - protein, 318 aa, unidentified
MANQVAVGIDISKKTMDVAIGHEQSTAIFSNDGAGHQALIAALKNHPVSLIVMEATGQYQLACACALQAAGFAVIVINPRQARDFAKAMGRLVKTDSVDARMLAELAQVLNQRPDRDRFIKPMPDQVQQHLHALVLRRRQLVRLLVSERQRKHMAHPEVVQDIAELMDMLATQLEALDRRIAEHLAQYQSDLATLLKSVKGVGPATAATLISELPELGQLKAKQICALVGVAPMNRDSGQARGERIICGGRATVRSALYMAAIVAMRHNAVIRRCYERLLAAGKPKKVAIVACMRKLLIIMNAMVKTGRPWNDQPAPA

SEQ ID NO: 109419 - protein, 351 aa, unidentified
MTIEHYIGFDVHKKSISFCIKRADGSIFDEGRFRATRHEIKGWVGRQTASWHGAMEATLFSGWIYDEMKPYAARLDMGNPSMMKAISAAKKKNDRLDARKIADLVRCDLLPKCYVGPREIRELRRMLRYRNAMVGHAVQIKCRMSGLLMESGAEYNGKQLHRKQYFSDLMEGLEEVPASVKELLQMSPGDAGDVREDATTVGGAVERGAAIEEAGGTVTDDRRVGEITSLTWALEMMDPRRFSSIGDALSYCGLTSALNVSADKAQRGPLSKQRNGHLQTVLIEAAKVAPRWNAQLAEVHEKELSRGHKNQATLEVARKLVAYLLAVDKSGRPFELRKPVQQPAEEVLAVG

SEQ ID NO: 109420 - protein, 412 aa, unidentified
MSMSPSLFVGIDVSHKHNVVCALDDQAQQVKKMASFPNNLPGTEQLEQWIVEKMHIAQAENLIVGTEATSFYDFHVMEHLAQSPLLAHLPPSLFRFNAKMIRDFKKALRAPHVKNDYRDAFAIAMRLRVGDLPAAFRPQLEHLPLQRLTRFRAHTAKSLAREKNYFLSQLFLKFSAYTQIKPFSDPFGATSQAILAEYLSTDELMAMPIEDLLEFIIKKGRNRFPDPQEVVEKLKKVARESYRIRPALAQSVHLVLTLSYKNIRTLTSTIKELDEAIAKELEGFTTTLKTIPGIGPVYAAGILAEIGNIDYFPGHPKLAKYAGLTWTEHQSGDFRAEETRIIKAANAYLRYYLVEAANLVRLHDPTFRAFYQRKHQETLKHKHKRALVLTARKLVRVIFAMEKNGTIYRPRA

SEQ ID NO: 109421 - protein, 421 aa, unidentified
MCLPFTLTRGLLWFWPEQSRTNGRDIRVPETLQCKQFELANTPMKTELYLGLDVHKEWILVAVAQWGRNGAVQDLGAISNDLHALEKLLGRLRKRYGPDVMIRACYEAGPCGFGIARRLGQLGVECAVVAPSLTPTRAGDRLKTDKRDARKLARLLRAGELLTAIYIPEPTDEAIRDLCRARSDAVDDRRRSRHRLKAFLLRHGYRYQGKSAWSAAHERYLRELVLPHPAMKVILEEYLISVQLASERIARCEAAMSDLLQSWRLEPAVRALMAMKGFQTVAAMIVVRELGALDRFTHPRQVMAYLGLVPTENTSSDRRRQGHITKCGNAHARWLLVECAQHYAASPKVSKELSRRQEGQSPEVRAISWRAQNRLHRRYSRLLARRLQRNKAMVAVARELCGFIWELLRSQECYHVPAPSE

SEQ ID NO: 109422 - protein, 451 aa, unidentified
MAKTYKSLFAQDITPTHHNAAAIDIGAKFHVAAVDPQRAAEPVRSFGTFTEDLGRLADWFAECGVRTIAMESTGVYWIPVFEILDQRGFDVVLVNARDAKHVPGRKTDISDAQWLQRLHAYGLLRASFRPKGEIATLRAYLRQRERLLDYTAAHIQHMQKALMQMNLQLHHVVSDITGVTGMAIIRSILDGERNPETLATLRDRRCQASVDTIRQALIGNYRDEHVFALRQAVDLHDFYQTKVAECDSEIQGVMRRLRDTAAAPAAKLPPARSRKKQPNSVGFHVRGLLHGILGCDLTQIDGLGPYLALKLVGECGTDLSAWPTAKHFTSWLSLAPSNKISGGKILSSRTRKSKSRAASLLRLAATTVGRTETALGAFYRRLSARVGKSKAITATARKIAVLFYNTLRHGMVYADPGASAYEERYRKRVLANLQRRAKSLGCVLHEAPAPG

SEQ ID NO: 109423 - protein, 321 aa, unidentified
MKTVLGIDQAKKKFDVALLRNGKYKSKVFENNPAGFSSLLAWLAKHDVATVHACMEATGSYGEALARFLHEAGHSVSVTNPARIKAFGQSELLRTKNDKTDAKLIARFCEKMEPTLWQPPPAEVEYLRGLGRRRDALVSMRTQELNRQESSNDTVNSSVQTVVECLDKEIEQISKLIKDHISKHPGLKHKHDLLNSIPGVGPSTIEAILSEINAFEGFETIEQVVAYMGLSPKEHTSGTSVKGKSAICKIGNARLRKALYMPALSAIIHNPIVKALYVRMKAKSKNGMVIACACMKKWVHLIYGVIKTNKPFDPAYTLKTA

SEQ ID NO: 109424 - protein, 328 aa, unidentified
MKKEKEQKQYCGIDVSGDTIDVCYIQMDGTMEWRQFENNRMGFKQLLKTCGIDYHYIMESTGVYHLPLAFFLQAQECMYSIINALQIKRFIQMNLERNKSDKKDAFHICNYGIMNNPEVYEMPERQYFECKLLNNAIEGLTQEITSFKNKLNALSKLEIDKKVIEKSYKQIIKTLSAELLKLETELNVKLASWQPELVKLVGSVVGIGKRATSLLIVSTQGFKHTTSYQQLISYAGLSPKEYSSGTSIKGKVRICKQGGGRLRHVLYMCALNAKETNKECKALFDRLVAKGKNKKLAVIAVCNKLLKQVFGVVKNRTPFDRNYLQKTD

SEQ ID NO: 109425 - protein, 428 aa, unidentified
MKYNTQNAKIESITEKTLIVGIDVGSETHYARAFDWRNYEYSKKPLEFSNTEAGFMTLKAWMADFAEKYGKNVVIPGMEPTGHYWFNLGAYLQDNGMKPVHVNPHHVKKSKELDDNNPNKNDRKDPKTIAALVNEGRFSYPYIPTGIYAEIRSLSNLRLQTQEEITRIKNRIARWFSIYFPEIKDVYRNPDSVSGLMILKEAPLPQDIVKLGVDGINKIWRDAKLRAAGLKRAKTLVTAAEHSIGSQEAPDSARIELKNLLNDYEIYKNREEDLMSLTEEKLSEIPHIDKLLEIKGVGLKTVSGFVAEVGDITRFDNPKQLQKLAGYAIVECSSGKHKGESHISYRGRKRLRYVLYEAAISLIARNEEFKEVHRYYRTRKENPLKKMQSVIAVACKVLRIFYTILTKGVTYDGAKMMQDIKRPQLKVA

SEQ ID NO: 109426 - protein, 393 aa, unidentified
MATSIFHRNFPQVQELEEKCQQARYIIGLDVHKKTTAICVIDSDHADQPVYQQKRVKNNQLLEKIQSFPGKKLVVSEASYGWFPLREALESLEDVTFIIFDARKTSAWIESSGIKNDKIDAQVLAFATLHGGISRLTVNQPCREEKEHFKLVNFRDQLVCQRTSVKNQLKALDRDYGINPYTGEQIEKSQIVKDMEDCLLDQLRFLNEKIQSVEKTMDNLSRDDETISLLKTIPGIGSITAFALRWKIGTIDRFASSAHLSSYFGFGLRQQQSGEHFVKGKITKTGNPLIRKLLVQGAQVIRFQRQDLVELYFPKLGQEKAMKDFRHANKVVIALARKNLTFAYQILKTSQAFDLNIYRQKRAVSVNIPVVSSIPQQPSVETEGAGSKAAELV

SEQ ID NO: 109427 - protein, 400 aa, unidentified
MISVGIDVSKGKSTVCILKPYGEIVSKPFNITHTQKDLSELSSMLFRLNDEVKIVMEATGIYHLPVLTYLQEKGFFVSVINPYLMKSYRNESLRKAKTDKIDSRIIANYGIDHWFKMKEFQTSGEIYEELKLLGQQYRHYMKLHLLSLAELTHLLDLTMPGIKNLLASWNETNRKDKRSDFVERFWHYDVITSMSEQEFTEEYILWAKEKKYVPSQEKAKVIYTLAQESIPTLPSETSSVKMLVTEAVRVLKEVDATLGLILSRMQEIAKTLPEYSVVREMGGVGNTLAPKLIAEIGDVRRFRNGKALVAFAGIDPPPYESGQFVGCNRKISKRGSASLRKVGYETMRSLKMRSRPEDPVYRYVVKKESKGKSKKSAKIAGLNKFLRIYYARVTELYKNI

SEQ ID NO: 109428 - protein, 322 aa, unidentified
MSGSPVTIGIDVASAHVDVAATGAELPAALGRVDNDTEGHSTLADGLARLKPTLVLMEATGGYEAALACALQAAGLRVAVVNPRMARDFARAMQRLAKTDRIDAATLAEFASVLTRRSDCERFIRPLSDSEQQDLAALVTRRRQLVSMQLSERQRLRLARPVTRPSIEAVLEAIARQLDDVEATMARRVEQHHAQMTKLLQNVAGIGRVAAATLIAELPELGRLNRRQICALVGVAPYANDSGASRGRRHIVGGRFEVRRVLYMATLTATRHNAAIRAFYERLVAAGKHKKVALIACMRKLITHLNAIVREHLNAQNRPSIT

SEQ ID NO: 109429 - protein, 320 aa, unidentified
MASRESLFIGIDVSKQTLDVAFGADPHAPLETIPSTDEGVQLLVTRLQRLQPTLIVLEATGGLERMVFAQLLQAGLPTARVQPRRVRALAHAEGRQAKTDRLDARLLARCAERVRPPHHQATDEQRASLRDLLVRREQVIQMRTAEIKRLTAAAPNLRPGIQQHIDWLDQEIRALAQERDNEAERTDEVRRKRERRDSVPGIGAITARNLLLRLPDLGTIKRTEAAAVVGGAPYAHQSGAQHKPRHISGGRRDVRRVLSMATLAATRRRLVRRAFDQRLCQAGKPRKVAIVAAMRKLLTILGAILRQQKPWDPAVHTSAP

SEQ ID NO: 109430 - protein, 403 aa, unidentified
MKHVIAFDVSMGKSYMVIYNAQKQCVFESEIKHSKPEFEKLQEKIHELADNTGELPEIVFESTGIYSRQLERFMQDNQYTYCLLNPLEAKLQCDSLRIHKTDRSDAHRLALTHFTVTRRVSNGTINSFHQLKSLSRWYSELDSELSIIRGRMHKVIQLTFPELERMFTSKSDLFLNFVQLFPHPDCVLDLSKTIIKNRIRANTNKKISNITAEKKAIQIIEIAKTSYPAVSQNDVLCDQLKLYARRYQELLHQKECCINKMVYIAEQRAEYGIILSLPGIGPNTAVRLMAEIGDITRFNNNKQLNAFAGIDIRRFQSGKTFYKDKINKRGNKHLRKLLFLIIQNMIKQRRYGQNHIVEYYDKLKTQPYNKCHKVASIACVNKFLKLLFHLITHDIHYDYRLTA

SEQ ID NO: 109431 - protein, 448 aa, unidentified
MARRRKTKVQKIRPTINPTAAAADIGAREIYVAVPVELSPTPVRRFETFTDELKALVAWLVELKITTVALEATSVYWIPLAELLEEAGIAVCLVNPRHVQNVSGRKSDVMDCQWLQYLHSVGLLRAAFRPAAEIRAVRALWRHRAALVRQTGWCIQHVHKALDQMNLQIHHVLTDITGLTGTSIVEAILAGERDPKKLAAFRDRRVKASLATLQQALTGDYRREHLFCLRQAYEAYQFIGQQIAQVDQELEAEMARLLPAPAPQVPAEATAPAAKSPTAYPAQSYLTALCGVDLTTIPGIGALTAHTIWAELGADLSAFPTVKHFCSWLSLCPDNRTSAGQCLSTKTRVSANRVAHALRLAAQGCHHAKHELGDYYRRMRARLGAAEGLVATAHKIARIVYAVLTTHQAYDPSIAAAAQQQTNQRRLARLHATAKNLGFQLVPDQQTA

SEQ ID NO: 109432 - protein, 440 aa, unidentified
MRSESRTDYKACAGIKASVPSKIGEEGEMKWVARIGIDWADKKHDWVLKDGQGRRDGGVFLASPEAVHEWVRSIRAQYPEGKILISLEQSRGALIYALRQYDFFILLPINPRALSLHRQSLYLSGAKSDPTDADLICDFGADNFDKMRVLVADDVQTRKLGLMVEARRSLVDQRTSNIQALTAACKQYFPQVLEWFGGAGEQLTLAFLQKWTTLEQARTIRRDSLRTFVRAHSRWSEEKIEALCSAIRSAVALTPDEAIIESYAMQAQSIASVVLVLDEQVSRYDKWLATLTQAHPDCEVFASFPGAGQVMTPRLIPAFGTNRDRWQDAREIQTYSGIAPVVDASGKRRRVLARWHCPKFLRQTFHEFALASIPHSQWAKAFYRQQRDRGNGHHAAVRSLAYRWMRILFRCWKDEELYDEERYLTQLRLKKSPIITRLAA

SEQ ID NO: 109433 - protein, 345 aa, unidentified
MSIVGGLDIHRKQLTFDYLDTVTGQVVRGQVAPADREHLRAWLARFAGHDDVAFAFEGCTGWRYVAGELASAGIGVHLAEPADTAFARGRKRHAKTDKTDSRHLRQLLAEGRLPECWIPPEQVLEARAQLEAYNDLRGEHTAWVQRVHAVFFHQGAPALGEGTLRGTEGLAVARAAAAAHLSPAGQRQVAVALAMMTCLEEQLEALRHQLLDMARHMKGARLLAGQVYGVGPLTALTLTCWLGGAGRFSSARKAVRFAGLDITVYSSDGKRAPGRLSRQGPPVLRWAVYEAGKAHARSSAPDHAYYAQVKDRKNSKRAALSEARKIIRQACHILAELGDGAFAAA

SEQ ID NO: 109434 - protein, 414 aa, unidentified
MELLHERCAALDIGKKELKACVRAPSPKGKRSRRQEIRTYATTTNSLLELRDWLVAEQVTLVVLEATGDYWRGAFYLLEDDLNVILVNAAHAKGLPGRKTDVCDASWLCQMGECGLLRASFVPPEPIRQLRDLTRYRTTLTAERTREAQRLEKELEDAGIKLSSVATDILGVSGRAMLAALIAGEDDAVALAELAKGRMRPKIPQLVQALTGNFGAHHAFLCRLHLERIDQLSTTIEELSTRIEEQMRPFSHKLDQLQTIPGVARAVAEVIVAETGADMSRFPSPGHLTSWAGVCPGHHESAGKRKSGKTRHGDRWLCGALGTAAMAAARTRDTTYLGARYRRLAPRLGKKKAIVAVEHSILTAAWHMLTDDVDYHDLGGDYFARLDPERAMRRIVRQANALGYTVRFDPIQAA

SEQ ID NO: 109435 - protein, 442 aa, unidentified
MAHLPVLDPLAAFVDVGSEQMYVSIAGGEPKVFGTFTAQLHELRDWLLSQKVKSVAMEATGIYWLPLYSVLEAAKLQVLMVNGKHTRNLPGRKTDMKDCQWGATLHAHGLLRAGFVPPAEIRRLQDYLRLRQDHITLAAGHVQHLQKALERMNIKLHDVISNLVGRSGMAVIRSMLEGERDPERLLALCDVQIRQQKAERIKASLQGTWAEEHLFALRQALESWEHYQRLIRACDQQIEAVLRSIDVDPPTSPPSKAHKRGGANAPQIDDLHPMLVALCGGNDLTVLPAHTDYSVLQLIGEVGTDLTQWPTEKHFTAWAGLAPGSHQSGKRQRSAKRRRNRAGRLFCVMARSLARSKHIALGGFYRRMAGRRGGLIANIALARKLAALFWRVMVKGLDYVEHGLQYYEAQALETKQRSMRRLAKQLGFSVTPIQTEAQNASA

SEQ ID NO: 109436 - protein, 382 aa, unidentified
MAILAIDVSKSSLSFYSDFIGKGFVDNSPQGIFDLFNKASDSSSDFILVLESTGIYSFDVANYFFQNHIPVFWVKTDNMKLYRKILNRPKTDKIDAKLIFDIASKFPDSLVPFVNNSYIISELRNLTRLYLKLNEDIARLKLRLYSYVSLYFPKLDFKLNKTYESLLKDFTVEEIATMPLEELFEYIAKVSRHIVSSKDLAEKIQSLAKNALRLSPNPSNTLRLSIVSTIELIQHYEKQINLVKKEISKLIKRIPNTLTTVKGIGDITAAGIIAEIGDINRFRNASALASYAGLVWNIKQSGNYKSENTQLTKKGNKYLRTYLVMAANSLRIYDPIFKDYYQRKYTQTTTHKHMRALILSARKLVNLVYYLLKNNVPYVPNR

SEQ ID NO: 109437 - protein, 518 aa, unidentified
MPRATFRRSAKPKAFLLQKPNGVLTDRVQKVGPEHFGIVAIDCAKARSRYLCADFYGRVLLEPTTLTHTRGDFRAALDRVRQAIAQHDLRDCIVAIEMTGDYHRPVQRAFRAAGFETRLVHPFTSKQYRQPADPGNKTDDTDLGGIFRAATHGFGLIEPHWADDYRTLQVLRRHRRDLVDKRAQLFCQIQETLHALMPGYAECFCHLFEAPPPLRFARHTGSAEAIQQLGVPGLKKIAHDAKLFCRRATFHKIVAWAEQAPPGADPSPARRRMLATLDDDRAAKTLQITALERDLAHLVVRTPYVMLLALPGVNIVTCADLAGELGPIANYANANGITGRAGLMPTRYQSDLVDHANGPLSRRGNRRLRAVLMQTADNLIHCNHYFQARADHWRRAGKDARWIRVKIAKIFSRLAFALVAGGQLFPHEACLQRYHILGKLLEFHREHRTPAADVQTDLDAAIEHLPRRARRALAAPLQEELDKLARSRGPQPLADVLPLVLARLMGRVVQSEPEDADS

SEQ ID NO: 109438 - protein, 377 aa, unidentified
MEVLYSRCAGLDVHKDTVVACVRVAVEGKVSREMRTFDTTTAGLVALSSWLAESGCTHVAMEATGVYWKPVWHILAADGFALILANAAHVKNVPGRKTDIADAAWLADLLAHGLIRASFVPEPALQEIRTLLRTRKQLGREKTAHVQRLQKTLEDANIKLDSVITDVIGVSGCAMIEALIAGESDPAALARLAHRRLKASPGKLSEALRGRVTPHHRFLLRLHLQQVDAVDTAIAQIDQEVEANLAPFRAAAQNLTAIPGVGALASRIIVSEIGIDMSRFPTAGHLLSWAGLCPRNDESAGKRRSTRLRKGAPWLKTTLVQCAWAAIRKTGSYLQAQFHRLRARRGTKKAICAVAASMLTAAYHMLKDGTELPGSRR

SEQ ID NO: 109439 - protein, 357 aa, unidentified
MEGNQESSDRRIVGGVDTHKDLHVAAVVDEVDRVLASQCFATTRHGYKQMLAWMRTFGSLQRVGIEATGSYGAGLLRYMQKAGVEVLEVTTPDKHDRRKRGKNDDLDAQNAAHAGKRTVTPKSRDGMIESLRVLKACRKTAVAARRVALQMIQNTIVCAPDELRELLRKMTRMQLIRTLAAWRPDLTDYRNVASAYRITLKSLGRRYLELHDEIADLDTMIVAIVDELAPALVARNSIGHETAAQLLLTAGDNVQRLRSEASFAALCGVSPVPASSGKTTRHRLSRGGDRAANSALHIIAIGRLRTDPRTQAYVAKRITEGHSKLEAIRCLKRYIAREVFSLIKQQPQERYPAQTAA

SEQ ID NO: 109440 - protein, 334 aa, unidentified
MENIALIGIDLGKNSFHIHCQDRRGKAVYRKKFTRPKLIEFLATCPATTIAMEACGGSHFMARKLEELGHSPKLISPQFVRPFVKSNKNDFVDAEAICEAASRPSMRFVQPRTESQQAMRALHRVRESLVQDKVKTTNQMHAFLLEFGISVPRGAAVISRLSTILEDNSLPLYLSQLLLKLQQHYHYLVEQIKYLESQLKRKLDEDEVGQRLLSIPCVGTLTASTISTEIGDGKQYASSRDFAAATGLVPRQYSTGGRTTLLGISKRGNKKIRTLLVQCARVFIQKLEHQSGKLADWVRDLLCRKSNFVVTCALANKLARIAWALTARQQTYVA

SEQ ID NO: 109441 - protein, 351 aa, unidentified
MLIIGCDFHTRFQKIAMMDTTTGELVTRRLEHGTGEAERFYAALAAPVRVGIEATLATQWFEKMLRHYGHELWIGDAAEIRAAMVRKQKTDDRDALHILDLLMQNRFPRIWVPSPAERDVRQLVRHRHKLVRFRTSVMNQLHALAMGQGLCLRKKLWTTVGRQKLESLTLDPWASRRRRELLELLDQLDPSIGELDRAVIGEAESRPTAVCLMQQVGVGPVTALAFVLTVGPVSRFPNSKKLVSYLGLNPSEESTGGRQRLGAISKQGNTMLRCLLVEAAQTSARLDPELRRNYQRLKLRRGNSGVAKVAIARKLAVRLYWKLREADRPNTAARMQGSPVSPVVGESLSAN

SEQ ID NO: 109442 - protein, 284 aa, unidentified
MHSTTAPLASIGIDIGKEVFHIVGLETDGKIAFRRKIKRLALVESFKKMAPCVVGMEACLSAHFVSRVLRQLGHEPRIIPAIYVKPFVKGQKNDYNDAEAIAEASLRPNLRSVREKTQDQLDLQACHRVRSRLVSRRTATINQIRAFLIEQGIAVRTGATALRNSLPAILKNRQDEISPRMRGLIAGLYEDWICLDERIETITGEIEKIGEKEANCRRLMSVPGIGPLISTAVVAAIGTGEAFERGRDFGAWLGLVPRQYSTGGRSILGRISKRGSKYLRTLII

SEQ ID NO: 109443 - protein, 445 aa, unidentified
MSKGSGLSRGDKRRNAKLAELRRLVPADHVIVGIDLADKKQAVVVCDHDSQVLARKTVKARAWELGPVLEWAQRVAHKHGFCGVTVGCEPTGHRWMVLNQLATQRDMTLMCVNPMLVGRAREAEDYTCDKSDDKDAMLIARLVAQLHCYRPERAEETWARLRQLGARRERLVTEATACVQQLRDLLECVWPGVLEAAADPFGSSNWCAAVAVVLDRCDGRPERLKGRGLARFEAAVVRELGRWGGQRRRRAIIEAVFVALVDPAGVMVQRRGVLERARWVLSDWRAASIRLAEVEARMVEVLDELELTELVTSIPGVSAVGAAAMLAETGDPTRFDSPRALVKHAGLCPRDNASGTFNGRARISRRGRPRLRLAAWRATWGALQHNPVMLARYRYLTTRDDNKLTDGQARAAIAAALLRWLHVVVTQRVRWDGAIAAAQVMPVAA

SEQ ID NO: 109444 - protein, 425 aa, unidentified
MKSNRNETMNQRIERITMQHAVVGIDIAKDAHAAQITDFRGRSLTPHHLSFPNTLDGFEKLLRWVSEAQSKHRLTSLLIGLEPTGHYWFNLANWLLQQGIEVVLVNPVTTHRNKENRDNSPSKNDPKDALVIADVVSRGYYTDYVTQAASFQRLKTLMSDREYWVKQSTSLGNRIVRWIDLYFPEFRQVFPDWTVLRSLASLHACPLPCDLKRLSIDEVIDHWRKQGMKRASGVSGRAKAAALLAAATRSIGDTRATAEARQDLRRLLQTYDHVVAMLGEMDEMIQSILAEIPLAEQLRSICGLGNITLAAILASAGDLRHYAHGRQLLRRAGLNLAECTSGKFKGQIKLSKRGDSTLRKYLYWGMLSLVRQNPDFKRWHAHNQAQGMKKQASIFKLIGKLARILIGMVQRGETYRNASAAPVAA

SEQ ID NO: 109445 - protein, 340 aa, unidentified
MKHIGMDVHSTTTDACVRNDKGAIVLRRRIQTKASELEKFVLGITGGKRIVLEEDQMADWVTRVLQPLADEVIRCQPQYNRLIIGSEDKCDKMDAESLSELLYLNRIKPVHHPAMHFRTLREAVRAYWIASRDLTRAKNRLKGWFLFNGLHEPGRRIYASRKRTKYLKPLQEQGRNIELAELLYERMDVCRQLKAKHIRMLRQVSRPVKDLVELVQTIPAIGPISSYTLVSLLEDGRRIPNKRKLWRYAGLSLRRHESRDIGFQGASKTGNRLLKHVVMSAAITIVSRGERNGLLNLWERDIRKNVDPKRARRNLARKIVVIAQHLLRSKQEYIDELIKA

SEQ ID NO: 109446 - protein, 310 aa, unidentified
MKQLIVYIGIDVAKAHLDVAWAEQSRRFNNDKVGRATLVKWIKQKQSGPVQVICEASGGYEQDLLEALAEAALVVSLVQATRVRQYARAAGILAKTDKVDARVLARFGAAMRPEPTSPRSAAQKLLRELESQRRHLSDLLVAEQNRIEQLHDEKLRGLARTLLGTIKKQIARIDARIATVITQDQGLCQKAQKLTGVKGVGERTAALLLAQMPELGTLNRREAAALAGLAPFNRDSGTMRGKRTIFAGRRAVRRGLYMAALVASRRNPILADFCRRLRTKDKPHKVALTAVMRKLLLALNQALASTQSFA

SEQ ID NO: 109447 - protein, 383 aa, unidentified
MRPFGEVVASPYDVGHTESELKELARFLKSLPGETRVLMEYTGRYYEPIARYLHQAGIFVSVVNAILAHDYSGNSLRKVKTDKIDAVKLANMAIDRWLQLVEYVPEDEIRQTLKICNRQYNQYNKLKTMLKNNLIALLDQTFPDVNKLFNSPARKSDGHEKWVDFALKFWHCECVCGISERQFKDKYERWCKRNGYHYSADKAEDIYAEACGNVGLLPMCESTKVLITQAIIQLQAIEETLAAVKCEMQKLASALPEYGTVMALYGVGEVLGPQLIAEIGDVSRFKSKKSLIAFAGIDSPADQSGQVDNKSKAITKRGSASLRKTLFQVMSVILQNSPDDDPVYTYLDKKRSEGKPYKVYMIAAANKFLRIYYARTKLALVNT

SEQ ID NO: 109448 - protein, 402 aa, unidentified
MNSVGIDVSKGKSMIAVMRPFGEVAVSPFEVRHTDSELCELAKLLRSLPGETRVVMEATGNYHLPVAWLLNDSGFYVSVVNAMLVHGYGNNSLRRAKTDKKDAIKLANYGLDHWLALPRYVPEEDTRLMLKNCYRQYQQYSKVQTMLKNNLISLLDTAFPDANRLFSSPPRADGSEKWVDFVATFWHCECVCGSSEKVFVAKYQKWCKKLGYNFSEDKALDIYASACGHFGVMPKTDTTKLLVEQAVSLLRVTSTALASLKQEMQSLAASLPEYPVVMKIFGVGPALGPQLMAEIGDVRRFHSKKALVAFAGIDAPPYQSGQMDVYSRSISKRGSSSLRRTLFLVMGIYLQNAPPDEPIYQFMDKKRSEGKPYKVYMMASANKFLRIYYATVKAYLDALDEA

SEQ ID NO: 109449 - protein, 370 aa, unidentified
MAQSSTLFIGIDVHKDTIAVAYVAHDHGAEVPSLGTIGTRRCDLDQLVRKMQAKATHLIFVYEAGPCGYWLYRYLMKKGSDCWVVAPSLIPQKPGDRVKTDRRDAVQLARLARSGALTAVYVPTVEDEAIRDLTRAREDAISDCKDAKFRLKACLLRHDIRYTGRANWGPAHLRWLSEVVCPTPTQQIVFQEYVRAVPEHTERLQRLEQALQEHVKTWRLSPVVEALQALRGVQCTVAVTLVAEMGALTRFDSPRELMKCLGLLPSEHSSGAQRRQGSITKAGNTHARRVLVEGAWAYRYPAKVRRHVQLRLEKQPKVIQDISGKAQVRLCQRSRRLTSRGKHANVVTVAIARELTGFLWAIAKEVPSVV

SEQ ID NO: 109450 - protein, 343 aa, unidentified
MEHYVGLDVSLKQTSICVVNQAGSVLREVVVDSDPDAIGAFVSSNAPGVVRIGLETGPTATWLWTELKRLGLPVICIDARHAKAVLKMQINKSDRNDAAGIARIMQTGWFKEVRVKDIDSHSVRALLASRALLVKIKRDLENQVRGLLKNLGLVIGRAKFNVFAARAEELVEDRPELVAAVRPLLEARKAVEQQVCNLDRKVLKLARRDAQVRRFMTTPGVGPITALCFKATIDDPTRFKRSRSVGAYVGLTSRCHASGEVEWSGRISKSGDAMLRSYLFEAAGVLLTRVPKWSALKAWGTRLAKRNGLCKAKVAVARKLAIILHRMWIDETEFNWSKKEVAV

SEQ ID NO: 109451 - protein, 322 aa, unidentified
MLVYHNSGLLRPSAPLKTLGERNEKSRNQIRRNRLWKKTLEVIRIGDNSLHQRQQFSTTEIGISKLINWLNPNDVVGLEAGSQSFRIAKSILNKGIQVIVLNPGDLATIYQSLKKTDKEDSLKIARLIQRFPIEELPVVPIPNDEEEDNRRLCTEQENWTRQLTQSKNRLHSLFTQAGLTHITKKHLRTKANREISVALLPSRYQKEAERILKVLDLVEQNLKLIEEEIKEALKKNKAYAQTIMSMPGVGMITSLAIMSYMGNCKRFSSAKQAAYYVGLVPRVDISGDSAYYGRIVNRGCHSIRRVIVKRLGVLSVVNMVVR

SEQ ID NO: 109452 - protein, 371 aa, unidentified
MEHTRFIGLDIHKERISIAVAESGRSGAVEYFGEISNDPVAIGKLCDRLRRPGKTLAFCYEAGPCGYGVHRQLASLGHRCDVVAPSLIPTRSGDRVKTNRRDATMLARLHRAGELTPVWVPDADHEAMRDLIRLRSVVRQIVTRARQHLQGFLLRHGRKHGRGTAWRMAYRRWLSTLAFEHPAQQVAFQDYVDAVMDAERRLQRVEEQISGLLPEWNLRPIVDALQAMRGIALITAVVLVAEVGDFTRFASPRQLMAYFGLVPGERSSGETIRRGGITKTGNAHARRALVEGAWAYRMKARIGRHKVDRIEALPKVVRDIGWKAQVRLCTRYRRLSARGKTANVVNVAIAREMVGFIWSIACTIQSAPKTA

SEQ ID NO: 109453 - protein, 466 aa, unidentified
MAKPARSARARAPRVPRKTNPTPPVMHPNAGGIDIGATEVYAALPHDRSAEPVRVFQTFTEDLQALAAWLKAHHITTVAMESTGVYWIPVFQILETAGIEVYLVNAHHAKNVPGRKSDVSDCQWLQYLHSVGLLRGSFRPPDEICAARTLLRHRTTLVAQAATHIQHMQKALVQMNVRLQHVLSDLSGTSGLAIIDALLAGERDPARLARLRDPHVKASEETIRKALVGDWRAEHLFTLRQARESYRYCQTLIRECDTEIESRLAQIRSRVDPTQTPPPPPQPSQARRQKGDIHLEAADLRTELYRMLGVDATQVPGLGTNSVAGLVMHLGTDLAAFPRVACFTNWQGLCPNPQVSGGRVLKRGTRDVKNPVATIFRMAAQSLHHSDSALGVYYRRMRAKLGAPKAITATAHKLARIYYHLVTTKQAYDESVFAKNEEREAKRRVERLKREATALGFDLAPKAVAA

SEQ ID NO: 109454 - protein, 358 aa, unidentified
MFYLGIDQHRKQLTVNLRNEQGDVVLKRQVSTQWDRIRAFLAELRDVAEPEGGFVAVVEVCGFNDWLLKMLDEYGCREIIVIQPEKRSKKKTDRRDAAELSQTLWVNRERLLAGKPCNGVRRVALPSKQDGENRQLTALRKRMGSLRTRTINKVQRILLKHNIQQECPTKGIQTKKARRWMTELPLDEIDRMEMDLLLAQWELWDAQLEQLDKTIQERQRTDPMAAIVASMPGAGAYSSLMLASRSARSTDFHAGSLANYWGLTPGCRNSGDATDRLGSITKEGSAMARFVLGQMVLHVLRRDASMKAWYLRIKRRRGSKIARVAVMRRLATILWHMVKHKEPYVMGGPPRLRLAKTA

SEQ ID NO: 109455 - protein, 357 aa, unidentified
MADPHTTVIGGVDCHQQTHHVVALDDHGHRLGDQAFAANRRGYAQVLSWLQQFGCIQAVGVESTASYGAGLTRHLLGAGIKVIEVNQPHRQLRARRGKSDAIDAEGAARKVLSGEATAQPKDTTGSVEAIRQLRVVRASAIKARTAALEQLGDLTMTAPAALRERLGARTSLHTWATTCARFRADVSRLEQPLEAAKLALRNLGQRIVALDAEIASFDIHLTRLVSAVAPRTLALLGLGTLTTAQLLMSLGQNAERIGDEAAFAHLCGVAPIPASSGKTNRHRLNPGGDRQANAALYLIAVCRLRYCQRTRAYAARRTAEGCSKREILRCLKRYIAREVYHTLRADLTAYTASTAAS

SEQ ID NO: 109456 - protein, 449 aa, unidentified
MSGQSGQTGLPVVHQFAAGIDIGSRFHVVAVPPELAAEAVRTFESYSADLHRMADWLIELGVTTVAMESTGVYWVAVYEILEERGLDVVLVNPRESRNVPGRKTDVNDAQWLQRLHACGLLRASFRPGREIAALRAYLRLRERHLDYAAAHIQHMQKALTFMNMQLQNVVSDITGATGMKIIRAIVAGEREPAKLAKLRDVRCHASVETIEASLCGNYQPEHLFALAQAVALYDFYQARIAECDVEIERSLAELNQGKPMPEAPLPKIRQTRQPNALAFDVRASLYQLIGLDLTQIHGIGPYLAIRLISECGTDLSRWPSAKHFTSWLKLSPGSKKSGGKVLSSHTGKTTNRVTVHLRRAAVAVGKTNTALGAFYRRLAARIGKAKAVTATARKIALLFYNAVRYGMAYVDPGADHYEQQYRQRVVKNLHRKATEFGFTLQPVSQDCVS

SEQ ID NO: 109457 - protein, 357 aa, unidentified
MKIIGVDLHTRQQSIAMLDDQTGELVEKQLSHEGEQVREFYAGLPKPVLVGVEATGSLHWFLRLLEELGIEFRVGHPAKIRAAEPRKQKNDSRDARLLLTLLAESRFPAIWMPSREQHDLQILLRHRDQFVRLRTRVQLSLQALALSHGLRRGHSLWTCGGQHTLRALPLAAHASEQRDTLLALYPQLQGPINDLDRQVERAAQQRPQARRLMTHPGVGPVTALATEVFLGDPRRFADGKAVASYVGMIPREHSSGGRQRFGRISKQGNALLRFLWGEAAIHAVRRDPELQRFYRRKLVQKGMGKARVAAARKLGIRLWIMLRDEIDYTEFCRRGHQRRQRSGAACAGMLHGDSGLN

SEQ ID NO: 109458 - protein, 428 aa, unidentified
MLKINPLSTFYVGIDVSSKSNYVCALDFYKNKYINSSFANNQPGAEELAKKILECLKEHPDLNTIVAALESTSVYSIHIANFLSSCEELMHFKPYVFVLNPKCTANYKKSYIGLGKSDPIDAFVIADYARAGNIETEPWRGSQFLALKRLTRHRLHLVECMTREKTYLVSNLYLKFSELQMLEGDDQPFCDIYGATSSSVLTEYLSPEEIIDSSEEDLISFLAQKSRNRIKDISKTAELLRKAARDSYRLDKALYEPLNVSIASSFNCIETFKKEIKLIDIAIEREIRGLNPNAFIILQSIDGIGPVFAGGIVAEIGDISAFHSSDALAKYAGLMWKSNQSGDFDGEDTPMSKAGNRYLRYYLGEAANSMRKHNVEYGAYYRKKFNEVPKHQHKRALALTSRKFVRLVYGLLARNQLYSGVSLDTSNE

SEQ ID NO: 109459 - protein, 324 aa, unidentified
MTRKNTLKSLPTDTDFRVVGLDLAKSDVSVAAIPVDDNTPSLVDRMTYADLLDWAGKISPTLFAMEPCNGYSLLCLQLENLGHEIKVISGWTVSMWINTHLSGQKTDLNDAIALARLAVSDAELTPIRHKSITEIRIQTVQAVRQQLMSQRSKSIVSFKALAQQWGIPCAAGHRNLKKLRESIEAKVDLITRPVANAMLFLLDAVKSLDRQIGQLNQTLQELVMSDERGRLLQSVLGVGTQISARVITVVGNIERFNSPRSLVAYVGVAPRNFITGHKNLTKKKHGNCPDLSHKGQGKISRRGDKLLRSLFIQGAACLLSLIHI

SEQ ID NO: 109460 - protein, 363 aa, unidentified
MEYIAFDAHKRYTQVSVESVDGERRYEGRITHTRGALQQFLTTRERGSPVALETVGNWYWIVDEIEAAGQIPQLVHARKAKLMLGMVNKTDKLDARGLNRLQRTGTLPTVWIPPGALRDQRDLPRTRMVLTRERTRLKNRIHATLAKYGLRLEGASDLFGRRGRAWLQAALPGLPPHSRFATERLLEQLGIVTAQILAFEQRLRTVFAPTPELALLRTLPGVGWVLAVVIWLEIGEVARFPSAAHLAAYAGTTPRVHASGGRIHYGPLRGDINRYLKWAFIEAASTICLHRQVRPHRHVCRLYARIQQRKGHPKAVGAIARHLAEASYWILSKREPYREPAAHPVSSTEGPARGPHERETLGN

SEQ ID NO: 109461 - protein, 344 aa, unidentified
MQITTIGIDLAKNVFQVHGANERGKTVLRKQLRREQVAAFFANLPSCLIGMEACGSAHHWARKLQAFGHTVRLMAPQFVKPYVKSNKNDAADAEAICEAVTRPTMRFVPIKNVEQQTVLSLHRVRQGFIRARTAQANQIRGLLGEYGVVVPQGISNISLRVPDLIEDATNDMPGAFRQLIERLLEHLKLLDQQVGEIEMQIKAWHRDDEISRRLEQVPGIGPITASALAATVGDARNFDNGRQLAAWLGLVLRQHSSGGKAKLLGMSKRGDAYLRTLLIHGARSVIYRATQRNDSDNLLVKLTARRNANVAAVAQANKTARIVWALLVHNREFRAGYTPAMAAA

SEQ ID NO: 109462 - protein, 380 aa, unidentified
MSTAATRSTQPARTLHLALDLGNRTWKLAFATSIAHAPRLRTIPARELTQLDAEIVAAQARFGLPPNAPVVSCYEAGRDGFWLHRALSARGVTSHVVDSASITENRRARRAKSDRLDATALVRLLLRHHAGERGVWSVLRVPSVEDEDRRQLHRELFALTRQRTRQVNRIKGLLALHGVVLAKPRGLPVRMPELRDWSGAPLPPALAGRVAREWARLRAIQQDIVALRAARRALLDAPDAASDPLLQKVRRRLALRGVGEVSAWLYTTEFFAWRAFRNRREVAGLAGLTPTTRASGDLEREQGISKAGNALIRALAIELAWSWVRRQPASALTRWYRERFAGGGPRLRRIGIVAVARKLLIALWRYLETGVPPEGAVFKA

SEQ ID NO: 109463 - protein, 352 aa, unidentified
MRKYYVGMDVHKLSIAIAVLDAHGKLVTRTVIETTTEAVRDFFRNLRGEIHLTFEEGNHAAWLYDIVEPLVKRVVACNPKSNRIEGSRNDRVDAVKLAELLRLNGLKPVYHGEQGTRTLKHLMRSYECLVKDITRVKNRLKALYNSQAIKQRGRELYHASKRESWLQKLPNQGQRTRAELYFQQLDELKVIKRAAQKAMVAESKRHPAYKVLSTVAELGPVRMAQIIPTVETPWRFRSKRPFWNYSGLAVVTRSTADHEFEDGRVRKRQKQVIQTRGLNPDYNRRLKSIFKGAAMHASHCGAYREYYEGLLKTGMREEMARLAVARKLSATVLAVWKSGESFDAGRILRKAV

SEQ ID NO: 109464 - protein, 332 aa, unidentified
MKQATMKKKIGIDISKAYFDVAYRDDGRVHHAQFSNDKTGFHKLKKWLRRQGVSAAHFGMEATGRYGWELAKFLYEEGYTVSIINPKQIKAYGDSWLRRNKTDAADALLIADFCQDRLLQPWQPPAEEVAAIRDMERRIGSLQKMKTMETNRLKAGKLAKPVELSIKEHIAQLEKAITQMEEAIREIVERHEKLAREIALLTSIIGIGENTAAIIIGEVKDITFFDSPSALAAYAGVTSRIHQSGDTVRKKPQMSRVGNARLRTALYYPTMSAMQHNPAIRALVERLKAKGKPGKVILIAAMRKLLHIIYGVWSSGQPFDPAYEQQFATSAS

SEQ ID NO: 109465 - protein, 348 aa, unidentified
MTLVGCDLHARDQQVAVLDTATGEIQERRLVHDGDSVEQFYTALPGPVTVGIESTGYALWFHALLRRLGHEVIVGDAAKIRAMVVRKTKTDRRDAAHLLDLLRHDRFPTVWLPDPAVRDQRTLLAHRMRLVRMRTMVKNGVHAIALNYRLALGPSLFTRAGVAQLQALSLPPHTACRRSESLELLSWLNTRIKGLDDQIGEAAHAHPEAQRLMTHPGVGPLSALATVLVLGAVTRFPTSKHVVSYVGLAPAIESSAGKHRLGRITKQGNALLRYVLGQAGQAAIKRDPDLNRLYYAVLHRRGRSRAKIAVARKLLVRLYVMLRDQIDYPTFLHRAPAAARRKEMTPTS

SEQ ID NO: 109466 - protein, 402 aa, unidentified
MNAVGIDVSKGKSMVAIMRPFGEIVSAPFEIKHTASGINSLVELINSVEGESRIVMEHTGRYYEVLAHQLSEANLFVSAINPKLIKDFDNDSLRKVKSDKADAVKIARYALDKWQNLKQYNVMDELRNQLKTMNRQFGFYMKHKTAMKNNLIGILDQTYPGVNTYFDSPARSDGSQKWVDFASTYWHVDCVRKMSLNSFIDHYQNWCKRKKYNFSQSKAEEIYGKAKELVPVLSKDAITKLIIKQAVDQLNSASTTVESLRTLMNETASKLPEYPVVMAMKGVGTSLGPQLIAEIGDVSRFTHKGAITAFAGVDPGVNESGSYEQKSVPTSKRGSSDLRKTLFQVMDVLIKTHPQDDPVYQFLDKKRAQGKPYYVYMTAGANKFLRIYYGRVKEYLSSLPES

SEQ ID NO: 109467 - protein, 323 aa, unidentified
MSTFVGVDIAKKTFDVATPLPNGKYRTKGKLTNDSKGFAEFHAWLQKHVTPDVLIVMEATGNYHEPLADFLHAKGYRLHVANPSTTAAHARTELARNKTDKTDAKLIADFAMQKHSKLRLWVPEPMARRRLRALVRRLEDLNEMRQMEYNRLGVANANVRLSIESVIAHISKEITDTETAIKQNIDDDTDLRGQSELIRSIDGIGEKTAALILAELGDPLDYDGPKNLSSFAGLSPRQNASGGFTGATHISRIGCSRLRRGLYMPALTGMRYNEALKAFADRLKANGKAPKQVVCAVMRKLLHLVYGVVKSNKPFDASIALAK

SEQ ID NO: 109468 - protein, 441 aa, unidentified
MKNEPTQNNNSIPAADPIAAWVGLDWADKKHSLFVRPTDGAATTACELEQKPQALDQFFLQLHQKHPQGRIAVCLEQSRGPVLYALMKYDFVVIYPVNPRCLADFRRAFKVSGAKADPTDADLLSELGCKHHQRLRALVPEDLATRQLRFLVEARRDFVNKRTALANELTATLKSYYPLALEVVGENLEGPMGLEFLRRWPNLAKLQGAKPSVVRAFFYAHNSRSEEKIAARLEAINTAVPLTEDPAIVGSLQLQAAGLAQQLAAVQKTVAEYDQQIRVVFEGHSEKWLFEKLPGAGPVLAPRVAAAFGTIRTNLGAALDLLCLSGVAPVKRQSGQQETVHFRFARPKFLHQSLVEFAKCSIGQCDWARLLYEKQITQGKSAYAAIRVVAFKWVRILWRCWKDGQAYDEVKYLRSLKKRGIKLYESLYNALPAETGPVNNS

SEQ ID NO: 109469 - protein, 341 aa, unidentified
MEEYIGLDVSMKETAVSIRRAGERIWRGKCASDPSIVAELIRKRAPFVKRVVFETGPLSVWFYHSLRTEGLPAICIDARHAKAALDMATNKTDANDADGLAQLAEVGFFREVRVKGFGSMLTRTLVASRTRLVQITTELSNQIRGVMKTFGLLVPAGKGSTFEKNVRSLLADQGGLASIVLPMLEAWRGIRVRAAELGRQLVRDARQSQACRILMSIPGIGAITATSFTTAIEEPENFRKSRSVGAWIGLTTRRYQSGEVDYDGHISRRGDRHLRGLLYEAAAVILTRSSTNSTLRTWGLRLRERIGFKRAAVAVARKLAVIMHTMLKTGELFNPNAGAAA

SEQ ID NO: 109470 - protein, 370 aa, unidentified
MIESSTETLWVGLDVHQNSITAAILHGNEPEPTIQRLPGDLNAARKLFRKLSKQGTPRACYEASGAGYVLKRVLDHDGFHCEIIAPSLIPRKPGDRRKTDRLDAVHLARCYRAGQLTPVAMPDEDQEAARQLLRGRLAMQRHITQLKHRIVRVLATHGHRFTGSKTNWTQGHRAWLAATCRELDGPLAIIVTHDVQHLEYLESQRSALDASIERLSQSPPWRAGVEALRCFRGIQLLTAMTLLTEIGDIRRFGHPRQLMAYTGLIPGERSSGDVQRRGPITRSGNAYLRRVLVESAWHYRHRAGADLILKRRRMGQDPRAVAVAVKAQHRLTKRFWHLRQTKHTNKAVTAVARELCAFVWEALRAIGEEV

SEQ ID NO: 109471 - protein, 420 aa, unidentified
MNTWNQLRYYAGFDWAADHHDVVILEPGGRRVAQFRFPHSAEGWQQFRQQIQPYPALGVAIETRSGAAVEELLQSACTVFPVQPKAAARYRERQSPSGAKDDPRDAWALADALRLDGRDWRALAPEDPLIQELRLLCRDEAALIEQRTALINQLRAALREYYDPALQAFADWTLPAAWALIVQFPTPTALAQAGKRAGEKFLHAHKLWRPETAPKRLELFAHAADWQRPPAVTQAKSRLAVSLAKLLQTLQRQLDEYGAAIQAVFAQHPDHDLFGSLPGAGPKLAPRLLSELGADRQRFDTPQALQGLAGTAPVSFQSGQIHRVLMRRACNPHLRHAVHLWANCSRRACGWAQAYYQAHRDKGKSHACALRCLGQRWLEVLWKMWQSHSLYDGDLHARNQQKHGSWVFQILTQPAAQPGE

SEQ ID NO: 109472 - protein, 329 aa, unidentified
MEYFAAIDVSLELSSVCVVDGTGKIVCEKKVASEPEALAAFFRGSGLILTRIGLEAGPLSQWLHAGLTAAGLPAILIETRHVKAALKAMTVKTDRNDARGMAQLMRMGWFRPVHVKTVPAQEIRALLTGRKLLLGKLRDVELGIRGLLRGFGLKVGQVSKGRYEARIRELTGGHPMLEPVAAAMLQARVSLRAEYGKLHRMLLGIVRTDATCRRLMTVPGVGPVVAVNYKTAVDDPARFRKSKDLGPYFGLTPSKYQSGEVDWTGRISKVGDAMVRTALFEAANVMLSRVTRFSTLKAWALRVAKLRGMKRAKVALARKLAVVLHRIVG

SEQ ID NO: 109473 - protein, 350 aa, unidentified
MDRYMGLDAHASSCTVAVVGPSGRRLHSQVVETNAGALIRVLRGIPGTRHLCLEEGTHASWLYEVLSPHVEEIVVAAVRQSRGQKSDKLDAFGLAEQLRIGAIKRKVYKKRGEFRELRHRAKAYTLLVGDSVRVQNRIKSLFRSRGVAVAGKSVFRAAEREAWLKKLPATARSLAELLMLEHDGLLELREKAEKEMVVEARKHRAWRLVRSCPGLGEIRTAQLLPIVVTPYRFKNKRSLWAYSGLGIVMRSSSDWVRTRSGEWVKAPIQQTRGLNRNSNRTLKGIFKGAATTVIGQAKDEPLYRHYLQLLDGGTKPNLAKLTLARQVASIMLAVWRNQEVYDPARVGQAV

SEQ ID NO: 109474 - protein, 438 aa, unidentified
MQEACSPASAEGVAAYVGIDWADQKHDVTLRAAAEPAKVEHQRIAHELNALTDWVGELHQRFAGKGKVLICLEQSRGALIYFLMGYDFLELYPINPSQLASYRETFSPAGAKDDRPDSELICELLHFHRERLKAWKPADELTRKLAFLNEGRRKAVDQRTELANETKSQLKVYFPLAVQILGNDTSTMLAADLLLQWPTFEALQKERPHKLRKFFYAHNCRNESKLLERLELIKAAKPLTRDLAVIEPAALRVQLLAKQLKSLLPFIALYEKQIVKLFGAHPDSFLFRDLPGAGAALAPRLLTAFGTDRGRFDNPTELLSLSGIAPVRRASGKKTGKRASVHFRHACPKFLRQSFHEFGACSIRYCPWAAACYQTQRDRGKGHHAAVRAVTFKWIRILFACWKQRQPYDPQRYQQALQIRGSQYATTARLNLEKTLGQ

SEQ ID NO: 109475 - protein, 388 aa, unidentified
MNTLFVGIDVGSRDNAVYIMLPDGTKHSSFPVQNNLGGAQTISKRVVSALTDKNLNAVTIGMEATSVYGDNLMCFLREDGSLGRFERKLFVLNPKQVNKFKASYSDLPKNDPVDAFVIADSLRFGRIGSPVYMDDYRYKALQNLTRARFYAVQNLTREKQRFMNYLFMKCSGLAQEKIFSDNYGAAALAVFEEFETPDDLADMDVEELASFIAEKGKNRSPRPDEIAKEVQAAARGSYRLPKTVNDSVNQVLSISISSMRAMQAQIKALNREIVRQFENIPNTLTSVPGIGPVFSAGIIAEVGDINRFDGQAQLAKYAGLVWTQHQSGTFEAQHSRLIKSGNRFLKYYLCEAANSLEYQHKRALALTARKLVRLVFRLLKDNRLYKPA

SEQ ID NO: 109476 - protein, 381 aa, unidentified
MYYIGIDISKFKHDCAVIDDSGEIVTPSWSFTNDAKGFSQLKLLLNSLDTETGIGLESTGHYGMNLKLFLESNNFSFMEFNPLLINRFVKSKSLRKTKSDSIDCMMIAHYLMTVEYKPYPSSFYHTEKLKSLTRFRDSLIRFRSRQLVELTNILDKVFPEFKPFFGSRFSVTALYILSNYSSPEKIANMNSKSYEALRKLSRGRFSTVDFAKLKQLAKNTIGTTEDYLLLQMQIVLDIYRQLDSKVDETEVSIKECVSDMNPPMLSVPGIGIESAAVILAEFGDFSKFKNASQMLSFAGLEPGYFQSGTSETTGKMVKHGSSYLRYALMNCAQTVVNYEPTFAMFYSKKRAEGKPHRVALLKSCYVSSTHCKLKTLHMMPI

SEQ ID NO: 109477 - protein, 337 aa, unidentified
MDYFAGLDISMDETHICVLDREGEVVYESKTASTAQAIADELAKAPSCRRIVFETGRMAPILFHGLRELGFPVVCIESRQAYQALKSLATHKTDRNDARGLAHLARTGFFKPVHVKSLSAHAVRSLIIARKKLVGQRVTLENQIRGLAIVFGVRLPRALTAAFIDQALKASEGVAGLSAAMRGLIAARTAVMTAVAAIDADMRRMTRASEACRRLMTIPGVGQLTALAFVAAIDDPSRIRRSRDVGAYLGLVPKRYQSGEIDYVGGISKCGDRRVRTLLYEAANVMLTRYKGQLKLKNWAFGVAKRSSMRKARVALARRLAIIMHAMLRDGTEFVAA

SEQ ID NO: 109478 - protein, 358 aa, unidentified
MQVPRCTHPGGKPRFYTKQHKYYCSIDLHTRVMYLCILNASGETVLHRNVAARPEPFLKAVAPYRDGLVVGAECMFTWYWLADLCEDEGIPFVLGHALYMKAIHGGKVKNDRVDSLKIATLLRGGMFPMAYVYPRHMRPTRDLLRRRLHFVRKRAELLAHIHNTNSQYNLPPFTKLISYRANRAGLAERFPNASVAKSIEVDLSLIDLYHELITDVELTVMRNAKQHDGNAIHLLRSIPGVGKVLSMTILYEICTIERFGRVQDFLSYSRLVKPTRSSAGKLYGHSGAKIGNAHLKWAFSEAATLLIRHSERGKKFFARLERKHSKGKALSVLAHKLGRATYFMLQRNQVFDMNKFVA

SEQ ID NO: 109479 - protein, 357 aa, unidentified
MPSSNAKYIGLDVHKETIAIAVLNGAGKLVMESIVETKASTLLDFLHGLRGELHVTLEEGTWAAWLHDVLKPHVAELVVCNPRRNALLKEGSKSDKIDARKLAELLRSGMLRAVYHGENGLRALRELVRSYEAVSKDVRRVMNRLKALYRGWGIPCKGIQVYGRRHRQQWLEKLREFGVRRRAELFYQQLDALQDLRHTVRGELLVESRKYPAVKILRRIPFIGSLRAAELVALMQTPQRFRSKRQLWTYSGLAVVTHDSAQFRYVDGQLQRAKKPQQVRGLNRNHNHAMKEILKSAAESASRRGGPFRDFYQGLLAKGIKPELARLTLARKIAAIILTLWKKGESFDAKHVKPQAA

SEQ ID NO: 109480 - protein, 343 aa, unidentified
MKLTRVGVDLAKQVFQVHGVDRAERPAWCKRLKRSRWIAELERAAEPGAEIGMEACGSAHHWARVLQGKGYRVKLIAPQFVKPYVKTNKTDANDAEAICEAMSRPSMRFVAVKTVEQQDLQAVHRVRSSLIRERTAKANQLRGLIYEYGLVAPRELISLRRAVPEWLEDADNGLTARFRALLAGLYRDLQRFDERVRELDQEIAVIAREHEAVGRLEQLRGIGPLTASALYALVGDARQYRNGREMAVSLGLTPRQHSSGGKERRLGISKRGDKYVRTLLIHGARSALRAAPGKTDRLSRWVLALAERSHPNVAATALANKMARVAWAMLRHGTNYEPEGVVA

SEQ ID NO: 109481 - protein, 355 aa, unidentified
MSMLAGQYEFVIGGDPDRDTVDLAVVDSATGALRAQLADRADGAGYARMLAWADSHAPGRRVWALEGTGSFAAGLAVFLAEAGEDVVEIGGVKRQRGAKNDQIDAARAARQALAREHQTKVRAHGLREALRMILTTRQAILVSRTKAINELKGLIVAAPEQLRSDLRGCSLASQLDRIQAMRTQPEGAVEHRMAVLTLQSIAARVRFLSAQVDELDPELMTLLKQHPAGPALLAEPGVGPVVAAQLLVSWSHRGRVRSEAAFAALSGTAPLEASSGQRIRHRLNRGGDRDLNRALHTVAITRMRCHPETRAYHAKRTAQGKTHRDIRRCIKRALARRLYRRIQAATHQQQIPAAA

SEQ ID NO: 109482 - protein, 333 aa, unidentified
MTGVIMEEAQTAAQDFVVGLDVAKAKIDVCLRLPNGKLRSKVLPNSEAGYKALVPWLAKHGCTRAHACMEATGVYHEGVAEYLCDAGFIVSIVNPAKIKAYGQATGARSKTDAADAQLIAAFCAVQRPEPWQAPPVSVRILRALVARRDALVELRTQELNRLQVAHDSVRASIQSVLNLLNEQIDQIEKQIRQHIDDDPTLGSQRKLLDSVPGLGDATIPVLLSRFGGPLRFASSKQAVAFTGLDVRRYQSGSSVHAKPRLSKRGDSKLRKALYMPAMVSMRLTPWGKAFAKRLTDAGKPKMVILGALMRKLVEIAYAILRTGKPFDPAMHST

SEQ ID NO: 109483 - protein, 474 aa, unidentified
MSRVGDEVEDVLLLSLTGLVSQDSEEDVVTKVSGLSRGDKRRNAKLAGLRELVPLENAILALDLADKKQAVVVCDHDSRVLARKTVKARAWELDPVLEWGQRIADKHGFAGVTVGCEPTGHRWMVLNQLAAQRNITMVCVNPMLVGRAREEEDYTRDKSDDKDAMLIARLVAKLHCYAPERAEEIWALLRQLGARRERLITESTACIQQLRDLLECAWPGVLEAAADPFRSTNWCAALEVVLERCTGHPERLKQLGLARFEAAAVRELARWGGSRRRRRIISAVFTALVDPRGVMAQRPGALERARYVLADWRSARTRLAHVEARMVEVLDELGLTELVTSIPGVSAVGAAAILADTGDPTRFDSPRALVKHAGLAPRDNNSGTFKGRSKISRRGRPRLRLAAWRAAWGAVHHNPVMAARYRYLTTRQHNRLTDGQARAAIAAALLRWIHVVVTQRVRWDAAIASATSEMLIAA

SEQ ID NO: 109484 - protein, 345 aa, unidentified
MGFEPGPSKEGSWMMAQNDLVVVGIDIAKHKVDACIRSLSLQGTFPSGAEGRRKLIAWLRKHKVGKAVMEASGGYERDWAKALHQAGIGIRIVDPKRVRSFARSAGQLAKNDAIDAVMIAWFAETFGEAKGQAYDAAREKLSKVMNARQGLLDLQINLQNRSEHAGPELVQRMQARLLKKIALEMTRLEAAIAAMIKATPHFAERAEIIESVPGLGEITSAGLIAAMPELGQVSNKVAAALLGTAPYDDDSGRRHGDRHIKGGRRKVRNLFYMACLGAATRHNPMLKSFYRRLIAKGKEPKVALVACMRKLIVILNTMIARRQKWDANLYVSDDERTALGLRPSV

SEQ ID NO: 109485 - protein, 338 aa, unidentified
METYAGIDLHSSNNYIGVIDSQARRLYTKRHDNRLDCILRALDPFKKTLAGVVVESTYNWYWVVDGLQDNGYTVHLANPAAIQQYEGLKFTDDKWDALWLANMLRLNILPRGISTPKKIERCGIYCDGRMMFVGQRTAQILSLQSMITRNRGLNFSGAVVKNIMDFFVDKLFDSPHLRFTAKKNLAVIRFLDGAIKEIEAEVKSQAKLKKEFEMLLTMTGVGDILGMTIMMEVGDISRFEAVGNYSSYCRCVESKRLSNGKLKGKNNKKNGNKYLSWAYIEAANFSRRFCPMAKKFYQRKLAKSNKVLATKALANKLSKASYFIMRDQVPYDPEKLFK

SEQ ID NO: 109486 - protein, 382 aa, unidentified
MQPTDTVNPTILLAIELSASTWLVAARLPRLEKPNLHRIDGGDTAGLLALISSLRARSARGPDATIGVVCCFEAGRDGFWLHRLLTAHGVACHVLEPTSILVNRRARRAKTDRLDAEGMLRVLAAYLRGDHQACSMVRVPTPEEEDAKRTHREREKLVQERLRIENRIEALLFTQGIRKRPSLRSWERDLAVLRTGDGREIPRHLRAELDRLRRRLVMTLELIREVEAERDEAVKTKSQDQACRKIAALSRIRGIGENFAAVLTREVFYRSFDNRRQIASYVGITPMPYQSGGMDRDRRISRAGNPRARTTMIQLAWLWLRYQPGSELAEWFRERVGTLAGRTRRIAIVAMARKLLIALWRYAETGVIPAGAEIRAETTVAA

SEQ ID NO: 109487 - protein, 406 aa, unidentified
MADIFALDVSMGKSYCVWYRGKHCLKEFSLVHTRAGFNALRDMIKKAQKPIIYFEATGIYSRVIEHFCETNGLRFCRLNPLELHLKSESLRRVKTDQKDAHRIALTVQENTFRLTVPWKKDYLQLHELSRFYNQLNADWNYRLNHLHTALEQVFPELKQLFVNRTSKLALNIVELFPHPALVRPYSRVKLKNILMASTDKRISKMKAYKYADRLIDLAQKSYPAVSGDAIQVDEVRYYARQLIALTRKKEEVIKRIESIAQRLPEYILYCSFPGIGKQTAAQLMGELGDISRFDNANQLNAFVGIDIRRYQSGTYLGQDHINKRGNPIARKLLYFTVGNMIRQQHANSNHIVDYYYRLKEKRPRPKLNKVAMVACMNKTLKCLLSMIKHHKKYHYRYTDSIVPVKA

SEQ ID NO: 109488 - protein, 353 aa, unidentified
MQKEKVIKQSVGIDCGKVELVVAFGVMQVGFEEKIISNTAFKNTSEGFKKLQKWASKLTDPAVELVYVIEATGVYHEKVSLYLHNESCKICVMHPNKVKSFSQTLTVKTVNDKTSSQAIAYLGLEKKLDAWQPPHPVYRELKQLTREREQLIEERTLCKNQLHAEESGAWPNTGSVKRIKQRIKLLNKQMTEIDAEIVAIVSKHEWLKKKLEYVCSIKGVALLSAVIIVAETNGFNLVRNKKQLVSYAGLDVVEKESGISVKGKTKISRKGNKYLRKALHFPALVAIRHNDQMKAVYNRLVSRHGIKMKAAVAVQKKILELVYVLWKKEEMFDQQYLKNKGQQLEVATLCELA

SEQ ID NO: 109489 - protein, 384 aa, unidentified
MSKHSIIYIGLDTHKVSTEVAHIEDQRGAKTVHQGKIKTTKAAITKLARQYQSKYPNATLHFVYEAGPCGYWIYRLLTSLGHCCYVVAPSLIPKKPGDKVKTDKRDAMKLAKLLKDEELTPIYVPEPEDEAIRDLSRARETAMKDLKDAKFQLKGLFLRNNITCKVNDNWSNQHLRWLTELILPHPSQQIVLQEMIQTITERIKRVERLVNELAHQAKLWRYYPVVQALQAMRGIRFLVAVGTIAELGDLRRFDHPRKLMAYLGLVPKENSSGDNRKQGGITKCGNGRARRLLIEGAQTYKHNANVSTELQKRQEALPKVVIDVAWKAQLRLCRRYKRLIQRGKHRNIVVAAIAREMLAYIWAISREVILVPVDPSTRISRVPA

SEQ ID NO: 109490 - protein, 400 aa, unidentified
MNAVGIDVSKGKSTVAIMRPFGEVIAEPFEVSHTDTELRKLACFLKKLPGETRIVMEYTGSYWQPIAKVLHDAGFFVSAVNALLIYKYGNHSIRKGKTDKLDAVKIANYCLDRWTDLERYSPTDQIRQTLKTCRRQYDQYIRLKVNLKNNLIALLDGTFPGVNTLLKSAPRDTDGHEKWVDFAGKFWHRQCVCGNSEKAFANQYRKWCAKAGYRFNAEKAVAIYSHAGSQVDTLPMSSAIQSLITHAVAQLNMIIETISAIQHEMLTLASQLPEYPIVMRMFGVGPVLGPQLMAEIGDVRRFHCKQSLVAFAGVDAPPCQSGTFESKNRHISKRGSPRLRKTLFQVMSTIIQHAPADDPVYQFLDRKRREGKHYYVYMTAAANKFLRIYYGTVMAYFEKP

SEQ ID NO: 109491 - protein, 429 aa, unidentified
MRSIGLDVHRDFCEVAISEGGKARSVGRVEATPEQLELFAQSLGRDDRVVLEATGNALAILRILEPHVAEVVLAHPKQLRAISHAKVKSDKVDARMLAELLAADLIPRVWAGDEGTRMLRRRISRRRQLVKQSTATKNAASAVLVRNLKRRPELSDLFGKAGRAWLEALELPQDERETLDACLRQLDFLKQELARVDRAIAEVALGSPEIRRLMTIPGVDITTAATLVAVIGDVGRFPTPRHLVGYLGLHPRLRQSGSGPARHGRTSKEGPAAARHVLVEAAWSAASSPGPLRAFAQRTAARRGTNIATVAVARKLCVLSWHLLTSGQDYAFARPSLVRRKLRTLELRAGAPRRRPGPTTAPVWGSKADDKRERELADRAEASYRRLVNDWRASRPAKRGAGATPGRAPSGPSVRQAARQASKPQQPAL

SEQ ID NO: 109492 - protein, 338 aa, unidentified
MRVSTIGLDIAKNVFQVHGVDEKGRTVLRKRLRRAQVAEFFANVPQSVVGLEACGGAHYWRRVLSRFGHEVRLMAPQFVKAYVKTNKNDAADAEAICEAVDRPNMRFVPAKSVEQQDLQALHRLRTRLIGNRTQLSNQIRGLLAEYGIVLPKQLSQLRRALPMLLEDGDNELTPMGRGLFASLFEELLQLDKRIESFDKQLASIHRQSPQCRRIAEVEGIGPITATALVAAICDGKSFTNGRQLSAWLGLVPRQHSSGDKRRLLGISKRGDPYLRTLLIHGARSVVYRAKGKTDARSRWIAEKQAKLGTPKTCVAVANKNARIVWALLAHEESYRKAA

SEQ ID NO: 109493 - protein, 354 aa, unidentified
MSKDIILTVDYHDRACVIRRLNRSSGEEQVLTEIPTTAESLNKVVDQARREVGRRGRVIWIQESTTGWARVQKLLGERVEFTLANVLQMPLPPKARRRKTDKVDTARMQREYLAGNLPLAHQPAASWRQLRRSVAYREGLVSRRTAVRNWIDRYLAHETWFDRTALWSPKGQVRLRTLVRDLPRTDGLVIEQKLEELRRLEEQLGVALSELVLAYDDSPEAQRLDAILGIDVVSGISIVARVGPIERFRNSDALIAFAGLAPGIQESDQTRRNGRIGGGGTDRHLRHYLIEATVWARKIPRYQGTYERVKKRRGPKVGRIVVARMLVRSIYKILKKGVAFDPGVTTQASTTAAC

SEQ ID NO: 109494 - protein, 407 aa, unidentified
MRPIYERCCGLDVHKKTVVACRLTPEGSQTRGFGTMTGELIQLRDWLLEAGVTHVAMESTGVYWKPVFNLLEDQGMELMVVNARHVKAVPGRKTDVKDAEWLAELLQHGLLKASFIPDRESRERRELVRYRRSLVEQRAHLVQRIQKLLEGANIKLGDVASDVMGVSGRAMLQALAAGVDDPAAVAGMAKTALRNKIPELERALTGSVREHQRFLLRSQFRLLESIETEIAALDEEVAERMRPFQTALDRLDEIPGIGRRAAEQILVETGTEMSRFPTSGHFASWARVCPGNNESAGKRQYASIGGGNRWLRTALLEAAWTVSHSRKPTFFTARYRRLAARRGRKRAAVAIAHSLLIAVYHVLKDGVVFQDLGPTHFERRNQEAIVRRTLHRLEALGYKVTVEAMPA

SEQ ID NO: 109495 - protein, 408 aa, unidentified
MGDDWASDHHDVEVMDSSGATLARARLPAGVAGMTRLHSMIAGAAGDRAEEEDVQVLVGIETDRGPWVQALAAAGYAVFGVNPLQAARYRERHAVSGAKSDAGDAHGLADMVRTDSHQLRPVAGDSAQAGAVKVVTRMHKTLIWERTRHVQRLRHALADYFPAALEAFEDLDAADTLELLARAPDPASAARLTTAQISAALKRARRRKIGAKAAAIQAALRAEHLGQPAVITAAYAASVRALAAVLGTLNEQVKALEGQVEAHFGAHPAAEIIMSQPGLGPILGARVLAEFGDDPDRYISAKARKNYAATSPITRASGKRKTALARYVHNDRLIDALMAQAFSSLQASPGARAYYDKQRDRGSDYNAALRQLANRLVGILHGCLKTGTLYQEATAWPQHAAATEKTAA

SEQ ID NO: 109496 - protein, 332 aa, unidentified
MNMHAQGGVVSGVGRANAGVDVSKLHLDVCVGDQHRRVPNDADGWQELISQFKSADVDLVVIEATGGYERELVWALQRAGVAVARVNPRQSHDFAKSMGELAKTDKVDARILRDFADVLARHKDRAKYITPLEDVRRQELAVLMTRRRQLIEMRVAEGHRLEQASARAARSIKAVLGLLDKQIAAIDADVDSHLNRHFKQQRALLDSVKGVGPVAILTLSAALPELGRLKRRQIAKLVGVAPLANDSGQRSGKRRIWGGRAEVRAVVYMAALSAIRYNPVFKLFYERLVQAGKPKKVAIVACMRKLLTILNAMLRDQTAWDLSKHEYFIQQA

SEQ ID NO: 109497 - protein, 353 aa, unidentified
MEYIAFDAHKHYTLASVARPDGQLVREQRIAHERGALQRFLERCERGSPVAVETVGNWYWIVDEIEAAGGVPKLVHARKAKLMMGQINKTDKLDVRGLNQLQRNGTLPTVWIPPGQLRDQRDLPRTRMVLVRQRTQLKNRIHATLAKYALHDLEVSDLFGARGRALLRQRLELLPPCTAYTTQHLLEQVERLDHQVREFEQRLRAMFKPTPAIQRLPTLPGVGLTLAVVIALEVGDVARFPTAEKLAAYAGTTPRVHASGGKTRFGPSRPDVNRYLKGAFVEAANAICLNRGRAPRRHVTRLYERVARRKGHQKAIGAVARHLAEATYWVLTKQEFYREPQPTTVSSTGDKRG

SEQ ID NO: 109498 - protein, 375 aa, unidentified
MKEKVRFIGLDVHAETIAVAIAEPDGEVRSLGTIPNRSESLRKLVRKLGPAEKLRACYEAGPTGYVVYWQLTELGVPCEVVAPTLVPVKAGDRVKTDRRDAEKLARCYRSGDLTAVWVPDEGSEALRDLVRAREAAKQDQMRARHRLSKFLLRSGQRPPTGVRPWTRPYLIWTAQLRFTQIAQESTRQDYLHEVEHMRERVARLEQAITEAVKLASPALQQVINDLQALRGIADISAVTIAAELGQVSRFHSARQLMGYCGAVPSEDSSGKRTRRGGITKTGNAHLRRIVVEAAWSYRRPPCIWYGLRRRQESISEEAKEIAWKAQHRLHKRYMRLGAAGKDQRKIAVAIARELLGFIWAIGARAETIVRHRAAA

SEQ ID NO: 109499 - protein, 343 aa, unidentified
MQTIRTIGLDIAKSVFQVHGVDASGEVVIRRQLKRRYVLAFFQKLPPCLIGIEACASSHYWSRELQALGHTVRLMPPAYVKPYVKRQKNDAADAEAICEAVTRANMRFVPIKTPEQQSCLMLHRTRHLFIRQQTAVINSIRAHLAEFGIVAPVGRKGVTELLHVVADPSDKRVPEVGRACLAALGDQLLSLKQQILEFDRMIMAWHRSNQTSKRLHYIPGVGPMLATALVASVADPRTFRSGRNFSAWIGLVPKQHSSGGKDRLGSISKQGDRYLRSLFVAGALAVIRYAKIHGTGHRPWLTALLGRRPTKVAAIALANKIARMAWAMMAKGERYRNPVALAR

SEQ ID NO: 109500 - protein, 341 aa, unidentified
MIIIGVDSHPEFQQIASVDTDTGEFQEKRLVHPAEAERFYRALAGTGQKVRVGMEASGQARWFERLLAELQFELWIGDASEIQTKRARKQKTDRQDAQHILKLMLKDDFPKIWVPSWENRDLRQLLWHRHRMVQARTRIMNQLQAVALNEGLRCKKKLWRAGGRQQLESFRLAPWASRRRRDLLELLDRLTPTIAELSEAIEQEVENHPEARGLMTHPGVGALTALAFVLIIGNVERFQRGKQIASYLGLVPLEKSSGNRRRLGHITKQGSSMLRFLLVEAAQVTVRSLPEWRSQYFRLVMRRGTEDDESGDGPPTGHSFVLDVASRFELRAAQKFGSHAG

SEQ ID NO: 109501 - protein, 309 aa, unidentified
MDAIVVGIDVSKDRLDVSVQPAGTVLSYGRDAAGIELLIGTLAPLAPQLVAVEATGGFETVVVASLAAAGLPVVVVNPAQVRSFAGALGKRAKTDRIDAAVIARFAAATKPTVRPLPDAATQALADLVTRRRQIIQMIVAEGQREKRASVRARKSIQRLLKSLRAELSEIDGEIDESVRGSPIWREKEDLLASVPGVGSGTARTMLAELPELGTLNRRQIAALAGLAPFTRQSGKWRGKSFIGGGRASVRTALFMAAMTAMRCNPVLRAFHHRLRAAGKPKMVALIAVARKLLTVLNAILRDNRKWQNA

SEQ ID NO: 109502 - protein, 364 aa, unidentified
MQFIGVDLHTNKFTCCYREENGEKTTETFELTEQGLSHFSQTLTGETYVLVEATVTSFCFVRLVQPLVKEILVANTYELKQISLARKNTDKIDADILCRIIKMQVLSGETTISSVTIPPIEIQELRGLFSTYRLMKKQTTQIKNRIHSLLKEKLYGFTQEEIFNKKSREKLREMKDDPVLSFQIDLLFNQLEHLEMLIKTLQDKIKEHAAPFMREIEILTSMKGVSVFTAIAIIADIINVDRFKNSKSFTSYLRCAPRVSNSNTSVSIRGTNKKGRKLSASLITQSLHHVLAGSGKLNKWYTRLTKYKKAGLVRTGLRRRVFAEIYQMLKKGEYHYGREAKKHEAKLLQYKKFLDKRKFLLESA

SEQ ID NO: 109503 - protein, 344 aa, unidentified
MDHFAGLDVSVKETSVCIVDDTGRIVREVKVASEPEALLKVLGNPAYRFKRIGLEAGPLSQWLFSALAEAGLPVVCVETRHMKAVLKAQINKTDRNDARGIAQMMRVGLYRPVHVKTLRSQKLRMLLTHRKLLQSKAIAIENDLRGTLRNFGLKVGMVGTVKFEARIQELVENIPDMALLVEPLLIVRRALREQIVVLHRRLLAIVRDDEVCQRLMTTPGVGPVVALTYRATVDVPARFRKSKSVGAVFGLTCSRYQSGEIDWSGRISRCGDEMMRVMLYEAAQSMMRSKKWSWLKAWAMQIARRRGMKKAIVALARRLAVIMHRIWVDGTEFRWTREQAAAAA

SEQ ID NO: 109504 - protein, 358 aa, unidentified
MEYGAIDLHKKESQIRIVTEDGAVIDRRIATTRERLTAVFWGRPRLRILLEAATESEWVAQHLETLGHEVIVADPNFTAMYGHRSRRIKTDRRDVAALAEACQRGCYRVAHRRSALRRTVQAQLNIRRELTEARTRAISLTRALVRGGGFRIRSGSTDSFLTRVAALDLPQGMTDTLAPMRRVIELLNTELTTADETFATHVAEDCVVRRLTTLPGIGPITASAYVAALDDAGRFGGAAQVASYLGLVPREYSSGEQQRRGHVLRSAHPYVQALLVQAAWRIVRVKDPRTVALRTWADAIAHRRGKKIAIVALARRLARVLFAMWRDEVAYDPARIRSSPRTFVVASDDGVTESAVNG

SEQ ID NO: 109505 - protein, 393 aa, unidentified
MICVGIDVAKDKHDCFILNSEGEVLADVFTIPNNAEGFDTLLQTIRRCARPEDKIKVGLEATGHYSYNILGFLLDKGLPTYVINPLHTNLYRKSLSLRKTKTDRVDARTIAAMLMSDVDLKSYTDTAYHNEELKSLTRYRFDKVRERAKLKQSVSRLVTILFPELEKLVPTLHMASVYALLSEFPSAKQVAGAHLTHLKAVLHDSSKGRYGRDMATTLRDAARCSVGSVMPAKSLELQHTIRLIRELDAEIEDIEAAIQSMMEEIHSPITTIPGIGVRMGAMILAEIGDFSRFDSPDKILAYTGMSPSTYQSGQLSLSGAYSHMEKRGSRYLRYALYNATKYVCLWDPTFAAYLAKKRAEGKHYNVALSHATKKLVRLIYAMEKSQQPYNTAA

SEQ ID NO: 109506 - protein, 343 aa, unidentified
MQSISTIGLDIAKSVFQVHGVDAAGQVVDRRQLKRRHVLPFFAKLPPCLIGIEACASSHYWARELQAVGHTVRLIPPAYVKPYVKRQKNDAADAEAICEAVTRPNMRFVPIKTVEQQGCLVLHRTRHLLVRQQTATINSIRAHLAEFGIVAPVGRRGVEHLLGVIADADDTRVPEVARACIATLGVQLRQLKAQILELDRRILAWHRSSEASRRLNHIPGVGPLLATALAASIADPKAFQSGRDFSAWIGLVPKQNSSGGKDKLGNISKRGDRYLRSLFTAGALAVIRYAKIHGTKHRPWLVALLARRPTKVAAIALANKLARIAWALMTKGSRYRQPAALRV

SEQ ID NO: 109507 - protein, 399 aa, unidentified
MSMAELRVALDIGSNRHRVGIGSADGRILEEFEISHDREGFERFFSRIAAFEKRYELPVVVAMEGLGGWARPLDRMIQQHGYELLNVNNVKLARFKEIFPAPAKSDKIDTRKILELMHMREVLPLAKAVLHRVGPIPVENEQLKRFTRRRRQLVDEKVRVVNRLQSDLQAVSPGLLEITGDVDNLWFLNLLTCREDLTKLAGMKRASLLKIAGVGKAYAAKIEAWQKHAAFADETAWVGEMVIADAQRVLDLTRQIQALEQRLEAISASSEIATRIRTITGFGLICSATLAGEIGTVDRFGSEASLALYTGMTRLDNSSGKYIGTKNTRQVNTHARTAMMTAAARHINNVSESKAFYDKKVAQGKTHNQAVRALGRHLIRVIWSMITHQRDYVPKNPIT

SEQ ID NO: 109508 - protein, 326 aa, unidentified
MYSIGLDVSKSSLSVHIPLGNLDVEIENSIKALKSLYAKLKKIYKKEIDKLVFVFEPTGNYSSVLYRFCADKKIQIFIVNPKQSHNFAKAISQRGKSDKVDAQMLSRAIMIAREEDIVVPVIDTSIEEIKEMMSYYKIKLKQRVQLSNHLEALRAKANNSSIVKRLQKEIKELKKVEADIIDEIYQMIAKDETLIKKYEAIISIDGIGKIAAIVLIHLFIRYPNANQRQITSLVGLDPVIRESGTSIKSKSRISKAGGKMYRGTLFMAAMVATKHNEKLKLFYNRLKENGKHTTVAQIAVMRKLVIIAHSLYKSGESYDENKHLGY

SEQ ID NO: 109509 - protein, 403 aa, unidentified
MNAVGIDVSKGKSMVAIMRPFGEIVSAPFEIKHTASGINSLVELINSVEGESRIVMEHTGRYYEVLAHQLSEANLFVSAINPKLIKDFDNDSLRKVKSDKADAVKIARYTLDKWQNLKQYNVMDELRNQLKTMNRQFGFYIKHKTAMKNNLIGLIDQTYPNANTYFNSPTRSDGSQKWVDFVSTYWHVDCIRKMSLNAFVEHYQNWCKRKKYAFNKSKAEEIYTKTKELVPVFPKNEITKHIIRQAIDQLNSTSVTVETIRTLMNETASKLPEYSIVMQFKGIGPSLGPQLMAEIGDVTRFTHKGALTAFAGVDPGVNESGSYAQKSVPTSKRGSSNLRKTLFQVMDVLIKTMPQDDPVYQFMDRKRTQGKPYYVYMTAGANKFLRIYYGRVKEYLSVLPDPS

SEQ ID NO: 109510 - protein, 327 aa, unidentified
MLGLDVSKASLEYCLLDAGSRQVLRQGRVPNTPAGIATLLAKIPAHYPWVAEPTGIYSQALVSLAHQAGRTVLQADPRQAHSFLRAIHPRAKTDRLDSHGLAHFALTMHPRPFVIKSEVVVHLEQCLAARKGISASLAQLTQQRRVLPAAATALDAAIMALREQLSVLDAQIAADTRQPELAVARALDAIPGIGPVTAAAVAACLTTRHFAHPDAFVAYIGLDVRVRDSGQRSGVRSLSKRGNPELRRLLYLCAQSTLNVHDPANPFKAQYYRELAKGLPTTAALNVVARKMARTCWSMVTYGTTYDPSRVHQQPTARCTPGLDTKP

SEQ ID NO: 109511 - protein, 467 aa, unidentified
MGPASRAARLAIQHEVPFALGRWVVPGCSTHDVCVLPAAKPSQQSNKKEGKMSTTDPLTSPVDPCGFTYVVGIDVGSEHLLYTICQPDKRAVVKPSQINNDRVGFGQLDQALHALGSEPSRILIGLEATSRYNENLYQFLAEQGYTLCLLHPRQTHQFAQQRGLRAKTDRLDASTIARLLLSGEARVGYVPDELIASYRELERLHSQLTAESARYQNEIHALLTVLFPEFTQVFADPCGATALGVLKRYPGAAAIATAGVEALTATLRELARRRYGRPTAVELVRLAERSAASGVATSARALSLKVLCDQLEHTLVNLAHREQELDRVLGGDEGASRLSSVPEFGRQTLAVLRAELGDVTRFSRIDQAVAYVGLDLEVRQSGKWKGQVKLSKRGSGRVRRVLSMAALRSLTLPDSPFAAYYHRLVARGLKGRKALMAVMRKMLLVACHLLRSNESYDPAKVCAVTGP

SEQ ID NO: 109512 - protein, 349 aa, unidentified
MRFYKNQHQFYIGIDLHARTMYVCVINNLGETVFHKNMICSTENLELVTNTFGKDIVIGVECIFTWYWIADFCAENGIDFALGHALYMKAIHGGKTKSDKIDSEKIANMLRGGMFPIAYAYPKAKRAVRDLLRRRLFFVRQRAELSVHLQNTNHQYNINEPLTSSRMRSETYRNTIPEKFSDPATLKMVNADLFMFQAYHDIITKLEFQIEDMMEIQDPYSFSLLRSIPGLGFILPLTILYEIDSISRFPDVGKFISYCRLVKCAHESAGKKEKGGHNKIGNVHLKWAFSEGAVLFLRNNERGQKWHEQLVSRYGKAKAMSLIAQKLARTVFYMLKRKEPFDLDKFYGE

SEQ ID NO: 109513 - protein, 407 aa, unidentified
MVRSQLKTHSRCNTKGKPAYMKKNSNSKNQQKKALANEQSKQKLLTLGAFWKNNPAVGEQLTIGLDLGDRASCWCALDGKGEVLARGEVVSERQPLEQFFKQVPASLVALEVGTHSPWISRLLEKAGHEVVVANARRVKAITENSKKNDRIDAELLARLVRVDRKLLSPIRHRGETAQADLMAVRVRAQLVEMRTKAVNGVRGLVKSFGQRLVKCDADSLTVEHAKHLDEAIRPYAEQMLGVVEQLSKEIDKCDATLKKINQARYAEETARLEQVQGVGPVTALTFILTLDDAARFQRSRDVGCYVGLRPKSKQSGDSEPEMRISKEGDVYLRKLLVQCAQYILSQRGPDTDLKRWGLEIAAKGKKKAKRRAVVAVARKLAVLLHRLWVSGEKYEPLRHNRAVAKAA

SEQ ID NO: 109514 - protein, 348 aa, unidentified
MTTQPHIIGIDLGKHWFHLIGLDRDGAIVLRRKLSRSQLSAFAATTPRNVVAMESCCGSQYWGRVFAQAGHEVRLAPAQFVKPYVKTNKNDFNDAQAIAEAASRATMRFVPLKTTEQLELQASHRIRRRLVHERTAVINQLRALLLEYGIVTPLGRETFARRWSQILGTASAQLSPRLLVLIQRLREHWRTLDTQIAEATQELTTWAEGSPLCQRVATVPGVGPMIATAVVSAVGDARMFARGRDMAAWLGLVPRQHSTGGKPTLGRISKRGNGYLRQLFLQGAVSAYLWMKRDRSALGAWVQQLDRRRQRPVVITALANKLVRICWKVLTSDTPFRLYPGRPVEHAV

SEQ ID NO: 109515 - protein, 349 aa, unidentified
MRFYQQEHRFYCGVDLHARCMYLCILDHTGQPLLHRNYPADARAFLDAVAPFRDGLVVAVECMFTWYWLADLCAEQGIPFVLGHALYMKAIHQGKSKNDRLDAAKIAGLLRGKLLPQAYVYSKAMRATRDLLRRRSFLVRRRAELLAHLVNTNSQYNLPPLNKKLVYPANRGELNLAERFTEPSARKLVECDLALIDALDGQIHELELHLVRTAKVDDVQAYARLQSIPGVGKILGLVLLYEIHDVGRFPEAGHFLSYARLVRPGHESAGKAKGFGNKKIGNAHLRWALGEAACLYLRSSDRAKRWQARMHAKHAPGKTLGILAAKLGRTVYHLLRTRQVFDEARFFAS

SEQ ID NO: 109516 - protein, 385 aa, unidentified
MPDVSSNAPAVVRMRAALDVHKRSIVCASQSDDPRAGELRVEEIPNTERAIRGLVRRLGGPAGLVVCYEAGPCGYDPYRLFTEIGVACDIVAPALIPRAPGARVKTDRRDAKRLLVLHRAGALTFVYPPTPAQEGLRDLVRCRDDLVCARRAARHRVVKQLLRYGHIYREGKKAWTKRHIAWVRRQRLDDPLAHAALAHMLAHLDGVDAQIAALDHQLDEIAGREPWSDPVRWLCCFRGITTLTALALLAELGDFRRFASARELMSFLGLTASEYSSGEQRHRGHITKTGPRHARRLLIEAAWHYQHAPRVSQRIAAVQPHVPPDVAERAFSAQVRLHHRHRHLTTHGKRSTVATVAVARELAGFLWAAMTRQPLNHPDPTPTSA

SEQ ID NO: 109517 - protein, 325 aa, unidentified
MSPSKLYCGIDMSATTFNICVQSQDGELIHHQLSNNTTGFKILLKTCDTNYHFVMESTGSFHLPLCFFLHEANRSYSVVNALQIKRFIQMNLERSKTDRIDAKHICIYGIERRPPQYQMPCQQYFECKALNNAIETLTNEITAFSNKIYALKQLKIDNQAVIKSYQKMIKSLRAELKKLEQELVNKLNAWQPDLVKKVGSVKGIGKRATAILIVFTQGFKHTETYQQLISYAGLSPKEFSSGKSIRGKVRISKIGGKQLRHTLYMCALNAKATNAACKQLYDRLVANGKNKKLALIAVCNKLLKQVFGVVKSGVLYQDNYQKNIA

SEQ ID NO: 109518 - protein, 345 aa, unidentified
MKHYAGLDVSLKETSICIVDETGSICREMKAPSHPEDLARVLKDPTWRLTRIGLEAGALSQWLFSWLTEAGLPVVCIETRHTKAFLKAQVNKSDRNDARGIAQMMRVNLFRPVHVKTVTSQQRRALLTARKLLQEKAIAIENDIRGLLRNFGLKVGVIGPVGFDTRIRELVDGRPELADIAASLLAARQKLREEVSRLHRKVLAIVKDDSTCRRLMTVPGVGPVVALAFTSTIDVPARFRRSKAVGAALGLTPVLKESGESKRVGCVSLCGDGMMRTLLYEAAQVMLTRVKKWSWLKAWAMNIAKRGSLRKAIVALARRLAVIMHRMWSDRTEFRWTRDNTTECA

SEQ ID NO: 109519 - protein, 388 aa, unidentified
MNKIIYIGMDVHSSNFTLCSFEPGYGFEADKIFGQTQIKEDIFNSTVKYINKLKSMRPDVDVICGYEAGGLGYNLHRKLKAKEIESVILAPTTMAVARNSSKKKNDYRDAITIAKCLASSAYKAVYIPDEKDEDVRDFIRMRDDHKTALKQIKQQLNAFCLRHGHHYDNPKWTGLHLNWLRKLELSKVQRETVEEYLATYEALTSKIAALDVRIEDIASEERYSEKVNKLKCIKGIKTHIALSFVCEIGDFNRFKSADKFSGFIGLVPGECSSGNTERMLGITKAGNRHLRRLVVEISNTHRRGTVGRKSVALRERQKDMPKDVVAYADKATNRCQRKYQRMMFKGKNSNQAVAAVARELCCFIWGMMTGHYSRTAQAEASVYRSELD

SEQ ID NO: 109520 - protein, 317 aa, unidentified
MDVVGIDVAKATLAVVWVRADGRQKQKQCANTAAGHAALVQWLGRQTPARMPIGLEATGGYQDAVALVLHDAGYPVSMLSPGAVAAYAQSQLRRAKTDATDAALIADYVRTQQPPVWTPAPVEVRVLQALVRRLDALLEMRTQETNRLELAAPVVQPSIAAMVAHLDTQITRVRRQIAEHIDQFPSLRQARDLIVSIPGIGDATAALVLGELGPIARFTSARQVAAFAGLVPQVRQSGTSVRGRGALTRLGSTRLRKALYFPALTAARCNAPLRIFARRLRAAGKPKMVVIAAVMRKLLHQIYGVLHSGRPFDPTLA

SEQ ID NO: 109521 - protein, 365 aa, unidentified
MNSVITNTELSSHEGTRSQFNGGRCAIKLGIDVHQDFYVVVVQEGGANPKPPQRFKKEAFLHWAAKLARSGAEVHAVYEACGFGFGLQRNLTALSIHCYVVCPQKLDEQNRRVKTDGLDAKALCLKLDRFVQGNRDAMALVRVPTEQQEQQRAIHRQREQLVKARKQLEAQGRSLMVNHGFEPVKSWWKRGNFGALQVPEWIKELLGNSQPLLLALQERIGALTLQLQVAAASKQPRGLGAMTSVIIDREIGDWNRFNNRRQVGSYTGLCPGEYSSGNTRLQSCVTKHGNPRLRAALVELAWRLVRFQPSYKPVLKWRAILAKGALATGAARKKAIVAVARQLAVDLWRIKTGRLRGEELGLINY

SEQ ID NO: 109522 - protein, 394 aa, unidentified
MKLVGIDVGKNSHHFCVMDKETGEFNVAPSSFSNNKEGFDFLINSLKPYSKKSILLGMEDTGHYHVALLKFLLSNGYTVALINPKTTDLTRKMEGAITKNDKLDTITICDVLDTPERKKQYRITKVDRFDLYEQRQLTRHHHNLKEELNIYCNRLQKSIDLVFPEFNTLFGSKYGVVYMNLLKTFGSAEAIASTDIRTIRKCFEIKGRGGRISLTAEKLKECAKNSIGISSEVETIQIKHLVSQIMLIKEQIAEIDKKIEEFSIKNNSPILSIPGISHFSGTSILAELGDIGNYSKPSRIIKFAGVAPYHYESSQYNAQHTAITKKGSKYLRKTLYQVILPVINNNPVFKKYYLLKISQGKGHRCAQGHCIRKLLRVIYHLLETGQSFDPALLR

SEQ ID NO: 109523 - protein, 431 aa, unidentified
MPESTVSRQPQEPQFAAFVGIDWADQKHVWCLQAAGSTQRESGELEHKVETVEAWVAQLCQRFGERPIAIAVEQLKGALVYMLAKYECLHLFPVPSTMAASMRKALYASGAKDDPREADLLLDFLLQHRDRLHRLAPDNEATRRVQNLVEERRKLVDEKTAQLNRLTSNLKIYFPQILDWFKDLDTELVCALLEHWPTLEELQQPSPVELRKFFHQHHCRNGELIEHRIQEIGHARPAIHDRAVIEAKRVVVKVTVQLIRSLREAIAELDGKIAEAAAAYPDFFIFDSLPGAGAVMAPRLLAVFGSQRDRYGSAEEVQIYSGIAPVLERSGKMKWVHFRWACPKFVRQSFHEWAGHSMVKSAWARAYYQQRRNQGQDHHAAVRALAFKWIRILFRCWKDRVAYDEEKYLAALAKRGSPLSALLVVPTRATM

SEQ ID NO: 109524 - protein, 343 aa, unidentified
MKASIVGLDIAKSVFQAHGTDANGKSIFKCKLGRSEVSAFFAKLAPCEVVLEACGSAHYWARVISRIGHDVKLVPPDRVKPFVKKGKKNDAVDAAAICMAATHPDTMFVPIKSEEQQGVLSLHSTRALLVKQQTMLSNALRALASEFGLIAPLGTRRLPVLMAKIEASADLPAAMKQSAMLLFEHYEKVAQSIDALEGQIRARAKNDDDARRLMTIPGVGPITASMIVASVADIGSFASARHFAAWLGLVPRQHSTGGKTRLGRITKAGNRQIRTLLVLGATAMLHRAQKWESAAGQWLCELMARRPRRLATVALANKMARIIWALLSRKEIYRPAGVSVSAG

SEQ ID NO: 109525 - protein, 332 aa, unidentified
MEQYVGLDVSLEETAVCVLDKTGKVIWRGRCSSDPDAIARTVRDRAPFVVRIGLETGQLSTWLVHGLRRLDLPVVCLDARHAKAALSLQVNKTDDNDAHGLAQIVRTGWYREVAVKSMDSQAVRVLLMARAQLISQRQATANQIRGLLKTFGLRVGQAGGSRFAVRVRELVADHPVLVAIIEPLLTVWQTVREQVVELDRQVRMRVREDAAARRLMTAPGVGAVVALAYTAVIDDPARLAKSASVGAYLGLTPRRYRSGEVDCAGRISKCGDGLLRSYLFEAANVVLSRITKPSWLKTWGQALAQRIGARKLAVVLHRMWRDNTEFRWEPAR

SEQ ID NO: 109526 - protein, 416 aa, unidentified
MADDIQKSCGLDIHKNFVIATVLTRGTDKKIQKRFLRNDDGILNLKSFVLAEKCEVVACESTNDFWMPIYDSINDHVTVIVGNARDMKAQTHKKTDKVDSEYIAVLSLNGMIRPSRVLPPHLRQIRSHVRLRHKLVKKRTDLKNIIHSIFSSEQFNLRTKLADIFGKTGKIIVRGIIQGLPVDDIIRKFPICIAGKEEKFRELLKKEISQDAIFRLKECMECIWQLDKSIKNIETRVLNWAHSNRKRQMEILMSVPGIGIIAAITLIAEIGDFKDFPDGDKLSSWLGMVPNVYQSANTFYNSHITKRGSKDARWILIQIAQVVASRSKDNVLKDFFNRKKGTIGFKKAIVALAHKIARIIWHLIVNDKIYSDIKGYGKKNKGFSYPIDLKKIPVDECITIIFQANAIINQKDPTIL

SEQ ID NO: 109527 - protein, 410 aa, unidentified
MELIVERPAALDVHKAQVMACVRTPDEGERTEHVEEFSTTVRGLLVLRDWLKAHKVTQVTMEATGVYWKPVWHVLEDDFELILVNARHVKQVPGRKTDVQDAQWLCRLAEAGLLRASFVPPKPIRELRQLTRYRKAQVSERQREANRLHKALEDTGIKLDCVATDILGVSGRAMLDALVCGTTDPEVLAELAKGRMRAKIPALREALEGRFEAHHALLVGAILAHLDFLDEQVELLSEAIEVKLAPFGAAAVELLLTIPGIGERTAENVIAEIGTDMAQFPSAGHLASWAGQCPGNHESAGKRRSGKTRKGSKWLNQALKEAAMAAIRTNGSYLQALYRRKKAQGGHNKALGAVKHSIVCACWHMLSTGELYRDLGPDDFARRNPERQTQRLVAQLERLGHSVTLTEVAA

SEQ ID NO: 109528 - protein, 363 aa, unidentified
MTQTILLTVDYHDQNCVVRRRAMASHEESVFTIPTTASDLTQTVAQARKLAGRRGRVVWVQESTTGWARVKELLGQTVDEFALANVVQMPLPPKGRRRKTDKVDTARIQREYLNGELPRAHQPPVWWREVRRVVGYREQLVARRTALRNWLNRYLAHETWVERGALWSDKGQKRLRATVSGWPARDRMLGEATLDELDQLAERLTGIEAELLKVYHECPDAQRVDAVRGIGVVGAVSIVARIGPVTRFPSAEHLIAYAGLAPGVQQSDQTRRDGRIGGGGTDGHLRHYLIEASIWARQIPRYQAAYERTAKRRGAKIGRLVVARMLLRSLYRVLTTGATFESTSKTRTPKALPSEAPTSKAGA

SEQ ID NO: 109529 - protein, 410 aa, unidentified
MSRKRRSSKKTGTPVLHSLNPNAAGVDIGATEIYIAVPADRDAQPVRHFSTFTEDLHAAADWLKSCNIETVAMESTGVYWIPFFQILEARGLQVFLVNAHHVKNVPGRKSDVSDCQWLQYLHSVGLLRGSFRPEQEVCTVRSILRHRDGLVQMASSHVQHIQKALDQMNLQLHHVISDITGMTGLAIIEAILAGERNPQTLAKLRDGRIKATESTIAKSLVGDYRREHLFTLGQSLAAYRHYQKLIGACDKEIEQYLETFESKADPPEDPKWKSQDGQNTRGGKPGFDLQSHLYRIFGVDLTQIPGVHTLTTQTLLAEIGPDLSRFANAAAFTSWLGLCPDNRISGGKILSVKTRKVKNRAATALRMAAQSLYRSQSYLGITFAGCELSWEPRKRSPLLRTNWRASSTTC

SEQ ID NO: 109530 - protein, 375 aa, unidentified
MKEKVRFLGLDVHAETITVAVAEPGDEVRSLGTIANRADSIRKLVKQLGPVEQLKACYEAGPTGYVLYWQLAELGVKCDVIAPTLIPVKAGDRVKTDRRDAEKLARCHRAGDLTAVWVPDAGSEALRDLVRAREAAKQDQLRARHRLSKFLLRSGQRPAAGLKAWTQHYMAWVRQLRFEQVAQESTRLDYLHEVEHMAERVVRLEQAIAEAVKLASPEIQEVVKDLQALRGIAQISAVTIAAELGNIRRFESARQLMGYSGAVPREDSSGKRTQRGSITKAGNAHLRRIAVEAAWSYRLRPGVGPGLRKRQEGVPEEIKEIAWKAQNRLHKRYSRLAAAGKDQRKIITAVGCELLGFIWAIGIKAETAAQQRMAA

SEQ ID NO: 109531 - protein, 326 aa, unidentified
MEHELHYIGIDTAKEKLDVDVLRPDGRHRTKKFANTTKGHDELVSWLKGHKIDHAHICIEATGTCMEPVAECPYDAGYIVSVINPALGKAFAQSEGLRNKTDTVDARMLAEFCRQKRPAAWEASHPLERALRALVVRHQALTDMHTQELNRTETAREVQRPGIDAHLLWLEAELKRLEKQIKDLTDDDPDMKHRRKLLESIPGIGEKTSAVLLAYIGLKNRFAHARQFAAFAGLTPRLHESGSSVRGVSRMSKAGHVSLLRALYMPVMVAASKTEWGRAFRDRLAANGKKGKVIPGAMTRKLARVAYGVLKSGVPFDASRHNPVAA

SEQ ID NO: 109532 - protein, 360 aa, unidentified
MKQSVVYIGIDVAKAHLDVAWAGTFRRLPNERSGHAALVRWIKQSTTPVQLICEASGGYEQALLESLEKSEVKVTLVQAVRVRQYARAAGILAKTDRIDAKVLAAFGSAMQPQPTSPLSAEQKRLRQYEAQRRQLSRILVAEENRLAQLSCTELRTLSRSLISKIKTQIKTLDRGISDLIAQDQTLCVKAQKLTAISGVGVRTAALLLAQMPELGQLNRRQAAALAGLAPFNHDSGSVRGKRAIFGARPALRSGLYMAALSAARFNPILSSFYQRLRTKGKPHKLALTAVMRKLLLALNQTLKPLPVLHLKSTQLLTMHELNSCSGGCVSRKFLSRHGRFRPTPDLTSQRAVRQNHQWNT

SEQ ID NO: 109533 - protein, 333 aa, unidentified
MNKKWFIGIDISKLSLDVAIHSDEGDQQENHIKVTNDILGFKKLLEWLKEKKVDYKQSLFCMEHTGLYGLEIQFFLTKKEITYCMESPLQIKRSLGLVRGKNDKVDAQRIAWYAYTFRDRIKASHLPPEALRILQRLLTERKHYVKQIVSFRQQKSDVIKYETKQASKRKAKMLEYLDDMLSQVESQMMEIITADGTINNNYNLLLSIPGIGIINAITTIVNTQNFTAFANARQYACYIGIAPFEHTSGTSVNGRTSVSKLGNKQAKVELTQAARSAIIHDPGIKSYFQRKYNEKGATRDAYGIVLNAVKFKLLLRIFAVVKRGSKYVKLAYA

SEQ ID NO: 109534 - protein, 433 aa, unidentified
MTTDSAAVRATKGKIMKPWTQITHYAGFDWARDHHDVVIVDRQGQIVADFRFQHSLEGWQQFREHVKNYPALAVAIETSQGAAVDQLLQLDCTVYPVNPLSAKGYRQRKAPSGNKTDHLDAWSLAEALRVDGQDWKALQPLDPLTQQLQLLCRDEIGLIEQRTALVNQLQQALVEYYPAALQAFEDWTHPYCWDFILQFPTPEKLAAAGKRRWEKFLHTQKLWRPETAPKRLEIFQNASQFCGSAPVTLAKSLLAVSLARLLNALQLQLDQYRQQIEALFKQHPDHDLFGSLPGAAQTLAPRLLGEIGGPNRFEDTQTLQCIAGTAPVSFQSGQIHRVHIRYSCNKVLRHTVHLWSQCCLRTCPWAQVYYRQKRADGKSHACALRCLGQRLLKILWKMLQTRKPYDADLHARNQKQHGSWVLTLIKPETNACV

SEQ ID NO: 109535 - protein, 410 aa, unidentified
MLFIGDDWAEAHHDIEIEDEAGRVLARRRLPEGLAGITMLHELVAEHLDPAAEPDQVLVGIETERGPWVQALLAAGYVVFAINPLQVARYRERHSPSGAKSDPGDAHLLAEIVRLDRAHHRRIAGDSEIAEYVKIAARAHQSMIWSRVRQVNTLRSLLREYYPAALAAFGTDLAGRDALAVLTVAPSPDLGRRLSQSRIETLLRRAGRQRNISTTAAKIRAALTSEQLAARPGVIGAYTASASALLAVLSAMVVQTEVLAGQVEQGFGQHPDAEIYRSQPGLGVILGARVLAEFGDDPARYADAKARKNYSGMSPITKASGTKRVVLARFARNRRLGDALLLQGFAALNNSPGARAFYDHQRTRGATHYQALRALANRLVGILHGCLRTHTLYDEHLAWHTEPDKLSPAA

SEQ ID NO: 109536 - protein, 399 aa, unidentified
MSLTIPLEVRVSVDVGCYQHRVAIGLSSGEVLEEFDIPHQPEGFDDFFARIEHHRVQHACPVAVAMEGFNGYARPLDQLSRARAYRLYNINHLKLARFKEIFLGAAKTDAIDARKGLELFQLQDHLPLAKRVLQEVAATPEANQVLKRLTRRRRRLVNEKGRVLSNLQTALQAVCPGLLQMTNDADNLWFLRFLTCTKELSKLARLRRSTLLKIPGVGAKYASQIQAWQPHAAFSDEVEWVGEMIQDDAQRLLDLHAQISALEAKIASVSQSSSLARILKSIPGYGLVSSAELAGEIGTIERFRSEASLGVYVGMSALDHSSGNSSAAKAPTQVNSRAKAAMMVAVDRHRKGVPQSQRYYEKKRSEGKTHNQAIRALGRHLCRVIYKLLKEERDYKIQD

SEQ ID NO: 109537 - protein, 314 aa, unidentified
MSILESKVYVGVDVASKHLDFFFPDTGKSERIKNDTEAVKDLCVRIQGQSQYMFVMEASGGYESLLCAQLGSHGILHSVVNARRVREFARSMGVDAKTDQIDARVISQFASVLKPIASEAQSDEERSHTALVTRRTQLVDLITQEKNRLKQTWDPYAKKSVQKMLKHLENELESIDKLLVKMLENDKKNQRKIEILQSAKGIGNVSTSMLIAQLPELGKLNREQIAKLVGVAPMNRDSGNTMGKRFIMGGRGNVRAILYMATLVAIRHNEKIRAYYAHLKSHKKASKVAIVACMRKFITILNHLIKTDQVWETK

SEQ ID NO: 109538 - protein, 350 aa, unidentified
MQYLGIDWGTRRAARCVIGPDGELTEGTISADEDGLVRLVSRLGPEVRGCIEMMSGAPWVRDSLAVCGWTIQIADARKVKAIAPLACKTDRVDARVLADLARRDLVPTVWVPPLDDRAIRERLRRRSHLIRLRTSAMNRTFGLLTQWGLRRSVSVLRQPGTIDELSEHGVPQVWRDSLALLVSVIDDLDHQIAPLERELRPLARADERARLLMTIPGVAELLGLTIASEIGDVARFPNAGKLVGYSGLNPRIKQSGQSARIGRMSKAGPDTLRWAAVEASQQAWRPNNPWHDLYTDIKRRHGKANPAKAAVARKILISSWHILSRNEPFKPSAPRATDPAPASSSTHLAA

SEQ ID NO: 109539 - protein, 403 aa, unidentified
MNCVGIDVSKGKSMIAVMRPFGEVVVSPFEVRHTANELSELAGLLKSLDGETRVVMESTGNYHAPVAWLLHDAGLYVSVVNAMLVHDYGNNSLRRAKTDKKDAVKLANYGLDHWLTLPRYIPEEDTRLMLKICYRQYQQYSKVQTMLKNNLISLLDTTFPDANRLFTSPPRADGSEKWVDFVATFWHCECVCGRSEKAFTTQYQKWCRKHGYNFSEDKALDIYASACRHFGVIPKTDTAKLLVEQAISQLQTTSSALAALKQEMQSLAASLPEYPVVMGMFGVGPTLGPQLLAEIGDVRRFHSKKALVAFAGIDAPPYQSGQIDVRSRSISKRGSASLRRTLFLVMSVILQCAPIDEPVYQFMDKKRSEGKPYRVYMMASANKFLRIYYASVKAYLESLEHEA

SEQ ID NO: 109540 - protein, 376 aa, unidentified
MNIEKSKFQSVIFVGLDVHKNSIALAARSFDKGLIVERTFSTKDLGKLRKFLYKLSERGPVRCVYEACGAGFFLQRQMQAWEIPCEIAASSLIPRKPGDKRKNDRLDARMLAEYYQAGLLTMVCVPSAEMEAARGVVRCRQAFRKKVTQIKHQITKFLQTKGVLFTEGSNWTGQHRDWLSKLQFDCPEDNFTFTMYLKTLRYLESSLGELDSKIEQLSKSEPFQEPVRYLRAFRGVQTLTAMVLVTEIGDVRRFKSPRHLMSYVGLTPSVRESGDSGNKAGSITKAGSARCRHVLIQAAWCNVKRPKVGHELRLRQAGLPAWVVDDSWRAQERLYRRFKHLEITKGRHKAIVAVARELIGFLGCTLHKLMSEKPAE

SEQ ID NO: 109541 - protein, 419 aa, unidentified
MSSKKTKKVKNINPKTLIVTFDIGKNIHYAYFRAPNNKEIKPFQVYNSGHSFIKLWNKFCHFQKQQGLKEIVVGFEPTGPYAEPLVHFLRKKPVKLVQVNPMHTKRLKELTDNSPNKTDKKDPRVIADVISLGHALTLVIPEGAAAELRRLTQARERSIQRRTAIKNQLQHIIYILFPEFLEIMKNISTKSAIYLINNYPTPESIINLGLDSLTLALKKVSRGKLGQERAKRLFEAAQSSVGINEGKRSIVLEIKCLATDIKKHNQFIDEFEKHMGEYLDQIPYSQSILSIKGMGEITVAGLIGEVADFRELNTISEIMKLAGLDLYEVSSGKHQGCHHISKRGRPLMRKLLYFAAINMVKSEGIMHKRYQNMLNQGIPKIKALTVISRKILRIIFALTRDNAMYDENYNEITNFKKAA

SEQ ID NO: 109542 - protein, 322 aa, unidentified
MSQVSSPSVFVGIDVSKARLDVCILAATETSFAVDNSVAGIADLVERLRALAVTRIVIESTGRYSRLVAAELCAAGQPVCVVNPRQARDFARSLGRLAKTDVIDARSLAEFARVAGLRVVEKQPENQAILDDRITRRRQVVQMRVMERNRLEGVTDKLTLTLIGKVIRLLEQQREDLDREIARLIDADDDWRIRRDHLASVPGIGDSTASMLVTDLPELGKLNREQIAALVGVAPMNRDSGTLRGKRAIFGGRPHVRATLYMATLSAMRFNPVIKVFADRLRSTGKPFKVVAVACIRKLLTILNVMLRDNQPWRSPCLAKNA

SEQ ID NO: 109543 - protein, 342 aa, unidentified
MTCYVGLDVSMKETAICVVDETGDRIWDGKSRTDPDAIAAVLARRAAGAVRIGIETGPMTVWLWHALTERELPVVCLHARHAAAALKLQMNKTDRNDAFGLARLVRSGWYRPVAVRSMETHRLRALLITRDQLVGMSTALINKIRGLAKTFGILVGPGKGGTFERQVRATLPDDPVVAALFESLLAMLGTLREQQLAIAKQLGRVARQSGACRLMMTMPGVGPLTAVSFMTTIEDPHRFRRSQDVGAYLGLTPRRYQSGEVDINGRISKCGDRLTRKLLFEAANVMLSRTSRALGLKDWAVAVGRRSGFWKARVALARKLAVILHRMWIEGRAFDPEVPAMT

SEQ ID NO: 109544 - protein, 345 aa, unidentified
MKCKTIGLDLAKNVLQVHGVDERGKTVLKKALKRAQVLPFFANMARCLIGMEACGSAHYWARKLEAMGHSVKLMAPQFVKPYVKTNKNDAADAEAICEAVSRPNMRFVPIKDGEQQALLAIHRARQGFVKARTAQANQIRGLLAEYGITLPVGIRHIATHLPDILEDGENGLPGIFRQLIDRLGTHLKALDRQVAELDTQIQAWHRESVASRRLAQVPGIGPMTASALVASIGDARNFENGRQLAAWLGLVPRQHSSGGKPTLLGISKRGDTYLRTLLIHGARAVIRVAEHKVGYAQSWLAGVMGRRNKNIAAVALANKNARIVWAMLAHDRTYRADFGMQESAA

SEQ ID NO: 109545 - protein, 411 aa, unidentified
MIKENYIYVGIDLHKETHTAVMIDCYNQKLGEITFPNRPADFPKLVAKVKKCNTDGKTIVFGLENAYGYGRALAVWLIDKGYLVKDVNTAISHRQAKHRGAMYRKSDSDDAEAIALATLNMLDKLPDAYPNDAYWSLGQLVHRRDNIMKQRTRLVNQLHEQLCIAYPSYKQFFNDISRPTALYFWEHYPSRKYLKGKSVEDLRAELVPVSHNKCSTRTCEKILDAIAGDKVKNNAYQDARDMVTLSIVSDLQHYDKQLAEVDKMLEQMYKMLGCTLTTIPGVNVITAVKILAEIGDIKRFSNANKLAQFAGIAPLHLSSSGKGKDLATKQGNRRLQATIYFLAIQMVQISSKGTPRNPVVRAYYEKRKAEGKTSQQALICISRRLISIIYGMLKSGTEYRMPVMENTGETV

SEQ ID NO: 109546 - protein, 404 aa, unidentified
MELTPIYRRVVALDVHQAKLTVCALFENAEGDAQVELREFGGFKRDRRAMAEWVAAFEPEVVVMESTGIYWKSPYAALEKVGIVALVVNAHHVKQVPGRKTDIADAQWLAILARSGLLKGGFVPPQNLRELRLVSRQMQKFTGILAGEKNRLHKVLTDGGIRLSAVVSDIHGTSARAMIKGLLDDETPEQVLTYASQRLKATEAELLDALEGDLSDTHRFVLREILAHIEELEARIRGFQQHLLQALQPHQPLLQALQTIPGLDAIGAAMLLVEIGTDMEAFGSPEKLAAWAGVCPGNNESAGKRKAGRKRKGNPYVRRILCEAANAASRTRSALADKFKALLIRRGRKRAIFALAHKILKIVFVLITRGDYYRDATVDYEALNVGRNAPRWIRMLRKYGYIAA

SEQ ID NO: 109547 - protein, 353 aa, unidentified
MVYSAKEYDIFIGIDVDQKSFSFTVKNHDTMNNSHKIPANPENLYQHIRNRYNNKRVICAYEVGVTGYHLHDYLTSKNIRCLMVPPPSIPKASNDRTKNNRLDSERISQHLKNGDMKPIRIPDYDCRELRQLLRSREEYVSMRKIAKQRIKSLLLFAHLHTLLKDTTQYWSYLHIKRLKELPCSPATRQRLDLLLKDLEYSRAQTVIILKELKKLSDQNTSLKRNIHYLRSIPGIGFITAITILASIGDTEQLRNPRELAAFTGLVPSEYSTGERISRGRITHLGNSVLRSLLVEAAWANITKDARLRQFYDRIRAKHHPQVGARKAIVAVARKLTLIIYRVLKEQREYITNM

SEQ ID NO: 109548 - protein, 607 aa, unidentified
MSTIASLDRIGVGIDTARYGHRVSFLRPDRKPAAKPLTVMENRAGYQALQDRLNQLHEQHPTAYFHVRIDAAGQYAVNLELFLRGLKLPMTISVGEPKRNKDYQKAHFPKRTTDDTESQAMARFAVIELPNATPAPSTPMILLREVAGRLQSKVKQTTQAINRLHNLLARVFPELATLTEDISVGWVLKLLDKYPTAERIAQAQIASLEKIPYLSVEQAHAVHQAAKQSVASLRGELAEALVRDLVNQLRLCQKAEQHLHQLLLEAFADLPASPHVQVLTITGIGEATAAALVAKIVDINRFATPNHLVSYFGVFPEESSSGVDKHGKPLPPGTLIMSPKGNDLVRFYLWNAARTAIQHNPAIRALYRRLRAKGKRGDVAFGHCMRKLLHLVYAVWKTDRPFDKEHFPWEGSSDTQPSATTPPSADAGTTPSANEEAVGHKRDLPAEEVVTTADSTLEPASPAVKPASQSAAHRPKVDFACVREHVTMEQVLQHLGYFASLRGRGRQRRGPCPVHSQPTAPERTFSVHLGKNAFQCFHAECAVKGNVLDLWAAIHRLPLYEAALDLAETFQVPRNREEEPVKGTSSPRTATAKTSAPAAATATDGAK

SEQ ID NO: 109549 - protein, 444 aa, unidentified
MLRFVGCDVHKRTAVFTILLGDGTLFAAYTVPVTREALAAFAERQLGAEDRLAMEATTNTWAVAGVLRPFVKEIVIGNPLKVRAIAEAKIKTDKVDSRVLAELLRCEYLPMVWQPDKETQRLRRLTHRRAALVSDRTRLKNRLHSILHHTLVPLPDCDLFSKKGIAWLRQVPLAQEESLARESDLRLLELTELEIAQQDELLVREAWQDEKVRLVMSIPGIDYTVAQTCLAAIGDISRFPNAKKLSAYLGLNPSTRQSGPHCYHGPITKQGNAHARWLLVQAAQHLAHYRGPLGQTMRKIVKRKNRNVAVVACARKLTVLLWHVLSSGEPFRYAQPKSLQAKLSRLRVRATGLRRRGGVAKGTPRSQQYGHGRTRALPSLPQVLAENGLREIAPLAKGERVMLERKRLESFYRDLQTPSRIQANTRTPQVEEWEEDVKSELTQS

SEQ ID NO: 109550 - protein, 369 aa, unidentified
MQDRIRYVGLDVHKEGIVVAIAEGGIRGAVREYGRVANTATALDRLIRKLADGGARLRFCYEAGPCGYGIHRHVSKRGHECVVVAPSLIPRRAGDRVKTDRRDAASLARLHRAGELTAVWVPDAGHEAIRDLVRARLDAVHAVRRARQQLSGFLLRQGCHYSRPAWTKLHRRWLSGLKFEQAVHHLVLEDYVQAVEAAEARRDRLRAQIEAMLPQWTLAPVVAALQTLRGMALVNAATLIAELGDLSRFTDPRQLMAYLGLVPSEHSSGASVKRGSITKAGNSAARRLLIEAAWCYRFPARVSRELLLRQENQPKPIRDIAWKGQVRLCARYRRLARTGKPANVVTAAIARELTGFIWAIARRVPMTAS

SEQ ID NO: 109551 - protein, 425 aa, unidentified
MKSTRGMRRRTAKLARRSEIVTRGALVAGIDIARKECVVVFVRAADKARVGRLRVPTTAEGLAAIAGRGHQLAEQHGAERLVLAMETTGHYWKILARTADRAGLPYVTVQSFVVARARELDDLTRDKTDQRDAGLIADLAVELRFNEVQLETGAWAELRSLANTRDHYRVDQRAALQEQRALLELTWPDLLAQAPDLDGSHLQAMLRLGLSPVQIGGLSRARFTARLRRETVGRFLPWMAGRLWAAARCAVHEDQAPSATLRLQLAAQRNRAGTIAVARLDAELAAAFETTGLAWLRGQIRGLGDSQLHNLLALTGDPRRLDDARCMVKLAGSNPTERSSGEQQAAGGIHRRGRPLLRLLAHQAAVCLVLHHPDFEARFLELINRPHRPLHKKQAYLAVANKLLRTLWALAVTGQPYQPTLARAA

SEQ ID NO: 109552 - protein, 344 aa, unidentified
MDHFAGLDVSVNETSVCIVDDTGRIIRETKVASEPDALLAVLKSPTHHFKRIGLEAGPLSQWLYTALAEVNLPVICVETRHMRAVLKAQINKTDRNDARGIAQMMRAGLYRPVHVKTLRSQKLRMLLTHRKLLQSKAIAIENDLRGTLRNFGLKVGMVGAAKFEARIRELVEKLPDIAALVEPLLIVRRVLREQVAILHRRLLAIVRDDEVCRRLMTIPGVGPTVALTYRATIDVPARFRNSRAVGAGLGLTPCKYQSGESEYTGAISKCGDEMMRVMLYEAAQILLMRATKWSWLKAWAMQIARRRGMKKAIVAVERRLAVVMHRIWVDGTTFRWTREEALAA

SEQ ID NO: 109553 - protein, 349 aa, unidentified
MTLYIGVDFHPHQQTLCLGDTETGETRTIDLRHDLEKVREFYTSLPEPAIVGIEASARAVWFENMLFESDHKLLVGNPVLIRKRATSRHKNDRRDAELILDLLVREEFPALWRRPHESNQVLEILRLRQSLVSQRTQVYNRLQALAHNVGLPKGRMRTAAFQAVLKAVEMDEAGCLARSQLFSLLGSLNTQIAELETWLRAKAKTNSQVQLLLTQRGVGYLTALATVHTLGDVSRFTRLAKQITAFVGLDPLERSSAGKVRFGSISKAGSPLLRYQLGMSALIATRFDMKLKSFYKRLAKKKPKAVAKTATAHKLLVKLAIMLRDNITADEFDQRGRTVGNARRRNGPK

SEQ ID NO: 109554 - protein, 268 aa, unidentified
MNKNKQIYGVDISKNVFDVVNSQGNHYQFKNDGNGFKLVLKILLSDSLVVMEATGYYHYRLAQFLYEQGIQVSVVNPLSVKRFIQMKLSKVKTDKSDAKAICEYASINEVPLYTARDKNQAECLQLMRLIDIYLKQRTALKNKLHWEITLGKPSKTVYHSLNRSLKAVQKEIKILEERLTEIVKEEQQKQLTLLKSIPGMGSKTAIMLIVLTDGFSNFENARQLCSYTGITPTLRQSGTSVRGRSRITKMGNAKLRNLLFMCSFSGNL

SEQ ID NO: 109555 - protein, 413 aa, unidentified
MLKIVYPICCGIDVHKTFVVACIASTNNKGVTTYKRHRFSTYTKGLKELSQWLCENNCKDVCMESTGKYWIPVFNILEDSCNITLAHPKYVKAIRGKKTDKKDAKWIADLFKHDLIAGSFMPPLAIRQLRDLMRYRFKLTNFMSSEKNRLQNCLTVSNIQLSNVVSDTFGKSSMNIINRLLENPLDNNFDIEPLIHGSMKDKIPELELAIDGFITPEQAEKLKVIKQHYADLESRKADLEKIILSLSVPYSEEINLILTVPSFKNIFSAIAVISEIGVNMDVFPTAKHLCSWAGLTPTNNESAGKKKSVRISKAGCYIKPLLVQCANAVVKSEKHPEIRNRYLRLKKRRGHKRAIIAIARMLLTAIYHILKKKEPYNAELYRKSDVLPVSRDITVEQAILLAKTQGYRILPAS

SEQ ID NO: 109556 - protein, 351 aa, unidentified
MLIIGCDLHTRYQVIAMLNSETGELVTRRLQHENGEAGAFYASLPAPAQVGIEATGYTQWFERLMAELNYELWVGDAAQIRARAVRRQKTDSRDAEHLLELLSTQRFPRLWIPSPEQRDLRQLLKHRHKLVTMVTTLKNQLHFLAMSQGLCRKSKLWSERGREELESLSLGPWARRRRQELLALLDQLQPQIAELDVGVAQAAAADPAAVDLMTQKGVGPVTALAFVLTLGPVERFQNSRQVVSYLGLNPREHSSGGRQRLGGISKQGNPMMRWLLVEAAQTAVRFDPELRRKYQRLKFRRGGSVAKVALARRLAVRLYWRLRQRKAETQPVRMPGSSGSAVVLPRAGSRH

SEQ ID NO: 109557 - protein, 310 aa, unidentified
MAKTPIAVLGIDLGKNSCSLAGLDAAGAVIMRRRMTREGTIKFVATLPACVVAMEACCGAHFLGRTFACQGHTVRLMSPEYVAPYVKAQKTDNRDAEAIAEAATRPTMRLVTLKSEAQLDLQVLHRARERLVAGRTRLTNQLRAMLLERGVILPKRRAPLIKRLDELMAGELPISQRARQLLLDLRDEWMDQDRRIKAYDDELMALTREDGAARRLATIPGIGVINATALLAAVGDASAFAKGRDLAAWLGLTPRQHSTGGKTKLLGISKRGNKYLRTQLIHGARGNGPLCEQSHASGNMGTPATHTGPP

SEQ ID NO: 109558 - protein, 344 aa, unidentified
MQQIQTIGVDLAKNVFQVHGVDESHEVVLVKQLRRNQVIPFFAKLEPCLVGMEACATAHHWARELIKLGHDVRLIPPVYVKAYVKRSKNDAADAAAICEAVTRPSMRFVPVKTEEQQAALAIHRVRDLLMRQRTQLINALRAHMAELGIVAETGREGGAKLVEVVADARSTGALPAEMIKALSAIIDQIFSLQEQIDQLNRCIKQQHCASEVAKRLEGIPGIGIITATAMAATVTDPGQFKSGRDLAAWIGLVPKQHSTGGKARLGGISKQGDRYLRRLLVGGGTSVVKLAKIFPWRYPWVAKLLEKKPAKVVAVAVANKLARVAWAVMNSGGTYRPQVRGAHP

SEQ ID NO: 109559 - protein, 403 aa, unidentified
MSQEHSIDIFLGLDVGKSEHHACALDRDGNKVFDKPLPQLESDLASVFHQLQEHGTVLVVVDQPNTIGALPIAVARACGCEVGYLPGLAMRKAADLYPGRAKTDKRDAFIIADTARTMPHTLRAVDRNNEVLSALKMLSGFDDDIARDCTRTVNRLRSILTQIYPSLERVLAGSTLTRTPILDMLIHYKGPQGLKRAGYHRVLNWMIKHTRKDPTPLVDEIFAALKAQTVTVPGSDAAELVIPQLAANIKALKEQRDTIAEQVEGMLDDFPLCEVLMSMPGVGIKTATQILLAIGDGSNFDSAGHLAAYAGIAPVTRRSGSSIRGEFPARSGNKRLKNALFYSAFAAIRSHEPSRQYYERKRAEGKRHNAAVICLARRRCNVIYAMLKNKEFFREIPPRPVAA

SEQ ID NO: 109560 - protein, 421 aa, unidentified
MADDLILAARIGIDWADDHHDFCLQEAGSSRVETGRIPQEPRALAEWVAGLRQRFGGRPVGICLETSRGPLIAALIEQDFIVLFPVNPRTLKRFREAFAPSGSKDDPIDAGLLLELLDKHEDRLHRWMPDDAETRAIARLVEARRKAVDLRTRLTNQLGAELKGYFPQALSWAGELDTQLATDFLQRWPTLQDVQRQKAQTIRKFYYGHNSRRAELIEQRIEEIRTAIPLTTDPAIIETSVLVVQMLARQIEALRPSITRYDKEIARRFGSHPDAHLFESLPGSGPAMAPRLLSAFGTRRERFKAASEVQEYSGIAPVTRRSGKQCQTTWRWSAPRFVRQSFHEFARLSIQYSAWARAYYELQMERGKSRHAAIRALAFKWIRIIYRCWQERTAYDEARYIQGLWARRSPLVHRLGLPAAA

SEQ ID NO: 109561 - protein, 422 aa, unidentified
MNCAEHKNEYAAYIGLDWGSEKHSAALKASGSNETEQFMLKQTPEDMHAWLLELRDRFVGRPVAIAIEQTKGAVIHVLLGYDFIHIFRINPKSLADYRKAFSPGGAKDDPTDAEYLLELVEQHRDRIKPWIPDDPSTRSLQKLVEFRRHVVNQRTALTNSLTQALKEYFPQALDWAGEIDRVMFCDFLSKWPTLERIKKARPDTIRAFYRQHGSRSRERIEERVNAIRVAKALTEDSAVIATSILVVQTIVRSLYAVIENIAFLEKEIEKIFNAHPDNLIFNSFPGAGPALAPRLLAAMGSDRSRFESAIEVQDSSGISPVLERSGKHEWVHRRFACSKFLRQTFHEFAGQSRRFCAWAQAYYEMRRSSGTGHHAAVRALAYKWIRIIFRCWKDKVPYDEQIYIRALQKKGSKVASLMEQPV

SEQ ID NO: 109562 - protein, 345 aa, unidentified
MFTVGVDLGKRKSQYAVLDAEGKPLVERALPNRREIVQKFLRGLPGPLEVGCETCINSYWLVEVVEAAGFPIQVGHALKMRLIAESRIKTDRVDAKVIAELLRTRFFPSIAIPPAEIRQARELLRGRVRMVRTRVQQRNRLHGILTRAGIDYTARDLVGPGVEAWLDGLDLAPAPRAMAGIYLGMMQDADSRIRALDRAIREQIRPVEPWAAIMQRLETIPGVGPFSAMLLLLELWDLSRFSDVKHLASYVGLVPSVHQSGQHRWGGPLTKQGNGLVRWILVEDAWVAIRQDSRYRGLYEHHVPRQGRRRAIIPVARQVLADVYAVWRHGITYLELIKAKQQKTA

SEQ ID NO: 109563 - protein, 433 aa, unidentified
MGQTETSSSPVDASSLQYVVGIDIGSQTCSFCTLKPDKSQVIKPTKFPNALSGFTFLHEKLERLGVAPNQVLIGLEATSRYGENLYRFLESQGYQVCLLHPRQTHQFAQQRGLRAKTDTLDASTIARVLLSGEARRGYVPTELIATYRELVRLHSQLSDEVARYKNEIHALLSVLFPEFVQIFTDPCRPTALGLLKRYPGAQAFVAAGVEAIAATLHELAPRHYGRGTAQQVVTLAQHSTSSGVAVVARASSLKILCDQVEHTQSNLAHLEAEIDKLLAADNGSKGLQSVPEFGRKTVAVLRAELGDVTRFQRADQVVAYAGLDIQVKESGKWKGQAKLSKRGSGRLRRLLYLTAVRCIRLEDSAFGQYYHRLVARGMRKIEALMAVMRKMLVVAYRLLSTGETFDPKRVCAVPVAQPAQHTPSSGQFATAGA

SEQ ID NO: 109564 - protein, 401 aa, unidentified
MAVSVGIDVSKDKHDCFIVSSDGEVLADVFTIPNTMDGFHCLLQQIQDHAAPRDEIKVGLEATGHYSYNLLGFLLDNGLTTYVLNPLRTNLYRKSLSLRKTKTDRVDARTIASMLLSNAGLKPYADTAYHNEELKSLTRYRFDKVRERAKLKSSIARLVCILFPELEKLIPSLHIASIYALLEEFPSAKQIATAHLARLKALLETASKGRYKRDMALEIRDAARNSIGSWMPAKSLELQHTIRLICELNAEITEIEEQIQSIMDELRSPITTIPGLGFRMAAMILAEVGDFTRFDSSDKLLAYAGMSPSTYQSGQLKNCYPHMEKRGSRYLRYALYNATKYVCHWEPTFAAYLTKKRAEGKHYNVALSHAAKKLVRLIFAMERSRMPYRSPDSSSVRKSGD

SEQ ID NO: 109565 - protein, 376 aa, unidentified
MMDQTGKVVFKAFSFPNTSDGGNALFSKLTSYSSSTDDFEIGMEATGHYWLSVYSFLFEKKFLLHVINPIQTDGWRRGTEIRKRKNDIIDSVLIADLIRYGQFVETRLADEDLFSLRTLTRFRTYLVESISDLKRKVVCVLDQVFPEYQSIFSDIFGKTSKEILLQFSSPIDFESVSSQTLAQLLAKLSRKQVGSAKAEQLKAAASCSFGVTFAKSSFTFQLKALIEQIAFIEKQVKETETEIAGIMEKLESPITTITGIGNVTGAAIISEIGDISKFDSPRKLVAFAGLDATVTQSGEFEAAHNVMSKRGSPYLRKAIFQAALVAAFKDPVLSAYYQKKRVEGKHHLTCIGAVARKMCNIIYAVVKNNQPYVPKA

SEQ ID NO: 109566 - protein, 377 aa, unidentified
MFRIRFVGLDVHADTIAVAVAELDGEVRSLGTIPNRLESVRKLVAKLGPAKQLRACYEAGPCGYVLYWQLTSLGVACQVVAPTLVPVKAGDRVKTDRRDAAKLARCYRAGDLTAVWVPDADHEALRDLVRAREDARQDQHRARHRLSKFLLRRGQRPPQDVKKGWTLKYMTWIKEQVHFDQPALEATLLDYVHEVDHMAARIERLEKAIGEAIQKAPPAMRAVVEALQALRGVAQITAVTVVAELGTLSRFDSPRQLMGYSGLVSREFSSGNRILRGSITKTGNAHLRRVIIESAWAYQYRPWIGGFLLKRQQGLDQEVKDIAWKAQWRLHTRYKKLAGAGKKKPQIVTAIGRELLGFIWAIAVKTEAKLQPQRKAA

SEQ ID NO: 109567 - protein, 412 aa, unidentified
MPLALPEALFFTGIDWAAATHAVCVMDAAGKITAEFTIAHSADGITQLIRRLARYGDPACIPIAIERPNGRLVDLLLEAGHPVVPVSPNAIKTWREGEVLSGAKSDAGDAAVIADYLRLRRHRLQVAVPCSGETQALRTVVRTRSDLVDMRVAATNQLSALLEASWPGAKAIFADVESPISLAFLTRYPTPAPAAHLGEKRIAAFCASQGYSGKRPAAELLARLRSAPAGTADPALTTALGTAVLAMVAVLRALNTAVRDLDRSAAARLGEHPDGAIFTSLPRSGQVNAAQMLAEWGDCRQAYGGPDSVAALAGCTPVTRESGKHRAVHFRWACNKRFRKAMTTFADNSRHASPWAAKIYNDARAAGKDHPHAVRILARAWIRVIWPCWLNHTPYDPARHGAAAALAEPIAA

SEQ ID NO: 109568 - protein, 430 aa, unidentified
MTDITDRQEIFRVLKTEVRGSTEYLIVGIDVAKDRHHAFFGTANGQTLAKRLVFDNNRDGFERLRAFAADLQARYLLPEVIYGVEPTASYHKPLAEFLIGNGDHVVYVSNVAVSRNRQMLDGRWDKNDKKDAANVADLVSQGRFLFYDRQEDPVRELVTLLRQRLWLRKQKHRTRMRIRNHFIAQYFPELDAHFQAERVALAVVRNCLDPRKISAMDSFLFDAGLPQKVFHAEKVYRRLEAIWTAAHTSIGCPVPEAAQAEASWLVDRLEGLHKEVVETETRIETIAQSFPEYEFLLSIPGFGPIVSATVLAAIGNAHRFDNERQVLRLAGLDLSASRSGKTSDTAVPVISKQGKADLRYMLVQAAQVASSLDFAIRQYYTQLLKGREMERGIRLKMKVKLGAKFLVVAWTLMKRRQKFDPKHFDPNRLK

SEQ ID NO: 109569 - protein, 448 aa, unidentified
MPVSPRINISLINFPPRDARVRYWIRWGARSLGRGELIMEVLYRRCAGIDVSKRDAKVCVRIQGSGRRGTSSEVTTWGSTTGQILALRDYLSAAGVEAVVMESTGAYWKPFYYLLEDDLNLVLVNAREAKTVPGRKTDVADAAWLADLGAHGLVRASFVPPPPIRELRDLTRLRTTVLRDKAQEWQRLEKLLEDAQIKLSSVVSDLAGVSSRMILQAMIDGPTDPERLAQLARGKLKVKHDQLVEALTGRFSDHHRFLARLHLSRIDAHTADAAQLEAAIEQAMAPFQAAQELLCSIPGVNTVIAEVIIAETGADMTVFPTAAHLCSWAGTSPGLHQSAGKNSPVATRHGNAHLKAALGMAAFNIARNNNTYLSARYRRLAARRGKKRAIVAIERAILTAIWHMLTDGAYYEDPGPDYYLKHNPARRASKALRELTRLGYKVTITKAA

SEQ ID NO: 109570 - protein, 351 aa, unidentified
MMIIGVDYHPSFQAIAFLMEETGECGEQELNHSDGQAEKFYRDLKQRGISVRVGMEATGYSRWFERLLAELGFELWIGDPAEIKTRRVKKQKTDRKDAQLLLRLMRENNFPQIWVPGPENRDLRQLLWHRHRLVQMRTRIMNQLQALAMNEGYRWKKKLFSEQGRAQLEKLTLAPWASRRRQELLELLDRMNPTIEELTAAVEREARKRPEVQRLMTHPGVGPLTALAFVLIIGTWERFPRGKQIGNYVGMIPSEDSSAGKQRLGHISKQGNSLLRFLLVEAAQAAARIQPDWRRRYVHLAMRRHRSIAKVAMGRRLAVRLYWMWRNGCEYSQSLEFGSYAGQLGTGHGVR

SEQ ID NO: 109571 - protein, 361 aa, unidentified
MNATTAAIDLAKNVFQVALADANARVLEQHRLTRAQFERFFDNRKVARVVMEACGSAHHWARVFAARGIEVILLPAHYVRAYVRRSKTDAADALALLEAARCADIVAVKVKSVEQQSLQALHRTRSLWMGTRTSRINALRGFCRELGLHVPLGARTGLEAMARAVADDQSAIPALLRPLMQQLFDEIRVLEARVAQLERQLAQVARESPACKLLMSIPGVGLLTATAIVAATSGSVAHFKSARHFASWFGLTPKENSSGGLRRLGRISKMGDTYLRMLLTHGARSVIRAATVAKLKGQELIGVRHWVLQLQARSNHNKAACALANKMARFCYAVLRDQTPFGQPATRLGKKMQRQSFELAH

SEQ ID NO: 109572 - protein, 342 aa, unidentified
MRIIGCDLHAAQQTIAMLDRETGAVVEKALKHEGTTVRDFYAGLAPPVVVGIEATGSMGWFLRLMEELRITCHVGHPAKIRQAETRRQKHDRRDAALLLELLAADRFPSIWMPSSELCDLRALLLHRDQWVRMRTRVKNALQGLALAHGIRRGASLWSRSGQATLASLPLAPHAGDRRSELQALHDHLTTHIDDLDQQVSVEAHRRPESCRLMTHPGVGPVTALATDVFLGDPSRFVDAKALASYVGMIPSEYSSGDRHRFGKLTKQGNPFLRFLWCEAAIHAVRRDAALRRFYRRKLHQKGLGKARVAAGRKLGIRLWILLRDQIDYGEFCRRAPARAAAR

SEQ ID NO: 109573 - protein, 424 aa, unidentified
MKVTYQTCCGVDVHKSFLVATIIKTTAGIEPSYQKKRFSTFNNSILDFKSWLLENECHDVCMESTGKYWVPVFNLLEDQINVTIANPKWVKAVKGNKDDTKDSKWIGDLFRLGLVKSSYIPCRLIRILREYTRYRYKIVSCRSSEKNRYQNALTVCNIALDSVVSDIFGKSSSSIIDYLLEQSGTTINHEEIASKLLKSLKSKEDAVIESVEGYQMTDAQKYRMRLIRAHMDYITAEINDIDKQIESLISSDPDYDKAIRLLTTIPGVKRDSAITIISEIGIDMSQFCNSKRLCCWAGLTPSNNESAGKKKSVRITRAGVYLKPALVQCAHAAVKSDKSPYYKTKYESLVKRRGKKRAVIAIARMILIAIYRMLSTGEVWNPSDLYKIDMPAPLAEKQKAKAIKQAKKLLQKEGLLPPDEPLAS

SEQ ID NO: 109574 - protein, 448 aa, unidentified
MLINNLHFKKEGYTLIKVRYSELVYVELKKRSMAMNNKRKRIQIVNEKVMISAIDIGKNKNTGYLRCYNGVEIKPFEFSNNKKGFKEFWEKIFRARVIHKIDKIIIGFESTSSYGEPLIHYLLDKPVQLVQVNPMHTKRVKELHDNSPLKTDTKDPKVIADIIQFGHYLSLVIPKGASAQLRRLNNCRERIIKNRTALINRLHSLVCAIFPEFLVIMKGIRSKTSLRFLKNYPTPDDIIKLGFESVGIELKNISRGKFGFDHAKRLFEAAKNSVGIKEGIESILMEIEYIIKEIHSQNQFIDQIEKKMKQYLKDIPYSRYLLSIKGIKEITVSGIIGEVGNFEDFHNQKAIIKLAGLNLYEVSSGEHKGKIQISKRGRSILRKTLFFASMNVIRKDGVMHDYYHNLINNGMLKKKALIAVSRKLLRLIFSLARNKRYYIHNYSLKSAA

SEQ ID NO: 109575 - protein, 327 aa, unidentified
MVTSVGIDVGKSKCQVALRDASGEYTEKSFCNTDEGLAQCVTFFNTRGVSKETPLVLESTGGYHLLFTMTLKDTYHYGSVKVINGILTKKYAGANIRKIKTDSVDAKTLADIGEREKLMNFSKTKEELMQKKRITLLKKLEHIRQQLRASTNDLEETAKSLGLLVGAEQRSKIILTAVEKEIECLLKEISEGAKSELADELTSIPGVSRSAISIVLSMVENRQFISRDQLVAFCGIDLTIRESGTSVHGKRHLSKRGDPFLRKKLFQIAWALKMHNPEYQRYYEKKREEGHHYFTCLIAVARKFLRQIHGMQRRLEGKKLIIASNDV

SEQ ID NO: 109576 - protein, 399 aa, unidentified
MKQIVSVGIDVSKGKSTVCAMIHPNTIIKESFEVLHTVEEMSMLADYIGSLDGEIRIVMESTGHYHLPVAQFLYQKGFFVCVENAYIIRQFSRIMLHGAKTDPLDAKKLAKYGLAYWSELKPYKFHPSCYTELSLLSKQYQTYIKLLIAAKQNVIHLMDEMLPGFKEALDTASSVQFSKVKYVDFAKEFYHVDMIKSMGKEIFRENYKQWCKEKGYRFQSEKADELFHLAEDGIPTLPTEFPSTRLCMEVATEQVSQLGYALEQILSQMQNLAKTLPEYQTIRQMGGMGEKLCVRFIADIGDVRRFHNAGIDAPPYQSGQYTGTKRRISKRGNSALRKTGYEVMKSLKSHPPKTDTRVYDFIIKKENEGKSKKQAKIAGLNKFLQIYYARVMEIYKNIA

SEQ ID NO: 109577 - protein, 405 aa, unidentified
MNSVGIDISKGKSMVAAITMTKEVTVKPREFEHTELGFEQLLDVLAPLTLEGETRIIMEATGRYHEIVASTLYEAGIYVSVVNPLLIHDYGNNSIRCVKTDRKDALKIARYGVDNWGELREYTPVDSARQLLKLLSRQYNQYMKVLVSQQSNLIALLEKTFPGANDLFKSPRRDDGHQKWVDFVQVFWHSDCVIRLKEREFIERYQKWCKRKGYNFSEDKAFDIYVYAACCGYTLPKNSSTKALVSIAVEQVIACSKSVAAVKAEMLKISAQMPEHNVVLSMFGVGDITAAQLIAEIGDVRRFNNRGALVAFAGVDPSTFQSGKYANKSGKATKRGSAHLRKTLFQVVGAYLKRSPADEAVFQFLNRKRAEGKHFYVYMTAAANKFLRIYYARVKVFMESLDHNN

SEQ ID NO: 109578 - protein, 354 aa, unidentified
MIIIGCDYHPGFQQIAFVDTETGDYGEQRLEHSERAERFYRDLADQGKKVRVGMEASGHARWFERLLVELTFELWIGDASEIRAKRVRKQKTDRQDAQHILQLLMENRFPKIWVPSGENRDLRQLLWHRHRMVQARTRIMNQLQAVALNEGLRCKKRLWRDAGREQLESFRLSPWASRRRRDLLELLDRLTPTIAELTAAIEQEVEKCPEAQRLQTHPGVGALTALAFVLIIGRADRFQCGKQIASYLGLVPLEDSSGQRRRLGHITKQGNSLLRFLLVEAAQVTVRSDQEWRSKYFHLAMRRGRKIAKVAMARRLAVRLYWMWRKEWNYGQLKKFGSHAGESGHRDGVKSNTE

SEQ ID NO: 109579 - protein, 490 aa, unidentified
MANRKHQPATAARQTKAQAQRQAKAHAKVEARRQQDIDRVNALPITHRHAAGIAIGGSSHWVCVGFTQDENPQLIRALPGHTAGLQQIVAFLREHPVSTVAMEATGIYWVPLYELLQSQGFEVLLVDPSYTKQVQGRPTTDKRDAQWIYRLHAVGLLAGAFRPDDKTCPLRSYLRQRAKLIRYGGQHVPHMHKALEQMNLKLMTVRRDRTGVTGQKILGAILRGTRDPSKLAAYRHPKCQATAEALVQALTGSGREEPVFRLRQAYEAWQFYQKPIDKVEEQIQTQLRRMKTDRALPPLKPKPRTRGRKPNDPRFDVRSALYYAIGLDRTEIEGIDEVTALVILSAIGVDLSKLETAKRFCSWLGLCPQFRQTGGKVKSSRRRPGTNRTATALRLAANSLHSSKSALGAFLRRRKSRLGAPAAITATAHKRARLVYYALKNGLPYVKKRQEEYERLLRETQIRAVKRKARQLGLKVTESIAEESVMELPT

SEQ ID NO: 109580 - protein, 340 aa, unidentified
MNEITTVGLDLAKHVFQVHGVDAEGTTVLRKQLRRGQVLAFFSRLPRCLVGMEACATAHYWARELRALGHEVRLMPAQYVKAYVKRNKNDAADAEAICEAVVRPTMRFVPAKTAEQQAAVLLHRGRERLVRQRTMLVNALRGHLAEFGVIAPQGLRNVGRLIAIIRDEEDARLPGLARQVLQVLAVQIEQLEAAIAALEKQLMSWHKSNPVSQRLATIPGIGPIIATAIAAMVAEPSGFRSGREFAAWLGLVPRQNSTGGKNRLGGISKRGNQYLRRLLINGASANLLRSKATNADPWVIGLRRRRPSLVVAVALANKTARIAWAVMHRQENYQRMATAA

SEQ ID NO: 109581 - protein, 323 aa, unidentified
MFYLGVDVSKAKLDCLLLDSATGKVKSKSIQNTNAGFKQLIEWLAEKKAPNAHVIMEPTGVYHEPAALALTDAGLTLSLVNPAQLRRFAQGLGVKNKTDKADSGVLARYGETLKPEAWQPPSKSARHLKALLARRDAVADDLQREQNRQEAIEFAVSPDEVKQSIIHSISFLKAELKRLEETIKEHIDSDPDLRSKKTLLETIPGVGERVSSNLTALFAAKTFNNAEQLAAYLGLVPVQWESGISVRGRPRLSKAGPSHLRKLLYMPAVVARQWNPHIKSFSDRLIAKGKSKMAVIGACMRKLAHLCFGVVHTGRPYDPNYAM

SEQ ID NO: 109582 - protein, 412 aa, unidentified
MRAVALDVHRDFCEVAIVTEGRLRSAGRIQTRPDALELFARSLAPEDWVALEVTGNAWAIAGILEGHVARVIVVSPTDTGIRQARAKTDRLDARTLAKLLWAGELDGVWTPDERVRVMRRRLARRAQLVRARSRVKNEIHAVLMRCLKDRPPASDLFGLKGRRWLADQQLALCERETVDAGLRQVDFLDTEITQVERLIAADALSWPEVKRLMTVPGVNVIAAATFMAAVGDIRRFPDRRKLTAYLGLDPRVRQSGAGPANHGHISKQGSNSARHALVEACWSTVRQPGPIAAFYQRIRARRGHSIAIVASARKLACLFWCLLTRGEDYAYAQPSLTAKKMRRLELLAGAPRWQGGRHVWSTNDEMRQAERALAAQAELAYRRNVADWQATRPPTAGASATQGHASQEPTKG

SEQ ID NO: 109583 - protein, 385 aa, unidentified
MGSQRFIPRDYDIFSGLDVDKRSISVTFTDHQGLVKSLRMPYSVEHLLNHVRKHFPNQKVAFGYEAGPTGYGLYDGIVAQGHPCLVAAPSMIPKAPGQRVKTNRLDSRSLSENLRGGQLKSIHVPSVIYRELRHLTQLRDVLVSEMVGMKQRIKSLLLMEGIEFPKAPAGSQWSSIVKGKLRKLSCSGATRFKLDQLLDSLEFNEKQIFKTTREIRRFFKNDAELSQCMKYLMTIPGVGWIVASQLLARIGDWRELKNIRQLAGFLGLVPSEYSTGERTDRGSITRTGDGRLRSKLIQASWSAIRQDDELREFFRSVCGKHPREIASRVAIVAVTRKLSVRISVVLMKQRPYELRKKVHSAPLTQEETSPQGTPRREPEPGEKNS

SEQ ID NO: 109584 - protein, 386 aa, unidentified
MPQLNDLSRSLVTLDQDATLIAVIEMGQASWLVAGVVPGVERQPLKKLGVDESTLLKLLHRWHEEAEKAGHKIKRIAVAFEAGRDGFWLARWLRACGIEVHVIHASSVAVSREHRRAKTDRLDTELLKRAFLGWLRGERDHCKMVAIPTTQDEDAKRPNRERENLVGEQSRIVNRMKATLTRLGIRGFNPKLKKAAERLDGLRTPEGEPIPPNTLAELRRDMVRRRLVSDQIRQIEDARLERLTHAPGDGPHAMMRLLARVIGVGIETADMLVQEVLSRNMRDRRAVARYGGLTGSPDESGKKRREKGLARSGNARVRRGMIQLAWRFLIFQKDSALAQWFRARTENAPGTRKTMIVALARKLLIVLWRLVREGVVPDGVILRPAQ

SEQ ID NO: 109585 - protein, 377 aa, unidentified
MSKDTLYVGLDTDKKHIDVALAEALPGGEVRYWGQVANEASAVARLVKRLQAGGRQLAMCYEAGPCGYGLYRLLNGKPAVRCRVVAPSMTPRRPGDRVKTNRRDSIALARLLRAGELTAVWVPDATHEAMRDLVRARGAGVADLVRCRQRIAGFLLRQDIRYAGKPWTKKHRVWLGQLVPALALPAHRLMLGEALQALDETTARRDRLTDHIAELVPDWSLAWLVDALQALRGFALINAATLAVEIGDPRRFAKPSQLMAYLGLVPSEHSTGNSVRRGGLTKTGNGRTRKALIEAAWTYSRPARAPRNNARHAPAVAAIAAKACHRLSLRYRRLTNTRGKRPIIAVAAIARELSGFVWAIAHAAGPAAATPERSTQR

SEQ ID NO: 109586 - protein, 309 aa, unidentified
MNKAVVYIGVDVAKASLDVAWAERSRRFANNKSGLSALTKWVKQSPLAAHLICEASGGYERGLLDAAQQNGIKVSLVQANRVRQYARAAGILAKTDKVDARVLCAFGSAMQPEPTPPLSAQQKRLRELETQRQHLSRMMVAEQNRLAQLNDKALQRLTRSLLATLKKQMAAIDARIAGLIAQDQSLKEKAQKLTAITGVGTRTAVLLLAQIPELGTLNRAQAAALAGLAPFNRDSGTLRGKRTIFGGRRALRCGLYMAALVAARHNLILRNFYQRLRSKGKPHKVALTAVMRKLLLALNHTLKPAASFA

SEQ ID NO: 109587 - protein, 402 aa, unidentified
MNSVGIDVSKGKSTIAVMRSLGEIVLSPFDVSHTSGELSALTKQLKSPDGETRVVMEATGNYHLPIAMALHEAGIYVSVVNAMLIHNYGNNTLRKTKTDRKDAIKLANYGIDSWLKLPRFIPEDEVRSLLKSCYRQYRQYSKVQTMLKNNLISLLDTVFPDVNRLFSSPARADGSEKWVDFVETFWHCKCVCGISQTAFEKKYRKWCQKLHYNFSTEKAIDIYRSACGHIGVFPKNESRHVLVKQTVSQLKATSSALAELRKEMLRLAETLPEYPVVTQMFGVGPALGPQLLAEIGDVRRFYSKKALVAFAGLDAPANDSGQIVDNHRSMSKIGSAALRRTLFLIMSVYLQQAPDNEPVYRFMDKKRAEGKPYRVYMMASANKFLRIYYASVKAYLDALDAA

SEQ ID NO: 109588 - protein, 324 aa, unidentified
MNGLVYVGVDVAKDSLEVALHPDAKSFPVTNDRDGIGQFIARLPQPGACVVVLEATGGYERMLIAELLQAGHRVACANPRQVRDFANGLGIRAKTDPIDAGAIARFGEFVKPRCLDIPQGPLGELQQLVERRRQLITIRTAENNRLEQASSKATRKSIRDVMKTLEKQIRSIEGQIEDLVRKHDDWQHKVDLMTSVPGVGPTTATTLLADLPELGQLNRQEIAALVGVAPYNHDSGKLRGVRRIGGGRAPVRNALYMAALCARRFNDTIRRFAERLAENSAVRPSKAPKVILTACMRKLLIILNTMLKNDTPWNPQLVGASSNA

SEQ ID NO: 109589 - protein, 375 aa, unidentified
MRDHSEAFVAFDTSKLRNAVAVAEAGRSGEVRYLGEIDSTPAATVKLVKKLASKYDRLWFCYEAGPTGYGLYRQITSLGHGCIVVAPSLIPKKAGDRVKTNRRDALGLVTQFRAGELTAVWVPDPRHEAMRDLTRARGAAVEDLRRKRQHISSFLLRLGLHYPGKKTWSKTHMKWLASQKLAHAEQRIGFEEMLLAVRQVEERIARLEEAIRAAVPEWSLAAVVEALMAMRGIDIISATAFLAEIGDLSRFRTPRELMAFLGLVPSEHSTGDKVKRGGITKTGNRRARCILAECSWAYRHPPRVGKDKQARVEAAPRGVREIAWKAQHRLYNRYRALTRRGKLKTVVITAIARELAGFIWAINREISTAGMAAKP

SEQ ID NO: 109590 - protein, 322 aa, unidentified
MSIATPTTMTMTMTTPTAYAGLDVAKLTLDLHLAGRHHPLPNTPAGHRRLVRWLQKQPGIHLVCEASGGYEQAPVRALWAAGLPVSVVEAGRVRHYARARGQRAKSDPLDAAVLAEFGAAVRPRPTPPPNPVADRLAALVQRRRQLQQTLVSETNRAAHYTDPLLRRQTAQLVRLLRAQVRVCAAETARLIEQDAELAAKAGRMQQVPGVGPVVAATLVAELPELGTLRDEAVAALVGVAPYDRDSGPQRGQRHIAGGRRSVRCALFMATLSAVRHDRLLKAHHQQLLARGKKPLVALTACLRKLLVLLNRLLKNPNFTLAG

SEQ ID NO: 109591 - protein, 409 aa, unidentified
MLFAGIDWASEEHAVAVHDDAGKSVAAFMVEHSAEGLDKLVARLRGMAEPAELTVAIERPDGRLVDRLLEAGHPVVAVSPNAIKVWREGEVASGAKSDPGDAAVIAEYLRLRFRKLQALRPFSDETRALRAAVRARGELVDQRTVVHNQLAAILDAFWPGAKEVFADIASPIALAFLRRYPTPASAGTLGEKQMAAFCKKQGYPGRRSPAELIERLRKPPAGIVAGAEMGARKAAVLAYVKVIASLNAAIKDLDKEVFTRLGEHPDGEIFTSLPRSGLINAAQMLAEWGDCRQAYDGPDAVGALAGMSPVTKKSGKHKSVHFRWACNKRFRNALHTFAGQSRHGSDWAAGIYDRARKRGADHPHAIRILARAWIRVIFACWRDGVAYDPAKHNAAAALAASSDSAPQAA

SEQ ID NO: 109592 - protein, 317 aa, unidentified
MALHRAFVGIDVSKEWLDLWLAPLKRFERAGNDGAGWAAVIGLLKSLGIEAGVVVAFEATGGYEQGLRRALLEAGFDVRRLNPLRVRLYAKSLGRNAKNDRIDARVIARYAEAADTTPDILDPARERLAELVSHRRRLVDERVAVGNQTSTLHCVLLQAQNRKRLALIERQIDETDALILEAVGQVPSLVAKVGLLKTLKGVKDITAMALVALLPELGRITRRAIAALVGLAPFDHDSGKFTGTRSIAGGRAAVRTALYMAARAAARSKSPLGDFYQRLIAAGKSPKVATVALMRKMLVTLNAMIRDNEAWKHAKPC

SEQ ID NO: 109593 - protein, 346 aa, unidentified
MKNNTAKGPITVLGIDLAKQSFQLHGVNAEGEVVLKKKLNRKQLSAFMANLPVCLIGLEACGGSHHWVRIFTEMGHAVRMMAPQFVKPYVKSNKNDAVDAEAICEAVQRPNMRFVPAKSIEQQDIQSIHRIRSQLVARRTAQANQIRGLLMEYGIIIPQGIKCIRKNLPDILEDGENLLTTIFREQLSALYDEMVHLDERVDSLELSLKRVCNQNEDCKRLLTIPGIGLMTATALIAAIGDIGAFKSARELAAWLGLVPRQHSTGGKPTLLGISKRGDSYLRTLLIHGGRSVVRCAHKHQDKRSQWIGEVEQRRGKNITAVAVANKNARITWALLTKKEDYQAQAA

SEQ ID NO: 109594 - protein, 369 aa, unidentified
MIDYFTSTFYFMKAIKQAVGIDVAQDELVCSYGILFEDLSWQIKSRKTFPNHNSGFKACLKWVESMRDVNSEVLFAMEATGVYHEKFAHWLVDMGQKLSIVLPNKISNYMRTLSIKTVTDSTCADAIAQFGLERKLDYWAPPKPIFRTLKQLTRERDQIVAERVTIDNQIHAEKTEAFPNANSLKRLDARRRLLCKQEQEIKGEIRQLVKSDQELDQEVKRITSIPGVGELTAVIVLAETNGFELVRNKRQLSSYAGLDVREKQSGTSVKGKPRISKKGNRSLRKAMHLPALAAIRHCEINKATFARLVGRHGIKMKAAVAVQRKLLELIYILFKNKTTFDPAYEEKREDSKNHAPLYSLAVADLSTEI

SEQ ID NO: 109595 - protein, 355 aa, unidentified
MNDAKYIGMDVHQATISAAVRDSAGNVVMEATLETKAETILEFVHGLRGSLHVSFEEGTCAAWLHDFLKPHVTEVLVCDSRKNALLRVGNKNDREDARKLSELLFLNKLHPVYHGETGIRTLKELARSYLTITRDLTRVMNRLKAIYRGWGIACGGQQVYAPRYRAEWLAKITEAGVRRRAEIYYQQFDTLAALRQEVRRELLAESRKHPAMRLLRQIPSIGPIRAALLIALMQTPHRFRTKRQLWAYCGLALRTYDSGEYRFVGGQLKRSKKAVTIRGLNKNYNHDLKNIFKGAATRAAATAGPFQNFYEARIANGMKPPMARLTLARKIAAITLLVWKKGVRFDGEQLKQQAA

SEQ ID NO: 109596 - protein, 320 aa, unidentified
MMTQNDLVVVGIDVAKDKVDARIRTVTERRTFPTTASGRRSLIAWLRKHQVGKAVMEASGGYERAWAKALRQAGLEVRIVDPKRVRSFAESAGRLAKNDKIDAEMIAWFAETFSEAPSQVEDPAHEEIKALVKGRKSLIDLRARLEMQKEHETPPLVRKAHARVLRKLAGEIAAIETAIGAKIKATPAFAVRAEIIESVPGFAEATALTLLAGLPELGHVSNEVAAALVGVAPYDDDSGKRHGQRCIKGGRRWVRNALYMPCVGAATLNNPVFKAFYQRLIAKGKAPKAALIACMRKLIVILNTMIARGEKWDPKRYRMA

SEQ ID NO: 109597 - protein, 340 aa, unidentified
MAILAGLDVHRAQITFDALNTETGEVLRGRMRGDREAVGEWMQQFAGEHVEVALEACTGWLFVYEVLVAAGAVAHLAEPAETSALRGKKRHAKTDRADARWLRTLLAEGRLPEAWIPPAHVREWRTKTRLRKTLVDERTSWLQRIRATLFHHGVTPAPEQLLRAEGRAFLRALTLPPAAAQRIDVALAIIDEIDRQLIPLERELAALARRQAGCQALMRQYGIGPVTATTILCELGDVTRMSASRKAVRCCGLDVGVYRSDRHSRTGRITRQGAPALRWALYEAAQSACKPASPDHADYVALKARGLTHTRASLTIARKLARRSFHILRELGPDALAPIN

SEQ ID NO: 109598 - protein, 385 aa, unidentified
MSTFDQTDAPAASEYATVHMAFELSKANWKIGVLLPGSPKLSRFTVKGGEVTTLSGRLASLRAKAERCGKPVRILSCYEAGLDGHWLHRWLTDQGVTSYIVDPSSIEVSRRGRRAKTDRIDLEKLMRAFLAHLRGEPRVCSMLHVPSAQDEDRKRSSRERDRLLKEQTAHTNRIKALLFGQGIRDVMPLKPGFIASLEAMRTGDGRALPARLKEELVREHERLCLAHKQVAALEAQGKAELRVAASGSVAAKIMQLIDLKSIGVISGQKLVNEVFYRSFDNRRQVGSYFGLTGTPYDSGESRREQGISKAGNSRARDLAIELAWLWVRHQPGSELTRWFRERVGDLKGRIRRIAIVALARKLMVALWRYLTTGLVPAGAVLRPSF

SEQ ID NO: 109599 - protein, 342 aa, unidentified
MEKVSIIGLDLAKRSFQAHGALADGGVGFRKKLSREKVLGFFAEQPRCIVAMEACGSAHHWGRAIGDLGHEVRLIPPAYVKPFVKRQKNDATDAEAIAEAASRPTMRFVAVKTEEQQARAMLFRTRDLLVRQRTQLINALRGHLSEHGVVAAQGPVNVKVLEEAVEDQTTSLPLLVVELARVFLDQIEGLSKTISKLEKVTAHEATCEETTRRLQTMPGVGPITALAIETFAPPMDVFKRGRDFAAWLGLVPRQQSTGGKQVLGKISKMGQRDIRRLLIIGAMAVVRSALRKGAPEESWLQRMLARKPKMLVAIGLANKMARSVWAMLAKGEDFRVPAVAAI

SEQ ID NO: 109600 - protein, 391 aa, unidentified
MRKPNDMSRCLAALDQDSTLVAVIELGQQGWLVAGIVPGIERHPLKKLEVDEAALLKLLQRWCEEARKAGHPIKRICVAFEAGRDGFWLARWLRMRGIEAYVIHPTSVSVSREHRRAKTDRLDTELLKRAFIGWLRGETEHCSMAAIPTLEEEDGKRPTRERESLVGERTRIVNRLKSCLVRLGIRGFNPKLRKAAERFASLRTPEGAPIPPNTLEELKRDTARLRLISDQIKEIEEARLVRLQAAPQTGPNAMVRLLARVLGIGVETADMLVREVLSREWRDRRAVARYAGLTGSPGESGKKRREKGLSKSGNARVRRGMIQLAWRFLRFQHDSELAQWFRARGVEGRRDIRKKMIVALARKLLIALWRLVTTGEVPAGVVLRAASSLPR

SEQ ID NO: 109601 - protein, 347 aa, unidentified
MRFYTQQHKHYCGIDLHARMMYLCVLDAPGTVLLSRNIQCNPKAFLSAVKAFRDDLVVAVECMFTWYWLCDLCAREGIGFVLGHALYMRAIHGGKAKNDRIDAHKIAALLKGGMIPQAYVYPPEMRATRDLLRRRNHLMRKRAELIAHIQNTVSQYNLPPLEHRIQKRCDREELLAHFPDVQVQNSVALDLAMIEQYDALLPKLERHMRACAKQQQGKAFTLLRSIHGADLILPLTILYEIQDIARFPRVQEFLSYCRLVKPVRESAGKIQGHSGKKIGNAHLKWAFSELATTFLRANPRAQAMHERLKARHGKGKALAIIAAKLARAVYYMLSRGKVFDPDKFYQV

SEQ ID NO: 109602 - protein, 466 aa, unidentified
MTRHRHRRSPPKPRRSVAVLDHINPNAAGIDCGASEHVVAVPPDRCQAPVQTFRTFTGDLAQLAGWLSACRVTSVAMEATGIYWIPVFEMLEARGFQVSLVNARHVKNVPGRKTDVSDAEWIRDLHIMGLLRASFRPADAIVALRAYVRHRSSLVEGASAHVQRMQKALMQMNVQLPIVVTDITGETGMRILRDIAAGRTDPEQLAKHRDPRCHASEAEIAAALTGNYRPEHVLILRQHLQLYDAYQEHITACDVAIHAHLDQLTSAVPPPATPLPAPRTRAKPRSSEPAFDVRTPLHHLTGTDLSQIDGIGPHTALRLVAEIGTDMTRWPTEQHFTSWLTLAPRNKISGGRLLSSRTQPSANRAAGILRVAAMTLGRGSTALGAFYRRLSSRVGKAKAITATARKLAILAYRTLKGELRYDDPGADAYDAQHHAQLVRRLRHRATKLGLALVDLETGELLEPAVS

SEQ ID NO: 109603 - protein, 334 aa, unidentified
MALELLAIDLGKRSFHLYGIDTDGVILSRKVSRAKLAEAVGNLAPKTVAMEACASAHYWARCWLAAGREVRLINPRFVKPFVKGSKNDAVDAEAIFEAAMRPTMRFVPVKSTDQQDLQSLHRARDRLICQRTALINHTRGLLAEYGIVLPQGPWRFTAQSPAAIAEADLSDLARAIFRELLDQLGDLDSRIKKLDATMVSLCRTNETCRRLAKLPGVGPVVATAIVAAVNEGRQFRSGREMAAWIGLVPRQYTTGGKPRLGGIGRRANHYLRRQLIHGARAVVGRLSKHDDRQTSWLKALVARRGFNRTIVALANKTARIAWVLLNRKEAYAAP

SEQ ID NO: 109604 - protein, 311 aa, unidentified
MVYVGIDVSKAALDIAVHDGALQQVPNDATGIAALVAQLRVAPPTLIVLEATGVYHASVTAALAAAGLAVAVVNPRQVRDFARSTGQLAKTDRLDARVLARFAAVVQPPVRPLPDDATQELAALVDRRRQLVDMLTAEKNRLAVARRSVQPSVKQHIKFLERAIADAESDLDTWITQSPLWRAQEELLRSVPGIGAQTARLLLAELPELGRISRREIASLVGVAPIARESGRWRGARHCWGGRAAVRAMLYMATVTAVRCNPVLRACYQKLRAANKPYKVAMTACMRRLLTIVNAMVKTQQRWQAPTLATA

SEQ ID NO: 109605 - protein, 356 aa, unidentified
MHDITPDAIVIGVDTHKDAHVAVAINGLGARLVTASFPVTTQGYRQLADWAASHGAVHTIGIEGTGSYGAGLTRSLAAMGVHVIEVGRVNRQLRRRHGKTDTVDAESAARSVLAGDAQGQPKTGDGAVEMIRHLKIARDTALKARTQPMVTLKTLLVNAPQALRERFIGITGKMTLIRGLAALRPGTPVSTTASAKMALRALVNRWLMLDAEIKEHESVLEDLVRAQAPALMEAPGISTGTIADMLVVLGDNPQRIRSEAAFAKLCGVCPVPASSGKTSRHRLNRGGNRRANAALYRVALVRMRHHPPTREYIQRRTAEGKSPREIRRCLKRYIAREIYRHLCTDNHQTIPCVKGA

SEQ ID NO: 109606 - protein, 410 aa, unidentified
MAERFVGIDVALREHRVAVLDRDGEAAGPSFTIAASKDGMATLLRTLAARDATAAQTLIGLEASGHLWENLEAALVGAGYRVLVLNPLQTRRYRDVLRRKAKTDDIDAHVIAGLIRSGAAQASYVPDEHIQSLRELARLRARLMDDWQDYLRQLIAQLDVVLPEHRTALGDLRSARARGILAQFPTAQHLAQASPRAIRRAAEDAGTRGFTLDDAIAVRDAARQSLYSGKAAAARAQVVRTLVNQLDRLSTAIDEVDRAATALLPPSEPGTGPSDADLLQTIPGIGPHTAATLLGELGAPMRFTDAPALVAYVGFYPVITESGQRVGTPRLSAVGSRIARRALYLAAVNAVRRSAEWRTIYLRKRAQGKSAKQALIVVAVKLLHTLYAMLKHRRPYNPSRLLVATATIGT

SEQ ID NO: 109607 - protein, 357 aa, unidentified
MKYYTSTTEFNCGIDLHAHQMYVCVMDRQGKKLVHTNIQDNDFDYFLRLVKPYRHDLTVCAECMFGWYWLADACQAEGLTFVLAHALYLHLIHGGKNKNDRIDSEKIAHLLRSNLIPPSYVYPAAKRPLRALLRQRISYVWRRSELLARIYSHQLAHNRTLVRQTSRRNRDPWAEQLLKSENHPLRQLALKNDLAMIRHYDHQIFQLEEELQRQTKRIACREYTLLKTIPGIGESLGLTILYEVGDIQRFPTVKDFLSYCRLVKGTVASAGKIKGLRGAKLGNPYLRWAFGEAAVIAKRDHYRLKPLAQQLADRMNGNKFKANTVSAIKWARAAYFMLKNKTVFDPDRLTAVLAKAA

SEQ ID NO: 109608 - protein, 340 aa, unidentified
MTITTVGIDLAKNVFAVHCVDQHGKTVLVKPKVSRAALPELIASLPPCVIGMEACSGAHYWARLFRQYGHEPRLMAAKFVSPYRMAGKSGKNDAADAQAICEAVRRPHMRFVPVKDESQQAMQCLHRTRQGFIEEKTATYNRLRGLISEFGVIAPQSADALRHMVSVQKSSLPLQVQQCVDDLMEHVDRIEANITEYDRILSHIAKTDHRSQRLMELKGVGPTTACALVASIGNAHDFKNGRQLAAWLGLTPSQYSSGGKSKLGRITKAGDSYLRTLLVQGARSVLIGAGKRTDSFSRWVCMLVERRGYWRAVVAIAAKNARLCWASLHYGDDFRLYSVN

SEQ ID NO: 109609 - protein, 344 aa, unidentified
MGEVITIGLDIAKSVFQVHGVDDVGAVVIRKRVSRAKMLQFFGGLRRCLIGIEACPAAHHWARELQAIGHTVKLMPPSYVKAYLKRSKNDANDAAAICEAVTRPSMRFVAIKTKEQQSALMLHRARQLLVRQRTMLSNAIRGHLSELGIVSAKGRNGTGELLQIITNDADSRIPLAARSILKVLAAQYCAIGAEITSIGKSILAWHRSCEPSRRLEEIPGIGPIVATALVAEIGDWKAFRSGRDLAAWIGLVPKQHTTGGKDKLGSITKQGNRYLRWLLVVGAMAVIRYSRKHGTEKRPWLGQLMERRPTKVAAVALANKIARMAWAIMVRDERYKEPKLLLAA

SEQ ID NO: 109610 - protein, 391 aa, unidentified
MCTGHTPAISSAEASVNHDSTVFVGLDVHKESITVAYAIDMGDVELLGKIGTLKADIDRLCKRVQSKARHVRVVYEAGPCGYGLYRELVERGFDCVVCAPSLIPKKPGERVKTDRRDAVKLVRALRAGDLSAVHVPDVEDEAFRDLARAWAAAKADLRQARQRLKSFLLSHGVRYSGNANWGPAHRRWISVFAFPNHWQQLAFDECRRTIEDRFAQCERLEATLHEAVVGWRFYPAILGLQTMRGIQFITAVGMLSELGDLSRFEHPRQLMAWLGVTPSEHSSGERRRQGSITKNGNSYARKLLVEAAWSYRYPARVSPEIQRRHEGIPKLILDRAWDAQVRLCRRYRKLAARGKNVNIAVVAVARELAGFIWDISKLAMSLAVTRNERPA

SEQ ID NO: 109611 - protein, 375 aa, unidentified
MNKYTTKYVGMDVHKETIAVAIAKEGRGEAVYYGEIANNAEAIRKLVTKVNSDGENVSFCYEAGPCGYEVYRQLIDLGQKCDVVAPSLIPKKSGDRVKTDRRDANTLTRLYRAGELTPVWVPDKEQEAMRDLTRAREDMKAMEGHAKQRLGAFLLRHGKKYPGKSKWTQAYFRWLEGIKFEIPVQQIVFQEYVDTVKQMKERVAEMEQEMRHAMGGWSLVPVVTGLMALRGVDMITAMTVVAELGDISRFETPRQLMAHLGLVPSEYSSGARRQRGGITKTGNGHARRVLIEASWSYRLPARKTAHLQRRAGKTSAVVQAIAWKAQKRLCKRYWYLINKGKLPVEACTAVARELSGFIWAIACEVLGKNYACVTA

SEQ ID NO: 109612 - protein, 424 aa, unidentified
MKNTTVAGIDVSKHFSDLCVLSADNSVLRELHFTHDQSGLKQAAHIMKEIEVQQKEKPVLIMESTSHYHRLPYYFFREQGFDVVIVNPLQSNAIKNISIRKVKTDKVDAYRIALLYRLQSYEATNQPIDILFDLRNLTRQYSDLVKSRTMYTNQLIAYLDQAFPSFRKVFKDVTALTALALLDRWPTPQAILVADKSEVFEVIRKVSRSGAAYATKKAEGLFQAATQDVEINIQAESNKVLIKSIVSIIRAFIDNMKIVQDEVKKLMKSDSHASTQVNLLSSIPGISWFGASILLSEISDITRFKKPAQLVAYCGLDPSQRQSGMFKGNKNKISKRGCRYIRRLLNMSAVTAVSKNSTGAYNNPVLAEFYQGKCLSKPKKVALCAVMNKMVHIIFAVLRDQKPFELREPEEHAIWLRDKSRLAS

SEQ ID NO: 109613 - protein, 359 aa, unidentified
MARKRTLSTLDTSIAYEAVGLDLAKEDVALAAFDSDHKEPYLIDRIPYDKLYELLADMAPTLVAMEPCSGAHQIAEQIQELGHEVMMISGRHVQAWVKDHCNGQKTDLNDAFAILNLAYDRWLTPIRGKTREECRLLALQASYRQLKGQRTKTMVHVKATLHAWGFPIRAGSFNQKVLHELIDTNREAFGDEVVETLHLMINRVRDLDHDIATVLKLLTEATKRDPRASLLRSIPGFGILTMSRWCAVIGDIARFDSPKQTMAFVGLVPNNRITGHHTETSSGREARGQGRMLKRGDKMLRSLCILGAASLCLMVRNDRLPDCPFVASIKERLASPRPWFKVLVYVAAKLVRIATALLK

SEQ ID NO: 109614 - protein, 310 aa, unidentified
MDMFIGIDVSKDRLDICIRPSGEIFAVTRDDEGLEHLVERLRALAPVLVALEATGGYETVVASALAAAHLPLAVINPRQIRDFARSTGKLAKTDRLDAAAIAHFAEAIRPPARPVADAEAQALGELVARRRQVIEMIVAEKNRRRLAGQPRVLKAIDRHVDLLQAELSELDRDIDGAIRKSPAWQADADLLASVPGVGKATLRTLIAELPELGRLDRRKIASLVGVAPINRDSGALRGRKTIAGGRAPVRTALYMAALVASRSNPLIAAHYQKLRAAGKPAKQALTACIRKLLVILNAILRDRKPWSLPA

SEQ ID NO: 109615 - protein, 416 aa, unidentified
MSLQRSKVCGIDVHKTFFVAAVLSNTGEFWIERFSHDRPGLLALKDWILDHGCEVVAVESTGVYWYSIYSTLEDSVPVIVANPYLIKNIPGRKTDIIDAQWIAELTLNNLIKPSRIFPKDDRELRNLTRARENLVQNRTRLKNRIHRSLESASIKLSSVLSDIFGKSGQYILEHLLQGTPIDEIIQGIPSQKIRDKEEALKNAIQYNLSDDQILIIEQSLEEIGLINRQIQELDDAIQGRLGDRNEDLQIAMSMPGIGWTSGVMILAEIGDYRDFDSPDKLAAWAGLVPTVYQSADKMRTGGITKQGSKHLRWILVEAAQAAAKKRGSILRRFFLRIKNRKGYNVAVVALARKILCILWHILVNKEYYTEENSPPKKVRMPRRIGITRKSVEQSIELLVEAGYLVWKQNIIELGGG

SEQ ID NO: 109616 - protein, 350 aa, unidentified
MEDSRGELCRNRRVIGTVERVRVDAQGKIVKEAKAASEPEALVAFFRSLGFAVKRIGLEAGPLSQWLHAGLKRAGFEVVLLETRHVKAALSAMTVKTDRKDARGIAQLIRMGWFRPVHAKSIASQEVRALLVARKQLLERLIDVELSMRGILRGFGLKVGPVTRKGFEARIRELVTGQATLERIAGAMLSARAALKAEYEKLHKAVLALVRDDAVCRRLMTVPSVGPLVAITYKSAMDDPYRITRSKSAGALFGLTPKKYQSGEKDVTGGITRAGDEMVRTALYEAANVLLSRITRFSKLKRWGMDVAKRRGSKRAKVALARKIAVILHRMWIDGTTYRWAAAEPTAAKA

SEQ ID NO: 109617 - protein, 412 aa, unidentified
MSIALPNQQFVGKPYKILHNSIDSLTTAVSKIKEAEELYSLESRIFLESTGIYHYPLFCYLRDKGFNCSVINPIITKNSTNINIRKVQNDRFDSKKAALVGLNPDLKVSLMPSDLALNCRNLCREYYDLMDNRSAYVNKLQGELRMAFPQYLGIFSKVTINTSLTLLETYTSPSAFLEADKQEIIDIIRSTARFGLTYAQNKYNAIIQAATDANQFGYIIESNIKRIRLYISFIRKYDEEINSILESLHELVDANEDADFVKQIHLIETFKGAGFLSAVSIMGEICDFSAFSKLKQLFAYFGLDPAVKQSGKFESTKVQMSKRGSAIARRVIHTLTLQSISISRNGEAKNPVLREYYLNKCGSKPKLVAMGAVSHKVCNMIFAILRDNKPFKIIAPQEHIKQYNAAKCDIAA

SEQ ID NO: 109618 - protein, 368 aa, unidentified
MYSIGVDFHKAYSHMTVLDSHGQMVKAGKVANTADAVRALVAPYREGGQAVVEATRNWTIMYDLLETELDAVYLAHPLKVRAIAEARIKTDRIDSRILAHLLRCDLLPTAYVRPKEQRLAQQVLRQRMFLVRLRTMVKNRMHVLIDRQIAARETAAGFSDLFGQAGLAWLRTVDLPPGERQLLDRELALFDALCGRIAESDGVVRSLSAGDLHVRRVRTIPGLGRFFSVLVANEIGDIRRFATPEKLCAYAGLVPSVYASGGKVFHGRLTKQGNKWLRWAMVEAVRPAVKSDSELRAYYERLRHRKGSNPAKVATARRLLTIIHRVLSQERPYRKPVSERIGMDGFLGLPSEPPNGIGLIPARVPKKG

SEQ ID NO: 109619 - protein, 356 aa, unidentified
MTRIAQLEPTLVTVGVDTHRDVHVAVALDQLGRRLGEIELATTRAGYQRLLAWAERFGAVEAFGIEGTGCYGAGLARHLRARKVFVIEVMRPNRQTRRRKGKSDPTDAEAAARAVLSAEAAGSPKAGDDLVEMIRVLRVARSTAIKARTQAINALRALLVTAPPELRDELRALSTSGLVAKAAQVRPGEPRNPLAASKLALRHLARRCQALQAETQSLDAQLARLTATASPHLAEAFGIGADTAGALLVAAGDNPERLRSEAAFSMLCGSSPIPASSGQTRRHRLNRGGNRQANAALYRIVLVRMRYHQPTKDYVQRRTTEGKSKREIIRCLKRYLAREVYTALKQSSQEKLARAA

SEQ ID NO: 109620 - protein, 392 aa, unidentified
MKTIVGIDVGKFHHQATILDPEGNVLGGTIRFENTAFGFQKLLTHLEKLVGTKPDTLFIALEATGHYWLPLYLFLLDKRYKVQVFNPYQSDALRRMSLGRAKTDTIDAELVARLARFGKQKETPLPGEEILTLRNLSRFRMELVFQSSDVKRKVIAVLDVLFPEFEKLFSDVFGNAALAVLHESPTPEEIVALDEGQLTKILETASRKRLGNETARKVQTAARDSIGSRFATKALVFELKLLLQQIGFLKEQLEELTGEITTLLETVDQQLTSIPGIGAVTTAAIIGELGDLTRFPNVASVIAYAGLDPKVSESGLTSKQRAISKRGSKYLRTAIWQAAVRSLIHNPDLKAFYDKKRSEGKPKQVAIGAVANKLTRMMYGILRSGKPYQSVM

SEQ ID NO: 109621 - protein, 349 aa, unidentified
MNYYAGLDVSLEETAICVVDETGRIVKETRAASAPRALIVALSGLGLPLERIGLEACSLAAWLHDDLCKAGLPAICIETRRANAAMKTMPNKTDRNDARALAQIMRTGWYRQVHVKTRQCRLWRSLLVARRTVLNEMRSIENVVRAVLRESGIKLGTPSRAGFVGRVRELAGDDAQVMPLVGPLLTILATMLDQFARLTKQVLDIVRREEVCRRLMSVPGVGPITALAFRATIDRPDRFKRSRDVGAHLGLTPARYQSGETDIQGKISRCGDELARTALYEAAHTLLVRSKKWSSLRAWGMKIAKHRGMARARVAVARKLAVILHRMWRDETAFRFGKEPCAAAASAGG

SEQ ID NO: 109622 - protein, 493 aa, unidentified
MGACELESGDVALAAIPIRKMTIGIAQTLLLIIDWRITMPKRTTGDRAELKPVNVGAAAIDIGSKMHMAAVNPASTDVPVRSFGTFTQDLHDLADWFKACGVTSVAMESTGVYWIPVYEILEQRGFEVILVNARYAKNVPGRKTDVSDAAWLRQLHSYGLLRGSFRPDAEIATLRAYLRQRERLVEYAAAHIQHMQKALMEMNLQLHHVVSDITGATGMRIIRAIVAGERNPDVLATYRDVRCHSSIETIRAALVGNDRHEHIFALTQSLELYDVYQAKMLDCDRKLEVLIAALNNKGAKPAGKLSKPRIKTKQVNTPTFDVRSALYGLLGVDLTEIHGLGPSLALKLVGECGTDLRAWPSAKHFTSWLCLAPGNKISGGKVLSSRTRRSSSRAAALLRLAATTVGRSDTALGAFYRRLSSRAGKSKAVTATARKIAVLFYNTLRHGISYRDPGADYYEQQYRNRVLANLQRRAKSLGFVLQAIPGDADPAVS

SEQ ID NO: 109623 - protein, 454 aa, unidentified
MQLWCGIDWAENHHDVSVVDETGTQLARMRIEDTVAGFSQLMSILTEQQRSSAEPITVAIETAKGLLPAALRAAGVPLVAINPLAVSRYRDRHSPSRAKSDAGDALVLANILRTDPHSHRPLPADSELAQSIHVLARAHQDAIWDRMQIASKLRSVLRQYYPSFLAAFPDLASREARAVLHLAPSPAQGQLVRKSALTAALRRAGRTRGIPAAVAVIHAALRREQLHQPPLVEAAMAEHATALLHALDAAVTAVARLEESLTTAFNQHPDAGIITSFPGLGTVLGARILGEIGDDRTRFATARGLKAFAGTAPITRASGMKTIVTRRVVRNKRLGQAAYLWALPMIAHSPAAHAHFTARREHGDSYSAAARNLTNRGIGMLHHCLQTRQHYDETRAFPGHPNQRVTPDRPLAGQAYQETGAHPHPAPGHNDQRPVTSIAPPASQACQKTEAQPA

SEQ ID NO: 109624 - protein, 413 aa, unidentified
MEVVYERCCGLDVHKETVVACALVSGPRGQPTREVRTFGSMTGELQDLGQWLEELGITHVVMESTGVYWRPVYNLLDGRFSLLVVNAQHLKALAGHKTDVQDAEWLADLLRHGLLKGSFIPSQLLRELRDLTRYRAKLGDERTSEVNRVHKVLEDANIKLASVASDIMGVSGRAILEELVQGRTDPAILAELAKGRLRDKRALLEEALSGRVRTHHRFMLAQHLSHIDFLDEAIRQLDAQIEEQMRPFAASLERWDSLPGINRRIAEIVVAEVGPDLEPFADAEHLASWTGMCPGNNESGGKRRSGKTRRGSPWLRRALVEAAHGAARTKNQYYQALYRRLAARRGKQRALIAVAHSLLVTGYYLVTRERSYQDLGANYFDQRNHDAVKQHAVRRLEKLGYRVNLTPPQAQVA

SEQ ID NO: 109625 - protein, 295 aa, unidentified
MIYIGVDLHQRFCYMTMMDASGAIGDQRQVPNDAESLRKYFQQWPEAVEAAVEACSFWQAFVDRVSPLVARLVLVHPKRVKAIASAKLKNDRVDSETLAHLLRANLLPESWMADRGTRELRQQTRLRVSLGQTRAQLKNRVHAVLHQQGLRPPVSDLFGRKGRAWLNEQPLPEAARRSVDTYLELIGQLDQKISFEEQQLNARAKSDPAVRDLMTIPGIGAYSAAVLLAEIGDVHRFSDKRQLYSYAGLVPRVRQSGEHTRSGHITREGSRNLRWILVEAAQVAPRLLAGCAALF

SEQ ID NO: 109626 - protein, 409 aa, unidentified
MRYYVGVDWADQTHAVWVVDESGTKITARTVAHTAAGFTEWGRELDEWRAQGIERWAAIERPDGRVVDFLLDHGVVVYPVNPKALDRARDRFRQSGAKSDPFDARVLADFLRTDHSHLQALQPSSEAAQELKLLTEDCQRHIRQQTRLVNQLTTTLKAYYPRALEVAELTTALAREFLQAYPTPEALTALTQRQWQRWARGRRLSEARIGALWAVLQQPQLPVPAHVVRAKARLMQSLVEQLTPVVATVAQYRTAIDDFFAHMPAAQWARTLPIGKHGITAPTLWARLGDAPGRWESFRHLQAQAGAVPVTKRSGKQRVVHFRFACDKSLRHVVDQVAFLSLLSSAWARAYYDQQRARGHAHHQALRALGAKWLKIIFVMWHRQVPYDEQYHLATMTRQQLRQRQPQIA

SEQ ID NO: 109627 - protein, 444 aa, unidentified
MGKAKITKTTIDLVRPNAAGIDIASEVHYVSVPDDRDTPSVRKFGSFTEDLHKMAQWLKQCNIDTVAMESTGIYWIQPYLILEEYGFEVYLVNARHIKNVSGRKTDVQDCQWIRQLHSYGLLNRSFQPESLTRELRAYMRHRKHLVQSTSNQILHMQKAFEQMNIKLHDVISDITGQSGMRMIKAILEGERDANTLAKLASGRIKASKDKIAKSLTGVWREEHLFELKQAFDLYQYLNLKINECDAQINKVMTRLASNENSDNIKRHKRTNKNSFHFDGTKYLKQILGIDVTRIYGISEITATEIISEVGADMSKWSTEKHFVSWLNLAPNNRTSGEKKLKPKKTNKRNKAGQAFMLAASTLKNSEHWLGVFYRRIKARHGAGIAVKATARKLSLIFYKMLKYKIEFDPLSIEAYNQYFREHRLKYVEKQAHALGLKLVPTIVS

SEQ ID NO: 109628 - protein, 337 aa, unidentified
MEYYAGLDVSMEETHICVLDREGTLIREGKTRSSPAMIAAFLADGPPCAQVIFETGRMAPMLYHGLVEQGVPVQCVESRQAYQALKSLAGHKTDRNDARGLAHLARTGFYKPTHVKSLSAHAIRSLIAARKKLVGQRVTIDNQIRGLVVVFGVRLPRALSPAFKDAALKVSDGVPGLHAALRGLFAAREAILTAVAAIDADMKRMARASKVCAHLMTVPGVGPITALAFAAAIDEPSRFRRSRHVGAYLGLVPRRYQSGEIDYSGSISKRGDIRVRTLLYEAANVMLTRCAGPLKLKTWALAIGARSTMRKARVALARRLAIIMHAMMRDGTEFQIT

SEQ ID NO: 109629 - protein, 389 aa, unidentified
MPLKNDLSRSLAAFEQDRTLVVVLEISLSTWLVAGLVPGVVRQPAKKLGADEHELLKLIYRWRAEASRAGREIDRICVAFEAGRDGFWLARWLAAKGMEAYVIHSASVAVSREHRRAKTDRLDTELLKRAFLGWLRGEPGHCGMAAIPTVEEEDARRPSREREKLVGDRTRIINRMKAALVRFGIRGFKPALRKAAERLDGVRTAEGNPLPANTRAELRRDMARLRVVVDQIKEIEDDRVRELEATSELEPGPPAMVRLIARIVGIGVETADMLVREVLSRDLRDRQAIARYAGLTGSPDESGSRRREKGLARAGNARVRRGMIQLAWRFLQFQPESRLAKWYRERTADRRGSTRKTMIVALARKLLIDLWRLVTTGQVPEGVLLRQGA

SEQ ID NO: 109630 - protein, 372 aa, unidentified
MQQNLRVFVGLDTSKNKISVALAEDGRRGEVRFFGDIDNSPDVVRRLVSKLSGKYQQLLFCYEAGPTGYGLHRQITALGHDCSVIAPSLIPKRPGEHVKTNHRDAVTLARLHRAGELTTIWVPDLGHEAIRDLVRAREAAMEDLREKRQHLQSFLLRHGQRYPGLRPWTLVHARWLSNLTFEHPAQYLVLREYRQAIEDAEARLERLTQQVTEVVSTWSMASVVEAYQAMRGVAFLTAVTFVAEIGDVRRFETPRQLMAYLGLVPSERSTGEQVRRGSITKAGNPRARRVLIEGAWTYRYPARLSRPLQLRQESLPKVVRAIAWKAQVRLCARYRRLMAAGKRQTLITTAIAREMAAFLWAIGHEVQPRSAA

SEQ ID NO: 109631 - protein, 426 aa, unidentified
MNCTQNYKIDQVTEQTLVVGIDIAKRAHYACFVDDRGRVLRKSFPIFQSKEGFQQLYKAIQEAMQAFGKSEVIVAVEPTGHYWLNLAYFLEEHGIPLVMVNPAHVCRSKELDDNLPTKHDAKDALVIARLAKDGRFLVPRLLHEIEADLRVGSTLKEKLRKEQTAVKNAIVRWTDRYFPEFWTVFRDLGKTALSVLEWTPLPADMAGRTVEELLEVYRQSEGMKCPQKAKIQALINTAKDSIGVTEGTAMARFEIAALVRRYRQLEAEIAALDAELKALVQTTMEYQWLKTVDGLGDAMIIDLLAEIGSFAHYRDPRQLVKLAGLTLKENSSGQRKGQKHISKRGRKRLRSVLFRAMIPLIRHNEAFRELHEYYTTRSVNPLTGKQSIVALCRKLLNVLFAICTKKQAFDAERMKQDVLSQVQRAA

SEQ ID NO: 109632 - protein, 397 aa, unidentified
MIAVGIDISKAKSTVAVIDSDGTVLTSPFTMAHTQPEMEAFVTYLKGLGEPTTILMEYTGHYHYPVLKKLQDEGFPVCIVNPYQMKKYGDVEIHKAKTDKKDALRIAAYALEKSYKLVPYSSMEQKYEDLKFLSRQYSQRITYVAKLKVQLIALLDQTMPGITRILPLNSRNPEKCALLLFIKRFKSFDEIHRIGKARFLASYDILAKKASERSASSKGLSIYELAVDSITTRGEDPYIWLSQNQCVDLLSATQNAADEIISQMRNIAETIPEYKVLRAMRGVGDRLGPIILAEIGDIRRFHSGKALNSYAGNDAPPYQSGQFESRNRHISKRGSSALRKACYEVMQALKLTKPQDDPVYLFMLKKEQEGKPFNVAKMAGVNKFLRIYYARAMELYK

SEQ ID NO: 109633 - protein, 375 aa, unidentified
MREKLRFLGMDVHAETIAAAIAEPDGEVRSLGTISNRMESVRKLIKKLGPVEKLRICYEAGPTGYVLYWQLAELGVQCEVIAPSLVPVKAGDRVKTDRRDAEKLARSYRSGDLTAVWVPDAGSEALRDLVRAREAAKQDELRARHRLGKFLLRSGHRPPTGVRSWTHLHLIWVSQIRFAQPAQESTRLDYLHEVEHMRERVLRLEQAIVEAVKLASPAMQGVITDLQALRGIAHISAVTIAAELGQVSRFAGARELMGYCGAVPSENSSGKRTRRGSITKTGNAHLRRIVVEAAWSYHRPPAIWAGLRKRQQSASQEATEIAWKAQHRLYKRYARLAAKGKDKRKIVTAVGRELLGFIWAIGTKAEATVSHRIAA

SEQ ID NO: 109634 - protein, 402 aa, unidentified
MNAVGIDVSKSKSVVAIMRPFGEIVSTPFEIKHTASDIHSLIELINSVEGESRIVMEHTGRYYEVLAHQLLEANLFVSAINPKLIKDFDNDSLRKVKSDKADAVKIARYALDKWQNLKQYNVMNELRNQLKTMNRQFGFYMKHKTAMKNNLIGILDQTYPGVNTYFDSPARSDGSQKWVDFASTYWHVDCVRKMSLNAFIDHYQNWCKRKKYNFSQSKAEEIYGKAKELVPVLSKDAITKLIIKQAVDQLNSASTTVESLRTLMNETASKLPEYPVVMAMKGVGTSLGPQLIAEIGDVSRFTHKGAITAFAGVDPGVNESGSYEQKSVPTSKRGSSVLRKTLFQVMDVLIKTHPQDDPVYQFLDKKRAQGKPYYVYMTAGANKFLRIYYGRVKEYLSSLPES

SEQ ID NO: 109635 - protein, 463 aa, unidentified
MNKVRSAENDTDPALEENGLAVLRRNVAGIDVGSTSHWVCAPTVDGTAREVEQFGATTPELEKLAQWLKQRKVESVAMESTGVYWIPLHEVLERHGLEVVLVNTRELAHVPGRKKSDRIDCKWIQRLHSCGLLRGSFRPAEQVCMLRTLVREKANLAAERADWVRRMQKSLEQMNVRVHRAVSDTEGTTGMAIIQAIVKGERDPMQLAKWRDPACRKSVEEIAEQLSGHWREDHLFSLEQSLKMHAAIEERIQAYQTEIQRRLAEMERADREGQQAPALKNKNKAKKIRQRREEPMRQALYRMSGVDLTAIDGVGVGVVEIVLTEYGSDLSCFPTEKQFVSHMTLAPKKPVSGGKPLKKKKRGSASSRVASALRSAALSLRHSQTALGAYFRHIQHRLGADVAAFATARKVATLIYRLLRWGHAYVDEGAEAYEQRYQAARINRLVSTAADLGYQLVAKPTNS

SEQ ID NO: 109636 - protein, 354 aa, unidentified
MSNRINSVVATMGIDIGKNAFHVVGLDRRGAIVLRQRWSRGQVEARLANMPPCLIGMEACVGAHHLSRRLQSQGHDARLMPAKYVRPYSKGQKNDFRDAEAIAEAVQRPTMKFVATKTAEQLDLQALHRVRERLVSQRTGIINQIRAFLLERGVAVRQGLRFLRAELPIILATRSDVLSPRMLRVVEELAGDWRRLDERIAGLSKEIEDLARQDPACERLMTVPGIGPIISSAMVAAIGNGAVFTKGRDFGAWLGLVPKQISTGDRTILGAISRRGNRYLRALFVQSAWVVLIRIKDWDRYGLKTWIDAAKKRLHHNVLAIALANKLARIAWAVLNKERAFECVKTHATARQPA

SEQ ID NO: 109637 - protein, 347 aa, unidentified
MRFYTQQHPHYCGIDLHARTMYLCILNQAGAIVLHRNMKADPDSFLSAIAPFRDQIVVTVECIFTWYWLADLCAREGITFVLGHALYMKAIHGGKAKNDKIDAHKIAVLLRGGMLPQAYVYPADMRSTRDLLRRRMHLMHQRSQLLAHIQNTNSQYNRPEIGKKIAYKSNREGVAERFADVSVRSSITFDLRRIDFYDGLLNEVELEILRHAKLHNPNTLHLLDSVPGVGKILSLVLLYEIHDICRFPRVQDFVSYCRLVKPKKESAGKTYGFIGAKIGNAHLKWAFSEAAVLFLRNNPQGQAYVARLEKTHSKGKALTILAHKLARAVYYMLRRNEAFEMKRFLNH

SEQ ID NO: 109638 - protein, 402 aa, unidentified
MTYDYVIGMDACKYFHHACVLDIDGTQVLSKRINQNEQSLRALFSAFSAYDHKVLVVVDQPNNIGRLTVAVAQDIGIDVRYLPGLAMRQLSRIHAGNAKTDIRDAYIIAHAAKNLPESLRSVDRVEEAFLQLKVLNGIDEDLARSYTRLINQIRSALVGCYPQFEQALRGQIIPRKWVLHLLARYGGPTKIKRLGKAKAAAFARRYKARNPEPVLDAIFAAISEQTVTIAGAHYAEMGVAMSAKDALLKLEHRQQIEKEVIELINDIPHTQFLLSMPGIGPKTAAQILMTAGDMSDFPSAGHLASYAGLSPRTNQSGTSIMSNSLNRAGNKKLKNALWQSSFASIRFHERSRQFYERKRREGKRHNAAVVALARRRLNVLYAMMRNHEHYHDPAPSQEDLAA

SEQ ID NO: 109639 - protein, 402 aa, unidentified
MNAVGIDISKGHSTVAIMRPFGEIVAAPFEVSHTAEELSKLANSLRALHGETKVIMEYTGSYYQPIAYALREAGLFVSTVHAKLIHDFGDNTIRKVKTDRADAIKIAGYGLTHWLKLPEYIPEDDIRRMLKAYSRQYTKYNKLKTMLRNNFIALTDQTFPGINELFTSPPRKDGSQKWMDFAVRFWHCECVCGLTPKVFFTQYRKWCQREGYHFSESKADDLYVSACGHVGVMPKTDSVKLLVNQAVIQLNTVSHSMAVLAAEMKRLATLLPEYPVVSAFYGVGDILGPQIMAEIGDIYRFEKKGSLVCFAGLEAPPFQSGKFESHDRNISKKGSPHLRRTLFQVMSCLLQHAPADDPIFQFLDRKRAEGKHYYSYMTAGCAKFLRIYYARVKQYLDALDEA

SEQ ID NO: 109640 - protein, 430 aa, unidentified
MGLIMPTAMHPERDNQPMPYEWFVGIDWGSQRHQVCVLDRDRRRVGERAIDHDGASLAQLAAWLWTVSAGQPQRVAVAIEVPRGAMVEGLLERGFHVFALHPKQLDRFRDRHSVAGAKDDRRDAFVLADAVRTDQPSFRRLQLDAPQLLRLRELSRAEETLLEDFRRSANRLQDQLHRLYPQMLQLCSAADASWLWDLIDLAPTPAHAALLSEEHVQRVLKAHRVRRVTAQEVLACLQAPALPVAPGAAEAAQAHCGFLLPCLRVLAEQLQACSQQVSALLHTLAEEPGDGEGPSDVAIVLSLPGVGRKMTAWLFAEAAQPLAERDYQVLRTHGGVAPVTKQSGKRRVVVMRRGCNPRLRHALYHMARVAMQRDAHFRRVYAALRAKGQRHGQALRNVGDRLLRILMAMLHNRTCYDASRIRREPVVQRG

SEQ ID NO: 109641 - protein, 345 aa, unidentified
MKHYAGLDVSVKETSVCVVDETRICRETKVPSHPDDLAQVLHDPAWRLERIGLEAGPLSQWLFSGLAEAGLPIVCIETRHTKAFLKAQVNKSDRNDARGIAQMMRVNLFRPVHVKTLTSQKRRALLTARKLLQEKAIAFENDIRGLLRNFGLKVGIVGAAKFDIRIRELLDCLPDPAEIMEPLLASWRKLREEVERLHRKLLSIVRDDGVCRRLMTIPGVGPVVALAYASTIDVPARFRNSKAVGASLGLTPVLHQSGESNRIGRVSLCGDGMMRTLLYEAAQVMLTNVHVKWSWLKAWAMNIAKRRGGRKAIVALARRLGVIMHRIWSDGTVFRWTRESIPAAV

SEQ ID NO: 109642 - protein, 348 aa, unidentified
MALTIVETRAVTGGVDTHADVHVAAALDPIGGLLGVGEFPATPAGYAGLLGWLRGFGTVCLVGIEGTGSYGAGLARHMATAGVRVVEAGRSDRQDRRRQGKSDPLDAVSAARAAQSGRARGAPKGRDGQVEAIRALMVAKRTARSERTQTINQARALVLTGPDDLRTRFSRHTPAGLVAQLAALRPRPGDVVGYATRISLRELGRRAQFLDSQLERLDELIVPLVTARAPGLLALHGVGPDTAALLLIAAGDHPGRLRSEAAWAHLCAAAPIPASSGKVTRHRLNPGGDRQANHALWRIVITRMGSHPPTRAYVERRSAEGLSKTEIIRCLKRYAAREVYPHLRPGAG

SEQ ID NO: 109643 - protein, 377 aa, unidentified
MFREEWPAAACIPRQAAGDRIEPALSRFWLPRSEIAPAPSSDPDGCRNNLVRFTRQGSRKMTQTNITTAGIDTSKAKLDIAVHDRPERWQVANAPAGWRALAANLARTGVTRVGIEATGGYERGVVEHLRAAGLTVLVLQPIQVKAFGRVHLRRAKNDALDAVLIAACAATMNEPRIAPDQRLTELADLLTFIEQIEEDIARLKIRLEHIGEPRLRRMVVTDIARLKARRLAMLRFIAKQLRAHHDLAARLELVLSVPGIGERTALALIIRMPELGYISREEASALAGLAPFDDDSGKHKGQRHISGGRGRLRRSLYAAALPAAFRWNKALISLYGRLIARGKAHNAALIACARKLLIYANTVVARGTPWVDSAPAT

SEQ ID NO: 109644 - protein, 346 aa, unidentified
MTIVEDRPVITGGVDTHVGTHVAAALDPVGGLLGVREFPATAAGYVGLLGWLGGFGDVALVGVEGTGSYGAGLARHLAAAGVRVVEVDRADRQDRHRQGKSDPLDAVSAARAAQSGRPGGAPKGRDGAVEAIRALMVAKRSARSERTQAINQARALIVTGPDDLRARFAGHTAPALACAVAALRPRPGDVPGYATRVALRELGRRVQFLDAQLERLDELIIPLVTARAPGLLSLHGVGPDTAALLLIAAGDHPGRLRSEAAWAHLCAVAPIPASSGKTSRHRLNRGGNREANHALWRIVITRMSSHPATRTYVARRTKEGLSKKEIIRCLKRYVAREVYHHLRDGA

SEQ ID NO: 109645 - protein, 343 aa, unidentified
MKLSRVGVDLAKNVYQLHGVDRHGKTVWKRRLRRAQWLQALLDNTDPGCEIGMEACTGAHYWSRELQSRGYTVRLIAPQFVKPYVKSNKNDANDAEAICEAMSRPHMRFVTVKSVDQQDIQATHRVRTELKDHRNAKANQIRGLVAEYGLVAPQTLLALRRAIPEWLEDADNGLTDYFRSLLHGLWNDLLSLEDRLKELDKAIETLARNNEVTKRLQQLRGVGPIVATALVATVGTGEQFKNGRQMAASLGLTPRQSSSGDKRRLLGISKRGDVYMRTQLIHGARAVVSQAKNRDDPLSRWATDIAKRRHPNVAAVALANKTARMAWAMLQNETDYDPNLAVG

SEQ ID NO: 109646 - protein, 401 aa, unidentified
MNAVGIDVSKGKSMVCVMRPFGEVVLEPFEVLHTAQNLNDLAGKLKALDGETRVVMEATGNYHKPVAFVLHDAGLFVSVVNPVLIHDYDNNSLRRVKTDRKDAVKIANYTLDKWTRLRQYLPEDDTRLALKNCYRQYQQAVAVRTMLKNNLISSLDLTFPDANKLFSSPAKSNGCEKWVDFIGDFWHSECVSSLSSDAFAKKYLKWCQKHGYNFTRSKSDTIYACAVNAASLPKSPTSKLLIQQQVAQLKAVSQSVAAFQQEMLRLSQQLPEFDTVMEMYGVGPSLGPQLMAEIGDVRRFSSKKSLIAFAGIEPQPNDSGKIVGNDSGISKVGSAVLRRTLFLIMTVILKTQPQDEPVFQFMNKKRSEGKPYKVYMMASANKFLRIYYARVKAVMDSKHSK

SEQ ID NO: 109647 - protein, 414 aa, unidentified
MEVVYERCAGLDVHKKSVTACRITPGGGGGWQKERRRFGTMTDELLKLADWLRAEQVTAVAMESTGVYWKPVFNILESEFEVCLVNARHIKYVPGRKSDISDAQWIGELLQHGLLKASYIPEKPQRDLRDLIRYRTALIQGRTREVNRVQKVLEDANVKLASVATNVMGVSGRQMLAAIIAGVEDPEALAELAKGRLRAKIPELERALTGRIRTSHRLLLRLHLEHIDDLNSKIENLNEEVNRLMDPFDEDQKRDRLDAIPGVGVDVAQVILAELGTDMNRFPSSAHAASWAGLAPGKNESAGKNRSGKITPGNRHLKVALVQAAHAASRTKDNYLAAQFRRLAARRGKKRAAIAVAHSILVIAYHMLRNGTQYLDLGGDYFDRRNKAQLQRNLVKRLEGLGHKVTLVPVAAVA

SEQ ID NO: 109648 - protein, 339 aa, unidentified
MDRQYVGIDFHRRRSVVVRVSSAGEKLSTTRVANDPLAIAAAVAEAGPEPEVVIEATYGWYWVVDLLQANGARVHLANPQGLNWGQRRVKNDERDAIDLADMLRLGRLPEAWIAPSATRELRELVRYRAKLVALRSGLKAQVHAVMAKEGVLPSLADMFGPGGHAQLEAMPLGDNYRTRVESLRDLIEVYDREVAMLERQIHRQLRGHRGYRAIQAINGIGPTIAAILVAEIGDVGRFRSAEALCSWAGLAPRHRESDTKTVRGSITKQGSKLVRWAVIEAVARYRGGSRLAGDFRRIAERRGTNKARVAVARKVLTLVYYGLRDGEIRCLAAPTRVAA

SEQ ID NO: 109649 - protein, 429 aa, unidentified
MNGVDTTRLERFRQLRKEIRGSNEHLIVGIDVAKDNHHAFFGTARGKTLLKRLVFNNNLQGYEKLSTYVEAAKVKNNLNKVVFGLEPTANYHKPLGEHLIKCGFDVVLVAGTAVKKNRELLDGRWDKHDTKDAANVADLVSQGKCMFYEYPIMLLRELRNLLSFKRRLKKQEHGTSVRIRNHLLAQYFPELDPHFSRMSGCSLSVVKWCLEPSLIAGMEYEEFLRLVAPGKRTIRQREHVKLIWEKAFESIGCKVGETVQFEAKMMVEELQHVRESISEVEEKIEDICLNFPEYKYLLSMPGFGKDISSKVLGAIGNPFRFDNAKQVIKLSGWDLNANRSGKSSGYATAVISKKGKADLRYALYQAALVASSKNQHFVAYFTEKLRQRSREKGIKTKMRVKLAAKLLVIAWTLMKKQEPFNPEYLKVTL

SEQ ID NO: 109650 - protein, 334 aa, unidentified
MEEAPTSSSTLAFSLGIDVGKARLELALRGEEGAVAQTTVSNCPEEHEQLLSWLRDQGARPEKTCVCMESSGGFEKSVALCLHEEGYRVSVVNPRRIKGYASSQLQRTKTDAADAALIARFGWREDLRAWNPPSGAESRLQELTRARQALKKEKTRAQNRRDEAEDEAVCRAHRGLLDEIERQIENLEEEIEEHIEEHPKLSRPCSLLETIPGIGRQTAAIVRAELGSHERFESARQAAAYAGLVPHHHESGTSVRGRPRMSKVGNGRLRRAMYFPAMTALRFNAAVKAFGNRLRERGKEKMVVVGAAMRKLLHICYGVLKSGRPFDPSLHPGA

SEQ ID NO: 109651 - protein, 412 aa, unidentified
MQDILTCVMGLDVHRDIIVACLAKGELGTDPEIEIRSFSTLIPEMQKLRDWVLEADCHHVAMESTGIYWQPIYEMLELCFDGQINILVVNARHMKNVPGRKTDMRDAQWIATLLRAGLLKGSFIPDKTFRELRHLTRYRKSIVHDITAQKNRIDKFLQSSGFRFAAFLSDTFGASGRNIIRHLMEYGSISREALDKCLKTQTRKRIDEILIALNGSLSEHQRGFLRMIFEHLEALEQHRHSVENAIAEEITKHEKALSLLCSIPGIDVTAAAAIIAEIGTDMSAFPDSQHICSWAGLSPGNNESAGKRKSAHINKGNPYLKSMLCEVGWVISGKRTLYLSGWYWRIKQRKGAKRATIALARKLLALIYTMLKVGTPYNEECFEPRRKQSKRKRASRMVNELQKLGYFVVAPD

SEQ ID NO: 109652 - protein, 316 aa, unidentified
MTASLLFAGIDVAKATLDIAVRPNAQTWQVIYDDIHVEALVTQLNDLSPTLIVVEATGGLERPLVVALLTAGLPVVVINPRLARDFAKATGRLAKTDRIDAQVLAHYGEAIRPSCRPLPDADTQQLRAMVDRRRQLVDMMTAEQSRLSAAPARIHDAIVSHLTWLRQQLASLDNDLDEILQASPIWRERDDILQSTPGVGPVLSRTLMSQLPELGDLNRKEIAALVGVAPFNCDSGAWQGRRTIWGGRAAVRSVLYMSTLAATRHNPVIREFYERLLAAGKAKKVALTACMRKLLTILNAMVKNQQRWQPRVAKRM

SEQ ID NO: 109653 - protein, 347 aa, unidentified
MNQITRIGMDTSKYIFQVHGVDASEQPVLRKRLGRKQMLGFFAELPPTVIGMEACGSSHYWARELKQLGHEVKLIAPQHVKPYVTRNKNDGRDAEGLCEAMSRPTMRFVPAKAVEQQAALMLAGLREQMIARRTQISNAIRGYAAEFGITVAQGLNQIEPLLARLAQDESVPELARDLFALQGRDYAQLQMELKAIEARLMAWHRANADSRRLAKIPAIGPIGATTLVMKTTDPGAFASGRHFAAWIGLTPKDHSTAGKTRHGKITRAGDERLRSVLVAGATAVIQQAKQGRGHPSPWLIALLKRKPPKLAAVALANKTARIAWKLMVTGESYDGARMSKAPLIAAT

SEQ ID NO: 109654 - protein, 359 aa, unidentified
MINTRKDTQTESSEEIKAEVLAVGVDVHSNRYVFRHQYDGGQAKPASGMTSEKFLQWVAGQKSRAKRIVCCYESGPFGFFLARTLRENGIECLVVAPENWDNRGKKVKTDKVDALHLLRRLHSYLCGNEEAFSVVRVPSEEEEQQRCLGRLRNQLKDTRQRAQMRGKSLLLTQGVKVDSQWWKPARWEALKEGLEDWLVHLLESHRRVILVADEEERELKTELESEEKPEWDFVGLGSLTYSLLVREICSWWRFKNRRQVGGYTGLCPGVHTSNGKGYNTGVNKHGNPRLRWLLVELAWRVIRYQPDYWKVARMKDALSSTKARRKQAVVAIARQLAVDMWRMATGQTTPEKLGLRTPA

SEQ ID NO: 109655 - protein, 340 aa, unidentified
MDVVIGIDPHKATHTAVAVGDDEVELARLALRSGPRQVDRLLAWAAPFPQRRWAVEGAEGLGFLLAQQLVAAGQTVLDVPATLAARTRLLGSGRSNKNDPNDALSVAITARRHGDLRHVAAAGHAELLRLLAKRHADLAKQRIRLVSRLHALAAELSPGGIAKTLNSTDAAKFLAATTPTDTVSQVRHDLIGELADDIARLEAQLKASERRLRSAVAASGTTATDICGIGPIIAAMLIGNTGDIARFANRDRFAAYNGTAPAEFSSGGRTIHRVSQRGNRTLNHALHLAAMCQLRQPASEGRGYYDRRVDEGKTPKEAIRALKRQISNTVYRHLIADTRR

SEQ ID NO: 109656 - protein, 338 aa, unidentified
MNNGLKLLSIDIGKNSFHLIGHDAGGHQVLRKCFNRNRLLQFAAQIEPCTIAMESCGGSHWLARKLASLGHRVKLIAPQHVKPYVTGNKNDFIDAEAICEAASRPRTHYVAAKTVEQQVLSVQHRLRESLVCHRTEAINRVHGFLLEFGIALPATKAAIAKVPELIDNSRSDLPLQLKRIMEHLLEDIRRLDAEIKACDVQIKQQLAQDDAGTRLMTIPGIGPITASALVADLGDASNFKTSRDLSAFLGLVPRQFSTGGRPVLLGISKRGDRRMRTLLVQGSRALMIRIDRREDALGQWVRNLLARKHPNKVACALANKLARIVWAVLRRGGTYNAS

SEQ ID NO: 109657 - protein, 406 aa, unidentified
MNQNTCITIDVSQNKSHIQGFIGPNKPLNKARTLRHTKQGFQFILTLKNLIESKINETPLIVFEFTGIYHKSLEKFLISQNLKYHIVSPLRAAKARNSEIREQKTDARDCLSLSKLFYSNNLGIFYSENETYSNLRKLNRYYDTCMKHLIKIKVNFRETLTVIYPNYNKLFSSIYSDDSLTFLKEFPHPSIYTSKSEDYILEILKNKWEHVESWTSSKVKKLTPLINEVVPGCNVTEPDIIMLLSYIAQIEYYLNQIKITVSKMNELAKKVPLYNLVHSLPGIQDILTCKFIAELGDISRFTNYKQIVAYAGIDPMIRQSGDKDGLHLKMSKKGNKRLRTILHLMVSSLIKTNREPNAIKDKYQKKTHQLNPLKPKVASMACANQLVRIIFYMHKASSTYIYQKCK

SEQ ID NO: 109658 - protein, 340 aa, unidentified
MRYIGIDVHKSISTYCVLNDAGKIELERDGVPTTAEGFQELMEYAAPRGCRILIENSTRSHFVYHLFAEAGYDIIAAHAVDLAAIAKSKVKNDRIDAYRLAQYLMRRDRGEVQFSVSNITSRENMRRRALCRLCADMVRMKTDMVRRAREYMSLHDVRLPPHYASIDSKRSLRALYARNDPVLTHMLAFVEMMNQRIESLEEDIVKEFGEDDDVRLLVSIPGMGVKTAATTVAAVDGIERFDSAQKLVSYLGVDPVSRESAGKRRPGRISKDGDPLVRYMLNNVVMNHVRHCPQSAVTAFFHRLRARMDHRRAVTATVRKIVCVIWALLTRREPFRAMSC

SEQ ID NO: 109659 - protein, 380 aa, unidentified
MSPVTTHAREFTSTTPVLHLAFELADLRWKLAFTPGLGQRPRVRTVPARDLGAVRQEITRALARFDLPATTPVVSCYEAGRDGFWLHRALTAMGIANQIVDSASIEINRRLRRAKADRLDAEKLVLMLGRATQGDPRVWRVVRVPSEADEAARQLSRELDAVTHDRTQVLNRMHGLLTTEGVHLALTGDVPAALPALRRWDGTPLPAELLERLARDWRQVEALTARRAALQAQRRRDVTTGTTPAHAQMRQLAQLSAVGMATATVLVREFFGWRAFRNRRQVGGCAGLTATPFQTGGTHHEQGISKAGNRRVRTVMIELAWGWLRYQPQSELSAWYQAYVGTGGPRHRRVGIVALARKLLIALWRYLETGTVPAGARLKA

SEQ ID NO: 109660 - protein, 368 aa, unidentified
MKKNNTRTQNPRGRKTVPQSITMGIDLGDKTSRWCALIDGEVREGTVATNRKAIVALFGELPRCRVAIEVGAHSRWVDRLFRDLGHEVYVANARQVKLITESSRKDDRLDAQTLARLARADPQLLRPVRHRSDEAQQVLTVIRVRAALVEVRTALVNSARGLAKSFGERLPKCDADQMSPERARALPERLRETLRPLLEQVAALTASIKDSDRNIEQIARTEYPETELLMQVSGVGNLIALTFLLTLEDHARFAHSRDVGCYVGLRPQRSESGARQPQLGITKEGDVYLRKMLVQSAHWILSRRGPDTDLKRWGLKLAERGGKNAKKRALVAVARKLGILLHRLWVTAEVYDPLRNSRAREMQRAAAA

SEQ ID NO: 109661 - protein, 404 aa, unidentified
MNAVGIDVSKGKSTVAVLRPYGEVVVSPFDVAHTGSDLRALADLIKKLPGETKVVMEATGNYFESIARYLHEQNIFVSVVNPVLISDFGGNTLRKPKTDKKDSVKIASYALTYWLDLKEYTPQEDLRKSLKLMNRQYQQSIKLKTMMNNNLISLLDLTFPGINKLFTSPSRESDGHEKWVDFVLEFSHCDMISKLTIKAFAKKYKKWSDKNSYHFTESSCKKIYAFAKDCVSSVSSDKAIVFSVVQAAKMLISATENCHAIQSEMNRVASKLPEYDTVMNMYGVGKAVGPQLMAEIGDSRRFHSRKAITAYFGYDSENNDSGQKTTRSNPMTKKGSGALRRTLFIIMQVLLQTKPQDNPVYDFLIKKKSEGKHYYSYINAAANKFLRIYYARVKEVLNVSEQMT

SEQ ID NO: 109662 - protein, 403 aa, unidentified
MEAIYKRCCGLDVHKKSITACIITPEGQETRTFSTMTKGLLELADWLAKHQITHVAMESTGVYWKPVYNLLEDEFTTMVVNAQHIKAVPGRKTDVKDAEWIAELLRHGLIKASFIPDRWQREMRELTRYRRSIIQERSREVNRIQKVLEGANIKLSSVATDVMGVSARAMLEAMVSGVEDPEELAQMAKGRMRTKLPQLEEALQGLMGAHQRMMLQTQLSHLDFLDQAIAQLDEEIANRMLPFEQPIRQIDEVPGINRRTVEDVLAEIGMDMSRFPTNRHISSWAKICPGNNQSAGKRRNGRTGHANKWLRTALVQGAQSASHTKNTYLSAQYHRIASRRGKNKAKVAVAHSILVIIYHILRDGVSFKELGGNYFDKLRSSDVIRSSVRRIEKLGYKVVLEPA

SEQ ID NO: 109663 - protein, 402 aa, unidentified
MNAVGIDVSKSKSVVAIMRPFGEIVSTPFEIKHTASDIHSLIELINSVEGESRIVMEHTGRYYEVLAHQLSEANLFVSAINPKLIKDFDNDSLRKVKSDKADAVKIARYALDKWQNLKQYNVMNELRNQLKTMNRQFGFYMKHKTAMKNNLIGILDQTYPGVNTYFDSPARSDGSQKWVDFASTYWHVDCVRKMSLNAFIDHYQNWCKRKKYNFSQSKAEEIYGKAKELVPVLPKDAITKLIIKQAVDQLNSASTTVESLRTLMNETASKLPEYPVVMAMKGVGTSLGPQLMAEIGNVSRFTHKSAITAFAGVDPGVNESGTYEQKSVPTSKRGSADLRKTLFQVMDVLIKTHPQDDPVYQFLDKKRAQGKPYYVYMTAGANKFLRIYYGRVKEYLSSLPES

SEQ ID NO: 109664 - protein, 408 aa, unidentified
MLFVGDDWAEDHHDVELMDASGRTLAKARLPEGVAGIARLHAMIGERLGEGAEDTAGLVKIGIETDRGPWVQALIAAGYTVFAVNPLQAARYRERLGVSGAKSDAADAHMLADMVRTDAHQLRPVAGDTAGAEAVKVVTRAHKTLIWERTRAGQRLRHALREYFPAALEAFEDLDAADALELLAKAPDPASAARLSTAQISAALKRARRRDIAVKTAKIQAVLRGEHLGQPAVVASADAVSVRALVAVLGTLNEQVKILQEQVEAHFGRHPDAEIILSQPGLGAILGARVLAEFGDEHDRYASAKARKNYAGTSPITRASGKKKVVAARFVHNDRLIDALMTQAFASLRVSPGARAYYDRQRARGADDNAALRQLANRLVGILHGCLKTDTPYSEATAWSHHLTESAA

SEQ ID NO: 109665 - protein, 416 aa, unidentified
MNAAGIDVSSRKSTVAVLRPLGEVVCLPFDVTHDIAGLASLVEKLKALDGETRVVMEHTGRYYEAVEKALHEAGIFVCAVNPLLIKEYGANSLRRVKTDKADAVKIARYALDNWADLRDFTPMDAIRYDLKTLNRQFQLASKQRTASANNLIALLEQSFPGIRKCFDSPVRSDGTQKWVDFAHSFWHVDCVRKQPFPAFCERYRKWCKRHAYFFKLSNAEEVYALAKRAVVLTPKSKVVKVLVQEAANQLISISRSVEVYRAEMDRLAAMLPEYPVVMAMYGVGKSYGPQLMAEIGDVRRFERKQALVAFAGIDPMPNQSGDKNVRSNKSSKRGSPYLRKTLFNVIRTYLQCAPQDEPVFQFLNRKRAEGKPFYVYMLAAANKFLRRYYAKLRDYFASLDTLQSVDPIPTTLKASL

SEQ ID NO: 109666 - protein, 342 aa, unidentified
MDHYAGIDVSLERSSVCVVDATGRIIRETKVASEPEALVRFFRELGLPLTRVGLEAGPLSQWLHAGLTGAGLEAVLLETRHVKAALSAMIVKTDRKDARGIAQLLRMGWYRPVHRKSPDAQEARALLAGRKLLQAKLRDVELSIRGILRGFGLKVGEVSKGRFAARIGELIAGHEMLEAVTGAMLRAREGLRAEFVRLHRRMLAIVRGDAVCRRLMTVPGVGALVALTFKTAVDDPERFRRAKAVGAHFGLTPKRYQSGETDVSGGISKVGDASVRTALYEAANAMLTRVSGISALKRWAMGVAKRRGMKRAKVALARKLAGVLHRMWANGADFRWGEEAVA

SEQ ID NO: 109667 - protein, 345 aa, unidentified
MTMLADGVVFVVGVDTHKQTHTAALVDHLGGVAETFEFSADPAGYREVLCRMAAHGGTRMWGVEGTGSYGAGLTGFLQDAGERVVEVERPGRPPRRNGAKSDAIDAIRAARQVLTSKHQIEPRRRGEREAVRVLLATRNGAVVARTKALNHLQALVVTAPTRLRSRLDALTTTQLTRQAALLRISSDRPIEDQATVRAMRACARRALACGQEADELETELGRILTDQVPHLLAEPGVGPISAAAIYLAWSHHGRIRNDAAFAALAGVAPIPASSGQTTRHRLNRGGDRQLNRALHTITLSRLSCHPETKAYATRRLAEGKTSREIRRCLKRHIARRIYKLLEHTP

SEQ ID NO: 109668 - protein, 366 aa, unidentified
MASIALGRSDVIVGVDTHKDQHVAVAIDGHGGLIGDPKVIDANNEGYAQLLEWAQSLGDLHVFAVEGCGSYGIGLARFLRRHGHPPVEVARPPRAGERRRSGKSDTIDAEHAARTALANAGGTVTPKLADGQVEAIRLVKIARDTAVKAHTTAIITLKAVLVTADQALRDELEPLSDHKLVVTCSNLDCTDDLADPQTAMRHTLAALAHRWLDLHEEIKVHSRHLKDLTRAAAPQLVDAFGVGLDIAAQMLITAGDNSDRVRSEAAFAKMCGVAPVPTGSGKTSGRHRLNRGGNRQANAALYRAVIVRMRLACTHHRLRRTTHPRRTLQEGHHPLPQALPRPRALPPPPRRQLHRPGTRARRLDRT

SEQ ID NO: 109669 - protein, 352 aa, unidentified
MDRYIGLDGHSQSCTLRVITATGKDVGRQVVETNGAAVVQAVRAIPGSKHLCLEEGAQSGWLYELLRNEVDEIVVTVPSRRTGWKDDARDALELAEGLRTGAIKRRVYKTCGPYSELRAAVRNYMILTRDVVRAKNRLKALYISRAIRSPGDEAYQTDKHEHWERKLPPPQRESARVLYQQLECLMTLRSGAEGRLLEASKAHKIVKVLSTAPAIGPIRAAQIVATVVTPHRFRTCRQFWAYCGLAVVTRSSSDWVPGAQGWVRSKIYQTRGLNRNRQPILKAVFKGAAHLIATRMAAHPLHESFKRLVDGGMKPAVAEVTLARRLAAAVLAMWKHQEVYDPAKHRSNIAHA

SEQ ID NO: 109670 - protein, 371 aa, unidentified
MSDHSEAFVAFDTSKLRHAVAIAEAGRTGEVRFLGEIETTEAATVKLVRKLAAKYRRLTFCYEAGPTGYGLHRLIESLGHDCIVVAPSLIPKKAGDRVKTNRRDALDLARQLRAGELTAVWVPDQRHEAMRDLTRAREAAVEDLQSKRRQVLSLLLRLGRYYPGKRTWTQTHMNWLASQKLDHAEQRIAFEEMLLAVRQAQERIARLEQAIRTAVPDWSLAQVVTALMALRGLDFVSASAFLAEIGDLTRFQTPRELMGYLGLVPSEHSTGDRVKRSGITKAGNRRARRILVECSWSYRHPPRVGAEKLVKVAAAPRAVQEIAWKAQSRLCARYRALARRGKRPTVVVTAIARELSGFIWAVNRAVAATAS

SEQ ID NO: 109671 - protein, 334 aa, unidentified
MGKITTVGIDLAKNVFSVHAIDDAGGVVLRRVLTRAQLPAAVAQWPACVIGIEACSGAHDWARRFQQFGHTVRIMAPRFVSPYRKSGKNDGNDAEAICEAVQRPNMRFVPVKSVDQQAVLALHRVRHGFVEERTATINRVRGLLAEFGVVLAHDARHVRHAATAAAETLPILARHCVEDLRDHLRVLDERIAQYDKELEHLARSDEAVRRLMGIAGVGTLTASATVASVGPAREFANGRQFAAWLGLTPKQWSTGGKSRLGHITKRGDPYLRNLLVMGARAVLQMATRRDDKMSRWALALKERRGYHRAAVAIAAKNARIMWALLAREATFKAA

SEQ ID NO: 109672 - protein, 385 aa, unidentified
MQKLNDLSQSHIVLQQDSTLIAVIEMSLSSWLVAGIVPGVERQPLKKLVVDESVLLKLLHRWREEAEKAGRRIERIAVAFEAGRDGFWLARWLRARGIEAHVIHASSVAVSREHRRAKTDRLDTELLKRVFLGWLRAERDHCKMVTIPTIQDEDAKRPNRERESLVGEQTRIVNRMKAALIRLGIRGFNPKLKKAAARLEDLRTPEDEPIPPNTLAELRRDMERRRLISDQIRQIEDARLERMERMPNDGPHAMVRLLARVIGVGIETADMLVREVLSRTMRDRRAVARYAGLTGAPDESGAKRREKGLARSGNARVRRGMIQLAWRFLMFQKDSALAQWFQARTENARGTRKTMIVALARKLLIALWRLVTTGEVPAGVVLRAA

SEQ ID NO: 109673 - protein, 415 aa, unidentified
MKVVFPTCCGVDVHKTFVVATIITTPADSLQPHYQKKRFSTFNSDSNRFADWLLEHDCLDVCMESTGKYWVPVFNILEKRGIRVVIANPKWVKAVKGNKDDTKDSKWIGDLFRIGLVKSSFIPDLDIRILREFTRYRYKLVSMKSSEKNRFQNAFTVCNVALDSVVSDMFGKSATAITDYLTSDESFDPEHCVSLLQRSLKKKATQVLESIEGFSIAVEQKARIKMIREHYDFIEKMIAKVDTRVNEMVAKDEGEINLLCTIPGIGRNSAITIISEIGTDMRQFGSSKRLCCWAGLTPGNNEPAGKKKSVRICRAGVYLKPALVQVAHAAVKDKANPYYALKYERIAKRRGKKRAVIAIARMILTAIYSMLCTGEVWNPVDLHKIDMPDHLKELLLANAIKQATRFLEKQGLTVA

SEQ ID NO: 109674 - protein, 407 aa, unidentified
MNAVGIDVSKGKSMVSVLRPFGEMVISPFEVKHNQNELNELVKCLKSLNGETKVIMECTANYHLPISYHLQKSGFIVCAVHAKLIHNFDNNSIRKVKTDKADSLKIANYGLSRWLQLSEYVPNENTRHMLKAYSHQYNKYIKLRTSLKNNLISLLDQTFPNANEIFTSPPRSDNGHEKWIDLVGNYWHFQCVSLVSLNEFSERYRKWCKRFGYYFQQSKVESIYSEAMGHIGIMPKNNVTKLLIRQAVAQINSICENLAVIKREMIRLAQTLPEYSAVITFNGVGELLASQLMAEIGDIYRFHTKKSLVSFAGLDAPPYASGKFVSSKRHISKKGSPHLRKSLFQVMDGILKRSPEGDPIYQFIDRKRAEGKPYLLYMTAGSAKFLRIYYARVKELLDTHCSKHNLP

SEQ ID NO: 109675 - protein, 314 aa, unidentified
MAFVGIDVAKAELVITSRPTLARWTVPNTAIGIAALLPQLREVAPELIVLEATGGYERDVVAALLTAELPAVVVNPRQVRAFAKATGQLAKTDRIDADVLALFAERVRPVWRPLEDEATTDLAAVLLRRRQLSDMLTAEKNRLGLARKPVRASLKKHISYLERELRITESELRELIEASPSWRVNDDLLQSVPAVGTVTSQTLLADLPEIGRLGHKQISALVGVAPMADDSGGSRGKRTIQGGRARVRQVLYMATLVAVRHNRVIREFYERLVAAGKPKKVALVACMRKLLTILNAMVRDQKPWSSSAPLPTRS

SEQ ID NO: 109676 - protein, 428 aa, unidentified
MSERDYNRQTAKRQRISKTTLIVGVDVGKAFNAVGFMNKDGNVLGSCSKLYNNREGFEQFVKMIEGLKARHRLRDVLIGMEPTGHYWRKLAYFAKEHGYEVRFVRTTALKHHRELDESSSAKSDQRDALTIANITREGKYIDTVIEDGTLRQLRTLSKARERLLRYSVSAKNSLHAALDDYFPELHEIFWSMGSRSLWVILDQCPFPEDVVSMKVSTLQELIARSSRKRAGSARKAKALYEAAQKSIGVKQIGSADLYRLRMCLEEVKRTVLTLKDMDRQLKCMVKDIPSASYLMSIPGIGHLSAAVFLGELGDPAHFHNARQIVKYAGYDPQESDSGSWVGRKFISKKGRWLLRKYLFFMSMRVVVLSKYFQEYYHRKLETKNRVGQQPRRKEILCAVAIKLIKVIFALLRDKRSFEDIASAAVVIA

SEQ ID NO: 109677 - protein, 394 aa, unidentified
MRQQYKTEASMIKHNILFIGLDTHKTFTEVAYIEDQRGAKSIHLGKILSNKAAFKKLARQLQSKYPDATLHFVYEAGPCGYWIYRLLTSLNHCCYVIAPSLIPKKPGEKIKTDKRDALKLAKLLKSEDLTPIYVPEPEDEAVRDLSRARETGMKDLKDAKYQLKALLLRNNITSKVKDNWSLQHLRWLAELVLPHPCQQIVLQEAVSTITERLKRLKRLDNELTHQVKNWRYYPVVKAVQAMRGVRLLVATGVIAELGDLTRFDHPRKLMSYLGLVPSEHSSGGKRHLGAITKCGNSRARRLLVEGAHSYKHNANISKEMQLRQEGLSKEVIDMAWQAQLRLCRRYSRLMHKGKHRNVVVTAIAREMIAYIWAISREVVLPVVDVKLRLSRVPA

SEQ ID NO: 109678 - protein, 367 aa, unidentified
MKNTIVHHEGAASLKVALNKIKLSGSIIKIGLDVHARIYVAVAQYDQLLPKPARRLTPSEFVPWVEQLLRAGHTVHVVYEACGFGFGLYRELKALGVHCYVIAPRKLDEQFTRVKTDPRDATTLCQRLSRYLEGNTRELAVIRVPSEAEEQARHVSRQREQLVRHRQKLEAQGRSLLINHALPAPAHWWKNQTWSRLTKLLPAWICLRLEVHRPALLILEQQISALSVELEAAAPALVPTGMGKLTTVVMTREICSWERFSNRRAISSYTGLCPGEYSSGTKRIPGSVTKHGNPRLRAALVECAWRMVRFQPQYPPVKKRLVILAKGSRATGGQRKKAIVAVARHLAVDLWRVHTGRNTAAQLGLTI

SEQ ID NO: 109679 - protein, 336 aa, unidentified
MKKISFFIGVDISKSTLDVAIIDQNSPNAALHSVFPNTKTGITSLLCWVKKHTSKDKSDFIFCMEHTGVYGLTLCSTLSEKNILYSLVPALEIQRSIGMQRGKNDKADSKAIAKYAYIRRDDIRITTMPHKAILKLRYILSQRDRVVKAKVMFENSKEVERFCDLNASNVLQKENKVIISFLKKRIEHFDKLVEKIIMEEPLMANQYKLITSIPGIGLQIAANIIAYTQAFHLFDCPRKFACYSGVAPFPYQSGSSIKGRTRVSHLANKKMKSILSLGALLAIRNDMEMRLYYQRKVDQGKNKMLVLNAVRNKLLHRIFAVVKRETPYVKLAQHIA

SEQ ID NO: 109680 - protein, 346 aa, unidentified
MLYAGLDLSRKRLDVCLLDEQGARVAVTAAPPDADGLRGLAERLAGHGEPLYAALESMNGARFVRDELAQLGWEVALADAQKVKGLAPLAAKTDRIDAYVLAELARRDLVPAIWLPSPAVRAERARARFRLHLVRHRAALKARIHASLIAHGHPCPVADLFGTRGRALLDSFALPEAWRASTAASLRLIEHLDDEIGACEAELRRLGADHRYVPLLMSAPGIAWVLAYTIASEIGEIERFATPKKLVGYTGLCPRVYQSGACDRRGPLAKNGPEYLRWALIEAAMHAARHPAYAAHYEATKRRLGRQRGAKVARVEVARKLAEAIWYMLTRSETFAPAGPTAALVA

SEQ ID NO: 109681 - protein, 345 aa, unidentified
MKNTTVGVDLAKNVIQVCVCKNTKVVSNTELTHHEFLEWLFNTQSTTIVFEACSNSNYWKQKALEAGHSAHLISAKLVSTVRQNQKTDKNDALAIVQASFLPDINLIKGKTVEQQQLQVVMRLRELAVKQKTASSNQLKALLLEFNIRVSTRNGGLGGAIKSVLEDAENGFSMAFRQALDTAWSHHLSIVKSISTYDICLEQSVEQNTDCKRLLKLEGVGTINAINLYLALGCADLGTFKKGKDAAACIGLTPIQYSSGGKTKQGNIGKHVKNSLLRSQLITGAMSVVFRVTKRDAVTKKDAWIQALAERRGKKCAAVALANKTVRTAFAMLAQDNEYKAELLTA

SEQ ID NO: 109682 - protein, 398 aa, unidentified
MTERPYSVFVGLDVGKGEHHACALDRDGARLHDKLLPQDETRIRELLARLSEHGPVLVVVDQPASIGALAVAVARHAGIDVGYLPGLAMRRIADLHPGQAKTDARDAYIIAEAARSMPHALRRVDVGEEALADLEVIVGFDDDLAGEVTRLANRIRGLLTQVHPALERVLGPIVQRPVTLDLLVRFGGPEGLRAAGRRRLLAVAKPRAPRSYERLVDQVQAALTEQTVTVPGTRAAELVLPQLASTLAGLLAQRDGAAAQIETILDAHPLSQVLTSMPGVGVRTAARILIDVGDGSAFPTSGHLAAYAGLAPVTRRSGSSIRGEHPARSGNKRLKRAMFLSAFAALHDPDSRTYYARKRAQGKKHNAALICLARRRVDVLHAMLRNGTLYQAKTPTAA

SEQ ID NO: 109683 - protein, 429 aa, unidentified
MDFTQNERLAQITEKTIIIGIDVAKHKHVARAIDDRGRDLAKRLVFQNDFTGFKQLLDWSQDLLDETNRNDLILGMEPTGHYWLNLAYYLKALGLHTVVVNPMKVKRTKELDDDSPTKNDTKDAKVIAQVIRAGRYHEPILLEGIYAELREGIKLHDMMQEDLASIKAQVHNALDRYFPEFLTVFKDWTGKAALHFLKKGYLPEDIQSSSEEELMAEVKQAAKRGVGIKRIQELKRAAETSVGLTVGLTMARQEIRYLIDQYQAIQERIQAHEALLEDLVLHVPGASQMMGIKGVSSITVAGFFAEVGDLSNYRDPRQIIKLAGLNLKLNESGLFKGQTTITKRGRKRLRSLLYQVARPLSIHNEGFKQLHYYYKNRPNNPLTGKQSFVALSRKLIKILFVIGTRDCAFDETRMMRDIPQLKNLQEAAA

SEQ ID NO: 109684 - protein, 337 aa, unidentified
MLIIGCDFHAGFQQIAIFDNRTGEYEERRMGHRVEAEEFYRSLRGQEVRVGMEACGQYPWFERLLAECGHELWLGDAARIRACEVRQQKTDRRDAVLLLRLLREERFPRIWVPTLEERDVRQLLVHRHKQVAARTRVKNQLQALAQSQGLQQKRKLWSAAGRTELLKLELLPYAAVRRERLLAMLDTLEAEIGALNRQVEEEVKRRPEAMKLMTHPGVGPITALAMVLTLGPVERFGSARQVASYFGLIPSEHSSGGRQQLGRITKQGSSFLRFLLVEAGQTAVQGDAELGRFYRRLAMRRHRALAKVAVARKLAMRLYWMLREDWTYAQLCKAVCR

SEQ ID NO: 109685 - protein, 346 aa, unidentified
MEHYVGLDISLKLTAICIVDRTGKIQREGVVPSDPEAIAAFIESHSSNVARVGLEAGATSTWLWTELNKLGLPVICIDARHAKAVLKMQINKSDRNDAVGIARIMQCGWYKEVRVKDLDSHAVKALLVSRALLVKIKRDLENQIRGLLKNLGLVIGRAKMNVFAARAAELIQDRPELTAAVIPLLKTREVIERQIADLDRKVLRLARNNAQVRRFMTVPGVGPITALCYLATIDDPTRFKKSRSVGAYAGLTTRRYRSGEIDWTGRISKCGDAMLRTYLYEAANVLLTRIAKWSALKSWGIRIAKRSSLRKAKVAVARKLAVILHRMWVDGTEFNWSSKEVAAHAA

SEQ ID NO: 109686 - protein, 349 aa, unidentified
MDVMHERCAGLDVHKATVVACVRTVMGGKVNRECRTFDTTTAGLPALLAWLTESGCTHVAMEATGVYWKPVWNILSDGDFELMLANAAPIKNVPGRKTDVNDAMWIADLTACGLIKASFVPGEATWELRSLLRARKQQTREQTRDIQRIQKTLEEANIKLDSVISDILGLSGRRMIKAMIAGVTDPSKLADLADRRIKATREELRDALHGRLTDHHRFLLGIYLKQYDALDALIMEIDRRVDASVARLDEETKAQAGQCPFRSLIELLCTIPGVSTLGAMIILSEIGRDMSRFPTAGHLVAWAGLCPGQNESAGKRRSSRLRKGAPWLKTLLVQCAWSASKKKDSYYKA

SEQ ID NO: 109687 - protein, 459 aa, unidentified
MKKKKIKQTKGMEEARPFEGLSKVNQNAAGVDIGATEIMVCVSGGEAIQLVKAFGNYTVDLRAICEWFRKHEVKTVAMESTGVYWIPLFEELERQGFECLLISSRSLRKVAGQKTDVADAQWIQTLHSYGLLKGSFRPQGDLVALRTLLRHRAQLVEHRAPHIQHMQKALLQMNIQLSQAVTDVMGMTGQMIIRAIVAGLRDPEALASFRDPGCKHSEEEIAKALTGTWREEHLYVLKQSLELYDFYTEKIEACDEEISRQYGMIRPDWGSGELPVVPNKKLHTHSKNAPKDAREIREHLYRINRVDLSLVDGFGISLAQIVTMEVGSNIGEKFPTEKHFSSWLGVAPKHDITGGKVLSNHTLKTKNRAGQAFRMAAQSVKKADCPFGVLYRRLRSRLGPAQATVATAHAIARVVYKMLKYKVEYDPLSVNEYQAKYEEQQVKYMKKRAAKFGYQLIPA

SEQ ID NO: 109688 - protein, 342 aa, unidentified
MKRYDGVDLHKNNFQVCYLGKKEEKQSTYRVSQEGIKKFKLDLKKTDKVGIEATGNARYLAGEIAEAVKRVVIINPWQFKVISQSVKKTDSEDAKTIAKYLSKDLVPEVRMRSKRDQQISSLITTRDKLVKLRTTLKNKIHGILSMNGYVTKKEMFSSAKSLKRIADLDLDEAYKFELQVISEQIESLNKSIEKITEELTRRGKGLKGYRNLKSITGIGDISATIMLNTIGEVKDFDNEDKLSAYFGIVPRVSNSNETIRHGRITKMGNKIARTALVQSTLIAIRYNPYLRAFYDRLKAKKGSGKAIIATSRKLLAIIYRALKYDLVYEDFNRYQLEVTQIK

SEQ ID NO: 109689 - protein, 384 aa, unidentified
MQTVADRPEAATAIRTDLGAIFVSLELSRSTWLITSLSPDGGEKMSKHVVRGGEVAGLLERFVQLREKARARTGKVFPFVVIQEAGLDGFWIDRALQNEGIESHVVDPASIATSRRRRRAKTDRIDGEALVRALLAYKRGEPRVCAMVKPPTPEEEDRRRLCRERKVLIAERVRHVNRVKGLLFSQGISGYEPLRRDRRERLVTLQTGDGRLLPDHLKAQVRRELDRLELLLEQIKAVEAERDVLLAAQQAPAAMLLDIKGIGPEFAAILWSEGLFRHFDNRRQVASYAGLAPTPWQSGSVDREQGVSKAGNPRLRTTLIQLAWLWLRHQPQSALALWFEERVRRNGGRLKKTTIVALARKLLVALWKYVTAGVVIEGAVMKAA

SEQ ID NO: 109690 - protein, 371 aa, unidentified
MAESSRTIYVGLDVHKDSIAVAYAPEDRGAEVVALGTSGTRQCDIDKLIRKLESKGATLVFVYEAGPCGYWLYRYLTRHGLSCHVVAPSLIPRKPGDRVKTDRRDAITLARLMRSGDLSSIYVPEIADEAIRDLSRGREDAMRDLKATKYRLKAFLLRQDIRYAGRASWNAAHLRWLSEVVCATRAQQIVFQEYVRAITEQHERLQRLETELHEEVKHWRLYPVVEAVQALRGVELTGAVILIAELGDLTRFDTPRKLMSYLGLTPSEYSSGDRRRQAGITKAGNTHARRALVEGAWAYRYPAKVSRHLQRRLEKLPAEIQAIGWKAQVRLCRRYRQLIARGKHVNQVVVAITREMAAFAWAIARVVPRPS

SEQ ID NO: 109691 - protein, 426 aa, unidentified
MQYALPLVLPGVPAGGVCAGIDWATADHVACVVDMTGRVTDRFSAAHDKAGIAALITRLRRSKVTEVAIERGDGPLVDALLTAGLTVVVITSRQVKNLRSRFGAAGAKDDRFDAFVLADTLRTDRARLRPLVPDTPATISLRMAVRARRDLVRHRVAVCNQLRAHLAVAFPAGITLFHDLDSPISLAFLARFGSQDAAAGLDEQAIGAWLATIAVRGRPAPASVLHARLHAAPPGATGTDGAAQAGVTAALTATLTALSAQIKALATQIAGQLAAHPDGHIFTSLPRPGTVRAARLLAEIGDCRSRLPDAESLAGLAGVAPVTRRSGTRIAHGFRWAVNRQLRDAICDFAADSRHASPWAAAIYDDARARGKDHPLAVRITARAWTYVIWRCWHDGTAYDPAKHNALQAVLARHAAQTAGTRQQDQ

SEQ ID NO: 109692 - protein, 472 aa, unidentified
MRYIGLDLAQTTSHKAVVIDAGGQVITPVLSVKTSAISLAQLFERAREGAPADEPLIVVMEPTGMAWFPIAVFCQRQGVKVYLVNSQQVADLRRFYRKHAKSDRIDARVLARLPIVNPEKLHALQLIGARQMACQRGCKELDRLTNLMVAIQNRLRAIDRFAWPGLEQVLSENIAPLARWFRENWYDPGAVLAAGAAGLLADWQNNGPKSAEMPESDEWATALVQLADEVVALYGLEAAFLDYGYLQAEVSREQALLATLENEYQQLQLGTVRPLYRQLHPSRNLETLYGVGQDGAAVYFSFVGDPERFPDHASFRGWSGMIPRSSQSGGSEAKGLSISQAGPGLVKKFSFLGAETARQWDPQIAAIYYDQVANRGKHHTQAICTCATHLLDRIWTILKEDRAYELRDVDGTPVTTEQARQIIATRYTVPKEVRQRNNQRTRRARQEQLAEKNQKRESHPDWVRGESETPSR

SEQ ID NO: 109693 - protein, 411 aa, unidentified
MLEVKAERCAGIDVGKKFLAVCVMIGPANQKPVMEVRRFGTNVKDLERLRTWLQETGCTEAVMESTGSYWKPVFNILEGSLKIILANPEQVKALRGKKTDPNDSRWLASLLRHGLVQGSFIPPRDIRELRDLTRRRRVLLSEGAAERNRVQKVMEDANVKLGNVLSDVFGTSGQAMLEALLENTLTPAEIAELAQSRLRPKIPQIVETLEGHRMTDHHRLLIKQSLHHMEYIEKMIGELDNEIGKRFQPYQKEIELACTVPGIGRIAAASILAETGMDMSPAGPFPDCHHLASWSAICPGNNESAGKRKSGRTRNGNRWLRATLTQTAWAGAAKKDSTFQRRYQKLKLRRGGQRAVTAVAHAQLIALYWALRNGTPYQEQRQQIEQDRREALVQYHLRQLTKLGHEIERAS

SEQ ID NO: 109694 - protein, 455 aa, unidentified
MYLPDWKWIPIRKELLLMSNKVIFNLDDLFISVGIDVGADFSWMSIALPNQQFVGKPYKILHNSIDSLTTAVSKIKEAEELYSLESRIFLESTGIYHYPLFCYLRDKGFNCSVINPIITKNSTNINIRKVHNDRFDSKKAALVGLKPDLKVSLMPSDLALNCRNLCREYYDLMDNRSAYVNKLQGELRIAFPQYLGIFSKVTINTSLTLLETYTSPSAFLKADKQEIIDIIKSTARFGLTYAQNKYNAIIQAATDANQFGYIIDSNIKRIRLYISFIRKYDEEINSILESLHELVDANEDADFVKQIHLIETFKGAGFLSAVSIMGEIGDFSAFSKPKQLFAYFGLDPSVKQSGKFEGTKVQMSKRGSAIARRVIHTLTLQSISISRNGEAKNPVLREYYLKKCDSKPKLVAMGAVSHKVCNMIFAILRDNKPFKIIAPQEHIKQYNSAKCDIAA

SEQ ID NO: 109695 - protein, 327 aa, unidentified
MSLFVGLDLHKKYSEFAVMDIFGNVLRQGRVENTLEKMKEFSESVPERSSMVIESSSTWYWAHKLLSERHNVTLSNPVKNKAIASAKVKTDKTDSITLANLLRGGWAAECYVPSKETMEFRELVRFRANLVRQRTRMKNRIHAYLLMNNISIDAGPFTKGFVEKVRGIEDARVQSYLRLIDGLNKEIREASRTIRQKAGSNEDASLLMTIPGISYYSALLIISEIAEIERFEDSSSLVGYSGLAPSTHSSGGKTYHGPIMKTGSRYLRWIMGQCTRAHMRVEPEGTVANFYVRIARRKGDQKAIVAASAKLLKIVFWVLKERRAYHS

SEQ ID NO: 109696 - protein, 394 aa, unidentified
MKLVGIDVGKNSHHFCVMDKETGEFNVAPSSFSNNKEGFDFLINSLKPYSKKSILIGMEDTGHYHVALLKFLLSNGYTVALINPKTTDLTCKMEGGITKNDKLDTITICDVLDTPERKKQYRITKVDRFDLYEQRQLTRHHHNLKEELNVYCNRLQKSIDLVFPEFNTLFSSKYSIVYMNLLKTFGSAEAIASTDIRTIRKCFEIKGRGNRISLTPEKLKECAKNSIGISSEVETIQIKHLVSQITLIKEQIAEIDKKIEEFSITNNSPILSIPGISHFSGTSILAELGDIGNYSKPSQIIKFAGVAPYHYESSQYNAQHTGITKKGSKYLRKTLYQIILTVINNNPVFKKYYRLKISQGKGHRCAQGHCIRKLLRIIYHLLETGQSFDPALLR

SEQ ID NO: 109697 - protein, 357 aa, unidentified
MKIVGCDLHARQQTIAMVDTETGEFVERTLSHEGNALREFYAALEGPVVVGIEATGSMQWFLELLQELGIQCRVGHPAKIRAKETRKQKHDRRDARLILELLIEDRFPEIWMPSIEERDLRTLLRDRHQWVKMRARLQHTLQAIALNHALRRGHALWSQAGQSTLQALPLPPYTSQRRTELLSLYEQLQQRIQELDKEVEAQARQRLQARRLLTHPGVGAVTALATDVFLGDPSRFDTANQVASYIGMIPCEHTSGKRQRLGKLTKQGNSLLRYLWTEAGMHAVRKDPELQRFYRRKLIQKGMGKARIAAARKLGIRLWIMMRDQIDYEQFCRRGRLRQKGKAHAGMPDFNSGPAMQ

SEQ ID NO: 109698 - protein, 338 aa, unidentified
MKLYGAIDLHSNNNVTVLIDEQDQVVYQKRLPNDLPVIVQQLSGYQASLQGIVVESTYNWYWLVDGLMDQGHKVHLANTAAIQQYEGLKYTDDDSDARWLAHILRLGVLPQGYIYPKEERAVRDLLRKRSQMVHQRTANLLSIQNLLTRNTGSSISANRIKALDVQEVDELLPNGDLALALKANLSVMSSADEQTQILERTVRDRVKLRPEFTFLKTVPGIGQILALTIMLETGDIRRFPSVGNFASYCRCVGSQKISNGKRKGSGNTKNGNKYLAWAFVEAANFAVRYQPKIRSFYQRKKAKTHGVLAIKAVAHKLCRACYYIIKDRVPFDIAKAFG

SEQ ID NO: 109699 - protein, 343 aa, unidentified
MQIVRIGLDLAKYVFEVHGVDQHGKIAVRKRLRRDAVSRFFANLAPCLVGMEASNGAHFWARVLTGLGHEVRLISPQFVTPYVKSNKNDRNDAEAICEAVGRPTMRFVPPKSADQLAVQAVHRIRRRLVTDRVKLANQIRGLLSEHGVVIARDITRLRRSLAVIVGSSDDGLSDLVRALISELQVELTELDRRIASYDRRIRDLFRNSDVCQRLGKIEGIGPVTATALIVAVGDPKCFKNGRQFAAWLGLVPKQRSSGGRARLSGISKRGDRYLRTLLIHGARAALVRAGGKQDPRSLWLSKLRERRHPNVAAVALANKNARIVWAMLSRDKSYEPALSMKVA

SEQ ID NO: 109700 - protein, 402 aa, unidentified
MPFFVGIDWASQAHAVCVIDETARIHWQGAVAHTAEGLTELLGRLRRLRHRGGLRVALERPSGLLVDTLDAAGLEVVPIRPNALKASRPRYSAAGGKTDPGDAFILADLLRTDGHRFRCLHAPSDETRALRALVRGRDDLVAQRVVLANQLRALLDRFWPGAVAIFADVDSPIALAFVTRYPTPHSAGRLGEKRLAQFLGQHAYCGHRPVAELLARLRRAPASLVGDAEAEASGDLVRALVAVLGPLVAHIQQLTAAIAATLAQHPDGPLLQSLPRSGAVNAAQILAELVDDRARFPTDEQLAAEGGLAPVTHTSGKHHAVVFRWACNKRLRQALTTFADNSRHASRWAALVYQRARGRGCRHPHAIRILARAWVRILWRCWQDRTPYDITRHRAAQTLAAA

SEQ ID NO: 109701 - protein, 326 aa, unidentified
MEHELHYIGIDTAKEKLDVDVLRPDGRHRTKKFANTTKGHDELVSWLKGHKIDHAHICIEATGTYMEPVAECLYDAGYIVSVINPALGKAFAQSEGLRNKTDTVDARMLAEFCRQKRPAAWEAPHPLERALRALVVRHQALTDMHTQELNRTETAREVQRPSIDAHLLWLEAELKRLEKQIKDLTDDDPDMKHRRKLLESIPGIGEKTSAVLLAYIGLKDRFARARQFAAFAGLTPRRYESGSSVRGASRLSKAGHVSLRRALYMPAMVATSKTEWGRAFRDRLAANGKKGKVILGAMMRKLAQVAYGVLKSGVPFDASRHNPVAA

SEQ ID NO: 109702 - protein, 342 aa, unidentified
MQPRFKPTVYFRQCVGIDVAKSTFMACLSMLDAEGCSTPSIEFTNDKHGFNQLVRWVRKESLKGYPLCFVMEPTGVYYEALAMHLTKLGMTVHVVPANRVRDFAKYEGYKTKTDKIDAYILSMLGCENRRLKNWEAPDEQLASIRSLCRLRASLVKHSTMLKNQLGALTASSFSDKKTVRICSAALDDVDKNISKAETEIRNLVDKSEQFKEAVRLSTTVPGIGQTTAAAILAEVGCFANFNNQRQVISFAGLDVVARQSGPQDPKRHISKKGNSTMRSMLYICAMAAIRCNPKMREFYDRIKKSNPSGKVALVAVMRKLLTLMYSVCKSKKSYDPEYSTKG

SEQ ID NO: 109703 - protein, 352 aa, unidentified
MQTPQLFIGIDVHKKNWSVSIRTDLFDHKTFNMTSDPDILIDYVNQHFQGYPVECCYEASCCGFFPYRQLSQAGWHVKVLNPSDIPQSAKNKDQKSDRLDCRHLAKQLHSGHLTGIYVPDEQQEQLRSLFRQKDNLTKVIRKLKSQIKGELLYYGIKIPLQYDTLRWTMELTAWLNRLEWKHSPGHSSMQSKLRHLDFVRQEWLALNTELRRYACNNYKEDYNLLMTIPGIGPTIAIGILAELGNIRRFKKFDQLASYVGLIPSIYSSGETVQVRGLTYRSKSLLRSYLVESAWVSVRRDPTMQDYYRSHKGKQPNKIIIKVAHKLLRRVWHVIKTGEEYKIGLKENPAEAS

SEQ ID NO: 109704 - protein, 346 aa, unidentified
MDHYAGIDVSLECSSVCVVDASGKIVREGKVASEPEMLVAWFDALDVPLSRIGLEAGPLSQWLHAGLREADFAIELLETRHVKAALSAMPVKTDRNDARGIAQLMRLGWFRPVHCKSLGAQEMRALLTARKLIQSKLFDVEMSLRGILRGFGLKVGKTTPRRFAGRIEDLVAGQATLETIAAAMLSAHEVLLRELNAFERRLRMMARTDARTRLMMSAPGVGAIVALTYVSAIDDPARFKSSKAVGAHFGLTPRKYQSGETDVTGRISKIGDASVRTALYEAAHVMLVRAIKGSALKSWAMKLARRAGMKKAKVALARKLAVILHRMWVDGTSFVFAPSNKPAVAA

SEQ ID NO: 109705 - protein, 375 aa, unidentified
MKEKVRFLGLDVHAETIAVAVAEADGEVRSLGTIANRAESIRKLVRKQGAGAQLRACYEAGPTGYVLYWQLTQLGVECTVAAPTLVPVKAGDRVKIDRRDALKLARCHRAGDLTAVWVPDEGSEALRDLVRAREAAKQDQLRARHRLSKFLLRTGRRPMPGVKAWTDRYMGWVRQLDYVQSAQAATLLDYVHEVEHMAERVGRLEQAINEAVKQAPVTMQAVIKGLQALRGIAQISAVTIVSELGQISRFDTPRQLMGYSGAVPREDSSGKRTQRGAITKTGNAHLRRIVVEAAWSYRLRPGVGPALRLRQEGVPEPIKDIAWKAQIRLSKRYARLAAAGKDKRKIVTAVGRELLGFIWAIGINAEAAGKQQRAA

SEQ ID NO: 109706 - protein, 416 aa, unidentified
MTDQEQWYAGVDWASESHHVFLTDSGGQKIGERIFKHGGEGLAAMAAWLMTESGAGEPSQVQIAIEVPHGPVVETLIERGFRVHSINPKQIDRFRDRVTLAGAKDDSRDAEVMASSLRTDPRCYRLLAEADPVIVELREWSRMSEDLGTERNRLTNRMREQLWRYFPAMLELENDLGAEWLLDLWEIVPTPTKAMRIREKTIAAILKRNRIRRFDAAHVLAMLRKPPVHVAAGTTEAASAHIAALVARIRLVNRQLAQAHRQLDALTGRLFPVEDTEPGQKKQRDSEILASLPGVGRIVLATLLAEAFDALQRRDYAALRSLTGVAPVTKRSGKSCIVIRRQARHDRLANAMYHWARTAIQHDRKSRAKYAALRGRGHSHGRALRSVADRLLNVACAMLKSRTLFNPSLAAPKTTC

SEQ ID NO: 109707 - protein, 311 aa, unidentified
MNLQEHFIGIDVSKDKLDVAVRPSGETRIFSNTHEDLRRLTQYVKSLTPALVVLEATGGLHRTVLSTLAAEGLPAVAVNPRQIRNFAKATGTVAKTDRIDAQVIAHFAEALRPQVRPLKDEQAERLQALMTRRRQLIDMLTAEKNRLASAPKWIQKDIRAHIQILERRLKHIDDDLDKLIKQSPLWRHKEEILQSMPGVGPVLARTLLAELPELGTLNRHQIAALVGVAPFNRDSGCFKGRRTIWGGRAHVRSVLYMNAVVAARFNPVIKAFYQRLRQAGKRFKVAITACMRKILIILNTMIKNDSCWNLT

SEQ ID NO: 109708 - protein, 373 aa, unidentified
MQKTIRFVGLDVHAATIAAAVAEPDGEVRSLGMIPNEPRAIRRLLTKLGAGDRLRVCYEAGPTGYVLYWQLTQLGIHCDVIAPTLIPVKPGDRVKTDRRDAVKLARSYRSGDLTPIWVPDAAHEALRDLVRAREAAKRDQLRARHRLSKFLLRHGRRPPAGGKAWGVKHRGWLRTVRFAQPAQDATLLDYVTEVDHACDRVARLDRALDVAAQDAPASMQAVIAALQALRGVAKLTAVTLVAELGALSRFARPRQLMGYSGAVAREHSSGPKIRRGAITKAGNAHVRRVVIEAAWAYQHRPSLGAALRARQAGLSPEVTAIAWKAQHRLHTRYRRLLAKGKPKPQVVTAIARELLGFIWAIGVHVDQETRRAA

SEQ ID NO: 109709 - protein, 371 aa, unidentified
MKVYQSTTQYNCGIDLHARCMYICVMNKEGKILVHKNIKHNNFDYFLKVVKPYRHDLTVACESTFNWYWLADACAGADIKFVLGHALYMKAIHGTKSKNDRVDSEKIAHLLRSNLLPEAYTCRPEIRPIRDLMRRRIHFVRQRSKLLSHMSSAPHVDGLDPLTSEEKRRPNRRTLVPERFEDPMRKLSLEADTYLAEQYDQVISKLEWQILKETRTINGPEFNRLQTIPGLGKTSALVILYEVDTIDRFKSVKNFCSYSRLITADAESAGKPCGVQGRKMGNAYLKWIFTEVAVHCKRHDTRLNCYFQILEAKHGRRRANRIIAHKMGRAVYYMLKRKEVFDYDKFLGKYKKRCEPTKKEKKEIREMAVSL

SEQ ID NO: 109710 - protein, 338 aa, unidentified
MKTYAGIDLHSSNNYLGVINEQDQRLFSKRLPNCIDIISAALEPFRDTLRGIAVESTYNWYWLVDGLQEAGHKMHLTNPSAIQQYEGLKHTDDKWDSFWLAHMLRLGILPEGYIYPQKQRSLRDLLRRRLFFVQKRTAHIHSLQSMFTRHLGGKISSNDVKKLDPEHMGNLFQDPYVALAAKSNTETIRFLTSKIKDMERMALSISKLKKSFQVLTTTPGIGSILGMTIMLEVGDIGRFAAAGNYASYCRCVKSTKLSNKKKKGQGNRKNGNKYLGWAYVEAAHLIIRCCSRANAFYQRKMAQVNGALATKALANKLARANFYMLRDQVAFRKERLFQ

SEQ ID NO: 109711 - protein, 342 aa, unidentified
MDHSAGLDVSVKETSICVVDDTGRIVREVKVASEPEALLQVLKSPAYHFKRIGLEAGPMSQWLYSAMAEAGLPVICVETRHMRAVLQAQINKTDRNDARGIAQMMRAGLYRPVHVKTLRSQKLRMLLTHRKLLQSKAIAIDNDLRGTLRNFGLKVGIVGAVKFEARIKELVENIPDLAVLVEPLLIVRRVLREQFVIQHRRLLAIVRDDEVCRRLMTTPGVGPVVALTYRATVDVPARFQKSKAVGAVFGLTCSKYQSGEIDRSGRISRCGDEMMRVMLYEAAQSMLRSKKWSWLKAWAMQIARRRGVKKAIVALARRLAVIMHRIWVDGTEFRWTREAAAA

SEQ ID NO: 109712 - protein, 412 aa, unidentified
MRLFAGDDWAEDHHDIEVMDAAGKVLAKRRLPEGAAGMAQLHGLIGQFVPEDDMDSAEVVIGIETDRGPWVAALAAAGYTVFPVNPLQASRYRERHGVSGAKSDAGDAHMLADMVRTGSRQLRAAAGDSPEAAGIKVLARTHKTLIWERTRAVQRLRHQLREYFPAALEAFEDLDAPGTLELLGKAPEPARAAKLTRAQVSAALKRARRRNIPDKATAILAALRSEQLGQPEALTAAYAATVRSLIAVITTLNEQVKILQGQVGEHFGRHPDAEVYLSQPGMGKILGARVLGEFGDDPLRYRDGKSRKNYAATSPITRASGKKKVVAARFIHNGRLVDALNSQAFAALSASPGARAFYDELRAREIEHNDALRRLANRLVGILHGCLKTGTLYDEATAWGHRENLPQSSAAA

SEQ ID NO: 109713 - protein, 419 aa, unidentified
MNRIETKKLKVVNSQTLIVAIDIGKTTNTGYCRCPSGKDIKPFEFSNNAEGFRKLWDCICWMKRSHHLEEVVVGFESTGAYGEPLGHYLKDKAVRLVQVNPMHTKRMKDLQGNSPGKTDRKDPKVIADIIGLGHALSVVIPDGAPAELRRLTLARERCLQRRTALYNQLQDLVFILFPEFLQVMKDVKTKTAQYLLRHYPTPQDIGKCGVETLSSVMKRVSRGKLGRVRAQALYGAARESVGLKEGTKGILLEIDEIVCGLEACHRFVEKTEEEMVVYLQEIPYSDSLLSVKGIGEVTVAGLIGEVGDFRQFHALRQVMKLAGLNLFEISSGKHKGNRHISKRGRPVLRKLLYFAAINTVRKGGVMHASYQRHLDRGMPKTKALIAIARKLLTILFALARDHSQYVETYSQKEALELAA

SEQ ID NO: 109714 - protein, 408 aa, unidentified
MSPEKPSPVRFIGLDIHKYYLIAMGVDADLNPLLGPQRVQLSNLEGWTQKTLTPQDAVVIEMTTNTWQIYDELLPHVHSVTVVHPPHIALITRSQVMTDKIAASHLARLHAKGLLVGIWVPPQEVRDRRALSAQRRKMSRLSTQAKNRLHAVLHRHHLPPPAGKPFSPDKRVWWLSLPLTPLEKAMLLSDLDTLTFAQSQIASLEQAMLSLAAQDERIPLLIQMPGISLVNAMTILAAIGDITRFPDAKNLVGYAGLGVRIHDSGLTSRTGKITKAGRKDLRATMVEAAQTAANTHPHWQAELKRLEPRLGRNKAIVAIARKLLVAVWHVLAFQIADRFAVPELVAKKLKNFSDRLRLERRSPGQSTAAYVRSQLDRLGIGAQVSHLYRGKLKSPLRLPPSALRPTGD

SEQ ID NO: 109715 - protein, 315 aa, unidentified
MIVLGIDIAKRKFDCALLLGERFRTKVFENNAAGIEACVAWLARHAGKPAHACIESTGPYAEAVAEALFDAGHTVSLINPARSHAFAKSLGVRSKTDEVDARTLARFCQGLKPEPWIPAPKSVRELQELVRRLDALIEMHTQETNRLAVAHEAVRDSIEEVLSFLDRSIAEIKEAIARHIDRHPDLKAQRALLDSIPGLGPATCAWLIAELNAKRFACARSAAAYTGLTPAHWRSGETVNGKPRLSKCGNARFRKVLYWPAISALRCNPIVQALAERLRARGKHKMVIIAAAMRKLVHIAFGVLKSNKPFNPAGA

SEQ ID NO: 109716 - protein, 348 aa, unidentified
MNATAKVIGLDIAKNVFVAVGRDIHGKVVLKRTLSRGDVLCTFANMPATAIGIESCAGSHYWARKLIALGHDVKLIAAQHTRAYVSGNKNDTNDAAAIAEARSRESTKYVPINTEAQQDLQMLHRARRALMVERNAMIYRIRAFAGEYGQVFPVGVAKFRAAFGTWITDAQNGLSGSAISTFGDLMEQLDDKETRIAAYDKRLLQAAKSDERAQRLLEVPGIGKITATAVLASVADAHHFGSGRDFAANLGLVPREHSSGGKQRLYGITKRGDVYLRTLLIHGARSALRCAGEKPDRLLRWAVKLAEKRGMNVAAVALANKLARVVWALLAYGRIYVPVWSNSMTKPA

SEQ ID NO: 109717 - protein, 400 aa, unidentified
MSERQARVWAGIDAGKGHHWAAVVDDTGATLWSKKIDNDESAILTALGEILALADQVHWAVDISGTSSALLLALLAAHGQQAVYVPGRTVNRMAGAYRGEAKTDARDAYVIAETARHRRDFTTIDVPAQLAADLALLTAHRTDLVADRVRMINRLRDVLTGVFPALEHAFDYSAHKGALVLLTGYQTPAAIRRRGRARLTAWLANRSVRGADAIAGTALEAAQAQQTAPPGEDVAAQIVADLAGQILALDDRLKRIDKQIRETFRSHPQAEIIESLPGMGPILGAEFIVAAGDLSAYADAGHLASAAGLVPVPRDSGRRTGNLHRPNRYSRRLRRVFYMSAQTSIIREGPNRDFYLKKRGEGCKHVQAVIALARRRASVLWALLRDGRTFTSAPPVTQAA

SEQ ID NO: 109718 - protein, 340 aa, unidentified
MNHYVGIDVSLEYSSMCVVDGNGKIVSEAKVESEPAVLIGWLMEQGLELTRIGLEAGPLSQWLYAALRQAGLAVELLETRHVCTALKTMVNKTDRNDARGIAQLMRLGWFRPVHCKSLDAQETRALLTARKLAQGQIHRIEMSLRGILRNFGLKVGKTTPAQFAGRIRELVAGHPILEAIAESLLKIRDTARREFGGLEKRVRALARCDTRARLLMSVPGVGPIVSVTFVAAIDDPARFSSSKDVGAFLGLTPKKYQSGETDRDGRISKIGDGAVRTALYEAAHSILTKPLKGATALKSWAMKLARRAGMEKAKVALARKLAIIMHRMLADGTTFSTQRA

SEQ ID NO: 109719 - protein, 339 aa, unidentified
MSVRTVGIDLAKQVFQVHGVDDAGRPVLKKRLRRTELRAFFAGLSPCLIGMEACASAHYWARELAAVGHEVRLMPPSYVKPYVKRQKNDAADAEAICEAVTRPTMRFVPVKSEDQQAVLMLHRTRDLLIRQRTALSNALRAHLAELGIVERQGVAGLDALMASVEGETEIPPLARKALALLIKELRSMKEQIKAVETEILAWHRGNEASRRLETIPGVGPIIASALAATIADPSVFKSGRQLAAWIGLVPRQNSSGGKERLGRITKQGEPYLRRLLVIGSSAVMRFCKTDGSALGGWITALRARRPAMVATVGMANKMARIAWAVLSRGKEFEMRPAMA

SEQ ID NO: 109720 - protein, 354 aa, unidentified
MTDIKYVAFDVHQATISAAVLDLSGKLITQAVFQTEVTAIRDFLRGLSGTVRLTFEEGTQAQWLFDLTRSLVAELIVCNPRENHSMKRGNKSDQKDALQLATLLRAGLLKSVYHGAQQTATLKHLAHNYDALTEDTTRAMNRLKALYRSQAIPCAGRDVYYTRNRQAWLTKLKAEGLRQRAEFLYRQLDHLRQLRRDARKALLKEARLHGAFRRLAEVPGLGPVRVAQIIAAIGSPHRFRTKRQLWAYCGFAVITRSSSDYQVSGDRLERRHKQTQTRGLNQSFSRRLKVAFKGAALEALKTEAFKKVYDRLMANGVRAEMARLTIARKLAAVTLAIWKSGEGYDATKLSKLAA

SEQ ID NO: 109721 - protein, 489 aa, unidentified
MKRAKKTSNTRTRSSSRKRLKALQIVHPNAAGIDVGASSHYVAVRPDAVPAGKPSVRSFGTFTVDLDALVEWLKECAVDTVAMEATGVYWKPVFEKIEAAGIEAILVNARHVKHVPGRKTDVKDCQWLQQLHSYGLLEGSFCPTQDICRLRTLVRHRANLVSDAAQAVLHMQKALTQMNVQLHHVINDLCGETGLRIVRAILNGQRDPEQLVKLRDCQITRSTPKEMEQALQGDWKEELLFVLRQSLKAFEFCHEQMDECDLEIEALLKSLPKATPVAKPEQAPAKDPLAAQDPKPKRPQSRKRNEPEQDLGPELARICGTDLTKAHGLRILSVLVIISEIGIDMNRWRSAKAFCSWLGLCPNNKISGGRILSSRTRQVVNRASTALRMAASGVAHTETWLGSFYRRMRARLGPAGATTATARKIATVVYHLLKNQEPFVDRDLELYEQRVYQNKLARLRKQARTLGYKLVELTQDQDVTTTATCELSE

SEQ ID NO: 109722 - protein, 353 aa, unidentified
MMKINVNATDYTEKTVHVGIDVHKKTYAVTCICDGIVVKRATIKANPEVLVEFLKKHFQRAALKSAYEAGFSGFILHRYLIKNGIENSVVHPASIEISARDRVKTDKRDSLKIATQLASGRLKGIYIPSEEREAYRSVTRLRETLMKDKKRVGNQLKSFLYLQGLITDEEEKISKRWIKKVMETQCHPDILYCIQSYAKQWLLLGEKVREVEKHLEEQAKLDQPLDLIYQSAPGIGPKHARALSNELETMKQFHNEKGLFSFTGLTPSEYSSGEHKRQGHISRQGRPLLRKILIQAAWVAIKKDVSLKVIFERIAKQAGRKRAIVAIARRLIGRILACFITGSLYEIKTISDS

SEQ ID NO: 109723 - protein, 352 aa, unidentified
MEIHTIGIDLAKTVFHLVGLNPHGEVVVQRKCSRSQLLRFTSNLRECLIGMEACGGAHFLGRALRDQGHDVRLMPAQYVKPYVKTNKNDYIDAEAIAEAVGRPRMRFVPIKTDDQLDLQSLHRIRERWVVRRTAVINQIRGLLLERGITIRKGRRYIEASLPAILEDAENKLSGILRMLLTQLQLEMQYLGRQIDESDRLILEIARGMDACRRLIAIPGIGPLTATATIAAIGNGAAFKKGRGFAAWLGVVPGEQSTGGKQKLTGTSKRGNKYLRKLFVQGAHTVLLQKNKQPAGLSTWLADLTARKRKQVATVAMANKMARVVWAVLTKGEAYRPPLLLQPAGNGLQMTPV

SEQ ID NO: 109724 - protein, 341 aa, unidentified
MQIYTGLDLSRKRLDWHACRADGTLVGAGAVPPDPDGLAQLVHRLGGGDVLAVVESMNGARFIHDQLELAGWDVRLADAQRARALAPLACKTDRIDAWVLAELARRDLVPEVWLPAPAVRQERERARFRMHLVKHRTMLKNRIHQTLIAHGHARPSANLFTQKGRALLTRLELPEPWRETVQASLALIDTLDEQIDELERELRRLGADHPYVPLLRTVPGIAWVLAYTIASEIGDITRFPNPRKLIGYTGLCPRVYQSGEQDRRGPLTKNGPAYLRWALVEAAHNAARHPVYRQLAERQRARHGRRGSAIAAVTIARKLTEAIWWMLTRNQPFAPAGARSA

SEQ ID NO: 109725 - protein, 348 aa, unidentified
MESVAGLDVGVKYSTLCVVSRDDRSMKLVSRHRTVTTPLAIGEWLTAQGIGRVGLEAGGQSAWLARELEQRGVAVTVMETRRQHAFGSYSKIKTDERDARLIGEALATGLYTKVHVRSAWSQEVRALLGARLQLKRQAQQSRQFIRGQLRAVGVELGRAIGKKWLLAAETAMAERGGVLGLALKALLASCRVLAEQITVLDKEIRRLARQDAPCRRMMTAPGAGLLSSLALRASLDDADRFARSAEVGPYLGLTPARWQSGAIDRRGGITKQGDGLVRAYLYEAAVSLLERQKRDCALRRWGLQHQARLGKRRTRVAVARKLAVLMHKLWRSGQTFDWNRGMEVPSTY

SEQ ID NO: 109726 - protein, 355 aa, unidentified
MSQEKYIGMDVHQATISVAVMESGGKLIMECILETKAATIIEFIRGLRGPLSVTFEEGTSAAWLHDLLKPHVSKIVVCDPRKNALLTDGSKSDRIDARKLAELLRGNQLRPVYHGDHGLRTLRELGRSYLTLTQDLTRVMSRIKALYRSWAIPCSGTTVYGARHRSEWLAKIPEPGVRLRTERFYQQLDLLRSLHGEARRDFVAESHKYPAVKLLRQIPFIGPIRSALLVALLQTPHRFRTKRQLWAYSGFAVETHDSGEYRYVRGKLLRNRERISVRGLSDNYNRDLKNLFKSTAISASARPGPLRDFYLALLAKGMRPTMARLTLARKIAAITLTMWKKGVDFDAKQLDQQAV

SEQ ID NO: 109727 - protein, 370 aa, unidentified
MSVRRILAKTINTDLEYEAIGIDLAKNCVSVALLTTDGEVVCIDRLDYSELEKSAQVLCPTTFAMEPCTEMNYLVQKLEAWGHRCLVIGGKHVRDYIENHYSGQKTDLNDAQALAFLAKDTQLRTIKAKDMEQQKYASLTTLREQYVKQYRQTIVSLKGICQAWGLNISKGISGKARLKDLIENHAAFPEELKESLVDMVTHAQTAQKALNKITKTLEVLAKNDKVCQLIQTIPGLGTICSCRLRATIGDIKRFKNPKDFPAYYGLVPRSIATGHNEKKGKITHRGDKTMRSLMVQGAGSVVNMATKGKLKSKQLTKWILKKQKENMPWGKLVCAVAAKLLRIVRAVLISSKPYNPKIAGVAKCSLPKGS

SEQ ID NO: 109728 - protein, 378 aa, unidentified
MKRILKIGMDVHTTNYTLCAMEPIIGEDDRVFATIKVTPDYKNILMFIENLKLKLGLNDEYDIQCGYEAGCLRYSLYNQLTAAGIKCVILAPTTMLTPQGVRIKTDMRDAYMIAQCLSYGGYHAVYIPTEDDDSVKEYLRMRNDHKLALKKIKQQINAFCIRHGFCYDGTKWTLSHLKWLKKLEITNGLHRETLDEYMASYEEQEAKIERYDKRIGEIAEQTRYHDKVKKLGCFLGIKTHTALSLIVETGDFERFAKGNQYASYLGLAPGENSSSDNIHRLGITKAGNSHLRQLLIEASGGICKGAVGHKSKELRARQNGNTAEVIAYADKANTRLRSRYYKFIRHGKKRNVAVAAIARELACFVWGMMTDNIEMKAA

SEQ ID NO: 109729 - protein, 458 aa, unidentified
MRRNKSTDRDRRTMAVVHPNAAAIDVGATMHMAAVNADRTPEPVRSFGTFTTDLHRLVDWLSECGVDTVVMESTSVYWIPIFELLDARGFAVFLVNARDAKHVPGRKTDVSDAQWLQRLHSFGLLRASFRPKDQIAELRAYLRQRERLLEYGASHIQHMQKALTEMNVQLHHVVTDITGATGLRIIRAILGGERNPAVLARMRDSRCHASVETIEKALAGNYRAEHLFALEQALALYDTYQQKASACDTRIEAVLKELSIRRGRQAGPLPSPRWYRSRQQNSLLFDVRAALFALLGKDLTQINGLGPYLALKLIAECGDDLSAWPSAKHFTSWLCLAPSNKISGGKVLSSRTRPSGSRAAALLRLAAATVGRTDTALGAFYRRLSARIGKAKAVTATARKIAVLFYNAVQHGMEYVDPGASAYETRYRARVIDNLHRRAKAFGFVLQPIDQTPSIAVS

SEQ ID NO: 109730 - protein, 343 aa, unidentified
MERYYYIGLDIHKKIIAYCVKAIDGCLIDQGKIKADRQSLGAWVKELPGPWIGAMEATMFTGWVYDFLKPHAVVLKVAHPAMLKAITAAKKKNDRADAEKIADLLRVNLLPECHMLSEEIRELRRILRYRNHIVRTAVKMQNKMSGLLMEVGVSYSKKRLHGKKYFRELLERVEEIPPSVKELLLLSRSSYEMFRSFQKRLVETLRTDSLIRDRVHRLMTISGVGEITALTWVLEIGDPGRFSSIRKAVSYCGLCSAQKESAGKEQRGPISKKRNKHLQTMLIEAAKLAPYWNEQLAIVYEREVKKGNKNRATLAVARKLVAYMLAVDKKQAEFKLPATTQAA

SEQ ID NO: 109731 - protein, 337 aa, unidentified
MSLEISSVCVVDAEGRIVREARVPSEPKALIAWFAAHGAPLARIGLEAGPPSHWLHAAMTEAGSAMELLETRHVRAAFKTMPVKTDKKGARGIAQLMRMGWVRSVHCKSPAAQEVRAMLTACKLLQGKLHDVEMSLRGILRGFGLKVGPTTLRTYAARVRALVEGHSTLEAIAAALLKARDVLADELRGFERRVRKMARDNEQARRLMTTPGVGAIVSLTYVSAIDEANRFRSSRMVGAHFGVTPKKYQLARRTIPAGSPRSATPVSGPRSMSAAHVILTPPVKGSDLKTWALGVAKHAGLRKAAVTLARKLAVVLHRMLRDQTDFAAHQAKPMMAA

SEQ ID NO: 109732 - protein, 383 aa, unidentified
MEAKRKGADPLEPERHRCARVEMSSNHSRDRGSAMNVTTYGLDLAKRVVQVHWVELETGEVKRKALARADVSAFFARRQPGIVAMEACGSAHHWGRLLRSLGHEVRLIAAQFVRPFVKTNKTDAADAEAIWEACQRPRMRFVAVKSEEQQAVLSLHRIRQQFVKVRTMQALQVRGLLYEFGVVVPQGWRVLLAQAGPILADETRCAAPELVRRELLRQLNGIRTLTTRIAELERQIGSWQRRESECQRLAAIPGVGRLTASAVVATVADARTFRSGREFAAFLGLVPRQSGTGGRVRLLGISKRGDPYLRTLLIHGARSALRQQSRADRTLDPWLKELLARRHKNVVLVALANKMARTIWALLAHGRAFDRSWSRALPVPASH

SEQ ID NO: 109733 - protein, 349 aa, unidentified
MVVGIDVHKGSHTAALLDERGALVETLTIANSAEGAGQLHSWLGEHGIEKAVIGIENAAGYGRLLASALAAAGHAVLNVPAWRTKRDRHAHGPGKSDAGDAVAVAEVVLRRRSELGPALEPELVRALGLLEGLRRQSIYDRTQAIQRLRAIWTQVDPQAEAQLAKCATQEALRKLKRIDFGSGLAAEAAARCVRELAREIERLNQRINELDGELEQLLREHGNPLADLPGAGPVVAVAVLAHSGDVRRFRNAAAYARFCGAAPIPCGSGKTANHHRLDRGGNRQLNAALHRIAIVQARVDPRARAFLARKTAEGKTKREARRALKRHLANVLYRRLHAWAENTLAAETA

SEQ ID NO: 109734 - protein, 340 aa, unidentified
MRKLYAGCDLHGNSNFWGIRDETGEKVFHKKLPNDLALMLAMLEPFREELVGIVVESTYNWYWMADGLMEKGYQVHLANPSAIQQYEGLKHADDKHDAFWLAEMLRLGILPEGYIYPKQERPVRDLLRKRGHLIRLRTSMVISLENIICRNVGRKVSANDVKRLGEDRVTPYLEGQEDLALAGQVSKNTVDFLSEQIQEIEKAVLKRVRLKKSYRLLLTIPGVGKILALVIMLETGPIRRFATVGDYGSYCRKVPSQWTSNEKKKGSGNRKSGNRYLAWAYAEASEFARRSYPEPRAYYQRKIQKTNAAVAHSALAHKLARAAYYIMRDQVPFRMEKLFG

SEQ ID NO: 109735 - protein, 348 aa, unidentified
MAHFSGLDVSVKETSVCVVDDAGRVILEQKVPTEPDAIIALLTSLGVTFGRIGIEAGPLSHWLVNALTAADLPVICVETRHMKALLTAQQINKTDRNDARGIAQMMRVGLFKPVHVKTLVAQEQRMLLTSRKLLQRKLLDLESDLRGTLRNFGLKVGAVSGGRYGARIRELVAGFARLAAIADPLLNVRRVMRQQLAILHKMLLDAVRVDPVCRRLMTAPGVGAVVALTYRATVDQPQRFVHSRAVGAHIGLTPKRYQSGEIDYDGRVSKCGDALLRTMLYEAAHSLLIQSRKWSWLKAWGMRVAQRRGIRRAIVAVARRLAVVLHRMWVDGSEFRWSKDNAAVAAAT

SEQ ID NO: 109736 - protein, 427 aa, unidentified
MKKADLLSTLFVGVDIGSRSHVVVLLDFESQKPLQRFKVANNQPGAVELAQRLAIALPSRSDLSRLIIALESTSFYGIHIANYLSSCDVLAPFHTFVYCLNPKVIRNYKKSFIDLGKNDAMDAFVIADFARANRITTQPWRGSQFLALQRLTRHRLHLAKAMTREKAYMLSNIFLKFSEFSMLDPDEQPFSHSFGATASSVLTDFLSTEEIIDMPMEDLIHYLCEKGHNRFPVPEDTASLLKQAARNSYRLDKCLYEPLTVSIASSFTVIATYKAEIRAVNKAIEKTLRGLDPNAYQCLLSIPGIGPVMAAGILSEIGYIGAFHSQEALAKYAGLVWRENQSSRFTGEDTPLSKAGNAYLRYYLLEATSHVKNHCSEFAAFYQKKYAEVKTHQHKRALALTARKLVRLIFGLLAKHQLYSSNRVDQA

SEQ ID NO: 109737 - protein, 329 aa, unidentified
MNLVSTLGIDLAKNVFSVHGVNSNGDVVLRRTVSRAKLGELVAQLSPCLIGMEACSGAHEWARRFCGHGHRVKLMAAKFVMPYRKSGKNDGNDAEAICEAVSRPNMRFVPVKSEQQQSDLSLHRVRQGFVEERTATLNRVRGLLAEFGHVLPQGAVQVRRLVPALLARLPSRVARCAQDLLEHADRLADKALEYEREIRQEVRGNDLARKALKRQGIGPITASALVATVGNGHDFKNGRQFAAWLGLVPRQYSTGGKTRLGHITKRGDPYLRTLLVMGARAVLQRATRESDPLSRWALALQQRRGYHRACVAVAAKNARVCWALLARGA

SEQ ID NO: 109738 - protein, 326 aa, unidentified
MTVLSTSNKTFIGIDVGGASFEAAWHRGGCTPCSNRPDAIAAFVERLRAGPPVERIVIEPTGGHEKPLVRALRRGGFIVELVHTSRFKAYRELVGARAKSDTSDARLLAAYAAAPDEVRGRKASHVVLPEDAGREQLAELAARRDQLKQMIHAENCRLAIVRNEDIRREIALHLQAMHASAKNVRAAMMRLVRQRDDLARAKKLLRTIKAIGEVSALTMLALLPELGRIDNKAAAALVGVAPFVRKSGTMNAPARIFGGRSAVRNVIYMAAVTAARHNPVLKPFYERLIAAGKPIKVALVAVMRRLVVFANAVLKSGQPWKGAIPA

SEQ ID NO: 109739 - protein, 395 aa, unidentified
MELLKYGLGIDMAKDKFDACISIIDKLQHVMIRAQCSFNNNKKGFETFILWVTKNTKLAIPAVYLMEATGIYYEQLAWFLHNKSCSVSVVLPNKAKKYKEALGLKSKNDRIDAKGLAQMACEQNNTTWKPLTSNIYLLRLITRQIQRVSDQSTVLNNQLHALEYGMYRDKAIEKMYAGQLDLLQKNKKSLQLRVEQIVESDEILKRKFKNIGKMKGLGLQNLAVIVAETNGFTAFENIAQLVSYAGYDVVENQSGKRSGKTKISKKGNNHIRRCLHFPAFNMIKYEVAPFKNLHERVYEKSKIKMKAYTAVQKKLLEFIYILWKKDEAFDPNYQDKTSRDVEPVPSLASVPQEPSTACGNKEKKLKIIKKKITPAITRVTQDKHPSKYRRMPSLA

SEQ ID NO: 109740 - protein, 315 aa, unidentified
MTNLKKSKSVVNVGVDVGKAFLDVCIYEKDIHWQEENNSEGIKRILKRLSHYTVERLVMEATGRYEFLLAEAAHNKHIPVCIVKPLAVRRYAGAISQIAKTDKIDAALIAEFGAVVQPKATPRKSKNLIAIKDLISRRRQLMNLRTQEMNRLKIMGKAFEVSCRRMIKCFDAEILRMEKRLAKHIEEQAEWTEKQTILKSAPGVGDTLVYTILADLPEIGTLNKKEISSLVGVAPMNRDSGKLRGKRRVQGGRASVRTVLYMATLSATQCNPIIKDFYQHLVSQGKHKKVAITACMRKFITMLNAMVRDQCEWAY

SEQ ID NO: 109741 - protein, 412 aa, unidentified
MKHEKMNYTYVGVDSHKDTHTAVFIDCFFEKLGEVSFGNRPSEYPAFLKEAEKLKTDGTELMFGLEDVSSYGRTLMTFLKTEGVLVKHVNALLVARERKNQNTFEKTDSLDAECAARVLLSKLSELPDADPQDMYWILRTLVVRRKFIVKNNTCLKNHLHTLLTQHYPGYGSFFSSIDGKTSLAFFYRFPSPCTLAGVTEEELTAFLKEASDGKIGAAKARLILDSLEDTTAPFQEMRDMAVRSAIRQIEFNITEMDRIEAHMAGFLERFDCTLTSMTGIEVVTAAGLLSCIGDIKKFPTPAKLARYSGVAPVTYASGRKDLKLANQRGNRELHSLFYGLAVRLASTVGSTNKVINPFFYEYYHRKISEGKTKRQALKCVERRLVNIIWTMLTNGEEYINPPMYDAPKNGRK

SEQ ID NO: 109742 - protein, 357 aa, unidentified
MGKSIRNLAAVTRVGLDLAKRVFQVHAVDARGEIIVARKLTRSQLIPFFATLPPCVVAMEACSSAHHWGRALIELGHEVRLLPPAHVKPYVRRNKSDQVDAAAICEAAGRPGQRFVPVRSIDNQAELMRHRARELLAGQRTAALNALRGHLAEIGVVAPQGAQHAYDLKRMAADGFDDNGEIVVPDCVRVALRPLVGQIDALDEAIGAIDREIAASVKADETARRLMTIPGVGPVTASAIVATIQDAGVFASGREFAAFLGLTPRQNSTGGKTRLGRITKMGDRYLRKLLVVGACATLRHRKGHNDALRLWASGMLDRKTVKYKFKLTAVALANKVARIVFVLMTRGGQYDDRPAAA

SEQ ID NO: 109743 - protein, 339 aa, unidentified
MSRFVGVDLHKNMFMVSYFDPRTGKHHLKSYHIKDIVSFKRELNSDDTVGVESTNNTRYFVNQISESAKEVKVINPSQFRVISKSVKKTDKNDARVIAEFLSKDMVPEVRMKDKKTAQINSLANTRDKLVKLRTALKNKIHNILSSHGILLKKESLSSNKALNRILEQPVDSTAHVELEVIVTQIRSLNEGIKRLDSELEDKGKELPGHENITSIKGIGNKSGSILLSVIGNINDFESEKKLAAYFGIVPRVSNSNETKWQGRITKRGSKLGRTTLVQCTLIAIKYSPYLRSFYERIKAKKGSGKAIIATSKKLLGIIFNTLKNDWVFEDFTNGVLKTT

SEQ ID NO: 109744 - protein, 341 aa, unidentified
MEKNVFIGIDFSKLTLDVTFFNVKSFQEKHYEQFENDKSGCVKMFKWIKKRCSDTSLWLFCGEFTGIYTLTLALFLRDKKIDLWLENPMQIKLSNGINRVKNDKVDSIQIANYAFRFQDKMKLYKLQSDASMEIKELVRFKDRLTKVKVQLQVPSAEIKRVMKGCDVANCILNSTKELVTGIEGQIKDVESRIRFLLKKDADMNRLYTLVTSVVGVGMQTAIYLLVHTSAFTNFSNVRQLACYCGVAPFAKSSGTSIKGKNQVSHIANKKLKSLLHMCALNAVRYDPVLKAFYLRKINEGKHKMNVLNSVRNKLLQRIWAVVQSGEMYDKTYHLNKAAIAA

SEQ ID NO: 109745 - protein, 336 aa, unidentified
MSKLVTVGIDLAKSVFQIHGVDESGRVLVRRQLRRSQLLAFFEKQPRCLIGMEACGGAHDWGRRLQELGHDVRLMPPSYVKPYVKRGKTDAADAAAICEAVTRPSMRFVAVKSEACSAVLVLHRTRDLLVRQRTQIGNAIRAHMTEFGVIAAKGAQNVDRLRTQLHQLPDAARLPVSLLFEQLVDTDTRIERLTGEIEAKHAQCETSQRLATIPGVGKLSATIIAATTPDVGNFDCARDYAAWLGLTPKPHSTGGKQRIGRISKMGNRYIRRLLYLGAMSQIMVRSRCGPRQDWLSDMLARKKTKVAAIALAHRMARTIFAVLRDGSRYQPQATTA

SEQ ID NO: 109746 - protein, 364 aa, unidentified
MRFYTQQHRFYVGIDLHARTLHLCVLDSAGSVVADRKLPCHFDSVLQAIQPYRQDLVVGVECMFGWYWLADRCAEHSIPFVLGHALYMKLIHGAKAKNDRLDAHKIARLLKGGNFPMAYVYPRGMRETRDLLRRRLYLVHKRAELITHLEILNAQNNLPPFGKKLGYAANRAELHIPERFADPSVRMSAALDLALCDKLDELIGTVELYLTRSAKVDDVQTYHRLRTVPGVGPILALVLLYEMHNVARFEQVGQFLSYARLVRCEHESAGKKLGSGGKKIGNAHLRWAFAEAACLFLRASERARQWKQKQEKKHGPAKVLGILAARLARSVYHLLRKEEAFDEERFWHGQAAAVQPAGSRTKGS

SEQ ID NO: 109747 - protein, 354 aa, unidentified
MASMPPQLDPVSRVVVAGIDTHKDLHVAAVVDTDGVVLGTESFSTTRAGYRAMVRWMRTFGDIRKVGVEGTGSYGAGITRHLTEAGIEVLEVDRPDRADRRRRGKSDTLDAEAAALAALAGRRTSIPKRKDGLVESLRVLRLTRATAIRSRTKALQLLRMHVISAPEELRDQVRNLTRMQLLRTCACWRPDTIGFRDPVVATRIALKSLARRILELNDEIATLDELINPLVAELAPRLLARPCIGVEIAGQILVTLGDNPARIRTEAGFAMLCGVAPLPASSGKTQRHRLNRGGDRQANRALHMAAISRMRTDDKTKAYVARKTAEGHSKLEIIRCLIGGLSRSRLVGRAVASR

SEQ ID NO: 109748 - protein, 361 aa, unidentified
MEKHNTTPKQTTAKRTIGLDLGDRSSRYCLLDEQGDVIQEGSVATTRKGLDRVFGAAGRCRLAMEVGTHSPWVSRYLTRLGYEVIVANARRVRLISESSRKDDKLDAKTLARLARIDPELLSPIRHRGVQAQADLMMIRARAVLVQTRTALINAARGLTKSYGERLPSCATYQMGKDQAELLSPAIRAALEPLLAEVETVTERIREYDKQLEQLCQTRYPETKLLKQVHGVGTLIALAFVLTVEDPHRFRKSRAVGCYVGLRPKRRQSGQSRPQLGISKEGDVYLRTLLVQGAHHVLGPFGKDSDLRRWGLKLAAQGGKNAKKRAVVAVARKLAVLLHKLWVSGETYEPLRLANRAQTVAA

SEQ ID NO: 109749 - protein, 411 aa, unidentified
MHNRQNYLYVGVDLHKEHHTAVIINCWQEKLGEIQFDNKPSAFSKFLLEVETYVSDGLSVVFGLEDVGGYGRALAKYLVDHERVVKEVNPALSFLERKSQVMIQKNDSWDAECVARILVNKFNQLPDAKPNDLLWSIQQLVSRRDALVKAQSALKNQLHIQLNYHYPSYKRFFSELDGKTALAFWQQYPSPSCLEGANIKQLTAFLLDVSNNTCSVKKASDILKLVKEDGHTMKEYQETRDFLVRSIVRDIEFKKKEMKYIERELKRLVNLLDYQLDTMPGIELVTASALIAEIGDIRRFLNANKLARFAGIAPVYFGSGGKGKAHKSKQGNRALHALFYNLAVQQVQVAKGSKTPRNPVFHAYYQKKLKEGKTKGQALVCIMRRLVNIIYGMMKYKTAYELPVVQEKEVV

SEQ ID NO: 109750 - protein, 343 aa, unidentified
MKLIRVGVDLSKHVFQVHGVDLWEQPAWRCKLSRQQWLNSLLKTIEPGCVIGMEACGGAHHWARQLQEQGYTVRLIAPQFVKPYVKSNKNDANDAEAICEAMGRPTMRFVSVKTIEQQDIQATHRIRSGLIEQRTAKANQTRGLVSEYGLIAPREVAQLRAAIPLWLEDAENGLSARFRRLLNGLWQDLMMLDERIKEMDREIAMIAATDPVAKRLQQLRGVGPITATALVATVGDASQFNNGRQMAASLGLTPRQSSSGGKERLLGISKRGDSYLRMLLVHGARSVIRTAKSKNDRLSQWVMRIASTRHPNIAAVALANKTARIAWAMMAKGTDYEASLVAI

SEQ ID NO: 109751 - protein, 319 aa, unidentified
MTEALYIGIDVSKAALDVAVGQSGDFWRVKNNPDGIRTLVERLEALRPALVVLESTGGYELRAASALYVAGLPVTVVNPGRVREFAKSIGQLAKTDKLDARLLAVFAEKVKPKPSRLPDEEEQLLTGLVRRRRQLLEMRTAETNRLDTTHPSLVQQLRSHVDWLTAEIEALDRQIDDFIDHSPLWSQKDELLQSTPGVGAVLSHTLLAEVPELGQLSRTEIAALIGVAPLNRDSGAKRGKRSIRGGRANVRCVLYMATLSATRHNPVIRTFYHRLLDNGKEKMVAIVACMRKLLVILNAMARDLRPWNPVPALQVPVKA

SEQ ID NO: 109752 - protein, 389 aa, unidentified
MCICGIDVAKLNHVALVQDEQGQIIVPAFSITNTRSGFEQLHRHLAALPGPVTIGLEATGHYWWALFEYLTRLGYPVVVLNPLQVHAYRKSGIRKCKSDRTDAFWIADLVRIGSGRLLRSDMPSLLQLRELTRFRAHLSDQIGDCKRKILSVLDRVFPEYETLFSDVFLRSSRTLLAEAVTAQDFAEFDLAELAQVLQTASRGRFGLAKAHVIQQTACQSVGITFLADAARVEMRCLLEQIDLLETQRQLLDQTIADLLAQLPQHITSIPGIGAVTGAAILAEIGDVQRFASPERLVAYAGIDASVHQTGQFQATQMHMSKRGSPHLRMALWQAASMAIRYDADLAAYYQRKRAEGKHHNTVIGAICRKLLARIYVVLKEQRPYVIQHL

SEQ ID NO: 109753 - protein, 353 aa, unidentified
MKTFKGMNIYVGLDVHKASVEMKVFSDNLSLGNAVKLRPFSSEVIFKYLNKHYPGANYHCVYEAGFSGFWLQRELEGLGINCRIVNPADVPTSHKDKIYKNDKVDCIKLGKGLRSSDLRGIYVLNEKQELDRCLLRQRGKVAKNISRTKNQIKSHLNFIGVKIDWEEGTSERYWSKRMISQIMANSKKRKDLALQGFLETLEALRKENLKGLRRIRELSKRSEHKKAAEALIGIKGIGNLSAMIIKTELVDIERFSSFDHLQSYVGLIPGQRSSSDSDVKGKITRRSNVRLRGVLIQCAWAAVRFDSEMSVYYEEQKQRLRRSQLAIIKVAVKMLRKIKYEWENANMGNEACH

SEQ ID NO: 109754 - protein, 343 aa, unidentified
MGEVSTIGLDIAKSVFQIHGVDAGGAVVIRKRITRAKLLEFFAALPPCVVGIEACPTAHHWSRRLQALGHTVRLMPPSYVKAYLKRSKNDANDAAAICEAVTRPSMRFVATKSEQQQSGLMLHRSRQLLVCQRTMLSNAIRGHMAELGIVSAKGRNGTAELLKIIADEQDDRIPEAARFSLDVLARQYAAVRAEIVTIEKRIHAWHRSSEESRRLEEIPGVGPIVATALVAEVGDWKVFSSGRSLAAWIGLVPRQHSTGGKERLGGISKQGNRHLRWLLVAGAMAVIRYARQHGTKRPWLTRLMDRRPIKVAAVALANKIARMAWAMMVRGERFKEPKLLPAA

SEQ ID NO: 109755 - protein, 341 aa, unidentified
MLKFTIGADISKDKINFALRFLNDNLHEKEVVNTTSALNKFIKEVQSLVKSIAKEKKTEYSIEFIMEHTGIYGNLLIECLAGHKITMYVVSGLEIKNSTGISRGKNDKIDARRIADYGLRFADKLKPYTLCDMMLIEIKGLNTKRAQLVRIKAQLIQTKDDNTKFQSKDLLKKITKIDNPIVKALDDAIEKIEADILELIKSNTAYYDNYKIAQSVPGVGKVIAIAFICATNNFTKFESAKALGSYCGVVPFGKESGRYKGKDRVSPIANKILKTLLHLGALASINGKNAFAVYYQRKVTEDKKNKMLAINNVRNKIVKTLFACIQNKTKYTAEYSFKFAV

SEQ ID NO: 109756 - protein, 405 aa, unidentified
MDIQPIFRCAVGMDVHLTTISVCVIVAEPGCEPEVHRRQFGAFQRDRRAMADWIAGFKPDTVVMESTGIYWKSPYAALEKVGIRALVVNAQHVKKVPGRKTDISDAEWLAMLARAGLLRGSFIPPESLRNLRQLSRYHNRTTAMLAAEKNRLVRVLSDAGIRLTAVVSDAHGVAARAMIDCLLNGGTPEQALAHAGRLQAPREELLAALQGELSEHHLFVARMIRQHLDILETQLADLERQLFDALKPYEAALELLLTIPGIDRLAAAKLVVEIGLDMTAFGNAGRLAKWAGVCPGNHESAGKRRTGRTIPGNRYVRAILCEIAWAAIRTTSQFKSRYQALVIRRGTKKAIIAIAHKVLKTVFVVLSRSVPYQDATVDYEALLVQRNAPRWLRQLKKHGYLPQAA

SEQ ID NO: 109757 - protein, 411 aa, unidentified
MSDVVEEIVYARCCGLDVHKAEIVACTIINGKKEVKTFSTMTDELLSMAKWLKDKEIQMTAMESTGSYWKPVFNILEIEEIPAILVNAQHIKTLRGRKTDVKDAEWIASLLRHGLLTASFVPQREMRELRELVKYRSSLTEDSTRTLNRIEKILQGANIKLSNVISKTGTKTELSIIAALANGVSDTEKLSKLAQGSLKNKVAELERALNGLIGDHQRLLLKSMYNHLKQIEEEIAVIEAEIDKRMEKDASIIECLDSIPGVGKTTAQSILAEIGTNMDQFPSEKNLASWAGVCPGQNESAGKRKSGKTRKGNSHLKKTLVQCANSASHTKDTYLSAQFKRILSRRGRKRALVALAHTILIICYVLIKENVKYQELGADFFDKRNKADIVKRSIKRLEALGYEVTVKHKVA

SEQ ID NO: 109758 - protein, 388 aa, unidentified
MLLDHPSDGPAAIHTQFGAIFVSLELSRSNWLITSLSPGKGEKMSKHSVTAGDIAGLLQLFAELKRKAQARTGQTYPIITIQEAGLDGFWIHRVLEQEGIESHVVDPASIATPRRRRRAKTDRLDGETLLRALLAYKRGEPRVCAMVVAPTPEEEDRRRLCRERGTLIAERIRHVNRIKGLLFAQGAADYAPLRRNRRARLEALRTGDGRVLPPHLKAQISRELDRLELLLEQIKQVEAEQDALLAAAKNAAGAQIVPEPVAMLLALKGIGANFAAVLWLEAFYRQFANRRQLAAYAGLAATPWRSGGIEREQGVSKAGNPRLRTTMIQLAWLWLRHQGQSALARWFKVHSQRGRKSAIVALARKLLVALWKYVAHGVVIEGAVMKSA

SEQ ID NO: 109759 - protein, 343 aa, unidentified
MEYHAGIDVSLELSSVCVVDATGRIVREAKVASEPEALIAWFRGLGLALARVGLEAGPLSQWLYAAMRDAGLAVELLETRHVRDAFKAMPVKTDRKDARGIAQLMRLGWFRPVHCKSLPAQETRALLAARKLLQTKHLDVEMSLRGVLRGFGLKVGPTTPRSFAARIRELVEGHPTLTAVADALLAARETLGEQLRGLEKRLRDQAREDERARRLMTTPGVGVIVALTFVSAVDDPGRFRSSKAVGAHFGLTPKRYQSGETDLTGRISKVGDAGVRTALYEAANIILTRPVKGSALKSWAARLARRAGLRKARVALARKLAVVMHRMLADGTPFAAERAAAAA

SEQ ID NO: 109760 - protein, 350 aa, unidentified
MSMVCGLDLHRGQITYDAEIEETGEIWRGRIWSPDRARFRHWLEVDVAKRANGAPVAMAVEGCTGWRYVVEEITAAGFEAHLAEPAETQAARGRKKRAKTDRSDACLQRELLQRGELSESWIPPEGVLEWRERTRLCKTLVDERRMWVQRIHAELFQHGVALPEGEIRSEEVRTWLGSDEVQLTAAARQRIGVGYRVMDAIEDELVVLRRQVQRFASRQPACRALARAHYGVGPLTAVITWAEPGDCRRFSRSMQVVRHCGLDVTVHESDRYRPGGHLSREGPPTLRWALYEAGKCAARLTSPDYDYYRAVKKRRDGKLATLAVARKIARRCYHTLRAMDTELVYAIPEI

SEQ ID NO: 109761 - protein, 418 aa, unidentified
MIPQENRIWIGVDWGDRAHTVCVLDDAGAVLLKKVVPHSPAGLRDMTGAVSALGPVGGAAIEDAQGLAGQALLAEGWPVYCINPKLSYAWRKAWSVSEAKTDGRDAHMLADGLRQQHARLRPVPAVPAAIRGLALLCEDERRLIAQRTALVQQLQAALKRYFPVALAYFDNWTSPSAWDFLLTFPTPESLARATTRKLMGFFKTHRLALTPARQAQIQDRARALDWHVAPEVVEVKARLAQTTAKLLRTLQSQLDEYRKVIETAAAAQPQTALVASLPGAGAKLAPRLLAHILPILDQCASADSLMMLGGVSPVLFESGKHKRVRMRHACQKGFRATLHLFAAQSACWCAWARAFYDLARQRGQSHALALRNLARKWLKILFRMLKTNTPYDEELYLKQLHLKNPALTKYMDSAKAGG

SEQ ID NO: 109762 - protein, 379 aa, unidentified
MDHAITDTPAETVLYGALELSKNTWLLALQFPDRAQPSLYPIRGGDTEGLMARLMAARDRWARVSGKSPSIVLCYEAGYDAFWLARFLKARGIECLVVDAASMQVNRRARRAKTDRIDVGMLLRALIAWCQGDRHVWSVVRVPSVDEEDLRRSHRERDRLVRERTAHINRIKGLLFGQGIRGINVKSKYKTLQIDKLVTGDGRPLPLRLASEITREIARLALIQDQIAALERERDQAPTPCKATEKKRVQLMSLTGIGPAIAAVMTREVYYRQFDNRRQVAGFLGLATSPHDSGDVERSQGISRAGRGQVRGTIIQAAWLWLKHQPKSAITRWFVQRTAGQSGRIRRIMIVAVARKLAIALWRFLEQGLVPQGAMLANR

SEQ ID NO: 109763 - protein, 354 aa, unidentified
MTKDIIVALDVHKKFSWVVTMCTKTGDIIYSAKLSHNGRLQNFLRSIPQSTVVLEMSGTWWLIDLLEGLGHNVKALHPQAVRLIAQSAKKTDKNDAEILAHIARLGPCPCVWLPPKDLRELRALLRFRIFLVRRCTSIKNHIHYILRANGWQYPPITDIFGKTGREYLRGVELPEGMRWQMDRSLDMLEQMESVVAEIDKKVKDEVKNNENAQLLMSMPGIGEFGALLLTSEIGDVGRFSSAKKMCAYFGLVPRVRQSGERCYRGRISKEGNSHIRWYMVQAAWVAVRVDERIGAFYGRLQRRKGSKIALVATARKMLTIVWWMLKERKRYERLMVAKERKVRLVLRRKGAGQP

SEQ ID NO: 109764 - protein, 316 aa, unidentified
MQTFLNIGVDVAKDAVVVACAAQSFPVHSVANQRAPLLAWLKSLPAGSRIGLESTGGYHELLADLAYAQGHTVFLLNPLDTKHYARAMGNRAKTDRVDAELIARLIAQEHTRLRPYTPPTANQRRLDRLIRRRAKIVRIKNTLKLTMNNLSGFSAELKAVLLKLDALIAKIDAAMSAIAACSPQHVDAQQHLQTIVGVGPVVGMALTNTLERAPFRNADAFVAFIGYDPRANDSGHKVGRRRLSKRGPAELRRLLFNAAMAAIKSKVWKPIYEHYRALGWSTTAALVIIARKIARTAWSIHHYHSIFDPERITKNA

SEQ ID NO: 109765 - protein, 355 aa, unidentified
MAMVALWVGLDVGDYHTHICVIDEYGTVQLETSVETQPSNIASTLSDFPRHSIKKIVMEAGLPCSMICRHLRALSYPAAIFDARRIARILSLSGSKTDKNDARGIAQIARVAESALKEVHVKTPDIERLRGELVLRDSLVRQRVAAETAMRNTFRVYGVKLKSTSSSAVLRARVSEALKSLGDHGIALGGQVTPLLDLCCSLRSCVASMDLRLKAIAQKNEVTRRFMEIPAVGPICALSFYTAVGEPDRFARSKDIAAYLGLAPRVRQSGNSSRLGRVTGYGNKLTRSHLVMAARSLNRKNTIALSDLRTWGEGVMERSGSSKARVAIARKLATIMLAMWRDGRSFQPFREADQM

SEQ ID NO: 109766 - protein, 340 aa, unidentified
MQITTKFYLGIDVSKHWFDLSLLTVINHQKQIMVTERFDNNETGIKQMEQWLKKQNVSFNDNTLLVIENTGIYHRLIWEFCSTHKLPIHIGNAAHIKWSFGIARGKNDVIDSQRLCNYAHKHADELKATPELNPVFIELKDMMTSRSKLVSQLGSIRSHLKELKLSNNKATQKLIEQAHKPVLDGLKKSIALIEKQILNIIHKDDTIKTNYDLLITVPGIGHLTAVYILCCTNNFIDKISGKQLACYAGVVPFQDKSGSSIKGRNKVHKMANKELKKMLHLCALSAVKCYPEFKQYYERKKKEGKHVMSVLNAIRNKIVLRAVAVVNNQKPYVENYRKAV

SEQ ID NO: 109767 - protein, 419 aa, unidentified
MNPVIGLDVAKGESQVQAFLDKRKPYRKSFSILHNVEEFNTVFLKFLNEIETLAGKMPTVILESTGHYHTPIVQFLEEHQYVYIIVNPLIAYRAKSSSLRKVKTDAIDAFHLCELYYKEELEPYKKRGIQHLNLRNLTRLHESISGVSAQTKLQLHSVLDQIFPEYVGVFGDLYSKVSLQTLLQFPTSKSVLSISECTLVDEIASLCKSRSDKWAKERAQKLRDAASRNPFQNNLFQSHIFNLEILITLILQYQEHLSKLDAEIDALAQEIEEYKILQSIPGIGEKIAATIISEIGEIDRFNHPKKLVAFAGVDPSVYASGKFTASVNRITKRGSSSLRHALYMAVRCGIRDARKKKTADEMIPRNKRLREFYDKKRNEGKPFRVAVIACVNKLLHWIYALLKNKTDFQDTAQKLHPDK

SEQ ID NO: 109768 - protein, 354 aa, unidentified
MKRMTKYVALDVHQATTVTSVRTETGQVIARSIVPTEPRALTELFRGMRGLVHVAFEEGTQAQWLHDLLTPLVHRVVVCDRHGEKRRGNHGDRVDADQLSERLRCGGLRAVFHGPAGRATLKELTRTYRNLVEDATRVMLRLKALFRARAIPAAGTRVYQPRERAQWLAQLPDRGARFRAEALYAELDVLRELRPRAKAAMLTEARRDPAWPVLRAVPFLGPVRVAVLLATMQTPWRFRTKRHLWAYAGLAVVTHSSADYRMEQGQPVRRRRAPMTRGLNRNHNRVLKDVFKGAATAATARPGPLQDFYQRLLARGMRPELARVTLTRKFAALTLRLWKTGARYDPTQLTRQAQ

SEQ ID NO: 109769 - protein, 453 aa, unidentified
MARKAEKVRTKDGLKLKIVNPNAAGIDIAYGEMQVCVPEDRDGENNRCFGSFTCDYEEIASWLKACGITTVAMESTGSYWVGLYFFLEEKGFDVLLANAKDVKNVSGKKTDEADAEWIMLMHSYGLLKPSFHPDAAARNIRELARHRDNMLRSAGKEIQHMQKSLVLMNIKVDTVISDILGKSGKAIIEAILAGNHDPKSLAQLADPRCKASKETIEKSLEGTWDAVHLFELKQSYDLYKYIHTQITDCEAEMDRMLNDYTDGSGTDMQAYVPTKKRIAKKNAISFDAEKHAFSVWGVNAMEIPGMSHGALTVLMGELGSGFAEKFTSAKSFCKWCNLVPNNKISGGKLLSSKVPKQKNRVGQVFRLCANSVKSVKTGLGVYFRRQKSKGGHLQAIVATANKIARIFYIMVTTKVHFDESKVGLDEKELLQRKIALAQRTLDRLNLRLSVAEG

SEQ ID NO: 109770 - protein, 352 aa, unidentified
MTVINLARSITGGVDTHLDVHVAAALDDRGALLGVESFATTTDGYKKLLGWLSDFGPVELVGVEGTGSYGAGLTRHLQAEGIRVVEVDRPNRQRRRRKGKSDPQDAISAARAAQSGDAAGEARSRDGNVESMRVVRVARASARKARTQALNQMRGLISTAPEPIRDELRALNVFHLLERASIYRPGGKRDIVSLTKFTLRMLAKRAIALEAEITEIDAILTPLVKETAPELVAALGLGTDTASTLLVAAGDNPERLRGEAAFAHLCGASPIDASSGKQERHRLNRSGDRQANSALWHIVITRMVYDPRTTEYIERRTTEGLTKKEAVRCLKRYVAREVYSLLPHQKLGLDSP

SEQ ID NO: 109771 - protein, 320 aa, unidentified
MQSPSAVLNIGADVAKDAIVVACSEGSFPVREVANQRPAVLAFLKGLPAGSRIGVESTGTYHELFAETAHQLGFRVFLLNPKDTHHYAKAVGLRGKTDRVDAELIARMIAHEHTKLHVWNPPTPQQREIDRLIKRRATLISLCEAVEMSLHDLGGFADELKALRTRFNQLIARIDLRTKALVEASPERKQNFTRVCTITGVGPVIGTALVNTLERVPVKSADAFVAFTGLDPRPDDSGQHRGKRRLSKRGPGELRRLLFLAAMSAAKTKTWRPRYEHYRAKGLSGTAALVILARRIARTAWSIYTYKTEFDPARLTNPLT

SEQ ID NO: 109772 - protein, 355 aa, unidentified
MNQEKYIGMDVHQATISVAVMDSSGKLIMECILETKAATILEFIAGLRGTLSVTFEEGTSAAWLHDLLKPHVGHLIVCDPRRNALLKDGSKSDRIDARKLAELLHGNKLHAVYHGEHGVRTLKELGRSYLTITKDVTRIMSRIKALYRSRAIPCRGTTVYAVRHRSEWLAKIPEPGVRLRAERLYQQLDLLQPVRQGARRDLLIESHQHHAVKLLRQIPSIGPIRAALLVALMQTPHRFRTKRQLWAYSGFAVEIHDSGEYRFVRGKLVRNRERITVRGLNHNHNHDLKNLFKGAALSASTRPGPLCDFYVALVEKGMRPTMARLTLARKMAAITLTMWKKGVEFDAKQLQRQAA

SEQ ID NO: 109773 - protein, 451 aa, unidentified
MSSTSTPSAHREPFVSVNPNAAGLDIGSAEIWVCVPADRAPQPVRKFGTFTPDLQALADWLQACDIETVAMESTGVYWIPIYELLEARGFQVYLVNARHIKNVPGRKTDEKDCAWIQRLHTYGLLSASFRPEAEMCALRAYLRHRANLVDYRAAHIQHMQKALQQMNVQLTQVLSDITGETGLAIIRAIVAGERDPVKLAQMRNPRCAHSQDEIAKALTGHYRPEHVFALQQALALYDFYTAQIQECDAEIERHYPVFKPVVDVEQNPLPPTRKKNTHSKNAPSFDVRTQLYRLTGVDLTAIDGLNEVTAQIIISEIGTDMSKWRTEKHFCSWLHLAPHNDITGGKVIRSRTLKGKNRAAQAFRLAAQAVGRTDTGLGAFYRRKRAKFGPEAAIVATAHKLARITYHLLKYREPYQEMGREEYERQVGERELAQLTRKAAKLGFTLTPQAA

SEQ ID NO: 109774 - protein, 358 aa, unidentified
MQRNKKTFKGQNIYIGIDVHKKNWQVAVITESGYTERLSTAADAKALFKFLKSHYPEGNYRAVYESGFSGFATHYALSELGVSCVVAHAADIPSSQYELTMKSDRIDAEKLARALRAGLVRGIYVRPKDNLDDRGVLRIRKTIQIQVGGYKTRIKHLLHSNGVELPERFSRSGTHWSRAFIAWLREDVRLLSDTRRSLDLLLLQVETLRANLLEATRRVRALSMTDRYREDCALLMGIPGIGLTVAMTILTEVCDIGRFGNERQFASYLGLVPTSHSSGERVSHGEMTFRGNKHIGPLLVEASWVLIVRDRELGRMYTEYRWRMAGQKAIIKIARKLSNIIFAVLKTRKAYEPYRRDA

SEQ ID NO: 109775 - protein, 466 aa, unidentified
MVAVMIGVDPHKGSHTAVAISPAEEPLGELRVRACAGQAERLLAWAAAWPQRTWAIEGASGLGHLLAQQLLAAGEQVVDIQPKLGARVRLLATGAVNKNDPNDARSVAVAALRSPARRQVQPEDHAAVLKVWAKRHRDLGRARTQVVCRLHAVLCELVPGGVSKRISAPQAGRLLEGIRPAGAVGAARCELAAEFLADLRRIDAQMRDAKKKLTIAVRASGTTLTSVFGVGPIFAATVIGDVRHVSRFADRDHFAAYNGTAPIEVSSGRRKIYRLSRRGNRRLNHVIHMAAVTQVSHRHSDGRAYYERKLAEGKTPKEALRSLKRRVSDAVFAQLQADARRAAAGPALREPGRATTPSPARPAHTPRHRLFGQATPGPCHHPTAPAQLQVRTQRETPPNHLTQRGFAMRDLQARWYRLWQAQIWGFCAPEAARSGPVRPGSGAASAARGTGRMPSGPGPCLAAMSK

SEQ ID NO: 109776 - protein, 436 aa, unidentified
MAKVFIGVDPHKLSATIEVVDERETVLATGRFGTDKAGYAAMRKHVAAWPERVWAVEGSNGAGRPLAQRLVADGQDVVDVPAKLSARARLFDTGHNRKSDAHDAHAVAVVAVRTQGLRVLSYDEALEALRMLADRREELTRARVQSVNRLQRLLSELIPGKGKKDLTALQAKAILASVRPRDLPGKTRRRLAVEQLAELVAVEKKIKALTAELKQMVKASGSGLMELRGVGPVVAARVLADVGDIARFADRNRFASWTGTAPIEASSGEIVRHRLSRAGNRRLNHMIHIAATSQIRLQTPGRAYYRRKVAAGKTRAEAMRCLKRRISDALYRQLLIDAKTVHAASPDAGPGGHRGATLHSSAAGSHPHTGTSDQPLPGPAPTTLPATKPHANPCAASAPRPSRRRAGAVKVERPTGRTTLTATSAGAHSAAPKPPS

SEQ ID NO: 109777 - protein, 345 aa, unidentified
MAPRIQTIGLDIGKEVFQAHGIDRNEMVVLRRKLRRAEVTAFFAGLRPCLVGMEATAGSHHWARTLAAMGHKVRVIPAAYVKAYVKTNKSDAKDAEAICEAVRRPGMRFAAVKTKEQQATLIVHRTRELLVRQRIVLTNALRGFLAEFGIVAPRGYSGTNKSLEAVRGAEIPSSARPALQLLKQAVELLRKQSEACEDQIGRHHTDDADSVRLATIPHVGPITASAVIATIGNAGQFCSARQFAAWLGLVPREFSTGGKQKLGHISKRGNPYLRRLLFLAASSALRDPKFAKTSAGAWALSLRARKPYRLTVIALAARLARTMWAMLMRRRNFEPYPERLAHTGG

SEQ ID NO: 109778 - protein, 398 aa, unidentified
MKNNSKSERVKKQNDAAAQRKHDYSSDVQRLLLKLGQQSVAAEGIAYFIGIDLGDKKSNYCFMGRGEEYLVEGQLPTTLEAFAAYFRAIRRSRIALEVGTHSPWVSNLLEGLGHEVYVANPRKMESIRKNKRKNDKKDARTLTRLVRADPQLLHPIRHRGVQAREDLILLRARDALVGARTKLINCVRGLVKSVGGRVPKCCSESFHRQAVAAIPESIRETLLPIVEQIGAMTVQIRKLEGQVKRMAGKKYPETVLFKQVAGVGDLTALAYLLTLENPGRFAKSREVGPYLGLVPKQDDSGDTSKQLRITKEGDTMVRKLLTGSSQYILGPFGPDSDLRRFGLKLAARGGKNAKKRAVTAVTRKLAVLLHRLWVTAEEYEPLRNARLQEAALAAVAKA

SEQ ID NO: 109779 - protein, 405 aa, unidentified
MPINMQYERAFGLDLSKKTFHGCILDGPDLGSRHFFTGEMGQQGKAKLAGRLCKGDLVLMEAGTASFSLARFLLENTESEVVVLNPAKLYNIFNSTLKTDKADSEKIAKIARTMPRDEWPTVSIPTREEQAERSVVSLEVFLAQEITMLVNRLYALFNSMGHPFVKKSDLKTEESRLALANRLLCEDSLAIEQAVMLSDQIGNVTGQLEQCKQRLRDICLSHPKEALSLLSIPGIGLMTAASQIAFLGDGSRFDSPDSYVNYVGLSERRFDSGTKVSKGHISHMGNKCIRRNIIQAAWATSKTTKCNPLSERYEHLRLRGKSKPVAAVAVAKKMIQLSYILVTSNGIYEFTKQQGLAAFRRRLQYHKLAELLDYLPEPIRMEMEEIDRTKRKEAAATTSRQKKFA

SEQ ID NO: 109780 - protein, 370 aa, unidentified
MNHLIRIGIDTSKSVFVLHGVNAAEQPVLQKKLRRRQVIPFFAEMPATQIGIEACGASHYWARELMALGHQVRLLPPQYVKPYVQRGKNDMADASAICEAMSRPRMRFVPVKSVEQQAALMLVGVRDQLVARRTQLSNMIRGYAAEFGLSAARGFDKIEPLLARLTQEPGLPALAKALFAALATEYAELKPKLRKIEAELLSWHRQNELSRRLAEIPAIGPIGASLLAMKVTDPHAFRRARDLAAWLGLTPKDHSTAGKQRLGVITRAGDEMLRRVLVAGATAVIQQVSKGRAPASPWLAALIRRKPPKAAAVALANKTARIAWKLMVSGEHYDPQRAKRGFVPPTGIVAPRKRRQGRFAPPSAVACGQP

SEQ ID NO: 109781 - protein, 326 aa, unidentified
MKNLVTGIDISKDTLDYCSLGNNDVQVKNRGVLEIHRKAINKWLDDFDKTNTVFALEHTGHYGAALIDCLSQKKYAFYLINPLELKKSLGIQRGKSDIKDAYRIAEYAITNKHKLNPYHLPAENLGRLKALITARERYVKMSVQVQNSLKANEILNRTIDVKMLIREEKKQYKSLQKSIKNIEDEMQKIIKADQELKSSYKKVTAVIGVGPVIAIKCITETANFTKFHNPRKFSCHCGLAPFPYQSGSSIRGKTRTHFLRDKSLKAILIKGAVTAVQHDPQLKTYYNRKVKDGKHHMSVINAVANKLVLRIFAVAKREEPFVKLSA

SEQ ID NO: 109782 - protein, 343 aa, unidentified
MKITRVGVDLAKKVFQVHGVDRHGRPVWLRQLKRSNWLQVLTEKLEPGCEIGMEACGGSHHWARELQARGFKVKLISPQFVKPYLKSLKNDVNDAEAICEAMSRHHMRFVAIKTVEQQDIQALHRVREGLKQSRTAKGNQIRGLVAEYGLVAPKQMGSLRKAIPCWLEDAENGLQVAFRALLHGLWQDLQYMDERLKELDKEILLLSERHPDAKRLKQLRGIGPLTATAMVAQFGDGRHFRRGRQAAASVGITPRHAGTGGKNWISGITKRGNPYLRSILIHGARSVVSKAKHKDDRLSRWVTELANRSHPNVAAVALANKTVRIAWAMLRNGADYDPEFTTA

SEQ ID NO: 109783 - protein, 360 aa, unidentified
MSNDNKEQPKMTAGLDLGDKYSYLCLLDTASGEVVEEGRLRTTAEALGQRFEGCQPMRIAIEVGTHSPWVSRLLEERGHEVLVANARKLRLIHQNKHKTDNIDAENLARLARVDPKLLAPLKHREKHTQAHLALLRSREALVEARTRLVNHVRGSVKAFGARLPKCSTHSFHKKAAPQIPEELEEVLRPVLETIALLSERIKDYERKLEALAEEHYPETKLLRQVRGVGPLTALAFVLTLEDPKRFEKSRAVGAYLGLAPAKNQSGERDPQQRISKEGDEMLRRLLVGSAHYILGPFGEDSDLRRHGEKIAQRGAKSAKKRAVVAVARKLSVLLHHLWISGEAYEPLYNARHPEEGGRVA

SEQ ID NO: 109784 - protein, 343 aa, unidentified
MQIRSVGIDLGKTTFHLVALGDNGKVLLKKKFTQKQLIAFTANMQTCLIGMEACSGSHFLGRALREQGHDVKLIPAQFVKPFVKSNKNDFIDAEAIAEAVDRENMRFVPIKTDDQLDLQALHRVRDRLMTRRTALINQIRAFLLERGIVFAKSPIRLREALPEVLENVNENLTPRMRNLVAMLWSEWKDLELQIVQMNDEVERIASSDAACRRLRQIPGIGPLVATAIVASIGNGAAFRKGREFAAWMGLLPKQHSTGGKARLYGISKRGNSYLRKILIHGARAVVLRSKRDRIAMGAWMTSLETRAPRNVLIVATAHKLARIAWAVLSSGQDYRAVPEAVTV

SEQ ID NO: 109785 - protein, 368 aa, unidentified
MDKIGVVEGRRQEGLPVPKRPPDGTPVWMAIDISRSKAVYCLRWDGREQRRLSTPLGIEHVRAVVEHYRGCQLHVAYEACGFGYELAWWLQEHGVAARVIAPSRVERAPGLQVKTDRVDVGKLARKLEKGDLKAIYIPSRTVHEQRQIGRTYAQSLKERKRAQVRIRSLMQEQGRLGPLPAAGWKVYSAWLSVQNLPEPVRLCVQVHEQLRGVADQQAKRMNAELYQLAHSAAYRPLVKALSAQSGVGWQSAIRLVLELGTMERFRTTAALPHYLGLTPSQYSSGEVDHRGHTLKCGPGFLRALLLQCAWSAVRQGGDPGLHDRFATLAPRIGRKRAIVAVARKLAIKLRGRWRTHVLSNEPASALAV

SEQ ID NO: 109786 - protein, 354 aa, unidentified
MIIIGVDYHPSFQQIAFLTEETGEYDERQLNHSEGEAERFYRDLHQRGMSVRVGMEASGYSRWFERLLAELGFELWIGDPAEIKTRRVKKQKTDRNDARLLLRLMREGTFPKIWIPSPENRDVRQLLWHRHRLVQMRTRIGNQLQALAMNEGRRRKWKLWSAQGRAELEKLVLGPWASRRRQELLELLDRLDPTIEELTAAVEQEAHKRAEALRLMTHPGVGPITALAFVLIIGTPERFARGKQIGTYVGMIPSEDSSAGKQRLGHISKQGSSLLRFLLVEAAHAAARINPEWRRRYIHLAMRRHKSIAKVAMGRRLGIRLYWMWRNHCEYSPSLEFGSYAGQLGTVHGVTTAP

SEQ ID NO: 109787 - protein, 363 aa, unidentified
MQVRHIFVGIDLGDKNSVARIAVDRDKSERFGFLNTRQGRARLFREVKRRSEQADGATIVMAYEASSCGFVLSDEAEALGIKCRVLAPTKMEKSVEQRQHKNDDRDANDVLEKLRGHVLAGNRLPTVWVPDLETRDDRELIRTRLDLTEKQTQIKAQIRMLIKRHGLEKPSGLGAGWTIGYRRWLQALRESEQLLGWSTRQALDSLLRQLQCLEAEIDRVQKPLEELANEPRHKPIIEELRQEAGVGLLTAMVYRTEIGQAGRFGRGRQVGKFVGLTPTSHESGQQSDRKGHISRQGPPRLRKVLCQASWVHIVHDARAGRIYQRLVSRNPKKKKIALVAVMRRLAVRMWHRMRKIELQQVRA

SEQ ID NO: 109788 - protein, 514 aa, unidentified
MSGRKVPALHVRTVQQPLSPPPTPTIVHPNHAPTRSRQADTADALRRAGRLSEQTRRDAEECAKVAGLPVRHAHAAGIDVGDSTHWVCVDSTPDGSDTVREFPAHTPGLRLLALWLRQCGVTTVALEASGVYGHVLFLTLLEAGFEVILTAPQFARQIKGRPKTDKRDCQWIQRLHKHGLLPAVFQPNEATHSLRDYVRQRANLVRLSGQHIQRMQKALVLMNLKLTKVLGDVTGVTGLKIIRAILAGQRDPRVLAKLRDRRCQHTAAEIAVALDGRYRPEHVTELRCCLTMWEKYQEVIAELDTVIAGQLRAMARQSELPPLSPKRRVRGRKPHDPRFDVRAALYYVTGIDLTAIEGIDELHALTLVSELGTDFTKWPTVKHFTSWLGLCPNWKKTGGKVKSSQTRRGKNRAAGALRLAAWSLMRSKSYLGAYLRRQRSRLGAPKAITATAHKLARIVYNVMRYGVAYMMETEAAYAEQVRQRLEKQLQRRAQELGFELKKIDPPATPTVGVV

SEQ ID NO: 109789 - protein, 338 aa, unidentified
MVLIGIDPHKATHTAVAVDTEETALAELTVKADRHQVERLLKWAIDFPDRRWAVESANGLGFLLAQQLVAAGEDVVDVPPTLAARVRDLGSGKTQKNDRNDALSTAIAAMRAKRLRNVVAEDHGGVLRLLVDHHHDLGSLRTQAVCRLHALVRCLIPGGTGVRLSAARAAVVLRSVRPTNAVDVERKRMALGHVADIRRLDAEIAASKVRIETAVAASGTSVTELYGVGPVVAAFLIGHSGDMARFANRDHYASYNATAPIEASSGPRVRHRLNPRGNRRLNHAIHVIAICQIRHPTEGRKYFDRKVAEGKTTKEALRALKRQISNVVYRQLVIDSGR

SEQ ID NO: 109790 - protein, 426 aa, unidentified
MDIVHPRVAGIDVHKKVVWVAVRLPGEAPGERTVVTKRFKTFWRALQKMAAWLAELGVTDAAMESTGVYWWPVYHALAGARIEVCVCNAAHMRNVPGRKRDIADCQWIAELHEHGLLRPSFIPAAEVAALRARTRYRKRLIEQRTAEGQRLAKVLEDAGIKIDSVASRLLGKSGREMIEALIAGERSPERLADLAKGVLRRKTDDLQMACDGRFTDSHAQMCRLHLDAYDHLTATIAELDALVAEAAAPFAAVIARLITIPGIGQRTAEVIVAETGGDMARFASSARLAAWAGLAPGDNESAGKRRHAAARQGNRHLRAAMTEAAWATARTRTRPGARFRRLARRFGKDHEKKAATAVARTLICIAWAVMAHGQDYADAGEDYYDQRDQRNREHLIRHHQQALARLGCQVTLVPPGDGSPPPGQVA

SEQ ID NO: 109791 - protein, 322 aa, unidentified
MSDERHVGVDVSKLWLDFAVLETQEAFRCENSEAGIASVLERLKTIKPTLVVLEASGGYEFEFAAVLSGHRLPVAVVNPRQVRDFAKALGVLAKTDAVDAAVIAKFAAAIKPQISAIPDEETERLDAVVARRRQLIQMLSAEKNRRAMLPSRKSRDPVRNSLDVSIRWLEQQLEEIDEQLSKLIQGSPIWKAREDLLKTAQGIGKVNARTLIADLPELGTLNRREVAALVGLAPFNRDSGALKGTRHIWGGRAAIRSALYMAVVASLRLRASRIRCFYDRLRAAGKPAKVAIVACMRKLLTILNAMARTGRPWNALPQPQND

SEQ ID NO: 109792 - protein, 371 aa, unidentified
MDVHSKSYNLCALESIWGQKDRLLAEAKVAATADEVARFIKALAKRYGLDEKTDILCGYEAGCFGYSLYHQLRERKIHCVILAPTTMPAPRGLRIKTDIRDAFEIARCLINGNYNHVYVLDDDDNDVKEYVRMRDDHKIAFKRIKQQIGAFCLRLGFQYSEGTKWTRQHLAWLRQLPLRAMQKETLDDYLLTYMHLEERLAQFDRRIEELASRERYQEKLKSLGCFLGMSTYNSLSLLVEVGDFERFAKAPQFSAFLGLVPGEHSSGDNINRLSISKAGNTHLRSLLIEAAQCYCRGIIGYKSKALKARQAGNAQEVIAYADRANVRLRKKYYRMLRHGKKRNVIVAAIARELACFIWGMMTKSYEREEVA

SEQ ID NO: 109793 - protein, 384 aa, unidentified
MRNVALDLGNRITYARADGGVIVERRVFNSLTEAESLLGPNTSPARVAIEASREAWFVHDTLTGWGHQVTLVDTTRVRELGIGHHKRKNDRIDAGILAVAIEKGTLPKAHLLSAARRRLREQLGLHRSLTESRASFATQLRGLLRARGVRLVKCAVARLPAVVEARCALAERELVKALRVAIEQLTHLLQGVDLEIERLAAEEPAILRLKTVPGVATIVASAFVSVIDDPKRFEHAHQVEAYVGLVPSEFTSGRRKLGSITKQGNSYLRSMLVQAAWSIIRSRQSTPLKTWALAVQRRRGKHVAAVALARRLAGVLWAIWYDGSVFEALHVGRASAEGLIHQARSIEFTAEQLRLQAAAAERVAAALELARRKTLVPHQRKATV

SEQ ID NO: 109794 - protein, 315 aa, unidentified
MTNLKMSKSSINVGIDVGKDTLDVFIYEKGLYWQDSNSPEGIGRILRRLAHYRVERLVMEATGRYEFALAEAAYGKKLPVCIAKPISIRRYAGAIEKLAKTDRIDAEVIAEYAAIIQPEPTPQKSKNLIAIKNLLARRRQVMGMRTQELNRVKIMGKAFEVSCNRMIRFFDQEIERLENRLQKHVDQQAEWSEKQSLLLSAPGVGNTLVYTLLADLPEIGTLTNKQIGKLVGVAPINRDSGKSRGKRRIQGGRACVRTTLYMATLSSIQCNPAIKCFYTKLVKQGKHKKVALTACMRKFITMLNAMVRDNESWCY

SEQ ID NO: 109795 - protein, 315 aa, unidentified
MRIPQAFMVGIDVSKAHFDVAVEGKSAVGRFDNDAPGRTALATAIAGAELVVVEATGGYEMAIVRALMAAGIPIAVVNPRQVRDFARASGRLAKTDQVDARVILHFARAMRPAQIPHIDDGRIALAALVARRRQLIDMAVAEKNRLEHAPQAVAALIGETLAALKSQLARVDAAIALAIEAEPDMAARRDLLLTVPGIGEVGAAVLIAELPELGAIDDKKLAALVGVAPVAHDSGTWRGQRHIAGGRATVRCALYMATLSAIRCSPAIKAFHKRLRDAGKPPKVALVAAMRKFIVMINTIIKRRTPWSEPQQHGC

SEQ ID NO: 109796 - protein, 330 aa, unidentified
MTHAVLGIDIAKLTFDACLIRPDGSLRHRTRFANSPAGFTELAAWLKKHHVTTTHACLEATSTYADALARDLLERAHRVSVVNPARIHDFGKSRLTRTKTDKADAALIARFCLTQTPPAWTPPLPEITELQGLIRHLETLEAARQQHANQLATATTQIVRDSLTALIRHLEGQVVEVEAAITEHIARHPDLRADVALLVSIPGIGERTAARLLAEIIHLKSYASARQVAAYAGVSPQQRESGTSVRGKTQLSKTGNARVRRAVYLPAVVAKRYNPLIKALCERLAERGKPPMVQIGAAMRKLLHLAYGVLKSRKPFDPNYGRPQQQPHAA

SEQ ID NO: 109797 - protein, 343 aa, unidentified
MQNTIIAVDIAKNVFEVAVSRRTGLVAERHRLSRRRFLPFFAELKPTTVLLEACGSAHHWARQLQNLGHKPILLPAHATRPYVLRNKTDQADAKALLEASRNKDIKPVPVKSIEQQALMTLHRLRSGWMSVRTARLNAIRGHLRELGFTIPLGARLVVPRLWELLEDAETDIPQFLRPALAEAGREVRELEQRILDIEKQLREVSRQSPLIMRLRTVPGIGLLTATALVAFVGNVQRFSSGRRFACYLGITPREYSSGQRRRLGHISKRGDVYLRTFLIHGARSVLNAAKRAENPDRLRTWVLSLEARAGHKRAAVALANKMARIAWAVWRSESAFQSTPAEA

SEQ ID NO: 109798 - protein, 386 aa, unidentified
MQRNDLSRSLVAFDQNSTLVSVIELSLKSWLVAGLVPGVERSPLKKLGADPDMLLALLHRWRAEAIKAGRQVERIVVAFEAGRDGFWLARWLRARGIESYVIHPTSIPVSREHRRAKSDRLDTQLLMRSVLGWLRGEVKHCSMVAIPTLAEEDARRPNREHEMLVKERSRIINRMKATMVRLGIRTFNITLRKAADKLTGLRTPEGVPLPANTLDELRRDMARLHMIREQLAAIEKARLARLKAAPQDGAHPMLLMLAKVLGIGVETADMLVHEVLSRDLRDDRAVGRYAGMTGAPDESGSKRREKGLAKAGNARVRRGMIQLAWRWLMFQKDSPLTQWYLARTAGAGQAVRKTMIVALARKLLIALWHYVRSGAVPAGVQLRAAI

SEQ ID NO: 109799 - protein, 384 aa, unidentified
MKRVSGLDVHKDSVYVCVLQENGEKVEERFGTLTPELNRLRETLLLHKVEEVAMESTSIYWIPIWNVLENDFELKLVNPYFIKQLPGRKTDVKDAEWIATVLQKELIRGSYVPEPHIQEMRQYERFVSNLSRRIVHLEQQIDMQLQRCNIRLSNYVTDIGGVSMRKVIKAITQGEIRAEALCALVHSRITNKHSKQIITDSLCGIIKPVDVFMLKQYLDELELLEKQKINSLEVLASIADHFFAKEMALLMTIPGVQKQSAMTILAELGANMKMFATAAALVGWAGMRPRNEESAGKIKSRKTLHGNKFLRVIIVQCAWAASRTKNGRLAQKFRYLSARMNSQKALVAIARKLLVIIWNMLSKNEAFDQARGINNKPRIVQVFN

SEQ ID NO: 109800 - protein, 341 aa, unidentified
MKHRHSDENGFSIYVGLDWGTTFHRACVLDASGKILRECRIEHSGQAIMAFLRDLNGMVSGKPDSIAVAIEVPRGPVVEAFLEGGFTVFSINPKQLDRFRDRYTVAGAKDDSRDAYVAADSLRTDQHCFRRLGVHHPDVVRLRELSRTEESLGGDLRRVINQLYQLLLRYYPQLLQLSSTPDEPWIWALLELAPVPQRGARLTVVRLKQLLSKHRIHRWTAEEVREVLATTPLPLAAGSADAISEHALLLLPQLRLLYGQRQQIRDRIEALLDRMTILGRENSECQEHRDIGLLLSLPGVGCLIGANLFSEGSDPLAQRDYYALRAHSGIAPVTKQSGKSK

SEQ ID NO: 109801 - protein, 350 aa, unidentified
MSRKSLPCDVTTIGIDLGKNTFHLIGLDRRGAIVLQLKVSRAQLERRIANVPRCLIGMEACSGAHHIGRQFEALGHDVRLIPAQYVKPFLKSHKNDYRDAEAIAEAVQRPTMRFVRIKTPEQMDLLALHRVRSRLVGQRTAATNQIRGFLIERGITVRQGLMPLRKALPEILSSGALSPRMVALIADLAADWRRLDERIEGVSADIESLAEQDASCQRLMTVPGIGPIISSAVVAAIGNGTGFKQGRDFGAWLGLVPRQESTGDRTILGKISKRGNKYLRTLFVQAAHVVLVRRPGAARRGLWPWIAQASKRLHRNMLAIALANKLARIAWAVLARGNAYQPRIAADAAS

SEQ ID NO: 109802 - protein, 339 aa, unidentified
MTHFVGLDVSQKMTSICVVDNAGRRLWRGQCPSVPEQIGILVRRHAGEDARIGIETGAMTPWLVHELRNLGLEVVCLDARHARAALEMQINKTDQNDAEGLAQIVRTGWYRSVYVKSFDSHRARSLLGARAQLVGMTTRLSNHIRGVLKTFGLLPGSMRGLPFDRRVEALLLDRSDVALIVRPMLVAWRQLREQVVAFDKAIRVLVRSNSACRLLMSVPGIGVLSALVYVSTVEDPARFGRSRSVGAHLGLTPRQYQSGEVDRSGRISKCGDTLARTLMYEAAGVVLTRLKRASSLKDWAQAIAKRSGAGKARVALARKLSVILHSIWRSGQPFRWSEQ

SEQ ID NO: 109803 - protein, 420 aa, unidentified
MKYAPVSRPGPHPGGVTAGIDWASADHAVCVVDGAGEVVSRFSVEHSAEGLRALVSRLARAGVREAAIERGDGPVVDALLAAGVTVVVITPRQIKNLRSRYGSAGNKDDRFDAYVLADVLRTDRARLRPLIPNSPATVTLRQACRARQDLVRHRVAVTNQLRAHLLCVFPGAVGLFCRLDSAISLAFLARFGCQDRAGWLSEKRLAAWLKGAGYSGRISPAVLYERLRSAPGGATGEQGAASAQVTRALAAVLASLNTQIKALEAQIAGQLAAHADGHIFTSLPRSGTVRAARLLAEIGDCRARFPDPQALICLAGAAPSTRQSGKHKAVTFRWAVSKQLRDAVCDFADGSRHASPWAAHIYNAAIARGKDHPHAIRILARAWLYVIWHCWHNSVAYDVGHHRALQRLLTAQDTTTKPAA

SEQ ID NO: 109804 - protein, 381 aa, unidentified
MDQKQTTQEKGPITKFPVLFVGFELGNSTWKMACSDGRKVRHVTVAARDLNQVERALLRAQDHFAMADGYSTVSCYEAGRDGFWLHRYLQDRGIDNVVVDSASLEVDRRLRRAKTDRIDAGKLLRMLIRYHGGEKRLWRVVRVPSREDEDARHLHRELESLKRERTRHRNRIHGILMQQGLCLPNPSKKRFLKDLEALRTWDGQKLPAGMKARLVRSYKQLRLVEDQISALATEKREQLKQVDNAKMRQVAQLLRLPGIGPVSSWAFVMEFFGWRQFRNRREVAALAGLTPTPYDSGRKLREQGISKAGNRRIRTLAIEIAWAWLRYQPHSRLSQWFSERFAGGGTRMRRVGIVALARRLLVDLWRFLEYGVVPEGALLTT

SEQ ID NO: 109805 - protein, 314 aa, unidentified
MSTEYFVGIDVSKDTLDVCVYPTQDTFRVPNSPDGLDELMKRLKPIEPRLIVFEATGGYETLAVSSLAAAGLPVVVVNPRQIRDFAKSIGRLAKTDVIDAGVIARFASAVRPELRPLKDSPSQELTGLVTRRRQIVGMIVAETNRLNAATRRNRRDIQAHIRWLQKRQDQIDDEIKRDIKNSPLWRTTDQILQSTSGVGPATSSTLISCVPELGQLNHKKIACLIGVAPLNRDSGRFKGRRMIWGGRAQVRAVLYMSTLSAIRFNPIIRQFYQRLKEAGKCFKVAMVACMRKLLVILNAMVRNQTKWRHCENKP

SEQ ID NO: 109806 - protein, 316 aa, unidentified
MSHPATPVSRFIGCDVGKTAIVVFDSMTGRSRSIANEPQALSDFASGLEPTCFVVCEATGGYEGALLAALLAAGVPVHRADARKVKAFIRSFGTIGKTDAIDAKALARYGSDRWAELARWQARDRERLRLQGLVLARRDMVRDRLAYANRRAAPGAEPAQAHLDALLASFDAQIKAIDADINVLTAQCQPIARAVNTLVAIEGMGAKTATALIALMPELGSLARRQAAALAGLAPHPRQSGELDAYRRTRGGRPEVKRVLFMAALSARKHNPTLKAFFERLVLAGKKPLVAITAIMRKLVVIANAKLKSLNALQLS

SEQ ID NO: 109807 - protein, 420 aa, unidentified
MPNIEIGVDFMVKENFIYVGIDLHKETHTAVMIDCYNQKLGEITFPNRPADFPKLVIKVKKCNTDAKEVVYGLENAYGYGRPLAVWLIDKGYFVKDVNTAISHRQAKHRGAMYRKSDSDDAEAIALATLNMLDKLPDACPNDAYWSLGQLVHRRDNIMKQRTRLVNQLHEQLCIAYPSYKSFFNDISRPTALYFWEHYPSRKYLRGKSVEDLRKELVPVSHNRCSTKNCEKILDAVASDKVKNNAYQDARDMVTLSIVSDLQHYDSQLAEVDKMLEQMYKMLGCTLTTIPGVNVITAVKILAEIGDIKRFSNANKLAQFAGIAPLHLSSSGKGKDVATKQGNRRLQATIYFLAIQMVQVSSKGTPRNSVVRAYYEKRKAEGKTSQQALICISRRLISIIYGMLKHGTEYRMPVVESAGEK

SEQ ID NO: 109808 - protein, 343 aa, unidentified
MQVSTIGVDLAKNVFQVHGVDSAGKVVITRPLRRKQVIDFFSKIPPCLVGMEACGTAHHWAREVSKLGHTVRLMPPSYVKGYVKRSKSDAADAAAICEAVTRPSMRFVPIKSADQQALLMLHRTRDLLIRQRTQLINALRAHLAEFGLVAETGREGLAQLAAIITDQSNREALPSAMKQALQAIVDQLAALELQIGTLDRAIHAHHRANDMSCRLETVPGIGVIGATAIASTVTDPSDFKSGRDFAAWIGLVPRQHSTGGKERLGGISKQGDRYLRRLLVIGATAVVRHARQHPQKHPWVMRLLAKKPAKLVAVAVANKMARIAWAIMAKGGYYRAPELAVAA

SEQ ID NO: 109809 - protein, 350 aa, unidentified
MKKICIGIDVSKETLDVTVIHIESYELVEKLGYSKFDNRPSGFRSMTAWVRKVIKSRGQMDEALFCMETTGSYDLPLCHWLHKNGLNVWRESALQIHCSKGFQRGKSDKEDSEVIAQYAARHQSRYTAFVPDAEAIADLKELICYRDSLVERRKECKVRLANKKETLVNRNSKAWKCIERLSKAEIKRLDKVIGECDEEIRNLMKEDEEMEKNYQHLTSIVGIGLINGAALIAYTGNFKKITTPNKMSCYCGCFTFYEDSGTSVHRKSPYRNACCKMLKGYLRMAAKSAMLANTELRKYSERLREKGKPYAVILNNVANKLMHIMFSLVKHDYDYEYNHEMVRRMEREIA

SEQ ID NO: 109810 - protein, 361 aa, unidentified
MTRSSKYVGLDVHQATTVSTVRDDAGRVLARTVVPTEAEALREFFRGMRGPIHVALEEGTQAQWLHDLLVPVVHRVVVCDRRGKSRQGNKGDQPDADELSDLLRCGRLRAVYHETGDRAMLKELARTYANLVEDSTRVMQRLKALFRARGIRTSGRSVYQREQRADWLRQLPDAGVRFRATVLYQELELLQELRPNAKAAMLTEARRDSAWRVLRTIPYLGPVRVAMLLATVQTPWRFRTKRNLWAYAGLAVVTHTTAEYELDGQRRVRRRRRAPLTRGLNRNHNRVMKDVFKAAATAAATRVGPLQDWYHGLLTRGMREELARVTLARKLAAITLHLWKRGERFDPTQLTVQAVHAHQAR

SEQ ID NO: 109811 - protein, 372 aa, unidentified
MQSYYVGLDVHSRESVFVVENEAGAIVARGSVPTTVNGLKHLRDSCGLPAATGVALETGTSAFFVARELARLELKPVVIDAHEVRRKAQRPEQKSDTRDALELCEGLRRGFYRSLVHVPSPAISDLRTTLSRRRHFIRIQTAEVNAVKRLLRGVGRNSGRRGSLRTDAHWQSLLAGDLVPEQLQDHVRHHYAVWRQAAERVRALDLSLGDSARQRRDAVKRLETVPGVGPIVALTAIAVLAEVSRFESAKHAASYAGLVPSTFQSGERDAHGHITKRGSAELRAMLCEAAHHARRPVHPLHPHFARVCARRGYKTAVVAVAHRLCRILFAMLRDGTDFSVTRVGVEEGDFERTTTYKYRLRPKPAGRLPVAG

SEQ ID NO: 109812 - protein, 472 aa, unidentified
MRKHKRAKTKSKASKPIHDPQPDSAGVDIGANEIWVAVPAERTEKSLRRFDAFTQDLKALVKWLLDCGVRSVAMESTGVYWIPLFQLLEDAGLKVCLVNARHVKNVPGRKSDVRDCQWLQYLHSVGLLLGSFRPHQAICAARSIYRYRQNLLSMAAQHIQHMQAALDQMNIKLHHVIDDLTGLTGRTIIEAILSGQRDPVQLAKLRDKRIQAAESTIVKALEGDWRKEHLFVLAAAWDNWKQVQQQIQKCDQQLWQYTRELEAATTIAKPTKTMRLKPQWIGSSPVIGPQPAPRVRKKTSKNQPEAPWREELSRFFGVDLTAIPGISVLTGLTLMTELGNDLSAFKSQHHFASWLCLCPDNETSASKVLRRATRRSQNRVRQALRMAASSLHHDKSYLGHKYRRLRAKLGAPKAVTAMAHQLARIIWTLIARRVPFDLSIFALQEQANEQRRLNRLAASARQMGYQLTPIAA

SEQ ID NO: 109813 - protein, 430 aa, unidentified
MKSNTQNAKIEAITEKTLVLGIDVGSETHYARAFDYRGVEYSKKPFKFSNTEAGFVTFKAWVLDIKEKHGKDKVIPGMEPTGHYWFNLGKFLQDNEMKPVLVNPHHVKKSKELDDNHPTKNDRKDPKVIAGLVREGRYMIPYLPDGVYADLRTASNIRFQLQAELTRIQNRINCWFNIYFPEYKTVYGKPDAKSGILILKEAPLPEDILTLGIDGVNQIWRDAKLRAVGKARAKTLIEAAEHSVGSKEGAVSARMEIRMLLEDYESRNIRLQEVMGLIEGLVNQIPMAEKLLEIKGVGIKTVSGFLAEVGDIRRFNDPKELQKLAGLALVENSSGKHKGKTTISRRGRKRLRYLLFEVAMSLVAKNPEFRELHNYYTTRRLNPLKKMQSLMAIAAKLLRVFYAILTKGVGYDPKKMVNDIRRPAAYAQAA

SEQ ID NO: 109814 - protein, 422 aa, unidentified
MPPSADGARRQTNMEQVFERCAGLDVHKATVSACVRVPRAGGRRHQEIRTFGTSTNDLLTMRDWLAGYAVTHIAMEATGVYWKPIYYVLEEGFTLLLVNAAHVKQVPGRKSDVADCAWLAQLLEHGLLRASFVLPRPIRELRDPARLRKRLTQDRARAANRLHKVLQDAGLKLSSVAANVLGVSGRAMLSALMGGNSDPNQLAELARGRMRNKMPALRQALTGRFRSHHAFLLGQVIAHVDYLDESIIDVSKRIEELLVAFAATLERLVTIPGVKRRTAEVIIAETGADMSRFASAQHLSSWAGICPGSDESAGKRRSGRSRQGNRWLRAALIESANPAGHTKATALAARYRRIRARRGHNRAIVAVGRSILEISYYVMSRATTYLEVGTNYLDQRHAERLKRRSLSQLQRLGYQVTLVTAA

SEQ ID NO: 109815 - protein, 429 aa, unidentified
MNSTQNKKIEQVKETTMIVGIDVGSEKHYFRAFNWRGIELTRKPVAFSNSVEGFNSFYNSVVELMQKNELKEALVGIEPTGHYWFDLGQFMGEKNIKFVMVNPHHVHKTKELDDNSPSKNDRKDPRVIAGLVRDGRYFYSYMPTGVYPELRNASNRRFVLVEEQTRSKNRLQKWVAVYFPEYKGIYTHIDAKGGLLVLKQAPTLEEIVRLGVEGIIKIWKDAKLRGNGHKKAILILNAAMKSIGLKAGLTEARMEIQDLIEDYELQTKRLERVNDLIKELCQQVRYADKLLEIKGIGITTVAGFIAEVGDITRFDSTKELQKLAGLELVADSSGKHDGKTKISKRGRKRLRYLLFEAAISVVGKNEEFKEIHRYYTTREKNPLKKMQSLIAVACKLIRVFHVILTKGISYDASKMLKDIRRPGEQLKAA

SEQ ID NO: 109816 - protein, 370 aa, unidentified
MKEITTSYIGLDIHKDSIAMAIAEAGRSAPRFIGTMTPEPAALCKALTRCTKRSNTLIVYEAGPCGYGWTRYLSAQGWRCEVISPAHITRKASEKLIKTDRLDALLLARESRAGNLVRVVVPDERDEAIRDLARAREDAGAARLRARLQLKAMLLRHGRAYQGKTSWTEAHERHLAGIKFELPAQQIAFDEYRQAVKDAHERLERLTQALREQCEHWRMKGVVKALMCLRGLDIIAATVFIAEIGDLSRFAHPKALMKYLGLTPSEHSSGNTRRQGPITKAGNKHARRILVEAAWTYRFNPRVSRPIEIRQQAQPKAIRDIAWKAQLRLAYRFRKLNAGRKMTQNKCCVAVAWELAAFIWDIARQVQIPA

SEQ ID NO: 109817 - protein, 365 aa, unidentified
MDTIYIGVDFHARQQTICYLKTETGELVTCELKHQDKQKVRAFYAQFRGRVIVGLEASGYSPWFERLLEELGCEVWLGHATEIRRRARWRQKNDRRDAELILDLMLHNEFPRLHRPAVQSREVLRMLRYRQKLIKIRTMSKNSLQALALQSGLAKGSRLFTQAGQQEFSATVMSPVMHWQREHWLQLLQPLNQQLLETMVWFKAQSKGDVCITRLRTHPGIGLLTSLCLVHTLQPVSRFRNTRKVAAYAGFDPVERSSAERKCFLGISKAGSRLLRYLLVEATQTAVRKDEDLKRFYKRLAERRGRPKAKVAAARKLLIRAYIMLRDEIDYAEFRHRAVAARLARRSQRPNVPEVLIGQPASPAQ

SEQ ID NO: 109818 - protein, 458 aa, unidentified
MQEKILKKAKGKSFLPMEVVNPNSAGIDVGDSIHAVAVPKDRDKQSVRSFGTMSCDLQEIANWLEKCGVETIALESTGVYWKPLFNNLIGYGFEVYLVNARHVKSVTGRKSDQCDAQWLQQLHSCGLLKSSYLPDNEQESLGTLVRYRKTLTEESSRFVLRMQKALELMNIKLHTVISDLMGKTGTAILEAIIAGERNAANFLPLINSRVKADHQTIVKSLQGSWRAEQLFTLTESYKCYKFFKERIATCDKEIEAQLQQYAALRNEGEVPITESYKEAHGQLTLKRKSKCTPKFDARSFLKSVLGVDVLAIYGMSELGALTILAETGTDMSKWATEKHFVSWLNLCPNNKISGGKLISSKLMKKKPNPASQAFRMAANAVQRSDNWLGDYFRHMKSKGGNKYAIVASANKIATIYYKMVNNHVEFTPMDLKQYQKKRKNAKIAYLEKKLELLKKQIA

SEQ ID NO: 109819 - protein, 329 aa, unidentified
MNAVGIDVSKGKSMVAIMRPFGEIVSTPFEIKHTASDINSLVELINSVEGESRIVMEHTGRYYEVLAHQLSEANLFVSAINPKLIKDFDNDSLRKVKSDKADAVKIARYTLDKWQNLKQYNVMDELRNQLKTMNRQFGFYIKHKTAMKNNLIGILDQTYPGVNTYFDSPARSDGSQKWVDFASTYWHVDCIRKMSLNAFIDHYQNWCKRKKYNFSQSKAEEIYGKAKELVPVLPKDAITKLIIKQAVDQLNSASTTVESLRTLMNETASKLPEYPVVMAMKGVGTSLGPQLIAEIGDVSRFTHKSAITAFAGVDPGVNESGSYELMLYK

SEQ ID NO: 109820 - protein, 341 aa, unidentified
MSVIIGIDPHKLLHAACAIDERETELARLEVRTNSRQVADLLAWATPFACRSWAIESAGGLGYLLAQQLVARGEHVVDVPATLSSRVRLLGSGKSTKNDANDARAVAVAALRAPQLAAVRVEDHVTILRLLAKAQLDTSRAKSRACCRLHALVAELVPGGIRKEIVVKQAEQVLLEIMPASATQRQRLDLAYDTLSEIVMLDDRAKRNKQRMIDEVLASATTLTGVFGIGPILAAMIIGYTGDVTRFPSAGHYAAYNGTAPVEFSSSGRTVHRLSRRGNRTLNHALHMIAVTQIRHLHSEGRGYYDRKLAEGKTPREARRALKRQISDRVYRQLRLDAGSK

SEQ ID NO: 109821 - protein, 492 aa, unidentified
MKQRVFVGIDLGGKFHEVQVTAAGGERLGKSFRIGRGRAGLAELEQGLRRVAGAEAEPIYTIEATQNYWLELVHPLKRCGAAVYLVSPSKSAALRTFYRRHTKNDAIDAESMSRLPLVDVDLRPAHVSEPRWDMLRRLVRQSWLVKGQMANRKRRIMTRVLMVYPGYEEVFRDRYCGASLLFCRRYLDPSKAHRLGRRRLFTLLCKRAWGKFDETRAGRLWQVIENAPELAVSYDDLQLLVNQDLDLLEAEERSQQALRERIAELYGELDPETQLMTVPGLGDFLAAAITAFLGEPGRFRSADEVVALSGLCPRLKSSAGTDTANQPITQHGDPVLRGCAYLAAEIARHYDPELQAFHRRLTARGKHYKQASCALGAKILRRCFALLREGRAYEVAHREQMTHHQKEEGKTVRESVHEVAERLNDGGGPSSPEFAAYAPAEVPASTDRASQPTTGRNRLPRNPVQPRSPSAMTSESWENGDPPTPARRRKSA

SEQ ID NO: 109822 - protein, 348 aa, unidentified
MIVIGIDSHKRSHTAVAVDGTGRKLAEKTLPATSAGHLELVRWAARFEDRTWALEDCRHLSRRLSTDLLVAGEAVVRVPPKLMAGVRRSSREPGKSDPIDALAVARAALREDLPVATLDGPEREVRLLVDHREDLVAERTRAQNRLRWHLHELDPGSEPVARSLDRAVVLAALDAQLATAPGTVGRLARELVGRIRTLTATINDLEREISRLVADLAPSLLALVGCGPLTAAKLVGETAGIGRFRSRAAFARHNGSAPLPVWSGNTERHRLSRTGNRQLNVALHRIAITQLQREGPGKTYLEHRRALGSTKTEAIRALRRRISDEVFRRMRHDEAARAAVPSGLAAAA

SEQ ID NO: 109823 - protein, 409 aa, unidentified
MRLFVGLDVSSFDMKVCFLNGDGEKLDSFSVSNDLPGATTLKEKLLQCVAGKEVDILKIGLESTSVYSFHPSMFLHHDIDLHRFGAKVFLLNPKQVANFKKSYSDMNKTDEIDAFVIADYLRFGRNQMSIVKESQYVALQQLTRSRYQLVKMLTKEKQHFLQHLSFKCNTFSQEVDTSVFGSAMTELFLEKFSLEELANMTLEELAEFLQEKSRNRFGDPKCVAASIQKAVKASYRLDKVVEDSIDVILGTSIAVIRTFQQQIKELEKSIKKIMAGLTQTLESIPGVGPVFAAGIIAEIGQIERFDDETKIAKYAGLYWRKHQSGRFTAEDTSLSRTGNHYLRYYLVEAANSVRKHVSDYQEYYVKKYNEVPKHQHKRALVLTARKFVRLVDALLRSHQLFTPGRCVKE

SEQ ID NO: 109824 - protein, 375 aa, unidentified
MKEKVRFLGLDVHAETIAVAVAEPDGSLRSLGTIANRGESIRKLVKKLGPVEQLRACYEAGPTGYVLYWQLSELGVDCKVIAPTLVPVKAGDRVKTDRRDAERLARSYRSDDLTAVWVPDEGSEALRDLVRAREAAKQDQLRARHRLSKLLLRTGRRPAPGVKAWTQAYMTWVGQIRFTQMAQESTRLDYVHEVEHMGERVVRLEQAIEEAVKLASPAIQEVVKGLQALRGIAKISAVTIAAELGNISRFEGARQLMGYSGVVPSEDSSGKRMKRGSITKTGNAHLRRIVVEAAWSYRLRPGVGPALRKRQQGVAEEIKEIAWKAQHRLHKRYQRLEAAGKDRRKIITAVGRELLGFVWAIGIKAEAATSQRMAA

SEQ ID NO: 109825 - protein, 342 aa, unidentified
MDKFEIAGVEVSAKVLVVALKSNGQMRSSEFDNTAAGHKQLIHFLRRYSQTVRVCMESTGLYGLDLALALDTEKGLEVMVANPRSVRHFGEAMMKRSKTDPIDAKLLAEYAERMPFRAWQPPSKQARQLCAMARAIHQLTEMSTMQKNRLHAAGSTETTPKIVRTELQRSLNNQQRSIQRLLKEAGRVVQSDSVLQKRFQLLLGIPGIGELSAVQLLGELVLVSPDCDVRQWVAYAGLDPRQYKSGTSVERKVRISKAGNKHLRRALYMPALVAVRHQPHFRAFYQHLRSRGKLKKVALVAVMRKLLHGIYGIFKSHQPFDAAKLFASPIDVTDFREKPLAI

SEQ ID NO: 109826 - protein, 354 aa, unidentified
MNHPSLTHMQATHILGIDIAKRKFDVCLRAAAADGPRHTHTFPNHAKGFKALNRWLAKYPLPHLHACLEATSRYGDALLGHLHHHGHTVSLVNPRRTRHYAASRLVRTQNDPLDAALIADFCASQHPRPWHPVAAGKRQLQDLVRTRGFFLNQKQQCGNRSETADPISARHLRQHIRQLEAQITALLQTQPDLARQVELADSISGVGRLTAAVAVAELPPVERLEHAGQAVAFAGLDPRQKDSGTSVHTAPRLSKMGSRLLRQTLYMAALAALRHNPIIRALGERLKAKGKGGKRAVAAAMRKLVRLIYGVLKQGKPFDPNWENRDRAGGVGGRASAGDEPSSPGLAAPAVATA

SEQ ID NO: 109827 - protein, 346 aa, unidentified
MTIVEATRAVTGGIDTHGEVHVAAVLDEVGGLLGTESFRADPEGYAELLSWLQAFGEVSKVGVEGTGSYGAGVARHLARAGVHVVEVDRQNRQARRQAGKSDPLDAVEAARAARSGRAHGTAKSRDGSVEAIRVLVVAKRSARGARIKALTQMRQLTFSAPDQLQSKLKGLPIAAFVAAAQGLRPTRSPDVVTAATKAALSSLAHRVADLEEEISDLDAMITPLPKETAPELLAVYGVGIDTAAALLVAAGDNPERLHSEAAWAHLCGVSPLEASSGKVTRHRLNRGGDRQANRALWHIVITRLASDPRTQAYMERRVKDGRSKSEAIRMLKRYVAREVYRYLPRA

SEQ ID NO: 109828 - protein, 420 aa, unidentified
MKEPNVDDFSALIGIDWADKKHDVCEVAVGSKNYQYAIISTKPQALHEWAMSLKKRYPDKPIALICELKKGPLIYALSKYEHITIFPVNPSTVAKYRKAFSLSGAKNDPADAFIQVEILTLHMNKLTPIKPESADIRILEQLLVYRRKMVQDRVDLSNRMTAILKNYYPHVLDWFKEKDTIIFCEFIRKWPSLHDAKKARKQTLLTFFNQHHSRYPEVNGNRISSIKNAVPLTEDNGVIIPNKIMMEMLVQQLKLLIESINNIDDEIKRSYKPLNDRAIFDSFPGAGPQLAPRLLVAFGENRSRYNAADELQKYAGIAPVVEQSGQKKWTHWRYSCPTFLRQTFVEWAGQTVRYSFWARAYYEQQIKKGKQHNAVIRSLAFKWIRIAFRCWKNKKPYDESIYLNALKKRGSPLLEYAMNS

SEQ ID NO: 109829 - protein, 483 aa, unidentified
MREVQEILDEEHEQVLERVAAIDVAKMSGMVCTRLPRQGGKPGARVSRVWEVAATTRAVVELAVQLVELGIQKVTVESTSDYWRTWFYLLEAAGLEVQLVNARDAKNVPGRPKTDKLDSVWEAKLTERGMLRPSFVPPAAIRQLRDYTRLRVDLTHERTRHYQRLEKLLEDALIKVTGVASKIGTMSVRDMLEALIAGERDPKVLAGLARGRMKAKYAALVEALTGRFDDHHGELARILLDQIDALTRQIDQLTTRLGELIAELPEAAAPQPGDPTDQGTAVPVDPSTGEILGPEPGRPTSERATPVAGRPNQHRGDRAALSAIERLDEIPGIDVRGAQIILAEVGLDMARFRTADHLASWAKVTPRTIQSGATSRGGKTGKGNPYLKGLLGEAAAAAAKTQTFLGDKYRRLVKRRGKLKALVAVARSILVIVWHLLSDPTARFADLGPDYNTNRTDKNRKIRNHVRQLEACGFTVTLTPVAA

SEQ ID NO: 109830 - protein, 344 aa, unidentified
MPATHRAFEDALVWARGLDDADRVWAIEDCRHVSGALEPFLPAHGEPVVRVPPQLLAGARNSARERGNSDLLDAVAIARAAIREGLDTLPVAQLAGPELDVRLLVDHRERLVAQRTALINDLRWQLHDLWPEDEVPPRALITSRWQNRVGRRLGRCDQTARVRIARDELRRIRDLARAITELEHELATLVARLAPRLLAERGCGVLTAAKLIGEIAGVSRFQTDAKLARTAAAAPIPASSGRTDRHRLDRGGNRQINCALHRIAVTKARVDPETAAYLTRKQAEGKSRREALRCLKRHLARRVFKLLQPAPPPTPTPLGHRTPTTTTRGVRSHCNTPVGTPAMT

SEQ ID NO: 109831 - protein, 426 aa, unidentified
MKNINVLTTLFVGIDVSARTNVCLAMDFNSNVLLKLNVPNNQTGADTLKAKLLDLIQRYDFKTTIVALESTSFYGMHISNFLSADEELIPHNVYVHPLNPKMISNYRKSFIGLGKTDLIDAYIIADFARVGRITTEPWKGPQYLALQRLTRHRLHMAECITREKAYMVSNIFLKFSELAVLKESDHPFSSNHTATAEAILTEMLSLEDLIRLSSEELIEFVCSHSKNRYLNPEEVCKLLKKAARDSYRLDKTLYEPLTVSIASSFNCIETYEREIKSINKAIEKTLKGLCSDAFTVLQSIPGIGPIFASGILSEIGDIHAFHSADALAKYAGIYWNRHQSGAFEADNTSMVKAGNKYLRYYLIEATNSIRCHEPSFAAYYRKKYDESKTHNHKRALALTSRKTIRLIYSLLDKNQLYSANRVQITP

SEQ ID NO: 109832 - protein, 384 aa, unidentified
MPKQSTATAFDHDSTLVLALELSGKGWEVGAVLPGVTRRPRRGLAARDMAGLLQQIERWKAEALRAGRTVCRTVLAYEAGRDGFWIARYLLACGIEVQIMHPASIPVERRGRRAKTDRIDLDMLLRTLLAWLRGEPRVCSIVRIPSEAEEDMRRPERERERLVSERVALENRIENLLCLQGIIGFKPRLKKAAVRLDELRSATGTPLPPLLLDELKRLMVRHRVLSEQLREIEAAREQAAMAAEPDHAVQQIRMLTRLVGLGLATATGLTREVFCRSFADRRAIAGFVGLTGTPFNSGGSEREQGISKNGNPRVRRILLQLAWRWLRFQPDSALSCWFAERTGGVKGRIRKIMVVALARKLLVALWRYVETGELPAGARLAAAA

SEQ ID NO: 109833 - protein, 342 aa, unidentified
MQITTIGLDIAKNVFQVHGIDAAEKVIVRKQLRRGQMLAFFKALQPCLVGMEACATSHYWARELRKLGHQVRLMPAKDVKAYVKRNKNDAADAQAICEAVRRPTMRFVQIKSVEQQGQLMLHRARDLLMRQRTQLINALRAHMAELGIVAAQGREGVKELLKIIATEQDARLPVDAHTSLVVLAGGLQALQTMIRSIERRIIAQHRSDEASKRLRSIPGIGIVGATAIAATVPDPKVFRSGRDFAAWIGIVPRQDSTGGKQKLGPISKQGDQYLRRILVVGAHAVLKRARHQPEKYPWVTRLLERKPFRVVAVAVANKMARVAWALLARGGSYRAPALAAAA

SEQ ID NO: 109834 - protein, 361 aa, unidentified
MSQYRLKSKELQVSELQKQLQHVNLNAAGIDVGSDRHLVAVPEGRDDVAVREFGAFTADLHALANWLSKCGVTTVAMESTGVYWIPVFELLEGLGFEVKLVDARRVKNVSGRKSDVLDCQWLQQLHTYGLLAGAFRPADEVCVLRGFMRQREMLVQASSMHIQHMQKALQQMNLLLHNVVTDITGMTGMKIIKAIIAGERNPHVLAKHRDNRCRSSAATIAKSLVGNYRAEHLFALKQAVELYETYQAKVRECELAIADYLSTQVNRTEAEPPASERTLRARDCMRGEVDMRVQLFKLAGVDLFSISGFGADTLLTLAGEVGFDMSAWKTEKHFTSWLSLCPGTNKSGGRVLTGKTKRSAN

SEQ ID NO: 109835 - protein, 400 aa, unidentified
MLSIGIDVSKGKSTVCGMKPGGEIVYTPFEVQHTREGMSELVSLLRGSGEEVRAVLESTGSYHCPVVAALLENGIFVSVINSLRMKRFCSQSIRKVKTDRIDAMQIALYGLAYWQELQPTKLPEDTYRELQLLARQYYQMTSMLIKAKVDFNAICDQVLPGMQELMNDHAGRHKLSDFVLRYRHTTHILEMGETRFRKDYCKWAEKKGYRNCERMAVLIFATAQNGIPVLPNAPSTQIVITEAIRVLHTVEASRDAILTQMQALAKTLPEYSLVREMPCIGDTLAPRLIAEIGDVRRFHSKRALIAYAGIDAPPYQSGKFCANNRHISKRGNRYLRKTGYEVMQSYVMHKPANDPIFTFIEKKRGEGKSGKLAMVAGLNKFLRVYYGKVTELYRSLPAIE

SEQ ID NO: 109836 - protein, 425 aa, unidentified
MNLLILKGVPMALKIVYKICCGIDVHKTFVVACIASTNDKGITSYESHRFSTYTSGLKTLLQWLLNRNCKDVCMESTGKYWIPVYNILENDCSIVLAHPKYVKAIRGKKTDKKDAKWIADLFKHDLVAGSFMPPADIRQLRDLMRYRFKLTCFQSSEKNRLQNCLTVSNIQLGNVVSDTFGKSAQAILDKLLENPADTSFDLEPLVYKSLKKKLPELRDAIDGYITPEQVGKLKVIKAHYESLESRKAELEELILALAAPYQQELAILQTAPGIRSDFTAIGIISEIGTNMEAFPSAKHLCSWAGLTPNNNESAGKKKSVRVSKAGCYIKPLLVQCANAVVTSKKHPEIRNRYLRLKKRRGHKKAIIAIARMLLTALYHMLKNGENYNAELYRKSDLPPADWEITVEQAIIIARNQGYKIKSATA

SEQ ID NO: 109837 - protein, 437 aa, unidentified
MNNPHPYDLVIGLDRSDKKADLCLIDSRTGQRRAVVIDTAPEALWEWLAELRQQHPQARVGLCLEQPAVHLIPFLEAYEWITLHPINPITLQKYREAFVTSRAKDDTQDADYLADLLLNHHAKLPVWAPEDSQTRTVQQLVFHRRAVIDERTGLTNRLQALLKQYFPQALQFCGEDLWRPLATAFLLKWPSLQAVQKTKPAALKTFYHLHGSRSAKLQEQRLALQEKAVPVTEETAILQSFGLRVQLICRQLQLVQKTVASFDQQTAQAYAAHPDHAIFASFPGAGPVLGTRLLASLGSQRERFGAATELQHYTGVAPVTKQSGGSCYIHRRYLCPKFHRQSFHEYAKESILWSRWAAAYYLQQRTKGSPHHTAVRALAYKWQRIIWRCWQNRQPYAEPTYEAALKQHGSPIVALFDRVELGKSPWKNPAKKSLKIR

SEQ ID NO: 109838 - protein, 343 aa, unidentified
MYYIGLDVHKKTISYCVKDAAGKIHREGKIGSTRRELDAWIKTLPQPRMMAMEATIFTGWIYDHLLPHAEKVKVAHPLMLRAIAAAKRKNDQIDASKIADCLRCDFLPECYMTSTEIRDRRRTLRYRGLLVKQTVQMKNRISGLLMETGVSYNKRRLHKVGYFDELMSGNEEIDASIRPLLKLSRETINRSQKLDYALVSSLERDPLLKERLERLKTVPGVGPITALTWVLEIGDVARFQSIKQAISYCGLCGAEKSSADKVLRTPISKQRNKHIQQVLVEAAKLAPRLSHELALIHEKEKQKGNRNRATLAVARKMVAWMVAVERRKQVFVPAEKFGGTVAA

SEQ ID NO: 109839 - protein, 348 aa, unidentified
MTVTIVETRAITGGVDTHADMHLAAALDPIGGLLGVQEFPATPAGYAWLLGWLGGFGTVCLVGIEGTGSYGAGLARYVTAAGVRVVEVDRSDRQDRHRQGKSDPLDAVSAARAAQSGRAAGAPKGRDGAVEAIRTLLVAKRTARSERTQTINQARALVLTGPDDLRVRFAGHAAAALVADLAALRPRPGDVVGYTTRIALRELGRRAEFLDAQLERLDELIVPLVTARAPSLLALYGVGPDTAALLLAAAGDHPERLRCEAAWAHLCGTAPIPASSGKVTRHRLNPGGDRQANHALWRIVITRMSSHPPTRAYVERRSKEGLSKKEIIRCLKRYVAREVYPCLRTPAG

SEQ ID NO: 109840 - protein, 395 aa, unidentified
MFIVGIDIAKRSHEAIIIAEDGQAVRKAFSFRINCTGYNLLLEQVRKLTLVKSQIVFAMESTAHYWLALYARLLKDGYAVMVLNPIQSHSLRELYIRKAKTDARDSLIIADLVRFGRCKASNVPQDKILALRELCRSRAYLVDMAADLKRKLIALLDRIFPEYESLFDSVFSKASIAVLRKYSTPQKVKNAHLGKLTDLLMESSNGHFGEWKAHQLKEAACSSFGIDDSDGVYSMLLGMFLEQILSLTAQADSLEKQISVFFQEFNNPLTSIPGVGTVLAATILSEIGDVTRFSSADKLLAYAGLDPSVKQSGEFKSNQNRMSKRGSPYLRRAIWLASTVAVHRDPMFQTYYEKKISEGLHYMNVIGHVSRKMTTVIFAVLRDGQPYQPILQSAG

SEQ ID NO: 109841 - protein, 385 aa, unidentified
MTMIHQSSPGATAIPGQDSRVVVSLELSPKKWLVTSLSPGSAKFSKRWLSGGDSAGLLALLRELVAKAEREVGGPVGVVCIQEAGLDGFWLHRVLVDAGIESHVVDAASIPVPRRKRRAKSDRIDGESLVRALLAWLRGESRACSMVRPPSVEAEDRRRLSRERETLVRQRIRESNRIRGLLASQGIADFDPLRRDRRTRLAELVTGDGRKLPPRLTAELDRALDRLELILGQIAEVEAACERELAAGKGRDPAALLPQLRSLGRDSVAVLTFEGFWRGFANRRQLGAFAGLAPTPWQSGQVNREQGIGSAGNPRLRRTMVQLAWLWLRHQPGSALSRWFCERVGTQKGRPRRIAVVALARKLLVALWRYVTQGIVPEGAVLKSA

SEQ ID NO: 109842 - protein, 355 aa, unidentified
MKILAIDMGWSNSVSCLFDSSSGEVQYQTLITGKEPFAKLLKEINPEQVVIEAGPMGGWVRDLCEQMKLKLLVLNTNDEPWRWRNVKKKTDRKDAFKLTQVAALRQGSGVHVPEHAVRQWRQLIYYRQTLVDEMVSIKNRLRAVLLQEDLHLPSGQKAWESASWQKLSEMARELGECGKDDLWRGMVKLELRRLEELAAHLGAVEKKLDGLAREDERVKRLKQVPGVGTRTAELVVALIDDPRRFGRGRKLSSYAGFAPRKHQSGKMDRDGHISRCGNGLLRKLLVQAAWSGKRNSLRMSRIYERVRKNTPKRTKQAIVAVARHLLVWLWAMLRDGSSWQVGHQPPPQKELSAVT

SEQ ID NO: 109843 - protein, 414 aa, unidentified
MLFVGDDWAEDHHDVELMDAAGRRLAAARLPEGVAGITRLHEMIGAHLGEDAGAGEDAGAGEVAIGIETDRGPWVSALVAAGYTVYAVNPLQAARYRERHGVSGAKSDKADAHTLADMVRTDAHQLRPVAADSPQAEAIKVVARAHKTLIWERTRHTLRLRYVLREYFPAALEAFDDLAAPDTLELLAKAPDPASAAKLNRSQIRAALKHARRRDIDMKTTRIQAALRSQQLGRAPVITAAYAATTRSIAAVLATFTEQINTLRGQVETHFGRHPDAEIILSQPGTGVLLGARVLAEFGDAPGRYADAKARKNYAGTSPITRQSGKRKITHARFVHNDRLVDALMSQAQSALLASPGARAYYDKQRARGLDHHAALRQLANRLVGILHGCLKTRTLYDEATAWSHHNQDQRTAA

SEQ ID NO: 109844 - protein, 399 aa, unidentified
MFYGLDVHKEFIQVCQLDAKAANRKDYRIGGSAEEIDGWARRLGPRDQVVLETTFHSWAIHSIVSQYAGRVVVANSLQVKAIAYAKIKTDKVDAYTLARLLHADFLPSVELPDEKTWALRQLVSHRRLLVKQRVAIKNTVLATFHRCLICPPEGDAFSARGRRWMRSLELAPAESFLVHNGLELLEAIEMRIDATDQELLNTAAIEEQAHLLMTIPGVGVTVALGLLAAIGDIRRFPSPGQLASYFGLVPRVSQSAGHCHHGRITKAGPGNARSLAIEAAQMLARSPSPIATTFYRVRRKKGYNVAVTALARKLIVLVWYMLQNGEPYRYAPVESTRRKLRSLVPKQERPRALRPPRTVEEVYREAGISLPPPPSKAERRVAANNRRTRTRLSRTHRKQ

SEQ ID NO: 109845 - protein, 483 aa, unidentified
MAARRRNKQKPAVVSGPVEIPDAEHELVIERVAAIDVAKAAGKVCLRLPDKSGRRFSRVWDVPARTGAIGELAEQLIEAGIEKVTVESTSDYWRIWYYLLEAAGLSVQLVNARDVKNVPGRPKTDKLDAVWLAKLTEKGLLRPSFVPPAEIRRLRDYTRLRADLTRDRTRYWQRLEKLLEDALIKISSVASTLVTLSTRDMIEALIAGERDPYRLAELARGKMKAKHSELITALDGRFDEHHAELARMLLSQIDALNTQIDTLSARIEALIAELPDDTQAIDHRTGGDAPGASTGTDIAPDPNTGGANPIRVAPAIEAECVLSTVERLDEVPGISVGNAQNILGEIGTDMSRFPTPEHLVSWAKLCPRTVQSGPVTRAGKTGKGNPYLKGALGEAATAAAKTNTFLGQRYRRLVKRRGKLKALVAVARSILVIIWHLLVNPATRFHDLGPDYYTNRIVTQRRLRNYVAQLAAMGYRVTIEPAA

SEQ ID NO: 109846 - protein, 355 aa, unidentified
MDSIKYVGLDVHRDTISVAVLKADGKLVMQSVIATQATAILDFLRGVRGTLYVTFEEGTHSAWLYDLLVRRVAHLVVCNPRKNALLKAGSKSDSIDARKLAELLRLGYLKPVYHGQNSTAAVKHLGRSYAGLTEDTTRIMGRLKALYRGQAIACAGQKPYGSRHREEWLAQLTDSGLQRRGRRLYQELDLLQQLRREARQDLILECRKHNETKLLRTVPWLGPIRVALLIGRVQTPHRFRSKRQFWAYCGLALETRDSGEYRVVDGQIERKKKPVFIRGLNRNHNHDLKNLFKSAATTASGSEGAFGEFYENLLKKGMRAEMARLTLARKIAAITLHVWKKGEPFDAAYLKSQAA

SEQ ID NO: 109847 - protein, 400 aa, unidentified
MISVGIDVSKGKSTVCILKPYGEIVSKPFNITHTQKDLSELSSMLFRLNDEVKIVMEATGIYHLPVLTYLQEKGFFVSVINPYLMKSYRNESLRKAKTDKIDSRIIANYGIDHWFKMKEFQTSGEIYEELKLLGQQYRHYMKLHLLSLAELTHLLDLTMPGIKNLLASWNETNRKDKRSDFVERFWHYDVITSMSEQEFTEKYILWAKEKKYVPSQEKAKVIYTLAQESIPTLPSETSSVKILVTEAVRVLKEVDATLGLILSRMQEIAKTLPEYSVVREMGGVGNTLAPKLIAEIGDVRRFRNGKALVAFAGIDPPPYESGQFVGCNRKISKRGSASLRKVGYETMRSLKMRSRPEDPVYRYVVKKESEGKSKKSAKIAGLNKFLRIYYARVTELYKNI

SEQ ID NO: 109848 - protein, 453 aa, unidentified
MKPERKKKNQSKKVLMTVVNPNAAGIDCGSRSHFVCVSQDNVIEFGSHTQGLNEIKEHLKSHGIKTVALESTGFYWQQLFMILQSAGFEVFLVNARHIKNVKGHKTDVVDSKWLQLLHSIGLLENSFQPDAFTKEIRQYARHRRSLIETSSRYVNKMNKSLTLMNIQLKTVLSDLSGASGLKVIKAIVEGERSPEALEQLVGKGIKATRQEILLALKGDWRNEHLFELAQNYEGYLFTQKQIEQTDKQIEILLKDWESKNGNKELSQEYSKTKHRSSQKNDPKADIRPFAFQMAEGVDLSQIEGVSTNTIFTLMTETGFNLKEKFNTAKHFASWLGFAPNRKITGGKTISSHTTTVQSPLSYALRQAANAAGNGKGRLGDFFRKIAFKNGRMAAIVATARKIAVIIYKMLERKEAYAYNYSIIETQRAKQNQLKNIQKKIKQLNIKQEDLVFC

SEQ ID NO: 109849 - protein, 406 aa, unidentified
MEDNSAKIFIQEVFSMSMYFVGIDISKYKHDCCIISAADQQIISKFTITNDKDGFEQLLTALNSLSNPEDIKIGFESTAHYALNLELFLENAHHSFMEVNPVLIKEYKKSTTLRRTKTDSVDCESIARWLITVEYKPHSKGFYHAYSLKSLTRLRDRLIRQRSFYLVKITNVLDHTFPEFKPFFNERLSKTALYLLENYGSAEKMARMNSASYDKLRCISRGKFSIQQFLRLKELAANTVGVNNSIFDLELNTLLTLYKSLSDEINTLETEIIKLIEEVHPHYMSIPGIGPISAAVIYAEYGDISNFSNPGQMLAFAGIEPGINDSGTESHGGRMVKHGSSQLRYVLLNSCLPLIRFDLTFATYYAKKRAEGKKHRVAITHVAKKLIRVIYALERQDVDFNAQKLR

SEQ ID NO: 109850 - protein, 446 aa, unidentified
MNYVGFDWASRAHDVTVLDEAGGVLDRWAFPHSETGWVTTLDRLARHGSAAEVPVIIERTSGLIVDRLLAAGHPVVPVHPTAFYAARPRWGASGAKSDPGDSYKLADYLRTDGHRLRRLTPTDPGLHELQALVRLRDDQVRARTAATNQLTAILDTYWPGPKQLFMSLASQIALAFLTDYPTPTSAAHLGEARMAAFCRRHAYRGGKSPAELLSRLRAAPVAPVGLPPATLAAMVTAQVTLLKTLQTVISDVERLIAVRVVAHPRSNLFENLPGVGMINLAQLLAEVGPILDRVDSAEQAATECGAAPVTRSSGQTRGVYFRWAANTRARKAITSFAHNARMQDDWAAALYADARARGKRNPHATRIVARAWLRVIWACWTSGQPYNPDRHRTRSSSYQSVPSPLPPRRSAGAVKMEPPTGGTILTAPSTGTSWEAEEPSPSPTST

SEQ ID NO: 109851 - protein, 438 aa, unidentified
MSNKFIFNLDDLFISVGIDVGADFSWMSIALPNQQIIGKPYKILHNQMNSLATAVSKIKEAEELYSLESRIFLESTGIYHYPLFCYLRDKGFNCSVINPIITKNSTNINIRKVHNDRFDSKKAALVGLKPDLKVSLMPSDLALNCRNLCREYYDLMDNRSAYVNKLQGELRMAFPQYLGIFSKITANTSLTLLETYTSPSAFIEADPQEIIDTIKSTARFGVAYAASKYNAIIQAAHDANEFGYILDSNIKRIRLYISFIRKYDEEIKNILDAMHELIDANEETDFVKQIHLVETFKGAGFLSAVTLMGEIGNFSAFSKPKQLFAYFGLDPAVKQSGKFEGTKIQISKRGSAIARRAIHTLTLQSISTSRTGEAKNPVLRDYYLEKCESKPKLVAMGAVSHKVCNMIFAILRDNKPFEIITPQEHIQQYNAAKCDIAA

SEQ ID NO: 109852 - protein, 367 aa, unidentified
MFIERTSIGLDVHARSVRAAAIDTVTGEVIERTVSAPVVDVVGFVESVAAEHGPVLVTYEAGPTGFGLARALLTARHACQVAAPSKVLRPVGDRVKTDRRDALLLARLARNGDIVPVAIPTPSQESARDLVRAREDARMTLMGARHQLSKLVLRHGFVYDGDAWTGGYDRWLRQIRKDHLLLGGAGTLAAFDDAYEMAAYALARRDRLDQQIMALAMDSEFTAVTHRLAALRGISTLTAFGLAVEIGDWHRLTGSTIGAYLGLVPSESSSGASRVQGGITKTGNSHARRLLIEAAWHHKKPYRPGKTMRDRWALTTAAAAARGDAGNRRLHHRWSVFEAHKKRHTVANTAIARELAGWCWSLAVMDD

SEQ ID NO: 109853 - protein, 412 aa, unidentified
MDTIVACIGLDWADERHSVHLQTPEGQIEHLELEQKPAVLHAWVAELQRRFGSGKIAVALEQRKGAVIHALLMYDCFVLYPINPKALARYREAFGPSGAKDDPLDSELLLDLVVRHRDQLRAWVPDTVESRTLQALCEQRRKLVNQRVALTNRITSLLKQYFPQALDWVGDLASVQACDFLRRWPTLAAVQTARPSTVRRFYQDHNCRKQAVIDARLAALASARPLTTDAAVIEPLSLSVQTYATQLRTLIAAIATFDAHIAAVFATHADRDIFGSFPGAGDVCAPRLAAAFGTDRSRWASAAELQAHAGIAPVTERSGKTLFIHHRLACPKFVKQTFHEFADQSIRFSRWARAYYDQQRARGNDHHAALRALAYKWIRILFRCWKERRPYDEETYIEALRRRGSPLAKTVA

SEQ ID NO: 109854 - protein, 425 aa, unidentified
MKKKRIYRATPVKQVRLEALMQALGERQVIVGIDIAKEDMFAAFESEGTVALTVRWKHPEQTLGFAELLTVVKARGPVEVAMEPSGTYGDALRALLERHDLPVFRVSPKRSHDAAEMFDGVPSYHDAKSAALLCKLHRDGVSERWSARSDHERGLSATVRLLGIYEGEFRRNSNRLEGLLARYWPELTQYLGLRLATLTELLATFGGPEAVATHAADAKSLMQRVGGAPLALAKIEAVLASARHTLGVPQLEAERELVMYVAREARRAQKLAKEVKRRLEELSQSHGATKHLCPVIGKTTAAVVVASLGDPRNYPSAAAFLKATGLNLKEKSSGKQKGSLHITKRGPGVVRLFLYLAALRLMQQYPAVNAWYQKKVQRQGGLAKPKAVIPIMRKLVLAAWFVARGDAFDVNKLFDVSRLEISPAH

SEQ ID NO: 109855 - protein, 343 aa, unidentified
MENYAGIDVSLELSSVCVVDAQGKILKEAKVTSEPDALVEFFETLGFAVKRIGLEAGPLSQWLHAGLKTAGFETVLLETRHVKAALSATVKTDRKDARGIAQLIRMGWFRAVHAKSIGAQEVRALLVARKQLLGRLIDVELSIRGILRGFGLKVGPVTRQNFEARIRELVAGQATLERIAIAMLSARSALKAEYGRLHKAVLAIVRDDAVCRRLMTVPGVGPLVAITYKSAIDDPHRIVKSKAAGALFGLTPKKYQSGEKDVTGGITLAGDEIVRTVLYEAANVLLSRITRFSKLKRWGMDVAKRRGSKRAKVALARKLAVILHRIWVDGTTYRWTDAGPIAA

SEQ ID NO: 109856 - protein, 336 aa, unidentified
MTIIRIGLDTSKHVFQMHGVDENDQPVLRQRIRRSEVEKVFAKLPPTRIGMEACGASHYWARVLRRLGHEVLLIPPQYVKAYVRRGKNDAIDAEAICEAMGRPRTRFVPVKSAGQQAALTMLGVRDLLVKQRTMLINAIRGHAAEFGVTVAKGPKQVAALLQRLATGEDVPALAREIIGVLASQLDGLNIKLKAIEARVMAWHRQDQTSQCLATIPGIGPIGGVSFALKVPDPKAFHSGRHFAAWIGITPREDSTAGRHRLGRISKAGDEDLRRLLVLGATAVIQQAKPGRASPWLMGLLARKAKKVAALALANKMARIIWAMMVSGETYRRTTAV

SEQ ID NO: 109857 - protein, 338 aa, unidentified
MVYGAIDLHMRYSQIRIVDETGAVLREQRVSTSRERLVNAFEGWGRMRILVETGTESEWVAQTLEAASHEVIVADPNYAPMYGDLQRRVKTDRRDVAALAEANRRGWYRAAHRTSAAQRGTRQVLRARRQIVQMRTGAVTLIRSLVKQEGYRVPRCGAERVPAQLETLRLPAALHALLAPLTKMIETATSEITTLDAQLQARAAADPLVQRLQTVPGVGLIVALTFRAQIDDVRRFRHAGQVSAAIGLVPREDSSAERRHRGHITKVGPRELRSLLVQAAWACWRSKHSATLRAWVEQVAARRGRRIAVVALARRLSRLLYALWRDGTSFDVKKLAAA

SEQ ID NO: 109858 - protein, 424 aa, unidentified
MKPHSDIEFTAFVGIDWSDTKHDICLQAAHSDEREFAVLLHRPDAIAAWAGALRQRFGGQPVAVCLELANGPLVYALQKYDFLVLFPVHPATLAKYREAFVPSHAKADPSDAQFALELLLRYRAKLRPLTPQSVPMRTLLRLVEQRRRLVGDQSRISNRLTDALKQYFPDVLAWFPDKDTILFCDFLTRWPTLKQLKRARRATLLSFFHDHHVRSQARIDERLHAIKSATPLTDDPAVIRPNQLLVLALIEQLRVTLQAIERFDAEIAAVSETLPDYALFRALPGAGGTLAPRLLAAFGEQRERYHSAAELQRYSGIAPVTESSGKQHWIHWRLQCPTFLRQTFVEWAGATIPHSFWAAAYYRQQRDKGCSHHAAVRALAFKWIRILYRCWQTRTAYDESTYLNALQRRGSPLLASMTGLAKNS

SEQ ID NO: 109859 - protein, 411 aa, unidentified
MEVLFTHCAGLDCHKQTVVVHRVLPGPATGLLRETRSFGTTTAELLRLSDWLSAGGVTHLAMESTGVYWKPIFNLLETSFNVAVLNAQHVKNVPGRKTDVKDAQWLAELLRHGLVQPSFIPPQAQRDLRDLTRERTNFVRQRATLANRVQKVLEGMNIKLGDVASDVLGRSGRAMLDALVAGQTDAAQLAELAQGKLRRKRAELEQALTGRVRAHHQFLLSELLSQIDSVDDTIARFTAAIERACLADGDVVALLDTIPGISKEVAEVVLAEIGTDMSRFPSAAQLAAWSGLVPGNDESAGKRRNGRIRKGDPWLRVILIQAALGATRSKGTYLGAQYRRLAARRGAKRAIVAVAHSLIVIIYHVIAERAPYRELGGDYFERGNAEAKAKRLVRRVEQLGYEVTLKPKPAA

SEQ ID NO: 109860 - protein, 414 aa, unidentified
MHTSPQEKLNTQTRTLYMALELSATTWKLAFVDRLCRRPRVRSIAAGDFDQLQEEIQRARRAYVLEPDAPVVSCYEAGRDGFWVHRCLVAQGVESHVVEPASIEVDRRKRRAKTDRLDAGRIVMALLRYRAGDRLACRMVRVPDAEDEDARQLNREMRTLKAEKTAHTNRIKALLATQGIHVKQIDRNFLQLLQGLKGADGAPLLEGLTARLRREFDRVALVVDQIRELQLLQATMLRTAAQEVERGDRAGRAPRHAVIAQRLTELGGIGPVTGWTLATEVFAWRDIQNRRQLAALAGLTPTPFASGSEEKEQGISKSGRGELRMLMIEIAWGWLKHQPDSELTKWYRKRFGDGTKRNRKIGIVALARKLLVALGKFVRHGEIPAGARWRKEMKFTYLPSLRKREHPSSVVTAA

SEQ ID NO: 109861 - protein, 405 aa, unidentified
MINAVGIDVSKGRSTIAVLRPGGITIRRPFDVSHSSADLSSLVQYIGSLEGDTRAVMESTGRYHEPVLHALSDAGIFVSAVNPHLIRNYGNNSLRKVKTDPADAMKIARYTIDNWSELREYTGMDNIRSQLKILNTQTAFLMKQKTAVKNNLIALLDQTYPGVDKLFTSPVRTDGSEKWVDYVYSFWHVDCVRKIGIKAFSERYAAFCKRHGYNFQKGKPQELFDASKELIATQPKDLICKKMIQNSIEQLKLLSRHIVELRSEMDRLASTLPEYSTVMEMYGVGPVYGPQLIAEIGDVSRFPRRESLTAFAGVDPGKNDSGQRISKSVHASKCGSSRLRKTLFQIMSTILQLGDNGDPVYRFLDKKRSEGKDYLVYMTAGANKFLRIYYGKVKECLRQQTNATE

SEQ ID NO: 109862 - protein, 318 aa, unidentified
MGNSPSIFVGIDVAKLKLDVVLLPSGEHFQVPNSTEGLGQLVDRLNVLPPECIVLEASGGYERPCVAALVEAGLPVAVINPRRARDLARGLGKRAKTDRIDAGVLAYCAQHCEVHKTVKTPEKQVQLEALVTRRRQLVSIRSVEQTRLEQAAINRTRNDIQEILKIVGRHIEKIEKQIADLIDSDDYWSGLAARLESVPGIGKATAAILLAELPELGTLNRQQIAALAGVAPYHRDSGTRKGKRVIAGGRAALRNCLYMAALTARTWNDKIRAFHEHLIAAGKPFKVALVACIRKLLTILNQIAKTGLHWNQHLPKNV

SEQ ID NO: 109863 - protein, 341 aa, unidentified
MGVYVGMDVHRKRSQVAIVDDAGSHQHNRNLANDPAKLVPVLGSLPPGTPVAFEAAYGWGWLVDLLEELELEPHLVHPSRCKAIASARLKNDKVDAATLAQLLRADLLPEAWIAPQATRDLRALLRHRASLVRLSTLCKNRIHAVLADRGIGEDQVLWTGPGRAWLADLALPPTPRAIIQDCCGLLDTLATPIARLEGEIATLAKPDPRVQALMVLPGVGKLTAMTLVAEIGDIARFPTARKLCAWAGLTPQVRNSDRKVRHGHITKQGSPWVRGILQEAAQTAKRHPMFAGAYAQLARRRGRNIATTAIARRLLARSFHILTQLEATSEKAGTGRARVSA

SEQ ID NO: 109864 - protein, 408 aa, unidentified
MSIVFGIDVSSRDSSVCVLQSGVTREYKITNDTIGFKTLLIDLKEYAEHPQIILEATGIYSRRITRFLDEYDYDYVLLNPLKAKKEINQGLRRNKTDRNDAYHLALAQDRNQHQPNRKEPEAYHQLQSLSRAYEELTHDIVSSKNRLHKYLQLTFPELETIFNNSRGVNYWYLVELFPHCQDVRNLDVSTIAKQIKDFKGYGINRAQKLAIKLKHLADLAYPAVDQDDPERDEVVYYANRLLRLTADRERRSEAMIKLAKTLPNRDLEILMSIPGIAEITAARILAELGDIRRFSNPNKINAFVGIDPGRYQSGEKDSSLRISKHGNAVARKILYRAIGQIDLAAKTSPCHIADYYERKKQFSQTKGFKKIAIASIHKLLRTVYILIITDQMYDYNVANNNQKDFCRN

SEQ ID NO: 109865 - protein, 407 aa, unidentified
MEVIYARCAGLDVHKQTVVACVRIAEGGTLRQEVQTFPTTTSGLLALADWLESFGVRQVGMEATGVYWKPVWHILEGHFELVLANAAHVKNVPGRKTDVNDAMWLADLLAHGLIRPSFVPPVPIQELRNLTRTRKQFVRERSAHVQRIEKVLEDANLKLSVVLSDILGKSGRAVLEAIVAGQSDPERLLACVSQRVKASRAEVLEALRGHIRPHHRFLLKLHLDHIDALDRAIATIEQEVGLGLEPFRAAARLISTIPGMSEVASHVVIAEIGIDMSRFATPGHLLSWACLCPRNDESAGKRRSTRLRRGSHWLKTTLVQAAWSAVRVKGGYLQAQFHRIRARRGAKKAIIAVAASMLTAIWHMLRNGTEWQDLGAAHFDRADAQKTANRLIRRLQQIGFNVQVAAA

SEQ ID NO: 109866 - protein, 338 aa, unidentified
MNISVLGIDLAKNIFHVHGVDRAGKTVMRKKLMRAQLPAFIAQLRPCLIGMEACGSAHYWARQFQAFGHTVKLMSPQFVKPYVKSNKNDTQDAEAICEAVTRPSMRFVAIKTVEQQDIQSLHRIRSGFVQRRTALANQLRGLLNEYGIIIPQGITQLPKYLPLLLENTENRLTAMSCTFFAELYAQFITLDKQIKQYTRQLEQLAKNLDVCQRLMNVPGVGALTATALIAAVNQGKEFKKGREMAAWLGLVPRQHSTGGKSKLLGISKRGDTYLRTLLIHGARSVIRHQEKQTTFKGSWVCGVIERRGKNKACVALANKNARILWALLSKDVEYKAVA

SEQ ID NO: 109867 - protein, 467 aa, unidentified
MVYSTLNHIQGKIGSRWAQFVRETGVENILIVAIDAAKYTPKAMIATFYGEILEKPFDIDASMSGFTKLKTLIGRHKVKANTRVVVGIETTGHYYEHLVFKCHLEGYHVRTINAATTAKEREALLNWSKTDNLDLMAIVQSVIHGRGTSNELPTGNIAKLRKLTRARRELTSERTKTKNLIRMHMDHIFREYQGKTVWINGKRKISKPLTDVFGKASRYLMRHYPHPSDILKLGEEGLRDLSIRENLKLRDKSIQLLLEYAEGSISRPKEQLDADIFLLSQKLDRLDLLDDQIKVLERKIEELFIVMDGAVVLSVQGIGLVTGAELVAEIGDLSDFDEAGQLIKLAGTNPIVKQSGDNRPSYYGVSKQGRRPFRNIVYQVGRSLAVNNPEMQQRYQKLKERGKHSRQAYIALGNRMIRLAFAMIRNHTLYQTEDKNYVLLEEISKKIRKTNVKKFFETHVSPIKCAS

SEQ ID NO: 109868 - protein, 406 aa, unidentified
MSVQSLGAAGSLVVVAVDVGKNVVALSVTDAGRHRLLGPVDFEMTGRGLDWVLGLIRSKLAGLDVPVKVGIEAAGHYHRPLLGPSVWPAGWQVLELNPAHVAEQRRVQGRRRVKTDALDLEAITELVLAGRGLPVTAREAVIGELGAWAAHRTRRVQARTATKNQLLGQLDRAFPGLTLVLPDVLGTKVGKLIAAEFADPKRLATLGAGRFIRFAASRGLQVRRPLADGLVEVARDALTTVDAPVARQVLGADLALLTELSAQIEVAEAEIARLLPLSPFATLTTTPGWGVVRAGNYAGALGDPQRWPGPSQIYRAAGLSPTQYESAGKRRDGTISREGSVALRRALIDLGMGLWFNDAPGRAYADGLKARGKKGGVIACAMAHRATRIAYAMVRDEVVYDPARWA

SEQ ID NO: 109869 - protein, 340 aa, unidentified
MDAIGVDTHKDTLAACLVDELGTALDERTFANDPTGHRALLDWASASSEATIGVEGSSSFGAPAARFLIASGRVVREVPPQLSRRERIRTRRPGKSDPTDALAIARVTAREHELPPVRLVDASLEIQLLVEAREDVVAETTRVRNRLHADLRVLAPGYGATAANLTAVRHRATVARLLRRLDGIQPELARTRLARLRALAAEEHALAVRIADRVAGHPLLELPGAGVLVTAKLIGEVGDIGRFRSSDAFAALAGVAPIPASSGQTQRMRLNRGGNRQLNRALYTIALAQAWHHPPAKAYIAKKRAEGKSWREAIRALKRQLVRTVFRLLQTGARSLVEAA

SEQ ID NO: 109870 - protein, 380 aa, unidentified
MDVLLTNVAGMDVHQKEIVVCVLSGTEEGSLQKEIHTFSTLTKSLYELLEWLEQRRVTHIAMESTGIYWKPVYNILEGYFDITLANAQRIKNVPGRKTDVSDSEWIAKLLRHGLIEKSFVPSQDLRELRDLTRLRKKWIGNLTAEKNRISKVLECSNIKLGSVISDIFGVSGRKLLTHLVEQGYLDQNDVDACLHPSLKKKADTISASLFGTLNDHQIFMIRSSWNHIEYIEKSVQELESRIDVLLQSYQEEKEILLTIPGVKEHTVACIIAEIGTDMSQFATSRHLASWAGVSPGNNESAGKKKSGKSVQGNPHIKSALCEVAWAISRSKNTGMSSTFWTLAARRGKKKALQAIAHKVLRIIYTLLINKQAYFEPRLAG

SEQ ID NO: 109871 - protein, 326 aa, unidentified
MQGKVTLKDSAAMEAYTGIDVCKRWLDIALHPHGHCERFENTGKGINKLMRWLSSHGVALIVMEATGKLHRKAHKALHDAGFAVAIVNPLRARLFAEAVGKLAKTDKIDAKCLALMAATVKPSAVAPRPELMENLQELLRTRQALVDEQTAFLNRIAACTSAFVKRELTRQRTALAASIARIGKEILRLVKSDASLERRYEILLSIPGVGPVAAAALAIGLSELGTCSDKQAAMLAGLAPVACESGESKGARHIRGGRAGVRRSLYMAAVSAITHNKPLSAFYDRLTAAGKLPKVALTAVMRKLVVIANTLVTQDRFWQDEAPQHA

SEQ ID NO: 109872 - protein, 411 aa, unidentified
MVRNDTVGRDTPVIAGVDTHKDTHYAAVITSTGQQLEAAPFPATPAGYRALTAFITAHGPLARVGVEGTNSYGAGLARHLIAAGIEVVEVLRPSRQVRRMRGKTDQIDAYAAARTALSGTGCSTPKNGDGLVEAIRVTVVARSSAIKAGTDTTLQIRDLLVSAPDTLRSQFRDLSGSALINMLARTRGHESDDRLTGLTRATLRTLARRIGMLDAEIAGHDRTLRRLVAEANPALLQAKGIGVICAAQLLIAAGDNPERIKGEGAFAMMCGAAPVPASSGKTIRHRLNRGGNRRANSALYHIAVVRLHSDSRTRAYAARRRAEGRTTKEIIRCLKRAIASEVYHLITNPPQPLDTTELRPLREAADLTLAQAADALKCSISTLSTIERGHSSNRQTITTYRDYLTHHQHAA

SEQ ID NO: 109873 - protein, 330 aa, unidentified
MKKAELFVGIDVSNKTLDVCKLSSTREFLKITNSQKSIAKFIKDLERRHTPSTIFLCLENTGKYSWRLVRALATSEINTYVVNPLHLKRSLGLIRGKNDKVDAVRIAQFIKKNHEELVPYVPEREEITNIKILLAERRYKVKTRRQLKAKNKDLKQVPNRTMVKTLINENNQLIKQYDKQIKRIETEIRAVINADQSLKQMAKLLKSVPGLGDIIAWNIIVKTNEFKTIKDPRKLACYCGVAPFQNRSGTSIFGKTRVSLLADKKLKKILHLGAMRAVRMNNDFKVYYERKVKEGKNKMLVLNAVRNKMIHVAYALINKQEFYQNRLVLS

SEQ ID NO: 109874 - protein, 400 aa, unidentified
MPFYAGLDWGGASHAACIVDGTARIVARFDVRHDAAGLADMLARLKRVAPPAELPIAIERPSGLIVDALLAAGHKVIPIHPNVVKACRPRYRAAGGKSDPGDAYMLADILRTDGHRFRPLIAVSDEIKALRALVRGRDDLVVQRVALANQLRSLLEGFWPGATDIFADIDSPIALAFIGRYPTPASASRLGEKRLASFVVQHAYSGRRSAAELLARLRAAPSGLASDAETQTKGEIVRALVGVLERLILAIATLSSRIEQAVEQLPDGRIVMSFPRAGRINAAQILAELGDVRERFPTKDQLAAEAGVCPVTHASGKSRGVVFRWACNKNLRVALTCFADNSRHASGWGAAIYNKARQRGCKHAHAVRILARAWVRVLWRAWQDGKPYDPAHHAGAAHVT

SEQ ID NO: 109875 - protein, 464 aa, unidentified
MKVAKINQQTRKGNKTRVPSFPILNPNAAGIDIGSAEHWVAVPEDRDEQPVRKFACFTQDLHAMAAWLKQCKVETVVMESTGVYWIPVFQILETHGFEVKLVNAKQAKNVPGRKTDVLDCQWLQRLHTYGLLSGSFRPDDAICVLRSYWRHRSTLIGYISSHIQHMQKALTQMNVQLHKVISDITGVTGMSIIRAILSGERDPVKLAQMKNYRIQSTTETIAKALEGDYRQEHLFSLRQAVELYDFYQQQVQACDHEIEAYLSQLDGIDIASNPIPPSRRRIAKHKGNQPDFDLRTHLYRISGVDFTQIDGLDVLNVQTILSEVGLNPDAFPTVKNFTSWLAICPNNRITGGRIKSRSTRKAVNRAAEAFRMAAYTLTHSSSALGGFSRRMRARLGAPKAITATAHKIARIFYQMWKYRTPYQDLGADYYEQRYKERVLSNMKKTARQIGYLIELTPMPQTAVS

SEQ ID NO: 109876 - protein, 451 aa, unidentified
MALLDRTVRIVLTSLLNVWWNSQWLLYLTLKGVLTIKVVYQTCCGIDVHKSFLVATIIKTTSGVDPSYQKKRFSTFNNSILQFKNWLIENQCRDVCMESTGKYWVPVFNLLEDEMNVTIANPKWVKAVKGNKDDTKDSKWIGDLFRLGLVQGSYIPCKPIRILREFTRYRYKLTSCRTSEKNRYQNALTVCNVALDSVVSDIFGKSATSVIDCLIEQSGNSINHEEIASRLLRSLKKKSDSVIESIEGYQMTDPQKYRMRLVRAHLDYITSTINDIDTMLDSLIAPYENAVQLLCTIPGVDRNSAITVISEIGTDMTPFSNSKRLCCWAGLTPGSNESAGKKKSVRITRAGVYLKPALVQVAHAAVKSDKSPYYKQKYERIMKRRGKKRAIIAIDRMILTAIYQMLSTGEAWNPTDLYKTDMPEPLKEKQKEKAIKQAKKLLIREGILSES

SEQ ID NO: 109877 - protein, 456 aa, unidentified
MNLQEKLAEVSKKKLLIGIDVAKDTHWAMIGDIKGKELMSPFKFNNNKEGFNLLESKINSLGSFSNAEVMFGLEPTGLYWKPLGMYLKSKNYRLVLINPSYTYKTKELQDNSQTKNDKKDARVIQTLVREGKFLEPIILKGDYARLRRLIKARESLIKRSGALQSKIKGIVSEYFPELFSTCKTLKSMTLMKLLKECPFPEDICSLGENLFLKKVKIYGNNRFGISKAQRLWEVARVSIGIKEGCIEAKLELKQLIEEYELLEKQKKELEQLIKVITLRLPETRYLIKLPGIKYLSIARLLSETGPLKNYGNSKDIEKLAGLNLVEASSGKHISCKTISKRGRKLLRHCAYLIALSSIRNNPGIKCEYRYRVETGKQNKIKALTAIAAKMLRIMFCLATKEREYDPNRVSKYYNYEWVRPAECPSGSPVKLGDDTVKKNIGHPLSVTLNEVMSGSR

SEQ ID NO: 109878 - protein, 416 aa, unidentified
MEQIFMIKENYIYVGIDLHKETHTAVMIDCYNQKLGEITFPNRPADFPKLVAKVKKCNTDGKTIVFGLENAYGYGRALAVWLIDKGYLVKDVNTAISHRQAKHRGAMYRKSDSDDAEAIALATLNMLDKLPDAYPNDAYWSLGQLVHRRDNIMKQRTRLVNQLHEQLCIAYPSYKQFFNDISRPTALYFWEHYPSRKYLKGKSVEDLRAELVPVSHNKCSTRTCEKILDAIAGDKVKNNAYQDARDMVTLSIVSDLQHYDKQLAEVDKMLEQMYKMLGCTLTTIPGVNVITAVKILAEIGDIKRFSNANKLAQFAGIAPLHLSSSGKGKDLATKQGNRRLQATIYFLAIQMVQISSKGTPRNPVVRAYYEKRKAEGKTSQQALICISRRLISIIYGMLKSGTEYRMPVMENTGETV

SEQ ID NO: 109879 - protein, 351 aa, unidentified
MTVYCGVDFHARCQTVSYCDTADGEVHQQELHHQKDDVRAFYQQFSGGVIVGLEASGYSAWFEELLEGLGHQVWIGDATEIRRLARRRQKNDRRDAAHILDLMLGGAFPRLHRQDGLSREVLRQLRYRQRLVKISVMIKNNLHALALSAGLSLQAQLSTAKGRARLEALPLSPTLAQQREAWLQLLGRVREQVVSVEHWLKRQASGDERVTRLRTHPGVGLLTSLCLVHTLGDTARFANSRKVTAYVGLEPMEHSSAETRRYGAISKAGSRLLRFLLGEAAQIAVRTDDQLRAFYRGLVARRGKAKAVTAIARKLLVRCFVMLRDGIDYAEFRRRGVARSVCPHLHIGFDA

SEQ ID NO: 109880 - protein, 418 aa, unidentified
MEIVYERVAAIDVGKKIIAVAVRTPGQHPGKRRQQVRKYNTFHQTLAEMVAWLVAEGVTHVTMEATGIYWKPIFHALCAAERPMEVLLVNARHVKNVPGRKSDALDAVWLAELTECGLLRGSFIPPPQIAAIRELTRYRKKLIEQRASELQRLGKVLEDSGIKIDSVASTLTTVSAREMIEALINGERDPAVLADLARGVMRKKIPELRMACAGRFGDQHALMCTLHLEHIDHLTDMIARLDTRIDEASLPFDPQIQLLATIPGIGERAAQVIISEIGVDMTRFPTAAHLASWAGLCPGNNESAGRHRSGKTRKGNTELCAVLTECAWAAGRTSTYVGAQFRRFHRRFGKKGGRKAAVATAHTLIVIVWHVLVETTGYQDLGADYFTRRLDNPEARKRRLIRELEALGHKVTVEPAAA

SEQ ID NO: 109881 - protein, 362 aa, unidentified
MRIIGCDLHARQQTLAMLDTTTGEVVEVTLKHEGDNVREFYSSLPRPVRVGIEATGSMQWFLNLMEELGIECLVGHPAQIRAAAPRKQKNDRRDAELILKMLVEGRFPAIWLPSKELQDLRALLRHRHQWVRMRTRIQNALQSIALANGLRRGTALWSNDGQSRIASLPLAPHTAYRRSELQGMYEKFEAEIEKLNQRVEEQACKRPGARLLMSHPGVGPITALATEVFLGDPARFADSKALASYVGMIPREYSSGGRQRLGGLSKQGNPLLRFLWGEAGAHAARKDPELQRFYRRKLVQKGLGKASVAVARKLGIRLWIMLRDQIEYNEFCRRGQKQQKSSDACVGMPETRYGAKSHRPID

SEQ ID NO: 109882 - protein, 411 aa, unidentified
MDKPGVAHQVTRFIGMDIHRSYATVAAVDSDQQVVLTARRIDYEHFDEWIRKNLRLTDAVTLESTGNAWYFHDLLAPLVVSVTVANPIQVALIAKARVKTDPRDALTLARLLAARMLPSVWVPPTEVREQRALVAHRQRLVKQRTQVRNRLRAVLIRHNLVAPPTEVFGSGQRAWWDGLDLPASEKLRVRHDFTILDSLEPLVKQVEAELARQSNIAPWEDQAAFLLQLPGIGVPSAMQVLAAIGDINRFPTPHQLVGYAGLGAGVHSSGQEHYGGGITKQGRRDLRKTMVDVAWVAVANHFYWKTVFERLADRTGRNKAIVAIARKLLVVVWHVLAKQVADRQAVPERVAGKFLEWSWKVGRVNRRGLTTVAFIRRQLCRVQVGENLTSVSRGKKTMRLPPSEPAVHAVG

SEQ ID NO: 109883 - protein, 346 aa, unidentified
MKYYVGLDVSLKEISVCVIDGDGKIKARGTTPADPMAVKSWFKKRSLEPETIVHESGQLSIWLQRGFLELGLPAVCIDARRAHKSLSARLNKSDASDAEGLAQLARTGWFTPVFVRSVEADRLRALVGARERMIRLRKDLEGHIRGVLKTFGIRMAGVTQGKLRQKSRDQLAAAGETDPVLRIMADAFIDIHAMLCKAAADLGRALKTKVETHPVAKRLMTIPGVGPIVSLSFIALIEDPSRFTKSTDVGAYLGLTPKRYQSGEIDWSGRISKRGDKAMRSLLVESASTLIRNVKRFSALKSWAIRLAGRKGFRKAAIATARKIAVLMLTLWKTETDFQWTKEVKS

SEQ ID NO: 109884 - protein, 410 aa, unidentified
MEVLYPHCAGLDVHKDTVVACVRHMVNGSVRREVRSFKTTTKELLALSDWLAGEGCTHVAMEATGVYGKPVWHVLSDGDFTLVLANAAHVKNVPGRKTDVNDATWLADLLAHGLIRSSFVPDGQTQEMRTLLRTRKQLVRECSRHVQRLQKTLEDANIKLDSVISDIVGLSGRRMIEALIAGETEPGALAAMAHRRIKATPDELEAALRGRVTRHHRFLLQLHLQQIDAVNAAIDQIDQEVDAYVEPFRATVRLLTTIPGIDELSACVILAEIGRDMSRFPTAGHLISWAGLCPKNDESAGKRRSTRMRKGAPWLKTTLVQCAAAAARKKASYLQAQFHRLRARRGAKKALGALAASILTSVYHMLISGELYRDLGPHHFDQRAKAVNTRRLVVRLQNLGYAVQITPLAA

SEQ ID NO: 109885 - protein, 465 aa, unidentified
MDSSAVRKPTKLKGKSLNNKSRLPKHLKHINKMAAGIDIGSRGHFVAVPEGCAEICVREFKSFTSDLYDLADWLKQCNIETVAMESTGSYWIPLYEILEARGVEVKLVDARHVKNVSGRKTDVLDCQWLQQLHSYGLLHGAFRPEEQICILRSYLRQRSMLIQQAGRHVQHMQKALTQMNIQLQHVISDLTGVTGLRIVREIVGGERDPKILAGYRNHHCKSSVEKIEKSLTGNYRDEHVFALKQGLELYETYHEKIKACDQEIEKQLLNFRNKPQQIREDDRNHKSRGNSKNRLSFDVTSHLIRITGVDLTAIPGIEASSAIRIISEIGLDLSRWKSSKQFASWLGVCPGNRVSGGKSLSGKSKRTANYAASAFRMAASTLHGSKSALGSFFRRLKSRLGAPKAITASAHKLAVIMFNMLKNGTEYFDTGQDYYDKRYRERIIHNLASKAKSLGLKVVPDPSIT

SEQ ID NO: 109886 - protein, 395 aa, unidentified
MFIVGIDIAKRSHEAIIIAEDGQVVRKAFSFRNNCTGYNLLLEQVRRLTLVKSQIVFAMESTAHYWLALYARLLKDGYAVMVLNPIQSHSLRELYIRKAKTDARDSLIIADLVRFGRCKASNVPQDKILALRELCRSRAYLVDMAADLKRKLIALLDRIFPEYESLFDSVFSKASIAVLSKYSTPQKAKNAHLGKLTDILMESSNGHFGEWKAHQLKEAACSSFGIDDSGGVYSTLLGMFLEQILSLTAQADSLEKQISVFFQEFNNPLTSIPGVGTVLAATILSEIGDITRFSSADKLLAYAGLDPSVKQSGEFKSNQNRMSKRGSPYLRRAIWLASTVAVHRDPMFQTYYEKKISEGLHYMNVIGHVSRKMTAVIFAVLRDGQPYQPILQSAG

SEQ ID NO: 109887 - protein, 408 aa, unidentified
MDVLFDRVAGLDIGKASVTVCVRTPAPAGKRVSQTRTFKTMTRSLEVMRDWLLDEGVQLAGMESTATYWKPVYYALEDHMDVWLLNAGHMKAVPGRKSDVRDAEWIAQLMEHGLVRPSFVPPPEIRRLRNMTRYRLQLTGDRTRDITRLEKLLEDASIKLSVVASSVDTVSAMAMLSALVAGERDAEAMAQLARGRMRSKIPDLSEALRGRFDDHHALLVGQMLARIELVNSALGTLNAQIETAMVPWTDKLDLLQTMPGIGPKTAQVFIAETGGDMAPWPSAAQLAAWVGLAPAMHESAGKRTPAGSRHGNKFLASMLVEAAGSVARTKNTYLGAQYARLASRRGQKRAAVAVAHSMLVSAYHMLNRGEPYRDLGPDWLAKRNDAAHTRRLVAQLERLGHTVTLDAA

SEQ ID NO: 109888 - protein, 400 aa, unidentified
MVPQLHVGIDVGCKVHRVGIADPQGKILDEFDMVHAEAGFRDFFCRVGCYKEELALPVAVAMEGYNGYARPLDRMIQEKGYTLYNVNNLKLARFKEVFPGAAKTDAIDTRKILELFHLKEHLPLAKDVLQEVIPAPLVNEKLKRLSRRRRQLVNEKIRIANRIQSDLQAICPELLSITNSVSNLWFLEFITCRDDPRQLIRLRPTTILKLHGIGRKYAGIIQEWQGKASFSHETDYVGPMIIQDARRLLELLDQIHILDRAMETLAEESQIAQRLSSIPGFGNTSISELAGEIGTLDRFTRESGLALYLGISPLTHQSGQKHRTRSPRQVNQRAKAAMMTAVARHMGYVPESRTYYDKKRAEGKTHNQAIRALGRHLVRVIWTMLKNNRDYKIREVKKMT

SEQ ID NO: 109889 - protein, 390 aa, unidentified
MIYVGIDVASLKHDFTIVTDQGEILIDGKTIGNDSEGFDVLLRALRTHGPSGEQTKIGMEETGIYHQRLRAYLKQSGYVVYTINPALISHSRKAESLRRTKTDRVDALAIARYLMMYKRSLHSYTPSLYHLEALKSSTRIYHTKRETLSRTKIELKRILQVVFPEFAKHYDPLSQWALNLLEAYPTPEKINRMHEATLVRILRTKGDRKPVARHIRKLAKSSVGQSDAMSERLIRFAISDLKHFKAQINEIKQALVEQMKSFQHLTSIPGVGAVTGATILAEIGDIHRFPHKTKLLAYAGLDPVIYESGTFKATNTRLSKRGSRFLRSAIFMAARIACVGQTRDNKFRAKYKAKIASGKHHYTAVFAAAKNLTYTIYAILKSGKSFDYAK

SEQ ID NO: 109890 - protein, 321 aa, unidentified
MSLFHLGIDVAKAKLDCALRLPNGKFRSKVIANSGNGFTQLIDWLASHQATPVHVCMEATGIYWEEVAQFLAKAGFTVSVVNPAQIKAYGASRLTRSKTDAVDARLIADFCAERQPAPWQAPSAEEIALRALVLRLEALQTMRIQESNRLDVSRDAVHEDIQQHLDWLDNAIKQLIKTINEHINNHPDLKQKRDLLDTIPGIGERTSAIMLAFYADTDRFDNGRQAAAFAGLDPRQYESGSSVKGKPRLSKVGHAFLRKSLYMPAMVTLYKTAWGKRFKDRLTSAGKPPKLIIGAMMRKLVHVAFGVLKSGKSFDPVLHGA

SEQ ID NO: 109891 - protein, 329 aa, unidentified
MKVQHIIGADLSKKSIDLVCHLLKSHVQIQNTVTGFKDLIQWMRQQKINPSKIMIVMEHTGLYSYCFEHFLHEHQIPFCKVNALAIKRSMGLVRGKTDKLDAVRIAAYGYEKKDNLAVDVPTSDALKRLKMLHSTRDRLVKQRASLACAIKEYRHIGITEKDVIMQTQLQLIKNFDRQIEKLMTEIEIIINEQEPLKQSFYLLQSIKGVGKILALTAIIKTSNFARFANARKFACYCGTAPFEHSSGTSIRKKSRVSHLADKQMKTLLDLSAKSAIQYDKELREYYLRRTNDGKSKMSTINIVRNKILYRMFAVIKRQTPFVESYLQAA

SEQ ID NO: 109892 - protein, 347 aa, unidentified
MDTIGLDLHKRESQLCIVNEEGTLIERRIATTKERFAAVLGDRPRARILLEASTESEWVARHLESLGHEVIVADPNFAPMYATRSRRTKTDRRDARTLMEACRLGAYRPAHRVSDARRHVRAQLAVREALVRTRTRYISIAKSLVRRDGLRVAGSESHHVAKRISALEISPMLADELLPIFTVLAPINEQIAEADRRLAQLCEEDPIVSLLATAPSIGPITASAVVATVNDITRFGSAHQFEAFLGLVPCERSSGEKRRIGRITKAGNARVRHLLVEAGWRIMRSKSPETLALRAWAARIAERRGNRIAVVALARRLAGVLFAMWRDEKPYDASALRAPRATLAQAS

SEQ ID NO: 109893 - protein, 483 aa, unidentified
MKPRPQQKSKKAGGQTAPSKWQEMNRRQRREMMRKMQSEDLTLEVVHPDAAGIDIGNESHYVAVPPTRDSQPVCRFGCTTSELKAMADWLKHCRIRTVAMQSTGVYWIAVYDILEEAGFEVYLVNARETKNLPGRKSDVQESQWLMKLHTYGLLRNSFRPSREIRTMRTYWRPRNDLVRAAGRHIQRMQKALTQMNIQLANVLSDVSGMTGQAIIKAILAGERDPHQLSGLRDWRVKASEEEIARSLEGNWQEDLLFVLKQEQDGYEFCQQQMAECDRQLEQYLQQREDRTQGTSLPEEKRKERRRKKKKGNAPQFDLRAELFRMTGSDLTQIDSIDGTTAMTILSEAGWDMSKWKTEDHFVSWLRLCPDNKISGDKIIGKGRLPTNNRATLALKMAASTLRRSNTYLGAQFRRLRSKLGAPVAIKAMAAKLARLLYRMLRYGMSFIDRGEAFYESQHRKLQINYLKRKAANLGFQIIEAPSA

SEQ ID NO: 109894 - protein, 342 aa, unidentified
MKPCDWKELLQLIERIRKRIAQELKKPVEVISCYEAGYDGFWLHRLLEAQGVRNHVIDPASLQVDRRARRAKTDGIDVGKLLRSLMAYLRGEPRVWSVVRVPTIIEEDDRRLHRERSRLINERIQHVNRIKGLLAIHGIYDYEPMHPERIQRLERLRTADRHSLPLRLKAEILRELQRLELVLGMIQTIETERDAIVSAKSKSQQTSAKKIKHLVKLKSIGPEFATVLVGEVFYRTFDNRKQVGSYVGLTPSPFQSGSTSRDQGISRAGNAKARTTMIELAWLWLRNQPDSPLSVWFRERVGNRKGRIKRIAIVAMARKLLIALWRYLETGVVPEGAVLKSK

SEQ ID NO: 109895 - protein, 395 aa, unidentified
MFIVGIDIAKRSHEAIIIAEDGQVVRKAFSFRNNCTGYNLLLEQVRRLTLVKSQIVFAMESTAHYWLALYARLLKDGYAVMVLNPIQSHSLRELYIRKAKTDARDSLVIADLVRFGRCKASNVPQDKILALRELCRSRAYLVDMAADLKRKLIALLDRIFPEYESLFDSVFSKASIAVLSKYSTPQKVKNANLRKLTDILMESSNGHFGEWKAHQLKEAACSSFGIDDSDGVYSTLLGMFLEQILSLTAQADSLEKQISVFFQEFNNPLTSIPGVGTVLAATILSEIGDITRFSSADKLLAYAGLDPSVKQSGEFKSNQNRMSKRGSPYLRRAIWLASTVAVHRDPMFQTYYEKKISEGLHYMNVIGHVSRKMTAVIFAVLRDGQPYQPILQSAG

SEQ ID NO: 109896 - protein, 466 aa, unidentified
MARKRKSDKSKKNKRPIRSLETIQPNAAGIDLGSREHWVAGPPQEDKAPNVERFGTTTPELLRLADWLTQQGVKTVAMESTGVYWIPLFEILDSKGFEVLLANARQVTHVPGRKTDMLDCQWLQLLHACGLLRGSFRPSDDMCRLRDLMRERNTMVEQRSDWVRRMQKSLNQMNVCVHHAVSDITGVTGMRIIRAIVDGQHDPHVLARMRDRRCRKSVEQIAAELTGNWRAEHLFNLRQALKMYDQLCTVVTDYDSEILAYIQRLQPADNTGTTAPPPVSKSKARNIAKKGQEPLRQALYQFSGFDLTTIDGIGVDIASEVVSELGLNYTMFPTENNFVSYLRLAPNLSISAGKKVSSKSKSNTCTRVAKALRMAALTLRNSKTALGAYYRRVAYRKGASVAVFATARKLAQLIYRLVRYGQAYVDTGTQAYEARFNQRRLKSYTKALYEMGYIVEPLATAEASTT

SEQ ID NO: 109897 - protein, 445 aa, unidentified
MLAVCVLIYGKGKEPEARQKEFATHQKALTNLRHWLSSQKVTQVAMESTGVYWKPVWYALEGHFQLLLANPFQVKALPGKKTDKRDSHWLAELLAHGLIAASFVPPEETRARRDLTRYRVKLSEEMNRIQNRIHKILEDASVKLDTVVSHILGGTGRSVIEGIIEGSESPAELAERAQGSLRGQRAQLELALHGRVREHHRFMLQQLLEDLRFVEAKILRLDQKLAASMDLELVSRLCTIPGVDVITAWTLLAELGTDMSVFAGSKKAASWAGLCPGNKESGGKRLSGRTRKGNRWLRRALCQAAWGASRQKDCFLNAFFQRHKARHGAQKAVIATAHRMLVIAFCILRDGTTYQERGGDFYDQLHAARTRQRLLERLRRLGVAVTVSFPAPAQAPASMPGSKRKRGRPCKCVERHLPCPHRLEQPTNSVATPPVASPGVCATSE

SEQ ID NO: 109898 - protein, 450 aa, unidentified
MSPLALDVVTKTDKTPVLGRMLSKYVGRKTSSIENGITKARNHSRQRGNIMRVVFGIDVSKASSEVAILVNGEKVHGYTIPNDAIGFNRLLGDLKTVHQPEIVFEATGVYSRRLQAFFEDNSYTYTRLNPLESKKQLDSLRVRKTDKIDAEKLAMSQFILNRKPSYVQEALYQELRDLSRFYQNLTEDIVCAKNRLHKVLQITFPELENILSAPTGEQYWNLVITFPCNSFVLESDDATLTAIIRQSTAKRISEKRVTYLVDKLTKLANQSYCAVKKTSPVIEEVKYYAGELLRLSEHRQGVVEEMVTLAQSLPEYEILLSIPGIAETTATSIIGELGDIRRFHSANQINAFIGIDLRHYESGNFLAKEHITKRGNPYARKILFKCIHNIASASHTNPCHIADFYEKRKRQSQVTSTKPHTIASIHRLIRTMYYLITHNKLYDYTSTQNR

SEQ ID NO: 109899 - protein, 484 aa, unidentified
MVLPNDGPKKSRKPKDPAKPKPKDPAKPKKSRERSIAIPVPASSAGLSVVNPDAAGIDVHSNMHMVCVPADRDAKPVRQFGANTADLHELVAWLKKCRVKTVALESTGIYWIPLFELLESEGFKVYLVEPGQLSRCGARPKTDVLDAQWIQRLHSYSLLRASFRPPDSVLALRAYWRQRQMQVRYAASHVQHMQKALEQMNVKLPEVVSDITGLTGMSIIDAILEGERDPIKLAKLRDERCQHSEDEIALALEGTWRPEHLFELRQARELYRFHHRQISECDQQLEAELEKFVNRAGEKTRTGKTRKLGRKSNDVHFEARDPLFRALGVDLTKIEGIDVGTALVILAEIGVDVSRFPTEKHFASWLRLCPPQNESNKTKRRRGRRKGASRVTIALRLAARSVGQTKTPLGLFYRRIRSRIGGLGAVKATAHKLACLVYRMLKHGEEYVTQSMEEYETKMKANMLKALARKAAAMGFQLSPLPSQ

SEQ ID NO: 109900 - protein, 348 aa, unidentified
MSEAYDGREVAGMDLHRRRSVLVRMTADGSKLETARISNSPAELRRQIARAGVSPRVVVEATYGWYWAADTLTAAGAEVHLAHPLGVKGFAYRRVKNDERDAADLADLLRMGRLPEAWIAPRPVRELRELTRYRHKLVRARTSCKDQVHAVLARLGVPVTCTDIFGTGGSIWLDGLVLPQPYAGKVASLRKICALLADEIALLDTAIAGVLEHHGGYQAVRELPGIGPVLAAVIIAEIGDITRFPGPARLCSRAGLTPRHRESDVRVSRGHITKQGSRMLRWALIEAIQHVPAGHPLRQRKDDIIARRGTQAKNIAKVAAARQLLTWIFYAMRDGRVRCLAAAVAQAG

SEQ ID NO: 109901 - protein, 347 aa, unidentified
MVTLGGDCHKRTHTLVAVDDNGQQLGAKVVPAVSAGHLEALDWARQWAERRWALENCRHLSRRLEADLLLAGEVVVQVSPKLMAGARRSAREWGKSDPIDALAVARAALRESDLPVAQLEGKSREVKLVLDHRDDLVGERTRVQNRLRWLLHELDPNLDVRERSLDRKVVLKRVAKVLAGHRGVAADIAVEQLERVRQLTKRINELEGQIRALVSDLAPTLLELEGCAALGAAKLIGETAGITRFKTPAKFAMHNGSAPIPVWSGNTGRHRLNRGGNRQLNVVLHRIALTQMRLGGRGYDYIQHRRAGGDTMREAMRALRRRISDEVYRRMWQDSMRTTRDRAQAAA

SEQ ID NO: 109902 - protein, 327 aa, unidentified
MSEPGNAAEVFVGIDVAKAKLDIGLYPRGETWTVEHTEEGIATVVERLAGERPALVILEATGGLELAMAAALVAAEVPVQVVNPRQARDFAKATGQLAKTDRLDALVLARFGAAIRPEPRPLPSAALQEARALVARRRQLQAMVVAEKNRRSGAPQRLHAQIDDHLAWLRRAVADLDKDLGQTIKGTVAWQAAVSRWRSVPGIGPVVSTTLLADLPELGSLTRQQIAALVGVAPLNHDSGTRRGTRSCWGGRAHVRTALYMGTLVATRWNPAIKTFYQRLLAAGKPKKLALVACMHKLLTILNALTRQQVDWQDQAQTQASSAALAA

SEQ ID NO: 109903 - protein, 355 aa, unidentified
MNDAKYIGMDVHQATISVAVRDSRGNLVMEAIVETKAETILQFIRGLRGSLSVTFEEGTWAAWLHDLLQPHVTRVVVCDPRKNALLKVGNKNDRIDARKLSELLYLNKLSSVYHGEPGIRTLKELARSYIAMTRDLTRVMSRLKAIYRSWGIPCAGQQVYAPRYRAEWLAKILEAGVRRRAGLYYQQFDALAALRQQARRELLAEARKHPAMKLLRQIPTIGLIRAALLIALMQTPNRFRTKRQLWAYCGLALRTYTSGEYRFVGGQLKRSKKVLAVRGLNINHNHDLKNIFKGAATRAASTAGPFQHLYEACVAGGIKPHLARLTLARKIAAITLLVWKKGVRFDAEHLKQQAA

SEQ ID NO: 109904 - protein, 343 aa, unidentified
MELYVGMDVSLKETSICVVDDEGVIQCEGTVISEPAAIAGFLKTKASGAKRIGLETGPTTTWLWHELRALGLPVICIDARHAKAVLSMQINKSDRNDGVGLARIMQCGWYKEVQVKKLACHEIRAVLKSRAQLVKIKRDLENEIRGLLKNQGLVIGKAGGRVFHRRAEELLGPHGLLAAAVRPLLDIREKVGREIAVLYRKLLDLVRNDADARRSMTVPGIGPITAMAFHSAIDEPSRFKRSRSVGAYVGLTPRRYASGEVDWSGRISKCGDKMLRTYLFEAAGVLLTRVPQWCKLKAWGHRLWKRIGFKKAKIAVARKLAVILHRMWRDGTDFIWSNKEAAA

SEQ ID NO: 109905 - protein, 317 aa, unidentified
MGQVQPSIKVAGIDVGKRRLDVAVHGLEDALGAGNDAGGFSELIAWLKSREVGRVGLEATGGYERGVRRALEAAGFEVVIHQPIEVRRFAQLKRWRAKSDRLDAKLIAWATAHVEAVKAAQDPRLVELAERMTAYEQITDQAAELKVFLESVTLADIARLVRAQIASLSRAKARLLADILTRLKAQADLLARFRLLLGLPGVGPVVAATLVVRMPELGAMRRGQPASLIGVAPFDRDSGQWKGLRFISGGRARPRRMLYLAGLQAKRCDPTLKAFAQRLAARGKPAKLIVVAVMRKLIEAANLVLQRGQPWLKHTAA

SEQ ID NO: 109906 - protein, 340 aa, unidentified
MEKRYIGIDLHRNRFTCCIRLENERTYLREWELEDLGTFVKKLRPTDEVAVEITGNTRLFFDAVAKHVARVVVVNTNQFRVIRQSVKKTDPNDARTLALYLWKNMLPEVRMKDKEHGQLASLTQTRDTLVKLRTALKNKINNILSARGLNLPKEALSSEKRLNEVLSLPFDEIVQIELRVIVEQIRSLNKSIADLEKTIGEEGSKLEGHKGLSSIKGIGKITGAILLSVIGDVNDFADEGHLASYFGIVPRVSNSNETEHSGRIHKRGTKLGRTALVQSALIAANYSPYLKRFYEQVKARRGAGKAIIALAKKFLGIIYRTLKNKWVFEDFPNFVLAEAS

SEQ ID NO: 109907 - protein, 365 aa, unidentified
MKIIYWIGIDDHGDKWTIAQYRGDEARPSKEFELVPDEKGYRRLLAYLKGLDGEVRIVYEAGPCGYELYRRLTKAGYQCQVAAPALTPRKPGERVKTNRRDAAKLGRYLRAGELTFIAIPDEERESLRDVIRSREAAQKDVGRTKKRIVHLLLRYGQRYRDGQAWTVRFWAWLKAIELAGENSQFVLAEMISELEHRMAQVHRYDEQIELAAQQPEYKTYLDGLRTLRGINTLSAMTVLSELGDLRRFPTAPQLMAAIGVVPSESSTGDKTNRFSITKAGNAHVRRIAVEAAWNYRRRPTAGRSIQARRKGQPKEIVDIAEKCEKRLNSKFFRLTSRHKKSTVAVVAVARELLGFIWAIGQIAHP

SEQ ID NO: 109908 - protein, 321 aa, unidentified
MTYVGIDVSKATFVVAYSSAKNSKTKTFKNTTKGIHEFIQSLSAGEHHCVLEATGNYSSLLVYLLSQAGITVSLENPLKIKNFARVMLSVTKTDETDARLIALYGEKMQPAPYKLRSDAMLTLKQKRTVIRQLKKQLIATRNLKGSMEVLPFFDPKCKKAIEKTIAFLEKQVKNLEEELAVLAQSEYKKQMDLLTSIKGIGITLAATLIMATGGFTYFDNAKQLTRYLGLSPTYQQSGTSVNVKGHINRNGDSSLRSQLYIAAMASLRCNAECKECFNRLRSNGKPGKVAVVAVANKLVRQAFAVVTQGKPYVDGFKSKKP

SEQ ID NO: 109909 - protein, 359 aa, unidentified
MTAMSIVAHSHAFVVGVDTHARNHVYAIITATTGELVDTRDFPTTGAGINRATAWVARRTGADLAVLWVIEGAASYGAILAGTVVTKGYSVVEAARMDAKSHHGVGKSDVLDAQRIARAVLPMQEKQLRRPRLNEGVRAALRVLVSARHSMTGERTRAVNGLTALVRVNELGLDARKALTGAQIAEVSRWREQDEELALSVARTEAVRLAKRIGDLDKDVAGNTQQITDLVKVSEAAPLLDVKGFGAITAATCLTVWSHQGRVHSEAAYASLAGVNPIPASSGNTVRHRLNRGGDRSLNSALHMVAITRMTHDEETREYVQKREAEGLSTKEIRRCIKRYLARRVYRIFNSQAEALIAG

SEQ ID NO: 109910 - protein, 320 aa, unidentified
MQSENVVVYAGVDVAKATLQVHLQGRQSEFANSPAGLRQLPKHLQKVAGVHVVCEATGGYEQAMVKVLHEAQIPVSVVNPAQVRAAAQAQGQRAKSDPIDALGLSDYGRRYQPKATPPVSQTQERLVALIQWLRQLVSGQAMAKTQAEHHRDPFVRRQHAKLLVHLESQIKALEEEIQTLLQEDKELQRRIDCLDSIAGVGARTAWLVQAHMPELGRVNRQEVAALAGLAPWTRDSGTMKGKRCIGGGRSEVRVALYMAALSAARSNPVMRDLYKRLRAKEKPAKVALTAVMRRLLTFMNHKLKKLNAETAAKENVQAIA

SEQ ID NO: 109911 - protein, 343 aa, unidentified
MQAVTTVGLDIAKSVFQVHGVNAAGEVIIRRQLKRRHVLPFFERLPACVVGMEACATSHHWSREIRALGHTVRLMPPAYVKPYVKRQKNDAADAEAICEAVTRANMRFVETKTPEQQACLMLHRTRHLFIRQQTSVINAIRAHMAEFGIVARVGRNGVAELLAVAADPTDRRLPEVARTCVAALGVQLRMLKAQILEFDRRIGAWHRSNQTSKRLDQIPGIGPALATALVASVPDPKAFRSGRNFSAWIGLVPKQYSSGGKDRLGSISKQGDRYLRGLFTAGALAVIRYAKIHGTEHRPWLTALLARKPTKVAAIALANKLARMAWAMMAKGERYKEPAALAA

SEQ ID NO: 109912 - protein, 345 aa, unidentified
MKKNIIGIDFSKETFDATLLDCRNSELSEAVQSAVHEKFTNNKEGFQAFVKWIKSSVKKITPDELLLCGEKTGKYSLPLSNFLYAKGYSICLDSGLRIKRSLGISRGKSDKADSLKIALYAYRYQDMAVCYVPLSKNVSRLKELFLYRQHLVSQVKAMAVRKNVTDDFKKELGDVKFIVDSAAKIIQQIKATIKKCEEKMQELIEEDDELKTTHDSITSIKGISLINATAFIAYTNNFKDFGGNAKKIATYWGVAAFAQESGTSVHKVARVSKIASKMLKSLLTQAARITVRWEPKFRQYFEQFISRGKHQGVALNNVKNKLIHVITALAVSKEKYNREYEYIKR

SEQ ID NO: 109913 - protein, 386 aa, unidentified
MQNLNDFSRSRIALKPDGTLIAVIEMSLSSWLVAGIAPGVERQPLKKLAVDESALLKLLHRWREEAEKAGRRIERIAVAFEAGRDGFWLARWLMARSIEAHVIHAASVAVSREHRRAKTDRLDTELLKRAFLGWLRGERDHCKMVAIPSIKNEDAKRPNRERENLVSEQSRIINRMKATLIRLGIRGFNPKLKRAAGRLDDLRTPEDEPIPPNTLAELRRDMERRRLVRDQIRQIEETRLQRLDHAPDDGPHAMVRLLARVIGVGIETADMLVHEVLSRNMRDRRAVARYAGLTGSPDESGRKRREKGLARSGNGRVRRGMIQLAWRFLLHQKDSALAQWFRVRTENGRGTRKRMIVALARKLLIALWQLVRQGVVPDGVVLRPAQ

SEQ ID NO: 109914 - protein, 328 aa, unidentified
MYQIGIDVSKKKLDICLLFYGILGKRKTKVIDNDAHSSRELISWLGKQKCRPEDARIVLEATGTYHETLCDQLFEAGIYLSIVNPYRIREFAKGMGILSKNDIVDAYALACFGTLKRPGAWVPPPPEVRELKALLRRRDALLADVLCEQNRLEKAEVTRTPKIVMRSIMKILKTLEKEKKGIEEEIAKHIDKYPGLKKDMDLLTSIKSVGPQLGGNMLMVLRCREFHSAEQVAAYLGVVPVERRSGTSVNSHAHLSKAGPSDIRAKLFLAALTATRFNPHVKALYDRLLAKGKTKMSALGAAMRKLVNLCYGVLKTQQPYDVNYAVSG

SEQ ID NO: 109915 - protein, 346 aa, unidentified
MTIVEAARTVTGGIDTHGETHVAAVLDQVGGLLGTESFEANLHGYSALFSWLAGFGKVGKVGVEGTGAYGAGLARFLTRAGVEVIEVDRPNRQDRRRTGKSDPIDAVEAARAALSGRAHGHAKSRDGAVEAIRVLVVAKRSARQARVKALTQMRQLTFTAPDQLQCRIKGLSAPQFIAAAQGLRPTRSTDPVTAATKASLSSLAHRIGELEEEIAELDARITPILEAHAPELLGIYGVGIDTAATLLVTAGDNPKRLRSEAAWAHLCGVSPLEASSGKVTRHRLNRGGDRQANRALWIIVISRLASDPATQAYMERRVKEGRSKREIIRILKRYVAREVYRHLPRG

SEQ ID NO: 109916 - protein, 309 aa, unidentified
MHSDCTPTPTVWVGVDIAKEHVDFFVLNRKDNPRGRRPQRAAALAELARELVELGVTHALLEATGGLERLAWAAFEAAGILVTVAPPSRVRHFARAAGVEAKTDQLDAEVAARFGEALSPEPTPLSSPALLRYRELLRQLSYFVKQRAQLRTRRHSVHEALVRKSLDRMIKAFGGEIEKLEKAVGAALAKLPAAAAQAKRLQQAGGVGPKTAWALTAELPELGTLTRGQAAALAGLAPRARDSGSHRAVHGGANGGSGGPQAARFLPTFTGGGQAETAGPDCGRPTVARHAKRYDSRRLRLASRPRCLT

SEQ ID NO: 109917 - protein, 353 aa, unidentified
MGKINKLLKGIKMLVQQPALINEIIDNEDFHKKEVIKNYGLNNGLKEISFFDLLNDNKVKTKKFNNNSKGFCELTKWLKNKKIDTAHLCMEATGGYEAPLAQYLYDNNFKVSVVNPARIKGFAMSRLSRVKTDKADSELIAYFCQAMQPDLWQPTPLHIQELQQLVRRLDSLIANKNQENNRLDGAIGEVAINISTHIEFLDKQIKKIEERISNHIKEHKDLNDKSKLLDSIPGVGEKTIGVILAFLTVEDFDSAKQVAAFVGLNPKPRQSGSSVRGVGRISKTGNADLRKAFYMPALTALRFNPIIKDFAERLLGTGKSKMVVVIASMRKLLHIIYGVLKNQITFNENINNI

SEQ ID NO: 109918 - protein, 341 aa, unidentified
MSDYSYFCGIDLAKNHFSLHAVDQNGKVILHKSVTRSKLLTTIANMPLMRIGVEACGGAHYWARTLNKLGHDARIMAVKYVIPYRTKGKNDLNDAVAICEAVQRPSTRFVPVKSPEQQAILSVHRMREHWVRERTALMYRIRALLSEFGLIIPVGRSSLMKHVPLMLEDAENELPHLARTGIADAYHHLGELNQRIADTEQVFESFAKVSANVQRVMKVRGIGPQTATAILASIGNGSQFDKSRDFSAWLGLVPKQYSTGGKPRLGRITKHGDKYLRTLLVHGARTVIANLGDKQDKLSQWCRGVLERRGMNRAIVALAAKNARIIWSLLHNQTEYENYAA

SEQ ID NO: 109919 - protein, 328 aa, unidentified
MKNYQEVIGIDVSKSKLDAYAHNRSSHREFSNDVKGYKALLKWANGKTQKVFFCFENTGHYSLKLALYLSSKKQVYVQENPVVIKRSSGVIREKNDVVDAMMIARYGWLHREELSASELKDNELLEVGRLLALRDQLVRSRTGLKNTLSELKKLLNNSSTDTCCKTLVCSIAHLTSQIDKIEKQLKTVVKTSERLSQNYKLITSLKGVGLVVGTQLLYHTNNFERFDNWRQFSSYCGTAPFGHSSGSSIHKKRKCHPMGDRQMKSLLSMAACTAIQYDSELRQYYKKKREEGKLKMIALNNVRNKLLSRVFAVVKRGTPYVELQKFAA

SEQ ID NO: 109920 - protein, 348 aa, unidentified
MRIIGCDLHARQQTLAMLDVETGEIEERRIEHDGDQVRAFYAGLPRPVLVGIEATGSMQWFLELMEELGVECVVGHPAQIRAGEPRKQKNDRRDARLLMRLLAEHRFPKIWMPSVEQRDVRALLLHREQWVRIRVRLQNALQSIALTHGIRRGAGLWSKAGQRTIGGLILPPHSGMRRDELMRLRVQLQEEIERLDQQAERVARERPLARLLMTHPGVGPITSLATEVFLGDPARFADGKAVASYVGMIPCENSSAGKQRLGKLTKQGNAMLRMLWCEAARHAVKKDEELRRFYRRKLAQKGLGIALVAAARKLGVRLWIMLREEIDYEEFCRRGRQRGEAQAERPAR

SEQ ID NO: 109921 - protein, 337 aa, unidentified
MTIVFVGIDLAKNVFALHGVDDAGKARLVRPAVRRDQLLETVAKLPPCTIGMEACSGAHHWARQFMAFGHTVRLMAPKFVVPYRMSGKRGKNDAADAAAICEAVQRPNMRFVPVKSELAQARLAVHTVRQGLVAGRTATINRLRGVLSEFGQVMPLKAKTVRLEAAARAEGLSQWAQTACMDLLAEIRRLDEQIDTDDQRIRLMAQADDRSKRLMGVPGIGATTASALLASIGNGHDFDNGRQVAAWLGLVPGQYSSGGKNRLGRITKAGDSYLRTLLILGARAVLAAASGKHDRISRWAQALAERRGYWKAVVAIAAKNARMAWAMLAKGEAFKPA

SEQ ID NO: 109922 - protein, 340 aa, unidentified
MVSLSRRQVFVGLDYHQSGVQVCVMDKNGKTLQNSSVANDAATIAAVVRRHGDDVLAAIECCCGAANLAKQLADLGWNISLAHAGFVARMKQNPDKTDLADARILADLVRVGYLPKVWLAPDDIVELRRIVRFRRELVAERRDVKLRIRALLRDERIASPAEEGKAWTKRWLKYLTQVVLRPTSAWILEQQLERLQELSQRIDQVEKRLQSLADQDAVIQKLLALRGIGLITAMTLRAEVAQFERFRSGKQLARYCGLSPRNASSGERESDSGLIKAGNPHLRAVLIEAAQRILWHDTHWQQFAAALLRRGKPKSVVVAAVANRWVRRLFHQMQPQALAA

SEQ ID NO: 109923 - protein, 345 aa, unidentified
MHKTDPAGIEISVQELIVTLRREGKLKPLKSFRNTPAGHQAIVRYLARKGRVVQVCLESTGVYGLDLALALHAAPGIEVMVANPRAVRHFAQALMQRSKNDRLDAVVLLEFAARMPFQAWQPPAPAARHLCALARRLEALTDLGTAEKNRLHAARATQALPQIIRQDLERSIRFHQRALARLTQEALKLIAQDAELQLKFNLLLTIPGVGQTSAVQTLAELAVLSPDLDVRQWVAYAGLDPREYTSGTSVHKKTRISKAGNRHLRRGLYMPALVAVRHDPHFRAYYAHLRARGKAKMQALVAVMRKLLHAIYGMFRHVLPFDGGKVYPLPKTLVAQSAVAKTEAA

SEQ ID NO: 109924 - protein, 381 aa, unidentified
MRQVCGLDVHKDSVFVCILNEKGVVFQEKFGVLTPELEQLAAKLQELDVGEVCMESTSVYWMPVWRVLEPYVAEMKLVNPYFIKQLPGKKSDVKDAEWIATCLLKDLIRGSYVPADIIQQLRQYDRRISDLNAECVRKLGKLDAALQRCNIRISNYVSTTDGKSYKEVIRLLSEGIRDPNELLKVIHSRTVNRVGRDIILASLTGVFSDTDIDIIRQLREEVELAQRHKDECQSKMDAICQQHFPKQLKNLQTIPGVKGRSVTAIIAEVGSDVSSFQDAAHLVSWCGLKPRNEESAGKIKARSITHGNKYLRKTMIECSWGAAKTQGCFLNKFSYYQTVVRRKNKMKVQVAIARKMLVAIWHVLHDNVAYRDYTPDIAPAA

SEQ ID NO: 109925 - protein, 309 aa, unidentified
MTPHLSSSPVIGIDVSQAHLEICVHDTVFTHPYRLRDLPSLVARLRAYAPARIVVEATGGLERPLLQALGAAGLPVTLVNPYRVRLFARSLGQWAKTDRLDAQVLVRYGESAKLPLLVLPRPEQQTLKALVVRRRQVIDLLLVERNRLRRAPAEVRPSVEWVLARLEEEVQRLEAAITALLEAAFGAEYALLTQVPGVGVVTAATLLAELPELGHLNGKQIAALVGVAPLADDSGTKSGPRHIRGGRQPVREVLYMATLAAVQFNPRLRRFYRRLVEAGKPKKVALVAAMRKLLVWLNAILRDRQPWRG

SEQ ID NO: 109926 - protein, 313 aa, unidentified
MKKQAVYVGIDVSKRKLNLATFPSNEEWETSNDDEGIAEIVKKMKRKKVELVILEPTGGYERPLVLALHLAKVRLALINPRMARDFAKSLGRLAKTDRVDALILARYGEATKPEPRAMPDQASLELEALVLRRRQLVSIKAAEKCRRHTTLDFLQPEIEEHVRLLEGQIKALEALIDERIKGNEQWSARRKLLQTVPGVGDVTSSTLVAELPELGFLDKKQIAALVGVAPMNCDSGKYRGKRRIWGGRASVRSALYMATLVAMRCNPVIQKFYQSLMEKGKLFKVAMVACLHKMLGILNTMLAHNQPWCPQLS

SEQ ID NO: 109927 - protein, 340 aa, unidentified
MTSVALHGGLDLHGDNVFCTLMDEARRIVFERRFPNDLATIREALDPYRKRIQALAVESTYNWYWLVDGLQGLNYPVKLANPARMQENIGLKHADDKTDARFIARQLVNGTLPEGYIYPVETRGIRDMLRRRMRLVHARSGEWISLESLIARHTGRDMGVKELKGCELSEVLAGQPHALTMAHASFRHIEFLDKEIKALEKAVMEELPDREDYTRLMTVPGIGLVLARTILLETGPITRFKEAGNYASYCRAVKAEHTTNGKKKGECNGKSGNKYLAWAYVEAANYAVKYSPEIRTWFQRKHTRSGKRVIALKALANKLSKACYFILRDGKDFDVKRLVG

SEQ ID NO: 109928 - protein, 391 aa, unidentified
MPTAADRAEAPTAIQTHLAAIFISLELSRSIWLITSLSPGCGEKMSKHSVRAGDVAALLARFSELKQKALARTGESFPIVAIQEAGLDGFWLHRVLEREGIESHVVDPASIATSRRRRRAKTDRIDGEALLRALLAYRRGEPRVCAMVKAPTPEEEDRRRLGRERKTLIAERVEHVNRIKGLLFSQGISGYEPLRRDRRQRLEELTTGDGRPLPTHLKTQISRELDRLELLLDQIKLAEAERDALLAAQPAPAPAPAGRMLLDFKGIGAEFAATLWLEALFRHFDNRRQIASYAGLAPTPWQSGSVNREQGVSKAGNPRLRATLIELAWLWLRHQPQSALALWFKERVNRNGGRMKKAIIVALARKLLVALWKYVTAGVVIEGAVMKAELA

SEQ ID NO: 109929 - protein, 407 aa, unidentified
MDVVHLKCAGLDVHAQTVVACARLGSGKAVAYDRRTFGTTTPELLALSDWLTAHGCTHVAMESSGIYWKPVWHVLDGHFELVLANAMHIRNIPGRKSDVNDATWIADLLAHGLIRSSFVPPPSVQELRDLTRTRKQLVREIAQHTLRIQKTLETANVKLTSVLADILGVSGRAILTALIAGETQPERLAALASDKVKASRAELVAALHGRLTDHHRFMLRLHLDQIASLDVAVRDVEARLGETLAPFRAAVDHLITMPGVSETVARVIVAEIGFAMTRFPSAAHLVSWAGLCPRLHESAGKRLSNRTRSSNPWLKTTLVQAAWAAARKKDSYFRAQFLRIKSRRGPKKAVLAVAASMLTAAYHMLRNGAVYRDLGADHFDRHDKAKLAKRLIARLHDLGLVVDVRAA

SEQ ID NO: 109930 - protein, 354 aa, unidentified
MKQGTQLDFSGQKIFAGIDVHKSSWKVCLRSEHMELKTFSQNPSAKELSNHLKQNYPSAIYNVVYEAGFCGFSYQREFSEAGISCIVVHPADVPTTDKDKQRKSDTVDCRKLSTTLSTGELKAIFVPGIEQQDDRGIIRVYQQMVKDQTRYKNRIKGWLNFQAISITKDIDAYWSNNFIKWLKELPLTPSARINLDILIQGYEQSRAMVLAATRQVRALSRQARYKNKITLIRSIPGIGEITALLFITEIGDINRFKEFDQLCDYIGLVPKVNGSGDRETVFGLTHRGHHQLREKLVEASWIAVRLDPAMTMAFNEYCKRMKKNRAIIKIAKKLLNRIRYVMKNQREYVTAVVK

SEQ ID NO: 109931 - protein, 360 aa, unidentified
MVGGRGSESAHVVIGVDTHKDEHVAVAIDQLGARLSEYRVATTTKGYADLERWSCSLGEVRAFGVEGTGAYGAGLARFLTSRGRTVVKVNRPDRSTRRRKGKSDPTDAEMAARAVLANVADSTPKSGVGEVEMIRMLRNTRISALKARTQALNQMQALIVTAPAELQETLLGLTKVKLMSRCARLRPGELTTPTAVAKHTLKSLARRCRQLTIEIDSLRNELSLLTSRAAPALINSFGVGPDSAAALLVTAGSNPERLNSEAAFAALCGVSPIPASSGKTNRHRLNRGGDRRANAALHRIVIVRLCFDDRTKTYMTRRTGEGMTKTEVIRCLKRYVAREVFRILREMRPDVALQTAARHL

SEQ ID NO: 109932 - protein, 464 aa, unidentified
MRIIGLDLALTGSHKAVVADARGQPLTPVLSLRTTALDLQQLWDRAREHAAAEEEDLVLVMEPTGMAWFPVAAWALRQPHSTVYLVNSQQVADLRRYYQKHHKSDRIDARVLVKLPGLSPEKLHPLCLPTGAQLACQRGCKELDRLMSLHTAIQNRLQALDRFAWPGLEALWPETLSPQRRWLREHWYDPQALTRAGRDALRRDWVEAGGAVEEPTEAADWADQLVALATQVVALYGTDWPYLDYGYLQAEVAREQALLDWVAEQHHDLQLETVRPLYRQMHPSRHLETLKGVGQDGAAVFASFIRRPERFVDGSHFRSWSGMIPGSKQSGESEASGVRITQAGPDLVKKFAYLDADTARKYDPQLAALYYDQMVHHGKHHCQAVCACATHLLDRIWVVLKEDRPYELRDVDGRPVTGAEAQRIIAERYTVPAEVRQRNNQRHRRARAEARAEKQQQKREKPPK

SEQ ID NO: 109933 - protein, 348 aa, unidentified
MKKISIGIDFSKETFDATVMFRDEDSFIEVGYCKFNNDQKGFRSFLKWVCDTVKPLPDSKIKSEWLFCGEHTGACSIPLCDFLAKKKLFMWLESALVIHRKCGIVREKNDKADSKKIAEYALRNYSDKVDPYTLDSNDMKRLKALYTAHHMLTRDKVSKINQIKSGVLDECPTALHEIESQLDAIKKSLVKIDEELSALLKTCSEFSHNYEILDSFKGVGPLAIACLIIKTRNFKDMTNSRELGCYIGVVPHRCQSGTSVDKAPKTSRYRDRHANAVITRCAISAITHNDIIKSYYDRLIARGVHYNKARNNCKFKIINILLAMIKNDRRFDTEIYGKSKKEWGKMSA

SEQ ID NO: 109934 - protein, 410 aa, unidentified
MEVLYPHCAGLDVHKDTVVACARHMEDGKVRSRVKTFKTTTSELMALSDWLSDEGCTHIAMEATGVYWKPVWHILGDGEFELVLANAAHVKNVPGRKTDANDAAWLADLMAHGLIKASFVPDEPTQQMRDLLRTRKQFVRERSSHLQRIQKTLEDANIKLDSVISDVAGVSGRRMVEALIEGQTDPAALAALANRRIRAGAAELEAALRGRVTAHHRFMLRLHLDHLDAVDAAIARIDKEVDGNVEPFRTAVEMLSGIPGISSLSAEVIVSEIGIDMSRFPTAGHLISWAGLCPRNDESAGKRRSSRMKKGAPWLKTTLIQCAWASTRVKGSYLQAQYLRLRSRRGAKKAIGAVAASMLTAAYHMLSNGTLYEDLGASHFEKRAKGKQLKQILNRLKNLGYDAHITPLAA

SEQ ID NO: 109935 - protein, 344 aa, unidentified
MTYYTGIDVSLRSVSICVVNDKGEVCFEAKVAAEIATIVECLHRFDRDVKSVGFEAGTLTQYLTYGLQAAGFEVVCLEARQVSVTLAAMRNKTDRNDARGIAQILRTGWYSRVHVKSLHSHQVRALLASRKVILKKCVDLENELRGLLKVFGIRLPSRVGHGAFDTELRETVSGDEMLACALVPLMDARTVLYKTYLKLDNAVKGLVCADPICRRLMSIPGVGPVTALTFKAAVDDPSCFKSSRTVAAHFGLTPRRFQSGEIDNPGHISRAGDADVRSALYVAAHSLLTRNAQWSSLKSWGVRLAKTRGHRRAVIAVARKLAVILHRMWLDGSEFRWGSVPTQA

SEQ ID NO: 109936 - protein, 343 aa, unidentified
MKHIGFDIDSTTTHISVFSDRGREIKRTKVATREADLVAFMMSISGPKRVALEESQMADFVTRIIEPHATKVIRCLPQHNRLISQSEKKCDREDARNLAELLYLDKLKAVHHAPWGYRQLREGVRAYWTASRELARAKSRLKAFYLFNGVHCTGEKAYSSRHRAGFIQQIEKRSGNKQLLEQFYLYMDFCRTRKAAHIKILKELVSSFHQEVRYLKTHPGIGFIGSCTLIAYLENGWRFKNKRKLWQYCGVGVRKHESAGKGRRGASRKGNRYLKNVVMTAAAAIAARRKADNALTQLWSAGVEAGIPADRLKRNLARKVAVLAQRSLRFKEGYHDDRVVTTQ

SEQ ID NO: 109937 - protein, 401 aa, unidentified
MGSLWAGVDVGKTHHHVCVVVDDGTVVLSEKIPNDQQAISGIAGRLGKRRKPIRWAVDLRGGPASLLLAVLLDRGADVRYVSGTVTSRMAEAFHGERKTDAHDAYVIAQTLRMRADLPTLTLADGVQQQLKLHVSRRLDLVADRVRITARIQDLLTMISPALEKTLNLRSKGALRLLAQWQTPGGLRRAGEARILAYLRQHGVRAAKALTTKVLAAARTQTVAVAGETTAAGIVAQMATDLEAVNDRITAIEETIAAVVAEHELGEIVTSLPGIGTTLAAEFLAHAGTLTTYTSPAALAAHAGLAPISRDSGRRQGHQIRPHRYHRGLRRVFSMSSFTALTHCPRSRAYYDKKRAEGKTHRQATAALSRQRLNVLWACIRDKTSYQPKQPRSAELAPCELA

SEQ ID NO: 109938 - protein, 417 aa, unidentified
MKSASNTLPEEAPNDVTGGLDWARDDHAVSVVDGRGRQIARHTVEHTAAGLRELITVLAAAGCREVAIERPDGAVVDALLEAGLTVVVISPNQVKNLRGRYGSAGNKDDRFDAFVLADTLRTDRARLRPLVPDSPQTVALRRTVRARRDLVAHRVALANQLRAHLRLVLPGAVGLFNEIDSLITLAFLTRFPTQDKADWLTPARLGKWLSSVGYSGRADPVVLHAHLTAAPRGAVGDQAAAHTAITESFVAALTIMGAQIKALKAEISTQLARHIDQHIFTSLPRSGQVRAARLLAETGDCRARFPTPESLICLAGVAPSTRQSGKSRVVGFRWACDKQLRDAVCDFAGDSIKANPWAANLYQQARNRGHDHPHAVRVLARAWLTVIWHCWHDEVAYDPTKHRALQRLLNKDQQAEA

SEQ ID NO: 109939 - protein, 340 aa, unidentified
MRQLYTGIDLHSNNSHIGIINQEDKRIFHKRLPNQADVILAELEPYRKEIVSITIESTFNWYWIVDCLSDVGYTVHLANPAAMQQYKGLKFLDDKHDAFWLAHMDRLGILPQGYIYPKEVRPIRDLLRKRGHLVKLRTSLINSLQGIISRNCGCSLSGQKMKQLRENHVTPLLAGNEDLALSGEVSKQSIDFLGSQITKIERICQDRMKLHPQYTGLLTIPGIGKILALTIMLETGPIERFKKVGEYSSYCRKVPTTWLSNNKKKGKGNSKNGNKYLSWAFAEAAEFARRYDDKAKAFFNRKSAKTKATVAYAALSHKLARAAFYIMRDNVEFDGKKLFA

SEQ ID NO: 109940 - protein, 423 aa, unidentified
MSYRIAGIDVHKKMLAVVVSDVEVDDEYQFERVRYSSSPEHLRFLAEWLMAQQVEEVVMESTAQYWKPVWGALERYWKPICHKREGAGPMSGTLHLAQAQSNRGRRGRKKDFPDAERLVKRLVADELVLSFVPDTEQRLWRTVTRRKYQLTRNHVRLQNQLEGLLEECHIKLSSLVSDLLGASARRMLKALAEGETNPVALAAMADKNLRATQAQLCDALGACTELKPIYRRLLKMFLEELQFIDQQISELDQELASLLSRHHDAVVHLAEIPGLGVDSAQQIIAEVGAGAATFPSAKQLSSWVGACPGEEESAEVSKSHRSPKGNRHMRRILNQAANAAAKSKGTIFEIVYRRLVSRLGHNQTIGAIAHRLCRLIWIILHRGVRYEERGPSVNAKTRRHRTNRMIRELRNLGYRVEPLVNTV

SEQ ID NO: 109941 - protein, 425 aa, unidentified
MKYALVQVLPDVPAGGVCAGIDWATAGHVACVVDMAGRVTGRFTVIHDRAGIALLIGRLREAGAAEIAIERGDGVLVRSLLDAGLTVVVISPRQVRHLRLRYGSSGAKDDHFDAYVLADTLRTDRARLRPLEPDAPATIALRSAVRARRDLVAHRAAACNRLRAHLDLVFPGAIGLFCRLDSPISLAFLARFSTQQAADALGEQQLTAWLKTIPNRGKTAPASVLCGRLRAAARGATGPEGAAQAAVTAALTATLTTLAAQARALQDEISRQLGAHPDAPVFTSLPRTGTLRAARLLAEIGDCRARYPDPGSLAALAGITPVTRQSGKHQGHSFRWAVNRELRDAFCDFADGSRHASPWAATIYADARDRGKDHPHAIRITARAWSYIIWRCWQERTPYDPAKHTALQRILDQQNSTTAGPEHTR

SEQ ID NO: 109942 - protein, 383 aa, unidentified
MAATLSTFVPRDYDIFAGLDVDQRSMAVTFTDHGTMQKSLKLPYSATQLLNYTEKHFSGRRVAFVYEAGPTGFGLHDELTAAMQFCLVVSPSMVPQAPRNKVKTNRLDSKKLSQGLRGGQLKGIHVPAQGYRELRHLVQLRDTHVAQMKATKQRIKSLLVYEGIPFPDATGKWSARVLRQLEQLPCNPSVRFKLDQLIDTLQFHYLSATKVQKQIRHFCQNDPELQQCIHFLASLPGIGIITATHALARLGDWRQITDVRQIAGFLGLVSSEHSTGEKENRGEITRIGDKRLRSKLIQCAWIAIRKDPELRAFYRRVYARQPKKLAARKAIVAVARKLTTRMYAVLKQQRSFVIRADSSVAPLTAKETIGLRERLDMPQNHQP

SEQ ID NO: 109943 - protein, 605 aa, unidentified
MLPHSGSPSQLSTPPADTGGSPNPTRIGVGIDTARYGHYAVFLREDLQPAAADLAFAESGAGYAELRTRLEQIAQRHTAVAWHVRIDAAGQYADNLQHFLHFLAAAAPSDRSTFTLSLGDPQRNKNYRAAIYGSKKSDPTEAAAAARFALTERPAGVTPMSTELRTLRQVAGRLQATVRQRTRLINQFHKLLALVFPELALLTKDVAAGWVLELVHRFPTARRLAAATPDQLQDIPYLAHDRIDTLLTHARTSVASLHDAALQELIRDQVRQLRDVHARQKRLENTLIAVYRRLPQANHLDTIPGIGPVTAAVLTAFILDIDRFETPGKLVAYFGILPIEAASGIDRDGKPRGPKRYVMSKRGNDLVRRYLWMAGLCAVGHNPAVRPLYARVVARHPQHKAIAIGHAMRKLLHLAFAVWKSGKPFDPEHYPWGAASAASDEAATEDARLRVPKSDPNDMPLSPKQPAAGLTLSAKPAQTEVTAAGNANVSPTPPRREPLVDFDHLKKQLPMTRLLDHLGLTSRLKGAGLQKRCPCPIHRGDARGRTFSVHLGQNVFQCFDKACRHKGDVIDLWAALHGLSLRQAAVDLIATFQLEAAPPTEKRNG

SEQ ID NO: 109944 - protein, 387 aa, unidentified
MTLINFVAANQKYYAFNLLSVFIMVFWSVQYLLQHLLVQTQVSHQLLQPLILILQLPQTPQFRHARPGKFFLPVNGMDYFLPLRLTVRNVLTRRITMNIVFLGIDLAKNVFQLCGLNQAGKPVYTKRTGRKELLQTLANIPACLIGIEASTGAFYWQREFEKLGHKVKVISPQYVRPFVRGQKNDGNDAQAIAVALMQPTMQFVPPKSPEQQDIQALHRARQRIVNHRTATVCQIRGLLLDRGIPIGSAVSRARRAIPLILEDAENGLSSRMRRTIAELYDLFNDLGRRIHFFDKEIETVFRQSEACPRIAKVKGIGPKTATAVVAAIGKGTEFKNGRHFAAWLGLVPRQHSSGDRQVLMNMTKKRRQASADTFYSWCPRCRQGCHE

SEQ ID NO: 109945 - protein, 340 aa, unidentified
MPSMQIGVDLAKSVFEVAVSTVPGQVHERRRLSRAALGPFFAARPPAEILLEACGSAHHWGRELQRLGHTVTLLHPRDVARYRDGNKTDRADAKALLEAARNTALSRVPVKSLEQQAVVALHRLRQGYLQTRTARINAVRGHLREFGCVIPLGPQQLLRQAAAALEQETVPALLRPALHIVLEEIVALETKAEAVRTELTHLAEQMPDAQLLLTVPGVGVLTATALVAFVGDIHRFRAGRHFAAYLGLTPRESSSGLVRRLGAITKHGNSYVRMLLVHGARSALRAGAVTQHPDDLRTWARALAARKGHNVAAVALANKLARVCWRVWRDQRPFERRDAR

SEQ ID NO: 109946 - protein, 386 aa, unidentified
MSMYFVGIDISKYKHDCCIISAADQQIVSKFTVKNDKDGFEHLLTTLNSLSNPEDIKIGFESTAHYALNLELFLENAHHSFMEVNPVLIKEYKKSTTLRRTKTDSVDCESIARWLMTVEYKPHSKGFYHSYSLKSLTRLRDRLIRQRSFYLVKITNVLDHTFPEFKPFFNERLSKTAIYLLENYGSAEKMAHMNSASYDKLRCASRGKFSIQQFLRLKELAANTVGVNNSIFDIELNSLLTLYNSLCKEIKTLEAEITKLIEEVHPHYMSIPGIGPISAAVIYAEYGDISNFSNPGQMLAFAGIEPGINDSGTESHGGRMVKHGSSQLRYVLLNACLPLIRFDITKGSTYDTHSHSISTKNLIKISLENTFPDSIKPEIKKETRLL

SEQ ID NO: 109947 - protein, 354 aa, unidentified
MIIIGVDFHPEFQPIALLNTRTGEVEEKRLAHPEEAEKFYRALAGAGETVRIGMEASGHARWFERLVAELQFDLWIGDAAEIRTKRVRKQKTDRQDAQLILSLLLEDRFPKIWVPSWENRDLRQLLWHRHRMVQARTRVMNQLQAVALNEGLRCKKKLWRERGRQQLESFGLAPWASRRRRDLLELLDRFNPAIAELTQAIEREVENCPAAQRLRTHPGVGVLTALAFVLILGDAERFHCGKQVASYVGLVPLEDSSGNRRRLGHITKQGSSILRFLRVEAAQVAVRSLPEWRSKYFHLVLRRGRKIAKVAMARRLAVQLFWMMRKEWNYEQLKKFGSHAGQPGNRHGVQSNTE

SEQ ID NO: 109948 - protein, 402 aa, unidentified
MNAVGIDVSKGKSMVAIMRPFGEIVSAPFEIKHTASDINSLVELINSVEGESRIVMEHTGRYYEALAHQLSEANLFVSAINPKLIKDFDNDSLRKVKSDKADAVKIARYALDKWQNLKQYNVMDELRNQLKTMNRQFGFYMKHKTAMKNNLISILDQTYPGVNTYFDSPARSDGSQKWVDFASTYWHVDCVRKMSLNAFIVHYQNWCKRKKYNFSQSKAEEIYGKAKELVPVLPKDDITKLIIKQAVNQLNSASTTVESLRTLMNETASKLPEYPIVMAMKGVGASLGPQLMAEIGDVSRFTHKGAITAFAGVDPGVNESGSYEQKSVPTSKRGSSDLRKTLFQVMDVLIKTHPQDDPVYQFLDKKRAQGKPYYVYMTAGANKFLRIYYGRVKEYLSSLPES

SEQ ID NO: 109949 - protein, 346 aa, unidentified
MEHYAGIDVSLELSSVCVVDAKGKIVKEAKVASEPDALVSFLQGLGFPVQRIGLEAGPLSQWLHAGLARAGFETVLLETRHVKAALSAMTVKTDRKDARGLAQLLRMGWFRPVHAKSIGSQEMRALLVARKQLLGKLIDVELSIRGILRGFGLKVGQVTRKEFEVRIWELVTGQATLERIARAMLSARATLKAEYEKLHKAVLAIVREDAVCRKLMTVPGVGPLVAVTFKSAVDDPRRITKSKAVGALFGLTPKKYQSGEKDITGGITRAGDGMVRTALYEAANVLLSRTTRFSKLKRWGMDVAKRRGSKRAKVALARKIGVILHRMWVDGTTYRWREAKLIAARA

SEQ ID NO: 109950 - protein, 325 aa, unidentified
MTQTICGVDVSSRTLDARIGHTGPREHFARTIDGVAALAGFCTQHGVELIVMEGSGGYEKLPFGLLDAEHRLPVAIVNPRAVRRFAEAMGVLEKTDRLDAGIIAWYAEVKQVKPTPLPSPMQDRLRALSTRLRQLTKLRTTQTNQRRLLGKSEAGAGSDAVTAAEVVGLIDEVVALVNRQIRSLEAKIAELIESDPLWHALDQTFREVKGVADRTVARLLAELPEIGTLSGKAIAKLAGLAPIACDSGASTGPRHIRAGRDGPREILFVVAELVSRHEPTFAAFRHKLRQAGKPLKVIRVALARKLLVVLNAKARDARRNFANAT

SEQ ID NO: 109951 - protein, 366 aa, unidentified
MGMLAEQADHVIGVDTHRDSHAAAAVAARTGAVDATTTIPADAFGYKRLLRFGRKHAPGRRVWAIESSGSFGSGLTSFLLAQGEWVVEVDRPKRPARRNGAKSDELDAVRAAHESLQREHLAQPRARGEREAIRVLLITRRGAIRARTKAINHLKALVVTAREELRHQLRNTPTDELVYRCSRLRTLPSHSTEHRATVLALRHTARRILALEAEANDLETEIENLVKRTVPQLLDELGIGPISAAQLYCSWSHRGRLRSDAAFAMLGGAAPIPASSGQTIRYRLNRAGDRDLNCALHTIVLTRLQHDPATRAYAARRTAEGKTPREIKRCLKRYVARNLFRLLEATGPHPVTAPRPPRSQVIGHCS

SEQ ID NO: 109952 - protein, 354 aa, unidentified
MTTNQSKDTEPGARARVIKLGLDVHASLIVVVRQVDGQASQPPQRFSEEAFIGFVHRQLAAAEAVHSCYEAGPFGYVLHRRLTALGVHNLVVRPRDWSTYGERVKTDARDAGALCSSLDRHLAGNRGALAVVRVPSEAEEAARGVSRQRQGLVRDRVRFTLRGKGIARLRGIALPPEWWRERTYARLELPADLQEQLSALRRVILCIDAEAVALTTQIEAAAPAALPAYLGPLTWEILRREVGDWGRFANRRQVASYTGLCPSEHSSGTSRLQGSINRHGNPRLRHILVEAAWRLLRYQPAYRPVAKWREKFMEQGRPGRRKKIVVAIARQLAVDLWRLATGRATAAQLGLVVP

SEQ ID NO: 109953 - protein, 344 aa, unidentified
MTQTEIFVGIDVSKAQLDVAVRPTGETWGVPHDDAGLDTVVARLQPLRPTMIVVEATGGWELRLAGALAGAGLPVAVINPRQARAFARATGQLAKTDRLDAQVLARFAEAVRPTPRPLPDEAAQELSAWLTRRRQLVDMLTAEKNRLGRAQGPVRAQIRSHITWLERQVTARDTDISTLIRRSPVWRERDDLLQSTPGVGLVFSTTLMAELPELGTLSRQQIAALVGVAPLNHDSGTLRGLRTCWGGRASVRAVLYMATLVATRCNPVIKAFYHHLLAAGKRKKVALVACMRKLLTILNAMLKHRRPWCPGPAPRATSSAGRGYPSSDGAAIVAPESNTGGAIS

SEQ ID NO: 109954 - protein, 388 aa, unidentified
MSKPFDLSKSLAALDQDSTLIVVIEMSQSSWLVAARAPGLARDPLKKLPPDPEQLFKLIDRWREESRRAGRVVRRVCVAFEAGRDGFWLARLLRQHDIEAHVIHPTSIPVKRDHRRAKTDRLDTELLMRAFLGWLRGEADHCSMAAIPTLAEEDAKRPTRERESRVNARSRLVNRMKGALARLGIRGFNPKLRKAAEKLEELRTGAGEPLPPNTLAELRRDMAQLRFVADQIKQIEKAREARLEKAPREGAHPMVLMLASIKGVGLETAEMLVAEVLSRKLRDRRAVARYGGLTGSPDESGSRSREKGLARSGNARVRRGMIQLAWRFLMFQKESALAKWFEARTANGPRGVRKTMIVALARKLLIDLWRFVEDGTVLVGVELFDSRA

SEQ ID NO: 109955 - protein, 392 aa, unidentified
MDESGTKITARTVTHTAEGLGEWGRELDAWRAQGIAVWAAIERPDGRVVDFLLDHGVVVYPVNPKALDRARDRFRQSGAKSDPFDARVLADFLRTDHGHIRPLQPSSEAAQELKLLTEDCQRHIRQQTRLVNQLTATLKAYYPRALEIAELTSALAREFLPAYPTPAALTALTERQWQRWARAHRLTEARTGELWAVLRQPQLPVPAHVVRAKARLMRALMEQLMPVMAAVAQYRKAIDDFFASIPAAQWARTLPIGKHGITAPTLWARLGDAPGRWESFRHLQAHAGTVPVTKRSGKQQRVVQFRFACDKALRYVVDQVAFLSLLSSAWARAYYDQQRARGHSHRQALRALGAKWLKIIFVMWERHVPYDEQYHLATMTRQQLRPRQKQIA

SEQ ID NO: 109956 - protein, 324 aa, unidentified
MTHVTSIGLDVHARSVSACAFDPFTGEVVQRSFGTDAGEIAAWIKGFEEPKAVYESGPTGSALCRQLRALGVDCAVGAVSRMQKPAAEKRRKNDRRDAAFLARLLATRNVVEVWVPPVEAEAARDLSRALDDAREDLQRARQRLSKFLLRRGHVFDETDALGRRRGAWTRAFWRWAEGLRPAEPAAASAFDHYVTCVRCAESDKRALERRVVEEARSERWRPVVEALSCIKGVDAVTAFCLAAEAGCFSRFPTAGAYASWLGLTPSERSSGEKEATGGITKTGNSASRRALVEAAWHYASCSPRPKAAPAGHEVPPRIKGRADD

SEQ ID NO: 109957 - protein, 347 aa, unidentified
MEISTVGLDLAKSIFQVHAIDAAGTAVVRKALRRAQVVPFFAKLPRCLIGMEACGTSHHWARELARLGHEVRLMPPAYVKPYVKRGKTDAADAEAICEAVTRPSMRFVPVKSAEQQAALALHRTRDLLVKQRTQLVNMVRGLLAEFGIETARGLHHALSLAARLSAGDAPEVPALAQRVVKGLADQIGALQVQLDLLEKDLLAWHRSNELSQRLATIPGVGVISATALAASVTEPERFRSGRQFAASLGLTPLQNCSGGKERMGRISRMGDRYLRRLLVLGMTSLVRRARSTPDAVDPRFVAMLQHKPVRVVTVAAANRTARVAWAIMTHGGPTGHLRPQPPRRRRA

SEQ ID NO: 109958 - protein, 433 aa, unidentified
MPRVKRKVETCMGLGNLPDPNEKVGNAMYFAGVDIAKRRHELCVIDDSGDILLQLPVENTKRGFEKLLTAFRTKQLTNQNVRFCLEATGHYWIALYCQLKEHGFSVDVVNPIQSDALRNLYIRKTKTDQKDSFILADLLRLGRATSTQLASETVFKLQTLSRMRFEFVSQIGGLKNKVIGILDRIFPEYPGCFSDVFIKTSRELLKQYSSPEELAEVDLTELSDFLREHSRGRIGMDRAERIQNLARGTFGISIAIDAFTLELRLLLQQIEFIEEQIKEIEDAIDQVMEEMRPSDETPYRHVIETIPGIGPVLAAAIIGEVGDITRFKNAKALVAFAGIDATIRASGQFEGTRNRMSKRGSPVLRHSLWLAAVSARRFNPEFKEYYDTKRAQGKHPNVVTGAIARKLAHLIFALWTDNRPFDPNYKWTAGSTN

SEQ ID NO: 109959 - protein, 378 aa, unidentified
MLYVGIDIAKNKHDVTALNVPGKTVLKPLTFSNNKAGFELLDLSLRQLNQDCLIALENTGHYAFNLLNFLHEQGYKVYTYTPLLIKEFAKSLSLRKTKTNKKDAHGIALKLLSDPNREQFQHDNRQVELKILARHIHRLKKKQSDWKVQYTRCLDIIFPELDKIVGKHSEYTYQLLTRYPNPQKRLEAGFDKLIEIKRLTASKIQDILSVAPRSIGTTSPAREFEIIEIIKHYKRLIDKAETCVNDLMAEFNSVITTGTGIGDRLGAVILAEIRNIHAFDNPAQLQAFAGLDSSIYQSGQIDLAGRMIKRGSPHLRWALIQAAKACARFSPAFKAYLKTKLEQGKHYNVAIIHLAKKLIRTLFYILKKELPFDEQKVM

SEQ ID NO: 109960 - protein, 446 aa, unidentified
MRFIGLDVHRDFCEVAICDEGSVRSAPRVATAPVALERFAQSLGSDDEVVLECTGNALAIARIIEPHVGRVVIAHAKAVRAIAWAKVKNDRIDARTLAMLLASGFLPGVWTPDERTRLLRRLVGRRAQLLKHRTSAKNAIHATLQRNLVGRAPATDVFGRRGRTWLSSIELPRDEQETVDACLRQIDFLDGEITRLDRALAREVVDSPEVRRLMTIPGVNVTTAVTFLAAIGDIDRFPTPRHLASYLGLTPRVRQSGIAEPRLGRISKEGSARARHVLVEAAWAVLKTPGPLRAFGERVAARRGRNVAAVAVARKLAVLCWHLLSSENDCAYGRPSLTAEKLRRLELAAGAESRRGWRGPGATFASKEQHASERASVVQAETAYRLLVIDRTRQRRVRAASPGRASRPSRGRQRGRDKPQTLLFSSSQPAPGHHPGKQVDVGPDTT

SEQ ID NO: 109961 - protein, 316 aa, unidentified
MVPSPLFGGIDVAKATLDIAVRPTAETWSVSNDATGIDALVLRLGALAPTLIVLEATGGYQGPLVAALVAAALPVVVVNPRHIRAFAQAVGILAKTDRIDARVIAHFAEAVKPAPRPLPDAETQELRALLVRRRQLVEMVSAERARLDTVPPRIQDASQAHIAWLTTQVAGLDDALTRASQTHPVWQAKDDGLQSIPGVGPVLARTMLGQVPAWGTLGPKPLAALIGVAPFNRDSGTLRGRRTVYGGRAEVRAVLYMGALVATRHNPVIKTFYERLLAAGKAKKVALTACMHKLLTIMNAMVRDLKPWQPQEVPSA

SEQ ID NO: 109962 - protein, 362 aa, unidentified
MKTVRSFIGMDVHKATISISIAEDGRSGPTRFLGMIPNTADEVAKLEKRLAKHGELDFCYEASGCGYGIHRQLTARGHKCMVIAPSMIPRKPGERITDRRDSDKLAILHRSGDLTPVWIPDPTHKALRDLVRARVDASMHLMRARQQLLAFLLRHSRIYPTGKHWTQRHRSWLAGQKFHEHAHGIVFRDYLETVWIAQQRRDALIERISALVGSWSLGPLVEALRGLRGIDMISATFIASTGDLSRFGSPRQLMGYLGLVSSEHSSGRTIRRGGITKTGNREARRMLIEAAWSYQNPARIAKEKAEILVRLLKEGSRHRMEGADQALPSVSLHGRQRQEANCGCRHDRTRTRRLHLGHRPGS

SEQ ID NO: 109963 - protein, 370 aa, unidentified
MHQSSTLYIGLDVHKESIAVAYVAKADHAEGVSLGNIGTRQCDIDHLIRKMQSKSTHLVFVSEAGPCGDWLYRYLTKKGHICWGVAPSLIPKKPGDRVKTNRRDAIKLARLMRSGDLTPVYVPQVEDEAIRDLCRAREDAIRDLQTAKLRLKAFLLRHDIRYTGQATWSPAHLRWLSDVVCPTPAQQSVFHEYVRAITDHTERLARLEQELTEHGQTWRLAPVVDALQALRGVPCTVAVTTVAELGDLTRFANPRQLLHYLGLTPSEYSTGERRQQGGITKTGNSHARRALVEGAWAYRYPAKVSRHLPLRLEKVSKPIQDSSWQAQIRRCKRYRQLSARGKHANQVVVAIARELRACMWAIAQEVPLTP

SEQ ID NO: 109964 - protein, 341 aa, unidentified
MSKVSVCGDAMLFAGIDVSAATLAVAVQREDGKGLDRREFANSAAGHRQLIAWLGKHGGRVRVSLEATGIYSLDVALALDEAEGIEVAVLNPKLASQFASTLARSKTDRLAAAALAEYSRRMRFVAWRRPPRGVLELRALIRHIATLSEEHTRLGNRLHAALGSATTPRCVREDLKRSRAGIARRMLKLRSQARTMVDRDPDLAGKFQQLLSIPGVGETSAIQLLSELAGLDPEMTVRQWVAHSGLDPAHRVSGTSVHKPSRISRQGNHHLRRALYMPAMVGARFDPHMKAFYELLQTRHKAKLQALIAVARKLLHAIFGLFKTGTSYDGQTLFPKLIPTS

SEQ ID NO: 109965 - protein, 327 aa, unidentified
MNQSASNLSILGIDVSKGKFDVALLREGKCKHKRFLNNLEGFKKLREWLAEYKVERLHACMESTSTYGEALAEYLHDRGFMVSIVNPARIKGFAQSELIRSKTDKVDASLIARFCAAMKPSLWTPESKEIRELRSLVRRVDALVEMRQQEINRLDVSDAVIKKTIENHIDYLTKQIDSIKEQINKHIDRHPQLRDKQKLLQSIPGVGEATIHLVLANFANTEKFSNAKRLSAFLGIAPREYQSGHSVRGRRRMSKVGRSSLRKAFFMPALVALRYNPIIVEMKRRLTEAGKPKMLIVGAAMRKLIHIIYGVLKHGKPFDSNFALKNT

SEQ ID NO: 109966 - protein, 428 aa, unidentified
MSSQEIIRRKRYCQIINEISGSARYMVVGIDVGKDKHHAFMGSATGISLYRKLIFENNLNGFSRLVNTADQIKAQNGLTKVVFGLEPTGNYHKPLARHLIGCDRDLVLTAGQAVKNNRQILNGRWDKNDTKDAANVADLISRGRCLYYDLPQQEIVDLRALLSLRRRLKKEEHSLRMRIRNGLLAQYFPELDQFYNACESENMAIARWCLSPAKIAAMEFDQFFKMVTRSRRGIAQKLRLEKIYQAAIDSVGCPIGLATEFEAELLVEKLNQIQGQVHDTEELIEDICLTFSEYSYLLTIPGFGPYISAKLLAAIADPFRFENRNQVLRLSGFDLCANRSGKTSDQAVPVISKNGNSELRYALYQAANVAASRTAHFRAYFTKMLQGREREKGIKTKMRVKLAAKMLVIAWTLMKKKEVFDPDHLNID

SEQ ID NO: 109967 - protein, 327 aa, unidentified
MNLHTLGIDIAKLKFDVCLITTSGKLKHKVLPNTAAGFAQLSAWLTKHEVARAHACMEATGAYGEALALHLHQAGHTVSVVNPAAIKAFAASRLSRTKTDKVDAELIARFCVALQPLAWTPPAPEVRQLQALVRRLESLVEMRTMESNRLEAIISVDVVKTSVEEHVAYLDQQIEQTQALIRTHINHHPRLKQQSALLDSIPGIGETTAALLLAEIVDVTQFASARQVAAYAGLVPRERRSGSSVRGRTRLSKIGNARLRKALYFPAITALRCSPFFKAWAEGLRGRGKCKMSVIGAAMRKLIHLAYGVLKTGKPFDPEWMQNAKSA

SEQ ID NO: 109968 - protein, 326 aa, unidentified
MSKQVLYVGIDVGCEELWVSVPRRKPKKFEHSKRGIRSLYNWAEKTAGDDQLHFCMEATGVYSVSVASQMVSECQAQVSVVNPAQIAAYGRVQMKRSKTDQLDAEVIRAFAESQKPTVWTPAARPLRQLTALVTQADAIKDCLGQWQNRHHAQEFVPDLPDEVKKTQRSLERSLTTQLKKIETAIANLCAQEPALAQQVALLCTIPGVANKSAVKLLAYGQNWLTERSAKALTAHAGLAPHHYQSGTSVRGKSRIDKRGNSKLRKTLYMPALVAVNHNPILIRFYQRLLNNGKPKKLALVAAMRKLLLISRAMLIARKTFNPLIQH

SEQ ID NO: 109969 - protein, 429 aa, unidentified
MNFRPIAGIDVGKFFSEMAILSPSNEVVARMKIRHDSSTDVERAVELLKKTEKDFDSRPFIVMESTGHYHKILFHSLCKAGFEVSVTNPIQTDSIKNIGIRKVKNDKVDARKIALLYRFQELKSTNIPNENIECLRSLCRQYYKLNDELTAYKNRLTGIVDQLMLNFKDVFSNIFSKAAIAVLEEYPTPAHILKANRNKLISLIQKKSRKSLKWSTAKYELLVSKARDFAPLSIHNASNVIMLGVYISMIKTLEESLEKVLKSIRLLIAEDMAKDMPMLALTLELLQSLPGIGLLSAATILAEIGDFSAFKKPGKLVAYFGVDPSVMQSGEFTGTRNKMSKRGSRLLRRVLFTIALANIRTKRDKTACNPVLLEFYQQKCQSKPKKVALGAVMRKLVCIIFAVLRDRKPYQLRSPQEHAQMLAAKHTAA

SEQ ID NO: 109970 - protein, 318 aa, unidentified
MESSPFIGVDLSQRTLDIARSDQSACLTIAHTTTAIRQWLRGLPGGCRIGVESTGTLHRELVRCALAGGHTVYVLNARDLSHYARALGRRAKTDQLDAALIARYLANEHAQLHPYRLPSALQSQLDELIGRRHTVVVTHGTLRQSFSAMRGKPRAWVRTQRALQALIQEIDARMQALVNKDPQLALAARHLRTVVGFGPLLSTTLAHALTRHPFARADAFIAYIGYDPRPRDSGEKRGHRFLSKRGPAELRRLLFTAAMAASKTQLWRPFYQRYRDRGLPTTAALVILARKLARIAFSIVKSATAFDPNRVKTACVRP

SEQ ID NO: 109971 - protein, 341 aa, unidentified
MKKNLFFIGLDISKADFAASIYKTPGQSIITKEAIPNDRKGFEMLLLWLKEHHIDKTNSHICMEATGVYSQAIAYYLLFAGFPVSIEPPLKVKRAFDPVGHKTDPVDSKQIAEYAYRFQDELTSWQPRDEILEKIRQLLSVREQFTKQKVALKNAMHAYAKQRVQVALIKKAHQETLSQIEKQIVRIDKELAKLIKQDPKILQKANHLKSIPGYGMLLAAHLLVITENFTKIQQHKRLASFVGIVPYQHQSGTSVYKRAKIRHFGPGPSRKLLRLAAQSVATHDVTFRRYYLRKLAQGKAKALVLNNIANKLLKVACAMIRNNTRYIKEHRSIHPMYLKSA

SEQ ID NO: 109972 - protein, 348 aa, unidentified
MKVTRIGLDLAKQVFQVHGVDEKGRKVLSRQLKRGQVEGFFRGLERCLVGMEACGGAHHWARVLGGLGHEVKLMAPQHVKPYVKGSKNDANDAEGICEAVGRPNMRFVAMKTVEQQRLQSLHRVRRTLVRNRTAAVNEIRGLLGEYGIVVRVGVAKLRGRLPELLEEADNGLPMSFRPVLAGLKEDLEYLDRRIGEMDAAMVRAAQEDERARALMKLRGVGPVTATALVAGLGDGKQFRRGRQASAWVGIVPGQHSSGGKERLLGISKRGDEYLRTLLIHGARSVVNSCKGKTDRLSRWVQEVCARRNKNVAAVALANKTMRMAWALLSRGEQYDPDYEMNRRAAQAA

SEQ ID NO: 109973 - protein, 417 aa, unidentified
MPREIESKEVRDELYYERCCGIDVHKAMIMACFRNGRKQTIKEFGTQSKELRELAKWLLEGNCEMAAMESTGSYWKPIYNILEVLGVEVMVVNAQHLKHVPGRKTDIKDAEWIAKQLSAGNLRGSYVPDREQRELREVTRYRKSLTEERAREINRLSKMLEGANIKLTSVVSDVLGKSSRKLLSTYVGGEDITGETIGSLIDKQLIGKAGMLVEAMDGVMSAVQRKLVKAVLEHIDDMARRIAELSKMIDDEMSKYDECIKRLDEIGGIGEQSAQTILAEIGMDMSRFPTASHLAKWAGLCPGNNESAGKKKSGRVSKGNATLKTTMIQCAQSAVLMKGTFFRAQYDRLVVRRGKNRAKVAVAHSMIIAIWHMLKYGTAYKDLGGDYYNRFNKEKKIAMHLKKLAELGYSLPIQATA

SEQ ID NO: 109974 - protein, 314 aa, unidentified
MSSLVFVGIDVSQARLDIAIRPGASFSLTHEESAIATLVEQLCALGPTLIVLEATGGMEIPLTSALATAGLPVVVVNPRQVRDFAKASGHLAKTDALDAQMLAQFAEVMRPQPRPLPDAEARALAALLTRRRQLVEMLTAEKNRLLSAPSPIRTRLRTHITWLERELQSTNTALAEAIRQSPVWREKDELLQSVPGVGPVVTSTLLASLPELGTLTHKQIAALVGVAPLNRDSGTLRGRRTVWGGRAQVRAVLYMGAIVAARFNPVIRVFYQRLQRAGKAKKVALTACMRKLLTILNAMLKHRTPWREVEAHHA

SEQ ID NO: 109975 - protein, 311 aa, unidentified
MTIHPICIGIDVAKAHLDLFHPVTGHHRIDNTGAAIEQWLQPLTGTDPFIVFEATGGYDWVLRCALGQARIRHARLNPTQARRYAQATGRLAKTDRIDAAMLCELGERLAPPPQDAVDASRKHLSDLHKRRDQLIAERSAEKVRLSEARGLCQTVLASLATHIAWLDEAIDELDAAILALIEQDSELQRQAALLRTAPGIGFVSAVTLLAQMPELGLRRPGSIAALCGLAPFNCDSGAMRGQRHIRGGRGRVRRALYMAALSAVRTNARIRAFYQRLLDAGKAKKLALIAVARKLITILNAMLRDAQPFIG

SEQ ID NO: 109976 - protein, 508 aa, unidentified
MRYKVNGSADMTDPALVRAVASPLESMVRESSPTVVSAAMRIPFRRSSRIRRFLWRCRSLTILEQMMAMRKREEEVVFPNAAAIDVGGSTHWVAVPRDRADQPVQEYGAMTDDLHAMANWLIACGVDTVALESTGVYWIPVYEVLERRGLKVWLVDARQMKYVPGRKSDVQDCQWLQKLMSLGLLRAAFRPDDEVCVVRAVARQREVLLAEQASWVLRMQKALVQMNIQLSEVLTDVMGMTGQAIIRDIVAGERDPAVLARHRQSRVKASEADIRRALTGNWRDEHVFVLAQSLAMYDSLAQRVTECDAKMQALLTPLGCHEVNLHGPGKRAGKNTPAFDLRMALARWAGVDLTRINGLALTSVLTILSEVGPELSRFTSVKHFCSWLGLCPGTKVSGGKVLSARTRRSTNRVRQALKLAAMSLSRNSSALGAFYRRMCARMDKPRANTAVAHKLARMIYFMLTRGEDYVDQGQQRYEEQQRQRSIAALRRRAADLGFAITPTGAAAT

SEQ ID NO: 109977 - protein, 388 aa, unidentified
MFHIGIDISKFKHDCFIATNAGDKIGSFTFKNDHEGFQTLKKELESLGEQNQIKIGFESTGHYGNNLKSFLSKLGYTYLEFNPQLTSKFSKATSLRKAKTDKIDAKLIASMLGQFDYKSLHTSFYHENDLKELVRQRDSYLESRSKELVKLTNVLDKVFPEFKPFFDDKFSKTSLYILKRFKNKEKIANLNMSHHETLRKMSMGKFTYAKFSNLRHLAKTSVGVSSKIYDLLIPVIIDSYYYLNSLIEQLDEQITTIYANTDSLIHTIPGIGIITAASIYAEIGNINRFTNPGQIIAYAGLDVSVSQSGLQEHRGKIVRRGSSLLRKKLYNYSFQSLRFIPQFHDYYHKKKSLGKHQNVVLTHLSRKLIRVIFHIETNKIPFDLNKIK

SEQ ID NO: 109978 - protein, 339 aa, unidentified
MKDQDVSDVVRTKKRTAMRYIGIDVSKATFVVAYSSDKGGEIRTFNNTTAGIRQFIGTLPKDGSIHCVMEATGNYSALLLYMLNVAGITVSMENPLKVKNFAKAMLSTIKTDKSDARLITLYGEKMNPRPFKVQGEAILRLRQKRTVIRQLTKQITAMSNLRGSLACLPVPDKGATHTVDETIKFLEKKRDRLQSELTDLVEVEFSRQLALLTTIKGIGITLATALIITTGGFTYFQNAKQVSRYLGICPTYEQSGTSVNIKGHINRNGDAYTRGLLYIAARPARSFNAQCKATYTRLRQNGKSGKLAMIAVANKLVRQAFAVVAHDKEYVDGFVSNRP

SEQ ID NO: 109979 - protein, 356 aa, unidentified
MQTQVTKKIDFKGKDLFIGLDVHKKSWSVTILVEGMEHRTFNQPPDPRTLYNYLQKMFPGGTFYSAYEAGFCGYGTHRALNDLGIKNIVINAADIPTSQKDQIHKLDPVDSRKIARALEKGLLRAIHIFDRDKEELRSLNRTRFYLMRDLRRSKNRIKSFLQYYSISIPMEFDNNLWTLKYISWLKQIQMKTMSGQDAFSNLICSYEYHREQILILSRQIRVRIREYDNELYKLLKTVSGVGPLTSSALITELGDINRFPHIDHLSSFVGLVPRVKQSGETSYTGGITFRCNSYLRTLLIESSWQAIRQDPAMMQYYHQHVINNKGQKVIIKVARKLLNRIRYVMKNRQPYVKGVA

SEQ ID NO: 109980 - protein, 388 aa, unidentified
MRQFKGSAQAAVDYNSTIIGALELSEKKWVLAVQLPGVDRHSRHMLDACGDSLASFVERLKARCTSAGRKIARVILTHEAGRDGFWLARFLTRQGIEVHVMQPSSLPVDRRARRAKTDKIDVEMLLRTLMAWLRGEPRVCSMVPIPSEADEEARRANREREDLTKERRSIVNKIDGILATLGIKGYKALRRDRRGQLNCVRQPGGDPIPQMAKARIARLLDRLELVLKLIDHVESARDDVLKKGAPANESERMIRSLTALRSIGPDIATLLVREAFVRQFRNRRALAGYVGLGGTPFSSGGSEREQGIGKDGNRRVRAAMVELAWTWLRWQPDSALSVWFRARVGAMGGGRIRKIMIVALARKLLVALWRYLKDGVIPEGANVKVAVA

SEQ ID NO: 109981 - protein, 421 aa, unidentified
MKGLRGKRADMIKEGTLIVAIDIGMTSNHGCCTTADGRSTKTFRFDNTREGLDTLWNMVLASKTRFQCNEVIIGYESTGPYGEPLIHYLNQKPSTIVQVNPLHTKRMSEINDNSPLKTDRKDPRVIADVIRIGHALSVVVPEGDAAYLRRINNARERHTKERTALLNQLQQFVFLIFPEFTRIIKTIYSKTALHILKKYTTPAKICSVNIEKLGEEMRRRSMGKFGVEHATALINFAKTTIGIEEGLEGLVMDIQHALLQLEMVDRLIAELEHEMETTLQRIPYSRKLLSIKGLGIVTVAGLIGEIGDFTKFTTQSEIAKLAGLDLYEVSSGKRQEQRRISKRGRGLLRKILYYAAMQTIRKNGIMHDYYQRLIGRGMKSIMALVAVSRKLLRIIFAIVRDDTEFIMNHESQRKEEIRKAA

SEQ ID NO: 109982 - protein, 343 aa, unidentified
MAIAIVGIDLGKTICSVVGLDETGAVVLRRRMRRQTVIELGAGLPRCVFAMEACCGAHLMGRILADQGHEVRLMSPEYVRPYVKAQKNDDRDAEAIAEAASRPTMRFVELKSETQLDMQTLHRVRQRLVGTRRTLVNQLRAILFERGHAIALGRRRLELAVDAKLADPMLALSGRVRDLIAEVRAEWRELDCRINALNAEFAARAREDDAARRLVTIPGIGVLNATALVAAVGDASAFRRGRDLGAWLGLVPKQHTTGGKPKLLGITKRGNKYLRMLFIHGARAALPSLAKSASPLGAWLRGLLARTHRNIVIVALANKLARIAWAILRGRASFDLGHGAAMA

SEQ ID NO: 109983 - protein, 338 aa, unidentified
MKLYGGIDLHSNNCVFNLVDEEGQVHLKKRLKNDLDTILSLLAPHRSALAGLVVESTYNWYWLVDGLMDAGYRVHLANTTAIQQYSGLKHGDDDSDANWLANMLRLGILPEGYIYPKEERMLRDLLRKRLQLVQQKTSNLLSIQGLYDRHLNRRLSGNKVKRLTVEQLLVDYPDENVRMAVTGNLVILNCLAEQIRLIERSLKQRLKLREEFLNLTSIDGIGLTLALTIMLETGEISRFHRVGQYASYCRCVSGARYSNGKRKSKTNTKNGNKYLAWAFVEAANFAIRYNETVKRYYQRKSSKTNVIVARKTVAHKLARACFYVLRDQVAFDVNKAFG

SEQ ID NO: 109984 - protein, 379 aa, unidentified
MSQYSTLFVGLDVHKDSIAVAYAPEVSGSEVTFLGPIGVRHCDIEKVIRQLHSKAPRLRFVYEAGPCGYWLYRYLQKLGEECLVVAPSLIPRRSGDRVKTDRRDAQQLARLLRSGDLNPVYVPGLADESIRDLCRLREDRMNDLRAARQRVKSFLLRHDVRYGGRASWSPAHMRWLAQVASLPTPAQQIVFQEQLNEATHLAERLAAADEQLSQHISGWRLAPYVRAYQALRGVQFHVASTVAAELGDITRFDRPRQLAAYVGLHPREHSSGESRHLGGIAKTGNGHVRRVLVEAAWSYRYAARISRQIQARQEELPEEIRDIAWKAQLRLCKRFRRLSAKGKHHNIIVTAIARELVAFLWAIAKQVPAVESDQAALAS

SEQ ID NO: 109985 - protein, 350 aa, unidentified
MLIIGCDFHTRYQQIAMVDEATGELVEQRLDHESGEAHTFYRGLPKPVRVGIEATGPMNWFERLLAELGHELWIGNSAKIRASEVRKQKTDERDALLILDLMLANRFPRIWVPTPTERDLRQLLWHRHKLVRMRTMLGNQLHFLAMSQGLCRKKKLFTKHGRVELAGLPLGPWAGRRREELLRLLDQLDPAIAELDRAVLEEAKRREDAARLMTHPGIGPVNALAFVLTIGPVARFHRSKQIASYLGLNPSEHSSGGKRRLGAISKQGNTMVRWLLIEAVHHAVRFDPELRQDYQRLKSRRGHAVAKVAIARKLAVRMYWMLRSGADYARLVRTQGSPGATLVNASSSLG

SEQ ID NO: 109986 - protein, 347 aa, unidentified
MRFYTRQHKFYCGVDLHARSMYVCVLDQEGNVLVSRNIASAPEPFLELVAPYREDVAVAAECMFTWYWLADLCAREGLVFVLGHALYMRAIHGGKAKNDRIDAHKIAALLRGGMLPQAYVYPQAMRATRDLMRRRNYLMRQRAELLAHITNINHQYNLPALGVRPARPAERAGLAEHFAEVPVRKSVEVDLSVIEHYDRELPALERYLESNAQAHDPVALAIVRSIHGMGKVLGLSILYEIHDIARFSRVQQFLSYGRLVKPTKESGGKILGHSGRKIGNAHLKWAFSEAAVCFLRANKPAQALRARLMAKHGKGKSLAIIAAKLARAVYFMLKRGEPFDAERFFSH

SEQ ID NO: 109987 - protein, 361 aa, unidentified
MGSPKTVTQHRRPAMKILALDMGNRKSVACGYEAETGEHRFQAIRTRPAEVRERVVAEAPGRVVIEIGPLAGWMSDLCRELGVELQVADTSQEAWRWKTVKRKTDRDDALKLARLSAMNQIHAVHVPEARVRGWRETIRYRHGLVERRTAIKNSIRGILSRQAIEWPAGAAGWSKKMRGQLLGLASVEDGLAWRLMMREELAQLEQVEGSIQRVEDLLDQIAAMHPGVALLRTIDGVGPRLAEIVVALIDDPRRFRNRKQVGCYGGLTPRKMQSGAMDRTGRISKHGDELLRSLLVEVAWISRQYNPWLREIYERVMRGSPSRKKIAIVAVARRLLIVCWAMLRDGTQWRQAKGAKLHLVA

SEQ ID NO: 109988 - protein, 330 aa, unidentified
MERQYIGVDLHKQFFQACAVNPAGDRVWEMRFPRTDGGMTLFRARCSPLTSIAVEACGPTWAFVDALGPTGAPVCVVDPRKTRLKAGFAAKTDRLDARRLGDALRRDSVVSIYVPPPAIRELREVCRGRHHVVRLRSRVAQMIRSLLLRSGVADVPVRRVYSARGLAWLETVPLPPEAAASLGRFRHLLVAIHAEATAADATVTGRAAADPVACALDAMVGIGPVFALTIRAEIGDVTRFRRGAELASYAGLVPRVDASGDRYWSGRITREGSPWLRWALVEAAMHAMRRADSLGRWARQLAIRKGAFKARVAVARRLCDEILTVWPRTA

SEQ ID NO: 109989 - protein, 399 aa, unidentified
MIGIGIDISKNKSTVSAINDTGEIIMKPQEFKHSENELNKLIQWIKDQEDTVFVVMESTGHYHYPVLKKLYEEGVYVSVVNAYLMKKYGDIEIRKAKTDKKDAIRIAKYAIEKRFSLKKYEGEDEKYNDLKFLSRQYNQIVSIRVKAKIQFNNLLDEIMPGINKILTRTTGNSSKILYDFVEKYEHFDNIKRKGEQKFIKEYSAWSKKKGYRNGAVKALKIYELAQNSITTRSANNSTYIALKNCIKILRETEESSNSILTQMQTIAYTLPEYKIVRELKGVGDKLAPRLIAEIGDVRKFTSAKALNAYAGNDAPPHQSGQFEGTKRHISKRGSSSLRKVGYEIMMALKVTKPTEDNAVYEFMIKKESEGKAKNVAKMAALNKFLRIYYTRVMNLYKTL

SEQ ID NO: 109990 - protein, 424 aa, unidentified
MGKRRNRVCGADVHKDLIVATIQSADGTEFQEKFGTTYSELERFRDWLLTNNCEQVAFEATGVYWFPVYDALSPSIDTIVANPWMIKGIPGNKSDASDSRWIAENCLDGKIKRSRIFSKEDRNLRTMTRARSGYTKTRTQLRNRIHKYLALCGIKLSSCISDIFGKSGRHILDGLVEVKEIDEILDSIPSGKVKKKRDLIKAALGNSLDDVSRMLVKDTLELLDHLEKKMEKTSLEILSRLQKRAKDLAIVMSVPGIGFTSGSIILAEIGDYRDFHTPEQLAKWCGLAPGLNESAGKKKPCGITKQGSKSLRTVLVEIAQVVAKMGNNKFSRFFHRLRTRKNYNVAITASARKLITIIYHLLINQELYQENNCNTATSKPVKKDLLYLSKEERLKDGVAAIVDAFYHLKNRYSEGVDRIAPPSH

SEQ ID NO: 109991 - protein, 325 aa, unidentified
MEYIALDAHKRYSFASVEGVDGIKRTEARVEHGAGAIRQFLEKFDRGSPVAVETVGNWYWIVGEIEEAGMVPCLVHARRAKMMLATVNKTDRLDARGMNRLQRSGTLPTVWIPSADLRDQRELFRTLMVFTQQRTRLKNRIHATLAKYGLRIEESSDAFSKKGRKELALCLTKLPTQTRYATELVLEQLDSVTVQIAALEKRMKGVFEPNKEIDCLLSLPGVGFILAVVIFSEVGDVARFLSASHFASYAGTAPSVHASGGKVRLGQLRSDVNRYLKWAFVETENAISRNHRRWPYCHATCLYERVRSRRGHQTAIGAGSGPTSC

SEQ ID NO: 109992 - protein, 401 aa, unidentified
MNAVGIDVSKGKSMVAIMRPLGEVVAAPFEVGHTATELNELAKFILKISGETRVVMEYTGVYFEPIAMALYDAGLCVCVVHAQLIHNYGNNTIRKVKTDKADAIKIANYALDNWDKLKPYTPIDEIRRQLKAYSRQYRKFNKLKTMLKNNFIALTDSTFPGVNELFSSPPRKSDGHEKWLDFAIKFWHAECVCSLSQKAFTERYRKWCHKAGYYFLESKAEDIYAAACGHIGLLPKDENTKQLVQQTIIQLTSICSSLSVIEYKMTELAVLLPEYPVVMEFHGVGRILGPQIMAEVGDVLRFKKKESLVCFAGLEAPPYESGKFESHNRTISKKGSPHLRAALFQVMDCLLKTQPVNDPVFQFIDRKRSEGKHYYSYMCAGSAKFLRIYYARVKEYLTALE

SEQ ID NO: 109993 - protein, 472 aa, unidentified
MGTACLLTALLCVPTALSSTNKWDLNPVNLSLERQTTRFSVSGQSLPVSSKSFLRGCAMLKIVYPICCGMDVHKSFVVACIASTNIQGVTTYKSHRFSTFTKGLRELSQWLLQNDCRDVCMESTGKYWIPIYNILEPACKIVLAHPKYVKAIRGKKTDKKDAQWIADIFKHDLVSGSFIPPADIRQLRDLVRYRFKLTNYITGEKNRAQNCLTVSNIKLDDVFTDVFGKAASAITTRLLENTEPFDVTPFLTKNHKASAEEIQMSVDGVICPEQAEKLRIIRSHMDALTLAKLNLESLILSVAEKYLPQLNLVLTVPGIQSFSAIAIIGEIGVDMSVFPTSKQLCSWAGLTPQNNESAGKKKTTRINRAGSYIKPLLVQCANAAIKGTHHPEVKNRYLALKKRRGHKKAIIAISRMLLTAIYNILKKNEPYNPALYRDLDRPPVHREVSVDEAVYILQRQGYLISAPRSTAT

SEQ ID NO: 109994 - protein, 369 aa, unidentified
MDKYIGFDIDSNKTSVCVVQKNKAERYATIGPDERSMRKFLVNEKKDGSRVHVTFEISGQAGFLYDSLIDCVDGIKVANPDKMTWIYRTAKKNDRIDARKMAVLLSIGEIPAVHMPGKEVRQWRMIICHRKKLLATSVAAKNRIRALLKSQGIRRSLHKGGWWKIANRLWLRELCGGGFDVNNMWRIQLSNLLAELNMAEEHIDSVTSYLDGYLDKQAGGKLLMSIPGVGPRTAEAVLAFTDDVERFAGGKEYCGYFGVTPKLDESGNSRRLGHISKKGPSVVRWVLCESSWKVIRYSKSMKSFYERVMAGQQSRKKIAIVAVARKLLSIMRAMLLTGATFSEEYVSGLEYGRIVRHTLGGIEKLRKTA

SEQ ID NO: 109995 - protein, 316 aa, unidentified
MNRQVFIGLDVSKQTLDVAVRPQGRHFVTPNDDRGIKQLVKRLAALTPQLIVLEASGGYEFLVTAALAEAGLPVALVNPQAVRKFAGATGKLAKTDKIDAQVLAHFAEALRPEPRPLPDPALQVLKAALQRRLQVVKMIGQEKNRLEKSFIPSVRQDIQKHLAWLQKRLKELDRDLNDQVRQSPLWKDRDRLYQSVPGIGPAVSRAVIAQLPEIGTLSGKKAAALVGVAPFNRDSGRFRGKRMIRGGRSYLRKMLYMAAVAASQWNPVIRAFYQRLLAAGKTPKLALTACMRKLVLILNAMVKNNQPWNQFINQAP

SEQ ID NO: 109996 - protein, 338 aa, unidentified
MSVALLSIDLAKNIFQLYGVDERGHPVLSRRVSRNKLLESIVNLPSCRIVMEACGGAHYWARRFSAMGHHVQIIAPRFVKPFVKSQKNDRNDAEAIVEAASRPTMRYVAVNSAQQQDIQSMHRIRSLLMRDRIAQINQIRGLLAEYGVVIAQTAPKVRQQLPSIIDDERNELTGLGRSMMRDMYERLVLLDKQIARYDELIHQVHKASPVSQRLEKIRGVGPLIATAVIAAAGSATEFSNGRQFAAWLGLTPRQHSSGGKDRLFGITKRGNGYLRMLLVHGARSVVQQAIKHTDTLSRWIREVQARRGTNIAVVALANKIARTIWVLLARGLEYAPPV

SEQ ID NO: 109997 - protein, 356 aa, unidentified
MLYLGIDQHARQLTVSLRGENGDVLLARQVSTEPDRVQAFFGQLTRDRLPDGGGFVAVLEVCGFNDWLIRMLRYYGCAKVILIQPEDRKKRKTDRRDAAALSELLWANRERLLHGKPVRGLRQVEITDPADQESRRLTTLRKEAGVARARLINKVKWVLRRHNLQWGMPTKTFPTAKAVAWLKGLALPEVDRMEMDHLLADLDQADRRLKDLEQPIARRSAANEAVAVLSSMPGVGRGFTALSLACRVGRVERFPRAHSLANYWGLTPGCRNSGENDQRLGRITKAGSATARWLLAQLVHKVLRRDARLRDWFKRVKRRRGPTVARVAVMRKLATVIWHMLSKRKTYAECRELAAA

SEQ ID NO: 109998 - protein, 350 aa, unidentified
MTTHITIGMDLGDRDHIVIVLDADGNEIKCARLINTKVALKRFFQPYSGATVAIEAGTHSPWISRLLEELGFQVYVGNPYKLRVIWDSTDKSDERDARMLAMIARLEPKLLWPIRHRDVNAHNDLEVIKAREMLVQSRTKLTNHVRSAIKSIGERLPSCSTASFATRAADLIPVALQPALMPLLETIAQMTDTIRALDKQIKALALERYPQTRCLQQVQGVGPLTALAFVLTIEDPQRFVKSRMVGAYLGLTPRRDQSGAIDKQLRITKAGNVYLRKLLVSCAHYIIGPFGADSDLRRHGLAIAARGGKSARKRAAVAVARKLAVLLHRLWISEQEYIPLHTRRKVVMVA

SEQ ID NO: 109999 - protein, 394 aa, unidentified
MKLIGIDIGKNKHFFCIMDQQTGEIISQPVSFSNDKEGFDFLVQKIKSYPKDSILIGMEDTGHYHFALLKYLLDLQYTVALINPKTTDFNRKMQGGITKNDKLDTINICDVLDTPERKKQYRITKVNSFDLYEQKQLTRHHHNLKEEENVYKNRLQKCIDIVFPEFNKLFNSKYGTVYMNILKMFGSAENIANTDIRTIRKCFEIEGRGNRISLTPERLKECAISSIGISSSAEVIQIKHLTAQIELIEEQLTEIDKKIEEFSIQNNSPILSIPGISHFSGTSILAELGDISNYSKPSQIIKFAGVAPLHYESSQFNAQHTAITKKGSKYLRKTLYQIILPVIKHNPVFNKYYQLKISQGKGHRCAQGHCVRKLLRIIYHLLKTNQQFDPQLLR

SEQ ID NO: 110000 - protein, 319 aa, unidentified
MAKRVEEVTLGFDVSKQQLDVYGSDKAGIRVIDNDPDTIARFLNAFSGLVAIAVEATNVYHETLVDLALERGFTVYLIDGYKLNKYREAVGIRAKTDANDAYLIHRYLVSERAHLRALSPKSQQQRQLWRLLKRRAKLVKLRTQMDLSLRDLKLQVPEVSEALTSIKRLINRLTVQACGLAKAAGWNESLGRLRTIPGVGKLNALALMVMYHRGEFSNADRFIAFLGLDIRVRDSGTFRGRRKLTKKGDPEVRRLLFNGARAAAYRYIEWGERKHQLMARGLTEIQVSVILARKIARIGYALMKKGGVYQNAEITCASS

SEQ ID NO: 110001 - protein, 320 aa, unidentified
MSRIVIGVDISKLKFDATILFENNKIKQRKFDNTHSGFKDFIKWIKLNKGEEAHICMEATGVYGDALATFLYDSGITVSMVNPLQIKGFAQSMLSRNKTDQTDATLIAHFCRAMQPTTWQPAPEHVRVLQALVRRLEALESMNRQELNRLGVAPEHIKCSIEAVIKKISEEIKLIKNKIKDHITKNPDLNDKSKLLQSIPGVGPATIMQVLAFIGDPSLFDNAKKLSAFVGLNPKQNQSGTSINGRTRLSKMGNANLRKAFYMPAVVALRYNPIIKAFSERLKASGKMMMVIIGAAMRKLLHIIYGVLKSGKPFTLELVK

SEQ ID NO: 110002 - protein, 409 aa, unidentified
MRYYVGVDWADQTHAVWVVDESGTQITARTVPHTAEGFVEWGRELDEWRVQGIERWAAIERPDGRVVDFLLDHGVVVYPVNPKALNRARDRFRQSGAKSDPFDARVLADFLRTDHLHLQALQPSSDAAQELKLLTEDCQRHIRQQTRLVNQLTTTLKAYYPRALEVAELTTALAREFLHAYPTPEALTVLTARQWQRWARGRRVSEARIGALWAVLQPPQLPVPAHVVRAKARLMQSLVEQLTPVVVAVAQYRKTIDDLFARMPAAQWARTLPIGKHGITAPTLWARLGDAPGRWESFRHLQAQAGAVPVTKRSGKQRVVHFRFACDKALRHVVDQVAFLSLLSSDWARAYYDQQRARGHGHRQALRALGAKWLKIIFVMWHRQVPYDEQYHLATMTRQQLRQRQTKIA

SEQ ID NO: 110003 - protein, 332 aa, unidentified
MNMNPQGGVANRDQRPNAGIDVSKQHLDVCLGTEDQRVCNDANGWDAVIAKCKDANVDLVVIEATGGYERGLACALQAADITVARVNPKQTRDFAKSMGVLAKTDRVDAHILRDFGDVLAHHKDRAKYITPMLDEHRQELAALMTRRRQLVDMHVAESNRLEHAGKRAVRSIKSVLRTLDKQLAAIDQDVDDHLDGYFKDQRAVLESVKGVGPVTILTLTAALPELGHLGRRQIAKLVGVAPLADDSGPRKGKRRIWGGRSEVRTVVYMATMAAIKYNPALNVFYSRLIASGKPKRVAIVACMRKLLTILNAMLRDQAMWDGAKHPQPTKAA

SEQ ID NO: 110004 - protein, 363 aa, unidentified
MENSSTATGIGKRWTVGIDVGDKTSRLYVLDDEGEVVEEGWLATTEAAFRRRFAATEPCLTVMEVGTHSPWLSRLLEGLGHECLVANPASLKGKQRKKSDKIDAEKLARWARSDPKILEPIRHAGAEVQADMALIHSRRSLVEARTKLINRTRGLVKSFGGRLPKCDSDYFAVKMKHLVPEALVGPVEPLLRLIAELTAEIKGLDRQVAALADKYSQATAPLMQVKSIGPLIATTYALTVRDPARFRKSRQVGAYLGLTPRQQSSGQREPELSITKAGNVYLRKLLVNAANHVLGPFGSDSDLRRWGLKKAEGGKVARKRAIVGVARKLAVLLHHLWLTGEEYDPLRRHAMVEEASSPPRQPA

SEQ ID NO: 110005 - protein, 337 aa, unidentified
MTRYVGVDLHRRRSVIVVLDSDGTELWTKRIDNDPLTLGLEIEEAGPAPEVVLEATWGWYWAADVIAEAGGNVHLAHPLGIAGFENRRVKNDRIDARLLADLLRMGRLPESWIAPEGIRYQRELVRYRRKLSQLRAGLKAQVHAVLGKEGLRPPVTHLWGPGGNAWLDDTEMADAYETRVRSLRRLIKTYDNEITKLDSRIADEFKHHEEYQVIQQLNGVGPVLAAIFCAELGDVERFRTAKQVCSWAGLTPRHRESDTTVHRGSITKQGPPLVRWAAIEAISKNHGDDHIRAHYRRVSERRGRNKGRVAAARKLLTLVYYGLRDGEIRSLAPPEAT

SEQ ID NO: 110006 - protein, 415 aa, unidentified
MDAISIGIDVSKGWSMVAAIRVPRETVWKPRKIMHTASALETLAYEIKALGYDGAEVRVVMEATGRYYEPVAQELHEVGNFVSVVNPKLVKDYGHNTLRKVKTDKADARKIARYGLEYWDDLREYTPVEAARRKLKQFSRQYNLYNKMKVQLKNNFIALLDQVFPGANELFDSPPKADGRQKWVDFVTTFWHCECIADMSEAAFIERYRKWCKRLGYYFSEAKAVDVYICSLGHITMLPKNSNTKLLITEAAKQLTCISRMVEIFRAEMLKLAKMMPEYEVVMGLYGVGETIGPQLMGEIGDVRDFSSRKALVAFAGIDPGDNSSGKHESKSNPSSKRGSALLRKVLFLAVEVYVIKQPADEPVYQFYKKKRAEGKEYYVCTTACANKFLRIYYARVKEFLDKELPEEKRFPCQG

SEQ ID NO: 110007 - protein, 387 aa, unidentified
MYYCGIDVAKRGHVVSVIDDTGKVLNHGVPISNDRIGFQQLADLLEPYRGGIRIGLEATGHYWLALYDYLCHLEYDLSVINPLQVKAFRKMDIRKRKTDRLDSVAISEFMRFANPGSTPADLPVIIQLKELTRFRFHLVQQIGDCKRKIISILDRVFPEYEQLFSNVFLVSSRQLLHHAVTADEFAAFDLNELAQILHTASRHRLGIDKARQIHLKASQSVGVSFLTDAIHTEIQCLLQLIELLEQQRSQVDAKVEQLMNSIPHHIVTIPGIGQVTGAMLLAEIGNINRFPALEQLVAYAGIDASVFKTGQFEGDEAHMSKRGSHYLRYALWQAATASLLHNPELKQYYDKKRAEGKQHGVAMGAVCHKLLSRIFVIMKEQRPYVTR

SEQ ID NO: 110008 - protein, 412 aa, unidentified
MSNPLVVGIDVHRKTHTVALMEQSGREVAPRFTVQNNRPGTATLAQTLQATVQQGGYDAIHVAAEATGWYWWHLFYTLDKDPLLHQNPLLLYPFNARMTANFRKTYSDRDKTDRVDAGVIADRLRLGRDLPQPYAYDEAYLGLRFLTRHRFHLVHQIVREKAYFLAYLYLKASEYTRLQPFGNLFGAASRALLLDYANLEEIAAIPFDNLTEIIDQLGKRRFADPKQNARLVQAVAQDSYPLPQGLQAPVNLILRQSLQQILSLQRLVQRTDTAIATAIETIPNTLTSVPGLGPVFAAGMASEIGDLARFDGDEAKVAKFAGLSWRQTQSGEFQAEETHLTHAGNRYLRYYLCEGANSVRMRSAEYRAFYERKYNEVRLHQHKRAIVLTARKLVRLVVRLLTTNQPYQPRRT

SEQ ID NO: 110009 - protein, 343 aa, unidentified
MKQISTIGLDLAKNVFQLHGIDASGAVVLTRQLRRAAVEKFFAQLPACTVGMEACGSAHHWARVIGKYGHQVKLMPPAYVKPYVKRNKNDGRDAEAICEAVGRPTMRFVAVKSVEQQAALAVHGTRGLLVRQRTMAANALRAALSELGIVAAQGYEGLRELIARLEQPSEEIPEHMRGALLVLAKHWQVLDADERMLEQQIAKAARSDRDARRLMEVPGVGPIIASTVLAKVPDAKLFRSGRDFAAWIGLTGRDHGTGGKPRPGRISKQGDRVLRALLISGASAHLRQQKTRGVRDPWLRDLLARRPYKVAMVAFAAKTARIIWAMLVKGEHYRDRASAPAAA

SEQ ID NO: 110010 - protein, 389 aa, unidentified
MLPNGDKHSSFSLANSHDGSTQLVKRIFTAMTSNNIDSVLIGLEATSVYGDNLVYFLKEDATLASFDRKIHVLNPKQVNKFKESYNDLPKNDYVDAFVIADCLRFGRINKEVYMDDYRYKALQNLTRARYFAVTNLTKEKQRFINVLFKKYSTMTQEKVFSDTFSTTALAVYEKFESAETLAKMDLQELTAFIMEKGKNRFPDPDAVAKALQKAARSSYRLPKTVNDSVNQVLAISITSIRALESQIKAFDKAITKQMELLPNVLISIPGIGPVLSAGIMAEIGDINRFQNQAALAKYAGLAWQQHQSGDFEAQTTRMIHSGNRFLKYYLCEAAFSLVRCDKEYNRFYHIKYKEVNRFQHKRALALTARKFVRLVFALLKDNRLYRPAE

SEQ ID NO: 110011 - protein, 375 aa, unidentified
MHMMQHREIRYIGLDVHKLTISVAIAEEGGAPTSYGKIPNDRVAIRTLMTRLGDPNVELRVAYEAGPTGYALHRQLTGVHIQCLVAAPSLIPKQPGNKVKTDRRDALKLARLLRSGDLTPVWVPDEAHEALRNLVRARADAKADLLRAKHRLSKFLLRQGCWAPIGVRAWSKRYFTWLHQLEFEHLPDRVVFADYLTEVNAAGERVKRLEAALHECAQSSSQVALIRALQAFRGIGFLSAVTLVAEAGDLRRFRTAPQFMAYAGIVPSESSSGGKQQRGSITKTGNSLLRHVLGEAAHHARRAPRVTSTVKQRQKDVPPEIIDLAWRAQVRLHTRYRHLSARIGALKALTAIARELAGFIWAAGHVIQEEVPVAA

SEQ ID NO: 110012 - protein, 391 aa, unidentified
MDKAWAGVDAGKEFHRAHVLDASGKELLSRKVENDEDDLLKLIDEALCLAEEVIWAIDQPGGGAALLLALLWERNQRVLYLPGLTVDRARAAYRSESKTDARDARVIADQARMRSDLGELRPGEQEIAELQLLLARRRDLVTDQSRTITRLREALLSLFPALERALDVNSKGPLTLLTHYQTPTQLRRAGHKRIATYLRNRGVKGSNKVAHKALGAARSQSVTLPAQEVAAAIVAELAEDVLGLKDRVESIDQELGQRFFARPEARVLVSLPGMGPILGAEFLVVVGEISAFESADRLAAYAGLVPAARDSGKRVGNNKRMRGGNKVLKRVFYQSAFASLRSAPESRVFYDRKRAEGKRHTQALIALARRRVNVLWAMLRDGTTFEDRSAA

SEQ ID NO: 110013 - protein, 376 aa, unidentified
MSIVTQPSVIDNPVAGGVDTHADVHVAAVIDHVGRELGHRSFATTAAGYVELACWLTSHGTVTVVGVEGTGVYGAGLTRSLTVDGVHVVEVDRPDRKARRFDGKSDPLDAYAAARAALSERATGAPKSRDGNVEMIRTLRVARSSAVKARAVAITQLKALIKTAPDELRDQLRDLNGATLINRCARLRPSRGDAPVPAPHAKRKPRPGRLDGVTAAAKHTLATLARRVHTLNDEINGLDDDLTGLVNETAPTLTAMFGVGTDIAGQLLATVGDNPGRIATSAAFAHLCGVAPIPATSGQIQNRHRLNSGGDRHANCSLYRIVMSRLRYDPRTQNRRDELRARGKTNKDIIRILKRAAAREVYQAIKTDLITTPIRT

SEQ ID NO: 110014 - protein, 411 aa, unidentified
MDKIYDKCCGIDVHKKLIVACFRCGKKQEVREFGATTRELLELADWLKDGGCEMVAMESTASYWKPLYNILESSDLNAIVVNARHMKAVPGRKTDVKDAEWIADLLQHGLLQPSYIPDKDQRELRELVRYRKSLVRERTRELNRLQKMLEGANIKLSGTVSDINGKSARSILEYLLTGKSIDGSKYDEMYEQKIIAHNLKATKEQIVDDLNGVMSPLQRRMMKELLVHLDELNIHIKNLDDEIDNFMKPEEKQASQAIQDVTGIGNTSAQAIISVIGSDMSRFPTDRHISSWAGLCPSDNESAKKRKSGKTRKGNALLRTTLITCAHAAVKNKKSYFYAQYMRISAHRGPKRAYVAVAHSMLISIYHILKDGVVFKDLGADYYNQFNKERKINAYLKKLKALGWEAPIVAA

SEQ ID NO: 110015 - protein, 354 aa, unidentified
MIIIGADYHPAFQQIAFVDTETGELQERRLEQPEGAEKFYRELAAQGKRVRVGMEASGHARWFERLLAELNIELWIGDAAEIRRKRERKQKTDRQDAQHILRLLLKDDFPRIWVPSWENRDLRQLLWHRHRMVQARTRMMNQLQAVALNEGLRCKKKLWREAGRKQLEAFRLAPWASRRRQDLLELLDRLNPTIAALSQAMEQEVEKCPEAQRLMTHPGVGPLTALAFVLIIERADRFQCGKQIASYLGLVPLEDSSGNRRRLGHITKQGNSLLRFLLVEAGQVTVRSLPEWRSKYVHLTMRRGRKIAKVAMARKLAVRLYWMMRQGWDYEQLKKFGSHSGQPGHRHGVKSNIE

SEQ ID NO: 110016 - protein, 367 aa, unidentified
MKKVSTAATKQSRNISRQRLIIGLDLGDRNSWYCVLDEGGWIQLEQRVRTTAKALQEVFGGMARSRIALEIGTHSPWVSRLLSELGHEVIVANARKVRLIGESRKKDDRLDAQTLARLARIDPELLYPVKHRSAQAQADLMMIRARAGLVRARTGLVNAARGLAKSYGERLRGCNVRNMDPEKAEGLSPELQRALEPLLATIEELSERIVEYNDRIESLAQASYPQVELLKQIKGVGTLIALTFLLTLEDPHRFRKSRDVGGYLGLQPGRRNSGQSEPQLHISKEGDPYLRTLLVQGAQHILGPFGIDCDLRRWGLKLAERGGRNGKKRAIVATARKLAVLLHHLWVSGEVYEPLHNSSRLTVTAAA

SEQ ID NO: 110017 - protein, 282 aa, unidentified
MRLPSARKGQFSSTVSTWASTADAILDLRNFLERQDVTIVAMEATGDYWKPFYYVLENTLPVLLVNAKNARNIPGRKTDVSDAAWLAQLAAHGLLRPSFVPPPPIRELRDLTRARAITVRDRTREIQRLEKFLESSGIKLSAVASSLTGVSSREILEDLVAGQRDPQILAAHAKGKLRQRIPELTAALNGSFGDHHALMTKLYLEQIDAYSRRVKTLTDAIERLMQPYRHTRETLCTIPGVSALVADVLIAETGADKSVFSTAGHLASWAGVCPGSNESTGP

SEQ ID NO: 110018 - protein, 351 aa, unidentified
MMIIGCDYHPSDQQIAFVDQETGECSERRLNHSEGEAEKFYRDLQQRGVSVRVGMEATGHARWFERLMAELGFELWIGDPAEIKTRRVRKQKTDRQDAQLLLKLLLEDRFPRVWVPSPENRDLRQLLWHRHRLVQMRTRIMNQLQAVAMNEGIRRKKALWSKSGRVQLELFSLAPWSSRRRQDLLELLDRLNPTIDQLSAAIAQEAEKRPEVRRLMTHPGVGPLTALAFVLIIGSPERFRCGKQIGSYVGLIPCEDSSAGHQRLGHISKQGNSSLRFLLVEAAQIAVRHDPDWRRRFLHLAVRRERRIAKVAMARKLAVRLYWMWRKGWDYQQVLQFGSHAGQPVKAHGVK

SEQ ID NO: 110019 - protein, 448 aa, unidentified
MAKRKMKMDIINPNAAGIDIGSRSHFVAINQEHSDVREFGVYAQDMKELLKWLLDNNVKTVAMESTGSYWQNLFTELQNSPIEVILTNGKFTKNIKGKKTDVLDCMWIQKLHTLGLLSGSFLPDLQTEHLRTLVRHRVNLIDTAAKASKRMSQSMRLMNLRLDVVVKDIVGLTGLRIINEICNGETKGVELAKLRHGNCKKSEEEIAKALQSNNRQDYLFVLKQELHKYNDAQQLIIECDIEIKILLDEFINQDDVKKSLHIDKKVHKRINKNTPKNIDLNLIAYQYFDGVDLYNIEGFSHGTVLTLMSELGEKGIFKFQNAQHFTSWLRLAPNNKISGGKILNNRTPKGSNRLKIALRQAANAIGNLKDTHLSNFFNRIAYRKGRSVAVSATARKLATILWNMLFKNQQYNPPTIYEYLDQKRKRKVLELQKQITNLDVRMNKIQPS

SEQ ID NO: 110020 - protein, 344 aa, unidentified
MYFIGVDHHKQVSVMTVLDEDGQERKNGRVPNFRRDVDRFLDGCRPFTAVLEAGRSSYVMADLLRELGGEVKIANALQVKAIAHARIKTDKRDSRMLAHLLRADLIPEVYQRKEWNRRAQRVIRLRAYWVRKQTEVKNKIRVLLAQQREEVRLAVEKRESGLFSSKGIEFVAELPLESREKEILRDLVQGYEEIQTHIKKSDGLVNTLYGEMEEAPRIDTVPGFGKTLSVLVAVEIADVKRFPRAADLHSYAGLIPSTHSSGERTYHGSITKQGSSWLRWAALEAVYPAVKKDLVLRTMYGRLARRKGPNVAKIAVARRLLTIIYRILTEKRDYIPDVMKQSAA

SEQ ID NO: 110021 - protein, 334 aa, unidentified
MLYAAIDIHKHAFQAAVLDPESGEVVEQRFSADRESLARWVEEWRGRVAAVAIEATTGWRWVWRELVSCGFEVRLAEPVQARGLLGRRRSAKTDRLDARWLARLLAKEMLPESWIPPEEIQRLRDRTRLRKALAEDRRRWGQRLHAFLLHEGWPCSKARLLTPEGMRWATALKLPEHARLQVDSLLAVIGALEAQLDTIEAELRRFARADERCRALQSIYGIGPILACHLLAEIGEARRFRRAAQITRLAGLDPVVDESGETRRRGKLAKAGSPHLRWALVEAAVHANRQSAPDLAVYRATRERRDATVARLTVARKIGKRVYLALRELEPTAA

SEQ ID NO: 110022 - protein, 341 aa, unidentified
MKPELSVVGIDLAKSIFHLVGMDERGTIILRKRLTRGEVMPFMAQLPRVLVGMEACGGAHYWARQLRAQGHEVKLMAPQYVKPYVKTNKNDLRDAEAIAEAVTRPNMRFVPIKNVAQQDLQALHRVRERLMGARTALVNEMRGLLAEYGIVLPTGVNAFRHALVEKLEVEHAKLTPLSQELFGKLCAEFKKLEIEVAYYDEKLQALATTHPESQRLLTIPGIGPITATALLAAVGDVGSFTNGRQFAAWLGLVPTQHSTGGQTRLLGISKRGDSYLRKLLIHGARATLRWARTKTDRRSQWIRGLLERRGWNRTAVAVANKNARIVWALLYRGGVYGESTH

SEQ ID NO: 110023 - protein, 388 aa, unidentified
MYYVGIDIAKYKHDCYICTSEGVTVLESFSFDNSNTGFKELQSALDHLDHSQQIKIGLEATGIYGKNLKLFLSSIGYDFHEFNPLLVKRFHDSLSNRKTKTDKIDARIIALYLSTGASRTYLYSSYHIEALKQLSRARNKLIRSRSDQYVIITNILDVEFPEFKAFFHNKLSDTALFLLNKYKTVDRMKRLTYQDCVLLHNKSRRIPTSSFEELRDLAKHTIGHHFNYNDLILSSALQIVNTLERQIESIEKEILAIMEELHSPIDTIPGISMLSAATILGEFGDFSKFSNPKQLCAFCGVEPAIYQSVTSSHKGKMVKHGSSQLRYVLFNAVPYLVIHNITFRKFFYKKLHEGKNYRVAQSHVVKKLLRVIYHLELTGESFDPTFLY

SEQ ID NO: 110024 - protein, 337 aa, unidentified
MTIIRIGLDTAKHVFQVHGVDENEQTVVRRQLRRGEMEKFFGKLAPTRIGLEACGASHYWARLLRGLGHEVVLLPPQYIKPYVKRGKNDANDAEAICEAMSRPGMRFVPIKSAESQAELMLLGVRNLLIKQRTTVINAIRGHAAEFGVIAAKGPVKVAELLQQAHTAEASVPELALNMLRLLAAQLDALDVKLKLIETRLMASHRENPLSQCLASQPGIGPIGALSFALRVTDPKSFRSGRHFAAWLGLTPKDHSSGGRHRQGRISRQGNEALRKLVVLGATAVIRFARPGHASPWLLNLLARKPKKLAAIALANKMARTLWAMMVSGEVYRRPLPA

SEQ ID NO: 110025 - protein, 349 aa, unidentified
MKKVIAGMDLHSNNVVIGIMDMDGKRLASRKVTREIEEVLKVLAPYKKRLEKIGVESTYNWYWLVDGLRALRYPVVLANPAGMQQYNGIKHADDKNDAFFLAELCRLEILPTGYIYDPELRPVRDLLRRRLSLVHQRTALMLSFESLFTRTTGEQMGLARLKKLDVPAAQKLYDHPANQLIAGVQMKHIEQLNQSIEQIEKVVIKVAKQLPYYAKLKTLPGVGIILGITITMEVGDIKRFSDAGHFASYCRTVDSKCLSNGKKKGENNQKCGNKYLAWAFVEGANFAKRYDEDCRKWYDRKAAKKGTVIATKALACKLAKAAWYLMAQGVDYDRNRIFPELAGALSKRR

SEQ ID NO: 110026 - protein, 379 aa, unidentified
MELVPIHKRVIGLDIHQAQVTACAIIEESGGETRLEQRQFGAFKRDRRELAVWAAALDPDEVVMESTGIYWKSPYAALEAVGIRATVVNARHVKQVPGRKTDVGDAQWLATLARAGLLRGSFVPPAQLRELRLIARQRQKLVGLLSSEKNRMHKMLTDAGIRLGVVVSDIHGQSARAMIKGILRGQAPHEVLQRASRRLKASREELHDALQGELTASHVFVLDELLRHIEELEARIARFDARLLAELASEHNALALLQTLPGVDLIGAAMLLVEIGSDMSVFGTSDRLASWVGLCPGNNESAGKRKSGRVRKGNPYVRRLLCEFAHAASRTKSAFQAKFQSLIVRRGHKRAIVALAHKMLRTIFHAQAWRTLPGFRHQL

SEQ ID NO: 110027 - protein, 340 aa, unidentified
MNRFLGVDLHRNCFTVCTLREDGQSELRKWSIYSLSEFAHTVQAKDAVAVEATGNTRYFCQSLQERGCRLVVVNPQQFQVISRSVKKTDAHDAKTLAQFLARDLLPEVRLKEALPAEIASALQTRDKLVKLRTTLKNKINNLLAGRGILIHRESLSSNKGLEQVLQAPISGLERVELEVLVGQIRHLNDSIRKLEAAIKKQAPKLPGYQNLKSIKGLGEIGTTTLLSTIGDINDFASEGKLSAYFGIVPRVANSNETARSGRITKRGNKLARTALVQCALIAMRYSHYLAHFYARIKAARGTGKAIIALARKFLGIIYRTLKNGWVFEDFPRFVIAPAGP

SEQ ID NO: 110028 - protein, 408 aa, unidentified
MNPLFVGIDVSSKNNVAYLMKPDGSKHSSFSVQNNLGGAKLLSERIVSALGSMQLERVVIGLEATSIYGDSLVYALREDGRLGRFQRKIHVLNPKQVRKFKEAYSDLPKNDWVDAFVIADHLRFGRINREVYMDDYRYKALQTLTRARFDVIQNLTREKQRFANYLFLKCSGMAQDKDIQNTSATTIALMEHFETVDDLANADLEELTAFITETGRGKFADPDATAKAVRAAAKGSYRLPKTVNDTVNQAMAVSIASMRALKGQVKVLDKAIEQQFEIIPNTLTSIPGIGKVYSAGIIAEIGDIHRFDSQASVAKYAGLVWNRSQSGDFEAENSRMIKSGNRYLRYYLLEAANSVRRCDSEFRRYYDLKFKEVNKYQHKRALALTARKLVRLVFRLLKDNRLYIPPEG

SEQ ID NO: 110029 - protein, 340 aa, unidentified
MQAIRFGIDLAKSVFQVHGVDAEGRVVVQRQLRREQMLTFFAKQPPALIGMEACGSAHYWARELSKLGHEVKLMPAAYVKAYLKRNKNDVRDAEACCEAVGRPTMRFVPIKTVERQCARAIHRARDLLVRQRTQLANAVRGLLYELGQTSAKGSAGIGALLARIEAADKAIPAAMLACLTPLAGQWRALDAAIKQYDEQILAQVRANPAAVRLMKIPGVGPISAHAVIAAIGDGRQFASARDFAAWVGLTRKNHDTGGVARLTGHISRAGDTGLRRLLILGASAWLRQVRVKPDKGSAWVQGVLGRRPVKVAVVAQAAKTARIIWALLNSGQDYRVPAAA

SEQ ID NO: 110030 - protein, 345 aa, unidentified
MIIGCDFHPSWQQIAWLDSETGETGERKLVHASGDATRFYQQLEAPVLIGMEATGNSQWFIELVQDLGHEIWIGDAAQIRASYVRKQKTDKRDAAHILKLVVEGRFPRLWTPDREQRDLRQLVLHRHKLVEIRSRVKNVLQHLALNQGMQRKAKLWSQAGQKLLRELPLKPWAACRREDLLGLLTMLNQQIGTLDQAVQQAADQHPQAKLLMTQPGVGPNTALAYVLTMGDVSRFPRGKQVASYLGLIPREESSGGRQKLGAISKQGNRLLRSLLVEAAQIAVRYDPGLRKQYLHRCHQKPKGVAKAAAARKLAVRLYWMLRTGKPYPEIVRIESSPRVALVGAS

SEQ ID NO: 110031 - protein, 423 aa, unidentified
MEMMYERVAGLDVHKATIVACARIGTGRKVTRECRTFETTTDGLLALLAWLVESRCSHVAMEATGVYWMPVWKILGDGDFVLIVANAAHIKNVPGRKTDMNDAMWIADLLACGLIKSSFVPEEEVQELRSLLRTRKQLGREQTRHVQRIQKTLTEANIQLDSVLSDIMGASGRRMIEAMIEGMRNPRQLAALASAQIKATPKQLYDALHGRLTDHHRFLLKLHLRQWDGLDATIREIDLEVEARIARMDKEVKAGEARFCDLIALLCTIPGVSTLSARTILSEIGRDMSRFPTAGHLVAWAGLCPGQNESAGKRKPARLRKGAPWLKTMLVQCAWAAKRKKDSYYKAQFFRLQARRGPQKAICAVAASILTAIYHILKNGTEHHDLGADHFNRRSTESQTKRLVAQLTKLGFEVQLQRTAEAA

SEQ ID NO: 110032 - protein, 386 aa, unidentified
MPKPADLNRCLSPLDQDHTIIAVIEMSQSSWLVAGIVPGIARQPLKKLAPDQDALLKLLHRWRAEAGQAGREISRIAVAFEAGRDGFWLARWLRAHGIEAHVIHPTSVAVSREHRRAKTDRLDTALLKRVFLGWLRGEPEHCHMAAIPTLEDEDARRPTRERECLVGERTRIVNRIKAALVRLGVRGFKPTVRNALEHLDALRTPEGTALPPNTRAELHRDMARLHFVTEQIQQIEAARGERLEQAGAGPNAMVRLLAQVVGVGIETADMLVHEVLSRNLRDRRAVARYAGLTGSPDESGSRRREKGLAKAGNARVRRGMIQLAWRFLLHQKESALAQWYRARTADARGSTRKTLIVALARKLLIALWRMVTTGEAPTGVVLRPAA

SEQ ID NO: 110033 - protein, 413 aa, unidentified
MKEVYRRCCGMDVHKDTVVVCVLPPVGGEGKAIRKTYGTFRNDLIRMRVWLKQLKVSEIAMESTGVYWRPLWNVLEEEGFRLLLVNPAQVKALAGRKSDGRDAQRIAEFLQDRRLDASFVPPAEIRQLRMMLRHRIALLEQRNEVHNQIRDLFETAGLKLSSVVSDLLGVSGRRILEALIAGEQSPEILCWKVRGRLRAKEKLVKESLKGYFTEFHRSMLESHYKHYRFLTSEIGIFEERIARAMKPYDSQIDLLVSIPGVDRIVAWHLIAELGMDPTTFPDADHCASWAGLVPGQNESAGKQKSTRCRKGNRTLRRVLTQAAWAASHCKAGYMPAFFRRVKSRRGWAKAIVATAHKILTIAFNVLRTGTPYHDLGHDYFDRLNPARATKKLVARLEALGHHVQLSPLARSNA

SEQ ID NO: 110034 - protein, 346 aa, unidentified
MKKIFIGIDFSKEKFDVVIIMAENLEEKAPRVHEQFANDKAGYRKFLKWVKENSHGVDMSLWLFCGENTGDYSKGLANFLYGKGCDMWLENAKCIKDSCGIRRLKSDRADAAMIAEYAMRNHDRMTLYEPLSGALAQLRELFLFRQMNVRKRSGYIVRKGEKGRTLDSSPAKSFMARKCKHMIAELDKTIKECDKMIEALIASDRDLQETYEIVTSVPGIGAQNAVCMMVYTDNFKRFDCNPRKIACYYGIAPFGHDSGTSVHCDPHVHYMANKTIKGILTQAALCAINHCPPVAHYYARLIERGKKTMVALNNVKNKLVRIVTALVRTKQKFIPEYEFAKRYAMD

SEQ ID NO: 110035 - protein, 355 aa, unidentified
MSMKITDDLKDLAVVGVDIGKDTFHLVGFDSAGELVLRKKIKRLALNQTFEKFPQCVVGMEACLSAHFVSRTLRGLGFEPRIIPAIYVKPFIKGQKNDYNDAEAIAEAALRPNLPTVSEKSQDQLDLQALHRVRSRLVSRRTAVINQIRAFLIEQGITVRRGLRALKNSFDAILEQRHDEISPRMRDILLGLRSDWAWLDERIEIVSTEIESISQSEENCARVMTIPGIGPMISTAMVAAIGLGEAFDRGRDFAAWVGLVPRQYSTGGRTVLGRISKRGSRYLRMLLVQAAKVILMRPHNWPKFSFGQWLGRAAERMHKNKLAVALANKLARIAWSVLRHGKAFDAQPDEMMAGI

SEQ ID NO: 110036 - protein, 412 aa, unidentified
MELLHQRCAGLDVHKQSVVAAVRLAVEGKVITEVRTFATTTQGLLSLSDWLAENGCTHVAMEATGVYWKPVWHVLSDGDFELVLANAAHVKNVPGRKTDASDAAWLAELLAHGLIRGSFVPDGPTQDMRALLRTRKQLTREKTRHTQRIHKTLEDANIKLDAVLADVLGRSGRAMLEALVAGESDPVRLAALAHAGVKCPQEKLREALRGRVREHHRFLLRLHLGQIDGLDAAIATLDREVDANLGPFRAAVEQVSTIPGVKALGAQAIVCEIGTDMSRFPTVGHLLSWAGMCPRNDESAGKRRSRRLRKGAPWLKTVLVQCAWAAIRKKGSYLQAQYLRLKSRRGPQKAICAVAASILTAVYHMLKDGTLYHDLGSDHFQRRSKTTQTQRLVTRLQHLGYAVEIKPLPTAA

SEQ ID NO: 110037 - protein, 437 aa, unidentified
MVPHAGGAIEEEKTMDILHERVAGLDVHKNTVVACVRIMTGKETTRECRTFATTTDGLLALRAWLSECQCTHVAMEATGVYWTPVWRILSEGDFELIVANAAHIKNVPGRKTDMNDAMWLADLLAFGLIKASFVPTEPMHELRSLTRTRKQLVREQTRHVQRIQKTLAEANIRLDSVISDIMGASGRRIIEAMIAGVRQPHKLADLAGKQIKATPKELYDALHGRLTDHHRFLLDLHLRQWDGLDTTIRTIDLEIDQRIDRMDEDRAAGASPFRTLIGNADTVPGVSAVAAPAILSEIGCDMSRFPSAGHLLAWAGMCPGQNESAGKRKPSRLRKGAPWLKTMLVQCAWAAIRKKGSYYQAQFLRLRHRRGPQKAICAVAASILTAIYHMLKDGTEHHDLGADYFDRRSTETKAKHLVARLTKLGFTVQLQPSAKAA

SEQ ID NO: 110038 - protein, 428 aa, unidentified
MNYNTQNAKIESITEKTLIVGIDVGSETHYARAFDWRNYEYSKKPLEFSNNEAGFVTFKVWMEELAEKYGKDVVIPGMEPTGHYWFNLGAYLQDNGMKPVHVNPHHVKKSKELDDNNPNKNDRKDPKTIAALVNEGRFSYPYIPTGVYAEIRSLSNLRLQAQEEITRIKNRIARWFSIYFPEIKDVYKNPGAVSGLMILKVAPLPKDIVKLGVDGVNQIWRDAKLRAAGLKRAKTLVTAAEHSIGSQEACDSARIELKILLNDYEIYHQREEELMELIEEKLSEVPYIDKLLEIKGIGMKTVSGFVAEVGDIKRFDNPKQLQKLAGYAIVECSSGKHKGESHISYRGRKRLRYVLYEAAISLIARNTEFKEIHRYYQTRGKNSLKKMQSVIAVACKALRIFYAILTKGVTYDGAKMLQDIKRPQLKVA

SEQ ID NO: 110039 - protein, 344 aa, unidentified
MTDVSILAIDLAKHSFQVCATTAEGVIVFNRKYTRGKLSELLASHPHCLVAMEACATSHYWGREAQGHGHDVRLIPPIYVKPFVKRSKNDANDAAAIAVAVRQPDMRFVAVKSPDQQAQAMLFRTHQTFTRQRSQLLITLRGHLAEHGIIVTKGNAALIAYEEVLEAQPDLVPDLVLEAARLYFHQIAQLNNSIAAFERQMKDTAKRSDTARRLQTMPGIGPINAAAFLAFAPPMESFQRGRDFAAWLGLVPRQHSTGGKTRLGRVSKMGQSDMRRLLITGATVCLRWAVAKGIDPQSWLGRLLARKPAKMVAVAMANKMARALWAMMTKGKDYSGNLVQYAKP

SEQ ID NO: 110040 - protein, 336 aa, unidentified
MTTLHIGVDIAKASFAGACWKNGSGSRWGAFTNDAEGFQELCKRVDAEREPDETVHLVLEPTGGYELALVLFAREQGWTVYLPNPARARAWAVSKGRRGKTDAMDALTLAQYGYEQKPHPQPEMPTRLQEMENLLRRKDDLERMLRQERNRQQSLGGRPGVPDAVTGSIDRVIEALEEDLEKIQEAIDEFMGQHEDLKAEARRLLTVPGVGEKNVLYILALLYRWSVLTQGKGQAKSLVALVGLDPKPYQSGTSVWKAASISRMGNREMRRRLYLSALGGIRGDNALRRFYDHLLEENKKKKVALVAAARKVLVWSWAVYRQGCAFDPTRVLPATA

SEQ ID NO: 110041 - protein, 424 aa, unidentified
MNFTQNDRLKQVTANTLIVGVDVGSQTHFCRAFDWRGFELSRRVFKFSNDRMGFLTFLRWTEELMNKTEMKKVIVGCEPTGCYWLTFQKFLQDHDVKLVTVNPFTVNRSKELDDNSPEKSDLKDPKTIAMLVKEGRYSTSYLPEGVYAEIREASVCRDQIMKQHVRLSNQIQGWLQKFFPEYLDCYSDWDSTSGLMLLKSAPLPQDILKIGAGGINQIWRDAKVRAAGLKRAQTLVEAAQESVGLEAGEAARLEIWVLVNDYILKAEQLKRLDDYLEEKVKEVPNMEKLLAIKGVGMSTVIGFIAEVGDIGRFTDPKQIQKLAGLEIVKKSSGKKKGQPRISKRGRRKLRRTMYESARALMNWNPAFQDVFLYYRNRTRNPLGGMQAKIAVACKAIRVFYVILQTGCDFDEEKFRRDIIRPEAA

SEQ ID NO: 110042 - protein, 350 aa, unidentified
MTIVDSSVLTAVTGGVDTHVDFHVAAALDHIGGLLGVETFPVSDAGYSSLLEWLGGFGTVVKVGVEGTGSYGAGLFRFLHRHGIEVVEVDRPDRQLRHREGKSDPTDAVAAARAALSGKATGRPKLGNGPVEQMRILTVARRSAREQRIQTLNQIRHLVFCAPEAIRERFIGRYQITMLKEMTAMRPRPGADPVAYVTLITLRDLARRIGQLDVEMKWISGQLKGLVSEVAPSLLDVHGLGPDGAAVLLVAAGDNPGRIRSEAAWAHLCGVAPIPASSGKTIRHRLNRGGNRQANSVLYQIVICRMSTDPRTRLYVNRRRADGRTTGEIVRILKRYAAREIYKHLPQDIT

SEQ ID NO: 110043 - protein, 411 aa, unidentified
METVIERCAGLDVHKDTVVACVRVPAPGGGRHQVVETFGTTTTALLALRDWLAAHAVTTVGMESTGVYWKPIYYVLEDDFRCWLLNARHLRNVPGRKTDVADAAWIAQLVEHGLVRPSFVPPKPIRELRHLTRYRKAQIEERTRESQRLDKVLQDAGIKLSSVASDLLGVSGRAMLRALVEGSHDPTVLAELARGTLRNKLPALREALRGRFSAHHRLLVSAILAKLEFLDGLIGELSAEIERVIAPFAPAVALLRTIPGVDHRTAEAVIAEIGVDMRRFGAAGRLASWAGMCPGNNDSAGKHGCGTTRKGSKWLRTHLTQAAKAASRTKRTYLAAQYARLRGRRGTAKATIAVAHSILVAAYHMLDRNQPYHDLGPDYFRARHSREHHLRRLMRQIEALGYKVSVEQEAA

SEQ ID NO: 110044 - protein, 354 aa, unidentified
MSQTPNTAVAVIGIDIGKNSFHVVGHDARGAIVLRQKWSRGQVEARLANIPPCLIGMEACVGAHHLSRKLASLGHDARLMPAKYVRPYSKGQKNDFNDAEAIAEAVQRPTMKFVAIKTAEQLDLQALHRVRERLVSQRTGIINQIRAFMLERGIAVRQGIGFLRTELPTILATRTDALSPRMLRVIEELAGDWRRLDQRIDGLSGEIEALARQDQACSRLMTVPGIGPIISSAMVAAIGTGDVFSKGRDFGAWLGLVPKQISTGDRTILGKISRRGNRYLRVLFVQAAWVVLVRIKNWERYGLKSWIEAAKKRLHHNVLAIALANKLARIAWAVLAKGRAFELTRTDDADVRPA

SEQ ID NO: 110045 - protein, 391 aa, unidentified
MDNAWAGIDAGKEFHWARVVGIEGETLLSRKVENDEADLRKLIGEVLPLAEEITWATDQPGGTAALLLALLWERNQKVIYIPGLTVDRARDTYRGESKTDAQDAYVIADQARMRGDLSELQANEGELAELQLLISRRRDLVTDRSRTITRLREALLALFPALERTLDLNNSSALTLVAHYQTPTALRRAGYKRVATYLKNRGIKGADTLAKKALAAAESQSAVLPAQDVASAIVAELAREALVLKQRIERVDEELKHRFFIRPEASILTSLPGMGPVLGAEFLVAAGDLSAFSSADQLAAYAGLVPAAHDSGKRAGNDHRMRGGNKVLKRAFYQSAFASLRTSPVSRAYYDRKRREGKRHTQAVIALARRRVNVLWAMLRDGTIYKAPSAA

SEQ ID NO: 110046 - protein, 259 aa, unidentified
MEAATVGLDLAKHVFQVHCADAQGRPLIRKRLRRAQVQAFFEALPPCLVGMEARASAHHWARELSKLGHRIRLVPPQYARPFVQTNKNDTADAEAICEAIQRPTMHFAPAKSMDQQAILTLHRSRDLLVRQRTMLVNALRGHCAEFGLIDLARIGSAQLPELAQAALKFIVDQIENISDQIKQIEIKLRAWHRQNPDSQRLATIPGIGLIVATALSATIGSAAQFKSGRQLAAWIGLVPRQFSTGGKPKLGGISKRGDC

SEQ ID NO: 110047 - protein, 348 aa, unidentified
MAMLADTVELVIGVDTHKHTHTAAVVVAATGVVLEQATVPATPAGYRQLLGLADRRVGRRVWAIEGTGGYGAGLTRFLHAHAEQVIELDRPKRAARRHGAKSDPLDAIRAAREALGRDQLAQPRAAGQRPALQVRLTARRSAVQAATDAQRQLHALVVAAPDTLRSRLRGLTTPRLVSTCGRLRLQTPWDTETTATAASLRALARRIQHLNTEIAEHTRAITALVRAWHPELLTPTGAGPIVAAVVLCAWSHPGRCHTDAAFAMLGGAAPIPASSGQTVRVRLNRSGDRHLNQALHLIVLTRLRYDPATRAYAQRRRAEGKTNREIRRCLVRYVARQLYRLLEAQPAL

SEQ ID NO: 110048 - protein, 416 aa, unidentified
MQVLYPRCCGLDVHKRSITGCCLWFNNTRQLQEETRQFGTHTTELRRLATWLREHEVKKVVMEATGSYWRPVWNLLEMEGFEQTLANPQHMKAVLGRKTDKKDARWSADLFQHGLIAPSFVPTQQMRHLRDLTRIRTKVMQDHTRVVNRIEAVLEDTNIKLSSVVSDIMGVSAQAMLQGLLNGERNTAKLAELAQGRMRPKVPQLKEALEGNLQPHHEFVLKRLFMQSRFLQQQQRAVDREIEHRLDDEMRQAIALWDTIPGVDENIATTMAAEMGIRTEQFADGPHLASWTAMCPGNHESAGKRKSGKTRKGNRWLRGALTQAAWAASHTKGTYLSGLFRRISARRGAKRAIVAVGHSILISAFYMWKNKQPYKELGDAYLDKIKPEKTANRLLKRLAKLGYVVAVTQVPTPQAQ

SEQ ID NO: 110049 - protein, 399 aa, unidentified
MECRDAPAERPRPAPGQALSRSLVALDQNRTIIAVVELSQSSWLVGGVVPGIERQPCKKLEPSPERLLAVLHRWRDEAVRAGRTITRIALAFEAGRDGFWLARWLEARGVEAHVIHPSSVAVSREHRRAKTDRLDTELLKRGFLGWLRGERGHSSMVRVPTIAEEDAKRPNRERECLVGERTRIVNRIKATLARMGIRNFKPTLRKAAERLATVHTPEGMPLPPNAVAELQRDMARLGFVVSQIREIEEARQKRLEQEPETGPHAMVRLLARIVGVGVETADMLVHEVLSRPMRDRRAVARYAGLTGAPDESGAQRREQGLARAGNARVRRGMIQLAWRFLMFQKESALALWYRARTADSRIGTRKTMIVALARKLVIALWRFVTTGELLEGVVLRPAS

SEQ ID NO: 110050 - protein, 390 aa, unidentified
MTNYDVYAGVDVGKSFHWIYATDADGKRIISRKINQNETELQEMFTSLRAGERNVLVVVDQPKNIGALTLACAKQAGCHTMFLPGLAMRRAAGILPGEAKTDARDAEVISMAARQIPASLRPVSTADPERAELDALVAWDSDVVHDRTREINRLRGLLVEVNPHFEAAIDDLTSPFILAIIQRFGGPWGMRTAGKTKIRAWASRQKHVPAATLETLIETAWTMENKPPGTTTREAGPIPAAAARISELTTIRDNIETQISQRMENNITYQMLMTMPGVGIHTASSLVTLVDITLFKNADHLASYAGIAPKTHDSGTSIKGETASRAGNKALKNTLFMSAFTSLKADPKSRAYYDTKRAAGKKHNTAVLSLARRRIKIMYAIMRDNTPYHT

SEQ ID NO: 110051 - protein, 355 aa, unidentified
MHATTVAVDLAKDIFELAFADADHRIVQRKRLSRRAFGRVLENHTPVRVVMEACSSAHYWARRFVRLGHTVRLLPARDVRPYVRRNKTDRTDAAGLLEADRCTQIDAVPIKSPEQQSVQALHRIREQLKAQRTATINLVRGVLREFGIVIGLGAAKVRPAVLAALEDGSNELPMPLRHTLAEMLEHLANLTHSMSGIESRLKVIAQDDPVTQRYQQVPGVGVLTATALHASAGSLDRFHSGRHFSAWLGLTPREHSSGSQRRLGRISRRGDGYLRLLLIHGARAALRAAQVRAHRQQPLTHLQTWALTTQQRIGHNKAAVALANKTARRLWAIQHHHTAFNPNHVSVRGNLQSST

SEQ ID NO: 110052 - protein, 458 aa, unidentified
MNDSRPTPKRLPLDSLACVYPNAAGLDIGAREIVAAVPPDRTTTPVRAFATFTPDLHQLVEWLIQSGIDTVAMESTGVYWVPIYELLEQNGIKPFLVNARHVKTVPGRKSDWNDAQWLQKLHALGLLQGSFRPDAEMCVLRTLLRHRAELIQHRAPHILHMQKALKLMNLQLPEVLTNIVGVTGQAILRAIVAGERDALQLARLRQPNCQSTTADIVKALTGDWREEQVFVLKQSLELFDYYTQKITECDHQIEQQFSTMKPRFDSTPPPATVPRVKRTQQKNQPNYDAQTYLLHLTGIDLTAVTGISGSSAQTILSEIGTDMSRWPTVKHFCSWLGLAPHNDISGGQVLHARTLKVGNRAAQALRQSVQSVARSDSAYGAYFRAMRARLGPQQAAVATAHKLARVIYHLLKYRDAFQAESAEEYERQRQDRELKYLKRRANKFGYQLMPVPEPAGVT

SEQ ID NO: 110053 - protein, 423 aa, unidentified
MKLASEQSFTALIGVDWSDKKHDFCLLGADSQQREQGVVAHRPEAIDQWARVLLQRFGGPIAVCLEIAKGPLVHALQRYEFLVLFPVNPAMLAKYREAFVPSRAKDDPSDAEIALELLIRHPEKLQALKTQSAPMRALTTLVEQRRNLVGDKTRITNRLCSTLKDYFPQALDWFEHRDTLLFCDFLQRWPSLKHVKRARQATLRSFFWAHNMRRSELIEERLCAIRCASALTDDVSVIGPCQLLVQALVAQLRVTLQAIDVFDAQISEVAKRLPDYALFAALPGAGAILAPRLLVAFGEQRERYASAAQLQQYAGVAPVLERSGNKCWVHWRMACPTFLRQTFVEWAGSTIPRSFWASAYYQRQRDKGCSHQAALRALAYKWIRIVYRCWQTRTPYDESAYLLALKRRGSPLLVALSVAPPSA

SEQ ID NO: 110054 - protein, 345 aa, unidentified
MWIIGCDFHPGSESLSIFDNRSEQIREFKLSHPVEAIAFYRGLQTSARVGIEAGSPCAWFRRLLAECGHELWIGDAAKIRAAEPRKKKTDLEDARLIRRLLVEDRFPRIWVPTEVERDARQLLMDRHHRMRARTAAKNQLQFLAMNQGVQKGKKLWTPSGRQLLRDLEMMPHAARRRDELLQWVAMLDRQIAELDVLIGEEVKMRPEALRLMTHPGIGPQTALATVLTLGDISRFQHARQVPAYLGLVPSEYSSGGKQRLGHISKQGSALMRFLLVEAGQTAVRGDEQLRRAYKRLWVRKGNRSVAKVMVARRLAVRLYWMLRNRWTYAELVRHAGQPESFCGKQ

SEQ ID NO: 110055 - protein, 474 aa, unidentified
MSERTVRRLVGIDLGIASQHTVRVLDGDGNLVKAARCVPAVASLTVLEQAALAGTPAGTVLEVIFEPTGPAWFPIAVFFSARGHRVFRVSSAKASDLRKFFRKHAKSNGIDADTLARLPLVDPAGLRQLELAEAGAAALDRRVRACDRLTQAATAHKVRIKDLARQLMPMTPLTADLGQADLAVLERYADPRALVKTGETRLTRLITKVSHGQQGAERAAQWLSAAVSAIELYGDHPAVPYAELAAEVATEVCLLKAITAELAAHATEREKAYLLTDTGQLARSLPGFGQIGAPALVAGMGRPGRFADGAHFKSYTGLAPRASETGETDRKGEPMSKAGPSLLRTTLIRAADHARKVDPQLARIYWIQMTERGAGHLKACCVTAAHLAERAWAVMHRGTPYVICDNDGNPVTPEQAKKIIAEKWTVPEDVRKRRRSGKQKGKAPQQAPAGPGKRGDLPRPRSSRLPRLPVKRSP

SEQ ID NO: 110056 - protein, 347 aa, unidentified
MDHVGLDLGKRESQIAILAEDGELINMRIRTERRRLVEMFGRRPKARILMEASTESEWVARCLEDLGHEVIVADPNYAPMYAQRTRRVKTDRRDAHALAHACRAGTYRPAHRTSTERRELRARLAVREAVVRTRAAWITRIQSLVRREGCRFRTGAPETFLTRVEELALPPALMTVIAPLVELLGPINKQIAVLDEELERIVAADEVARHLTTVPGVGPVTATAYVATVDDVTRFRGAHQVEAYLGLVPSEWSSSEVQRRGHITKAGNSRMRWLLVQAAWCILRRRKRPQTAALRDWAERIAGRRGRSIAVVALARRLAGILFAIWRDGTVYDATKVRGPLPARRAA

SEQ ID NO: 110057 - protein, 310 aa, unidentified
MFSYPAGIDVSKDSLQVQVDLLDVGVSCPNAEGDFPGLIGWLLLHQVGRVLLEATGGYERNVMKALQAAGFEVIRINPCRAKNFAKAMGQQAKTDPIDARLLAQFAAVIKSANSRVTSAEQDDLRALVQQRENFVQQRDDDKRRLKTASSEAVKPALQSHIDYLCEAVKLIEKLIHQSAESLDREKVTRLRSVKGIGLVTAASVMAYLPELGEVGRHQIAALAGIAPYNDDSGTHKGKRYISGGRFAARRALYMACWSVIRFQPDFNARYKALREKGKCAKVALIACMRVLLVRLNAMIRDGSEWKGRIA

SEQ ID NO: 110058 - protein, 407 aa, unidentified
MRLFIGDDWAEDHHDVEVMDQAGRVLARARLPEGVAGMGRLHALAGQHLGEGAEDGEVLIGIETDRGPWVAALAAAGYVVYPVNPLQASRYRARHGVSGAKSDQGDSHVLADMVRADSHQLRPAAGDTAEAGAVKVVARAHKTLIWERTRQVQRLRHQLREYFPAALEAFADLDAPDALELLAKAPDPARAARLTRAQVSAALKRARRHHIAGKTDAILAALRGEQLVQPPALTAAYAAAARSLIALIATLNDQVKTLHGQVEDHFGRHPDAEIYRSQPGMGAILGARVPGEFGDDPHRYVSAKARKNYAATSPITRASGKKKVVAARFIHNGRLIDALMAWAFASLTASPGARTFYDELRAKDIEHNDALRRLASRLTGILHGCLKTRTRYDEATAWSHREASLAA

SEQ ID NO: 110059 - protein, 412 aa, unidentified
MKDLLEISCGLDVHKEKIVACILTGPLGKPTRSEIREFSTLIPDMIALRNWIVSKNCHHVAMESTGIYWMAIYEILEDAFSGDITLLVVNARHMKNVPGKKTDMRDSEWISTLLRAGLLNGSFIPEKRIREFRDLNRYRKSVIRDITSQKNRIEKFLQSSGFRLSSFISDIFGASGRNIILHLIEHGQIDKTALDSCLKTKTRNRIDEILMSVNGTLSEHQKAFLRILMTHYDSLKKHLAEIETSLEEDMAPFALQVEQLNSIYGISTTASCAIIAEIGIDMKPFKTAEHICSWAGLCPGNNESAGKRKSTSVTKGNPYIKSMLCEIAWVIAGKRNTYLSAWYWRIKQKKGAKKAIVALARKLLVIIYTMLKQGTVFDESCFETRRKHCEQKQLSRYIRELEKHGYHVEAQS

SEQ ID NO: 110060 - protein, 427 aa, unidentified
MDFKQNQKINQVTEQTLVVGIDIAKRTHYACIVDDRGRVLQKSFSVPQAGNGFELFYQRVLAAMKEHEKSEVIVGIEPTGHYWLNLAYFLEERGIPLVMVNPMHVKRSKELDDNLPTKHDRKDALVIARLVKDGRFSYPRILKGMEAELRVGSTFRSKLTEELGAVKNMIIRWLDRYFPEFVQVFPSFGKMALAALECTPFPSDLYQKQPDEVLSLFRKVEGLKSPQRPKAVRLIEVAAGSIGVTEGLEMARIEIATLVRRYHQLEQDIESITGQLIELVKTSVEYEWLSTVPGLGDTTIVDLLAEIGSFSHYQDPRQLIKLAGLTLRENSSGLHKGQKRISKRGRRKLRALLFRVMMPMIRHNEAFRKLHEYYTYTNRQVNPLRKKQSIVVLCGKLLKVLHGISTKHKPFDAQRMMRDIPGLAEAE

SEQ ID NO: 110061 - protein, 355 aa, unidentified
MSEEKYIGMDVHQATISVAVMDAQGKLIMECLLETKAATIVEFIQGLQGTLSLTFEEGTSAAWLHDLLKPHVSRLVVCDPRKAALLKEGNKSDRIDARKLAELLRTHQLKPVYHGEHGVRTLKELGRSYLTLTKDVTRVMNRIKSLYRSWAIPCSGTTVYAPRHHAEWLAKIGEPGVRVRAERLYQQLDSLQPVRLQARRELLLESHKHPAVKLLRQIPSIGPIRAALLVALLQTPHRFRTKRQLWAYSGFAVETHDSGEYRLVRGKVQRNRERITVRGLNDNHNKDLKNLFKSAAISASTRPGPLHDFYVARIAKGMRPTMARLTLARKIVTITLTIWKKGVSFDPQQLHRQAA

SEQ ID NO: 110062 - protein, 400 aa, unidentified
MLSIGIDVSKGKSTVCGMKPGGEIVYTPFEVQHTREGMSELVSLLHNSGEEVRAVLESTGSYHCPVVAALLENGIFVSVVNSLRMKRFCSQSIRKVKTDRIDAMQIALYGLAYWQELQPTKLPEDTYRELQLLARQYYQMTSLLIKAKVDFNAICDQVLPGMQELMSDHAGRHKLSDFVLRYRHTTHILEMGETRFRKDYCKWAEKKGYRNCERMAALIFATAQNGIPVLPNAPSTQIVITEAIRVLHTVEASRDAILTQMQALAKTLPEYSLVREMPCIGDTLAPRLIAEIGDVRRFHSKRALIAYAGIDAPPYQSGKFCANNRHISKRGNRYLRKTGYEVMQSYVMHKPANDPIFTFIEKKRGEGKSGKLAMVAGLNKFLRVYYGKVTELYRSLPAIE

SEQ ID NO: 110063 - protein, 428 aa, unidentified
MIPAVLERCAGIDVHKKFVMVCALLGPAQANPEAKIRRFGTYNAELEQLRDWLQELNCMHVVMESTGPYWKPVFNVLEEAGVQTTLANPQQVKNLRGHKTDMKDCQWLAHLLRHGMIRPSYIPPRPIRELRDLTRRRKQLVRNGAMERNRVQKLLEEANVKLGNVLSDVFGASGQEMLFALVQGEASAEQIAQLAKQRARKKIPQIQAALEGHRMNQTQRDLISQCMSHMAFLEQQIEEVDQQIQDKIRNFGLSQSYALLQTVPGMKKEAAATVLAEVGATVEAFSTPAKLSSWAGVCPGNNESAGKRKSTRTTKGNPYLRDMLLECAWASSHRKNSQMQHRYQRLQLRKGYKRAIVAVAHALIQAVYYVLSTRQPFVDTAEPTRSPATVHRLIRHHTRRLRKLNCWLERRAQTAQTSTFHKPQVTSG

SEQ ID NO: 110064 - protein, 373 aa, unidentified
MPKHSTAFGMDVHLRSTTVCALDADTGEAVTRRFPGNPWGEIAGWMDGFPGPSLAAYESGYLGFAPQRELAGLGVECVVAAVSKIPRSAADSASKNDRNDAARMAKAILAHDISPVWVPSPEVEGIRDLAGAYDGATARLATAKQRLLAFLARRGFVYGGTTPAGNPRKYWTYDFLRWLDKVRPEDDGGVRTLAALRNEVEAAAEARADLLSEYGAAVDASPIAAEVAALQSIKGCAFALAAAFSAEVGDFTRFRSGRQVTAYFGLAPSQRSSGDSVRLGGISGAGNALVRKLAVEGSWCYAAARHQPKLMPRDTGVPLEIRMHGRKGSERLLRRREEMLARGVPAAKANAATAAELVRWLWALGMMCREGAE

SEQ ID NO: 110065 - protein, 410 aa, unidentified
MRRVIGMDIHRTFAEVVVWEDGRLRPAGRVDMTRAGLKGFGRNLTNEDEVVVEATGNAMAVVRVLTPYVARVIVANPLQVKAIAHARIKTDKIDAGALASLRAADFLPEVWLPDVETERMRRLVARRNQVVRHRTRVKNEVHAILHAHLVPPCPHADLFGRLGRLWLDGQPLPDDERAAIARHLRELDRLGEDLGVLDTDVAQAAIDDPAVKRLLTITGVNLVVAAGLVAAIGDVRRFADPQKLVSYVGLNPRVRQSGLGLAQHGRISKHGRAHARAMLVEAAWAAAKAPGPLRAFFLRIRARRGHQVAAVAVARKLAVLCWHLLTKGADYQWARPALVANKLRAMELQAGAPAKKGNKRGAAYAYNVKQLRDREIDLARHAEHAYERFVQHWQPRRRTGRTGAANEERR

SEQ ID NO: 110066 - protein, 342 aa, unidentified
MKEVSIVGVDLAKRVFQLHGARADGTVAFRKKVTRGQVLQVLSGLPKCIVAMEACATAHFWAREIGKLGHSVRLIPPIYVKPFVKRQKNDAADAEAIAEAASRPTMRFVEPKSEKQQARAMVFRTRDLLVRQRTQLINALRAHLAEHGVIAAQGIANVAALGALIEQTGPDLDLMVVETARLYLDQIEVLSDRIATLEKVLKLEAARSQSTARLMTMPGIGPVTAMAVDAFAPSMTAFKRGRDFAAWLGLVPRQHSSGGKQVLGRTSKMGQRDIRRLLIIGAMTVIRWADRKGVSENSWLGRMLSRKPRMLVAIALANKMARSIWAMMTKNEDYRTPALSAG

SEQ ID NO: 110067 - protein, 320 aa, unidentified
MQCIGVDVSKQELVTYDGVRGQTFPNDKQLGKFAEYLDSVKHAVVVFEPTSTYSHRLHALCARRSIATCQLNPRVVPNLRKASRSRSKTDKTDAELLYQYGMDRGKDEAREAKQVDRLVHALSVQLALYRVIQKARITYQGLLEAWINDPSTPKTSINRLGADIASMKGKEARCVARAEEIIEEDQQASSSLQALMSIPGLGPITSITLLAFFRRYQGANREQTVALAGLDPIQYQSGTSVHRRGKISKRGSRELRKRLYEATLSAARYNVSVRQLYQRLKDAGKPEKVARTAAARKLLLIAHAIYKTGEHYRSPVNQAT

SEQ ID NO: 110068 - protein, 358 aa, unidentified
MKYVGVDLHKNQFTAYDSSTGRYRNYGSNAIGIMSFIRDCKDTTTGEQIVVGVESTGNTRYFKRLLEAERIQVKVINTMKFKVITESVKKTDKHDASTIAEFLGKDMLPEAWLCSEYSERLRRLLHVRKTLVKAIVTTKNQIHGMVTAYGYEDKKSSLQSKRGRHMIMNTLASTEIGLVVQLLMDTIESLSENVKNIEKKIEELVEGDTRIELLMSIPGCGRITAWTIRAYTDDMNRFKSAQQYAAYVGVVPYVHNSNTLIRHGKITKHGPEPLRTAFVQLVMGINRMRALHNYRIMKRYRFIKENKGSGKAIIATARKLTHIVWHILTNNEPFNPDLQLRSSWESNRHVQFEEKRFA

SEQ ID NO: 110069 - protein, 338 aa, unidentified
MAIVMGLDQHRAQITAEWIDTDTGEVSRSRISPAHRAGVRKFAERFRGQELEVALEATTGWRFVAEELRRVGAVVHLAEPAETAARRGNKKRAKSDRADARHVRELLMIGRLPESWIAPDHLLDLRSRVRLRHTLSHQRGEWQQRIQAVLYHHGCPHRRNLMTAEGLGWLKAQPLPAGAREQVTVALGMIDALDAQLAPLDKELRAYARRQLGCKALMKHFGVGELTAVTILAELGDVDRFSSSREAVRYAGLDITVHQSDQRRSPGHLSRQGPPALRWALFEAAQSAARQGSPDRDYFAQAAQRLGANRACLSVARKLLKRSYHTLRELGEEALQPA

SEQ ID NO: 110070 - protein, 421 aa, unidentified
MKKIKPKTFKAVNQKILIATIDGGKDTHYGYYRWPDGTEGKSLPFWNNGRGFKEFWERISSVADAQGFEEIVVGFESTGPYMEPLAQFLRYKKSVRLVQVNPMHTKRLKELSGNSPLKTDRKDPKVIADIIELGHALTVVIPEGPAAELRRLTQGRERTIESRTRLFNQLQSLLVITFPEFLQVMMDVKTASAQHLLRHYPTAQDIVTLGEPALAALLRKVSRGKLREDRARALFEAANESVGVLEGRSSMLLEVGLMLDTIATYDRFIEGVETEMLRHLEQIPYSRVILSLKGIGPVTAAGLIGEVGDFTKFGTISEVMKLAGLDLYEVSSGKHRGKLRISKRGRPLIRKLLYFAALSAVRKGGVMHEWYQRALGRGMIKTKALVAVSRKLLGVIFALIRDHSVYVENYTKQKPILQEAA

SEQ ID NO: 110071 - protein, 408 aa, unidentified
MQVEHPVCCGIDVHKETLTACLRRVDANGQVSKEGREFATTYTSLLALSDWLVEQHCPVVAMESTGVYWKPVYHVLAGTVEVYIGNAHELRSRPGKKTDKRDAAWIAELLAHGLIRPSFVPPPEICALRDVTRTRVALVQTRSQSKNRVHKLLEDTNLKLGSVVSDLFGATGRRMLAALVAGERDPRVLASLALGSLKHKRPQLELALTGQFTAHHGTLLGLLLELIAVLDRQIATLDQQIGALVAPLQQQVAQLDSIPGVDIIAARDILAEIGTDMSRFGDAARLASWAGVCPGNHESAGKRYRGKTRKGNRYLRRVLVQCAWGARKTPTFLGRTFRRLEVRLGKKKAALAIAHKMLVIVYHLLAAGACYEETRYDQWNPKQEARERQRALKALERLGYTVTIERAA

SEQ ID NO: 110072 - protein, 341 aa, unidentified
MSLIKAIGIDLAKSIFSIHGVDTHDKCKLRKTIKRNKLLAEIAKLPPCIIGMEACSGAHYWAREFTKLGHDVRIMASKFVIPYRQNEKNDANDAEAICEAVTRPKTRFVTIKSEEQQAVLCLHRIRQGAIKDRTALINRLRGLLAEFGIVMPKGRYPAQQAITSILEDAENALPILARELLHDLWLEIKGLNQQILKHDRKLYQLANQMNAAKRLMSIPGVSEVTATAVVATVCDATEFDTSRAFSAWIGLVPKQYTTGGQVKLGRISKRGEKHIRTSLIHGARAVIANCKHKTDRTRLWVKDLIERRGFKRATVALAAKNARLIWALLHSEKEYQIDYVK

SEQ ID NO: 110073 - protein, 333 aa, unidentified
MNKITLIGIDTAKQVFHGVGVDAHGHYVWRKQLSRGRLLSRLAQLAPCEVVLEACGASHHWARSIQALGHTVRLIAPQHVKPFRRGQKNDYRDAEAIISAALSPGMHFVGIKRVEQQAEQALHRVRSRLMRDRNAAANELRGLLGEYGVVFGSGFKRLREGARCFAETEEAHTLGLVELVNDVLEEIRVLQQRMDHYEHLIEQRVQADDISRRLREELSGVGKLSASALRVKVADVRDYPSGRHFAAYLGLAPGHSGTGGKVRIGHIKRGHDRYLRQLLIHGARSALCHLGDKQDVQSRWLRGLLERRGFNIASVALAHKNARQAWAIMAREQ

SEQ ID NO: 110074 - protein, 404 aa, unidentified
MQVTFGIDVSKSNSTVCELIGESKNELTITNDRPGFIQLLHELAAFSKHPQIIFEATGVYSRRLQAFLEDYGYEYVVINPLKAKKEMNMGLRYNKTDKTDAYHLALIQRLYHHPVNQSESQTYKQLNALSRFYDQLTSDLVIAKNRLHQALQSTFPEIENLFSSAKGKNYWQIVVRYPHCDLVRREDKKQLINWLMSLKGIAFKHALRTADKLIELAHLAYPVVSCSSIEVEQVQYYAHRLLNLSDQRENLIARMVKLPNHDLENLESIPGFAQTTAIRVLAELGDLRRFSNPNKINAFIGIDPGRYQSGEMDSNLSITKHGNAVARKLLYRAIGQIDNAAKTNPCHIADYYESKKLSSQTKGFKKIAIASIHKLIRTIYALIINDQPYDYNVATHNQKDFSRN

SEQ ID NO: 110075 - protein, 392 aa, unidentified
MLFVGIDIAKRNHEASVIAQDGHVVRKAMRFANSQAGYNKFMDMVRSLSEPVVFGMEATGHYWLTLYTHLRNDGFTVHVINPTQSDALRGMYIRKTKTDSVDSVIIADVIRFGRYCETSVDPGDLQAMRELCRQRFYIIDMASDLKRKVIALLDQVFPEYEKLFSDSFGLSSMELLSQYTTPEEMLSVSSQQLAEVLKKASRGRLGAEKAVEIQDAAKNSFGIVMASSSFSPIIRQYIEQIRSLESSVDIFDTEIARLLSGFDTQLTTITGIGSTLAAVILSEIGGDIRRFSSPAKLAAYAGVDPTVKQSGDFSGTRIKMSKRGSPYLRRAIWLASTVAAFKDPVIHALYERKRAEGKDHMTVIGHVCRKMISIIFAVLRDNTPYVPAGISD

SEQ ID NO: 110076 - protein, 407 aa, unidentified
MVNVGVDLHKTQFTVCVRRCGGETFGKYPTSEEGYQAFLAEAARWQKGGEEVRVGVESTGNTRYFKGRMEDAGIGVTVINTLKLKVVTESVKKTDKHDAATIAEFLELGILPQSRLCSRTSEQLRRLLKVRSTLVRAQVVIKNQIHALLSAEGKKDVKSAELQSKRGRKRVLDALKEWENGLVAQPLLETIDRLAENVKEMEGQLRTLTAGDRMVELLMSIPGCGEIGAWTIRAYTDDIKRFSSAKKYCAYAGLVPWVQNSNETVHHGKITKRGPKELRTALVQVVMGLRRMKGKTLTWRIMERYEAMKKGKGSGKAIIATARKMATVIWNMLSEEVEFDLVKMVDRKLARKAEAMSGTLRVVKEALDEREEKPVVVVDEKKDEGVEKKAKKTGVARKTSKRKKKVG

SEQ ID NO: 110077 - protein, 347 aa, unidentified
MAIVDSARLVVGGVDTHRDSNVAAVVDMNGGLLGVESFLTTADGHRALASWMTAFGAIERVGIEGTGAYGAGIARHFIAAEVAVIEVDRPNRQKRRQHGKSDQLDAIEAARGTLSGRCAGRAKSGNSHAEALRALLVAKRSARSTRIRTLVQLRHLMFTAPDELRARLGGLSATQLVNDSAKLRPHAGGDIVVQATKTTALILARRIHALDAELATIDEQLGPIVKAAAPDLLNIFGVGIDTAAVLLVTAGDNPERITSEAAWAMLCGVAPVPATSGKIDNRFRLNSGGDRHANNAIWRIVITRLGQHDPRTVAYMTRRLAEGKSKRSIIRSLKRYVARETFQALPR

SEQ ID NO: 110078 - protein, 342 aa, unidentified
MKIIGCDFHPSFQQIAMVDTETGEETERRVTAAETVEFYSQLPMPVLVGMEACGNTLWFERLLARLGHQLWLGDASKIRAMDTRKQKTDRRDAGLLLQLLVENRFPRIWVPSLEQRDLRQLLLHRYKLIGMRRGVKNQLQHLALNQGLQRKYKLWTSAGRKLLEELALTGYTAQRRDELLLLLDDLQSRVAQLDQAVQKAAQQDRVARLLQTHPGVGPITALAYSLTLGEISRFAHSRQVVSYLGLNPAEHSSGGRQRLGGISKQGNPMLRSLLVEAGQSAARLVPELKRAYQRLKHRKHSAVAKVMVARKLAVRLYWMWRTEQPYSATRMQGSPGHFVAVV

SEQ ID NO: 110079 - protein, 345 aa, unidentified
MQSMYYVGLDVHKKTISYCVKEGSGRIHSEGKIASTRLDLDRWRSTLPQPWTAAMEATIFTGWIYDALVPYATELKVAHPLMLRAIAAAKKKNDRIDASKIADCLRCNFLPECYMASPEIRERRRTLRYRNLLVRQLVQMKNKIAVLLMEAGVSYNKQKLHKAGYFAELIGTSPDIQDGLRPLLRLCRETVVRLGKTESALVRSLQRDPLLQERIERLMTIPAVGPITALTWALEVGDVARFSSIKKAISYCGLCAAEKSSAETVKRSPLSKQRNRHLQTTLIEAAKMAPRNSPALAMLYETEKQKHNANRATLAVARKLVTYLVAVDRRQTDFLLIEKQTCTAA

SEQ ID NO: 110080 - protein, 345 aa, unidentified
MENMYYIGLDVHKKTISYCVKDGSGRIYAEAEIPATRLDLDIWMKTLPQPWTAAMEATIFTAWIYDHLKPHAAAVKVAHPLMLRAIAAAKKKNDRIDAHKIADCLRCDFLPECYMASTEIRERRRTLRYRNLLVRQAVQMKNKIAVLLMEAGVSYNKQKLHKVGYFRELLATNQDIDEGLKSLLRLCRETVVRLGKTESALVRSLQRDSLLMERVERLMTIPAVGPITALTWALEVGDVQRFSSIKKAISYCGLCGAENSSANIIKRTPLSKQRNKHLQTVLIEAAKMAPRNSPDLAMIYDREKQKDNANRATLAVARKLVAYLVAVDRRQKEFLTVERENRTAA

SEQ ID NO: 110081 - protein, 403 aa, unidentified
MNMNAVGIDVSKGKSMVAILRSYGEIISKPFEVKHTVSGIRSLIEQIQSIDGESRIVMEHTGRYYEPLVRELSKADLFVSAINPKLIKDFGDNSLRKVKSDKADAVKIARYTLDSWTELRQYSLMDEIRNQLKTMNRQFDFYMKHKTAMKNNLISILDQTYPGANTYFDSPAREDGSQKWVDFSATYWHVDCVRKLSLNAFIDHYQKWCKRRKYNFSRSKAVEIYEASKELVSILPKDDLTKLIIKQAVEQLNAASQTVERLRALMNETASKLPEYPVVMAMKGVGKSLGPQLMAEIGDVSRFTHKGAITAFAGVDPGVNESGSYEQKSVPASKRGSSTLRKTLFQVMDVLIKTKPQDDPVYLFMDKKRAQGKPYYVYMTAGANKFLRIYYGRVKEYLSSLPE

SEQ ID NO: 110082 - protein, 326 aa, unidentified
MKNIIGIDVSKDRFDVYCKTTKEYTSYSSDASDIDKLAEYCQKQEPELVVMEATGGYEFKMASVLMAKGLPVSIVNPGRVKEFAKSLGILAKTDKICARKISLFAEAVKPRQNSQIDEQRREIKELTVRREQLVKMRTAEKNRLDKAFEKTTLNSIKSTIDFLERQINDLDKTISELIEKVPRLKKKAEILTSIPGVGEKTASMLVAAMPELGTLNRRQIAMLVGVAPINRDSGKMRGKRATGGGRKGVRDKLFMPALTIVRFNPALKCFYERLVEKGKPKKVALTATMRKLVCIMNTMLQNETFWQNKLLRGEAGFGAEPQEKSI

SEQ ID NO: 110083 - protein, 337 aa, unidentified
MIHVGADLHERFCYMTAVDATGGSVKAGPVANRPLELRRWLRSLPKPVEVAVEACSFWPAFQDAVEKEVAAIHLVHPQRVKAIASAKLKNDRVDSATLAHLLRCDLLPRAWMADRGTRERRQQVRLRISLGQHRAALKNQVHAILHQHGKHSPASDTFGKQGRYWLEKIILPPVARQAVNTYCQLIDQTSQHIRKQELRLQEMASQDERAQWLASIPGVGTYSAMIILSEIGEIQRFHNAKALFSYAGLVPWVRESAGHQKRGGISRCGSPRLRWVMVEAAHTALRCSPAARKYFDRLRRRKHAHVARVALARKLLAAVFAMLRDGECFDETIFAAV

SEQ ID NO: 110084 - protein, 342 aa, unidentified
MKYVGIDLHKQTISGCVIVQERGRKKVFSRKRLECRDEAGIAAWLQELGPFEVVVEATASYQWFVKLAQPLARRVLLAHPKKLRIIAESKRKSDKLDARVLAEFLADDAIPLAYQPTPRVREHRVLVRFRHYTQRRITSVKNKLRHILAAYNADVRNLFTAAGREHLAGVQLSAADRFAADCLLSELEQHGERLTAANRELQHFAKQAPLAEREARAVLESIPNVGPVTCDTILAELGDWRRFSSQKRVVSYGGLAPGFRESAGKAKQLGITKEGSRLLRWSLVELAWRMVGKSRRWQRHYTRLEARIGAKKAIVAIARRLLGVIFSLLRNNQKYSLALEAA

SEQ ID NO: 110085 - protein, 359 aa, unidentified
MRIIGCDLHARQQTLAMLDSTTGEIVNLTLAHEGDNVREFYSNLPRPVRVGIEATGSMQWFLNLMEELGIECQVGHPANIRAAEPRKQKHDRRDADLILKLLVEKRFPSIWLPSKELLDLRGLLLHRDQWVRMRTRVQNALQAIALANGLRRGPSLWSHAGQDKLASLSLAPHTAHRRSELQALYAKFDMEIEKLNQRVEEQAWERPTALRLMTHPGVGPITALATDVFLGDPTRFVDGKALASYVGIIPREYSSGGRQRLGGLTKQGNPLLRFLWCEAAIHAVRKDPELQRFYLRKLFQKGLGKARVAVARKLGIRLWILLRDQIDYNEFCRRGPMRQKNGGTCAGMPARVIAQTVAD

SEQ ID NO: 110086 - protein, 342 aa, unidentified
MTKIIGCDFHPRFQQIAFVEQETGEFGEHRLSHPDEAKQFYGSLVGQGARIGVEATGNYRWFLRLMQELGHEVLVGDATAIRASNPRNQKTDKRDARHILRLLVEDRFPAVWQPPAENEEQRQLLLHRCRLVRMRTRIKNQLDSMAKNEGVLSPRVWAAKRREQIAALPLAGWYARRRSDLLDLLEELNQRIEPLDEAVRAAAEACSEARLLMTHPGVGPVVSLAYVLTIGDWRRFPRGKQVGSYLGLIPAEESSGSKRRLGKVSKQGNTLVRWLLVEAAATAQRYDASWHRQYVRLSMTKHHGVAKVAIAHKLAVRLYWMLRCGEDYGKVMERGSHAGQSE

SEQ ID NO: 110087 - protein, 397 aa, unidentified
MSIQALGWDIHRKFSRVSLLEKTAEGEIQVNTRARLDHADRDGMRQWLGRLPEGTPVALEAAFGWPWIADLLEEVGMDPHLGHPPALKVLAQHEAKSDRCDSDRLAKFQLRGILPESYLAPPDVRQVRERTRYRMALSGLRSMVKNRIHALLHRFGILHGYSDLFGKQGRRFLEQLQLPPASRSVLDGSLELLDEIVRQITLVEKWMKENLEEDVAVRLLQTIPGVGLILAYVIRAEVGEIARFPTARHLRSYSGTAPVSDDSADRHGARHCSPACNHAMRWALIEAVTGVLATRGPKGLRLRQLYARLTHGGRSNKNQAKVALAGQLAELVFIVWKKRTAYEETPSARPGSRQKQAARGPCHEERRKNQVSANMRPDQSRFPIARHSTTGAGQAHL

SEQ ID NO: 110088 - protein, 432 aa, unidentified
MKHNPSSKQNQRISRISETTLVIGADIAKHQHVARAFNYRGIEHGRRCLFQNDENGLLNLLAWAEAIKQEHGFTDVLLGVEPTGHYWFPLFHFLKQRGIEVVLVNPHHVRKSKELDDNLPTKNDIKDAKVVAKLVLDGRYTQPKLPEGVYADLRVLMNQRDRLCGDLHRVKGRIHNWLDRFFPEYRQVFKDWEGKASLVTLKHFPLPQDIVAAGEAAIVAVWKQNDIKRAVGPKRAELLCQKARKSIGLTEGAAAARHELAMYLEQYAMLCRQMEQLMELVAKLVEQIPGAAHMMSIPCIGLVTVAGFLAEVGDLSGYDHSQQIVRHAGLSLRENSSGLHKGKTTISKRGRFRLRALLFRAALTMVAKNPEFRALHLYFTTRRDNSLKKKQSIIAICNKLIRVLFELGRKRKDYDASKVLGPHREAQLPAAA

SEQ ID NO: 110089 - protein, 345 aa, unidentified
MKYYAGLDVSVKETSICIVDQTGKICREVKVTSHPDDLIAVLKDPAWNMERIGLEAGPLSQWLFVGLARAGLPVICIETRHTKAFLKAQPSKSDRNDARGIAQMMRVHLYRAVHVKTLTSQKRRALLTARKLLQDKAIAIENDLRGLLRNFGLKVGVVGSAKFEARIRELVEGTLNLVEIVEPLLDARRNLREHFATLHRKLLMIARDDEVCPLLMTIPGVGPVVAVAYTATIDIPQRFKNSKAVGPILGLTPVLNQSGESHRVGRVSLCGDGMMRTLLYDAAQVLLNRVAKWSWLKAWAMSVAKRRGLQKAMVALARRLAVIMHRMWSDGTEFCWSREKLPAGA

SEQ ID NO: 110090 - protein, 366 aa, unidentified
MTHYVGLDVSMKSVFVCILDQEGNISREVELPTEPAAIHSFLAGTSLEINKIGLETGNMTHWLTKGLRGYGYEVHPMESRKMAAILATVINKTDQNDARGIAEALRAGHYHQCVHRSDGAMELRTALHARDLLVKQRTQTTNSIRGFLKVYGVKLKKGRGADFPELVREAVSELAIEVRVSMESLLSVLAVLSDEIGKLDRVLEKQAKTTSSVQLLKTIDGIGTITALAYVGEIDEVDRFKSSRDVAAYLGLTPRQYSSGEITKQGRVSKQGSSHLRGLLIESATVLLTRCQSWSPIKSWGLKLMKKKGKRKAIVAVARKLAVIMHSMLKNGAEFNRKGKTAMIKDAHKKAKAKLDKDTGLIEQAI

SEQ ID NO: 110091 - protein, 345 aa, unidentified
MNITTVGIDLAKNVFQVHGVDARGKVVLRRQLRRGQVARFFVKLPPCLIGIESCASAHHWGRTLERFGHTVRLMAPQFVKPYVKANKNDVADAEAICEAVGRPNMRFVPIKSIEQQGILSVHRVRQGFVKARTAQANQIRGLLGEFGLVIPKGICHVARCVPGLLEDASNELPLALRQLIDRLTSHLKGLDQQVRELERQIIAWHRGSELSCKLEKIPGIGPLAATALVASIGDARSFNNGRQVSAWLGLVPRQNSSGGKSTLLGISKRGDVYLRTLLIHGARSAILMAKRQRDNKNVWLANLLNRRHSNIAAVALANKNVRTVWALLAHGRDFKPDYLPLRAGA

SEQ ID NO: 110092 - protein, 357 aa, unidentified
MEQFIGCDAHKKFSLFVAMNEDGEYGRAIRVGHDREVFRAFLKDLPPGSQIALETSGSYYWLVDEMERAGHRPQLAHALTAKRRMEGRHKTDERDARGLAMLLRNGTLPRVWIPPAELRDQREMLRLRMSLVRMKTQLKNRIHGVLLRYNLCIQASDLFGDQGRAELLSRQGELPAWSHESVLEQLQMVDAVQSQIVDCEKQLEVILYPNVERDLLKTLPCVGKILSAVIALEIGDVRRFGEAKYLVSYAGLVPSARESAERKRQGRCPRDCNVYLKWALVEAANLIASKQKTWPERHAVRLYQRVKQNTKMHGKAAMAVARHLAEASYWILTKQEVYREPKSKAASSFVDARVSAN

SEQ ID NO: 110093 - protein, 414 aa, unidentified
MESTARTTLPEEAPNGLTCGIDWARDDHAVSIVDHRGREIARRTVEHNADGLRELLAVLERAGVREVAIERPDGPVVETLLAGGVTVVVISPNQLKNLRGRYGSAGNKDDRFDAFVLADTLRTDRARLHPLLPDTPATVTLRQTCRARKDLVAHRVAVANQLRAHLKIVFPGAVGLFADLDSQISLAFLARFDCQDRADWLSVKRLAGWLAGVGYSGRTDPSVLYRRLTSAPRGTAGTDGTATTGAFVAVLCSLVAQIKALDVDIAEQLSRHADAQIFTSLPRSGTFRAARLLAEIGDCRARFPTPQALACLAGVAPSTRQSGKVKHVGFRWAADKQLRDAVTDFASDSRRANPWAADVYNRAIARGHDHPHAVRILARAWLYIIWHCWQDEVAYNPAKHRALQTLLNHQHRAA

SEQ ID NO: 110094 - protein, 319 aa, unidentified
MAQNDLIVAGIDVAKDKVDVCIRPLSLRRTFASTAEDRRELASWLRRKKVGKAVMEASGGYEREWAKALRDAKIEVRIVDPKRVRDFARSAGRLAKNDTIDAEMIAWFAETFDEAPGQAHDAAREELAQIVNARLGLLDLQTKLLNRGEHTGPEPVQKMQARMLKKIAVEIAKLETVIAVMIKATPRFAELAEIIESVPGLAETTSATLIAKMPELGQVNNKIGAALLGAAPYDDDSGRRRGERHIKGGRRKVRNLFYMACLGAATLHNPVLKAFYDRLIAKGKEKKVALVACMRKLIVILNIMIARRQKWDPNLHVVG

SEQ ID NO: 110095 - protein, 325 aa, unidentified
MSISKVAVINDWIGIDVSKGALDVYFLVDQRQAQFSNDPTGIAQLIGQLVKRDHPAVVCEASGGYEQAMANALHGRGIHVSIVNPKQVRDLAKGLGKLAKTDSIDAQVLARFGEVNQPAATVFASKAEAELKELVTRRQQLVEILTAEKNRVQQVKGKVKKSIAAHIKWLKKRIETLDDEIKALSESNQAWQQHKAVLQSTKGIGEVISSSLLILLPELGQVSNKAIAAIAGVAPYNKDSGGYRGQRHIWGGRATVRSLLYMATLSALRANPPIKALYKHLLSKGKAKKVAIVACMRKLLICLNSMVRHDQKWDNNKVTIRYKST

SEQ ID NO: 110096 - protein, 401 aa, unidentified
MWTLGIDVAKFRHCATLLDEAGRPVFTNLSVEHSRQGVEALVLRLAACGPAPAGIRVGMEATGHYWMILFEALSQAGYQPELINPLVTAARRNVTIRGSKTDSTDATLIARLLRETDLKVCAVPQGPPRQLRDLTRLRFECAHQAVGDKRRLLGLLDLAFPEYHEHFSDVTGVTSRAVLEAFPTAEELAQVDIRRLTRLLLEASRGRFGRTQAQRLKAAAKNSFALIHGHEALALEIRFVIERVNLLLEQIAQLDQRIRTLLTDQQQLLQSIPGLGEIWTPTVLAEVLPVFDPEAPHGAKKLVATAGIDVRLNDSGEKTGTGKMSKRGSRYLRTAVMEAAQVAVFRAHDPLFESVYQRQRDRGKHHLVALSHTANKMLHVVFSVLKTNRPYTPQLPTAVTP

SEQ ID NO: 110097 - protein, 321 aa, unidentified
MTKDKEIYGIDISKDVFDVYSESSGHVQFKNTEQGFKSLLRSLPKTALVVMEATGYYHYRLAQFLHSKGVLVSVVNPLSVKRFIQMKLAKVKTDKSDAKSIYEYGTMNEVPLYNALNDVQAECLQLFGLLDNYIKKSTATKNKLHGEKALGIPSRTVYSSLNRDLKHLQKEIAMLENKLLELVKQDQQDQLTLLQSIPGIGMKTALFLIVITDGFKKFETASQLCSYVGITPTIRESGSSVRGRSRISKVGNRKLRNLMFLASFSACKHNKACKALFDRIVAKGKSKKLALIAVANKLLKQAFAIAKSGLPYDENFVSRLV

SEQ ID NO: 110098 - protein, 317 aa, unidentified
MGGVNAAIEVGKHELKVCLGSEGELFSEPNQPRAINRIIKRLSSAGCARVLIEGGSYQSVLIAALRAAELPVVIVNPRRVREFAKSIGRLAKTDEIDARVLALYGERTEPPLRELADEQTQSLRTLSVRREQLIEMLVMEENRLEHVPAKAKAVRHNLRSHIDYLRKQMKQADDDLDREVRNSPLWDKYEMLSSVPGVGRVLSVALLSDLPELGRLNRGEIAALAGVAPFNCDSGTLRGQRKIAGGRTRLRRALYMAALSSVRCNPVLKPFYLRLRGAGKPAKVALVAVMRKLLLILNAILKTNTAWRALPCPTANS

SEQ ID NO: 110099 - protein, 373 aa, unidentified
MERVAENLAKGKEIFCGIDLHDRSMLCALGIGKEAPAFREFNTQEWDGVGLLIGHLKELERKHPGSRLYVAYEASCCGFGLLDRLRSEGFLAEVLNPCDLPTSPKKRSEKTDQRDALKILDALRSWVLAGSRLPTVWIPPKALRDDRELVRRRLQLGEDLAQTKNRIHGFLKRNGHRRPEPLKTTWTKKYVRWLKDLVSQVPAGAGLELGSLLRELEFRLEELKKVNRELERMSGRDEYRVKVAALREIPGVGLLTAMVFLTELGDLRRFKNRRALANYLGLTPRSYESGEKDDRKGHISKLGPARVRKVLNQAAWALVRLDSYWRTWYEGDGRAPKQERKRRITAVMRRLGIWMWHWALEAEPSQVVEASAV

SEQ ID NO: 110100 - protein, 387 aa, unidentified
MPQCHDLSRSRSALVQDSTIIAVVEMSLASWLVAAIVPGVERHPLKKLEPDQDGLLRLLHRWRDEAVQAGRTITRIAVAFEAGRDGFWLARWLRARGIEAYVIHPTSIAVSREHRRAKTDRLDTALLKRAFLGWLRGEPDHCSMAAIPALADEDAKRPSRERENLVNERTRLGNRMKATLARFGIRSFRPTLRTAPEQFEALRTPESVPLPPNTLAEMRRDLARLQVVREQIKEIEQARLERLDRAPGERHNTMVRLLARVIGVGVETADLLVNEILSRNLRDRRAVARYAGLTGAPDESGAKRREKGLARVGNARVRRSMLQLAWRFLRFQADSDLARWYRARTADGRGATRKTLIIALARKLLIALWRLATTGDLSQGIILRPAA

SEQ ID NO: 110101 - protein, 350 aa, unidentified
MGKGITIGLDLGDKTNEVCVLDATGEVIVRRNVMNTKETVVKFFKKYDGALVAMEVGTHSPWIARELEALGCEVLVGNARKLRAIWASKNKSDVRDAEMLARIARVDRELMYPVHHRGIEAQQDLAVLKARDALVAVRTGLVNHVRSTIKTVGCRMARCSTDSFARRARECLPEGLLPALLPVIEEIEALTTRIRGYDKQIPALIEKSHPDAKRLSQVPGVGPVTSLGYVLSLEEAGRFKKSRTVGAYLGLTAKRDQSGQTDKQLRITKTGDEFVRRLLVGCAQYIVGPFGPECDLRRFGQKLAARGGKNAKRRAVVAVARKLSVVLHRLWVTGAEYDPDYRKNAVNKAA

SEQ ID NO: 110102 - protein, 353 aa, unidentified
MKLKIDPNAAPLTSIGIDIGKEIFHLVGLGTDGKIAFRRKIKRLALKEAFEKLPPCVVGMEACLSAHFVSRMLRTLGHEPRIIPAIYVKPFLKGQKNDYNDAEAICEAALRPNLRTVQEKSQDQLDLQACHRVRSRLVSRRTAAINQIRAFLIEQGIAVRAGTSALRKSLFEILKNRKDEISPRMANLIVGLYEDWLWLDKRIETITSEIKQLSQSEPNCRRLMSVPGIGPLISTGLVAAIGTGEAFERGRDLGAWLGLVPRQYSTGGRSILGRISKRGSKYLRTLFIQAAKVLLIRPQNWPRYSFGAWLKTAAERLHRNKLAVALANKLARIAWSVLRHDRAFDTHIEAGAI

SEQ ID NO: 110103 - protein, 399 aa, unidentified
MNPVVGLDVAKGESQIQAFLDRKTPFKKSFKISHTVEGFKQLHQFLQSIEEKANTKPVLIMESTGHYHSPVMQFLDSLNYIYIVINPLISYRAKSSSLRKVKTDVIDAYHLCELYYKEELEPHKKRGAQLLNLRNLTRQHDHLTGISSQAKLHFLAILDQVFPEYRGVFGDLYSNVSLLTLLEFPSSEAVLQAGEDQLAKRIASLCTSRSKQWAKEKSKLLITAAEKNPFQVNLYKSLIISLEMHIKMVLQYKEHLSNLKGEIDVLVKEIEEYTIIQSIPGIGKKITVTIISEIGEIDRFDNPKKLVAFTGVDPSVFESGKFTASRNRITKRGSSRLRHALFMAVRCAIRDNRKRKTTDEIIPRNKRMRQFYDKKREEGKPFRVTVIACVNKLLAGLVA

SEQ ID NO: 110104 - protein, 312 aa, unidentified
MNPNPPTVYAGLDIAKATLQLNLLAKSFDLPNTPSGHAQLVKKLAAVSAVHLVCEATGGHERAVAAALHAAQIPVSVINPARVRQFARASGTYAKTDPIDAQVLTAFGAAMSPPITPARTPTESKLAAYVSRRLQLIEIRVAEAQRADACIDSVLANSFVGCLRYLDNAIRKIDFLIKNLVSEDARLADQVRRLAEIPGVGLVTAVNTLAEMPELGSLTRNQSAALAGLAPYNRDSGITTGKRRISGGRPLLRRGLYMAALSASRTNPILKPFYDRLIAKGKPAKVALTAVMRKLVILMNHVLKNPSFSLAK

SEQ ID NO: 110105 - protein, 347 aa, unidentified
MRFYTKQHKFYCGIDLHAKKMYLCILDAEGEVRLHRNIKTDREVFLKVIESFREDIVVAVECMFTWYWIADLCTEHGIPFILGHALYMKAIHGGKAKNDKIDSRKIAVLLRGGMIPIAYTYPAKMRATRDLLRRRNHLMRKRAELYAHIQNTNSQYNLPESLGCIAKPRNRQGIVERFEDPSVQKMIDTDLAVIQAYDPIIAKMERDIIRMANHHDPIAYALLKSIHGIGRILGLVILYEIEDINRFPSVQDFASYSRLVKCAKESNGKKYGSSGKKIGNAHLKWAFSEAAVLFLKGNEPGKRYLDRLANKHGKGKALSILAHKMGRAVYFMLKNKKPFDQNKFLGL

SEQ ID NO: 110106 - protein, 374 aa, unidentified
MPLQNADVTKLFIGIDIHKKSWSVSIRTELFDHKTFSTPPDPEGLYDYVIAHFPRHDVSITYEAGCCGFSAGRYFLGLGWQVTIVNPADVPRMDKQNYQKTDKIDSRNLCKQLQKNNLRAIHIPTEEQEQFRSLLRQRTNITKELRRVKSHIKGMLLFHGIKIPTNYDNANWTIEFKTWLSDVKWSSTCGTESMQSKLRTLDFFHTEYLNIGNLLRAYCRKYHNTDYYLLGSIPGIGGFLAAAILSECGDVRRFTNEKQFSSFIGVVPGIFNSGGSENNLGVTPRANTILRPYIIESAWIAIRKDPEIQAYYKLHFGKNPKCIIVKVAHKMVKRILSVIKTGKPYQINKNLELDKNIKLPEDVEMIDEIIDTEI

SEQ ID NO: 110107 - protein, 324 aa, unidentified
MSTPPVCIGIDVAKAELVVATPTADLCRVPNSAAGLRKLLARLKGLSVAIVVMESTGSYGRSAATALTQAGYQVAIVQPGRVWHFAKSIGMLAKTDPIDARVIARFAAATDPRCTSTPAADTTALRALVDRRDQIIEMRKQEENRLEASGDATGGDAAIATELRESIERLTATELRYTQQIADHIQAHQRLLRISECLQEETGVGAQTAAVLLAHFPELGTVNRGQAAALAGLAPYDRASGTHDGKRAIFGGRRRLRRALYLAAISAARWSPWLKDVYAALRARGKCAKVALIACARKLLVRLNALVATMLKPAVQQEGAQQIP

SEQ ID NO: 110108 - protein, 419 aa, unidentified
MLVVGIDVAAEVHQVAVIDATEAVIVKPTPFAEDAAGYQQLFELLARAGARGGEDLPLAPASAQPQRTLVVMEATGHYWQNLFAALVAEDYAVALVNPLRTYRFAGEELARTKTDSIDCVQIARFGAQKRPAPTALPDAAAAELRELVRLRTRLMQEGIDRVNQLHRLIDLGFPEFTRYLGDLNTELAGAILRQYPTAQAFRALAPRRLARLNYDGRHQVGEELARKLIDAAKISVGSQHSPAHQTGVRYACEDLQTLRKRLKQVETEISSKPEQHQVGKLLTTIAGIGDNTAAMLIAELGDPARFESAGALAAYVGLCPGHKHSGKHQPRSSSLTPIGNRRVRKALWMPTLGAATQSNPWLMAFYRRLIARGKPSKVALIAAMRKLLNAIYSVAKNRRPFVPFLNAQPTVHPEAQPSL

SEQ ID NO: 110109 - protein, 399 aa, unidentified
MISVGIDVSKEKSKVCILKPYGEIIRSPYEITHTESQMAELVSMIKCLDDEVRVIMEATGNYHLPVLSFLKEHEIFVAVINPLVMKKYASIILRKGKTDKLDSIKIANYGLDNWFHLINHESSEKVYVQLRLLGRQYAHYIKLRIESKLSLTTMLDYTMPGIKAMLKSRSDKPEKDKLNDFVEEYWHYDNITKKSEKQFINSYKNWAKKKGYQQSEAKAIKIYNLAKQGIPTLSSNAPSTKMLALEAVRVLREIDKTLALILSQMQELAKSLKEYTVAREMGGVGDIIAPRLIEEIGDIRRFHSGKVLIAYAGIDAPLYQSGQFTGTRRRISKRGSSILRKTGYEVMKCLKSNKPEADAVYLFIIKKEAEGKASKVVKMAGLNKFSRIYYARVKEVYKN

SEQ ID NO: 110110 - protein, 332 aa, unidentified
MSIIGCDLHTRYQVIAMLDFETGEISTRRLEHEGEEARRFYAGLGKPALIGIEATGYTQWFERLVAELGHELWVGDPAEIRARAVRRQKTDTRDAEHMLDLLVNHRFPRVWVPTPEERDYRQLLKHRDKLVKMQTSVRNQLHFLAMSQGVCRKRRLWSTRGRRELEALQLGRWASIRRQELLALLDGLGPRIEEMDRAVKAEALRRAEALRLMEQQGVGPVTALAFVLTVGPVGRFPSSRKLVSYLGLNPREDSSGGHQRLGHISKQGNEMLRWLLVEAGHTAARLDPELGRVYQRLKFRRGGRVAKVAIARRLAVRLYWRLRDGNAGSHVQ

SEQ ID NO: 110111 - protein, 337 aa, unidentified
MKRHLGVDLHRTQFTVCTRLENGRTYLRQWPMRDLKLFAAQLRKEDELAVESTGNTRLFHDAVIEHVARVAVVNPSQFKVISQSVKKTDKNDAELLALYLAKGLLPEVRMKERKQRELSHLAQTRDLLVKQRSALKAKINNLLSAEGINLKRESLSSNKALERVLALPLSPLMRAEARVLVGQIRGLNQSIAELEELIEEEGPKLAGHENLMSIKGIGSVSAAVLLSVIGDVRDFSDAGKLAAYLGLVPRVQNSNETEHSGRITKQGNKLARTCLVQCALVAKRYSSFLQTFYQRIQRRRGGGKANIALARKFLGVIYHTLKNNWVFEDFPNFVLAS

SEQ ID NO: 110112 - protein, 340 aa, unidentified
MNKINTIAIDLAKNVFQICILSFDQKVLKNKQVSRAQLPLIMAKQEKSIVAMEACYSSHYWARLFAEMGHEVRIIPAQHVKPFVRGNKNDHNDALAIAEASSRPNINFVPLKTIEQQDIQALHRIRDKLIARRTSIVNQVRGLLSEYGVIMPQGLAGFTKHIALLLDPSDTRLTPRIKFQLAEVKEEYDNLSRRRLSIQKELDEYIQENELCQRLMTIPGIGIINATALFAAIGNASQFANPRELSVWLGVTPKQHASGGKSFMGGMTKRGNRYLRKQLVHGARTLIHRTKGKEDKLSVWIKQLVERRGIHKGVVAIANRLARIAWILLHRNEDYKAVPT

SEQ ID NO: 110113 - protein, 371 aa, unidentified
MADIDGVAGIDAHKHVFTVAVLDARGGRCAIESFPTSPEGLAEVLALLDSFGFAIGRIGVEGSAGLGRHVAAFLVAAGYDVREVQANRTAERRRRRRRHKTDREDAEAIARETLADPDLPPAGKQRRPDPCWDELVAVRNRRKSLIGQRVRLLNEAEAVLTGLPLAIRAALPQTSRVRPRLRALDRGAASSVQVTAADRVNLAWLVEVAGDIARLDARVTELDKQIPALLGRLGCTLAEEYGIAAVGAMDLLVEVGDPTRFTTEAQFARWCGAAPVAVSSGEGDQAPLHHRLDLAGNRQVNSTLHLMHVTQVRSYPPARDYIAKKRAEHKTKREARRAHKRHLANIVIRRMWADHAQRFKTPANLTTPAAA

SEQ ID NO: 110114 - protein, 410 aa, unidentified
MQTLVERGCGLDVHQATVVACLLIVLKNGRVQRQVRTFGTTTRELMGLRKWLLSESCTHVAMESTGVYWKPIYTILEGALEIVVANAQHVKKVPGRKTDVKDAEWIADLLCHGLLRPSFVPPSPIRELRDLTRYRRKLVESRTAERNRLLKLLETANIKLASVATDVFGVSGLLMLHALVEGKATAQEMAELAKKQLRKKIPELELALEGKVEEHHRFLLRVQLRRLRTVEEDLGILEQRIQEKLKPYAAQFTLLQEIPGIDETLAAAIIAELGVDMGVFESVSQLSSWAGVCPGNNESAGKRRSSRIPKGNVYLKTALVEAANSAAKAKGTYLRDKFYRLKARRGYKRAAVAVGHKILVAIYHMLSHQVCYNELGDVYLDNLNKHHVTRNLVNRLERLGYAVTLQQKAA

SEQ ID NO: 110115 - protein, 385 aa, unidentified
MESQTFIPRDYEVFAGLDVDKKSISVTFTDHQGLLKSMRMPYSVEHLINHVRKHYGDKKVAFAYEAGPTGYGLYDGLVARQYPCVIASPSMIPKAPGQRVKTNRLDSRGISENLRGGQLKSIHVPTTLYRELRHLTQLRDALVSEMVAMKQRIKSLLLMEGLEFPPAPAGSQWSFVVKAKLRKLPCSAVVRFKLDQLLDNLEFGEKQILKSTREIRRFCHNDPELSQCIEYLKTLPGFGWIVASQMMARVGDWRQIKNIRQLPAFLGLVPTERSTGERTDRGSITHSGDPRLRSKLIQASWSAIRQDGELREFFRTVARKHPRHLGPRIAIVAVAHKLSVWASVLLMKQRPFEVRQKIQSAPLTQEETVPQGTTRRQAVPGEKTS

SEQ ID NO: 110116 - protein, 384 aa, unidentified
MGVTAYKWRSHMKYSTVYVGMDVHKETFSVCCYTNEKEEAEYCQTMDAQYSKVLNYIESMRFHYGEEAMFICGYEAGCLGYTLYHQLTDHGIKCVILAPTTMSKPTNEKKMKTDRRDARLIARCLAHHDYKSVYIPTEHDEQVKEFIRMRDDHNLALKKIKQQILSFCLRHNYRYEGSKQHWTQKHLDWLRALEPEEIYKEILNEYLLTYQTLVDKIERLDRRIEYLASDEAYNDKVNKLVCFLGIKTHTALSVIVETGDFKRFKDARSYSAYLGLVPGENSSGPKKNGLSITKAGNRHIRRLLVETAQSYTRGQVGYKSKALKARQKGNAADVISYADRSNERLRRKYYNMTLRNNKKTNVAKTAIARELSCFIWGMMTANYI

SEQ ID NO: 110117 - protein, 500 aa, unidentified
MKTRRSKAKIRVRQKKLSGICSEPEQKLEILRPNAAGIDCGAQEHYVAVPPDRVSAGEATVRCFSAFTEGLDAAVDWLRDCRVSTVAMESTGVYWIALHQKLEAAGIEVYLVNARHVRHVPGRKTDVQDSQWLRQLHRFGLLNASFRPEDIICRLRSLHRHRDNLVSSSASEIQHMQKALQQMNLHLHHVVSDITGLTGLRIIDAVLAGQRDPEQLVRLRDRRVYKSTPQEMQAALVGDYRGEHLFVLSQSLQAYRFYQARIEECDREMEPLLEKLAQQIEATSANLMLDALEPSGSKGESNRPEQLPEPKPTSGPKSKRKRKPRANEPKIQLAGLLERICGIDLTQVVGLNVLNVLLIVSEIGVDMSKWRSAKAFCSWLGLCPGNKISGGKLLDSRTRQVVNRVADALRLAAQSAGRTQTCLGIFYRRKQAHLGAPKATTATARKLACLIYHLLKNKQPYQEPDSASYQLRLQKSALSKLQRQAIALGYTLLPTAPVPA

SEQ ID NO: 110118 - protein, 296 aa, unidentified
MFTVLATANTQFLNREIGHVQLTKWIRLQPASLIIFEATGAYHRQLEQALGTKGIPFVKVNPKQARRFAQASGKLAKTDRVDCEMLAKMGAALQLAPKPICAENLYDLRELLSARRALIKDCTAAKARKATASNTLIKQQLERRLRQIESDTAKIDTLMLDLASQDQRMSERLEILSSIPEIGTITALMILVDMPEIGTLDGKQVASLAGLSPMSQSSGKWQGKARIQGGRPNLRHAIFMPALVAIRFNPDLKAKYDQLVATGKEKKVAITAVMRKRLVFANALLRDHRKWAEKVA

SEQ ID NO: 110119 - protein, 300 aa, unidentified
MGKLPTDLSCVTTVGLDLAKHIFFVHAVDAAGKVVVARELRRRDVAAFFANLPPCLVGIEACGSAHHWGRTLIAQGHDVRLMPPAYVKPYVKRQKNDAADAAAICEAVTRPSMRFVKVREIDNQAVLMRHKAREMLVGQRTQLLNGLRGHLAEIGVIAAQGAGHGRALAALIRQGHEDVPESVRAALLPLVVQLDHLDAAIDDADAAIGQLAKAEPVARRLMSIPGIGPLTASALVATVGDPSTFTGPREFAAFLGLVPRQHSLRGGQKCGEYIEFSVGERNVGAAGRIEPAEPYVEFPA

SEQ ID NO: 110120 - protein, 386 aa, unidentified
MKTVAGLDVHKDSVYLCILRENGEKIERVYGVLTPQLDSMRDFMAENEVSEVAMESTSVYWIPIWRVLVDSFELKLVNPYFIRQLPGRKSDVKDAQWIAECVMKELIRGSFIPSPLVQRLRLYDRRIFEINAELVRKYSKIDAILQRCNIRLSNYVSNTDCKSYKAVVKQISEGVTSPQELLRHVHKRIINKHGEDTILAALTGVVSDSEIDMLAQYVAESAILEDNKNKCIEKMREICNSEFKEQMKNLQEIPGVSERSALTVLAEIGPDVNAFPSAKHLVSWCGFNPRNDESNKKIKSNKITHGNRFIRIASVQCAWAASRTKDCYFSKFYAFHTQVRKKFKLKVVVAVARKILVCIWHILKFNVSYKDFEPQKSVTKDCTQFA

SEQ ID NO: 110121 - protein, 341 aa, unidentified
MAEYIGLDVSLKETAVSIRRDNVRVWRGKCPSDPALIAELIRKRAPSARRVVFETGSLSVWFYHALTAEGLPAICIDARHAKKALDMAPNKTDAKDADMLAQLAEVGFYREVRVKSFDSMLGRTLLGARMRLVRMSVELSNQIRGIMKTFGRIVPPGRGGRFESNVRALVVDGEELAAIVEPLLEAWKSLRTRAAQLDERVLASARQSEACRILMSIPGVGAITASTFAAAIEDPANFRNSRSVGAWVGLTTKRYQSGEVDYDGHISRRGDIHLRSRLYEAAVVLLTRSGMECSLRTWGLALKERLGFKRAAVALARKLAVTMHAMLKTGTFFDRNAGALA

SEQ ID NO: 110122 - protein, 348 aa, unidentified
MKYYIGLDAHSTTSTFAVVDSDGQCVLRETVNTSEQSLVHVINKVHGERHLTFEESTMSQWLYLQLHDKVDELLVCNPTYVAEKSGAKTDFRDALHLAQELRTNHLKPVYHDNSHWSELRVSVSGYLDIVEEIIRFKNRLKSVFRAEAVSTDENSFYKNRARVGELKNPSAKFVAEKLFDQIEFLEKEKLKYRDLFERNKKQYRPIRNLMTVPGISIIRANIICAIVCQPSRFANKHRFWGYCMLVRHIQQSGGRIYGNKRFHGRKELRDVFIGAAESAVRTETSLRDHYDALRAKGVTHKNAKLSLARRIASIALCLLKNNDKYNDNYDEYLKERKELRKKFFDQTL

SEQ ID NO: 110123 - protein, 328 aa, unidentified
MALTIVETRAITGGVDTHADTHVAAALDPIGGLLGVREFPVTPAGYAGLLGWLGRFGTVCLVGIEGTGSYGAGLARHVTAAGVRVVEAGRSDRQDRRRQGKSDPLDAVSAARAAQSGRARGAPKGRDGQVEAIRALMVAKRSASADRIQAINQARSLIVTGPDDIRVRFARHTPAALVAGLASLRPRPGSTVGYATRVSLRELGRRGQFLDGQLERPGELIAPLVTARAPGLLALYGIGTHTAALLLIAAGDHPERLRSEAAWAHLCAAAPIPASSGKTVRHRLNPGGDRQANHALYAPRGALSYSRCSREKLGGRFLGLMANLASKD

SEQ ID NO: 110124 - protein, 343 aa, unidentified
MKLHVLGIDLGKTVFHLVGLDSAGRVVIRKRCSRTQLLAFTANLQVQLIGMESCSGSHFLGRALREQGHEVRLMPAQYVKPYVQTNKSDFLDAEAIAEAVQRPRMRFVPIKTEEQLDLQALHRVRERWVMRRTAVVNQIRSLLLERGLTLPKGRRYVDQALPRILEDATLRLSDSFRVLLSQLKIELEQLTARIGQMDAVIQKTAKENEACQRLTEIPGVGPVTATALIGAVGNASDFRKGRNLAAWMGMVPRECSTGGQQKLLGISKRGNKYLRTLFIQGARSVLQQRHKQAPGLSIWLAQLLARAHQNVVIVALANKMVRMAWAVLCKNERYRAPVLAVTT

SEQ ID NO: 110125 - protein, 350 aa, unidentified
MIIIGCDYHPGFQQIAFVDTDTGELRERRLPHPEEAEQFYRDLAAQGMKVRVGMEASGHARWFERLLAELNFELGIGDAAEIRAKRVRKQKTDRQDAQHILQLLVENRFPQIWVPSGENRDLRQLLWHRHRMVQARTRIMNQLQAVALNEGLRCKKRLWRERGREQLESFRLAPWASRRRHDLLELLDRLNPTIAELTQAIEQEAEKCPEAQRLMTHPGVGPLTALAFVLILGRADRFQCGKQIACYLGLVPLEKSSGDRRRLGHITKQGNSLLRFLLVEAAQVTVRSDQEWRSKYFHLAMRRGRKIAKVAMARRLAIQMYWMMRKEWDYEQVKKFGSHAGQPGHRHGVQ

SEQ ID NO: 110126 - protein, 428 aa, unidentified
MMMNQMHQEKLSHAYIGLDLHKYTHTAVVMNCFSERITTIEIENKPSEFDILLKQIKSKTKGLTLIFGLEDVGGNGRSLAVFLKSKGFVVKEVNAALAAGYRKGDAQYKKSDEHDAQCVAEVLLHRLHKLPDANPQDLHWTLSQLVSRRNVLVKNQTTLTNQLHELLKHHYPSYNKFFSDIRGKAAMCFWHTYPSPKHLKDISVEELSMTLREASRNSVSIKKAQRILDIISSDGNTTEGYQDQRDFIVRSLVRELLYQKEEMTKVEEQMEKTEAMLKYQLQTMPGISTVTSCALISEIGDIHRFSNPNKLAKFAGIAPVNFSSAGKGKDKVSKQGNRKLHGIFYFLAVQQVQVSRSTRIPGNQAFFNYYQKKIQEGKTKQQALVCVMRRLVNIIFGMMKSGSAYRMPIVEVQTPNKDLHKLAEGKVA

SEQ ID NO: 110127 - protein, 396 aa, unidentified
MSMAELRVALDIGSKKHRVAIGTGDGRILEEFDIPHDKGGFEHFFNRVELFEKRFALPVVVAMEGLGGWARPLDRMIQQHSYELLNVNNVKLARFKEIFAGPAKSDKIDTRKILELMHMREALPLAKRVLHVVGVTPVENEQLKRFTRRRRQLVDEKTRVSNRLWSDLQAVSPGLLEITGQIDNLWFLNFLTAREDLSKLAGLKRSSLLRIDGVGKAYAAKIELWQKTAGFADETEWVGSMIIADARRILELMRQIQQLEATIETIAATSRIATTLRTITGFGLICSATMAGEIGNLERFQKESSLALYVGMTRLDNSSGNYVGTKNTRQVNTHAKAAMMTAAARHINYTPESKVYYDKKVAEGKTHNQAVRALGRHLIRVIWSMLKHRRDYIQKS

SEQ ID NO: 110128 - protein, 341 aa, unidentified
MSVIAPVFSFGLNGYAGSGLALQDKAEKRLMQITIGIDISKETLDAYRFPDNHHIQVANGRAGHKSLVRWIGKQNGSLVVFEATGAYHRNLEAALAANGTAFAKVNPRQARRFAEATGRLAKTDRVDATMLAKMGAILGLKAHEPKTEALHILRELITARRALMKDKVAAKTRLQTTRQTLLKNQINARLKQIKIQIQQVDAAITEKVAQDEALSNKLDILTSIPGIAETTAFSMLIEMPELGTLEGKQAASLAGLAPMSRQSGKWQGKERIKGGRAFLRRAIYMPALVATRYNPGLKAKYDQLIRAGKSGKVALTAIMRKLVVMANALLRDGRTWSELRP

SEQ ID NO: 110129 - protein, 338 aa, unidentified
MIHVGVDLHQRFCYMTALEARGKILQAGTVTNEKLALRRYFRQFRGKEVQVAVEACGFWPAFREVVEPEVKRLVLVHPQRVKAIASAKLKNDRVDSATLAHLLRCDLLPESWKADRGTQARRQQVRLRATLVRHRTRLKNQVHAVLHQQGLRSPVTDLFGKRGRLWLAEVKLPVQARESVNVCLRLLDGYSEEIQKQNLQLSEKAKQDKPAEWLMTIPGIGECSAMMLLAEIGDIRRFQDKEALCSYAGLVPRVRESAGKAARGGTTRQGSPWMRWILVEAAQVATRCSPAAKRYYERLARKKHKHVARVALARKLLIAVYALLRDGVVFDEQKFATV

SEQ ID NO: 110130 - protein, 270 aa, unidentified
MDHFAGLDVSVKETSVCIVDDTGRIVREVKVASEPEALLKVLGKEAWRFKRIGLEAGPLSQWLFSALAEAELPVVCVETRHMQAVLKAQINKTDRNDARGIAQMMRAGLYRPVHVKTLRSQKLRILLTHRKLLQSKAIAIENDLRGTLRNFGLKVGMVGKLRFEARIQELVENQPDLAVLVEPLLIVRRALREQTVILHRRLLAIVRDDEVCRRLMTTPGVGPVVALTYRATVDVPARFRKSKSVGAVFGLTINRARSIGAAKYRAVAMR

SEQ ID NO: 110131 - protein, 434 aa, unidentified
MTFDSAAVRATKGNVMKPFNEITHYAGLDWARDHHDVVIVDRQGRIVADFRIEHSLAGWQQFRENVKAYPALGVAIETSQGAVVDQLLQLDCSVYPVNPLSAKHYRERKAPSGNKTDHLDAWSLAEALRTDGQGWKALRPLDPLTQQLQMLCRDEITLIEQRTAWVNQLQQALVEYYPAALQAFQDWTLPATWDFILQFPTPEKLATAGRRRWEKFLHTQKLWRPQTATKRLEIFQAAGQFGGSAPVVWAKSLLAQSLARLLQALQLQLDQYRQNIEALFAQHPDHDLFGSLPGAAKMLAPRLLGEIGGPAHRFADPQALQCVAGTAPVSFQSGQIHRVRLRHQCNKVLRHTVHLWSQCCVQACPWAQTYYNQKRAEGKSHACALRCLGQRLLKILWAMLQTRKPYDADLHARNQKRHGSWVLTLLKPAASAGE

SEQ ID NO: 110132 - protein, 338 aa, unidentified
MTIIATGIDLAKNVFAVHGVSAGGVVQMRQPKVARAKLGALIAGLPPGVIGMEACSGAHHWARQFQAHGHTVRLMAPKLVAPYRMSGKRGKNDAADAAAICEAVQRPTMRFVPIKTEEQQAQLMVHRARQGFITERTACINRIRGLLSEFGIVLPLKAEVVRRLAREHLEDLPGYANLVIGDLLSEVAHLDERIAQYDRHVHAMAKQSTPAQQLMQLMGIGEATATALVAMVGNATEFKCGRQFAAWIGLVPGQYSSGGKARLGRITKAGDPYLRSLLVMGARAVLNAAKNKTDSISRWALALEQRRGYWKAVVAMAAKNARLAWAVLTKGDAFKLPA

SEQ ID NO: 110133 - protein, 396 aa, unidentified
MLSGQPMERPMQRNDLSRSLVAFEQNSTLVAVIELSLKTWLVAALVPGLARQPLKKQGADPDAVLALLHRWRAEAIKAGRKIDRIVVAFEAGRDGFWLARWLRARQIEAYVIHPTSIPVSREHRRAKSDRLDTELLMRAVLGWLRGEAKHCSMVAIPTLAQEDARRPNREHQTLVKECGRVVSRMKATMARLGVRSFNVKLRKALEKLAGLRTPEGVPLPANTLDELRRDMAQLRLIREQIKEIEQARLARLKKAPQEGAHPMLLMLAKVLGIGVETADMLVHEVLSRDLRDDKAVGRYAGMTGAPDESGSRRREKGLARAGNARVRRGMIQLAWRWLMFQKNSALTQWYLARTAGAGQAVRKSMIVALARKLLIALWRYVRTGEVPAGARLRAAI

SEQ ID NO: 110134 - protein, 311 aa, unidentified
MEHPCFVGIDVSKAHLDVHVLPTGESFRVGHDDAGFVTLIARVRPFTPTVVVLEATGGYEVTVATALAGARLPVAVINPRQIRDFARATGQLAKTDALDARVIALFAEAVRPIARPLPDEQARALGDMVARRRQLVDMLCAEQNRRRLLRDQGLQRHLEAHIAWLDDAISRLEADLTTLIRSTPIWREADELLRSVPGVGRVTSCALIADLPELGHLDRRRIAALAGLAPVARDSGAFRGRRMIVGGRAHVRRILYMATVAAIKYNPVIRAFFHRLVAAGRPGKVAVIAAMRKLLTILNAMLRDRRPWQIA

SEQ ID NO: 110135 - protein, 319 aa, unidentified
MSKKAITFEQVIDRGCGIDVHKRVLVATVRGTGISEETRTFDSFTSSIEALRDWLKDRGITHVAMESTGVYWKPVFNILEEDFEVILVNARHIKNVPGRKTDKKDSKWIAKLLLSGLLRGSFIPAKPTRELRDLTRYRRKTVEAIASEKNRLQKLLEDANIKLSSVVSNMSGSTAVKIISAMIAGEEDIDELVKLRHGKMQVSKEDLAHALQGHLTEHHRFMLSTIQSSIADRQVLLNKLDQRIEEHLKANELEFSSDLLQSIPGVGKDAAAGILAEIGHQMDQFPSERHLASWAGISPGNNESGGKKKVDGQPTETST

SEQ ID NO: 110136 - protein, 347 aa, unidentified
MNFYHSTHRHYCGIDLHARSLYVCILDQQGEVLLHKEIKARPEPLLALLEPFRDDLVVGVECMHCWYWISDLCKEHGIHFILGHALYMKAIHGGKTKNDRIDSFKIAMLMKGGNFPLAYVYPKEMRATRDLLRRRTRIVQHGAMLKAHVVNTTSQYNLPPNKVNLKNVGAREQVRATFVDRDVQHNIDLDLAIIECYHRELSKLEEHLERQAKQHDPTSLSVLRTIPGVGRILALTMLYEIGDIQRFETVQKFASYARLIKCKAESAGKVYGTQGNKIGNAHLKWAFSEAAVLYLRGNDKAQRYLQKLQKRMNKPKALSALAHKLGRAAYFMLKHQRVFDEQRFLKG

SEQ ID NO: 110137 - protein, 466 aa, unidentified
MKHNQRTPVGKRRKSPSLLERIQPDAAGIDCGEKSHYVAVPRERDTQPVREFRTFTTELYHLADWLAQCGIKTVAMESTGVYWIPLYEILEERGFEVILVNARDVHNVRGRKSDVSDCEWLQELHSVGLLRASFRPAAVIVALRSYLRERATLVKEAATRIQRMQKALTQMNLQLHTVITDLTGTTGLNIVRSILAGVHDPEQLAVHRDRRCKADKAELVAALTGNYRAEHLFSLRQNFAAYEFHLGQIAECDAAVEALLQNLAAQQPSPSTALPPPRRKPTANNHAPRFDIRTPLHRLTGGADLSQIDAIGPQAALQLVAEIGTDMSRWRTAQHFTSWLTLAPNNKISGGRLLSSRTPPSANRAAAVLRRCAMSLTRTRTALGAFYRRLAVRIGKPKAITATARKLALLVYRVLSGDLVYQDPGANAYHQLHLARELKSLRRRATQFGYDLIDRNTGEVLLNPVS

SEQ ID NO: 110138 - protein, 337 aa, unidentified
MNKYIGIDVAKATLQIYIPKSDSDIEIKNSSDGLKKLYSKLKKQYKKELQDIVFVYESTGAYSTILEQFCQDKGILCFKVGAYQSASFSKVIKNRSKTDKIDARMLSQMHILAKDKDIQIPKRNEKAHQIRSYIKYYQSLVKEHRRQSSYLEAATYNLEDKFILKQVKKKIASLEKEQAMIIEKVLEIIKANPTFKQAYENITSIKGIAEKSGIILLYLFLKYPNASRQQITALCGLDPVQRSSGTSVQHKERISKQGLSLVRAILYMPILSITIHNKEMELIYDRLLKRGKPKMLAQMAVMRKVILLAHSLYKNNQRYDENRYLNFTQIKELDMVG

SEQ ID NO: 110139 - protein, 322 aa, unidentified
MNKYKETFGVDISKDVFDIHGSRSGHNQYKNDETGFVKLLKELPVDSLVVMEATGYYHYRLAQFLYKNKVVVSVVNPLSVKRFIQMKLAKVKTDKSDAKAICDYALINEVPIYNALTDVQSECLQLFRLLDVYIKHRTATKNKMHGEEVLGIPSKFVYRSLRRNKKHLNTEVKALEAKILSLVKEDHQQQLTLLTSVPGIGPKTALFLIIVTDGFSKFETASQLCSYVGITPTIRESGSSVRGRARISKVGNKKLRNLLFLCSFNACKHNKACRELYERIVNKGKSKKLALIAVANKLIKQCFAIAKSGRPYDEMYVSVLPR

SEQ ID NO: 110140 - protein, 444 aa, unidentified
MEVTFTHCAGLDVHKKTVVACCIAPGLKGEKQIEVRTFGTMTVDLLALSDWLTSKQITHVAMESTGEFWKPIYNLLEGNFELLVVNAKHIKNVPGRKTDVKDAEWIAELLRHGLVRGSFIPPQAQRDLRDLTRQRTNLVQDRATVVNRLQKVLEWANIKLSSVATDVTGVSARAMLEAIVQDQVDPAALSELARGRLRKKRDALEQALTGAVRDHHRFMIAQHLTQIDFLDQQIAAFDGQITAAMQDLSQPPDKPGPGQSDQRPAATSPSDSTSPLTWEAAVALLDTIPGVGPRSAEMILAEIGLDMSRFPNEAHFCSWAKVSPGNNESAGKRYSGAIGHGNRWLRTVLVQVAWAAVKVKKSYLSSFYHRLAARRGAKRAIIAVAHRILIAIYHMLKKHEPFKDLGATYLDERNKPKVVNRMKHRIEQLGYRVTIEPALVSAPG

SEQ ID NO: 110141 - protein, 321 aa, unidentified
MLSVLGIDIAKQKIEVALLITDKVKNKSFQNTLDGFEALALWLRKWGIERVQACLEATGNYGEDLAVFLHQAGHVVSIVNPARIKGFAQSELIRTKTDKIDAAIIARFCLAMKPKPWVPPSPEIRALQAWVRRADSLIDMLTQEKNRLDTAHESVLPLIKEHIDYLGKEIEQVRHQIADLIDRTPELKRKKDLLASIPGIGKVTIAAILAELDDLEKFKHVRELVAFIGLAPKERLSGSSIKGKPRLCKTGHARLRKALYMPALVSIQYNPLMIAFYQRLKEKGKNGKVIVCAIMRKLVHIIFGVLKSGKKYDPNYKPALA

SEQ ID NO: 110142 - protein, 359 aa, unidentified
MVRHIFVGIDLGDKNSVARIALDQEKSQRRAFINNRQGRARLLEQVKRQAEQAGGAKIVMAYEASSCGFVLRDEAEAMKIQCWVLAPTRMEKSVDQRKHKNDDRDADDVLEKLRGHVLAGNRLPTVWVPDRQTRDDRELIRARLDLSEKQTQVKAQIQMLLKRQGLEKPSGLGAAWTVAYRRWLDGLKGWTGLGWGRRQALSSLLSQLSFIEAEIRRMEKPMEQLADEPRHQAIVAELTQEPGVGRLTALVYRTEIGYAGRFRRGRQLGKFTGLTPTSHESGQQNDRKGHISRQGPPRLRKILCQASWVHIRHDPQARRVYQELVCRNPKKKKIALVAIMRRLAVRLWHRMRQIELAQA

SEQ ID NO: 110143 - protein, 408 aa, unidentified
MNAVGIDVSKGKSMVAALRPMGEVAFLPREFLHTEIGLEQMAYAIIALGKDTRVVMEATGRYHEPVAEALHEYGIYVCVLNPLLIKQSGGGSIRKVKTDRADAMKIAKYGLDNWVDLREYTPMDTVRQQLKLCSRQYNLYMKTVVSLQNNLISLTDKTFPGVNELFSSPERADGHQKWVDFVMAFWHCDCICCVSETAFTERYQKWCKRKGYHFSAEKALDIYDKSCGHFTTLPKNNNTKLLISTAAQQLLAGKMTLAALRAEMTRLAKQLPEYDTVHAMYGVGETTAAQLMAEIGDVRRFPRRSSIVGFAGVDPGVDESGKYSAKSVPTTKRGSSHLRKTLYQIVCTYLKKSPANEPVYQFLDKKRSEGKPYFVYMTAAQNKFLRIYYARVKECLEAFDAQQDSAQS

SEQ ID NO: 110144 - protein, 381 aa, unidentified
MSAVTRRGECNGEPVLFMALELSDKAWKVGTTVGPGQKPRTKNVPSGKLKALKEEIRRAKRRFSLAAEARVVSCYEAGREGFWIHRWLESEGVMNVVVDPASIDVNRRKRRAKTDRLDVFKLLSNLMRWWIGEEKVWSVVVVPSVRDEDARHFHRERQTLKKERTAHINRIKCLLKLHGIGLKRVDGDFVEQLGGIRLHDGSSLPAQIRQRLGREYQRLVFVEEQIEILARQRREALRQSTDGRIAKVRKLTQLRGVGDVGAWIIVMEILGWREFGNRRQLASLVGLTGTPSDSGDTSREQGIDKAGNALVRKILIEMAWNWVRWQPDSEISRWFNRKFGGAGKRHRRIGIVGVARRLLIAFWRYLEQDVEPRGAIIIEPT

SEQ ID NO: 110145 - protein, 352 aa, unidentified
MKLLKYIGMDVHKATTVIAVLDSAGKVLAEAIIETKGSTIVDFLKSQRGTLHVAFEEGTQASWLYDLIQPQVASVVVCNPRKIVRQGNKADKLDAKLLAELLRTGALKPVYHGEKSTRAVKELALSYISVVADGTRIKNRLKSLFRGRGIECSGTAVYSPDERNNWLARLDSPAVCARAARLWQELDLVEHLSEEAEKDLVAEARKHADTRILRSVPGIGPIRAAVILGVAATPHRFRTKRQFWGYCGLAVVTATSAEYELLNGRVCRSKKRPLVRGLNNNYNRALKGVFKSAAKTVAAGEWKSRFEAMVADGTTESLARLTLARKIASITLALWKKGERYDPKKVKSSHAA

SEQ ID NO: 110146 - protein, 428 aa, unidentified
MDFTQNNRLAQINEQTLIIGVDIAKRKHVARAIDDRGRDLVKRLVFTNSLQGFSNLIEWSESLSDQYERPNIIIGMEPTGHYWLNLAYYLKAQGIHVVVVNPMKVKRSKEMDDDSPTKNDTKDAKVIAQIIRDGRYHEPTLPEDVYAELREGMKLYDMIQEDMSSIKAQMHNALDRYFPEFLDVFKDWTGKAALHLLERGYLPEDIRKASEEDLLLEVKRAAKRGVGIKRIQNLKLAAEDSVGLTVGLRMGRQEIRYLIDQYKALEERLIALEAQLEDLVLHIPGADQMIAIKGVSAITVAGFFAEVGDLSNYRDPRQIIKLAGLNLKLNQSGMFKGQTTITKRGRKRLRSLLYQVARPLSLHNEGFKQLHHYYRHRSDNPLTGKQSFIALSRKLIKIFYVLGTRKCTFSEERMMRDIPMITTLQEAA

SEQ ID NO: 110147 - protein, 341 aa, unidentified
MKVTTIGLDIAKSVFQVHGEDCNGKVVVQKRLRRSQVVAWFSQLPRSLIGIEACGTAHYWARTLRELGHEVRLIPAAYVKPFVRRNKNDARDAAAICAALNRPDMRFVAIKSVEQQASRGLERSRDLLVKQRTQLMNCTRSLLAELGIIAAQGRRGFAELVARVSDSDAAIPPVLLTALLPLIRQIEGLHTTIAALEDRIIAAARENPVMRRLAGIPGIGGLTAHAIVTAVGDGRQFGSARDFAAWCGLTPQEHASAAKRHDKGISRQGDIRLRKLLALGASTVMRNARSRTDRATAWQRGILARRPVKVAVLAQAAKNARIAWALLVSGETYRTATPTAA

SEQ ID NO: 110148 - protein, 579 aa, unidentified
MIQFLSALAEEGLLTFLPETAQWSWDLNRAHAKGYTENIADLMSAKLTRLPADTQTALQMLACLGNTAQIATVSPRSGCPEQVEASLLEAIRQEFVQRLETSYRFTHDRVQEVAYSLIPEQQRAAVHLQIGKRLLERTPPEELDERLFEVVNHLNSGVELMTDPVERARLADLNAAAGRRARASIAYSTARNFFAAGAALLPEETWDSRYDGVDAPPTASMCQSGGVEHHLREASVSEVSIIGLDIAKHVFHAHGADERGRAILSKRISRGKLLDFFAAQPRCMVALEACGGAHHWARQLTQLGHEVRLIPPAYVKPFVKRQKNDAIDAEAICEAAQRPSMRFVAVKSEQQQAAGLVFRTRDLLVRQRTQLINAIRGHLTEYGWVAPKGPSHVAMLADLIEEEEMVNSLPEAARAMFRVMLDLLAGLNSKIADLEKEIARRAREDDVSRRLMTVPGIGPISATAIAALAPPAETFAKGRDFAAWLGLTPLQRSTGGKQKLGATSKMGERTLRRLLIIGSSAVVKQASKRGAPRGSWLEQMLARKPRMLVTVALANKMARIVWALLVKQENYRAPVAAKA

SEQ ID NO: 110149 - protein, 456 aa, unidentified
MKIPQSTIRLLTGRLVKILLYREVSTMKSNTQNAKIEAITEKTLVLGIDVGSETHYARAFDYRGIEYSKKPFKFSNTEAGFVTFKEWILDLKDRHEKEKVVPGMEPTGHYWFNLGKFLQDNEMKPVLVNPHHVKKSKELDDNNPTKNDRKDPKVIAGLVREGRYMIPYLPDGVYADLRTASNIRFQLQAELTRIQNRISRWFNIYFPEYKTVYGKPDAKSGMLILKAAPLPEDILTLGIDGVNQIWRDAKLRAVGKARAKTLIEAAGHSVGSKEGAVSARMEIRMLLEDYESRNMRLQEVMVLIEELVKGIPMAEKLLEIKGVGIRTVSGFLAEVGDISRFNNPKELQKLAGLALVENSSGKHKGGTTISRRGRKRLRYLLFEAAMSLVAKNPEFRELHNYYTTRRRNPLKKMQSLMAVATKLIRVFYAMLTKGVDYDPKKMVSDIRRPEAYLQAA

SEQ ID NO: 110150 - protein, 347 aa, unidentified
MTIVEVARPVVGGVDTHLDVHVAAAVDSLGGLLGVRSFPTTPAGYHALSSWLVSFGTVERVGVEGTGTYGAGLARHLAVSGITVIEVDRPNRQERRRNGKSDELDAIEAARAVVSGRARGHAKSGIGNVEGLRALLVAKRSARSIRIRTSGQLRHLVVTAPDDLRVRLSGLTTKSLIAQAGGLRPGIGGDPVRHATKTAIVTLARRVQAINAEIAALDRQLEVLVRATGPRMLEVYGVGVDTAAILLVAAGDNATRIRSEAAWAHLCGVAPIPAGSGKTNSRHRLNPGGNRQANHALWRIVLTRLGQGEPRTVAYMRRRLAQGRTKPEIIRSLKRYVARETYRQLFA

SEQ ID NO: 110151 - protein, 371 aa, unidentified
MKSIIYIGMDVHKKTYSLCALLKETGEIIGETKIPADVSLIIKFIENAKKSVDSDDVQIKTGYEAGCLGYSLYWQLAAKGIECDILAPSTMHRSAKNKVVKNDRRDAKNIAANLANGTYKSVYVPTDEDVEIKEYIRMMHDFKIELKKVKQHINAFLLRFGHHYPGKSKWIPAHIKWLKELELSDMYREILDEYLSQLEILSEKIERFKHRLEELSQKETYNEKIGQLRCIKGIDTTAAMTMHAETSDFDRFPTANAFASYCGLTPGEDSSGESYHRLGITKQGNSMIRTTMVEAAQVLVRGTIGKKGKKVKSKQKDQNVKVIDYADKAVVRFQKKYHRMIFRGVKRNIAITAVARELACFVWGIETGHIS

SEQ ID NO: 110152 - protein, 361 aa, unidentified
MSESMALVGLDVHKAQTVAAVLDPVTGELRVERLRGEPASVVPVFLEELDRPVAAVYEAGPTGFVLARVAEERGLDIRVVAPGSIPRAPGDRVKTDRRDAKRLVRLFAAGELGFAFVPSEVDERFRDLVRCVEDARKDLMRSRHRLSKFLLRRGQRFPCKAWTQPHDAWLAKLRFEDPLSQATFVDYLCAVQGLVARRRALIGVLEAAVPESSHATTVARLRCFRGIDTLTAAGLCAEVGDFHRFAKPALLSGFLGVVPSEYTSDDKRTQGQITKAGPPHARRLLVEAAHHYRYRPVVGVGLKARQAGQDPRVIEIAWRCQRRLHERWSHLAGTRGKRTGTVAIACARELAAFCWEAATLD

SEQ ID NO: 110153 - protein, 360 aa, unidentified
MDKHKYVALDVDSANIVAGVYDRQGEALMQCYLRNNGQVISEFFKTMTGVVHVTFEEGTQAIWLYELIRPLVAEVIVCNPRENKLLQAGNKSDRIDVAKLGKLLRLGELRPVYQGPSAAQGLKQLVHGYQALVDDTTRVKNRLKALYRGRGLSCKGELIYGREQRQQWLGQLETKEMQSRAASLYEELDCVLRLRAEAEKVMCRAARKHEAYKWISSAPGLGAIRTAQILATAITPHRFRGQRQFWPYCGLAVVTRSSSDYEWVDGGARRKRKPIQTRGLNQNYNRTMKAVFKGAAISALQQHPEFQEYYQRLCAQGTRPEMARLTVARKLAAIVLILWKKGELYNSERLNQAAPGAGQQ

SEQ ID NO: 110154 - protein, 365 aa, unidentified
MKKITIAAKPSKKILQQRLTIGLDLGDRNSWYCVLDESGQIQREQRVRTNATALREVFSEMAHSRIALEIGTHSPWISRLLSELGHEVMVANARKVRLIGESRKKDDRLDAQTLARLARIDPQLLYPVQHRSAQAQADLMMIRARAGLVRARTGLVNTARGLAKSYGERLRGCNVRNMNPEKAEGLSPELRAGLEPLLACIESVSEQIGEYNERIEKLAQDSYPQVALLKQVKGVGTLIALTFLLTLEDPHRFRKSRDVGCYLGLQPGRRNSGQSEPQMHISKEGDPYLRTLLVQGAQHILGPFGVDCDLRRWGLKLAERGGRSGKKRAIVATARKLAVLLHHLWVSGEVYEPLHNSNQRAMPAA

SEQ ID NO: 110155 - protein, 474 aa, unidentified
MNVKTRRTKKQVNVENQSINLLSKEELSKKIEVAEKELRSYTWRELETNGKFAKNDKLSFITDDMLIVGCDIGSENHYIRAIDVRGRELSRGAYEFSNTSEGFENAKAWVLALAAKHDKKQIVLGLEPTGHYWFALAAWMISNGISVVQVNPYAVKQSKEIEDNSQLKDDRKDPKLIANLVKDGNYGMPYLPEKVYADMRRLSMFRDQLTEDRIRNINRLHRELKIYFPEYMDAFGKIDGAFTLEVLKVSAIPTDITALGAEGMKNIWHKAKLRGRGYSRANEIVSYAEKSVGLTDGTDAGREAVKWYAEQILRLDEQLAEIESALHEKCREIPYAENILALNGVGENILAGILAEMGDISRFDDVKEIQKLSGMGLVACSSGKHKGQTKISHRGRKRLRYWLFQAAKSVVSHADEFKQLHEYYTTRSNNPLKKMQSLVVIACKILRVIYTILKTGTTYDPQKLLKDIKHPAAS

SEQ ID NO: 110156 - protein, 402 aa, unidentified
MNCVGIDVSKGKSMIAVMRPFGEVVVSPFEVLHTDSELSELARLLKSLDGETRVVMEATGNYHAPVAWLLHDAGLYVSVVNAMLVHDYGNNSLRRAKTDKKDAVKLANYGLDHWLTLPRYVPDEDTRLMLKTCYRQYQQYSKVQTMLKNNLISLLDTTFPDANRLFASPPRADGSEKWVDFVDAFWHCECVCGLSEKTFITRYQKWCRKHGYNFNENKALDIYASACGHFGVMPKTDTTKLLVEQAISQLQATSAALAALKQEMQSLAASLPEYPVVMGMFGVGPTLGPQLIAEIGDVRRFHSKKALVAFAGIDAPPYQSGQIDVRSRSISKRGSASLRRTLFLVMGVLLQCAPMDEPVYQFMNKKRSEGKPYRVYMMASANKFLRIYYASVKAYLDSLEHN

SEQ ID NO: 110157 - protein, 328 aa, unidentified
MAIVMGLDQHRAQITAEWFDTETGEVSRGRIVPADRSGVRKFLARFVGRELEVALEATTGWRFVVEELHRVGARVHLAEPAETSALRGNKQRAKNDRADARHLRELLMAGRVPESWVPPGHLLDLRARVRLRHTLVDQRGEWQQRMQAVLYHHGLPKRAGLLTGENRAWVGQLALTGAARGQITVALAMIDAIDAQVAPLDRELRCYARRQAGCKAIQAHYGIGPLTSVVILSELGDARRFSSSREAVRYGGLDITVHASDKRRAPGHLSRQGPPVLRWALYEAAQTARRKTSPDHAYYQQAAERLGDNRALLSVMRKLLKRSYHTLR

SEQ ID NO: 110158 - protein, 347 aa, unidentified
MLIIGCDFHPGFQQVAIFDNRSGEIQERRLGHRAEAEEFYRALAGQEVRVGMEACGHYPWFERLLSELGIELWLGDAGRIRAQEVRKQKTDRRDAAHLLELLLEQRFPKIWVPSLEERDVRQLLMHRHKQVQTRTQVKNQLHALALSQGVQRKRKLWTQAGRAELEQLELLPYAAERRKQLLRSLDRLEQEIAELNQRVQAEVAQRAAAVKLQTHPGVGPVTALAMVLTLGPAERFASGKQVGSYFGLIPSEHSSGGRQKLGRISKQGSSFLRFLLVEAGQSAARQDAELGRFYRRLAARKHRALAKVAVARKLATRLYLMLREDWTYAQLCRAMVSASPSHSVVES

SEQ ID NO: 110159 - protein, 368 aa, unidentified
MGKFITYVGLDVHKKTIAVAFADEDGSEVRSYGIIDSKLCSLDNIVRKLLSRGGEPRFVYEAGPCGYGIYRHLKEQNIECMVVAPSLIPEKSGDRIKNDRRDARKLARLYRPGELTAVHVPNREDEAMRDLTRAREDSKTAERKARQQLNAFLLRHGLIYGGNSNWSLAHWRWISDIKMEHEAQQFTLQEYVDTARSCSERVERITEKIRLLAGQWRFSPMVEAIQALRGVSLVVAATVVAEIGDLRRFDNPRKLMAYLGLIPSEHSTGEHTKRGGITKTGNGHARRMLTEAAWSYRMPARVSRRLRDRQQNLPDKVWKIAWKAQVRLCNRYQRLIARGKLSKVATTAVARELAAFMWAIFRTVEVGA

SEQ ID NO: 110160 - protein, 347 aa, unidentified
MKFYTTLHKYYCGIDLHAKILYVCILDQQGDKLVHQKIGADPQALLRLLEPYIGNIVVGVECMHCWYWVSDFCQTHEVDFVLGHALYMKAIHGGKAKNDKIDSYKIATLLKGGNFPLAYNYPREMRATRDLLRRRTGVVRHGASLKAHVVNTDSQYNLPAQSLNLKNVSAREHLRHHYDDEVVQRTIELDMVLLDCYAKELAKVEYFIEKQAKQHHGTYLYIIRSFPGIGQILGLTILYEIGHITRFKSVQNFASYSRLVKCKAESAGKTYGTSGNKIGNGHLKWAFSEAAVLYLRGNDKAKNYLNKLQRRMSKGKALSALAHKIGRCVYFMLRDKTVFDEKKFLKG

SEQ ID NO: 110161 - protein, 371 aa, unidentified
MKSILSVGMDVHKNSFSLCAYDGYTGEIVSESTFASDVKLVIKFIEKLKSRYENDVEIKCGYEAGCLGYSLYKSLTSRGVDCVILAPTTMQVSAKNKMVKNDRMDALNIAKNLASGSYKAVYIPDEEDVEIKEYIRMIHDFKKELKRVKQEIYAFVLRHGYQYDGKSKWTIRYMNWIRELEMSEIQRETLDEYLAEMDNLNDKIERFMNRIDEMYQSDRYNEKVSELRCFKGIDTFAAMTIQVETADFERFPNAKAYASYTGLTTGEHSSGDKNNRIGITKQGNTVIRKTLVECAQSLVKGNVYTPKSKRPKSRQKGMDVNIIAYADKATERLKKKYQKLIERNVPRNKAIVAVARELACFIWGMETGNIH

SEQ ID NO: 110162 - protein, 344 aa, unidentified
MTFVGCDLHTRKQQVAVLDTATGEIAEHQLLHEGNAVEEFYAALPGPVTVGIESTGYALWFHTLMQRLGHTLLVGDAAKIRAMVVRKTKTDRRDARHILDLLAHDRFPIIWIPDPATRDLRALLTHRMRLVRIRTMVKNGLQAIALNYRVALGSKLLRQAGLTQLQALALPPYMAQRRDQSLELLAGLTRQIHQLDDAISTAALAHPDAPRLITHPGVGPLTALATIVVLGPVARFPGTKHVVSYVGLAPAVNASADKYHLGHITKQGSTLLRNVLGQAASHAGRMDVDLKRTYLALVHRRGRPKAKVAIARKLLVRLFIMLRDRIDYDEFRRRGRRSPAVASP

SEQ ID NO: 110163 - protein, 319 aa, unidentified
MTSKGMEKMNPSTIGVDISKDTLDAFRLRDGASRRFANDKAGHKALIKWIGKQEVRVVFEPTGAYHRAFELALDRAGLPLVKVNPRQARRFAEATGQLAKTDHLDAALLARMGAVLGLEPRPVASEVLGGLKELHIARLALVKDRTAAKNRGKMQTLPLLKQLNAERLDHIEQQIEAIEAQIMAHIEADESFARRFAILISIPGISQTTACALLIDMPELGSLDAKEAASLAGLAPAARQSGRWTGRAFIRGGRSGVRQALYMPSLVAARFNQDLKAKYEQLVKAGKPAKVALTAIMRKIVVLANALIKNNRKWAENAP

SEQ ID NO: 110164 - protein, 357 aa, unidentified
MKIVAGKSKKSVVGKDVYVGIDVHKESWQVTVRTGGEEIFNGRIPGQYQSLKKLFERYQGCRMKVAYEAGPFGFWLSDKLVADGIEALVVPPSLIPTESGNRVKTDKRDSRKLARLLESNMLKRVYVLTPEEREHRDLLRTRRQLVDHRNDVARQIKSKLLFYGITSPFTASTRWSLKYIEWLKVLRCDTEYLRESFNLLIDLYEYLTRQIVRINKKVALLCRDKKYRDKIKLLCTAPGIGRLTAIEILVELQDITRFESAEELAAYIGLTPSEYSTGERTRQGRITRCGNKRVRTYLVESTWMLITKDPAIRLKYLKLKSLRGGKRATIAIARKLLIRIRRMLLDNVPYRMTAMAA

SEQ ID NO: 110165 - protein, 374 aa, unidentified
MTMMQHRQIRYIGLDVHKVSITVAIAEESGAPTSYGSIANDPAAIRKLMTRLGGPEVELRVVYEAGPTGYALHRQLAKMAIDCIVVAPSLIPKQPGNKVKTDRRDALKLARLLRSGDLIPVWVPDEAHEALRSLVRARADAKADQLRAKHRLSKLLLRQGCRPPSGVRTWSQRHVQWLRQLEFEHLPDRIVFADYLAEVTAAGERLKRLEAALYQCAQSSSQVAVIRALEAFRGIGFLSAVTLVAEAGDLRRFRTAPQFMAYAGLVPSESSSGGKQHRGPITKTGNSLLRHVLGETAHHARHAPRVSSKLKARQVAVPREIVELAWRAQLRLHARYRHLSSRIGSLKALTAIARELAGFIWAAGQVLQEVPTAA

SEQ ID NO: 110166 - protein, 404 aa, unidentified
MRKRVSKRASVVRPSGRDRAAAGIDPARYNVQVAVYSPSHLYCNRRFPLSARTAHDLAQLLPPGTPCITEGYGTAGRLFFLELAHHSIPCKELNPQLGRHLRFIQQEAHTDQGDALAAAKAEFYWPERLAPICLAEDREALATLVKTRRRLVKGNTANKNRLHKVLSESYGALYKTLQTRIDINTHKGRRFFTQFPSINALLTGPDGKAELDRFFPGKATSLIASEHPWSSPRMVEALEAEGRLLLTHIETTEKVTHDLQKKITTLLSSHHEAPWLLSIPGVGVVSAATLLAEVKTIDRFPTEAKFAGYCGLGQLLFHSGDGVPYFTKRTLYNRTLRSVFFDIAFAALSRNDQARSYYTKKRKEGKTHRQALLRLARYYARLVYAVLTKHQTYAALMEEKTRSS

SEQ ID NO: 110167 - protein, 402 aa, unidentified
MNAVGIDVSKGKSMVAIMRPFGEIVSAPFEIKHTASDINSLVELINSVEGESRIVMEHTGRYYEVLAHQLSKANLFVSAINPKLIKDFDNDSLRKVKSDKADAIKIARYALDKWQNLKQYNVMDELRNQLKTMNRQFGFYMKHKTAMKNNLIGILDQTYPGVNTYFDSPARSDGSQKWVDFASTYWHVDCVRKMSQNAFIDHYQNWCKRKKYNFSQSKAEEIYGKAKELVPVLPKDDITKLIIKQAVNQLNSASTTVESLRTLMNETASKLPEYPIVMAMKGVGASLGPQLMAEIGDVSRFTHKGAITAFAGVDPGVNESGSYEQKSVPTSKRGSSDLRKTLFQVMDVLIKTHPQDDPVYQFIDKKRAQGKPYYVYMTAGANKFLRIYYGRVKEYLSSLPES

SEQ ID NO: 110168 - protein, 357 aa, unidentified
MESQEVKYVGVDCGKKSIEVVRINSENSLERRQFSTTESGINNLLQWLTLNDIVGLEAGSQSFRIAKSILNKGVQVIVLNPGNLATIYQSLKKTDKEDSLKIARLIQRHPIEELPTVPIPNDEEEDNRRLCSEHENWTKQLTQGKNRLHSLFTQAGLTQITKKHLRTKVSREASVTLLSDRYKKEAERILKVLDLVELNLKLIEEEIQEALKKNKAYVQTIMSMPGIGMITSLAIMSYMGDCKRFSSAKQAAYYAGLVPRVDISGDTVRYGRIINRGCHSIRRVIVQAAWSLVRCQHGGKVKEFYQRLYLKKGAKKSIIATSRKMIEVLYVMIRTGKLFDSMPENILNRKLAQYGLM

SEQ ID NO: 110169 - protein, 400 aa, unidentified
MNAVGIDVSKGKSTVAVLRPFGEVVASPFDVIHNDNDLKRLVKLIRSLPGESKVVMEYTGTYFEPIAQFLHNNGIFVSVVNALLVHDYGGNSLRKVKTDKKDALKLASYALDRWTELDEYVPADEQRKILKLLNRQYNQSIKIQTMMKNNLISLTDSVFPGINRLFTSLERQSDGHEKWVDFLHAFPHKDCVAKLYLSAFKAKYKSWCSRNKYRYSESKAEKIHSYAKSVIAVLPLNESVKLIVIQVVSQLNTILETAFSIRTEMNRIASSLPEYDTVMSMFGVGKVYGPQLIAEIGDTRRFRNRRAITAFAGLDAPPYQSGQLDVSSRHISKRGSAALRKVLFQITEIFILSKPENEPVYQFIIKKRSEGKHYYSYRIAAANKFLRIYYAKVNQILNAT

SEQ ID NO: 110170 - protein, 351 aa, unidentified
MSTQITALPKLYIGIDIHKRSWKVHCATDLFCGKSFSMNPEPEQLKAYVSKHFDDYEVSTAYEAGCCGYSAHRAFESYGWLSLVVNPADIHRKGKEKHTKTDKIDAQLIARELKDGRLEGIHIPDVHREEFRSLFRRRNDLVKDFRRVKSYIKMQLLYFGIKEPLEFDNDHWSHAYRKWLDDMMFAYPTAKATLDSRMRFFRFVDQELRDVSTQLRRYCKTHHKKDYMLLRSIPGIGGIVACGILCELGDLRRFNSIKHLAGYVGLAPGVHQSGGNYKTLGITPRAHRLIRSYFVEASWQAIRADPVMQAYYRKHQGKNVKSIIIKVARKLLSRTLAVIKTETPYTIGVLE

SEQ ID NO: 110171 - protein, 349 aa, unidentified
MEHVAIDLGRPNSVMCQLDADGKKSFRRFALNRPNLDRFFGERPRCRILIESSTEAEWVARHLEGLGHEVVVADPNYAAMYGERNRRVKTDRRDADVLFEANRLGIYREAHRRSQEQRDVTALLRVRDSLVRTRTRWINLVRALVRGEGFRIRSGAAESFSDRVDELELSADLRAQIWPVLELLGPLNERLLAVEKQVVELKKRDEHVRRLQTAPAIGAVTSAAFMALIDDVGRFPRAHAVECYVGLVPSEWSSSEKRLQGRITKAGDSRVRWLLVEAGWTIMRSRRPECQPLRSWAEGVAARRGRKVAAVALARRLAGILYAMLRDGTDYDPTRLQQGSHRRTRPAAA

SEQ ID NO: 110172 - protein, 349 aa, unidentified
MYTLGIDLHKRASTWSLINESHTEIWKTSVVSHPDHFSKTLPTVPVAPQDLQVAIEPVAGWRWATQLLEEHGCDVHMAHPRKVKLIAESKQKTDALDAYQLARLLASGYFPEARRVPDTTYDLRLLLRTRSHIVRLRTSVLNRIHGIATTTGLHTIPGGNPCSVVGKQTLLASESILRELHLLADALTERIKALDHTCEQSVAQFPDTVYLRSMPGVGIITALTVVAEVGDFCDFASAKKLASYAGLVPKQRSSGTRVRYGGITHEGSPYLRTILVEAAMRIHPKGAPELYQVVSNLTPRCGAKKARVALARKLLSIMWTLVATQTTYNPSLVSSATTILSNPDTGAGA

SEQ ID NO: 110173 - protein, 374 aa, unidentified
MKYYSTVYVGMDVHKENYSLCCYTNEKEQAEYPQRVPADYSKVINYIEAMRFHYGDNVLFVCGYEAGCLGYTLYHELTAHNLKCVILAPTTMPVPSGRKKVKTDKRDAALIARCLAHHDYSPVHIPTQKDEQVKEYLRMRDDHKLALKKVKQQILAFCLRHGYHYDGTKNHWTQTHLAWLRTLKVEALYQEILEEYLLTYDYLTGKLARIDQRIEELASEDEYRENVAKLCCFIGIKTQTALSAITETGDFKRFPDAEHYAAYLGLVPGENSSGEGQNRLGITKAGNRHLRMLLVEAAQSYSRGQIGHKSKVLTDRQSGNSPAVIAYADKANERLRRKYYRMVLKNEKKTNVAKTAVARELACFIWGMMTENIA

SEQ ID NO: 110174 - protein, 446 aa, unidentified
MMKQKRSLKKVDMALPRHLQHINVNAAGIDIGSRSHFVAVPEGSDEKPVREFSGFTGDLERMAEWLIACGVTTVAMESTGIYWIPVFEILESHGLEVKLVNARHVKNVPGRKSDVLDCQWLQQLHTYGLLRGAFRPVEQVCTLRAYVRQRAMLVRSAASYIQRMQKALAQMNLQLHNVVTDITGMTGMRIIKAILGGERTPDVLAAMRDRRCKNSATTIARSLQGSYRPEHLFSLQQAVELYEFHQEKIADCDRQILEQLKRFDAQNAPDDAPPSNVEEALQRMSGVDLTSIDGIDTNTALKILAEIGTDMNRWKTAKHFASWLGLSPGTKVSGGKVLSSATKPVANKAAAALRMAAFTLFNSKSALGAYLRRQRARLGAPKAITATAHKLARLVYTMLKQGTAYVDAGQEYYEKRYRSRVIQNMKRKAQELGFELVAIQGAAVPA

SEQ ID NO: 110175 - protein, 343 aa, unidentified
MSEISMIGLDVAKNVFQVHGVDGSGKEVLRKQLRRNAVEKFFAKLPPCTVGMEACGSAHHWARVIGHYGHDVKLMPPAYVKPYVKRNKNDGRDAEAICEAVSRPTMRFVAIKSVEQQAMLSVHTTRALLVKQRTMVANALRAQLSELGIVAAQGHEGLHELMTRLEAPSDEIPEMMRSALLMLVEQWQALDARERVLEKQIVKAVRCDQQARRLMAAPGVGPIIASAVLAKVPDARVFRSGRDFAAWVGLTGRDHGTGGKHRPGHISKQGDRALRTLLINGASAHLRQQKRRGVSDPWLRELLARRPYKVAMVAFAAKTARIIWAMLAKGEAYRDRASAPAAA

SEQ ID NO: 110176 - protein, 385 aa, unidentified
MDEEVSPTTKNGDKHMNKTDKYIGLDVHKDTTVIAVAEGGRVGEVRVYGSIPGDLRSLEKVLGKLGGENVRLHVVYEAGPTGFLVYRRLRQLEIDCIVVAPSKTPQPKGVRQKTDLRDAVQLARLHRAGELTGINVPDEVDESVRDLTRARADAVHDLTRAKQRLKSFLLRQGYRYPGSANWSEAHQRYLRKLTLPLPALRSVLEEQLLAIDQATERVKRLDDLLEVQIPKWRHYPAVQALMCLRGFQMTAAAIMVAEAGDVRRFAHPRGFMGFLGLVPKEETTGGSRKLGSITKAGNAQARWCLIEAIQSAYGPPKLSSRLSLRQEGQPKAYRDLAWKIQVRLHKRGWHLLHRGVMKAKVNVALARELAGFVWDLLRQVPAPDA

SEQ ID NO: 110177 - protein, 491 aa, unidentified
MSKSTCKNSKGLAKKPQTKKQLEQEVVTLSVIRPNAAGIDIGDTLHAVAVPPGRDKEQVRIFGAFTCDLLSIIKWLLHCKVDTVAMESTGVYWKPLYAILIEYGFDVWLVNSKQTKNVSGKKTDMEDATWIQQLHSCGLLNRSFLPDDLTESLRSLVRQRKALLHDHSRCVQRIQKNFELMNLKIHTVISDIMGKTGKKIIEAIIKGQREAKNFLPLIDERIQASKDDIIKSLEANWRPECLFLIKQCYLQCEQLQQHICDCEKEVENILQQMVAIQNEGIIEPVESQPIQQKDADTAKAGNIKRERKNKKKNKNTPKYDVRQYLLKIHGVDVIDIFGVSEISALEILSETGTDLSKWETEANFISWLNLCPNNKITGGKLVSSKLMKKKPNNAAQAFKAAANGLKKTDNWLGDYFRRMKAKGGQKFAIVCTARKLALIYYKMVKNKIPFMPVDMNEYKEKYKKARILYLEKKLAELREDVAEFEPIREVI

SEQ ID NO: 110178 - protein, 342 aa, unidentified
MSRYIGVDLHRNRFTACVRSERGRQYVSTWKLEGLSKFVSRLRATDEVAVEVTGNTRLFYDAVEPRVKRLVVVDPRQFEVIRKSVKKTDAHDARALALFLSKDMLPEVRMKDPAHAEMASLVQTRDTLVKARTALKNKVNNLLSARGINLSRESLASDKGLREVLGMRFGTTVDVELEVLVGQIRSLNQSIARLEKAIADQGPKLPGHGNLKSIKGIGDVGAGVLLSVIGDVHDFNDEGKLAAYFGIVPRIANSNETEHSGRITKRGSKLGRTVLIPCALIAKRYSVYLQRYYERIQARRGTGKAIVALARKFLGIIYLTLKQNLVWEDFANGVIRDAEVSP

SEQ ID NO: 110179 - protein, 430 aa, unidentified
MQNDRQSSETVILGVDTHLDIHVGAVISQAGKLLGTHIIQTNQAGYLELLDWARSFGSLERAGIEGTGTYGAALTRYLIKNSIYVVEVNRPDRSKRRLEGKSDPLDAENAARTVLSGSSKAIPKMQSGACEALRIISVARRSAVKACTQAINQLRALLVSAPQDVRDKLWKSKPHECVTACINSEVSEHSPLRIALCSTLRSLAKRWMALTEELNELDESLDKLTRKYASNLRSQFGVGPQTAATLLAVAGDNPERLKNEAALASLCGVNPLPASSGKTVRHRLNRGGSREANNALWTIALVRMRSDPRTRIYVDRRTGEGLSTKEILRCLKRYIVRELYPLILSDLAYANRRSWHRSVNSPMERFFRSLKNEWMPVTGYTSFSEAAQAITGYIVGYYSELRPHEYNGGLPPNESENRYRKNSKTVASFS

SEQ ID NO: 110180 - protein, 433 aa, unidentified
MGLIVPTTIQPEREDQPLPYEWFVGIDWGSQQHQVSVLDRDRRRVGERVVDHDGASLARLADWLWTLSAGQPQRVAVAIEVPRGAIVEGLLERGFHLFALHPKQLDRCRDRHSVAGAKDDRRDAFVLADSLRTDQPSFRRLQLEAPQFLLLRELSRAEETLLAEFRRSANRLREQLHRFYPQMLQLCAAADAPWLWDLITLAPTPAHAMLLSEEQVQRVLKAHRIRRLKATEVLACLQAPALPVAPGTADAAQAHCGFLLPCLRVLAEQLLACSQQVSTLLRTLADEPGKGEGPSDVAMVQSLPGVGRKITAWLCAEATQPRAERDYQMLRTHGGVAPVTKQSGKRRQVVMRHGCNPRLRHALYHMARIAMQRDAHFGSVYAALRAKGQRHGQALRNIGDRLLRILMAMLRDRTGYDASRIRCKPVVEMGQKM

SEQ ID NO: 110181 - protein, 342 aa, unidentified
MNEVSIIGLDLAKNVFQAHGAASGGSVVFRRKLARAQLLKFLGDQPSCVVAMEACARAHHWGRAISDLGHQVRLIPPAYVKPFVKRQKNDMADAEAIAEAASRPTMRFVAVKSEAQQATAMVYRTRDLLVRQRTQTINALRAHLAEQGIVAPAGPAHIGRLAAIVDGEEGTLPVEVKELARLLLNQIADYAEKITDLDAKLRRRATQDDKARHLTTIPGVGPITAAAITTFAPPMETFSKGRDFAAWVGLTPRQHSSGGKERLGRTSKMGQKDIRRLLIIGAVAVVRWAARKGAPEGSWLARMLARKPKMLVAVALANRMARTAWALMRKGEDYRDPMAMAA

SEQ ID NO: 110182 - protein, 346 aa, unidentified
MNNSLSTFDPCGIEVSAQTLVVALGPPERPASLREFPNTASGHQGVRRFLERAGQPVRVAMESTGLYGLDLALCLHHAGVAVMVANPRAVRHFAQAMMQRSKTDLLDAEVLRQFAARLPFLAWRPPSPTALKLMAVARRLEALTEILAAEKNRRHAASLSEALPAIVRRDVERSIQTQQRAIERLTRAAEEFVLSDPQLARRFELLLSIPGFATTSALHVLAELTLLPADLNVRQWVAQAGLDPRQYSSGSSVEKKPRISKAGNKHLRRALYMPALVAVRHDPHLRGFYEHLVARGKTKMQALVAVMRKLLHAIFGMFKHDQPFDGTKVYALAPAPTFAALEVACA

SEQ ID NO: 110183 - protein, 424 aa, unidentified
MKVTYQTCCGVDVHKSFLVATIVKTTGGIEPSYQKKRFSTFNSSILEFKQWLLDNHCHDVCMESTGKYWVPVFNLLEDKINVVIANPKWVKAVKGNKDDTKDSKWIGDLFRLGLVKGSYIPCKKVRILREYTRYRYKLVSCRSSEKNRYQNALTVCNVALDSIVSDIFGKSSTSIIDYLLEQSGTSINHEEIASKLLRSLKSKEDAVIESVEGYQMTDAQKYRMRLVRAHMDYITAEINDVDKMIENMISSNPDFENAVQFLCTIPGVKRDSAITIISETGTDMSQFSSSKRLCCWAGLTPGSNESAGKKKSVRITRAGVYLKPALVQCAHAAVKSDKSPYYKKKYESLVKRRGKKRAIIAIARMILTAIYQMLSTGEQWNPSDLYKIDMPVALVEKQKAKAIKQAKKLLQREGLLPPDEPLAS

SEQ ID NO: 110184 - protein, 337 aa, unidentified
MNYIGIDIAKSTVQVFIPQNELDIEIENSLKGFQNLYAKLKKLYKKSIDEIVFVYESTGSYSTILETYAQKKQISCFRVGAYQSASFSKVIKNRNKTDKVDARMLSQMYILAKEGEIRVPHRDKEAHKIRSLIKYYQSLVKEERRKANYLEAASFNLEDGYVLKKVKKHIKRLQKEQQEVIEIILEIIHHNSVYHQAFTNILSIKGIGKKSAIILLYLFLRYPNASRQHITALCGLDPIQRSSGISVQHKERISKQGLTLVRDILYMPTLVAVRYNDEMQLIYERLVARGKPKMVAQMAVMRKIVLLAHSLYKNNERYDEKRFLKFTQVEKNIETED

SEQ ID NO: 110185 - protein, 601 aa, unidentified
MSTVLSLDRIGVGIDTARYGHRVSFLRPDHQPAAKPMTVLESRAGYQALQERLQLLQRQHPQAHFHVRIDAAGQYAANLEHFLRTLTLPMTLSVGEPKRNKDYQKAHFPKRTTDDTESQAMARFAVVELPAPTAPVAPALNLLREVAGRLQAKVKQSTQAINRLHNLLARVFPELANLTDDLTASWVLELLDRYPTAQRIGQARLATLQNISYLTAELAAQIHLVAQQSVACLSGDVAETLVRDLVAQVRHTQHAEEQMRRLLSDAYAALPASAHLQVVTIPGIGVATAAALIAQTVDIQRFTTPAHFVGYFGVFPEENSSGVDKLGKPLPPGTLCMSRKGNDLVRHYLWNAARAAIVHNPAIRALYQRLRSKGTRGDVALGHCMRKLLHLVFAVWKSNRPFDKQYDAEQTPGQTCTTPSPGTGTDPTAASNEPSPGPAAPSSDPEQNNATAVGHTRDVPAEEVVTTATATVAPTPAVVKPTPPANRVARPKVDFAFLRQQVTMEQVLQRLGLADSLRGRGQQRRGPCPIHGQPGNTQPTFSAHLGKHIFQCFHATCGAQGNVLDLWAAVHKLPLYEAALHLAETFHLPRNREEEPVLGTR

SEQ ID NO: 110186 - protein, 435 aa, unidentified
MEEMTDEPLYRDRVCGIDIGKAGMVATIRVPSDKNPARRASETRSFGTTRREVLALADWLRCWQVTAVVMEATGDYWKGPFYRLEAEGFECVLADARQVKNLPGRPKRDPADSRWLAACFERGAVTACFVATPEFRVIRLHTRYRRDLTAERTREKQRAEKLLESAAIKISSVITDLHGVTGRDIMDHLIAGERNPKVLAQLARRSARRKISQLEEALEGAEFFTADHAALLATMLARIDRVNEEIARLTEVIERLLAPYEEQLAQAESMPGWARRAAQDAVAETGVDMSRFRTGAHLASWAGRTPLDNQSGKRNGRSKSKKGNRYLGGLLGETAVAAGRTATREGARYRRLARRRGKAKAQVAVGNTQLKVYHKLLSNPGMRYADLGPDYYERRASVRRQIAHHIGKLGALGFEVTLCRIPEPEPDGTGQTQSA

SEQ ID NO: 110187 - protein, 430 aa, unidentified
MNRTSKSAELAALIGIDWASQRHALCLYDCATGKRESSILEHTPEAIAQWARGLQERFAGKKIALCLEQTRGPLIYALREYSFFVLYPINPATAARYRQAFKTSRAKDDPSDAQICLELLLHHREKLTPWLAEDAQMRELSCLLQHRRVAVDLRTLLTNMLRDALKAYYPQALELAGQDLFAPLGCQFLLKWPSLQDLQKACKESVRKFYYAHNCRRMDVIEKRLDAIAQMTPLCRDRALLEPAMVQVKMLARQLLQLGGALKEYDSKIEQLFAQHSDALIWQSFPGAGLTLAPRLACAFGTERSRYQSAAAIQQYSGTAPVTEKSGKNQHWVHRRWARPHFTHQSFFEYASQSVLHCGWAKVFIKDQLARGKTYPTAIHALAFNPERFRGMFVCWRDRVPYDETIYLQSLQRRGSHLAAKLNQQLPKAA

SEQ ID NO: 110188 - protein, 342 aa, unidentified
MRSVLCKRRSRHVMSALVCGLDVHKDSTYATILTSEGKIVNQTRMNNERVLSYLSHFKVARVAMESSNQVAPLYRQLTREGYLVMVSHPKKTRYIAEAKIKSDRVDSKAIAELARLDALPLAYMPDKETAMLREKVRRRAFLVRERVKLRVKIKSILTYEGLKWPSDHGLFTGKGEAWLHGLNLESVESYLRVLKPLDDEIKFVSKQLKGMAEDNEDVKLLMTIPGIGYYSALLIKSEIGDVNRFPFGDRLCSYAGLVPSTHASGSTVRHGGITKEGSKWLRWVMVEAAQAHVRMYDTAMTQAYHRIAERRGKQVAVVAIARKLLMCCYSVLKNKRPYYDQI

SEQ ID NO: 110189 - protein, 347 aa, unidentified
MRFYNRPHQYYCGIDLHVKTMYVCILDTTGQVLVHRNVPSTPAAFLEVVAPYRTGLVVAVECMFTWYWLADVCAAEGIAFVLGHALAMKAIHGGKAKNDKIDSHKIAVLLRGGMLPQAYVYPAAMRSTRDLLRRRLHLVRKRGQLLAHIQNTRAQYNLPAFEKRLAYPGNRDGVVEHFPDPSVRKSIEVDVALIDQYDALIIDLELTIAREAKRHDADAFHRIRSVPGIGKILSLTILYEIHDITRFDRVQEFSSYARLIKCTHTSAGRTLGTGGAKMGNVHLKWAFSEAAVLFLRHTTEGKKILTRLEKKHGKGKALSILAHKIGRAVYYMLSRGTVFSMEKFLAA

SEQ ID NO: 110190 - protein, 372 aa, unidentified
MESIVYVGMDVHKDTYSVCCYKSSEDRNYFEKKMKASSSNIIKYLKSVEKEFGEGTVFVCGYEAGPTGFGLYRDLQKAGYICVVMAPTSLRKAPGNRVKNDTVDARYLAKTLFTKDYSEVHVTTKHEEAIKEYCRMRLSIKKELKMAKQLLQSFLLRQDKKYTEGTTYWSLNHRKWLKTVTFEDGYLQETFNEYMITINSLEARLKTIEHKIDEIANDSAIKEKVEKLVCFCGIETLTAVTIAAEIGDFNRFKKAYHFANYIGFGWAEESSGKKERVLGMSKCGNINIRRLLTESAKSIKQTNSRGQKSKRLIDRQKGKDPQVIAYADRCRYRLKNKMIHLECRGKHSNVSSTAAARELACFIWGMMTNNIA

SEQ ID NO: 110191 - protein, 347 aa, unidentified
MNYVGLDWAYGRAAWCALAESGAIQGEGLIPADEDGLARLALKLGPDVKACVEMMSGAIWVKDQLELCGWSVEVAHARKVRDIAPLACKTDKVDARVLAELCRRELVPAVWVASLKDRAIRERLRRRAHLVKARTSARNRIFGLLTQFGLRVSFTRLRQPDALELLERRGVPEVWRDSIAEHLAEIEELDRRINPIDRELGPIARSDPRAKLLQTIPGVGPLIGLTFAAEIGDVSRFSSASKLVGYAGLAPRIIQSGERSQTGRLSKAGSRTLRWSAVEAANNAWRPTNPFHEHYRRLAARHGKNPAKSSVARKLLVCSWHMLSRGQVFQPTQSTTAAESSSRFLAA

SEQ ID NO: 110192 - protein, 366 aa, unidentified
MYYIGLDVHKKTISYCVKDVSGQVQREGRIPATRTELDSWMKTLPKPWTVAMEASIFTGWVYDHLLPQAAQVKVAHPVMLRAIAAAKKKNDRIDAGKIADCLRCDFLPECHMVSTAIRDRRRTLRYRHLLVRQMVQMKNRVSGLLLETGVSHNKQRLHKVKYFRELLATNKEVDESIRPLLKLSRESIERLQKTDYALVSSLERDPLLAQRLKNLRTVPGVGPITALTWALEIGDVSRFHSVKQAISYCGLCGDEKSSADKVLRTSLSKQRNKHIQRVLVEAAKLAPKQSHELALVYEKAKQKGNANRATIAVARKMVTYLLAVDRGDRPFCTRRRLRYHGGIKPPPARKHRITQRAGCQVLQVAD

SEQ ID NO: 110193 - protein, 346 aa, unidentified
MNTTTIGIDLAKLVFQVHGVDVRGKVTLRKQLKRQQVVKFFTQMTPCLIGMEACGGAHFWARRLSDLGHTVKLIAPQFVKPYVKSNKNDAADAEAICEAVGRPNMRFVPIKNTEQQALLGIHRVRQGFVVERTAQSNQIRGLLGEFGLVMPVGIRCIESKVPEILEDAENGLSGVTRALIARLLAHFRELDRQVDELEREINAWHREDTASQRLQAIPGIGPLTASALVASVGDAKVFHNGRQFAAWLGLVPRQNSSGGKTNLLGISKRGDVYLRTLLIHGARSVLRNLNRHPDRAESWLARVAARRNPNIAAVALANKNARTVWALLAHGRDYQSGYHSSNPMAA

SEQ ID NO: 110194 - protein, 327 aa, unidentified
MTEPMVGIDVAKASFDVAVPLERPGKYRTKGKLPNTPTGFAELLGWLRQHAPAAGVCMEATGIYHEALAAFLVQHGVTVSVVNPAQIAAYARSELSRTKTDRCDAKLIARFAMAQQVHGTLRPWVPPTPGQRQLRALVHRLNDLQAMRQMEANRLAVGDASVRLSIQRMIDALDQQIEALKKAIEDHIDQDPDLRRDHDLLRSIPGIGDLTAAFIQGCAGDLRRFDDPRQLDAFAGLNPAIRESGQWVGQSRLSKLGHALLRARLYMPALVASRHNNAVRALFDRLVGRGKPPKLALGAAMRKLLHIAWGVVRSGRPFDPQRALATG

SEQ ID NO: 110195 - protein, 316 aa, unidentified
MMKQIYCGVDACKARLDAYVATNSTGGVSDSFENTAEGIEKLRLFASEHGAVMVVMESSGSVERLGYRLLWEADMPCALVNPRSVYHYGQSMGFLEKTDRIDAMMIARFASAKEVVAMPPASPAQQRLTALYARLRHVVDDIIKQKQRLHTAHEDFAQDGIKKLLKVLKDESDKLSIEIASMIDDDPLWQALATEFTKYKGVADRTVAVLMADLREIGTLSNRAISKLAGLAPLADDSGKRQGKRSIRGGRASVRNILFLIAGHLARFEPDFIAFKLRLEQKGKPKMQIRIALAHKLLVRLNAKARDIRVSLANAA

SEQ ID NO: 110196 - protein, 401 aa, unidentified
MNAVGIDVSKGKSMVCVMRPFGEVVLEPFEVLHTAQNLNDLAGKLKALDGETRVVMEATGNYHKPVAFVLHDAGLFVSVVNPVLIHDYDNNSLRRVKTDRKDAVKIANYTLDKWTRLRQYLPEDDTRLALKNCYRQYQQAVAVRTMLKNNLISSLDLTFPDANKLFSSPAKSNGCEKWVDFIGDFWHSECVSSLSSDAFAKKYLKWCQKHGYNFTRSKSDTIYACAVNAASLPKSPTSKLLIQQQVAQLKAVSQSVAAFQQEMLRLSQQLPEFDTVMEMYGVGPSLGPQLMAEIGDIRRFSSKKLLIAFAGIEPQPNDSGKIVGNDSGISKVGSAVLRRTLFLIMTVILKTQPQDEPVFQFMNKKRSEGKPYKVYMMASANKFLRIYYARVKAVMDSKHSK

SEQ ID NO: 110197 - protein, 391 aa, unidentified
MIYIGIDVAKDKHDCFITNSEGEVLFNAFTIPNNADGFHDLFQKISSLTNDFSNVKVGLEATGHYNYNLLGFLIDKGLPTFVINPLHTNLFRKSLSLRQTKTDKVDAHTIALMMMSGVNLQSYSDTSYHNEELKSLTRYRFDKVQERAKLKTSISRLVNILFPELEKLVPSLHMVSIYALLAEFPSSAQIASCHLTRLTNLLANASKGHYNKEKAIEIRNAAKHSIGSNMPAKSLELKHTIRLIQELTSEIDEIECSIKSIMDEIRSPILSIPGINYRMGAMIIAEIGDFNRFSSPDKILAYAGLSPSTYESGQLDGCYSHMEKRGSRYLRYALFNATKFVCIWDNQFSAYLAKKRSEGKHYNVAISHAAKKLVRVIYQLEKSGQLYHRAA

SEQ ID NO: 110198 - protein, 318 aa, unidentified
MDSQIAVGIDISKRTMEVAIGYEQSTVIFGNDDAGHQALIKALKNYQVSLIVMEATGQYQLACACALQAAGFAVVVINPRQARDFAKAMGRLVKTDSVDARMLAELAQVLNRRPDRDRFIKPMPDQAQQQLHALVLRRRQLVRLLVSERQRKHMAHAEVVQDITELMDVLAKQLETLDRRIAEHLAQYRSDLATLLKSVKGIGPATAATLISELPELGQLKAKQICALVGVAPMNRDSGQARGKRIICGGRATVRSALYMAAIVAMRYNPVIRRCYERLLAAGKPKKVAIVACMRKLLIIMNAMVKSGRSWNDQVAQA

SEQ ID NO: 110199 - protein, 377 aa, unidentified
MLSARPAGACRPPPDQQKELAITTIAHPERPRVTVGVDTHLDVHVAHAKDQLGRRMETVSIPTTPAGYQDLLAWARGLGEVEAWGVEGTGCYGAALTRFLGDQGQVVLEVNRPDRQARRRRGKSDPVDAEAAARAVQAGEVTTLPKAGTATVEMIRSLRVARQTAIKARTQAINALKALLVTAPAQLREQLRGRSAAMLVRQAAALEPGPLVTPTAAAKLALRCLACRYQALHAEVATLDAELARLVAKAAPGLVARFGVGPDSAGALLVAAGDNPGRLRSDACFSMLCGSSPIEASSGKTRRHRLNRGGDRQANAALYRIVVVRLRWHQPTKDYMARRLTEGKTTKEIIRCLKRYVAREMFTVLNQMDQDALTPAT

SEQ ID NO: 110200 - protein, 367 aa, unidentified
MGERTRFLGLDAHALTIAVAVAEEVGAPHEHGVIPNDPSSIRRLVCRLGGSDVRLVACYEAGPTGYALHRQLQALGVECMVVAPSLVPVRSGDRVKTDRRDALKLARLLRSGDLTPVWVPDQEHEALRDLVRARADAKADELRARHRLSKFLLRQGIRPPHGVRPWTTRYDTWLAQLRLEEPCAQVVLEDYRNVVRAAGERVRGLERALHTAVPDRHRPLVAALQAFRGIAFLTAVTIVAEVGDLRRFATAPQFMAYVGLVPSEYSSGASRYRGRITKTGNAALRHVLGETAHHARLQPRISTTLRRRQQGVPPDIVELSWRAQKRLHHRYRHLSSRLGRPKAIIAVGRELAGFIWAVGQHIEIAAA

SEQ ID NO: 110201 - protein, 482 aa, unidentified
MKPKQQEKTKEATCGPTQGHWQQMNRKQRREMTRKIQSEDISLEVIHPNAAGIDIGNESHYVAVPPTRDSQPVRRFGCTTAELKAMANWLKQCGIGTVAMQSTGVYWIAVYDILERAGLEVYLVNARDTKNLPGRKSDVQESQWLMKLHTYGLLRNSFRPSQEIRTMRTYWRQRNDLVQSAGRHIQRIQKALTQMNIQLANVLSDVSGMTGQAIIKAILTGERDPHKLVAFRDHRVKASEEKIARSLEGNWEEDHLFVLQQEQDGYEFCQKEKAQCDQRVEQELQQREGRSAGANLPEEKRKERLKKKKGNKPQFDLRTGLFRMSGTDLTRIDGIDVMTAMTILSEAGSDMSKWETEDHFVSWLRLCPDNRISGDKIIGKGRLPTNNRVSIALKMAANTLRTSKTYLGAQFRRLRSRLDTPVAIKAMAAKLARLVYRILRYGMKYVDHGAAFYEAQHRQLQIKHLKSKAAKLGFHLIQVPAA

SEQ ID NO: 110202 - protein, 351 aa, unidentified
MKLATIDYSGKKVFVGMDVHKKTYAIAAYCDGEIVKKWTTKADPVATAAQLNRYFAGAEIHSAYEAGFSGFKLHRVLSDVGVLSRVIHAASVEVKSNDRVKTDKRDAKKIAEQIAVGKLRAIDVPSEEVEHRRALTRGREQVVERRKAIGNQLKMKLSYLGIDYPDKFKISENFMKWVEKLEINGSHRFAIKELIDAWRQESKRIKRFEQELAKQAANDPLEKIYRSAPGIGAISARTLSNELGNMTRFDNERQLFSTTGLTPGEYSSGDRVRKGHISRQGSSRIRGLLTEVAWRAISEDHSLKAFYKRVAQTRDGKRAIVAVARKLLGRLRYCLKHKVEWKDLAASNVAA

SEQ ID NO: 110203 - protein, 476 aa, unidentified
MVEQGCCSGWDRPGDGLDPSLRESFRETAAPGGARWAATYEDDAPRALAYQAGRAPRLPQVCLEVSAMLFVGVDWAETQHAACLVVAAGTVVRRLTIPHTPAGLARLRAAITAAEPDPTAVLVAIERPDGLLVEALLDAGYVVYALNPKAVERYRERTRLAGGKTDPADAELLARVLLTDRDRQRPLQPHGPLAEELRVLARQDETASRDQRRLLNRLRQELLAAFPALLDAFPDLGAVSTLAFLDRWPTAAAARTLRPAAIEAFLRQHRHNHPDTAAARIHAALQAAALTAPAHLAAARVGAIQLAARQLLLLHRQRAAWERRLRELLAGEGAHPDGEILLSLPGLDARLAARVLGEIGDRRERFPTPAALQCYAGTAPVTKASGRARQVVARTACNRFLRQALLRWAFCSLTRSAWARTSYDRQRAAGKSHFQALRALANRWLEILHHLLATHQRYDEAVHQRNRARAAGVAAA

SEQ ID NO: 110204 - protein, 457 aa, unidentified
MMETKRRREQRSMLPVHPDAAAIDIGATVHVAAVGPARDPEPVRSFGTFTGDLHRLADWFAQCGIKTVVMESTGVYWIPIYEILEQRGFEVRVVNARDAKHVPGRKTDISDAAWLQRLHEFGLLRGSFRPQGAIAALRAYLRQRERLLDYAAAHIQHMQKALTQMNLQIHHVISDITGATGMRIIRAIVAGERDPDTLASHRDIRCHSSAETVRQALIGNYREEHLFALAQAVELYEVYQAKVATCDEKIEGVLERLKQPCRAPAKPLRAARHKTRQPNAPAFDARGALYAVLGVDLTQIHGLGPYLALKLISECGTDLSAWPSAKHFTSWLSLAPGNKISGGKILSSRTRPSGNRAAALLRLAATTVGRTETALGAFYRRLSARIGKAKAVTATARKIAVLFYNAVRHGMDYADPGASYYEERYRQRVLTNLQRRAKAFGYVLQPTEIKAVSMAVS

SEQ ID NO: 110205 - protein, 394 aa, unidentified
MAFKIFCKNCCGLDVHKTWIYACMGITDTNGRTEYKQARFSSFTKGLQKLADWLAKYDCNDVCMESTGKFWIPVFNILEKTCWVTLAYPKYTKPQKGNKTDHKDAKWICDLYMCDMVNPSFIPPPDIRQLRDLMRYRSKLTNIMTSEKNRALNCLTVSNLKLDDVFSDVFGKSSRSVIRYILEHPGETFQVAPFIDRRCKHPVEEIQAVIDGTISHQQAVKLRECLQHLDELEVHKTNVEKEILCLVRQYPYQLELLQTVPGFSGNIMTAIALISEIGADMSVFPSAKHLVSWAGCCPRNDQSSKKVKSTRISRAGVYLKPLLVQVAIQPFTANADKLSAAGALEIRCQICDGRFLSMWAALFIFLGCPLPPCPKNLHVHNGRIVILASVAWIF

SEQ ID NO: 110206 - protein, 407 aa, unidentified
MEVVIERACGMDVHKDNITACILTPEGKEIQTFSTKTVFLLQLVDWIKQHNCTHVAMESTSVYWKPIVNLLEAEDIEFLVVNAQHMKAVPGRKTDVKDAEWIAKLLRHGLLKASYIPDRNQRELRELVRYRRSIIEERARQHNRIQKVLEGANIKLGSVVSDVLGVSARDMLDAIADGEKDPEKLANFARRTMKKKKEELELALKGYINSHQRLMLKTILGHIDFLTEQIEMLDQEVADRVSSHQEDVARLDSIPGIATRMAEQILSEIGTDVKKQFPTAAHMCSWAGLVPGQNESAGKRKSAKTKKGNKYLRSALTEAAHSVRGSKNYLGALYRRTASRKGKKRAGIVVAHAMLRISYYLLTRKEMYVDLGEDYFDKQRQQSIVRHSLRRLESLGYTVTLEEPKAS

SEQ ID NO: 110207 - protein, 397 aa, unidentified
MYIVGIDIAKRKHEAAVIDGEGTVIIKPFSFTNNCSGYNRLLAMLTKAKLPLDEVSFAMEATGHYWLALFTRLQKEGFRVQVINPVQTNSIRSFYIRQAKTDPRDALLIAEVIRFGHFSESTLHPENIYELRELCRGRHAIVSMQADVKRKVVALLDQVFPEYETAFTNLFGDTSMAILQTCPTPKELSEMRLEELCHLIEVSSHKRFRMAKAQELQELARNSFGFAMAGDVFSTMIRLYAKHLDFLKQQVQEMDRKIAEIMDTLDTSITTITGIGPTLGAYILSEIGDISRFSSAAKLAAYAGIDPTIRQSGEYNGVRNRMSKRGSPYLRHAIWLATSSAVLHDPALKLYFQKKRDEGKPYMASVGHACRKMVSIIYAVMRDNKAYTPCIPNEISA

SEQ ID NO: 110208 - protein, 355 aa, unidentified
MSNYITIGMDLGNKKHTVCALDQEGKVLWRREVANTPEALKPFFEENAGATVAMETGLCCRWISALAKSCGCDALVGNARKLAAIWQSKQKNDENDALLIAKLARADRELFHPVELRDDERHEMVQIIELREVAVSQRTQAVNSVRGLCKAHGVFIPKCDAACFHRVAKDAIPKGMAWKFKPMLRHLKGLATTIKRYDAMLEKYAQAHFKEEVELLRTIPSVGPITSCAFVAHVADPKRFGSARDAGAYFGLTPGQDQSGDKDAPKRITKAGSTLMRHLLVTAANYILRASSPDTALKRHGERICARGGKVARRKAKTAVARKLAVVMLAMLKSGKAYDDGLAAKNAATGDAPAA

SEQ ID NO: 110209 - protein, 340 aa, unidentified
MIIGCDFHPRFQQIAFVDQESGEYGERRLNHLDEAERFYRSLAGRQVRMGAEATGNFRWFRRLMQELGFEFVLGDASAIRASYPRKQKTDKRDARHILTLLVEDRFPAVWQPPADNDELRQLLMHRCRLVRMRARVKNQLDSMAKDEGLLSPRVWSPRRRGEIEALPLPGWYAHRRADLLGLLDGLDKQIRPLDEAVREAAEGNREACLLMTHPGVGPIVSLAYVLTIGDWRRFPRGKQVGSYLGLIPAEESSGGKRRLGHISKQGSTLLRWLLVEAAAIAQRYDAGWHRQYVRLSMSKHHGVAKVAIAHKLAVRLYWMLRSGEDYSKVMERGSHAGQSV

SEQ ID NO: 110210 - protein, 423 aa, unidentified
MDRIYERSAGIDVHRDTLVVTVRINEHGRRDSTETRTFETFHDAVLELARWLVECQVQVIGLESTGDYWKAPVRVLQQHCPGTLIWLVNPAEVKKVPGRKTDRIDSRWLSKLVMFGLVSPSFLPSPDQEDLRKLTRLRAKVVMDQTRYSNRIVKYIEASGIKLASVCSDVLGKTGRRILDAILAGTSDPQALAELACGTLRTKKDQLARAVQGSISEATLFVLRELLGELDRTDQLLERLDAEIALRLRPLAREMELLKTVDGVSDIVASTILAECGADMSVFPSDANLASWGGFSPGSNESAGKVKSARTRKGDKYLRTILVQAANAAVKVKNSFWKQKFSQIFARLGHKKAIFAIGHKMLVAIYHILRDRVPYRRPEIKPPTAKKLAHMLKTYGERIRELGFDVVITPKPAPEVPGGAMQT

SEQ ID NO: 110211 - protein, 351 aa, unidentified
MFAQSLGIDVAGKAFRVCLKIRRTDGQVKIKGSRKFSNTPKGFAALLKWVTSKQTSDDPMRAVMEATGVYYESLAYFLHEQGWRVFVLLPNRIKGYFKFLNLKSKTDKIEAAGLAELGINHNLPTWEPASPQMYSLKRLCRERNTLIDEKTVISNRLHAEKSCKTPDRGTVRRLKQLIRLIDIQVKEVEQDLSQGLEQDPELKQRIDNICQVKGLGWITVLCIIAETNGFKLVTHKSQLVSYAGYDVVERQSGSTINGKTRISKKGNRHIRRALHFPALSVVKYHDEFTNLYNRVYDRTKIKMKGYVGVQRKLLVLIYTLYKKNEAYDPKYAQRNEDNSRSRQGTMPAYTG

SEQ ID NO: 110212 - protein, 340 aa, unidentified
MKKDVKCYLGMDISKLWVDVTLLHVVDHQKQPTTTERFDNTETGIKALDKWFRKQQVPFDDNSLLVVENTGVYHRLIWGYCSTHGLPLHIGNATHIKYSFGIARGKNDKLDSQRLCSYAFKNAEELKATPALNPALLQLKDLMTARSRLLSQLNSIKQYLGELKLSNTKAVQQTLEQVHAAALEGIKASLKTVEEQIRQLIAQDAAIKSNYELLVSVPGIGHLTAVYILCCTNNFICKITGKQLASYAGVAPFGNSSGTSVKGRDKVHKMANKELKKLLHMGALAAIQHYEEFRAYYERKVKEGKHELAVLNAIRSKIVLRAVAVINNQHKYVDNYKKTA

SEQ ID NO: 110213 - protein, 424 aa, unidentified
MKVTYQTCCGVDVHKSFLVATIVKTTGGIEPSYQKKRFSTFNNSILEFKQWLLDNHCHDVCMESTGKYWVPVFNLLEDKINVVIANPKWVKAVKGNKDDTKDSKWIGDLFRLGLVKGSYIPCKKVRILREYTRYRYKLVSCRSSEKNRYQNALTVCNVALDSIVSDIFGKSSTSIIDYLLEQSGTSINHEEIASKLLRSLKSKEDAVIESVEGYQMTDAQKYRMRLVRAHMDYITAEINDVDKMIENMISSNPDFENAVQFLCTIPGVKRDSAITIISETGTDMSQFSSSKRLCCWAGLTPDSNESAGKKKSVRITRAGVYLKPALVQCAHAAVKSDKSPYYKKKYESLVKRRGKKRAIIAIARMILTAIYQMLSTGEQWNPSDLYKIDMPVALVEKQKAKAIKQAKKLLQREGLLPPDEPLAS

SEQ ID NO: 110214 - protein, 403 aa, unidentified
MSPEHSIDIFLGLDVGKSEHHACALDRDGNKVFDKPLPQLESELAGVFHQLQKLGTVLVIVDQPNTIGALPIAVARDCGCEVGYLPGLAMRKAADLYPGRAKTDKRDAFIIADTARTMPHTLRAVDRNDEVLSALKMLSGFDDDIARDCTRTVNRLRSVLTQIYPSLERVFAGSTLTRTPILELLIHYKGPQGLKRAGYQRVLNWMIKCTRKDPTPLVDDIFTALKAQTVTVPGSDAAELVIPQLAANIQALKEQRNTIAEQVEEMLADFPLCEVLMSMPGVGIKTAAQILLAIGDGSDFASGGYLAAYAGIAPVTRRSGSSIRGEFPARSGNKRLKNALFYSAFAVIRSHEPSRRYYERKRAEGKRHNAAVICLARRRCNVIYAMLKNKEFFREIPPRPVAA

SEQ ID NO: 110215 - protein, 427 aa, unidentified
MPYRIAGIDVHKRMLAVVVSEVEVDGEYAFERRQFGSNPAQLRLLAAWLLEQQVEEAVMESTAQYWKPVWGALERYWKPLCQKREGARPTSGAMHLAQAPSNRGRRGRKDDFADAERLVKRLVAHELILSFVPDAEQRLWRTVMRTKNQLTRNRVQLQNRLEALLEEAHLKLSSLVSDLLGVSARRMLKALAEGETDPAALAALADHRLRATQEELCDALGACQDIPPVYRRLVKMALEDWQRLDTQIRQLEQEMATLLGPYQEQVQRLAEVPGLGVDSAQQIIAEVGATAATFPSAGNLSSWVGACPGKEETAGVNHSRRSPKGNRPMRRILNQAANAAVKLQGSIFAILYRRYVPRWGHNQTIAVIAHRLCRLVWKILHQGVRYDERGPAVSERSKHTRTAKMIRQLRNLGYRVELPAPASGVPA

SEQ ID NO: 110216 - protein, 347 aa, unidentified
MVTIGIDPHKSSHTAVALEDTGVSLGEIRVLADSSTLATLSAWAARWTRRLWAIEGAGGLGRLLAQQLVVAGETVVDVPSALAARTRVLQSGHGRKTDGIDARSVALVAQHRNDLSRIALDDHSAVLRLLSDRRDELTSERRRVINRLHRLLRDLHPGGAPRQLSADRASRLLSTVRPAGVVEIERKAMARQLLADVRRIDRALVDNRRRCARAVAASGSSLTEIFGISDVLAAKILGHTGDITRFDNADHYASYTGTAPIEVSSGDQRRHRLSRAGNRSLNHALHLAARVQTMHPGPGRTHYQRKQAEHKTPSEALRSLKRQLAKVVYRHLRNDHALQTSPTPGLT

SEQ ID NO: 110217 - protein, 343 aa, unidentified
MSEYDGRQFVGIDLHRRRTVIVRQGESGEQLGSSRIVNDPLALAAEIGKAGPSPEVVLEATYGWYWAADVLAEAGARVHLAHPLGIKGFAARRVKNDLRDATDLADLLRMNRLPEAWIAPPEVRELRELVRHRAKLVAVRSGFKAGVHAVLAKQGLHIAVSDLFGPRGRAELAQAPLDTAYRARVNAYCRLIDTLDREIELAAGWIAARLATHPGYRAIQQIPGVGPTWAAVFAAEIGDVNRFASARHLCSWAGLTPRHRESDTTVHRGPITKQGATLVRWAAVEAVQKLPPTAGWLVSTREQIAARRGRNIAKVAVARKLLILVYYGLRDGHIRALHNAGAA

SEQ ID NO: 110218 - protein, 342 aa, unidentified
MQVTTIGLDIAKNVFQVHGIDAAEKVVVRKQLRRRQVLEFFKALPPCLVGMEACATAHYWARELKKLGHQVRLMPAKDVKAYVKRNKNDAADAEAICEAVRRPTMRFVQIKSTEQQGRLMLHRARDLLMRQRTQVINAMRAHLAELGIVAAQGRDGIKELLKIIASEEDARLPVDAHASLVVLAAGLHAVQTMIRSIEKRIMVQHRSNEASQRLETIPGIGVIGATAIAATVPDPKVFGSGRDFAAWIGLVPREDSTGGKQKLGPISKRGDRYLRRILVVGACAVLRYARHKPEKYPWLTQLLARKPFKVVAVALANKMARIAWALLAKGGTYRVPALAAAA

SEQ ID NO: 110219 - protein, 387 aa, unidentified
MPQPNDLSRSLVALDQDSTIIAVVEMSQSSWLVAGMLPGIERQPRKKLEPSAERLLGLLHRWRDEAVKAGRKITRIALAFEAGRDGFWLARWLRARGVEAHVIHASSVAVSREHRRAKTDRLDTELLKRGFLGWLRGERGHCTMARVPTIAEEDAKRPNRERECLVGERTRIVNRMKGTLARLGIRNFKPTLRKAAERLGTLHIPEGSALPPNVSAELQRDIARLGFVTRQIKEIEEARQERLEQEPETGPHAMVRHLARVVGVGIETADMLVNEVLSRPMRDRKAVARYAGLTGSPDESGAKRREQGLARAGNARVRRGMIQLAWRFLRFQKESALARWYQARTADSRAGTRKTMIVALARKLLIALWRFVTTGETLEGVILRPAG

SEQ ID NO: 110220 - protein, 350 aa, unidentified
MDTTVAPLASIGVDIGKEVFHLVGFGTDGKIAFRRKIKRLALIETFKKLPPCIVGMEACLSAHFVSRALRKLGHEPRIIPAIYVKPFVKGQKNDYNDAEAIAEAALRPNLRTVREKSQEQLDLQACHRVRSWLVSRRTATINQIRAFLIEQGIALRAGVAALRNSLFDILKNREDEISPRMSELIVGLYEDWLWLDERIETITKEIEEISQREGNCLRLMSVPGVGPLISTAVVAAVGTGEAFDRGRDFGAWLGLVPRQYSTGGRSILGSISKRGSRYLRTLFIQAAKVLLMRPQNWPKFSFGAWLANAATRMHRNKLATALANKIARIAWSVLSTGKAFDTHKLEIEAV

SEQ ID NO: 110221 - protein, 321 aa, unidentified
MDVQGKVVLKKQCKRDQMAAFFANLPPCLIGMEACGSAHYWARKLQALGHTVKLMAPQFVKPYVKTNKHDAADAEAICEAVCRPNMRFVPIKNVEQQAVLALHRVRQGLVKARTAQGNQIRGLLSEFGLIIPLGLAAIHQRVPVLLDQAGEELPGAFRHLVQRMLDHLKDLDRQVGELDVQIQVWHRSNALSRKLEKIPGIGPITASALIASIGDAKNFANGRQLAAWLGLVPRQHSTGGKSNLLGISKRGDCYLRTLLIHGARAVIWQAQRKINAQGWLANLLARRNKNVATVALANKNARTVWALLAHDREFRPDYAGA

SEQ ID NO: 110222 - protein, 340 aa, unidentified
MKLCGAIDLHSNNNVTVLSNEKDEVVYRKRLPNDLKLILGQLAPYQSEIEGIVVESTYNWYWLVDGLMEQVYRVHLANTAAIQQYNGLKYTDDDSDARWLAHLLRLGVLPQGYIYPREQRPVRDLLRKRGQLVRQRTANLLSIQNLYTRNTGSSLSANEIKGLQVEDIDGNVAVSELALAIKANFSVMQSADEQVQILEQTVRERVKLRAEFKFLKTVPGIGQILALTMMLETGDIRRFPSVGNYASYCRCVGSQKISNGKKKGKGNTKNGNKYLSWAFVEAANFAIRFNPKIRSFYQRKKSKSKGVVALKAVAHKLCRACYYIMRDRVAFNVTKAFGQN

SEQ ID NO: 110223 - protein, 370 aa, unidentified
MKQYYCGMDLHSNNTFIGILDEKDKRIFQKRSPNNIKGILEYLNPFKEYISGVVVESTFNWYWLVDGLMETDYKVHLAHPPAIVQYNGLKNQDDKHSAFHLAMLLRLGILPEGHIFPKEERHIRDLLRKRLMMVQNSTKYILNFKSMVNRNLSTTISSNDIKKLKSDQLSKFFKNPHLLLSAQCSVSAINYFQHEIKIIEREILKAATLKSEFQILLTAPGIGNILGLTIALETGDIKRFSKVGNYASYCRNVTSIRSSNNKKKGINNKRNGNKYLSWAYLEAAHKLRRYCPEAKEFYERKKRKTNTVVAIKALAHKLCRACYYMMKDNVAFDIEKIFGKPIKSLNKGYGSKSKRGLATKPNAPIDNTAA

SEQ ID NO: 110224 - protein, 347 aa, unidentified
MLADQVDYVVGVDPHRDSHALAIVHVLSGAVVFEATIAASGQGYAEALQIVDVHAPGRRAFAVEGSGSFGAGLTRFLTGRGERVLEVSRLRRERRSGGKTDALDAVRAARSVLDQERPATPRAGGERQALQALVAARDGAVTAKCAGLAQMRDLLITTPEPLRSELRPLTQAPLLRRLAATRPETRRDPELRGSLLALRSVARRVLQLQAEERELGRQIEALTRKLAPQLLDQPGVGPHAAAQLVLSWSHHGRIRSEAAFARLAGAAPIPASSGQTVRHRLDRSGDRKLNRALHMILVTRKRTHPPTKAYIERRMHEGKTRREANRCLKRYLARNLYRLLENPPPRA

SEQ ID NO: 110225 - protein, 386 aa, unidentified
MIYVGIDIAKLNHFASIISSDGEVLIEPFKFSNDSGGFRLLLSKLDQFESDSLVIGLESTAHYGNNLVEFLVSRHFHVCVINPIQTSAMRKNNIRKTKTDRIDTLLIAKTLMVQPHRFYDKQDIDLMHLKNLGRFRQVLMKQRTSAKIKLTSFLDQAFPELQYFFNGIHHKSVYSLLKEAPSPEKIASMHMTHLAHLLETTSHGHFKKDKAQALRILAQKSVGSSDSSISIQITQTIEQVELLDSQIHDVEAQITTIVKSSGSVILTIPGISCIEAGMILGEIGDIHRFSSPSKLLAFAGLDPSVYQSGNFNASHTRMSKRGSCVLRYALIYAAHNIVRNNDVFRSFYDAKRSQGKNHYNALGHCAGKLVRVIFKMLSDNVAFCLS

SEQ ID NO: 110226 - protein, 340 aa, unidentified
MNNLNTIAIDLAKNVFQVGLFSPQHIMMSNKQFSRQKLTSFMAKQEKAIVVMEACYSSHYWARLFMEMGHVVHLLPAQHVKPFVRGNKNDRNDSIAIAEASWRPNIKFVPLKSIEQQDIQALHRIRDKLISRRTSIINQTRGLLSEYGVVIPQGLKSFTQHISALIDPEDERITVRMKQQLRAVKEEYDQLSRRSKAIETELKQYAQQNPLCQRLMTLPGVGVLNATALYAAIGNGSQFENPRALSVWLGVTPKQYASGEKSFYGGITKRGNHYLRKQLIHGARSVMHRIKAKDDKLSVWVKQLVERRGKNKAAVALANRLARLAWILLHRNENYHSVAS

SEQ ID NO: 110227 - protein, 381 aa, unidentified
MKNVRFIGLDVHAETIAVAVAEAGGEVRSLGTIPNRAESVGRLIRKLGKAEQLRVCYEAGPTGYVLYWQLSELGVKCEVVAPTLVPVKAGDRVKTDRRDAQKLARCYRAGDLTAVWVPDAAHEALRDLVRARLAGKRDQLRARNRLGKFLLRHGRRPPEGSAAWSMKHLAWVRRQCFEQAAQQATLVDYLHEVEHAAERILRLERSIDTAIETLPEKMRAVIEALQSLRGIAKVSAVSIMAELGEVSRFAHPRQLMGYSGIVSREHSSGERIRRGAISKAGSAHLRRIVVEAAWAYRHRPGLGPRLQARQRDQSEEIKAMAWKAQHRLHARYAKLLAKGKAKQQVITAVGRELLGFIWAIGVAAERAHTESPRRALLRRAA

SEQ ID NO: 110228 - protein, 366 aa, unidentified
MEKIYIGVDFHARQQTICYLKTETGELVIAELKHQDKEQVRAFYQQFQGPIIVGLEASGYSPWFEALLEQLGGEVWLGHATEIRRRARWRQKNDRRDAELIWDLMVHDEFPRLHRPAVQSREVLRMLRYRQKLIKLRTMTKNSLQAIALQAGLAKGKQLFTRAGQEEFQLVAMSPVLHWQREHWLALLQPFNQQLLETMVWFKAQSKDDVGIQRLRTHPGIGLLTSLCLLHTLQPVSRFRNARKVAAYAGFDPVERSSAERQRFLGISKAGSRLLRYLLVEAVHTAVRYDEDLKRFYQRLAARRGRPKAKVAAARKLLIRAYIMMRDEIDYAEFRRRAVAVRLARQGHGPTNVPAVLIGQPASPGA

SEQ ID NO: 110229 - protein, 457 aa, unidentified
MNPKRSKPKNDRTMPMIHPNAAAIDIGATMHTAAVRADRTPEPIRSFGTFTTDLHRLVDWFAECGVETVVMESTSVYWIPIFELLDARGFAVFVVNARDAKHVPGRKTDVSDAQWLQRLHSYGLLRASFRPKGQIAELRAYVRQRERLLEYAASHIQHMQKALTEMNLQLHHVVADVTGATGLRIIRAILAGERDSKVLACLRDYRCHSSAEAIEKALTGNYRAEHLFALELALALYNVYQDKASACDARIEAVLKELSISRGRDACPLPSPRRRLHGKANGPDFDVRAALFKLLGKDLTQIDGLGSYLSLRLIAECGDDLSAWPSAKHFTSWLCLAPSNKISGGKVLSSRTRRSGSRASALLRLAAVTVGRTDTALGAFYRRLSARIGKAKAITATARKIAVLFYSAVRHGMEYVDPGSSYYETRYRTRVVENLHRRAKAFGFVLLPLESKAGAVS

SEQ ID NO: 110230 - protein, 342 aa, unidentified
MMIIGCDFHPGFQQIAMVDTETGEYTEKTLTRSEAIQFYRQLQGKVLVGMEGCGNTLWFERLLAELGHELWLGDAGKIRTLEVRKQKTDRRDAELLLRLLEEGRFPRLWVPNLEQRDLRQLLLHRHKLVAMRRGVKNQLQHLALNQGVQRRAKLWSRAGRKLLEELPLAGWTARRREELLSLLDDLEQKVGDLDEAVEEAVRKDAVAQLLKTHPGVGPVTALAFSLTLGQIERFAHSRQVVSYLGLNPSEHSSGGRQRLGSISKQGNPMLRSLLVEAGQTTARLEPELKRAYQRLKRRKHSAVAKVMVARKLAVRLYWMWRTQQPYGATRMQGSPTGPVAER

SEQ ID NO: 110231 - protein, 373 aa, unidentified
MSVYVGIDVHRKRSQVAVIDQDGEVLANRNVPNGVEPILTVIGGLPAGTPAAFEAAFGWGWLVELLEDYGFAPHLVHPLQCKAIASARLKNDKVDAAILAQLLRADLLPEAWIAPPAVRQLRALLRHRAQLVRLRTLLRNRIHAVLADHGHDRSAGCWTGPGRAWLASLPLPEVSREVVQDDLALIDALQVPIDRLDWEVRQRARSDPRVRVLTQLPGVGLFTALVILAETGDITRFGSARKLASWAGLTPTVRGSDRTVRHGHISKQGSAWLRWILCQAAQTAKRHPDFAASYQAIARRRGNKIATTAIARKLLTRAWHLLTDAERAASHQATATTSAPAPPAGTRSPAGRGRQAPGELAFSHEPATPRSMT

SEQ ID NO: 110232 - protein, 343 aa, unidentified
MVHLGLDLSRRRIDVCVLDDDGEQVTTTSAAPDADGLRVLASRFPAPVRAVVESMTGARFVHDTLESYGWDVELADAIKVKALAPLTAKTDRIDARVLAELSYRDLIPAVWLPPPEIRGMRELGRFRLHLVKHRTALKNRIHSTLITHQLQVPVSDLFGVAGRRYLETLALEPMWRDTTTAALEVIDHLNGQITQCETQLRQAARTNPDVAILQTAPGIGPVLGYTIAAEIGDIGRFAHPDKLVGYAGLCPRVMQSGDTDRRGSLTKHGPRYLRWAYIEAAIWAGRHPAYQTRHNRIARRLGPYRGTKAARIDTARRVAKATWWMLTKQEPFRPAGPLPPMAA

SEQ ID NO: 110233 - protein, 358 aa, unidentified
MKYYIGCDAHKKYSVFVGITDGGEIDPAQRVEHDRASYRSYLDGLPAGSQIAVESVGNWYWLIDEMEKAGHIPTLVNAGKAKLMMGNINKTDKLDAKGLAILSVNGTLPAVWIPPGELRDQRELVRMRIFLVRTRTGLKNRIHATFAKYAISFEEVSDLFGVRGRNLIDERLAELPPETRNSVEEQLKLLDQVQRQIDSIEQRIRQIVKVTPEMQLLMSIPGVGAILAILIALEIGDIARFGDGAHLASYCGAVPRVKSSGGKTYHGKTRPDVNHYLKWGFTEAANCVVLSQHLMTGRHVVRLYRRIRQNKGHAKAIGALRRHLAEAAYVVLKSGQPYHEPSVSKEHSVTKEVCASLA

SEQ ID NO: 110234 - protein, 422 aa, unidentified
MNQKSTSPIYVGVDWSTQELEVCVEDASGRVVQRRTFPGSGTGLADLAGWLLAQVEGQPERVRVAIEMSRGPAVETMLERGFAVFGINPKQVDRFRDRFSPAGAKDDRFDARVLADSLRTDPQAFRPLCVDAAEIIELREWSRIGDDLQAERVRVTNRLREQLRRYFPQALEITDDLGADWFLEVLRLLPSPEEAASGRSLSVDRILKRHRIRRITGEEILAVLRQPSVHVAPGTVEAATAHGRLLSDQLHLINEQLGECHRHLDRLCEQLSTGEGEESEEGPRGEQRDAKILRSFPGVGRVVLATLLAEAAQLLKARDYLALRSLAGIAPVTRKSGQREHVVMRRACQGRLRNAMYHWARTATQCDPVWKARYAALRQKGHGHGRACRGIADRLLAAAVAALRAGTLYDSARLTGSTRKVA

SEQ ID NO: 110235 - protein, 491 aa, unidentified
MINTSIFSAQSKDLRKLFEQAGHRSKVLCAPLDYAKKQHTVLFCNGHGDILKKPFSVDNSPAGLKFLLDQLQHTLTGRHLQAKHVFFGGEDIPAYAENFITQLRQKGYLVAQVNAWEAKKRRENFQASNDHLDLTAIAKLLLDWRGNVAPAAHGTYRSLRELSRTRRRVVRDKTALSNRIHTYVDRLFPGFLDVAQSGLAPFSKASLALMSERFSAPQIRRRRRPSLSHQLQRHGVEKADEAARLLQQLAAQVLEPASEHVSVWQVSLQQQVLLYNATQAACHALEAEVAHWLALTPGAFLTSIRGIGVTLAAGLSAELGDPNRLRRLACLCSYAGIIPGSKQTGGPQSPAHTTGVKPRCNRILKDWAVQASVKIGQCGPPELKAAYLALEAQEQHAQFIMAKRLLRLCKCLLRTQSIYRPSHLLAADTPRGKLAAYYLELWPALLTKWKGTCDLRHVFAAQHPLGGWRLMVQDLYGLALPLPKETTMTPD

SEQ ID NO: 110236 - protein, 391 aa, unidentified
MYLVGIDISKFKHDCFIMTETGEVINNSFSFDNNDSGFTLLLNTLKSLDQSQKIKIGLEATGHYGNNLKLFLTENNYSFMEFNPYLVKKFAESFTLRRTKTDKLDAMTIASVLGSPHLTYDPYQISSSHISSLKSLTRYREAFIKERSLHLVQLTNIMDQIFPEFKPFFNGKFGTTAIYILKKYKTPERISKLTDEDIFKIKTVSRKISASKLVKLRELAKNTVGHSSISNQILLKSILNLYTNVDDEVTEIEKQIDSIMSEYKNHIVSIPGISKYSAAQIIGEVGDFKRFSSASKLLAFAGMEPSTIQSGTMDFKGKMVKHGSGHLRYVLMNIAMTIIVHNPTFYSYYSKKHHQEGKNHRVALSHVVRKLVRIIYHLEVTNQDFNSNLLK

SEQ ID NO: 110237 - protein, 409 aa, unidentified
MSSNDTVNCVGIDVSKGKSTIAIMRPLGEIVKVPYEVNHTSSELKMLADTLLNLEGETRIIMEYTGKYYLPIARYLNDSGFFVCVVHAKLMHDFANNSIRKIKTDKADAVKIANYGLANWDILKPFSLEDETRLLLKALNRQYNRYMKQYVASKNSFISLLDQTFPGLNCLFPGNRRPDGRLKWVDVASKFWHSECVSNHSLQYFQKAYNKWCIQNDYRGSDDKAKKIYELASECIPSLPKNDCTKTLIQQAATDLSNTMAALLSTQNEMNRLASSLPEYPVVLAMNGVGTTLGPQLMAEIGDVRRFPKKENLVAFAGVDAPPFQSGKYESRNRHISKRGSSELRKSMFQVIGCLCQHSMSNDPVYQFVARKKAEGKPYYVCMVAGCNKFLRIYYARVKEYLNNLEQQA

SEQ ID NO: 110238 - protein, 408 aa, unidentified
MNTLYVGIDVSSKSNVVYLMLPNGDKHSNFSVANSHEGSTQLVKRILSALTSHSLDTVLIGLEATSVYGDNLVYFLREDATLAPFNRKIHVLNPKQVKKFHDAYNDLPKNDYVDSFVIADCLRFGRINKEVYMGDYRYKALQNLTRARFFAVQNLVKEKQRFMNVLFKKYSTMTQEKVFSDAFSTTALAVYDEFESAEALANMDLHELTDFIIEKGKNRFPDPDAVAKAIQKAARSSYRLPKTVNDSVNQVLSISITSMKALESQIKEFDKAIKAQMELLPNVLISIPGIGPVYSAGIMAEIGDINRFNSQAALAKYAGLAWKQHQSGGFESEVTRLIPSGNRFLKYYLCEAAFSLVRCDKEYSDFYHLKYKEVNRCQHKRALALTARKFVRLVFRLLKDNRLYCPAK

SEQ ID NO: 110239 - protein, 341 aa, unidentified
MINQQILKQNIGIDISKDAFDAYLVALTKELDIVSIGGRRFKNTDKGIEEFVKWAEKKANPAVELEFTMESTGVYYENLAYTLFEEGYIVHVVLPNLAKKYIESLGLRSKTDKLDAKALGQMGVERKLSVWHPASKNIRILKVLTRERTKRQKEKTVVKNQLHALKHSKDRPASSIQRLTELINFLEQLITDIDKEIKQLITEDEVLNLKVQNIISTPGLGITTAASVIAETNGFAGFNNIKQLQSFAGYDIKIRESGKWKGKSKISKKGNSYIRYALYFPAYTIIRKSPHYKTFYDRLLDKKGESLIAATAVQRKLLGLIYTLWKKDVCFDPDIESKQAA

SEQ ID NO: 110240 - protein, 341 aa, unidentified
MELYMTKQTYVGIDVGASELVVVIIRNGKPGKAKNFSNTPEGRNALIKYLNPKKRKIKICLEATGTYHFDIAVELSNTKNIEVMVMNPKAVKNFEMALIQRNKTDAIDAQLLADIASMLDFKEQFIAWQAPDKEIIDLRSAGRRLNELTRQKAAAKNQLHALQATESTPQFVLDSVKQTITNLEQQIKELQQHVLELVENNDELNQVLELLISIAGVGKTSAIYIMGEILILPKNMTVKQWVAHAGLDPREFTSGTSVNKQPRLTKAGNRHLRCALFMPALSATRHNVNVKAFYNHLLDKGKKKMQGICAVMRKLLHAIYGILKTGQPFDGSKFYVIPQPI

SEQ ID NO: 110241 - protein, 347 aa, unidentified
MEQITRIGMDTSKNVFQLHGVDAAEKPVLRKKLTRREMVHFFEKLPPTLVAIEACGSSHHWARLLGSLGHDVRLIAPQLAKPYVKRGKNDAADAEALCEAVSRPTMRFVPVKTAEQQAALMLVGVRERLIQKRTQLVNAIRGYGAEFGITAATGACRVGPLLERIAADEAIPELARELFALQGKEYAQLQCEIERIDAKLMEWHRNDECSQRLAKIPGVGPIGATLLMMKTPDPHLFKSGRDFAAWMGLTPKDHSTAGKTRHGVITRAGDELLRSTLVVGATAVVQHARNGRGRNLTPWLIGLIGRKSPKLVAVAVANKAARIAWKLMVSGERYQCVAPPALTAVAA

SEQ ID NO: 110242 - protein, 341 aa, unidentified
MQITTIGLDIAKNVFQVHGIDGAEKVIVRKQLRRGQVMAFFEALAPCVVGMEACATSHYWARELTKLGNEVRLMPAKDVKAYVKRNKNDAADAEAICEAVRRPTMRFVRIKSAEQQGQLMLHRARDLLMRQRTQVINALRAHLAEFGITAAQGREGIKELLAIVAQEEGSRLPSDAHASLTVLAAQLQAVQTMIGSLEKRIVAQHRSNEASKRLETIPGIGVIGATTIAAVVPDPRVFRSGRDFAAWIGIVPRQDSTGGKQKLGPISKQGDQYLRRILIVGAHAVLRRARQQPEKYPWLTQLLARRPFKVVAVALANKMARVAWALLAKGGTYRAPQLVAA

SEQ ID NO: 110243 - protein, 459 aa, unidentified
MAQRKPKSSRSKPTLPPQLAAVNLHAAGIDIGAEAHWVAVPPSDDLQPVRCFGACTADLEALADWLATCGITTIALESTGVYWIPLFELLETRGFAVLLVDPQQVQKIKGRPKSDRHDCQWIQRLHTFGLLAGAFRPADQICVLRSYLRQRAMLLTSAAQHIQHMQKALTQMNLKLQHVVSDITGVTGLAILRAILAGERDPAKLAQLRDYRCKHDEATIARALQGNWRDEHLFALAQAVALYDVYHQKITECDQHIEASLQTFADRSDGQPLPPPARPRKRGGNQPAFAVREPLHRISGVDLTQIEGIDETTSLVILSEIGLDMSRWPTVKHFTSWLGLCPHHRVSGGKVLSRRTKPCANRAATALRLAAACLHHSQSALGAFFRRMKARLGTPKAITATAHKLARLVYSMLKHGTAYVRQGMEEYEQQYRDRMVQNMTRRAKALGYTLVKATEGTPV

SEQ ID NO: 110244 - protein, 345 aa, unidentified
MMVMLGTDAHKRSHTIVAVDPGGADIGSVTVTATTDGHLRAVQWAAQYTERQWAIEDCRALSRRLEGDLLGVGERVVRVPPKMMARARATARQAGKSDPIDALAVGRAALREPDLPVAQLDGPSREVRLLVDYRETLVRQRTALQNQLRWRLHELEPGYDPPTGSLNRYCTLDDVIGLLEGHDSMVADLARRETRRIRDLTVEINQLERDIQQRVTVLVPTLLAIPGCGALTAAKLIGEAADITRFRSRDAYAMWAGVAPIPVWSANNTRFRLNRGGNRQTNAALHRIAITQIRMHPDAQAFIQRRIESGSTKREALRLLKRKLANVVYRTLQTDTQTTHLAQAA

SEQ ID NO: 110245 - protein, 416 aa, unidentified
MKKNSISQTTSGQKTKPAKARGPVQRDSKEVMAELVAKLSERLGPKPAPEKAAEGKPGVVPAPNRDRLTVGVDLGDQWSNYCILGLEGETLAEGQLRTTGEDVAAFFRALSAARVILEVGTHSAWVREVVVGCGHEVLVANPRLMDGTKRRKRKNDRIDANKLARLGRVDPQSLFPIEHRSTEVRQDLVVLRARDALVTARTQLINTTRGLVKSMGARLPKCSSPSFSDKVEETLPAEVREALLPLVRLAEALSDCIKVYDERIEKLGREKYGHTELLQQVKGVGPLTSLAYVLTLENPDRFRKSRDVGPYLGLVPKQEDSGDSQPQLRISKAGDVMVRRLLVGSAHYILGRFGPDTDLRRYGLRLCERGGKNAKKRAAVAVARKLAVLLHRLWISGEVYEPLRHGAPTAEVGEAA

SEQ ID NO: 110246 - protein, 341 aa, unidentified
MEEYIGLDVSLKDTAISVRRNGKRVWRGKCASDPQLLAAVIRERAPKAKRVVFETGPLSVWFYHELTAQGVPAICIDARHAKAALNMATNKTDANDADGLAHLAEVGFYKAVRVKDSNSMLTRTLVGARGQLIKIVTDLSNQIRGLMKTFGLIVPKGAGRVFEAHVRRLLASNGMLEQIIVPLLEAWCSIRTRAAELDRQLVATARTSTPCRLLMSIPGVGAVTAATFTAAIEAPENFKTSRAVGAWLGLTTRRYQSGEVDYDGHISRRGDKYLRVLLYEAAGVILTRAQADSALRRWGLKLRERIGFKRAAIAVARKLVVIMHTMLKTGQLFERTIGTTA

SEQ ID NO: 110247 - protein, 412 aa, unidentified
MEVLHPRCAGLDVHKETVVACVRIVSGGEVSRAVRTFETTTARLIELAEWLEASGCTQAAMEATGVYWKPVWQVLAGGGFGLVLANASHVKNVPGRKTDVNDATWLAELLAHGLIRASFVPGPEIQELRGLLRTRKQLVREKASHVQRLQKTLEEANIKLESVLSDVMGRSGRAMIQALIAGETDPAKLAALAHPKVRAPQARLREALRGRVKPHHRFLLGLHLQQIAALDAGIAAIDREVDAGLASFRDAVKQLSTIPGVSELSAQVILSEIGTDMSRFATPAHLRSWAGLCPRNDESAGKRRSTRLRTGAPWLKATLVQCGWAAARTKATYLNAQFVRLRTRRGPKKAVCAVAASILTAAYHMLKDGTFYADLGAAHFDRRRPDAQARRLVKRLADLGFSVELKSPIAAS

SEQ ID NO: 110248 - protein, 361 aa, unidentified
MKCVQRNKLDFSGQNIYVGIDVHLKSWSVAILSEHSVLKRFSQSPEPELLHKYLVSNYPGANYFSVYEAGFCGFWIHESLTDLGITNIVVNPADVPTMSKEKLRKTDAVDCNKLARELRSGSLEGIYVPGTATLELRSLIRMRTLIVKDSTRAKNRIKSLLHFHGVKIPEEFIRCSSHCWSKRFLRWLHNLELSTEYGKKTLELHLEQFIRLRKMLLQETRAIREISRKAPFAKPIRLLSSVPGIGITTAATLMVEIDDIVRFNSAEHLASFIGLVPMCHSSGDNDSVSNMTIRRHFMLRWLLVESAWTAIRIDPAMTMAYTEYRKRMNPQKAIVKIARRLVNRVYFVLKYEKEYVSCIVK

SEQ ID NO: 110249 - protein, 387 aa, unidentified
MTTDHLATALQTVVRVNDTKLFASLELSKSRWLVTVSAPGSEKLSKHVVIGGDGGALLNLLGRLRASAERRGGMAVQVVVIQEAGLDGFWLHRLLEANGIESHVVDPASIAVDRRHRRAKTDVIDGEMLLRTLMAWARGERRVCSMVRPPSPDEEDRRRLTRERGTLLKERTQHTNRIKGLLAGQGITDYDPLRKDRLARLDALRTGDGRPLPERLKAEIRREIERVDLVVSQMAVVERERDALVGMTSDPAPETAAAVLVRLKGIGPELGSLIWLEALYRGFSNRRQIAAYAGLAPSPWQSGGTDREQGISKSGNRRLRHALVELAWFWLRHQPASALSVWFRARVGQGRGRIRRIAIVALARKLLVALWRYATQGVVPAGATFKA

SEQ ID NO: 110250 - protein, 401 aa, unidentified
MPEQPLIQRWIGLDIHKAYFVAVGVNAEKRAIFGPHKIPNEQLEDWIAKHLLPTDAVVMEMTTNTYLFYDTLVPHVGSVIAVHPPHVLLVTGVKVKTDKKAALTLAQLHAAGLLTGVWIPPVEVRELRAVIAQRSKMVRLRTQAKNRLTSLLHRTHRERPAQPFQPEQKAWWDSLPLTTIEKYIVASDLETLAFAGKQIDAIGEVLRQEAAKDERVPLLTQLPGIAMLTALTILAAIGPIERFEDAKHLVGYAGMGASVHDSGQMHATGHITKAGRRDLRGAMVDAANAAVRHHLYWKKVFERLEYRLGRSKAIVAIARRLLVAVWHILTNGVADRHADETSVAASMYKLAYEIKVNNLPKGTSARAFTRQQLDRLGIGQTMDVLPWGGKKVKLPPSQLNT

SEQ ID NO: 110251 - protein, 407 aa, unidentified
MAERPEIWVGIDVGKQTHHACAVDDTGKRLFSQKLANDQAAIEQLVVRVHGMSDRVGWAIDLTSPMASLLITVLLTVGGDVTYVPGRVVNTMTHGFRGEGKTDAKDARVIAETARMRGDFTQVRMPDELIAGLKALTSYRADLMDDWVAGVNRLRALLGSIFPALEAAFDYSKRTPLILVAGLCTPAEIRAAGIDGVAAYLTENKAWGPMITKAAATAVAAAQAQTLSLPGQADAAMLIKRQARKLLDLDREIKDTDKLITARFRQHPWAKIIESMPGMGPGLGADFLVETGGDLATFGSAGRLASYAGLVPVPRDSGRVSGNFHRPKRYNRRMRRVFYMAALSSLKNPDGPSRRFYDRKRGERLIRLIHTQALLALARRLVDVLWALLRDGREFTYATPTPAGLAA

SEQ ID NO: 110252 - protein, 344 aa, unidentified
MSEVIIIGLDIAKHVFHAHGADERGRAVFSKRISRGKLLDFFATQPSCTVALEACGGAHHWARQLTQLGHEVRLIPPAYVKPFVKRQKNDAIDAEAICEAAQRPSMRFVAVKSEQQQAAGLVFRTRDLLVRQRTQLINAIRGHLTEYGWIAPKGPSHVAMLADLIEEEEMASSLPKAAHVMFRLMLDLLASLNGKIADLDKEIARRAREDEVSRRLMTVPGIGPISATAIAALAPPAETFAKGRDFAAWLGLTPLQRSTGGKQRLGATSKMGERTLRRLLIIGSSAVVQQASKRGAPKGSWLEQMLARKPRMLVTVALANKMARIVWALLVKQENYRAPVAAKA

SEQ ID NO: 110253 - protein, 331 aa, unidentified
MEEVRRFVGIDVAKAALDVFIGSAAKAFTVANDEVGIRDLVSQLGPADFVILEATGGLETPVASALAAAGIAVAIVNPRQVRDFARATGRLAKTDRLDAEVLARFGEAVRPEARPLADEQAQALEALVSRRRQLVEMLTAEKNRRARGPKVLHRSIDEHIRWLEKRLSAFDDELGELIRNTPLWRERDELLRSMPGVGKVLSSTLLAQLPELGMLNRKQIAALAGLAPFNRDSGSMRGSRCIWGGRAQVRRVLYMATVAGVRCNPTLRTFYLRLRANGKHAKPALTACMRKFLVILNAMLHNKTHWQTPALISTTAPFSPLLGAVSQYGCC

SEQ ID NO: 110254 - protein, 314 aa, unidentified
MRRAAVFVGIDVSKEFVDVHVVPGEELHHFGSSAKEVEALRRWLRRRRPRLIVLEATGGYGTTLAAELQEAGLSVAVVNPRQVRDFARALGLLAKTDRISARVLALFAQKIEPPARPVGDAPARHIKALVARRRQLVDLRTAEGNRLTQASLADVHDSIQAVLDTIDRQLQDTDQRLQEAIAASPLWVEKATLLESVPGVGRVTAAALLAELPELGQLTRRQIAALAGLAPLNRDSGMFRGHRMIIGGRATVRHALFMATLVATRCNPVIRAHYQHLCNAGKRKIVALVACMRKLLVILNAMIRNNQPWEPRLA

SEQ ID NO: 110255 - protein, 406 aa, unidentified
MIFAAIDWAEQNHMLLVMDAEGKTLAKARFDHSHPGLLELRDILRAHAKRPADVAVAIELNEGLLLDWLLHQRYRVFGINPKSAARARDRYTPAGLKDDERDAWTLAEFLRTSHQHLRPMRPDSEQTMTLTAWVRIREDLVQERTIHLQRLRSHLVQWNPHFLQATSDLKANWTLALLEQTPTADEFALLKWSKIKKFAQGRRMRSVTRDRVLSQATLASPTIHAARNQAHALEVRHRVKAIRQLNKQIAEIDHHLDQLIESHPDVNVFRSLPVTGTVTIATFMAGFGEDRERWSGHEEVAARWGAAPVTQQSGKHKTVKRRIACESTIHQAWVWFSFNTVCREGCWARSYYQEKRKNGTDHYAALRCVAQRWIRIVYRLWHDRVLYDEQLYQERRKARLGPKPES

SEQ ID NO: 110256 - protein, 417 aa, unidentified
MNTMTMQSFAAFVGIDWADTKHDVCIQSANSSRREFAVIPHKVEEIDEWAKSLHRRFSGPIAIAVELSKGPIVYALQKYDYFVIFPINPSTLAKYREAFQPSRAKDDPTDAELALDLILRHPERFEPLQPQSVEIRELTELVEQRRRLVSDRVRLTNRLRSTLKLYYPQTLDWFNRIDTKLFCGFIERWPTLMQVKRARITTLTTFFRAGNTRNPALLETRLASIRSSQHLTLDEAVIAPNRLRVLMLVGMLRVILDAIKSYDQTIAELAPEHDDYCLFSSLPGAGPSLAPRLLVAFGEQRSRFKNAAELQKYSGIAPVTERSGTKHWVHWRWRCPNFVRQTFVEWAAQTINKSYWAGEYYRQQREKGSAHQSALRALAFKWIRILYRCWQTRTPYDEATYLKALQRRGSPLVAKAV

SEQ ID NO: 110257 - protein, 341 aa, unidentified
MKTTTFGLDLAKRVFQLHWVEADTGEVKRRQLKRDQMVKFFTQRPASVVAMEACGSAHYWGRKLIELGHEVRLIAPKFVRPFVRSNKTDAADAQAIWEAAQRPERRFVAVKTEQQQAVLMMHRMREQLVKMRTMQINQLHGLLAEFGVILPVGREKMMAQLPQALARLEDTLPAMVLETLREQRARLERLSEDIEGIERKLWAWRKEDEAVKRLMQIPGVGLLTATAAVATIGDAKVFSSGRECAAFLGLVPRQSGTGGKVRLSGITKRGDVYLRKLLVHGARAVLQHAKQLDPWLEGLLARRPFNAVVVALANKTARTIWAMLAYGRSYEDRRCHAQEGA

SEQ ID NO: 110258 - protein, 344 aa, unidentified
MRFYTKQHKYYCGIDLHARSMYICILDQEGKTALHRNRKASPEAFLKAIEPYREDIVVAVECMFVWYWLADLCAKEKIPFVLGHALYMKAIHGGKSKNDKIDSKKIATLLRGGNIPVAYVYPRKMRSTWDLLRRRNHLMRKRSELLAHIQNTNSQYNLPEFGRKLSYKANRGGVAEHFPDPSVRKSIEVDLKLLDFYDQLLSNLELYIVKKAKADDVYSWYRLRSIPGVGKILGLEIHDINRFPTVQDFVSYCRLVKCPRESAGKKFGTKNSKIGNGHLKWAFSEAACLFLRGNEQAQHYHARLVSKYGKGKALSILAHKIGRAVYFMLKRKEPFSMNVFFQQT

SEQ ID NO: 110259 - protein, 386 aa, unidentified
MKKNNIPEQSPSKGANKMSRKVNRTGQKSRRQTGPVTIGLDLGDKSSRYCVLNEAGQVVLERSVGSSKKAMTQVFGAIPRFRIALEVGTHSPWVSRLLERLGHEVIVANARQVKLISQSSRKNDRLDAQMLARLARVDPQLLRPIRHRSEQAQGHLTVIRVRAALVDARTGLVNAARGLAKAMGERLPKCDTDQMGEERLKMLPQGLREALRPLLQEVESLTGKIKECDVKIEQMARTEYPETGLLRQVSGVGTLIALTFVLTVEDKKRFAKSREVGCFVGLRPSQSDSGESKPQLPISKEGDQYLRKMLVQGAHCILSKRGPDTDLKRWGVALSDRGGKNAKKRAIVAVARKLGILLHRLWVTGEVYEPLRNRQAAAQQKKTAAA

SEQ ID NO: 110260 - protein, 436 aa, unidentified
MNTLVLSQTKAKNAIEIAKATPDKMLCIGIDIASQTHVARAVLGTNKRFKNGCSFKTSTEGFQKITGWINRLISSNNIEYSFISMEPTATYWRPVYTFMKSAFPKTGVYQVDPMAVAYSRKMHSSNMSKGDPEDAFLIAELTQNGKCRKGIQKPQICLALRELMRNKKHAVKQATIWERQLRHILENLMPGITNIIPEKCDSDVYAVFNKTTNPEKIRSLSLDKWLELNYEFKCPTTKLKQFYKLACLDIKAFEDYSFGSNNWECVWTAYKQAHYQCESFKELIINTVKKHPAFENLMTIPGLGPLTIAGFIAAVGDLNQYSNSSQIEKVFGFDLQRNQSGKKESVPKITKRGYSLGRTAMYLAAFAGCKLNAWHDYYQRKKANSGSGNKALIALAAKIARTAFQIAVNNEPFDSRKIMPVGRGQLSRSASGFSIS

SEQ ID NO: 110261 - protein, 412 aa, unidentified
MQLVYERCAGLDLHKKTVVACAIVPDEHGQRRKELQTFSTMTPDLLRLRTWLTSLGVTQVAMESTGVFWKPVFNILEGSFELLVVNAQHIKAVPGRKTDVRDAEWIADLLQHGLLRPSFIPPLWQREIRDLTRSRTSVSEERTRVINRVQKLLEDANIKLASVVSDLMGKSSRQMLAGLLQGQADPTILAEYARGRMRSKRALLEQALQGRFTEHHRVLLKEHLAHLDALEEQIDHLSAEIRERLKPFEAQLRRLETIPGIKRRLAEVILAEIGPEMARFPSARHLASWAGMCPGNQESGGKRLSGKTRKGSPWLRTALVEAAHAATHSKDCYLTAQYQRLATRRGGKKATIAVGHTLLVIIYQLLTEDRDYQELGGNYFDAWDRQVVQSQLVRRLERLGYQVTLAPTPLTI

SEQ ID NO: 110262 - protein, 332 aa, unidentified
MNMHPQGGVANRDHGPNAGVDVCKQHLDVCLGTLELREVNDATGWDVLIAKFKEDEVDLVVLEATGGYERGLVCALQGAGITVARLNPRQARDFAKSMGVLAKTDQVDARTLRDFGDVLARHKDRAKFITPLVDEQRQVLAELMTRRRQLVDMRVAENNRLEHAGKHSMRSIKSVLKTLDRQLEAIDHEIDDHLDRHFKDQRTLLDSVKGVGPVTILTLTAAMPELGSLGRRQIAKLVGVAPLANDSGLHKGKRRIWGGRADVRAVVYMAALAAIKHNPTIKVFHSRLIAAGKPKKVAIVACMRKLLTILNAMLRDQSMWNAAKHLQSTKTA

SEQ ID NO: 110263 - protein, 344 aa, unidentified
MDVMIGIDPHKRSHTATMLDRRQRELRQISVRSGSRQLAELLAWANGARRRTWAVECASGLGYLLAQQLVAAGETVVDVPATLASRVRVLGTGQSAKTDPNDARSVALAALHAPSLMVVRPADDVTVCRLLAKRHTDLSRWRTKQCCRLHALLVELVPGGLGKEVTVNQARSLLEAVQPGDVAGIERHRQAVELVADIERLDVAVADSRTRISAAVAASETTVTDIFGVGPVVAAMLIGYSGDPLRFATASRYAAYTGCAPIEFSSGGRTTHRLSRRGNRRLNHALHCAAITQIRHRHSPGRGYYDRKLAEGKTPREAIRSLKRRLSDIVWRHLVADAQRDTAR

SEQ ID NO: 110264 - protein, 354 aa, unidentified
MLYTGIDLHKKYSVACTQDATGQCVREARIDHSNSGALQSYFDSLGQESRVVIEACWNWGWLHDQLEELDQVSDVTVVHPGKTRIIAEAQIKTDRIDARALCNLLRADLVARIHIPSAEARARKNVLRQRLFFVRLRTMLRNRVHALIDRQHGLKRPVCSDLFGPKGLGWLRRLEISGPDGMLLSECLSMLDAIAAQVKELEQCIAKELVDCEVMQRLTSMPGLGPILAAVIAIELDGVERFRSPAKLCAYAGLVPTTHASGGKVFNGRLLPFCNRYMRWAFIEAAWTAMGCDGYFGDLYRAHRNRGKKANVAITIVAHRLCQIAWHILHEHRNYQPSPVNRALLISPATPAKT

SEQ ID NO: 110265 - protein, 356 aa, unidentified
MQIIGVDLHTRQQTVAMLNVETGEIVEKTLQHEGNSVREFYSTLAGPTRVGIEATGSMQWFLELMEELGIDCQVGHPAKIRAAEPRKQKHDRRDAALVLQLLVENRFPSIWMPSREQRDVRSLILYRHQWVRIRTRVQNALQAIALSHGLRRGSSLWSEAGQHTIASLSLTRYTAERRTALQSLYRRLEEQIGELNRKLEDLAWQRPQARRLMTHPGVGPITALATETFLGEPKRFVDGKAVASYVGLIPSEHSSGGRQRLGGLSKQGNPLLRFLWCEAVGHAVRKDAELQRFYQHKLVQKGLGKAKVAAARKLGIRLWILLRDQIDYQEFCRRGQLRQKHGGAHAGMPAREHDPA

SEQ ID NO: 110266 - protein, 340 aa, unidentified
MVDVSIIGLDLAKTVFQVHGSDADGLPLFNKRLSRSSVLKFFSEKPPCLVAMEACASAHYWGREIGKLGHEVKLIPPIYVKPFVKRQKNDAADAEAISEAASRPTMRFVAVKGEDQQAACMVFKTRDLFVRQKTQLANALRGHLAEFGVIAPKGIVHLKRLAVVIEEDTGLLPASVLEYAGMILAQISALQEKIDRLEKRVQEHARGNDITARLMTIPGIGPITASALCAFAPPAETFSKGRDFSAWLGLTPKQHSSGGKERLGRTSKMGQRDLRRLLITGAVAVVRWAVRRGPEEGSWLARMLERKPRMLVAVALANRMARIAWALMANGGSYKEPVAV

SEQ ID NO: 110267 - protein, 349 aa, unidentified
MVADELDYVVGVDTHRDEHTLALVEATTGAVLAQQTVAASAGGYAQALRFAQQQAEGVRLWAVEGAGHYGAGLARYLSERGETVLEAGRSPRGERRLRGKDDQLDAVRAARAALASEPLARPRSGERREALRLLLVARRSAVEVRREALVQLRSVIVTAPDRLREELRGLPVRRLLERCSHLRRSNSARADQRATRLVLRSLARRIEAVTLEAAELEGEILAQVRALAPQLLEEPGVGPIVAAQLLVAWSHPGRVRSEAAFARLAGVAPVPASSGQTRRQRLSRGGDRQLNRALHTVILHRRQHDPQTRDYIARRIAEGKSRREATRLLKRYLARHLYRLLQNQEPLLA

SEQ ID NO: 110268 - protein, 339 aa, unidentified
MKDFSMFAGIDISKRTFDVVLLSATTGTRVHQSFTQSREGFREFSVWLKKQGARKASTLFCMEHTGMYSDGLISYLVHLKCFLWVEMAIRIKRSMGLHRGGSDKASALIIAEYAFRFRDRVRLWQPLDSRLLEIRMLLKQRERMLLSLKQLEVPVRELKECDQLAMAKLLQRNQQPVIRELKAAVKKIESQIAALVSADEDLSTAARRITSIKGVGMQTAISLMVYTKGFTMFENGKQLACYCGVVPFSKSSGTSVRTRPGVSPFANRRLKSLLHLCAMAALRHDAEIRAYYLRKVQEGKNKMLVINAIRNKLLQRIYALLRDKRNYEENYVYNGGKVA

SEQ ID NO: 110269 - protein, 407 aa, unidentified
MASIDRTKYLFVGVDLHKKTHVAVLCNCFGDIIKKFKVTNAPTHFPTFLDNVRKHADGKDVIFGLEDVNFYGRSLAKFLIQNGCLVKEVNSSYTKKKRNNGTNRNKTDELDAKAICMNLIMEYDAHPIANPQDIYLAIKQTLSTRNNFVQMAANMKTSLHNLLVHHYPNYTEFFKDFESKTARGFFHTFPSCEMLGNITADELTRILQKFNKSVPKNKAQEILDAIAANGWVDNGYQEERNQSIRSYIDSINHLEQEITLLEEQLDKLIDETGYPLKTIQGVDTVLAATFIANIGDINRFKHNSQIAKLAGIAPIEHSSGESQNRYTNKLGNRELNTAFYSLALTQIRQGINPLMYEYYQKKIKEGRKKKQAMVYVARRLVSIVFSIMKTKEPYRQPSIVEQEVVGA

SEQ ID NO: 110270 - protein, 364 aa, unidentified
MFYSGIDLHKDNSFITTVDDGGAIVKQERLPNVPEIILTYFDALQGPHKAVVECTAGWYWLNDLLEPHGIELILAHAKYLKAISYAKVKTDKVDSQTLANLLRLDSIPQAHKIQRDLRDLRDVMRSRLRLVQKRTSCYVSIHNLGRKLNCGDQIDIEQRSVPEILPEAYRLHLQNLYEQVDLLNKQILNLEHFLQPVLIPNDDIQRLVWIPGIGKTTAFTIYLEADGIERFLSDKHFVSYCRLVPGAKNSNKTIRHKSGCKDGNKYLKIAFTDMAVRAIQYYPEYRQIYQKIRRRANEPIARTVVAKELARIVYHILKNKTEYRGLKGQPISHQKATQYPRLKHRSMATPGKPVRLTDAQASSA

SEQ ID NO: 110271 - protein, 355 aa, unidentified
MNDGKYIGLDVHQATISVAVLDSAGNLVMEAILETKAETILQFIHGLRGSLHVTFEEGTCAAWLHALLKPHVTQVLVCDPRKNALIKAGNKSDRIDAHKLADLLYLNKLNPVYHGETGIRALKEVARSYLALTRDTTRVMNRLKALYRSWAIPCAGQRVYAPRYRSEWLAKITEAGVHRRAEIYYQQLDALRSLREQVRRDLLAEGRKHGAMKLLRQIPSIGPIRAVLLIALMQTPHRFRTKRQLWAYCGLALKTSTSGEYQIVEGQLKRSKKFLAIRGLNQNHNHDLKNIFKGAATRAAAVPGPFQEFHAGLVARGMKPTMARLTLARKIAAITLIVWKKGVRFDAEYLKQQAA

SEQ ID NO: 110272 - protein, 386 aa, unidentified
MPDVSSCAPAEVRLWVALDAHKLSIVVATLPPSGGRPEVSRIENTPKAIRRLIDRLGGPAGLAVAYEAGPTGWAIKRLLDGLGVACDVIAPSLVPVRPGDRVKTDRRDAKKLVRLFRAGELTFVMPPTPEQEGLRDLVRCREDLRDARTRARHRVIKALLRYGHVFTDGKHWTIKHRTWLAQQQLADPVAQLALETMRAHLEMIETQMRTVDAQLERLAHQERWKPGVRVLTSFRGIATLTALSLLAEIGDFRRFGSARELMRYLGLTPSEYSSGESQHRGHITKAGPVHTRRLLIEAAWHYRHPPRLTERQREAETAAHAAGDELAPLVAARAWQAQVRLNHRHRVLTRDRGKRATVTNVAVARELVGFLWAAMTDQPLREELAA

SEQ ID NO: 110273 - protein, 338 aa, unidentified
MTSKISILAIDLAKGSFQVCAVGPDGMVVFNRAMSRTRLATLLADHPACIVAMEACATSHHWGRFAQSHGHEVRLVPAAYVKPFVKRQKNDRADAEAIAEAALRPTMRFVAVKSAETQGRAVAFRTHQCMVRQRTQLINALRGHLAEFGLVAPKGPASLKLLENALADESSDLPEPVRHVGSIYVEQIARLTEVIDQLSDEMETSSKTDEQLRRLCTIPGIGPVTAGAVAAFAPDLDTFDSGRNFAAWLGLVPRQRSTGGKARLGSVSKMGQTDIRRLLIVGAMSVIRWVVRRGGSANRWLAALVARKPKMVAAVALANKMARMIWALSTKQENYRMA

SEQ ID NO: 110274 - protein, 347 aa, unidentified
MLYAGLDLSRQRLDVHLLDEDGRTVEVTAVRPDADALQSLVAAVARHGQPVSAAIESMNGARFVHDTLELAGWEVEIADALKVKGLAPLAAKTDKIDAWVLAELGRRELVPAIWLPDPANRAERERARFRLHLVRHRTALKNRIHATLIAFGHPVPVSDLFGVSGRELLAGLAIPEPWTTTLATSLRFVDELDTEIDACERELRAMGAGHPYLPLLRTVPGIAWVLGYTIAAEIGDIGRFSSAKKLTGYTGLCPIVRQSGGRDDRGPLAKNGPKYLRWALIEAATHAARHPMYKDRYERNKKRLGRQRGSKVARVDIARELATAIWHMLSKNEPFAPGRSPATPLVA

SEQ ID NO: 110275 - protein, 326 aa, unidentified
MQSILGIDVSKSTLDVVLIAKSGSSHRKISNTSQGYHQLEKWLEDRQAGKVHVCLEATGQYGEAVAEYLDACGYQVSVVNPARIKRYGESKLHRNKTDKADAALIAEFCQKENPTSWQPLSPEIKHLRAFVRRLEDQKANLQQEVNRLKSGEKDTWVVGDLQSHIDYLRERIAATEKEIEDFVNKTLGLKSQQKLLATIPDIGDLTANTLLAEIGDVSIYDGAPQLAAYAGLNPQAHRSGSSVHKKTRISKQGRSELRSCLYMPAIVAMSYNPVIQDLSLRMAKRGSLKMEIIVAAMRKLLHIAYGVLKNQLPFDPNYAAQFNFSS

SEQ ID NO: 110276 - protein, 356 aa, unidentified
MDKVIREGAVRVGVDLAKRVIQVHAVDAAGRVLTTKPLARTKFIEWCVRLPRGCMVAMEASSSAHHWARKLAALGLDPRIISAQLVQPYRSQGASGKNDANDAAAICEAASRPNMRFIPVKSIEQQSMLCVHRLREGIKEDRTACINRIRGLLAEFGLVFPQSPHELQAVLSEVLEDATNELGVLARLTLQRAQTQWHELDEHLAWCDERIDAHAKDNAAVKTAATLLGIGPVTASAVVATVGDFKQFKNGAQFGAWIGLTPRQRSSGGKNNLGGITKRGDTYLRTLLIQGAKSAVMTAHRRQDKISTWVVSLRERSGWQKAVVALANKNARILWAVLTRGQAFDANHLSVKPTAA

SEQ ID NO: 110277 - protein, 423 aa, unidentified
MMKLKYSICCGLDVHKNVIVATIVTTNKDGISEYLQKSFSTINSDIQRFHNWLIENNCYHVCMESTGKYWIPIFNYLENDIDVCLTHPKYVKAIKGKKTDKKDSKWIADLYKFDLVRCSFIPPKDFRQLRELSRYRFKLVCMKSSEKNRIQNCMTISNVGIAIVLSDPFGKTATEIISYLLEHTADSMDEKAVRKLIKKGAKSKSDEIIEAIKGYTIETDQAKKLELARGHLEYLDDMITQTEVELYVRIKPYYEFVEFVSTMPGMTELSSTIVLAETGVDMDIFDDAKHLCSWCGLSPANNESAGKKKSVRIAKAGDYLKPMMVQCALAAIKSKKQPYFAIKYGRIKKRRGHKKAIIAIARMMMVCIYHMVSEKKPFTPTDYEELMDPQNHVESVVLNENNVFAYLESLGYDSSKLVKRNDN

SEQ ID NO: 110278 - protein, 317 aa, unidentified
MTQTNIMTAGIDTSKLKLDIAVHGRAERWQLANALPGWRILAANLAKAGVTNVGIEATGGYERGVVEHLRAAGFTVLVLQPIQVKAFGRVHLRRAKNDALDAVLIAACAAAVDQPRIAPDPRLAELAGYLTFLEQIEEDIARFKVRLEHIDEPRLRRIVTSDIARLKARRTAQMRTIAKHLRDHDDLARRLDLVLSIPGIGERTALALIIRMPELGQISREEAAALAGLAPFDDDSGLRRGQRHIAGGRGRLRRSLFAAALPAAFRWNAALIALYTRLIARGKPHKSALIACARKLLIYANTVVQRGTPWTEKHAML

SEQ ID NO: 110279 - protein, 338 aa, unidentified
MNIVFLGIDLAKNVFQLCGLNQASKPVYTKRTGRKELLQTLANIPACLIGIEASTGAFYWQREFEKLGHKVKVISPQYVKPFVRGQKNDGNDAQAIAVALMQPTMQFVPPKSPEQQDIQALHRARQRIVNHRTATVCQIRGLLLDRGIPIGSAVSRARRAIPLIPEDAENGLSSRMRRTIAELYDLFNDLGRRIHFFDKEIETVFRQSEACQRIAKVKGIGPETATAVVAAIGKGTEFKNGRHFAAWQGLVPRQHSSGDRQVLMNMTKKGDRHLRTLFIHGDRAVVRVATNNSDGHMNQWVNQLKERRGFNKTTVAVANKNARIIWSMLRNETGYQVV

SEQ ID NO: 110280 - protein, 391 aa, unidentified
MDVFVGIDIGKEAHHAVCLDGQGRQLFSQPLANEQAAIERLCEQARSCGDPLFAVDLSEGPVALVLAALLAAGEAVCYVSGLAVNRSRTMLAGESKDDPRDATVIAENARLRAALLPRFAAADESLATLRLLLRHRADLVADRTRAIARLRETMVGYFPGLERALDYRSRGALELVARYNRPAAVRRAGPARLARYLTARGVRNPERIATAAVAAAKGQSVRIAGEEAAAAIVAELAGEVLRLGVRLAALDSELGRAFFSHPQAEMVLSLPGFGVRLGAELLVEVGQLARFPDAGHLAAYAGLAPVSRDSGKYVGHRRRPRGGNKRLKNVLYHAAFVAARSDPRCRAFYERKRAEGKRHHQAVIALARRRTDVIYAMLKHGTPYRSELFVA

SEQ ID NO: 110281 - protein, 343 aa, unidentified
MKDIIYNHYIAIDWSIENMAIARMTKKSNKISVIDIPSDIIELQAYLKNLKGTKILAIEETTTSQWLYAELKDYVDRIFICDPNRNKLLNEGPKTDKIDATKLVQLLKAGLMKEVYHSNNKFLYLRRVVSGYEDLVKAGTRLKNQRYALLRACGQRGYEKIGDRLDSQGEQFVLECLDRQIEAYEEEKKGYEKEFKDLARKYPEIRHQKSLPGIGFIHAVKIIARVVTPYRFADKGHYWSYSGLIKLERISGGRRYGKKNPRYCRQLKNVYKSGVLAAIGGNNPINDYYEYLIQEKGYPEYKARHNTCRRLATLSLGVFKSGKKFQPNRRDHVKKVKEVSSGL

SEQ ID NO: 110282 - protein, 481 aa, unidentified
MKERSAIGIDPDSKGFVCALVRSSTAKVISKGYMTTEADLESFLRWVKKEGEPIVAIEGCNGLSRPIEKALREAGVTFYSFKPEDTNTFRKAVLGQNKNNEKDAESVARYALALDSQGKLQRYQRVWFANMELRLLTRSYDRKSEAATAEMNRLWKHLRHASPDLYLAFGGYHPEINLNKDMLGTQGILALFSQKPEVWEWKDLSEEGFLQAMGGSCKGRCALIPELRKVGARVKPFPRSTALLIQSSARLIAQFKRDQGEMVKMMDEVTKDSLPVQTLKETRGIATITASTLIAEIIDIRRFGSDDNLASYSGLGMREHSTGDTTRMVGTQSFNHHLKDAFMTAARNFVTFNPDSHLSGYHRNLVKSGMDPLEATRRVARALVRVVYRKLASLAKADNGCLAGNGEEHKEGESDMASGSTRSGQSHTSDMSLSSPQKTETLTATRVKTEARATVRVKREARSTRKTKTSRRREKILEKSS

SEQ ID NO: 110283 - protein, 452 aa, unidentified
MEEPQEVQDEEYERVYQRVAAIDVAKASGVVCTRVPDESRPGRRRTKVWTVIATMNAVTELADHLRCHQIQVITLESTSDYWRIWWVVLEAAGLKVQLVNARSVKNVPGRAKTDKKDAVWLAKLTERGMLRPSFVPPPEIRRLREFTRLRADLVHERTRYWARLEKLLERALIKISAVASSLDTLSVRAMIEALIAGQRNPKALADLARGRLRIKRAQLAEALDGRFEPHHGELARIILDQIDALTAQIDQLTARITELIAATPAAQGIDADGTTGPDAGADPGAPVLPAVARLDEITGCGTVAAQAIIAEIGLDMTVFGTPGRLVSWARRCPQTRQSGTKTSAGKAGKGNPYLNGVLGEIAASAGRTDTFLGERYRRLARRRGKRKAVTAVARSVLVVIFHLLADPQARFRDLGPDFYDNRISTERKIANHVRQLQALGLTVTLTPAQDAA

SEQ ID NO: 110284 - protein, 319 aa, unidentified
MRDARMVGIDVAQATLAVAVLPAGRTWEVAYTEEGLATLVAALQPLAPARVVLEGTGGLQAPAVAALALAGLPVVVVRPRQVRDFAKATGQLAKHDRLDALVLAQFAAAVQPPARALADDDTTRLSEFVTRRRQLVEMRRAEEQRLTRLEHRRTTPRVRADVVDHIAWLSRRIERLDEELHAAIQASPVWCVRAQLYQSVRGVGPVVARTLLAGLPELGTVSARVIAALVGGAPYVRESGVWRGRRHIGGGRAEVRRVLYLAAMSGVRTNPVLRAYYARLVAAGKPRKVALIACAHKLLTILNAMARDQRPWTPTLGST

SEQ ID NO: 110285 - protein, 312 aa, unidentified
MTTLHPFVVGIDISKHHLDLHDLRDGATRRIANTDPAIAKWIATLGEARCLVVMEATGRYDASLRQALAAARIAHARVNPERARHFARATGRRAKTDAIDARMLAELGRRLPVRTEPDASPARLHLAALSRRRDQLVAMRKQERTRRAEETDAAIRDDLDVHLAMLDQRIAALDRAITAAMRSDPGLAARNALLRSAPGIGPVAATVLIAHLPELGEIDQRAIAALAGLAPYNNDSGTFRGRRSVRGGRTRIRQALYMAALAAARSHTSLGRFHQRLRDAGKPPKVALVALARKLLITLNAMARQQQPFAMT

SEQ ID NO: 110286 - protein, 310 aa, unidentified
MEITVGIDVSKARLDVHVHPSGESFAVDNDEAGVAALVGRLGQLVGLSTIGLEASGRYERLAVAELAAARLPVVVLNPAQVRHYGQAIGQRAKTDPIDARLIALFVMAVRPEPRPLPDAQTNELSALMTRRRQLVQMLVTERMRRQQAPKGIVRVSMARIVTSLEQGLRELDAEIDKTVRGTPVWRDKQDLLASVPGIGKTIARTLLAELPELGTLSPRQAAALAGLAPYTRQSGKWRGRSTIGGGRSQVRAALFMGALVAARFNPTLKAFRDRLVAAGKPKLVALIATARKLLVILNAILRDKTPWQNA

SEQ ID NO: 110287 - protein, 348 aa, unidentified
MKNIIIGIDFSKETFDATVLDLSKTNGVLPASIDGMHQKFQNGKLGFRQLLRWVKASTRQRPSKDWMFCGEQTGKYSQGLCDFLSSNGLDMWCEAPLRIKRCMGIARGKNDCLDSLRIAEYAYRYQDKMSAYKPVSKAIAQLKELFLARLKFVEQRKALYVRNNTCTEYSKGSDAEKMVAELSQKLIEQFDESIKKLDKEMQAIIDSDEEILETFENISSIKGISLINASAFIIYTNNFKDFGADPRRIASYWGVAVFAQDSGTSVHHPARTSPMCSKMLKSLLSEAAVAAKTYNPGIKQYYDRLIAKGKHKGVALNNVKNKLVHIITALAVNKTKYMEGYESIRKAS

SEQ ID NO: 110288 - protein, 331 aa, unidentified
MTENPPDVSLTVFVGIDTHKDTHHAAVIDHLGRDVADRQFPATAAGYRAVLAWLAGIGVVARVGVEGTGSYGSGVTAVLQQAGIDVVDVDRTARRSRRFHGKSDPLDAYSAARLAASGIARTIPKAHNGDVEAIRFLHNARRSAVKSRAEAITALKSAVVNAPEAIREQLRDLSTTAVKTALRSLARRIRMLDEEITALEADLHPLIDDAAKDLLERYGVGYETAAQLLITIGDNHERISTEAAFANLCGVAPIPASSGKTNRNRLNRGGNRQANRALHIIVVARLKRDPRTQAYRDKRLTEGKSKRDIIRCLKRAVAREMFKLLTRKITG

SEQ ID NO: 110289 - protein, 407 aa, unidentified
MRYYIGVDWADEEDAVWVVNDAGDKVLSRRVAHTVAARSEWARWLRERQAEGVELWAAIERPHGRIVDFLLDHGVVVYPINPKSLDRARDRFRVSGAKSDPFDAQVLALFLRSDHLQLRPLRPNSEAAQELKGLTRDYRRQVHLQTRLLNQLTATLKEYYPRALELCEDLTAGWAQAFLARYPTPAAAAALTDEDWRAFARAHRLSPTRTAALWETLQQPQLPLPAHVVRIKARLLQVLLRELASTLAGVAEYRQAIDDFFSTMPMAEIARSLPVGKSGTTVPAVWAELGDNLDRWDSFRHVQGYAGSVPETERSGKHLVVKFRFACNTPLRDAIHQLAFLSLSHSVWARAYYDRYRARNHTHHEALRALGAKWLKIIFVMWKRQVPYSETHHLATMARQHLRQTAA

SEQ ID NO: 110290 - protein, 362 aa, unidentified
MTTIGAERPDTKAKVILGVDTHLDFHVAVAVDHLGRSLGESSVPTTANGYERLLCWAEGFGPLRCAGVEGTSSYGAGLVRHLKARGTEVLEVERPKRRRRSSRRNAKSDPADAERAARAVLAGEASGAPKSGDGCVEMIRALRAARRSAMKARTQAANQLQGLRLTAPEKLLNRLRELSTKELVSVAARFRLGDDPRDVPAATKFALRSVARRYEALSAEIAELDAQLARLVAQVAPELVCLPGIGTDHAATLLIVAGDNPQRLRSEASFASLCGVSPIEASSGKVVRHRLNRGGNREANRALYMICLARMRRDRRTQEYVARRTQEGKSKREIIRCLKRYVAREAYRVLISCVARSSPTGP

SEQ ID NO: 110291 - protein, 347 aa, unidentified
MKHFAGLDVSLEWTSVCVVDEVGQIVREAKVLSEPDALVAFFAELDVRVTRICLEAGPLSQWLHDGLAEAGLPVVCAETRQLKAVLSATVNKSDRSDARGIAQMLRVNMIRPVHVKTVSSQEKRMLLTNRKFMLKQLCDAESHIRGTLRNFGLKVGQVSRGRFETRIRELVEDRAALTCLVQPMLRARAELLTAFNELHSMMLHQVRADPVCRRLMTIPGVGPVTALTFRATVDVPARFGRSRSVGAHFGLTPRKWQSGEIDHMGRISKCGDVMMRTALYDAAHSMLTRTTRWSWLKAWAMQVAKRRGQERAKIALARRLGVIMHRMWMDGSEFRWNRGSADAAAAA

SEQ ID NO: 110292 - protein, 355 aa, unidentified
MNSRKYIGMDVHKESISIAVRNDAGKIVMECVIETKASMILDFIAGLRGDLHVTFEEGTSAAWLYDLLKPHVTKLVVCDPRKNASMREGNQSDKIDARRLAELLRLHHLSPVYHGEHGLRSLKELVRSYLTITKDLTRVMSRVKAIYRSWAIPCTGKQVYAARHRAEWIEKIREPGVRRRAEFYYQQLDALQILRQQVRRELWAEAKKHKAWKLLCQIPSIGPIRAAVLLGILQTPHRFRTKRQLWTYSGFGIETQSSADHRRLHGQLQRAKKQISIRGLNRNCNHDLKNLFKGAAIVASSKPGPFQEFYTALLTKGMRPEMARLTLARKIATIVLMVWKRGASFDAQHLKPQTA

SEQ ID NO: 110293 - protein, 336 aa, unidentified
MPKIPRSRTVDRVNQTRIVQGRDNGRKMSEVYTGIDVSKEFLDIAVLPSGERKRYGNDEAGIGKLTARLKKLSPVLVVMEPTGGLEMPLAAALTLEGVKIAVVNARQVRDYARATGKLAKTDKIDALVMAEFASVIKPPVREFRDEETAEIKSIMSRRRQLLEMLTAEKNRLAIARKILKPKILSHIEWLKKEIADLDNELRQRIEDSPIWRVKDNLLQSIPGVGKVLSATLLAELPELGKLNRRQIAALVGVAPYNRDSGKMRGKRSVWGGRVSVRSVLYMATLVSTRFNPVITSFYQRLLEKGKAKKVAIVACMRRLLIIMNAILKTQKAWNYA

SEQ ID NO: 110294 - protein, 339 aa, unidentified
MELYSAIDLHSNNSHVGIMDNQQNRVFYRKLPNDKKVIENVFAPYREQLKGIVIESTLNWYWLADHLMEKGYPVHLANPCGIQKYSGLKHADDKHDAFWLAQMLALKILPEGYIYPKQDRPLRDLLRKRAHLVRIRTSLILSLQNIVMRNHGIKIRSNDLKKLTQDPAAELLKDQEELALAGKASKETIDFLTRQIQRIEKAVQSKVVLKEPFSKLLSLPGVGDILGVTILLETGPIARFKDVGHYASYCRKVNSCWTSNEKKKGKGNTKNGNRYLSWAFSEAADYARMTHDLSRNFYNRKLNQTNASVAHHALAHKLARAAYFIMRDHVEFKEDKMFR

SEQ ID NO: 110295 - protein, 343 aa, unidentified
MEYYAGIDVSLESSSLCVVDATGRIVREAKVASEPETLTAWFNSLGFALSRIGLEAGPMSQWLYAAMKQAGLTVELLETRHVRNAFKIMPVKTDRKDARGIAQLMRLGWFRPVHCKSLPAQEIRSLLGARKLLQGKLHDIELSLRGTLRGFGLKVGKTTPKTFEGRVRSLVTNHPTLTLIAEALLRARAVLLGEFLNLDQKVHTLARHDPRARLLTTAPGVGSMVALTYAAAIDDPARFKSSKTVGALFGLTPKRYQSGETDVTGRISKIGDAAVRTALYEAANIILERPVKGGWLKAWALGVAKRAGMRKAKVALARKLAVVLHRMLVDGTPFNMEKAAAKP

SEQ ID NO: 110296 - protein, 473 aa, unidentified
MARKKGKDPAGIGGPGLTGEPAGVSDEPAEVIARAAAIDVAKGSGMVCTRVPHESGPRRRVQRIWQVSARYSEIAALMAELAKLGIQRLVLESTSDYWRIWYYLAEAAGLEVWLVNARDAKHLPGRPKTDKLDCVWLCKLNERGMLRRSFVPPEAVRDLRALTRLRSRLAQDQARHQSRIEKILEDALLKISSVISDLMGASGRRFLAALVAGERAPDKLAALGDRRLKASPAQLEQALAGRFRDIHALEIGMLLELIDDITAKMARLDAEITARLARIPGIAPACAGCGEIGGGHAPSCPQAGAPVLSVIERLDELTGIGIDAAQVIVAELGTDKTTFPTPGHAAAWAKLASRTIQSGSTSKDGRTGKGNPYLRAVLGRAAMTAAKTDTYLGERYRRIARRRGKQKAIVAVSRTICEIAWMIITDPSVRFSELGPDYYARLDAGRQTRNKIRELERLNPGMKVTLTPAATAA

SEQ ID NO: 110297 - protein, 341 aa, unidentified
MGQVSTIGLDLAKSVFQVHGADASGAVVFRKRLRRSQVRPFFAAQPPCTVAMEACGSAHHGAREMGMLGQTVRLIPPAYVKPFVKRQKNNATDAEAICEAAQRPTMRFVAPKSEQAQAAALVFRARDLLVRQRTQVIHALRGPLAEFGLVVAQGPAPVSQLVQAVVNPDEPLPEIARPILQILIDTLHRLDEPIALLDHEIVQRAKADETAHRLMTLPGIGPVTAVALTALAPPAQTFRRGRDFAAWVGLTPLQHSTGGKQKLGATSKRGERTLRRLLMIGASAVLRWAARHGAPAGSWIARMLACKPPMLVRVALANKMARIVWALMAKGGTYQAPAASA

SEQ ID NO: 110298 - protein, 337 aa, unidentified
MEDIIYDHYIAIDWAAKNMAIARMTKKSNKITAIDVPSDIVELQFYLKNLKGTKILAIEETTTSQWLYTELKDYVDKVLICDPYRNSLLQEGPKTDKIDATKLVQLLKADLMKEVFHSTDKFIYLRRIVSGYEDLVKSGVRLKNQRYSMLRVCGKSGYEKKGIKLASRDEQYVLECLDRQTQNYEEEKKGYEKEFARLARKHPEIRHQKSIPGIGLINAVKIVARVVTPYRFSGKGHYLSYSGLIKHEKMSGGRSYGKKNPRYCRMMKCVYKSGVIAAIGGNNPINDYYEYLISEKGCPAYNARNKACRQLAILSFGVFKSGKKYKPYRRDHVKKGK

SEQ ID NO: 110299 - protein, 445 aa, unidentified
MSDATLSTKIAEPEWAALVAIDWADQKHFWRLALADSGQQEQGQLANTPEAVDTWAAELNIRFGGRPIAVCLEQSRGSLVYMLAKYPHLVLFPVHPKTAAQYRETFCPSGAKGDPSDTASLLDLLQRHRERLRQLQPDTSETRLLQLLVETRRRMVDEKTRQKNRLTACLKRYFPQVLQWFDKVDSAVVGALLQRWPNLTELQRAHPGTLKKFFHEHNCRAEERIRERIAGIQSATPATVDAAILEGEAFNACGLVALLATLRSHIDKLDQRIAQLVAEHPEGSLFGSLPGAGAALVPRLIVAFGTRRERYDSAYQMQCYSGIAPVTEASGKSQWVHFRRACPQFLRQTFHEFAFHSIQSSEWARAFYDSQIAKEKSHHAAVRALAYRWIRIIFRCWKDGKPYDEQTYQRSLQRRGSPLIGSFAPATGAGWNTVAGFQKLSQENS

SEQ ID NO: 110300 - protein, 308 aa, unidentified
MPVFVGIDVAKASLAVALYPGEQQLEVGNDAAGHKALCRWLAAQQVERVLVEATGGYEQALVQHLAEHWPVVRIPPHRARAFAVAIGKVAKTDPIDAAVLARLAAVVDGPEVTPLRAVDARLQALVRRREQLVAQRDDERRRQQQATDRCVRSSLLRQIRQLAREVARLDRDIAACVPQCDSDRAQRLRSVPGLGPVTVATLMAFLPELGQLGNRQISALVGLAPYNCDSGNRQGLRRIRGGRANVRRILYMASWSVVRHQPAFKARYAALRARGKCAKVALVACMRVLLIRLNAMIRDASEWRMAAG

SEQ ID NO: 110301 - protein, 359 aa, unidentified
MRTITIGVDLAKQVFSVCSVDAAGRVQDRRDLRREAFRQWLPNVPAGSIVAMEACSGAHHWARRCLQLGLQPRLIAAQFVTPFRKSRTAKNDRNDAEAIATAARQGNMRFVPVKTVDQQVRLSWHRVREGYKADALATSNRMRGLLAEFGVVVAQSDTALRRAVADLDALALPSGLVELLRDVDAHWRQLQARIADSDRRISEHAKSDEACTRLRAIIGVGPITADAVVATIGSAQDFKNGRQFAAWLGLVPMQHSSGGRSRLGRISCRGDGYLRTLLIQGARSSLQRAKAVPWEKATPEQRWIQDIERRLPFGKVLVAIANKHARQLWAMLARGEHYDAEAWLKHPMVQRPARRSAAR

SEQ ID NO: 110302 - protein, 357 aa, unidentified
MVTGLKHQKEKGSMDHFAGLDVSVKETSVCIVDDTGRIVREVKVASEPEALLTALKNPSYHFKRIGLEAGPLSQWLFSALAEAELPVVCVETRHMQAVLKAQINKTDRNDARGIAQMMRVGLYRPVHVKTLRSQKLRMMLTHRKLLQSKAIAIENDLRGTLRNFGLKVGIAGKTKFEARIKELVENLPDLAELVEPMLVVRRTLREQIVILHRRLLAIVRDDEVCRRLMTTPGVGPVVALTYRATVDVPARFRKSKSVGAVFGLTCSKYQSGEIDWSGRISRCGDEMMRTMLYEAAQVMLTRTNKWSWLKAWAMQIARRRGMKKAIVALARRLAVILHRIWVDGTEFRWTREQAVAA

SEQ ID NO: 110303 - protein, 326 aa, unidentified
MTTSYSIDNTFIGIDVGKASLDVQWHRGDSARYANRPDAIASLVQRLQTGSVVTRIAIEPTGGYEKPLLEALRQAKLPVELVHTSRFKGYRTMVGVKAKSDTSDARLLAAYAASSDEVRGRTADRVELPQDAVREELRELASRRDQLKHMIHAESCRINITRHAILRQNIEAHLEALRAEDKLMLQTMRALVRRRLDLRRDQHLLRTIKGLGAVSVLTLIAAVPELGHLDNKQAAALIGVAPFVHKSGTLTAPARIHGGRAAVRRVLYMAAVTASRHNPVLKSFYERLIAKGKPPKLALVALMRRLVVFANAVLRSGQPWKGAVLA

SEQ ID NO: 110304 - protein, 342 aa, unidentified
MEGYAGKQFVGIDLHRRRTVIVRTTEGGEVLESVRIVNDVERLASVMARAGECPEVVLEATYGWYWAVDALQAGGATVHLAHPLGVKAFEYRRVKNDRDAADLADLLRMGRLPEAWIAPPATRELRELVRHRAKLVGLRSHCKAEVHAVLAKCGVQVLMSDLFGVAGTALLDGLDLPAPYAARIASLRRLMDDLDFEVDLFAGMVRGRMAREPGYAAVQKIPGIGPTLGAVFVAEIGDITRFASAPKLTCWAGLTPKHHESDTHVRRGRITKQGSRLVRWAAIESVKTISATTPAGVLRERVADRRGRNIGSVAAARRQLEFVFYALRDGHVRALEHPPRVA

SEQ ID NO: 110305 - protein, 356 aa, unidentified
MSEKIVTLGIDLSKHYFQCHGVNQAGKCVFKKKLTKKKLLEYVSNLPKCTIVTEACGGAHYFARKFRELGHEAKMIAPVYVKPFVKSNKDDTADAEAIVEAESRPSMRYVGIKEVWQQDLQCIHRVRQRLIKNKTALTNEIRGFLFEYGISFAKGDSALIKALRDVLSNENESVTPMTKLLMQDLSSEFIELQGRISTYDEKLKELAKKDDTFKRLNPVRGLGLISITALIIALADPHVFNNGRHFSAWLGLVPKHSGTGGKNRNLGISKRGDNYIRSLLIHGARASVRAVCLKALKQKPLDPLEKWIFGLYQKKGMNKTAVALANKNARIAWAIMAHGKKYDVGLATTYQNKVAA

SEQ ID NO: 110306 - protein, 412 aa, unidentified
MSVVQFTQVLSRGCGMDIHKKVVVATVQGEGLCKETRSFDTFTRSLTQLREWLVSLGITHVAMESTGVYWKPIYNVFEGFIPHIWIVNARHIKNVPGHKTDKNDSEWICQLLVAGLLKPSFIPPKAQRELRDLTRYRRKLIQSVSANKNRIIRILEDGNIKLSSVLSDTSGATAVKLIDMLCDGKQITLSDIESVRHGRCQHTKEEMLEACTGCLDEHKVYMLGKIRECNASLKEDILDFDKRIKDVLSPYHDAIERMCEIPGIQNRVCEDLVAEIGLDMSNFPTSAHLCSWAGMCPGNNESAGKKKSSRTNHGDKQVKETLVEAAWAASRAKGTFFMERFNRLAPRKGSKKALIAVGHSLLKCIHYVLSTGGRYKELGDSYVPNKKEQKRKEYLKKELQKLGYSVTLSKED

SEQ ID NO: 110307 - protein, 427 aa, unidentified
MKHIPIAGIDVGKRFSEMAVLSPDNIVVSRLKIFHDASSNIDKAIDLLLKAEKDFAARPVVVMESTGHYHKILFHSLCKAGFDVCVINPLQTDSIKNLGIRKVKNDKVDARRIALLYRFQELKSTNIPNEDLECLRSLCRQYFNLCDELTAYKNRLIGVIDQIMLNFTDVFKDVCSQTALAILESYPTPKHILKAKESDLIELIQKTSRKNVNWASKKYNLLISKAKDFEPLSLDSAANLAMLDVNISMIKSLSKSLEKVITAILQLLDEDATKDIPILSMTISLLCSIPGIGLITAATVLAEIGDFSAFSKPDKLVAFFGIDPSVKQSGQFEGTRNKMSKRGSRLLRRVLFTTALANVRKKRNGNELNPVLYDFYRKKSTNKAKKVALGAVMHKLVFIIFAVLRDKKPFELRKPEEHAKMLNKKAS

SEQ ID NO: 110308 - protein, 324 aa, unidentified
MTAPVLGIDIAKLKFNVCLINSQGKLRHKLFPNTAAGFEQLQQWLLRQGVQCVHACLEATGTYGDSLALFLHQAGHTVSVINPAAIKAFAQSRLSRTKTDRVDAELIARFCLSQAPPAWTPLPAEVRELQALVRRLESLIEMRVMEENRLSSGIAVKAVQESIEELIAYLCEQIKRTQESIRKHIDSHPGLKQQSELLDSIPGIAQTTAALLLSEMTDIKQYRSARQAAAYAGLVPRERQSGSSVRGRARLSKIGNARLRRALYFPAITALRCSEFFQSWAKGLQERGKCKMSVICAVMRKLVHLAYGVLKSGKPFDPEWAKTA

SEQ ID NO: 110309 - protein, 317 aa, unidentified
MQTYIGVDISKNDFLACFNEMDKPIKFANSNLGLTKFFNHLKTIGCAKDETIIGVESTGAYSLPLAIIGARKKYVVKIINPIVTKSYLGSSIRKVKTDKADARVIRSCLIGGAGAEFKDTAEETVLKNLIRQRYFFVKLKTELTLKQQDITLKEECLKMPISNINSELKEVIEKKIIYLEQQLSACLPEQQTLLQSIPGVGKITAMTFATEIGDIAKFSSPKKLVGFVGIDSKIRQSGTSLNIKGHISKRGNRIIRKTLYAAALTAIQRPSLFRDFYQKKLSEGKAKNVCIVAVMRKMIHVIYAVLKRQSPFVEKEA

SEQ ID NO: 110310 - protein, 412 aa, unidentified
MKVVYPRCAGIDIHKESMTVCVIVDRQDGSAPEYQKRKLPTHTEGIQELSAWLEECQVTDVGMESTGVYWKPVWNALEGKWGLHLCNPQHVRAIPGSKTDIRDGTRISELLAYGKLPESFIPPVWQRELRDLTRLRARFTQELGRTGNRILKVLEDAQIKLDCVASDALGVSGLRILNALVEGETEAGKLAELAVGKLKKKRAELRTALSGNFREHHRFQVRLLLEDMKECENKIFQLDLRIAPYLEPYEEIVRRLDAIPGVDRLGAAIILAEIGPDMSSWEDSRKLASWSCLCPGNCESAGKRLSGRTRKGNRWLRRAFCQMAWAATRKKGSYFKTQYRRLLGRRGKQRALLAVAHTLVTVVYHLLKTPQLEYRELGEDYFDRRDAEQTKRSLIKRLDKLGYNVTITPKAA

SEQ ID NO: 110311 - protein, 358 aa, unidentified
MKYVGIDVHKKMCQAAVLEEDGELLDQIRFLNRKEDIKDFAFKLLTFRDDVKAVVESTGNLWIQIHDILEKYGIDVSLSNPYKTRLIAEAKIKTDKVDAKMLARLLRADMLFTCYVPGEEIRNRREFLRHRLNLVKMRTQVKNRIHSILDKHGLRVPYPTKFSKKSITWLREQDLGFMDEAIVDGQLALLETLDEQIRVIEDKIAAIAVEDPQVRLLMTMPGIGFFTASLLVAEIGDINRFSCEKKIASWACLAPRISQSGEKTHIGRVSGPGNKRVAAMMVQCAHTACRFDARFKRFYDRYSKRRGKGKAAVAVAHEMMRIVYFMLRDNEPYRGENVELTVKKLKRMEGRASYGLRI

SEQ ID NO: 110312 - protein, 360 aa, unidentified
MNSAEEAKARAVIGGVDTHKDLHVATVVDHRDRVLDTRSFATTRQGYRQMLAWMRSFGELLRVGVESTGSYGAGLLRFLQHAGVTVLEVTTPDKQDRRKRGKNDDLDAQNAAHAAFAGKRTVTPRSRDGMIEALRVLVACRKTAVTARKIALQMIQNTIVAAPDVLRDQLRVMTRMQLVRTLAAWRPDLTAYRDLDVAYRIALKSLARRYLELHDEIADLDVMIAAIVEELAPNLMARNSIGYVGAAQLLLTAGGNPERMRSEASFAALCGVSPVPASSGKTVRHRLNRGGDRSANSALHIIAIGRLRTDQRTKDFVARRIASGHSKLDAIRSLKRYLAREVFALIMQRQKEINATHFAA

SEQ ID NO: 110313 - protein, 450 aa, unidentified
MGNASGVSRGDRNRNARLARLRSLVPVTNAIVGIDLADAKQMVVVTDHDSKVLARKTFRCRAWDLGAALGWAAERAAAKGFSGVTVACEPTGHRWRVLGQLAADRSMPFVCVQPMLSSWARRSEDLTSDKTDEKDAVLIARLTAQLRCYVPEPVDETWGRLRHLGARREQVIVEMVSQIQQMRALLECVWPAALDTAKQPFRSKTWVAAMSAICERDGGDLDRTRRLGPARFEQAVRREILKRGGQKPSLRIARRLFAALTDPTGVIAHRPGALERVAFLLVDWHTAGDKLTDTEARMISVLGELKLTALATSIPGLSPVGAAAILAETGDPNRFASGRALVKHAGLAPREKLSGTFVGRTKLTGAGRPGLRLAAWRAVWGTQRGNTVYAARYRHLTSREQNKLTATQAQTVIAAAILRQLHAVITTGQAWDPDIATPGTGHRKQMPIAA

SEQ ID NO: 110314 - protein, 332 aa, unidentified
MNMNLQGGAAERAQRPNAGIDVSKAHFDACWATHEARLSNDTSGWKGLITKLQADAVDLVVIEATGGYERGLMLALQEAGFTVARVNPRQARDFAKSMGVLAKTDSLDARTLRDFADVLARHKDRAKFITPLMDEQRQLLAELMTRRRQLIDMRVAETQRLEHAHARAAKSIRSVIRLLDRQIAEIDRDIDEHMDRHFKPQRKLFDSVKGVGAVTTLTLLSMLPELGRLGRKPIAKLVGIAPLADDSGRRRGPRRIWGGRAEVRAALYMATLSAMRFNPVIAAHYQRLLAAGKPKKVAMVACMRKLLTILNAMFRDGAMWNAAKHVQVAQNT

SEQ ID NO: 110315 - protein, 347 aa, unidentified
MSITRIGLDTAKSVFQLHGIDEVGKVKIKRKLQRREMIPYFEKLEPCIIYLEACGAGHYWARILIGLGHDVKLIAPEAVRPFVKKGKKNDPADAAALCEAGGRPDIKFVPVKTEEQQAMLAVHSVRALLVKQQTMLSNAMRGLAAEFGLIVPKGIDKLVELMAQVDADENVPKQGRLAVQELFDQREFVAERIETLEAEIVAHARQNEAARRLATIPGVGPIAASLIAASVADFSVFKRGRDFAAWLGLVPRQHSTAGKTRLGKITKAGNREIRTLLVLGATSMTFRAPQWKSAAGVWADRLLQRKPFRLVTVALANKIARIAWALMTRNEVYQANGRVVTAAEAVA

SEQ ID NO: 110316 - protein, 362 aa, unidentified
MNETYYIGLDVHKQSVSYCVKTASGEVVEEGKLAARREDLRAWAAALPKPWRGAMEATLFSAWIYDTLKPYAQELQVGHPARLKAIGCAKKKSDRLDARTLSDLLRCNLLPTCYVLSPEMRNLRRLLRYRQLVVRQSVRMQNKIAGLLMETGAPFVKAKLHGKKYFDQLLQTLEEVPESVKDLLRMSRGALEMFDACQKRLVKELVAAPELTARVERLATIPGVGPLTALTWALEIADPQRFSSIGQAQSYCGLTSAFRSSAGKEQRGPLSKQRNAWLQTALIEAAKLAPRWNPQLAEVHERELGRGHRNRATLQVARKLVGYLLAVDKTGKPFQLRSAQAPGENPAKKESPTLADAALASA

SEQ ID NO: 110317 - protein, 348 aa, unidentified
MITIGIDPHSRNHAAAALDDRGRILGELAVGSTVRELDRLARWIAGIGTERIVAIEGARGFGLALCRRLQGAGETIIDVAPALTVAERRSARRPGKDDRGDAVAVARVAMREHTLPRVSSEESGSDLKLLVDARDQLVAEATRTRNRLHALLLAIAPGYHEHVRDLTSSTALMVARRLASRARTTDRVRSTLACSAIARLRSLSAETGALEREITASLDRAAPANLLGICGVGPLVAAKILGEVRDVRRFSSPAAFASYSGTAPIPASSGTVIRHRLHRGGNRQLNRALHTVALTQARRDDRARAFLARKRAEGKTPREARRALKRHLAVAVFRALVLDAEELSPKNP

SEQ ID NO: 110318 - protein, 368 aa, unidentified
MKKNSTCLKSPKRNKSRKRSITIGMDLGDKTSHYYVLDSEGEMVRESTVATTKKGMKQRFGHLPKCRIAIEVGTHSPWVSRLLSSFGHEVIVANARQVKLISASSRKDDRLDAQTLARLARMDPELLRPIRHRGEKTQGDLMQVRVRAALVDTRTGLVNTARGLAKAMGERLPKCDADQMGVEKMQGLPAVLVEALTPLLETVQSLTQQIKASDQKLEQLAGRDYPETELLRQVSGVGSLISLTFVLTIEDPNRFRKSRDVGCYVGLRPRRSESGESRPQLGISKEGDVYLRKLLVQGAHCILSQKSPDTDLKRWGLKLAGKGNKNAKKRALVAVARKLAILLHHLWVNGEVYEPLRNSRSLEPKAAA

SEQ ID NO: 110319 - protein, 372 aa, unidentified
MKKNRSGCKSPKARMKATRATNVSVGIDLGDKTSRYCMLDENGEVLREASVATTKKAMTQVFATMKPCRVAIEVGTHSPWVSRLLKSCGHEVIVANARQVQLISKSSRKNDRMDAQTLARLARVDPRLLRPIQHRSEQAQGHLRVIRVRAALVEARTMLVNAARGLTKATGERLPSCDADQMGVELMESLPAGLQNSLRPLLEEVGSLTEKIQALDQQVEQIARTDYPETDLLRQVSGVGPLIALTFVLTVEDRERFQKSRDVGCYLGLRPRQSDSGESEPQLRITKEGDPYLRKLLVQGAHCIMGGRGPDTDLKRWGLKLSARGGKNAKKRAVVAVARKLAILLHRLWVTGEVYEPLRNSQSVNKSRKAAA

SEQ ID NO: 110320 - protein, 458 aa, unidentified
MKRNRSKAKIDRMMPMVNPNAAAIDIGATMHMAAVRADRTPEPVRSFGTFTTDLHRLVDWFKECGVETVVMESTSVYWIPIFELLDARGFTVFLVNARDAKHVPGRKTDVSDAQWLQRLHSYGLLRASFRPKGQIAELRAYVRQRERLLEYAASHIQHMQKALTEMNLQLHHVVADITGVTGLRIIRAILAGERDPKVLTRLRDYRCHSSAETIEKALTGTYRAEHLFALEQALALYDAYREKASACDARIEAVLKELSMGRGHSLDSLPSSGRDRSDQANALAFDARTLLFALLGKDITQINGLGPYLSLKLIAECGDDLSAWPSAKHFTSWLGLAPSNKISGGKILSSRTRRCGSRASALLRLAAVSVGRTDTALGAFFRRLSARIGKAKAVTATARKIAVLFYNAVRHGMEYVDPGASYYETRYRTRVVNNLHRRAKAFGFVLQPMDPAPGVVVS

SEQ ID NO: 110321 - protein, 392 aa, unidentified
MTDFAALLGIDWSDKKHDLCLIDSATGEREASVLPHSPQQIEEWATGLRARFGGRPVAVCLEQSRGPLIYALLKYDFLTLYPVNPRTLARFREAFSPSRHKDDPPDAAYLAELLLHHRERLRAWQPDDERTRSLRLLVEHRRRLVGDRTRISNRLTSLLKCYFPQVLEWFPDIRTALVCDFLLRWPSLDALKRVRRQTLIQFFRSHNSVRRETLEQRLNSIKGAQPLTTDDAVLHSSAAMTKALASQMKATLDAVRDFDRQIEALCAVHQDFELFKSLPGAGEVYAARLTAALGSDRQRWQSADELARLAGVAPVMERSGQSCWVRWRYLRPEVPAPDFPRVRGREYSAFLLGQGVLRVAAGEGQEPSRGGALTRLQVGADHLPLLADEDSL

SEQ ID NO: 110322 - protein, 407 aa, unidentified
MEVVNPRCAGLDVHSRRISACARIVTDRGVSREVCSFGTSTRELRAMADWLESKGCTHVAMESTGVYWKPVWHVLEGRFELVLANASQVRNMPGRKSDVSDATWIGELLAHGLIRPSFVPPAPVQEMRDLTRTRKQLVREISRHTLRIQKTLEDANIKLAEVVSSVLGMSGRAILAGLVRGETDPERLADLAATGRLKASRDQIVEALRGTVTDHHRFMLKVHLDQIDQLERAVREVEERARAGPFRAAIELLSTIPGVSETTATVIVAEIGDDMRRFPTAGHLLSWAGLCPRMDESAGKRLSNRTRRGAPWLKTVLVQAAWSASKKRDSHFRARFLRLKSRRGPKKAVVAIAASILTAAYQMLKTGAEYQDLGPKHYDHIDRVRAADRLRRRLQALGYRVTMEPAA

SEQ ID NO: 110323 - protein, 413 aa, unidentified
MERLIERCCGLDVHKATVSACVRVTQRPGGELKQEVRTFATTTPELLALREWLSEQRVTHVAMEATGVYWKPIYYVLEDGFELLLVNPAHFKQVPGRKTDVADCAWLAQLLEHGLLRSSFVPPAPIRELRDLTRYRKSLTEERTRAANRLHKVLQDAGIKLSSVATDMLGVSGRSMLMALVAGTTDPALLADLACGQLRKKLPELRQALTGRFGPHHSFMVSRLLADIDYVEEAGAELSRRIEELLAPFAAAVERLITIPGVQRRTAEVMVAEIGADMSRFPSAAHLSSWAGMCPGNHESAGKRRSGKTRRGNRWIRTALVEAGGAAGRTKRTALGARYRRLRGHLGHGRAVLAVGRNILEIAYHLLSEQTIYRELGIDYFDRYRAERLKRRSLAQLQRLGYQVTLTPLPTAA

SEQ ID NO: 110324 - protein, 415 aa, unidentified
MTHHPKMLYTYVGIDSHKDSHTAVFLDCFFEKLGEVTFENLPSKFSAFMAKAEKLKVDGTTLLFGLEDISMYGRLLAVFFRDNGQKMKHVNALLVAKERKNQNTTQKTDTIDAECAARVLLSKFSDLPDAQPDDKYWILQSLVTRRDFIVKNNISLKNHLHSLITQHYPNYRHWFPNIDSHASLAFLMRYPSPSTMAGVTHENLAEFIREASNYRVGGGVSSTVRARKILDTLQDTTVSFQELRDRSVQSTLRQINVNIQEIKQLEQDIANFMENFSCTLTSMSGIDTTAAAQMLALIGDIRRFTTAAKLARYAGIAPVTYASGQSGKQYADNRGNRPLNSIIYLLAVRLISSASNKILNPSIHDYYHRKLSEGKTKRQALKCVQRRLVNIIWRMLMYNEVYENPHMVDKVVAKV

SEQ ID NO: 110325 - protein, 473 aa, unidentified
MIKSVGIDLGGIGEHRVRCLDEEAQMCDSFGFDTTRVGLEKLEERIFKDGSNPVIVFEPTGLAWLLVAVYLKSRYPDSRLVRVQAQKVVALRKYLNRSSKSDKIDSLTLAKMPFIDPEKLEEIYLPPGTIYAIQRFTRQRKRLESEIAGHKKRIGSIVDGHYPGLRSAFSDPWSAHARAFLRSRLNPLTVVRAGENALYRFLTRARKHGRIEASIESHGVYLVCRELSAIFKASSSVETIDDVFYSAIQEEISREMKLLEIKEAESAAIAKRVEKLYIEIHPSDNLRTIPGVGNHTAPIFVATIGDPKRFRSQSAFANYCGIVPGASQSSDSEAKGLRMTKAGPPIMRWALFQAGGIGRAHDPQLACLYYREMVHNGKNHMQAMGAVMSHLSARVLAVLREDKPYILRDIDGRPVSREEARKIIQEKYQVPESIRRERRRRKTPGSPSLQKKLREMLIPRIREAAETPQPVVT

SEQ ID NO: 110326 - protein, 356 aa, unidentified
MKKDSTVTVGMDLGDKFSQICVLDVEGEILEESRVPTTRAGVKRKFEKLPVCHVAIEVGAHSRWVGQLLKELGHEVVTANPRKLRMIFKNESKSDRMDALALARVARLDPNLLHGVVQRSQECQDQLSVVKARAILVGIRTKLVNHVRGVCKAYGKRLPGCTAETLPKRALAELPDAARPALEPLLQTIAEVTARIRDYDRTLIKIVEEKGPEAGKLTRIPGVGPLTALTFMLTLDEAGRFERSRAVGSYLGLRPRRDQSGTSDKQLPITKTGNVYLRSLLVNCAHRILGPFGADCAIRRWGLKLAERGGKNGKRRAIVAVARKLSVVMHRLWVTGEDFVPFPLPISRPQSMQVAG

SEQ ID NO: 110327 - protein, 439 aa, unidentified
MKRKKSKANRSRSVNFQALPIINPDAAGIDVGAKEHLVAVPCDRDPQPVRTFQAFTPELHELAGWLKRCGIKTVALESTGIYWISLYEVLEQYGFEIRVVNARHVKHVPGRSKTDVLDCQWIQKLHSFGLLNGSFRPDQQIRKLRTYMRLRDNLVGSRTEAVHHMQKALFEMNVQLTNVISDITGETGLQIVQAIIDGERDPKQLAALCSSRIKAPRETVAKSLHGSWDEALLHCLKSALETYEFIQRQIQECDLCVHRQLSQLDSRASLPKTAVTLKAQLHRVCGVDLTKIPGIKEQAAQVIISEVGLDMTKWNTEKQFSSFLGLCPDNSISGGKVLRHSTRKVYNRAADALRLCAQSLTHSKSALGAKYRRLRARLGAPKAIVAMAHHLARLVYRILRYGQSYVEKGILEYELKFRLQRIKWLRKEAKSLNLQLVAP

SEQ ID NO: 110328 - protein, 345 aa, unidentified
MTRFVGLDVSQKLTAICVVDETGRRLWRGQCATDPGQIERMVKGHAGEDARVGVETGPMTPWLVHELRGRGLNVVCLDARHASAALKMQMNKTDQNDAEGLAQIMRTGWYRPVHVKSLDAHRARALLGARAQLVGMTTRLSNHIRGVLKTFGMLPGAMRGLPFDRRVEELLVDRDDLAPIVQPMLVAWRQLREQIAAFDKAVRALAKASPTCRLLMSVPGIGVLSVLAYVSTVEDPARFARSRSVGAHMGLTPKQYQSGEVDRSGRISKCGDMLARTLLYEAAVVLLSRVKRASRLKDWAQALAKRSGVGKARVALARKLSVILHSIWKTGKPFRWSEQEQAQAA

SEQ ID NO: 110329 - protein, 387 aa, unidentified
MPHPNDLSRSLVALEQDATLIAVIEMGQASWLIAGIVPGLERQPLKKLAADPDTLLQLLHRWRNEAMQAGRSIKRIALAYEAGRDGFWLARWLRTHEIEAHVIHPASVPVSREHRRAKTDRLDAELLKRAFLGWLRGEPKHCTMAAIPTLEDEDARRPSRERESLVGECTRIVNRVKATLARLGIRGFRLTLARASEQLKTLRTPEGAAVPPNTLAELRRDLARLNFVKQQVKEIEAARTERLEATPGGGRNAMVHLLARVVGVGVETADMLVQEVFSRKLRDRKALARYAGLTGAPDESGRRRRERGLAKAGNARVRRGMIQLAWGHLLHQKESALAEWYRGRTADARGGTRKTMIVALARKLLIVLWRLATTGEAPAGLRLRPAA

SEQ ID NO: 110330 - protein, 373 aa, unidentified
MRADKKRGKKKGCKMNSIIAGIDLGDRESLTTVLSPIGDVADRFSFSMNEEGYAFFASRVPKDARIAFESTIMAYPISRALRTHGYNDITVAHPKTLTWIVRSKKKNDRVDSLKIAKLHMAGMLPESHLLSRDEQIVRDLLVQRVKLGVEIGRLKNSLIGYLKREDIYNSLPKTKDNFSVRRRRAIHSLRFDDKRDLILRTMMDRLEFLERQCIPLEDSVRENARVSDDVRLLMSITGVDYYLASLLSSFIGDVERFPSDDHLASFFGIVPTSRDSADVKRRGKMTKDGSSIARWALSVMVDTVMQHNAPIREHYQSVKKRTGSGKLAHVSTMRKLTRMLYHMLKTKQHWKWENTLLTEKKMAKLGIGGGDGS

SEQ ID NO: 110331 - protein, 320 aa, unidentified
MNQESTFIGIDVAKTRLDVAIRPTGQQWQVAYTEEGIQGLVDQFADLHPTLVLLEASGGLELPMVTALAAAGLPVVVVNPRQVRDFAKATGKLAKTDVLDAQVLAHFAEAVRPTPRSLPDTETRALTALVARRNQVMGMLVAEKNRLYASRPPVRQRIQTHIAWLEQELENVDRGLNEALHKSPVWREKENLLRTVPGVGPQLTISLLAYLPELGTLNRKSIAALAGVAPFNRDSGTLRGKRAVWGGRSRIRACLYMGALVATRHNPAIRTFYQRLLAAGKPKKVALTACMRKLLIILNAMLKHHTSWQSLTPQLLGPCS

SEQ ID NO: 110332 - protein, 353 aa, unidentified
MNDATTVAIDLAKDVFELAFGNGAGQIVERKRLSRRAFARCLENRPRLEVVMEACGSAHYWARRLQALGHGVRLLPARDVRPYVRRNKTDRADAAGLLEAARCSQIDPVPVKSPRQQGLQALHRARELLKGQRTAGLNLVRGLLREYGIAIPAGAAKVPAAVRDALEDGDNDLPMCLRATVAEQMERVQALAAGMAAIERRLEEEARADVAVQRYQTVPGVGLLTATALRAGAGDLARFRSGRHLAAWLGVVPREHSSGQQRRLGKITKRGDSYLRTLLIHGGRAVLRSAAMRQRAGRPLDPLQAWALELQQRQGHNKAAVALANKLARRLWAIDHHGAAFNPAHISVKPEAA

SEQ ID NO: 110333 - protein, 325 aa, unidentified
MTLSLGVDVSKSKFDAALMTAQGKYRSKVFNNTAGGFEEFLKWIDANVERGRSNVQVCMEATGVYHEALANFLFDSHVKVFVINPLRIKRFVESEGLRNKTDKGDAKALARFALHNQLDAWEAPSTGVRELQALVIRLESLQTMRHSELNRLDVAHPSICDSIAAVVAALDAQIETVRLLISKTIDDDPDLRQRQDLLETIPGLGATTIASLLAYIGRPERFKTVKSLVAYAGLTPAIRQSGTSVDKRQGLHPVGHPALRKALFYPAMTAARYNPIVAAFWQRLKAQNKPGKVILVACMHKLLSIAYGVLKSKRPFDPSLAPNNA

SEQ ID NO: 110334 - protein, 401 aa, unidentified
MNEVGIDVSKGKSMVCVMRPFGEVVLEPFEVLHTAQNLNDLAGKLKALDGETRVVLEATGNYHKAVAFVLHDAGLFVSVVNPVLIHDYDNNSLRRVKTDRKDSVKIANYTLDKWTRLRQYLPEDDTRLALKNCYRQYQQAVAIRTMLKNNLISSLDLTFPDANKLFSSPAKNNGCEKWVDFIGDFWHSECVSSLSPDAFSKKYLKWCQKHGYNFTRSKSDEIFACAVNAASLPKSPTSKLLIQQQVAQLKAVSQSVAAFQQEMLRLSQQLPEFDTVMEMYGVGPSLGPQLMAEIGDVRRFSSKKSLIAFAGIEPQPNDSGKVVGNDKGISKVGSAVLRRTLFLIMTVILQTQPQDEPVFQFMNKKRSEGKPYKVYMMASANKFLRIYYARVKSVMDSECSQ

SEQ ID NO: 110335 - protein, 394 aa, unidentified
MDRIWAGIDIGKEHHHCVVIDCDGKRLLSRRVANDETELLALVADVSALGNEVTWTVDVVDGGAALMLAILLGHDQGVLYLSGRAVHRAAAGYRGEGKSDARDAAIIADQARMRRDLTPIRPGDEITVELKMLTARRADLVADRTRAVNRLREQLLGLFPALERSFDYIHCKGALTLLTGYQTPAAIRRSGLTRLERWLATRKTRNAHTLARRAVEAAASQRTTLPGETVAAQMVQTLATEVLALHDKIAEIDKLIESRFQQHPNAAIIQSLPGFGPLLGAEFLAITGGDMTCFGTPDRLAGMAGLAPVPRDSGRVSGNLHRPKRYHRGLQRVFYYSAMNSIRWSDESQRFYARKRAEGKRHTHAVLALARRRVNVLWAMLRDQRPYQAAPVTT

SEQ ID NO: 110336 - protein, 409 aa, unidentified
MYFVGIDIAKKTHQAAIICSDGKLISKPFKVSNTVDGFNLFLEKLTAVNTDLSQFEIGMEATGHYWLNLYTWLSDKSFRLHVINPLQSDALRNLYIRKTKTDSVDAKIIADVIRIGQYSETQLADENIIALRDLNRQRFYLVDMAADLKRKIIAMMDRIFPEYQDFFSDMFSKTSVQIMKEYTSPEQILQIPTERLTQLLKKASRGRFTETKAKELKALAANSFAALLSSEMTTLLIRQMLEQLDLLEKQIADIEHIIAAQFTQFNTKLTTIPGIGTTLGATILSEIGDINRFDKPKQLIAYAGMDPSVKQSGNFVGTQSHMSKRGSPYLRRALWLAAVVAVSHNDLFKYLFQQKMNAGKTYAQAMGYICHKLLNTVFAILKTGEEYKPVYPPQIDVSKFADRPINSQL

SEQ ID NO: 110337 - protein, 348 aa, unidentified
MIVARHYDHVVGVDTHARTHTYAIVATKTGEILGTKAFAVTAAAIDRAIAWVRGIAGGSVLFAMEGTGSYGASLGRALLRDEIVFCEVRPPKKSSRVRGKTDEIDAIAAATSAMGIELEALTRPKADGLRNALRVTLDARRYMEVRRTSARNQLNALVRTGDFGLDTRRALTDRGVQQLANLDANRSDVAERIIRAEAVRLASTVIDLGRQMRHNREALAELVELLAPGLQQIYGVGPVTAAVAVAAYSHPGRVRSEAAFAALAGVNPIPASSGNTTRHRLNRGGDRQLNRALDVIARVRMVSEARTRAYVERRTSEGRTVREIRRSVKRYIARELFKALQVRMVLGT

SEQ ID NO: 110338 - protein, 329 aa, unidentified
MDNCGIDVAMKSSAVCIVDGRGAVVLEEAVTTDESGLASVLKGRRRMRCVLEAGPLAEWLSRLIEEMGHEAVVIDARKAKGVIRTKKKTDRLDARNLARMGKTGWYTKVHRKSVEARATRTFLQARQGLVQTALAQGSRIRGLLRAHGIKLGEVKESQFASEVKRLACEKSQDLWEMLQPLVEVRRQALKASEQMRRRMIRDAAVEDSVARRLMTVPGVGPITSTAYVATIDDPKRFRSSEQVAAYLGLVPSVAQSGELEVHGHITKEGDGMLRSYLVIRLRPVTPTTSCGAYATTKRSLNPPLPRLVAATKRERTLKITRRLDESQPL

SEQ ID NO: 110339 - protein, 282 aa, unidentified
MKYIGIDVSKATFVAAYSSDRCGETRTFDNTAAGIKKFIGTISSIPDVHCVMEATGNYSAMLLYLLNSAGITVSMENPLKIKNFARAMLSVVKTDILDAKLIALYGEKMTPAPFKVQSEAILRLKQKRTVMRQLQKQRTALSNLKGSIECLPVLDKGAIHAISETLVCIDKRLAGLQKELTELVGNEFGSQLALLTSIKGIGITLATALIITTGGFTYFQNAKQVSRYLGLCPTYEQSGTSVNVRGHINRNGDSYTRGLLYIAAWPASRFNAQCKDLIFNSQ

SEQ ID NO: 110340 - protein, 405 aa, unidentified
MKHVIAFDVSMGKSTIVIYDCYQRCQYEGELEHTISGFQSLKGRIESLREQDGKVPDIVFEATGVYSKGLENFLQVHQYPYIRLNPLEAKLQMAAMRRHKTDISDAHELAKSHFRLDRQETYVQEEYFEQMRALGRYYEDIEKEIRHHYNRLHSFLQLSFPLLEKVFTKSSVLFLNIIQLYPHPACLHMLSKEDLRNQIKQATRKNISNQKAEEKAALLINAAENSYSAIRPEDVRCQHLRHYAKRILELVDQKKDIIRQMVDLSKDRVDFQVLVSFPGIGESTAVRIIGELGDIRRFKNHKQVNAYVGIDIQRFQSGKLQYQDRINKRGNRRLRQILYFMVMSMISLRTKTKNTIVDYYDQLKKQPQSKPHKVAMIACVNKFLKVAFHLIQHDVLYDYESAKAS

SEQ ID NO: 110341 - protein, 378 aa, unidentified
MSSGPFTTPDAMKERGLRSSWVTERFSEYSLFTTKEAPVNAEYDGRQIVGIDLHRRRSVIVQMSPEGERLGKTRIENDPFALAEQVAVWGEAPEVVLEATYGWYWAVDVLQEAGARVHLAHPLGVKGFAYRRVKNDERDAADLADLLRMGRLPEAWIAPPATRELRELVRHRAKLVALRSGLKASVHAVLAKCGVSVPMSDLFGVSGQKLLDELALPAAYAGRVASLRRLIDAFDFEIDIYTRMLTARLDGHAGYTAVQAIDGVGPTFAAVFVAEIGDVHRFGAAPQLCSWAGLTPRHRESDTKVHRGRITKQGSTLVRCAAIESVQRVRRGPIGHARARIGEHRGANIGKVAAARKLLTLVYYGLRDGHIRCLARPA

SEQ ID NO: 110342 - protein, 412 aa, unidentified
MSHGHVMWVSREAAFRSTDDWKDTTMPSAISPPKAVLGIDVGKSSHWACLVTREGEVALNRRVRNSEGDLDGLFSQVACDTIVVVDQCRNIGLLAISRARLAGLGVAYLPGLAAHQAARLFAGDAKTDERDALVIAKTALGIPDALLPVPEPDEALEAARSLAAQRSHMVTCATRDKNRLRSILLESCPAFEALADLGDRHWLNMLEKLGGPWGCIDAGKPAFGAVTKGANRARMDAAWNAAMASTRPPKRRVDAENPQVRMLARRIREALEEADRIDREITALLAGDGTYECLVTIPGIGPRTASELVIGINIEDFPDHDHLASYCGIAPRNRQSGTSISSVSASRQGNRRLKNLLIFSCNSLVRSENRFGEYYRACRGRGMCHGEALKAVARKRLKVIYAIMRDKVPYSA

SEQ ID NO: 110343 - protein, 316 aa, unidentified
MDGPSVSFVGIDVAKQSFDAWVSPEKKFFSLPNDQAGIEQLLAQLPTPGSCLIVIEATGIYQRPLVVALVERGHQVAVVNPRRTRDFAKSEGLLAKTDRLDAQMLARFAEKMHPRTLEGHSEKHQQIQELTLRRRQLVELRKLEKNHQESATHKPVQRTIKKVIDLLSKQIAEIERQLEKLVESDEEWQQKAQIIASIPGVGKVTVFALLAQLSELGNLNRGKISALVGVAPFNCDSGTFRGKRRIRGGRTELRNVLYMATLTAKRMNPVIKAFAERLAKAGKPFKVVHVACMRKLLSILNVLIKTNSLWNPNYAS

SEQ ID NO: 110344 - protein, 421 aa, unidentified
MSQQNVEIAAFVGLDWADQKHVATLQEANSDQRQRFTLDQTPEALQSWIQQLRNRFAGRPVAIAVEQKRGALIYALMHVDFLHLYPVNPQTLSQFRKAFYPSGAKDDPVDADLLLEILMAHRRHLRVWIPDDVLTRSIQLLTEDRRHLVDERTALTNQLMAALKTHFPQALDWFGDLHTARACAFLLRWPTLQQLKRATSSSVRKFYRAQGYRGEDKLEQLISNIEKAQALTEDGAVLLAGSMKVQALVTQIPLLTESIERYDQQIASLFEQHDDSTLFGSFPGAGPSLAPRLLAAFGSNRGRFEFAAEMQQLAGIAPVTEKSGTGIWIHWRLACSKFMRQTFHEFAGQSITQSDWARACYNELRKRGKSHHAALRALAFKWIRIIFRCWKTRTPYDEARYCKSLQLRRSPVAGKLAAAEK

SEQ ID NO: 110345 - protein, 338 aa, unidentified
MKLYGAIDLHSNNNVTVLIDEQDKVVYEKRLPNDLGVIAQQLAAYQSSLEGIVVESTYNWYWLVDGLMDKGHQIHLANTAAIQQYEGLKYTDDHSDARWLAHILRLGVLPQGYIYPKEERAVRDLLRKRGQMVRQRTANLLSLQNLITRNTGSSISSNRIKTLDSETVDALLPNQDLALAVKANLAMIQCADGQIDILERTVTDRVKLRAEFSFLKTVPGIGQILALTIMLETGEIKRFSTVGDYASYCRCVGSQKLSNGKKKGSGNTKNGNKYLAWAFVEAANFAIRYNARIKSFYQRKKAKSHGVLAIKAVAHKLCRACYYIVRDQVPFDVAKAFA

SEQ ID NO: 110346 - protein, 410 aa, unidentified
MELLHRRCCGLDVHKETVVACLRLVSDGKVTTEVRTFKTTTADLLHLSEWLAANGCTHVAMEATGVYWKPVWHILDDGEFELVLANAAHVKNVPGRKTDVNDAMWLAELLAHGLIRASFVPDTQTQEMRNLLRTRKQLVREQSSHVLRVQKTLEDANIKLDSVLSDLMGKSGRAMLEALIAGETNPTKLASLADRRAKASHEEFREALRGRVTKHHRFLLRLHLNQIDALDAAMATLDAQVEANLGPFRTAVELIMSTPGIKNLGAHVIVSEIGIDMSRFPSHAHLISWAGICPRNDESAGKRRSNRLRKGAPWLKTTLVQCAWAAVKKKDSYLQAQFYRIKARRGPKKAIMAVAASILTAIYHMLKDGTMYKDLGCNHFDRRSTDKQKQRLVKRLAELGYAVEIKPLAA

SEQ ID NO: 110347 - protein, 347 aa, unidentified
MEYFVGLDVSLETVNVCIVNAAGDILLEKKIAAEPAAIVHLLKGFGSPFKRIGLEAGPTSSWLYGELRAAGYGAICLECRHVKAGLSAMRNKTDRNDARGIAQLVRLGWFRQVHVKSEEAQRTRMLLVNRQQLLTKALDIENSVRGSLKVFGLRVGVVARRGFEARVLELVADDPILLVVTEPMLRVRQALLEEFERLDRLCQQLARRDPVCRRLMTVPGVGVVVALTYRTGVDAPERFSKSRDVGAHFGLTPKRYSSGQTDYDGRISRCGDEMVRTALYQAANVLLHHGRWSSLRSWAMRIAKRGSVKGAKVALARRLAVVMHRMWTDGTDFRWSDTSRMTVPTAA

SEQ ID NO: 110348 - protein, 321 aa, unidentified
MKPVYIGIDVCKDFLDAYARPAAASKRFPNTPAGIQQLVAWVQPFAPQRVVFESTGPYQKAAVGALLAANLPAVVVNARQVRDFAKGTGQLAKTDAIDAAILAHFGEVVATVVRPLPSQEILEFRDVCDRRGQLVRMLAAEKNHRHAAQGSSPKVLKNIDKHIAFLQRQIEDLEGRMDRIVADSEAFKAKDDILQSIVGIGPQVSRTLLVHLPELGEGSRQSIAALVGLAPFADDSGTCNRIRHIRGGRGKVRIALYQAAVAAIRYCTTMKSFYASLKARGKATKVALIAVARKILVLANALLRTMTPYENRANSVCPKNA

SEQ ID NO: 110349 - protein, 302 aa, unidentified
MGVDIAKSYLDAAIGNEKRRFANERVGHRELIKWVKQLKVPVQVICESSGGYERALVQALVGAQLRVSLVQANRVRQFARAAGILAKTDRIDAKVLCSFAEAMQPGTISASQLEQQHLRELESQRRHLTHLLVMEQNRAARVSDCCVRRLNRSLLKQIKKQIEQLDLFIKEHIEASPELSAKAQKLTAINGVGARTAALLLAQMPELGQLNRREVAALVGVAPFNRDSGKMRGKRAIYGGRRPVRHGLYMAALVAAHHNPILRAFYLRLRAAGKPAKLALTATMRKLLIVLNSALKSDLNYA

SEQ ID NO: 110350 - protein, 420 aa, unidentified
MVYLERGYNLKELPWSKTVSNSFLFKEACMILVGVDVAKDKHDCYIMTSEGEVLFKSFTIANNMEGFNQLYEKILSVIDNFDNVKIGLEATGHYSYNILGYLLDKGLTPYVINPLHSNLYRKSLSLRKTKTDKVDSRIIASMLMSDVSLKPYSNTLYHNEELKSLTRYRFTKVQERAKLKISISRLVTILFPELEKLVPTLQMNSIYALLYEFPSAHAISKAHLTRLTNLLNTTSKGHYTKDKAILIREAAKNSIGSNMPAKSLELKHTIKLIKELTSEINEIEEEIKIIMNKINSPILTIPGIGLSTGAQILAEIGDFKNFSSPDKLLAFAGLSPSTYQSGNMYSSNAKMEKRGSKYLRFALFNAAIYVSYWEPTFSQYLKKKRVEGKHYYVAISHVVKKLVRVIFHLEKTNERYSTVV

SEQ ID NO: 110351 - protein, 348 aa, unidentified
MSEAYDGLQVVGMDLHRRRSVLVRMTSDGRKLETAHITNSPAALRRVIARAGKRPKVVLEATYGWYWAADTLAAAGAEVHLAHPLGVRGFAYRRVKNDEKDAADLADLLRMGRLPEAWIAPDEIRELRELTRYRIKLVRLRTSCKDQVHAVLAKLGIEVTCSDIFGVWGNTWLDGLELGQPYAGKVASLRALAGALTAEITVLEAALAGLLAHHDGYHAIRALPGIGPVLAAVLVAEIGDITRFPHPARLCSWAGLTPRHRESDVKVSRGHITKQGSPLVRWALMEAIQHVPAGHPLRQRKDGLLARRGKEAKNIAKVAAARQLLTWVFYAMRDGQVRTLAASSPKAA

SEQ ID NO: 110352 - protein, 335 aa, unidentified
MKFKSFIGVDVSKLTLDLCLIDPDGEIKNFKIENDLSALKKFFDDVRKVVNIEKTLVCAEYTGHYSNPLKSYCLSHKIGLWLESGAEIKLRSGVQRRKNDKIDAERIAQYAIRYTDKANLQAVEDEAIEESKLLLSERELYIKERAKYKTQIKDLKNFIEKKYYKDRKKRLEKHMALLSKSIEAIDRRIKELFKTTEKLSNQMEILKSIDGVGDQVAIHTIVSTGAFTKFSNGRKFACHVGVAPFSFESGTSQRSRSKVSHRANKKLKTLFHMAALSAIKMQGEFRDYFERKLAEGKKKMTIINSVRAKIINRIFALIRDNRKYEKSYQIGLVNP

SEQ ID NO: 110353 - protein, 410 aa, unidentified
MSEQDPEFVYVGLDWAAAAHAVCVLSAVGKVLVQFMIDHTAEGITTLIRRLAKYGDAADVQIGIERPNGRLVDLLLEAGHPVIPVSPNAIKTWREGEVISGAKSDTGDALVIAEYLRLRHHRLHAVAPYSSQTKALRTVVRTRDDVVRMRVAATNQLSALLDDHWPGAKAIFADVESAISLAFLRHYPTPTAAAHLGEKRLAAFLSKQGYSGRRPVTDLLTRLRHAPQGTADPVLTTAVRDAVLALVTVLEALNTAGKALDRSVITRLGEHPDAEIFTSLPRSGQINAAQVLAEWGDSRAAYDGPEAIAALAGVTPVTKASGKQHAVHFRWACNKRFRRALTTFADNSRHQSPWAADIYARARARGHDHPHAVRILARAWIRIIYRCWHDHRPYDPNLHGGTQRLMPQTA

SEQ ID NO: 110354 - protein, 375 aa, unidentified
MREKVRFLGLDVHAETIAVAIAEPGGEVRSLGMIANRAESIRKLVKKLGPVAQLRACYEAGPTGYVLYWQLAELGVKCEVIAPTLVPVKAGDRVKTDRRDAEKLARSYRSDDLTAVWVPDESSEALRDLVRAREAAKQDQLRARHRLSKFLLRSGQRPAPGVKTWTQIYMAWIRQIRFVQMAQESTRLDYLHEVEHMGERVARLEQAIAEAAKLAPPELQEVIKGLQALRGIAHISAVTIAAGLGEFSRFEGARQLMGYSGIVPSEESSGERTRRGNITKTGNAHLRRIAVEAAWSHRLRPCVGPALRKRQEGVAEEIKEIAWKAQHRLHKRYCRLAATRKDQRKIITALGRELLRFIWAIGIKAETAARQRIAA

SEQ ID NO: 110355 - protein, 353 aa, unidentified
MEQFIGCDAHKKFSLFIAMNEEGEYGRPIRVGHERERMRAFLEALPVGSQIALETSGSYYWLVEEMERAGHRPQLAHALTAKRRMEGRHKTDERDARGLAMLLRNGTLPRVWIPPAALRDQREMLRLRMILVESRSQVKNRIDGVRLRYNVELKGKDIYTQGGREELDGHLTELPEWTRESVHKQLGMVDHLDQQIEACEPSLETMLEPNAERDLLKTLPGVGKILSAVIALEIGDIARFGNAERLVSYAGLVPAARESAGRKRPGQCPSACNTYLKWAFVEAGNVIATHHHKWPERHVAQLYVRVKHNTKMHGKATVAVGRHLAEAAYWILSKQELYREPKSNRQALSSTHG

SEQ ID NO: 110356 - protein, 347 aa, unidentified
MRFYNQQHKFYCGIDLHARKMYVCIIDQQGKTRVHQNLKTDPELLFDVIFPFLEDVVISVECMFSWYWIADFCTEHKIPFVLGHALYMKAIHGGKTKNDKIDSYKIAKILRGGTLPFAYAYPAKMRATRDLLRRRTYMVRQCGLLLAHIQNTNTQYNLPAFNKNISRKFNHDGVAARFEDPSVRAAVEADLAMVEAFNNLIKPLEWQIEKIACQHDHNSLYLLRTIPGVGQILALVILYEVHDIKRFSSVQRFCSYARLIRPEKESDGKWAGKSNKKIGNAHLKWAIRTAAMISLRESDQAKKYVDRLSCKHNKGKALGIYTHKLGRAVYFMLKNKRAFDMKHFFSH

SEQ ID NO: 110357 - protein, 386 aa, unidentified
MQRKRFKRSLVAFEQNSTLVSVVELSFKTWLVAGLVPGLKRQPLKKQGADADALLALLHRWRAEAVKAGGKIERIVVAFEAGRDGFWLARWLRARGIEAYVIHATSIPVSREHRRAKSDRLDTELLMRAVLGWLRGEAKHCSMVAIPTLAQEDARRPNREHQTLVKECGRIVSRMKATMARLGVRNFNVKLRKAVEKLAGLLTPEGVPLPANTLDELRRDMAQLRLIREQIKEIEKARLARLQKAPQDGAHPMLLMLAKVLGIGLETADMLVHEVLSRDLRDDKAVGRYGGMTGAPDESGSKRREKGLARAGNARVRRGMIQLAWRWLMFQKDSALTQWYLARTAGAGHAVRKTMIVALARKLLIALWRYVTTGSVPAGARLRAAI

SEQ ID NO: 110358 - protein, 350 aa, unidentified
MVTIGVDLHKRWHTAVAVDEHGRKLAERTVRATPAGHLELLAWGQARSTERRWALEDCRNLSRRFEQDLLAAGEMVVRVSPRLMGTARRSGREPGKSDPIDARAVARAALQEPDLPVARLDGPERELRLLVDHREDLVAERTRAQARLRWHLHELLPGEEPASRTLDRPAVLGALEVRLSSLPGVVAHIARDLVGRIRGLTVDIDALEKRIGSLVRPLAPSLLALQGCGVLTAAKLIGEVAGIERFRSAAAFARFNGTAPVPVWSGNVTRHRLSRGGNRQVNAALHRIAITQRRLPGPGRAYVEKRLAANDTRTEAIRALRRRISDEVRRRMLLDLALGTARPAPLGMAA

SEQ ID NO: 110359 - protein, 431 aa, unidentified
MLKINPLSTLYVGIDVSSKSNYVCALDFYKNKYINSSFANNQPGAEELALKILECLKEHPDITTIVAALESTSVYSIHIANYLSSCEELMRFKPYVFVLNPKCTANYKKSYIGLGKSDPVDAFVIADYARAGNIESEPWRGSQFLALKRLTRHRLHLVECMTREKTYLVSNLYLKFSELQMLEGDDQPFCDIYGATSSSVLMEYFSPEEILDSSEEDLIAFLAKKSRNRIKDISKTADLLKKAARDSYRLDKALYEPLNVSIASSFNCIETFKREIKVIDNAIEKEIKGLNPNAFIILQSIDGIGPVFAGGIIAEIGDITAFHSSDALAKYAGLTWKSNQSGDFDGEDTPMIKAGNRYLRYYLGEAANSMRKHNVEYGTYYRKKYNEVPKHQHKRALALTSRKFVRLVYGLLARNQLYSGVSLDTSIKDSN

SEQ ID NO: 110360 - protein, 324 aa, unidentified
MQAVTTIGLDIAKSVFQIHGVDAAGNVIVRRQLKRRYVLPFFQRLPPCLIGIEACASSHHWSRELKALGHTVRLMPPAYVKPYVKRQKNDAADAEAICEAVTRANMRFVETKTPEQQSCLMLHRTRHLFIRQQTAVINAIRAHLAEYGIVAAVGRNGVEELLGVVADPSDKRVPEIARACLAALGAQLRMLKAQILEFDRMITAWHRSNETSKRLDAIPGVGPALATALVASVPDPKAFRSGRNFSAWIGLVPKQHSSGGKDKLGSISKQGDRYLRSLFTAGALAAPGVSSHNVEITKRFTSGKHPDMGHVPRAQSSSLVTRRA

SEQ ID NO: 110361 - protein, 406 aa, unidentified
MNLNAVGIDVSKRKSTVSVLRSGGDVLMKPFDISHRTADFQTLADKLKALDGETRVVMECTGHYYEPVARELSQAGLFVSAVNPQIINKFQGQGNPLRKVKTDKADSVKIARYTLDNWANLKQYTLMDELRSQLKNMNRQFDFYMKHKTAMKNNLIALIDQTYPGANTYFNSLAREDGSQKWVDFLDTYWHVDCVRKMSLQAFTEHYQKWCSRKKYSFRKSKAEEIYGIAKELVPVLPKDNFTKCIIKQAVAQVNAASQTVEQLRSLMNETASKLPEYPVVMAMKGVGPSLGPQLMAEIGDVTRFTHKGAVTAFAGVDPGVNASGDYSQKSVHASKHGSPMLRKTLFQIMDVLIKTKPDDAVYLFMDKKRAEGKPYYVYMTAGANKFLRVYYGRVKEYLSALQESY

SEQ ID NO: 110362 - protein, 356 aa, unidentified
MSQKLNSVIAVIGIDIGKNSFHLIGQNKRGAIVLRQKWSRGQVEARLANMQPCLIGMEACVGAHHLSRKLQALGHDARLMPAKYVRPYSKGQKNDFRDAEAIAEAVQRPTMKFVAIKTADQLDLQALHRVRERLVGQRTGIINQIRAFLLERGVAVRQGLGFLRAELPAILAKRTDVLSPRMLHLIEGLLDDWHRLDARIEALSNEIGALACQDPACDRLMSVPGIGPIIASAMVAAIGDGSAFSKGRDFGAWLGLVPKQISTGDRTILGSISKRGNRYLRVLFVQAAWVVLTRVRPENWERYGLKSWIEAAHQRLHHNVLAIALANKLARIAWAVLNKGRAFECVKTHASSSQPA

SEQ ID NO: 110363 - protein, 343 aa, unidentified
MSIPINMFTSHMPPTIWDVHRGDFQMPTTAAGYADFLVWARAHGPIHTVGIEGSGHYGAGLARYLRTEGVSIREVGHPNRQRRARYGKTDTLDARGAAAIVLAGQDSGQPKDADGDIEMLRVLKVTRTSAVNAKSIAITTMQDLLVTAPPMVREQFTGLSSRRLITACAQLDVNEIPCTPTESVYLALRYLAIRYQQLAAEATALEHQIHRLTIQACPALLSLHGVGPECAATLLIALGDNKHRITSEAAFAKLCGVSPVEASSCQTIRHRLNRGGNRQANKTLHTVITVRLRRHQPTRDHLARRSAEGKTKREAIRCLKRYLAREIYNTVLPAQTRQKTCQQ

SEQ ID NO: 110364 - protein, 343 aa, unidentified
MTQYVGLDVSLKETKLHVLDEAGNRVWRGGCGTDPAAIAAAVRQYAPTAVRIGLETGPLTTWLWTALTAEGLPMVCLDARHAKKALDMKVNKTDANDAEGLAHLVRAGWYREVRVKSRSAMLAKALLGARSQLLSMSLALENQIRGILKTFGRIVPKGAGGLFEKNVRALIMDDGEIVAVIMPLLQAREMARSKCAALDHRLIRSVQGDATCRMLMSMPGVGPITAVAYVAALEKPDTFKRSRAVAAWLGLTPRRFQSGEVDYAGHISRRGDRQLRALLYEAAAVLLTRVRKESALRRWGLMLWKRLGFKRAATALARRMAVVLHAMWKSGTPFNPALGAATP

SEQ ID NO: 110365 - protein, 349 aa, unidentified
MDMVHAGLDLSRKRLDVQLLSQSGRRLEHFATPPDRDGLRVLVRHVAQTYGGPVHAAIESMTGARYVHDELERLGWELEIADAQKVKGLAPLACKTDRIDAWVLAELSRRDLVPAIWLPSPDVRAERERARWRLHLVRHRTALKNRIHQTLISFGHGCPVADLFGVRGRQLLAALELPEPWLGTVSASLQLIDDLERQIDDCERQLRRLGADHAYVPLLVTLPGVAWVLGYTIAAEIGDITRFASPTKLCGYSGLCPSVRQSGSRDVRGPLAKNGPKYLRWALIEAAHVAARHPLYRQRYQATKSRLGPQRGSQVAAVELARTLAHAIWYMLTRHRPFAPAGAAQALAA

SEQ ID NO: 110366 - protein, 356 aa, unidentified
MTVVVGIDVHKDTHCAVAVDDVGRQLGAARTFRTTDAGCLALLRWAQREHGRDGAEVRFAVEDCRHLTGRLERALLTAGARVVRVPPKLMAGARSSARTRGKSDSIDALAIAQAALREPDLPVAEHTHTSREVELLVDHREDLVGERTRMQNRLRWHLHELDPTIDPAKRGLDRTVELDRVTQALAALPAGTVRRLALELELVDDIRTLTGRINSLERELRQLITAQAPQLLTLPGCGVLTAAKLVGETARPARFRSEACFAMHAGVAPIPASSGRTDRHRLARGGNRQLNAALHRIAVTQIRLDGLGRAYYQRRREQGDTSMEALRALKRRLARVVSALLAGTDGTVTTQLPQAA

SEQ ID NO: 110367 - protein, 362 aa, unidentified
MMKLKYSICCGLDVHKNVIVATIVTTNKDGISEYKQKSFSTINSDIQRFHNWLIENNCYHVCMESTGKYWIPIFNYLENDIDVCLTHPKYVKAIKGKKTDKKDSKWIADLYKFDLVRCSFIPPKDFRQLRELSRYRFKLVCMKSSEKNRIQNCMTVSNVGIASVLSDPFGKTATEIISYLLEHTADSMDEKAVRKFIKKGAKSKSDEIIEAIKGYTIETDQAKKLELARGHLEYLDDMITQTEVELYVRIKPYYEFVEFVSTMPGMTELSSTIVLTETGVDMDIFDDAKHLCSWCGLSPANNESAGKKKSVRIAKAGDYLKPMMVQCALAAIKSKNSLILQSNMVESKSDVDTKRQSLPLQE

SEQ ID NO: 110368 - protein, 417 aa, unidentified
MAEYAALIGIDWADTKHDISLIDLATGQHEASLLRHSSQTIDEWATALRARFHGQRIAVCLEQARGPLIYALMKYDFITLYPINPTTLAKYREAFSPSRHKDDVTDAAYLAELLAHHRDHLRAWQPDDEPTRTLRYLVEHRRRLVDDRTRLSNRMTSLLKGYFPQVLEWFPDIRTTLVCDFLLRWPSLDTLGRVRRETLVKFFRAHNSVRTETIEKRVEAIKQAVPLVTDRAVIAASVLMTRALAAQMKTTLSAIIAFDAEIEALCAVNQDFVLLKSLPGAGQNYAARLTVALGTDRARWQSADELACLSGIAPVIERSGKSCRVRWRYFCPKFLRQSFVEYAGASVQHSFWAKAYYEQQRAKGKGHQAAVRALAFKWIRIIYQCWKSRTAYNEVKYLEGLRKKGSSLLNYAANNPA

SEQ ID NO: 110369 - protein, 418 aa, unidentified
MSPLPEQSFTAYVGIDWADTKHDICLQAAGDTRREFCCIRHQAAAIDEWANTLYRRFGGPLAVALELWKGPIVAALQKYEFLVLFPINPTTLAKYREAFQPSGAKNDPKDAELALDLLLHHPERFDPLKPQSVAMRTLVSLVERRRQLVGDQTQLTNRLCDTLKQYYPQALEWFDDRGTVLFCDFLARWPTLRSVRQARTATLEAFFHAHHCRSASRISARIRSIRGAAPLTDDVAIIGPCRLYVLALVSQLRAVLAAIAQFEHEIAAVAPTLPDYALFRNLPGAGEQLAPRLLAAFGEQRERFRSADELQKYVGIAPVTERSGKKSWVHWRLQCPKFLRQTFVEWAAQTIPRSFWAGAYYRQQRAKGSSHHIAVRALAFKWIRILYRCWQTRTPYNETMYLNVLRKRGSRLLGTLGA

SEQ ID NO: 110370 - protein, 341 aa, unidentified
MDHVGIDVHKKDSQICIVAEGGELIERRVRTEVGRLADMFEKRPPARILIEASTDSEWVARCLEGLGHEVVVADPNFAPMYAARRRTVKTDRRDARALADACGLGAYRPAHRLSDAQRHVRGRLGVREALVRTRTRYISLIRARLRQDGWRVPTGSAEGFGRRVLALRLPGRLLSEVAPLLAVIRHGDRQLAYADERIAAFTATDPRVRRLRSVPSVGPVTAAAFVAALDDAQRFRRAHEVEAYLGLVPQEWSSGQTQRRGRITKAGSRRVRWLLIQAAVSLRRLRDPRTAGLREWAERIAARRGRKIAVVALARRLAGILFALLRDGTVYEARRQPAVPA

SEQ ID NO: 110371 - protein, 335 aa, unidentified
MSQRFVGVDLHKKLCYFTELDSEGNVIKKGKFGNNFGEVAAFAASLKPQTKLTVEPVLNYLWFLDQMIPYVDSVHPANPAKVRVIAEAKTKCDRYDSLMLAELLRTNFLPESYYVPREIRSLRDLIRQRSQLVAMRVSLKNRIRHLIFLNGSQVKAADIASPKARREMERLCLSPTVKDLIQQCQETIQYLNRGIAVLEKEISCGRDDLAAVKLLQTIPGIGPLFAIIIYAETGDINRFKSGRAFASYCGLVPWVRASGDKIYTGSITKAGSVAMRRVFVEAAIMAPRKSPALNRLLNRVLYKSNIQKARVAVAHKLARITYAMLSKGESFKDCD

SEQ ID NO: 110372 - protein, 351 aa, unidentified
MHIIGCDFHPSWQNIASLDTETGEVVEKKLVHASDDAHRFYRELPAPALVGVEATGNSQWFVEMVCGCGHEIWVGDAAEVRASYVRKQKTDKRDAAHILKLLIEGRFPKIWMPSSGERDQRQLLIHRHKLVEVRSRVKNGLQHLALNQGLQKKRKLWSKAGQQQLHELALQPWADRRRSDLFELLKKLDGQIGELDRAVKEAAEQNANARLLMTQPGVGPITALAFVLTIGDVTRFKRSKQVASYLGLIPREHSSGGKQKLGSISKQGNRFMRSLLVEAAQSAVRYDPEFRKEYVHRCHSMPRGVAKVAAARKLVVRMYWMWKTQTPYPAIVHVESSPRVPLADATVRPLG

SEQ ID NO: 110373 - protein, 373 aa, unidentified
MTKNITWVGLDAHKKAINVAMLVGHDTKAQEWVVENKPAAVRRLVKKLVREADAGEVRCCYEAGPCGYALQRQMEAAGPVICEVIAPALIPRKPGERIKTDRRDARKLGELLRAGLLTEVQAPTPEQEAVRDLCRAREDAKEDLLRCRHRLGKMLLRRGLVYSGGKKAWTQAHRKWVRSVKFDHATDQAVLNDYLLAIEQVEQRVQTLEQQLMKAAESEPLREPVGWLRCFRGIDTVTAVTLVAELHGIERFTSPRQLMAYVGVVPSEHSSSERTRRGGITKAGNSHARRVLIEAAWHYRHPPRISAGLTERRAGQPAAVIAIADKAQQRLYRRQRHLAAHGKTATQAVVAGARELIGFVWAALLHQHHVVSA

SEQ ID NO: 110374 - protein, 344 aa, unidentified
MNSTTIAVDVAKSVFEVAVSIYPGQVHERHRLSREAFGRFLGAHPPATVLMEACGSAHYWARPAQSHGHRVVLVAPHVVRPYVVRNKTDRTDAKGLLEVFRNEDVQPVPVKSTTQQALAALHRLRSTWLATRTARLNTVRGLLREFGLIIPVGAHHVVPHVRAVLEDVDAGIPGLLRPPLAAAVEEIGELNRRIRAVERQLETAAADTLAVGHLRTIPGIGLLTATALVATVGDVARFPSARHFASYLGLTPREHSSGARRRLGAISKRGDTYLRMLLIHGARAVLWHAKAKAAASPDRLRIWALQLERLRGHNKAAVALANKLARIAWAVWRRGTPFAVLPAA

SEQ ID NO: 110375 - protein, 350 aa, unidentified
MIIIGCDYHPGFQQIAFVDTDTGELNERKLGHREEAEQFYRQLKVRGKKVRVGMEASGHARWFERLLTEVQFELWIGDAAEIRTKRVRKQKTDRQDAELLLRLLIEDRFPRIWVAGGENRDLRQLLWHRHRLVQMRTRIMNQLHVLALNEGVRRKKALWRPAGRAQLQSLVLARWASRRRQDLLELLDQLTPKIQELTRALEQEVEKRPVARRLMTHPGVGPLTALAFELVIGTPERFGCGKQIASYVGLVPSEESSGDRRRLGHISKQGNSLLRFLLVEAAQVTVRTDPDWRRRFLHLAMRRERRIAKVAMARKLAVRLYWMWRKEWDYEQMRKFGSHVGEPGNRQGAS

SEQ ID NO: 110376 - protein, 476 aa, unidentified
MEVMFDRVAGLDVGKETVTVCLRTPGPRGGRRSETRTFKTMTGSLQVMRDWLVEAGVSIAAMESTSTYWKPPFYCLEEVMEVWLLNAAHMKAVPGRKSDVRDAEWIAQLLEHGLLRPSFVPPPAIRRLRMLTRYRVQLMGDRAREIVRLELMLEDASIKLSSVASSLKTVSARAILTAMINGESDPLRLADLAKGKMRRKIPDLAQALSGHFDANHARLARSMLRRLDLVEQALAELDAVIMDACQPWQHQIELLQTIPGVGPKVAETIIAETGADMSRFPSAAHLAAWAGLAPAMNESAGRQTPAGKRHGNKWLTAMLVEAAGSVGRMHGKNYLAVQHARLTKRRGMGRAQGRGRALHLGCGLLDAQTRRALPRPGRRLAQPPQRPSPHPTADRAAGTPRPHGDHRPSRLSTDLPGSVERPTRRCRSMPGGRVFTGLCGTLKRCLVLGVRGCGQARCLSEPSSGSGWRYKCLVQG

SEQ ID NO: 110377 - protein, 367 aa, unidentified
MQRVYVGLDVHSKETVYVIQDAEGTVTAEGAVRTSREGLEGLVEQHQLGSDSAVCLETGGQAAFVCDVLESRGLQPAVIDASEVRRKARRRGQKTDRRDAFELCDGLRRNQWETRVYMPPPGIRQLRQILSRRRHFVRLSTQQINAAKYLLRREGLLNGQRVSLTTSAGWDALQAHAQTVALRPHLALHAQTWALAQAHIEVLEAELVQALAPVHTIVERLQSVPGIGLITASSFVAIIGTPERFADSNHVVSYLGLAPSMNDSGDTERHGRITKAGSSSMRTLLCEVAQHAARLTHPLNPYFVRVAAKHGYKKAAIAIAQRLARIMYRMWRDGTDFLPTKLNIEPDGRRRTKRALWRIKPAVAAVK

SEQ ID NO: 110378 - protein, 345 aa, unidentified
MDHFAGLDVSVKETSVCIVDDTGKIVREVKVASEPEALLAVLTNPAYRLKRIGLEAGPLSQWLFSALAEAGLPVICVETRHMRAVLKAQINKTDRNDARGIAQMMRVGLYRPVHVKTLRSQKLRMLLTHRKLLQSKAIAIENDLRATLRNFGLKVGVVGTVKFETRIQELVENVPDLAMLVEPLLVVRRALREQIGILHRRLLVIVRDDDVCRRLMTVPGVGPVVALTYRATIDVPARFRNSKAVGAVFGLTPSKYQSGEVDRTGAISKCGDEMMRMMLYEAAHIMLVRSVKWSWLKAWAMQIARRRGLKKAIVALARRLAVILHRIWVDGTEFRWTREQAAVAA

SEQ ID NO: 110379 - protein, 346 aa, unidentified
MNQIIRIGMDTSKQVFQLHGVDAAEQVVLRKKLRRKNLVEFFARLAPTVVGIEAGGASHHWARRLGALGHEVKLMPPQYVKPYVKRNKNDAADAEALCEAMSRPTMRFVAVKTEEQQAALMLVNLRDRLIRNRTQLSNAIRGHAAEFGLIAAKGLDKIEPLLKRLAEDETLPALARELFGLHAEEYAGLQAQLTEVEGRLMAWHRDNAASRRLARIPGVGPIGATMLAMKVPDAGHFRSGRHFAAWLGLTPKDHSTAGRTRLGVITRAGDPALRSVLVVGAMAVIRQAVRGRGRTSPWLAALLQRKPRKLAAVALANKMARIAWKMMVTGEPFDAARLLAATSKAA

SEQ ID NO: 110380 - protein, 366 aa, unidentified
METIYIGVDFHARQQTICYLKTETGELVTCELKHQDKQKVRAFYAQFCGRVIVGLEASGYSPWFERLLEGLGGEVWLGHATEIRRRARWRQKNDRRDAELILELMLHDEFPRLHRPAVQSREVLRMLRYRQKLIKMRTMSKNSLQAIALQAGLAKGSRLFTKAGQQELAAAEMSPVMHWQREHWLQLMEPLNQQLLETMVWFKAQSKGDACITRLRTHPGIGLLTSLCIVHTLQPVSRFRNTRKVAAYAGFDPVERSSAERKCFLGISKAGSRLLRYLLVEAAQTAVRKDEDLKRFYRRLADRRGRPKAKVAAARKLLIRAYIMLRDEIDYAEFRHRAVAARLARRGQGPSNVPEVLIGQPASPEH

SEQ ID NO: 110381 - protein, 484 aa, unidentified
MEVLHECVAGLDVHKDNVVGCVRTVSGDKTTREHRTFDATTDGLLALLEWLTSCRCELVAMEATGVYWMPVWRILSDGAFKLIVVNAAHIKAVPGRKTDMKDSTWLADLAAFGLLKASFVPDEEQHELRALMRTRKQLVREQTRHVQRIQKTLTEANIKLDSVISDIMGRNGRRMIEAMITGVRDPRKLAALADQRLKATPKQLYDALHGRLTDHHRFLLQLHLGQWDTLDATIKGVDREVATRVFRMDTEGTAAKANFSDLIDQLVTIPGVSRLSALTILSEIGTDMSRFATAGHLVAWAGMCPGQNESAGKRKRTRLRKGAPWLKTMLVQCAWAAKRKKDSYYKAQFFRLQSRRGPQKAICAVAASLLTAIYHMLKDGTGPRLRLFRPASSRNQGEAVGKPDRQAWLRSHLAAHRQGGLKCKKERRKNQCLNALFLFRSEATKQSILSLRLDGLLRFARNDGTGRANARPMTGSAKQSIFAA

SEQ ID NO: 110382 - protein, 328 aa, unidentified
MFYLGMDVAKSKLDCCLLLDESSGKRKTKVVNNTKPGIVDLLAWVAKQNVSQDELHIVMEATGIYHEQAALALADAGVIVSIINPAQIKDFGRGLAVRTKTDGVDSFVLARYGALLKPAAWQPPPPEARVLQALLARREAIAQDLQRERNRQEKADATDTPERIRQSLANSIEFLVKQLADLQQDIDRHIDKHSNLKDDMALLQSIPAVGPQVSGNLLSVMHSHDFGSAEQLAAYLGLVPVERQSGSSVLGRAKLSKAGPARIRAVLYMAAIVATRYNPHVKAVYDRLLARGKSKMSALGAAMRKLVHLCFGVLKTRQPYQPNYAKIA

SEQ ID NO: 110383 - protein, 412 aa, unidentified
MLTESHDEEQIIARVAALDIGKAEVVCCVRVPAGANAKKRLQEVSTHSTMSRALTELANHLVDLGVERVVMEATSEYWKPVFYLLEAHGLDPWLVNARDVKHLPGRPKSDKLDAVWLCKVAERQMLRPSFVPPKPIRQLRDLTRYRIDLVGARTAEKNRVEKLLEDACIKLSVVASDIFGVSGRQMMVALIGGERDPKVLAQLARSRMRAKIGLLEEAFNGHFDNHHAFLLTRMLGRIDAIDADIAAVDAQIEAQLAPFASAAARLDDIPGVGPVAAAIIVAEVGVDVSRFPTAAHLCSSAGKSKGNGSSGHGNRYLARILGESAVVAGRTDSFLGERYRRIAKRRGKKRAIVAVGRSILVIVWHLLSDEQAVFNDLGADHFTRHVNSETKKRNHIRQLEALGYNVTLSPAA

SEQ ID NO: 110384 - protein, 394 aa, unidentified
MKLVGIDIGKHKHFVSIVDKLTGEVILQPVAFSNNAQGFEFLISQIALYPVDSVLIGMEDTGHYHFALLRFLLQKNYSVALINPKTTDLNRRMDGGITKNDKLDTLNICDILSSNKLKKPYRLTSSKKFDLYEQKQLTRLHHSLKEQINVLSNRLQKCIDLVFPEYNALFKSKYGKVYMSILKQFGSAKAIAQADIRTLRKCFDITGRGNRISLTAEKLKESAKTSVGISSLADEMQIKHLIAHIELLNDQLKEIDKKIEEFSTDLNSPIISVPGISHFSGTSILAEYGDIFNYSKPSKIIKAAGVAPFHYESSQYEAKHSAITKQGSSYLRKTLYQVIVPVIRFNKVFKDYYDLKRSQGKSHRCAQSHCIRKLLRVIYHLVTTNQQFDASLLR

SEQ ID NO: 110385 - protein, 346 aa, unidentified
MIVIGADPHKRTHTVCAVDAATGELRSSETVAASKAGHARLLAWGRGLGDGRVWAIEDCRHVSGGLERALVDAGERVVRVAPKLMAGQRRSARQRGKSDEIDALAVARAALREGIDTLPTAHLDEAALELKLLSDHRDNLVADRADSQRRLRWHLHDLWPDHEIPTGALDRNVWLDKTSRKLARADQTARVRVSRDLINHIRQSLRQERNLQKEIAALVNDQAPQLLDIPGCGPLTAGRIIAETAGIDRFKTDAQFARLAGVAPIPASTANTNRHRLDRQGNHRLNCAIHRIAITQARTHPPARTYLTRKQTEGKTTKEAIRALKRHLARTIHNPHHPTHPTNHLT

SEQ ID NO: 110386 - protein, 476 aa, unidentified
MRSKSKQGPEPEEIPDAEYELVAERVAAIDVAKTSGKVCVRTPGARRRVSRVWDVSAMTGPITDLADQLIELGIEKVTVESTSDYWRIWYYLLEAAGLDVQLVNARDVKNVPGRPKTDKLDAVWLAKLTEKGLLRPSFVPPKPIRQLRDYTRLREDPTRERTRYWQRLEKLLEDALIKVSSVASTMDTQSVRDMIEALIAGERDPRRLAGLARGKMRPKYAALVEALDGQFNDHHAELARMLLDQIDALTVQIGTLTTRIEQLLAAMPDTPKPGGSTGGRTDTDARGSGQDPAARTGSAFSIEASAETVAECARLTTIERLDEIPGIGPQTAQAILAEIGFDMTRFPTAAHLVSWAKLCPRTIQSGAKQRFGKSGKGNPYLKGALGEAANAAAKTDTFLGERYRRIVKHRGKLKALVAVARSILVIIWNLLADPTARFHDLGPDYHTTRINTERKVRSHIAQLAALGYHVTVQPAA

SEQ ID NO: 110387 - protein, 334 aa, unidentified
MLTAEADKRKTKVVVNTAAGVQALLAWCAKHGAQPAQLHAILEPTGLYHEQAATALPQVRVSLVNPAQARDFAKALALRSKNDALDSYVLARYGQTLSPALWHPAPLHARQLRALLTRREALSKDLLRELNRKEKSQFSPSAPLVDGSIDKAIAFLREQIKQIERAIDQHIDNHPDLKQDCELLNSIPAIGPQAGNAILAVMHNRHIDSAQSLAAYLGVVPVQRQSGSSLNSCARLSKAGPSQVRATLYMAALVGTRHNPHIRALYQRLLKAGKSKKAALGAAMRKLVHLCFGARADAMKSCGCQSPSGDRQAIGGCQSPCGDRHPGVRLPFSS

SEQ ID NO: 110388 - protein, 452 aa, unidentified
MKRKRSYTAQDVEQLDVEALLLQVSVGCIVAIDVAKTKFVAAIATAAGEVVKLVKFEHPRQTAAFLTLLRRFQQAERKPVVVMEPTGTYGDAVRHQCHTMGLPVHMMPPKYSHDFAEVLDGVPSMHDPKAATVLAKLQAIKPARIWKPEGDPRRDLRAWVDQRRPIARVLAIYHGHLEAMLARHWPEFADYMDVYRQRSWFALLKEFPGPHATTAASEAAAQTLRKASRSHLGDARVQGIIDSARSTTGVPMTTGEQERLRDITEQIESQTRRMAAVDAKLAELVGRDVVLRHMATVVGPACAAAIESLVGSPLDFTNARALEKAMGLNLKEKSSGNTRGHMSITKRGPGEVRHLLFMAALRLLKDDATACAWCHARKGYKADQKIKAVVALMRKLARALWHVARGEAFDPSKLFDTRRLDLASHTTHRNTAAPTSSSARAPGPYQGGAAIE

SEQ ID NO: 110389 - protein, 352 aa, unidentified
MAGVMIGVDPHKASHTAVAISGAEEPLGELRVRASAAQAERLLEWAAAWPERTWAVEGADGLGHLLAQQLLSAGERVLDVQPKLGARVRLLATGNVNKNDPNDARSVAVAALRSPGVRDARPDNHAAVLKVWSKRRRDLASSRTQVVCRLHAVLCELVPGGVAKKIIAAHAARLLDTIKPPDAVAAARWELAAALVEDLRRIDGQLRETKKKLDTAVRASGTSLTGLFGVGPVTAAVIIGEVRDVSRFTNSDRFAAYNGTAPIEVSSGGRKVHRLSRRGNRRVNHAIHMIAVTQVRQKHSEGRAYFDKKLAEGKTRKEALRALKRQVSDAVFTRLRTDARRAQTQARDPGGQ

SEQ ID NO: 110390 - protein, 312 aa, unidentified
MAMLSFCGIDVSKDRLDVVVLPEGWFFSVSNGTAGWAELVVRLRPLTVSAIGLEPSGGYERGIIRALLAAGLSVRRINPNKLRQFARARGVLAKNDRLDARLIAEYVAIMPTRVVQRDAAVERLAEIVTMRRQLCDEHVAAENQAAHLEDAMLRRLSKRRQMRLEADIRLLDKRLAEMVAANVALAQRYELLTSMPGVGPVLAFTLIALLPELGKMSRKQIAALVGLAPYDFDSGKLKGHRSIYGGRMSVRNVLYMAALSASRYSPALKAFHNRLADADKKSKVIIVAVMRKMITTLNAMLRDNAVWQPRSA

SEQ ID NO: 110391 - protein, 308 aa, unidentified
MSQGIYVGVDISKDNLDIAINTEKGSRRLNNNAAGIKKVIEYLRGVSPILVVFEATGGLELPFWQEAGIAATPVNPRQIRDFAKAKGVLAKTDTIDAQIIAQYASAMQPQAQAFPDTQELKEMIARRSQIIEMLTAEKNRLKAARRSRIQQDIKANIEWLKSRLDGVDKDLQEAIKANPEWRQKFEILESTPGIGNTTAASLVAGFVELGQLNRHQVAALAGVAPINRDSGTMRGKRIVWGGRPRIRAALYMATLVATRYNPVIKAFYLRLCAAGKAKKVALTACMRKLLLILNSMLKHNLSWRYSPS

SEQ ID NO: 110392 - protein, 459 aa, unidentified
MQTFYLGIDASKGYADFIILNIHKKVVLESFQLDDTFDGHCLLYELLMNFLTDHPDSNICAALESTGGYENNWYNALLEFQGTLNLQTARLNPLGVHHNSKAGLKRNVTDKISAQNVAEYMIAHPEKVSYQSQDQLASLRKQWGFIKMLTKQCTQILNQLGSLLYSANPEILTYCKDGVPAWVLKLLVKYPTAANLARAKVRSISQIPFVSTTKAEALVLNAKKSVASAVDEVTQQLVAATVKQILHLKETIKIQTAIMAKACAVPEVDLLKTFIGISDASAIGLILNIQSVKRFKTVKKLAAFFGIHPKLKISGDGISAVRMSKEGRAEPRQILYMVAMVAITHNPLIREIYEKHVSQGMEKMAAIGLCMHKILRIAYGMLKNNRPFDPEIDRRNSQKPTTHRKQRENKTRRYQDYDSKAPISRRQKAKRMEQRQSQSDNGAAVRDLSPRSIPDVSLP

SEQ ID NO: 110393 - protein, 349 aa, unidentified
MHNDTLIAVDVAKSVFEIAVSELPGKVTERCRLPRSKFVAFFANRPAATVIMEACGSSHHWGRQIARLGHRIQLLPPQHVRPYVRGNKTDRSDVKGMLEAYRNADIHPVPVKSIEQQILATLHRLRSSWVAERTAKSNTLRGLLRELGVVIPVGARHVVPHAWALIEDAESVLPEALRAPFAEVCEELRTLGQRIEQIETQLKALAEQMPEVTRLRSIPGVGLLIATAVVAFVGDIHRFRSARHFASYLGLTPREYSSGSKRRLGRISKRGDVYLRMLIIHGARSILGHAKRQEAHGVDRLRRWAVQLEKRVGHNKAAVALANKLARLLWALCTSERTYTPAHEAGVAA

SEQ ID NO: 110394 - protein, 407 aa, unidentified
MMSAAVFVGHDWAEDHHDIHIEDRDGKRLHVCRLDDGLDGVRRLHAVLAEFTNDPSEVLIASETDRGLFITAMVSAGYHVIALNPMSTARYRERHSTSGAKSDRGDAQTLAAVARLDGHNHRLLEPDSALADAIKHTARAHQNLIWARQRQLNQLRSVLREFFPAALATFPELAHNDCLATLAIAPTPGAASKLSSARIAAALRRGGRKRGADAKAPKIQAALRAETLRAPEQLEAAMGSHVLALVAVATELSGQIERLETELAALLNQHPEAEIIRSIPGLGTKLGARLLGEFGDAPNRFPDARSRKNYAGTSPITKASGRSRIVIARRIRNKRLADTCHQWAFTAISHSPGARAFYDERRQQGDSHNRALRALSNRLVGIAHGCLTHQTPYDEHTAWGHRYNLVA

SEQ ID NO: 110395 - protein, 315 aa, unidentified
MSKETLDTYYARGQRKQGTTFANSPDGWKLMRAWLKAMGSKQAHVCMEATGRHSLGVALALHDAGHVVSVVNPAQIRDFARTKLGRNKTDKVDAALIREYAELFKPEPWTPPSPAMRRLCELQTMRAGIIRCRAEWKNRVGSGLGDSTATELAAATIEHFTSQLEAIDWAIGETMDQDTELRGRRDLLLSIIGVGETLAASLIAEMPEPGVLRRSGEMVAYAGLNPSHHRSGSSIDRPTRISKIGNATLRSSLYMPALSAMRFNPAVAALVARLRSAGRLKPKQIGVAAMRKLLVLCFGVLKTGKRFDPAIAMPA

SEQ ID NO: 110396 - protein, 323 aa, unidentified
MNKDIKYFGIDISHLDFDVTDSEGNYYQFKNNPSGFKKFVKLIEIDSHCVMEATGYYHYQLAYYLLESGVKVSVENPLAVKRFIQMKLSKIKTDKSDSKLICEYAKQVELKLWKGNSKHQTECLQMVRLLAVYTKQSTMLKNKLHGESVLGNPSKAVVSSLKRSLKQVQKEIKTLKEKLMILVKKVHQDVLTRLKSIPGIGNKTALMLVVLTDGFERFKSGSELCSYAGLTPVIRKSGSSVNGRSRISKIGNQKLRNLLFMCSFNACKYNKACRAIYERLVAKGKSKKLALIAVCNKLLKQAFAIAKSGLVYDQTYRSVLVVN

SEQ ID NO: 110397 - protein, 431 aa, unidentified
MKNRTNQRLEEIAAGTLIVGVDVAKSEQWARFVDYRGVEIGKAVLFKNNRQGFESIVAKIREICKIKILRYPIEQVMIGMEPTGHYWKALANYLMKTDFRVVCVNPYHTKKAKELDDNSPTKSDKKDALTIARLVKDGRYFDPYLPREEYGELRGLTNARVSALKRNNAVKNTITAILDEYFPEIGTVFKKPLQGKASRQVLRSCPFPAFILAMGEDGVLAEIKKAVKKTVGIKKVRQLMSAAQTSVGVDYGLGTAKMRLCWLLNELELIEQQLSEIEQAMESELRQTGYAQRFLGIKGIGVVTAASFLGEVGDPLRFQNARQIANYAGYNLVEDSSGKSKSGTCISKRGRRQLRSLLYQMAFTMVGCNEEMKALYRHLTTRKVNPLKKKQALVVISKKIITVMYSLLKKQEAYKPELVLGAARKEMMMAA

SEQ ID NO: 110398 - protein, 348 aa, unidentified
MNRIVVGVDIAKRVFQLHWVEPQTGEVVALQLKREEFLEHFANRSSCLIGMEACGGSQHWARSLQKLGHEVKLLSGRMVKPFVVGNKNDAADARGIWMAVQQTGIKAVAIKSEQQQAVLALHRMREQLVKFRTAQINGLRGLLTEYGEVMPQGRAGIKRDIPGALGRLSDRLPTMVIETLREQYARLSELDEQVSQIERRLRQWQREDSATQRIAAIPGVGLLSATAAVATMGDANAFKSGREFAAWLGLVPRQTGTGGRVRLLGISKRGDKYLRTLLIHGARAVLTHSKLPSEWVTELVKRRPKNVAVVAMANKMARTIWALTAHERAYQSGYVSRPAWGCTRSINQ

SEQ ID NO: 110399 - protein, 396 aa, unidentified
MKKVYEKVASIGMDVHYKFSNVAFRDGQGQLLRREKLDHRDWPKLVDRLSQWPPEVAIAMEGSFGWPWICDLLTQLGRKPQLANSFKIDKMREARGWTKTNEKDAALVSLMPLEKGDWWKVWMAPPEVRDRREWTRFRADLVQTQTRTKNRIHALFHRHGIFHRYSDLFGSKGRMFLEALCEKDNGLLSGGAWWALRGNLAILSLVRRQIAEVLKQTHRQLQRTPVTRQLRQNVPGLGAVLTHVIVAETGDMARFGYNHRRYASYCLLAPRSDDSGEPREEPAPGRKLGRRGNRVLKWAFIEAARGAVRRGGIWRAMYDRYTQGGKKSRNRGYIKVARALAKQVVGQWRQAVLAGQTSQDSPQPAAERKHRRSRRGGKSGSTRSGTGEPKHTMVEA

SEQ ID NO: 110400 - protein, 474 aa, unidentified
MTTERNPKNQAKRRRKNKASATQQQINTGTNPHAAGIDIGADELVVAIPPDRCAENVRTFRSFTANLHQLRDWLLEHKITTVAMESTSNYWVNCYDMLAEAGIDCYLVNARHVKGVPGKKTDVCDSQWLQQLHAAGLLKKSFRPDQEILSLRYLTRYRESLIREAGNHLRRMQKVLTEMNLKLHHVFSDIDGVSAQTIIQAILAGERDPKTLAALRNGRCRSSETDILAALQGQYRPELLFVLGQLQKNWLEQQKHIADLDDQILNLLQKIAPAQKASKDSGTKAAKSPKRRQLGKNALSLDYCRESQHYFGVDLTEVDGLGPSVILALLSEIGNRQQLLDSFKSADSFCAWLGLCPCNAISGGRVLRSATRKTKNPLNEALRLAAFGISRARSRLGEYCRRMKGRLGKAQGITATAHKLARILYALIQSGTAYSETTAFPPKPQNERKQRRQLEILAQKLGFQVTPIPATTLT

SEQ ID NO: 110401 - protein, 397 aa, unidentified
MYIVGIDIAKRKHEAAVIDGEGAVIIKPFSFTNNCSGYNRLLAMLTKAKLPLDEVSFAMEATGHYWLALFTRLQKEGFRVQVINPVQTNSIRSFYIRQAKTDPRDALLIAEVIRFGHFSESTLHPENIYELRELCRGRHAIVSMQADVKRKVVALLDQVFPEYETAFTNMFGDTSMAILQTCPTPKELSEMPLEELCHLIEVSSHKRFRMAKAQELQALARNSFGFAMAGDVFSTMIRLYAKHLDFLKQQVREMDRKIAEIMDTLDTPITTITGIGPTLGAYILSEIGDISRFSSAAKLAAYAGIDPTMRQSGEYNGVRNRMSKRGSPYLRHAIWLAASSAVLHDPALKLYFQKKRDEGKPYMASVGHACRKMVSIIYAVMRDNKAYTPCIPNEISA

SEQ ID NO: 110402 - protein, 370 aa, unidentified
MAEPTTLFVGLDVHKETIAVAHASPDRSSDVVYVGQIGTREADIDKLLRRLHSHAARLVIAYEAGPCGYGLYRTLAKKGISCMVVAPSLIPKKPGERVKTDRRDAAQLARLLRSGDLTSIYVPTIEDEAVRDLSRAREASIGVLKDAKLRLKSFLLRHGLHYTGRATWNEAHLRYLAKVVCPTPAQQIVFQESLRAVTEQTERAHRFEAELVEIAATWRLRPIVDAFQSMRGVQRHTAVTIASELGDLTRFDNPRQLAAFVGLIPSEYSSGESRRLGPITKAGNGHARRALVEAAWAYRYPAKVSVHLQQRIERCPKPIQDISWKAQVRLCKRYRRMVARGKNPNIVVTAIGREILASLWAIAREVPIGA

SEQ ID NO: 110403 - protein, 338 aa, unidentified
MNYVGIDHHRQYSHMTVMDQMGQVLRSGRVPNLQNEIGKFLEGFEAVEAVIETGRSSYTMVDVLEEMGIAVKIAHPNEVKAIARAKIKTDKRDSEVLAHLSRMNMIPEVYRRSPENRRDQRILRQRAFYVRAMTALKNRVYALLAQQKEEVRQEVARETNIFSAKGQKTLLGLELTRGEKRLLEALLKTYRHLETRIAESTALVEKIYEESREAQLIRTIPGFGKYLSVLVAVEIADLSRFADAAHLHAYAGVIPSVHSSGDKTYYGKIIRAGNRWLRWAAVEAVWPAIRADFDLRCFYERLARRKGANKAKVATARRLLTIIYKVWKEQRNYIPYRR

SEQ ID NO: 110404 - protein, 326 aa, unidentified
MSTSSNSCFVGIDVSKNSLEIALRPDDQHWSVDYDLLHIPPLVSKLKALAAERIIVEATGGVETLLVTHLAAASLPVVVVNPRQARDFARASGKLAKTDRVDALVLARFGEALKPDLRPLPTDEARKFEALLVRRRQIVEMIVSEKNRLSQPGHPNPIARDINEHIKWMEKRLKKCDTDLQKALEQSEVWRVHDNLLRGVPGIGSVTSRTLLAALPELGKLTNKQIASLVGVAPYSQQSGRWRGQSRIRGGRGDVRAVLYMATLTATRCNPVIRAFYQRLIGAGKKKKVALVACMRKLLVILNAMIKDQTAWGEHQKSAQISDAHA

SEQ ID NO: 110405 - protein, 341 aa, unidentified
MKNKSFIGIDISKNVIDVSIFCEETPIKDFSHDVFNNSRKGFGEMCTWLKKNHVVLSNCLFGMEFTGSYSMELEKFLTARKYQFCMLSTHTVKHYPMGPKDKNDKIDSAKIADFLYRYNGTECVKPYKMPDKTMQRLKTLMNERKFLVEQRTCFMNRRQLCTTKEDTQLYDGYIKKLSRDIENIELEEQKLLATDESLLTTYRNLLTIPGIGSVNAINVIVITRNFTAFETARQYASYVGVAPHFRTSGTSVRWRPRPSARCDGQAKADLSMAALITVQYDAELQSFYNRKLGGKQDSDTKRKALNAVKFKLVLRMFAIGKQNRKWEPLDSKSSNEKLAIS

SEQ ID NO: 110406 - protein, 321 aa, unidentified
MNNISVLGIDVSKDKLDCALCIEDKYKSKVVTNNPKGFTDLLNWLHKWHVDAPHVCMEATGVYWEASAEFLAAHDMKVSVVNPAQIKAFGGSRLVRTKTDAVDARLIADFCHRMVPEVWQPPSPAEQALRALVQRLDALQRMHTQESNRLDVAREAVRKGIADHLAWLDKEIETLTKQIRDHINGDPDLKRKRDLLDSIPGVGERTIAAILAFGTDPNHFASARQCVAFAGLNPRQHQSGSSVNGKPRMSKVGHALLRKTLYMPAMVTLYKTAWGKVFRDRLASAGKPPKLIIGAMMRKLLQVAFGVLKSGQPFNPVLHGC

SEQ ID NO: 110407 - protein, 346 aa, unidentified
MEQIIRIGMDTSKHIFQLHGVDAAERPVLRKRVGRKQMVALLAKLPATVIGMEACGAAHYWARELGKLGHEVRLMAPQHVKPYVKRNKNDGRDAEGLCEAMSRPTMRFVPVKTTEQQAALMLTGVREQIVARRTQLSNMIRGYAAEFGITAAKGLDKIEPLLAEIAQEESVPVLARDLFALHGREYAQLQAELKAVEARLRAWHRANPDSRRLAEIPGIGPVGAPELVMKTPDPGAFTSARHFAAWIGLTPKDHSTAGKTQLGKITRAGDERLRSVLVAGATAVIKQAMQGRGHPSPWLVALLKRKPPKLAAVALANKNARIAWKLMVTGESYDGTRMHAASAAAA

SEQ ID NO: 110408 - protein, 323 aa, unidentified
MQGQKSPERSAEPGVYVGVDVCKDWLDVYLHPIGQKFRAANTPEGLKALKRRIADLPVELIVMEATGKFHRQAHRTLHAAGLAVAVVNPLRARLFAEAVGQLAKTDRLDARVLALMGQALEPSALAPAPEALEALQELARARAAAIADQTALSHRRGASQTAFLKAELGRRLKVLAAHIERLDAEIERRIGADAALKRRYDIVLTIPGVGPVAAVALVIGLPELGACSGKAAALLAGLAPLACDSGEKAGERHIRGGRAFVRTGLYLAALAAARFNPQLRDDYQRLRDAGKKAKVAIAAIMRKLVVLANVLIKEDRPWRPIHA

SEQ ID NO: 110409 - protein, 386 aa, unidentified
MQTPNDLSQSRIVLKQDTTLIAVIEMSLSSWLVAGIVPGVKRQPLKKLPVDESALLKLLNRWREEAEKAGRKIERIAVAFEAGRDGFWLARWLRARGIEAHVIHASSVAVSREHRRAKTDRLDTELLKRAFLGWLRGERDHCKMVAIPTIGDEDAKRPNRERESLVGEQTRIVNRMKAALSRLGIRGFNPKLKKAAERLEDLRTPEDEPIPPNTLAELRRDMERRRLVRSQIRDIEDARLGRLEKAPGDGPHAMVRLLARVIGVGIETADMLVQEVLSRNLRDRRAVARYGGLTGSPDESGKKRREKGLARSGNARVRRGMIQLAWRFLMFQKDSTLAHWFYARTKQAPQTRKTMIVALARKLLIALWRLVREGVIPEGIVLRPAL

SEQ ID NO: 110410 - protein, 385 aa, unidentified
MTLAYWGFSRYARLYYQRNNFNMQTIERKNTLFIGVDVHKDTHTAVGISPFGEKLFELTVGNYGKDFRSLAEKVGSVSVESKLSPYFGLEDCSGFGERLADFLLDSGYAVVHVPPILVDERRKNETHPEKSDSLDALGVAKVMLTRSDKLLPYTVTEESRKAKQIKEISMDREFLVSERTRLKNQLHTILHRLWNTEYGEKFKDPFSLKALRYWKGRKPKSADAFLVRSMKRKVGRLLDLHEEITELENELEVLLEDSGHTIHTASGCGTTLAAMIVGEIGDINRFRSPAALAKYAGCAPREHSSGKSHRHRKTRSGNRRLNSAFHRMALSQISRSGNDAAKKYYKKKTGEGKSKSQALVCLRRQLVNVVWMMMKHKTEYVYPQE

SEQ ID NO: 110411 - protein, 377 aa, unidentified
MSEITRLMLMIVRVGVDLAKNLIQVHAVDAAGRKVVAKAIRREQFFAWCEQLPAGCLVAMEACSGAHHWARRLRATGLDARLIAASFVTPYRMEGRSGKNDATDAAAICEAASRPSMRFVPVKTPEQQGIMSLHRIREGLKEERTACVNRIRGVLAEFGLVFAKSPKALRAQLAEVLEDASNELSGIARLALQEAFGHWRELDDKLLWCDRQIRRHVRSSADARRAATITGIGELTASAITASVSDLTQFKNGAQFGAWLGLVPSQNSSGGKSSLGRITKRGDDYLRTLLIQGAKSAVMSAHKRGDPTSRWLVQLKERAGWQKACVAMANKNARILWAVMTREAAYDPHHVSVKPLCKLPLDERAGTAPPAMAPSAA

SEQ ID NO: 110412 - protein, 369 aa, unidentified
MPHVTSIGLDVHARSVAAAAFNPFTGEVVHRDFGTDAAEIAEWALGFEEPRACYESGPTGFHMARELRALGLDCAVAAVSKMQRPAADARRKNDRRDAEFIARMLATHNIVEVPLPDAAVEAARDLDRALDDATAEYRRARQRLNMFLIRLGHVWDERNADGARKGSWTRAHWRWISGIRLEGPQRDVLGYYVTAARCAESDRRQLEKEVLALARTDRWRPAVEALCCIKGIDTLTAFRLAAEAGSFTRFRTAPAFASWCGLIPSERSSGETERRGGITKTGNRLARTALVESAWHYLTCTPRPKAPAPGADVPAAIRARADDCTARLCRRREALAAAGKSPCKANAAVARELACWVWEIGCRAEGTLG

SEQ ID NO: 110413 - protein, 426 aa, unidentified
MKSTQNEKISQIKFSTLVVGIDVAKETHYARAFDFRGIELSKLLRFSNTAEGFQRLEEWMQNICRQHSKTDIIVGFEPTGHYWFPLGDYLKNQGHKLAMVNPFHVKRTKELDDNSPSKNDRKDPKTIAMLVKDGRYREVYIPEDVYQELREAVSERDRLVQRIISISNQVTRWLDIHFPEFNTIFKDWRRKAALQILRDFPTPEKIVAAGAERIEEAWKSAMKRTAGLKRAQELVKVAEKSIGRKTGLVAAEASLQNLLKEYDLYSQQYQQLEQLMLELLQQVPNAEKLLDIKGVGLITAATFVGEVGDIRRFQDPRQIQKLAGFNLVENSSGKHKGKSKISRRGRRRLRHGLFMAMITILATNPEFRQLHKKNINRENNPLNKMQSIIALCGKLIRVFYALLRTGTEYSADKMMGDIELGMKAAA

SEQ ID NO: 110414 - protein, 355 aa, unidentified
MRIIGCDLHARQQTLAVLDVATGEIQEHILEHEGSAVRDFYSGLEGRVRVGIEATGSMHWFLELMDELGVECQVGHPAKIRACEPRKQKHDRRDAMLLLNLLAEDRFPKIWMPTVEQRDVRELLLYRHQWVRVRVRMQNALQSIALSHGLRRGTSLWSKAGLEAIGSLALPPYTTQRRDALVRTYRQLQTEIEALDKTVAACAEQRPQARRLMTHPGVGPITGLATEVFLGDATRFADGKAVASYVGMIPSEFSSAGRQRCGALTKQGNALLRFLWCEAVGHAARRDEALKRFFRRKLAQKGLGKATVATGRKLGIRLWIMMRDQIDYEEFCRHARRNGEAQAEMPDCEHGPGRQ

SEQ ID NO: 110415 - protein, 420 aa, unidentified
MKVVYQTCCGVDVHKSFLVATIIKTTSGVQPSYHKKRFSTFNNSILEFKKWLLDNSCRDVCMESTGKYWIPVFNLLEDEINVTIANPKWVKAVKGNKDDTKDSKWIGDLFRLGLVPGSYIPCKEIRILREFTRYRYKLTSCRSSEKNRFQNALTVCNVALDSVVSDIFGKSATSVIDYLLEQTDNSINHEEISSRLLRSLKKKSESVIKSIEGYQMTDPQKYRMRLVHAHMDYITSTIFDIDSMIDSLVEPYNNAVKLLCTIPGVDRNSAITIISEIGTDMTQFSNSKRLCCWAGLTPGNNESAGKKKSVRITRAGVYLKPALVQVAHAAVKSNKSPYYKAKYERIMKRRGKKRAIIAIARMILTAAYQMLSTGEVWNPTDLYKIDMPEPLKEKQKEKAIKQAKKLLIAEGIIIESHLAS

SEQ ID NO: 110416 - protein, 319 aa, unidentified
MNNKQSQFTTVIGIDVSKNKIDVADNQNSAVKTVGNNKKELTQWIKSIADRTITIVVMEATGGYESLLVELLHQNEIALAVVNPRRVCNFAIGIGRDAKTDPIDAGVIVRFGEVVQPVPQLAQSDEQIKLGVLVERRRQILDLINQEQNRSQQTRDKEIRDSIDTVLETLKKQLKTLDERIAKAVVADEANVRKVEILNSVKGIGPVTISTIVAELPELGKLNRQKIAKLAGVAPLNNDSGQSIGKRKTAGGRSGVRRTLYMATLVATRFNPRIKAYYQRLLAKGKLKKVALTAAMRKLITILNTLVRTNQLWIDPVAG

SEQ ID NO: 110417 - protein, 407 aa, unidentified
MRNYIGVDWADEEDAVWVVNDAGDKVLSRRVAHTVAARSEWARWLRERQAEGVELWAAIERPHGRIVDFLLDHGVVVYPINPKSLDRARDRFRVSGAKSDPFDAQVLALFLRSDHLQLRPLRPNSEAAQELKGLTRDYRRQVHLQTRLLNQLTATLKEYYPRALELCEDLTAGWAQAFLARYPTPAAAATLTEADWGAFARAHRLGPTRTAALWETLQQPQLPLPAHVVRIKARLLQALLHELAPTLSGVAEYRQAIDDFFSIMPMAEIARSLPVGKSGTTVPAIWAELGDNLDRWDSFRHVLGYAGSVPETERSGKHLVVKFRFACNTPLRDALHHLAFLSLSHSVWARAYYDGYRARNHTHHEALRALGAKWLKIIFVMWKRHLSYSETHHLATMARQHLRQMAA

SEQ ID NO: 110418 - protein, 412 aa, unidentified
MDVFCGIDWAEDHHDIALVNRDGELLGRRRISDDAAGLAQLLALLAEHGDTADDPVPVAIETPRGLLTACLRATGRQVYPINPMAVARYRDRHSIAGRKSDHGDAVVLAGVLRTDAHAHRPLPADTELAQAIAVLARAQQDAVWARTTAHNKLRSHLREYYPGFLAAFASARGGILRPAARVILAAAPDPATAAKLTVAQLRALLRNAGRSRGIDAEANRLRDALRTGQMRQLPLVEQAMGRQALALLGQLNAACAAADDLEQAAIESFNQHPDAGIITSFPGLGALTGARVLAETGDDRSRFTDAKGLKAYAGAAPITRASGKTTAVLHRRIKNNRLNAAGYNWTFAALTASPGARSHYDRRRADGDRHAAAQRNLFGRLLGCLHHCLATGQHYDEATAFPSPDSKFQQAA

SEQ ID NO: 110419 - protein, 408 aa, unidentified
MSEQSTEVIYVGLDWAAVVHAVCVLSAAGKVLAQFTIEHTADGIASLIRRLAKYGAPDVVQVGIERPNGRLVDLLLEAGYPVIPVSPNAIKTWREGEVVSGAKSDAGDALVIAEYLRLRHHRLRPVQPYSPQTKALRTVVRTRDDIVQMRVRATNQLSALLEAHWPGATTIFADVESPISLAFLRRYPTAAAAQLGEKRLAAFLTSHGYSGRRAASVLLARLRSAPAGTTDPVLTKAVSDAVNALVTVLEALNTAGKQLDRSVIAHLGEHPDAEVFTSLPRSGQINAAQVLAEWGDSRAAYDGPDAVAALAGVTPVTKASGKQHAVHFRWACNKRFRQALTTFADNSRHTSPWAAHIYAQARARGHDHQHAVRILARAWIRVIYRCWHTGQPYNPNLHGGAQKLPIAA

SEQ ID NO: 110420 - protein, 313 aa, unidentified
MVFVGIDVSKNQLDVHVRSSGEAWSTGNDPKAHATLATKLAALAPSLVVLEATGGYQAAIAATLAASNIRVAVVNPRQVRDFAKATGALAKTDAIDAAVLAHFAESIRPEPRPMPDELTLELQALVTRRRQLIDMRTAESNRLETCRVEPVRRNIQKMIKMLTQQIGKIDDDLDTTIRNSPLWREREDLLSSAIGIGTTTARTLLTQLPELGKLNRREIAALVGVAPFNDDSGKRRGIRTIRGGRADVRAVLYMATIAAVRFNPQIRVVYQRLLAAGKLKKVALIACTRKLLTILNAMMKTNTQWRLDAANAA

SEQ ID NO: 110421 - protein, 426 aa, unidentified
MSNRIGVAYAVAGRAAGLFKRRHRPLGHRFRWLGGWILLVLPERTQVAWMSLVMGIDQHRAQITAEWLDTETGEVSRARVRPADRAGVRRFLARFAGQQLEVALEATTGWRFLVEELRAVGAVVHLAEPAETAALRGNKRRAKSDRADARHHRELVLAGRLPESWIPPDHILDVRARVRLRHTLIEQHTEWQQRIQAVLYHHGCRQRRRLMEGDGREWLASQALSETAREQITVAMAIIDALDVQLAPLTKELCAWARRQAGCKALIDAYYGIGELCAVTVIAELGDCRRFQNSRDAVRYSGLDVTVYQSDRHRAPGHLSRQGPPALRWALYEAAQVARRPGSPDRGYYEQAAERLGGNRACVALARKLLKRCYHTLRELGDDALTPPVERPQPGPGSAAARRASSGSPRSLEPTTTNQRADVLAA

SEQ ID NO: 110422 - protein, 460 aa, unidentified
MNRKRSKSRVDRTMPMMHPNAAAIDVGATIHMAAVSADRAPEPVRSFGTFTTDLHRLVDWFTECGVETVVMESTSVYWIPIFELLDARGFTVFLVNARDAKHVPGRKTDVSDAQWLQRLHSYGLLRASFRPKGQIAELRAYVRQRERLLEYAASHVQHMQKALTEMNLQLHHVVADITGSTGLRIIRAILAGERDPEVLACMRHYSCHSSAETIAKALTGSYRPEHLFALEQALALYDAYHEKASACDVRIEAVLKELSIHRGRGHGSVPPASRRRHRTDHANALAFDVRAALIALLGKDITTIDGLGPYLCLKLIAECGNDLSSWATAKHFTSWLGLAPSNKVSGGKMLSSRTRRSGGRAAALLRLAAVTVGRTDTALGAFYRRLSSRIGKAKAVTATARKIAVLFYNAVRHGMEYVDPGASSYETHYRTRVVNNLHRRAKAFGFVLQPLKPKADSVVS

SEQ ID NO: 110423 - protein, 393 aa, unidentified
MDIMYERCCGLDVHKQTVVACVLVPGAGRQPAKEIRTFGTMTKELLELGDWLAEKGVTHVALESTGVYWHPVWNLLEGQVELLLVNAQHIKQVPGRKTDVRDCEWIANLLRHGLLRASFVPERPQRELRELTRYRTTLIRERAAEINRIQKTLEGANIKLGDVASDILGVSARRMLEALIGGATDPVVLADLAKDKLRKKIPQLQQALKGQFGAHHRFLLAQQLAHLDGLDELIDQLGSEIAERVQPVEHVVERVDAIPGFGRRTAEIVIAEIGTDLSRFPSFKHLASWVGLCPGNNESAGKRMSGKTRKGDVWLRSALIEAAHAASRSKDTYLAAYYHRIAARRGKKKAIVALAHTLLTIIYYLLTRDCDYKDLGPEYLNEHDREQTEKVGQ

SEQ ID NO: 110424 - protein, 427 aa, unidentified
MKYNQNLKILQITEKTLIVGVDIAKEIHHARAFDFRGIEYGKRIEFSNDIDGMEKFFKWAVEIMNKSNKEHLMVGMEPTGHYWLCFAQFLRDKNHKVVLVNPFHVKRSKEFDDNSPTKNDRKDPKTIAMLVKDGRYVEPNIPDGIYSELRIAVDIREMLTKDLNKIKNRVARWLDIYFPEFNKVFADWEGKAALITLKEFPTPTKIIGIRAEEILAAWKKEVNRAVGIKRALKLIEAASQSVGKRDGIEMAEIEIKIILEQYEMIVKQIKEIESKIEELFMQVPDASEMLGIRGVGVITAATFIAEVGDITRYEHPKQIQKFAGYNLVENSSGQHKGQTTISKRGRRRLRSALYKMMMPILANNKEFQELHKYYTTRKENPLKKKQSIIVLCCKLIRVFFAILKKGVKYDGNKMLRDIKRPEIRNAA

SEQ ID NO: 110425 - protein, 310 aa, unidentified
MEQIYVGIDVAKDRLDVHMRPSDKAFAVTRDGKGLAELVERLQGLSPVLIVMEATGGFETVVAGALGGAQLPLAVVNPRQIRDYARAIGRLAKTDALDAEVIALFAERVPITPRPLPDAEVRYLSELVARRRQLIEMITMESNRRRTLTNRRLLRSVERLLAALQGELTALDHDLDDTIRGTPAWREAEDLLISVPGVGDKLARTLIADLPELGRLSRRQIAALVGVAPLNRDSGTMRGRRTTWAGRAKVRAMLYMAALVASRRNDVLRPFYQRLLQAGKPKKLALVAVMRKLLTILNAMMRDRTPWQNA

SEQ ID NO: 110426 - protein, 371 aa, unidentified
MGKSSKSLVIGLDVHKDTIAVAYAAEDRGIEVVSLGMIGTRQYDIDKLIRKLEAKGATLLFAYEAGPCGYWLYRYLTRRGLSCAVVAPSLIPRKPGDRVKTDRRDAVTLARLLRSGDLSSIYVPTVDDEAIRDLSRAREDAVRDLKRHKVRLKAFLLRQDIRYEGRANWNAAHLRWLARVVCPTPAQQIVFQEYVHAVSEQTDRLGRLETELQTAVTTWRLYPVVAAVQALRGLNLTGAVTLIAEVGDLTRFDTPRKLMSYLGLTPSEYSSGEHRHQGGITKAGNGHARRALVEGAWAYRYPAKVSRHLQLRLENVPAEVRAIAWKAQLRLCKRYRLLSARGKHVNQVVVAIAREMAAFAWAIARTVPIAA

SEQ ID NO: 110427 - protein, 420 aa, unidentified
MTHPKMKWTYIGVDSHKETHCAVFLDCFFGKIGEITFNNIPSEFEAFLKEAKKHKVGGTDFAFGLEDTSAYGKSLAMFLADKKQMVKHVNAALVANERNSHNVLHKTDSFDAECAARVLLSRFDELPIANPQDKYWVLAEIVTRRNSLIKINVGLKNYLHTLLSGNYPNYKKYFRLVASKTALAFFENYPSPDTLKGVTAEELRETIKRNSGGSFGIAMATVLLKHVEKCGCKPSEYQAEKCFTVKSVVRQVKANLFEIEETEKLLEGFLKNFDYKLTSIRGVDTVMAARLIAEIGDIQRFSTPAKLAKYAGVAPVTYASGKTDIQYANTRGNRQLNETLFRLALTMVMVTGRSRKIRNPYFYDYYRKKLSEGKTKRQALKCVERRLVNILWGMMKNKTEYRNPPSYDEPKEKEDKEQKA

SEQ ID NO: 110428 - protein, 371 aa, unidentified
MKHNSIFIGMDVHKNSIDIAIAESGRTGQVRHYGKINGTLAALNKAVGKLVGKGDRAHFVYEAGPCGYQIYRHLTARGFDCAVVAPSMIPRQSGNRIKNDRRDSLMLARLHRAGELTAVYVPLPEDEAIRDLSRAREDAKSDEKRSKQRLLAFLLRSGHRYSGRSPWSQAHMRWLADIKMARLSQQIVLQEYIDTINQCTLRLQRLTEQIRQLLPQWRLFPVVQALQSLRGVSLIVAVTTVAEIGDFKRFQNPEELMGFLGLVPSDNSSGEKIKHGSITKAGNSHVRRMLVEAAWAYRFSARLSRALLKRQEDLPQPICEIAWKAQLRLCARYRHFWAKGKVKPVIVTAIARELCGFIWAIAIKTDIPVAV

SEQ ID NO: 110429 - protein, 343 aa, unidentified
MTKITTVGLDLAKSVFQVHAADLEGRPVLRKKLRRGQVLEFFAALSPCLVGLEACASAHHWARELQALGHDVRLIPPQYVKPFVKTNKNDASDAEAICEALMRPTMRFAGVKSADQQAVLLLHRSRDLLVRQRTMLINALRGHCGEFGVVAAQGAPKVTDLIEVIEDPEDARIPALACEALGALIAQLRGVQAEILGLEKKLKVWHRSNEASRRLEAIPGVGVITATALVATIGDASQFHSGRQLAAWLGLVPRQYSSGGKERLGRISKRGDGYIRRLLVHGARADLRWSRRRKHERSAWQESLLARRPTNVVLVAMANKTARVAWALLSRGETFRATARIAA

SEQ ID NO: 110430 - protein, 340 aa, unidentified
MTITTVDIDLAKNVFAVHCVDQNGKTVLVKPRVSRAALPELIAGLPPCVIGMETCSGAHYWARMFRQYGHEPRLMAAKFVSPYRMAGKSGKNDAADAQAICEAVRRPHMRFVPVKDEGQQAMQCLHRTRQGFIEEKTTTYNRLRGLISEFGVIAPQSTDGLRHMVSAQKDSLPLQVQQCVDDLLEHVDHIEAKIAEYDRILSRMAKTDHRSQRLMELKGVGPTTACALVASIGNAHDFKNGRQLAAWLGLTPSQYSSGGKSKLGRITKAGDSYLRTLLVQGARSALIGAEKKSDSFSRWACSLVERRGYWRAVVAIAAKNARLCWASLHYGDDFSLYSAD

SEQ ID NO: 110431 - protein, 420 aa, unidentified
MKVVYQTCCGVDVHKSFLVATVIKTSSGVEPSYQKKRFSTFNNSILQFKEWLVKNQCRDICMESTGKYWIPVFNLLEDEINVTIANPKWVKAVKGNKDDTKDSKWIGDLFRLGLVPGSYIPCKPIRILREFTRYRYKLISCRTSEKNRYQNALTVCNVALDSVVSDIFGKSATSVIDYLIEQPDNSINHEEIASRLLRSLKKKSDSVIESIEGYQMTDSQKYRMRLVRAHLDYITSTINDIDTMLNSLIAPYENAVQLLCTIPGVDRNSAITVISEIGTDMTPFSNSKRLCCWAGLTPGNNESAGKKKSVRITRAGVYLKPALVQVAHAAVKSDKSPYYKQKYERIMKRRGKKRAIIAITRMILTAIYQMLSTGEAWNPTDLFKIDMPEPMKEKQKEKAIKQAMKLLIREGKISESQLAS

SEQ ID NO: 110432 - protein, 353 aa, unidentified
MNEITTVGADLAKDVIVVCAGDAQGRTVYYKQLSFAGFAEWAAKLSACTFGMEACSTAHHWARFLSAQGHTPKLMAAEFVAPFRKSQGAKNDRNDAQAILAAVRQPDMRFVSVKSVDQQAMLAWHRARAGFGEERTALLNRTRGLLAEFGVWLGRSAEVLIRQLPRLAQDQRLPEHFRPILFYALEHLRRIDQCIADCDTRIHEHVRQSEEAKRIQALTGVGELTASALLATVSNPRDFKNGRQMAAWTGLVPRQNSSGGKQRLGVITKRGDSYLRGLLTQGARSTLQVALKREPLRRSRLQQWIVALHGRVGYHKTLVAIANKHTRILWAILAHGESYDPDAWRRHAPQRHA

SEQ ID NO: 110433 - protein, 343 aa, unidentified
MKHFVGLDVSVKETSICVVDGDGDVVLQTSVPSEPRAIVDVLAAPSLAIERIGLEAGPLSEWLYAGLVDAGLPAICVETRHMHAALSAQINKTDRNDALGIGQMMRVGLYKAVHVKTPASQRRRVLLTSRKLLQRKVQDLENELRGIVKTFGLKVGVVGKSRFEARVRELVAGDAILEAIVVPVLTARAALRTQYDALHRMVLALARRDPICRRLMTAPGVGPVVALTYRTVIDNPARFAKSRSVGAHIGLTPRMFQSGEVSRMGRVSRSGDANLRSLMCEAALVLMTGSGRWSSLKAWVIAIARRRGKQKAIVAVGRRLAVILHRMWVDGTDFRWGKETASA

SEQ ID NO: 110434 - protein, 375 aa, unidentified
MKEKLRFLGLDVHAETIAVAIAEPDGEVRGLGTIPNRADSLHKLIKKLGPAEKLRVCYEAGPTGYVTYWQLAELGVKCEVVAPTLVPVKAGDRVKTDRRDAEKLARCYRSGDLTAVWVPDEGSEALRDLVRAREAAKQDQLRARHRLSKFLLRSGQRPPSGIRPWTRPYLIWVAQLRFTQMAQEATRMDYLHEVEHMRERVGRLEQAIAEAVKLASPTLQQVINDLQALRGIADISAVTIAAELGQVSRFDGARQLMGYCGAVPSEDSSGKRTRRGSITKTGNAHLRRIVVEAAWSYHRPPCIWYGLRKRQESISEEAKGIAWKAQHRLHKRYMRLAASGKDKRKITTAVARELLGFIWAIGTRAETVARQRIAA

SEQ ID NO: 110435 - protein, 359 aa, unidentified
MDATTVAVDLAKNVFELVAADQHWRVIERARLTRTQFQRWFGNRDVALVVMEACGSAHHWARVLQQQGIQVRLLPPRYVRAYVKRNKTDAADAAALLEAARCADIVPVRIKSVEQQALQSLHRVRSAWVATRTARINTLRGLCREFGILISAGARLGVEQISRVLVDPHSNVPAMLRDTLKLLVEEIRLLEVRIAQLERELSEAAKLSPACCTLLTVPGVGLLTATALVASTGGSVQHFKDARHFASWFGLTPKEHSSGSSRYLGRISKRGDRYLRTLLTHGARAVLRAASLAQRRGAVLDPLRRWGLLLQSRSNYNKATCGLANKLARICYASLRDQQPYQSLRLAKKLERQTFPMPA

SEQ ID NO: 110436 - protein, 353 aa, unidentified
MKEYIAFDCHKHYTLMEREDVATRRQRLCRIEHGRGAIRRALRECAPGTPVAVEATGNWYWIVDEIEQAGLVPLLVNPRKAKLMMGCINKTDKLDVHGLNVLQRNGTLPTVWIPPGHLRDLRELTRTRMVLTAHRTRMKNRILATLTKYALNPTEFSDAFGRKARPVLEARAAELPPESQRVTRLLLLQLDFTQSQIEELEARLRELVALTPDMQLLMTIPGIGVILATVIVLEAGDLARFPDGPHFAAYAGSVPRVHASGDKVRFGRTRPDVNRYLKWAFAEAGNSVALNHKRCPDRHVSRLYLRMKEHRGHPKAIGAVARHLAEATFHVLTRNQEYRAPNTKAKSGRTRKA

SEQ ID NO: 110437 - protein, 391 aa, unidentified
MTMYFVGIDISKYKHDCCIISAANQKVVSKFTFKNDKSGFEQLNLILNSLSTPEDIKIGFESTAHYALNLELFLENSLLTFMEVNPVLISEYKKSKTLRRTKTDSVDCESIARWLMTVEYKPHSKGFYHAYSLKSLTRLRDRLVRQRSFYLVKITNVLDHTFPEFKPFFHERLSKTALYLLENYGSAEKIARMNSASYEKLRSISRGKFSPQQFIRLKELAANTVGVNNSIFDVELNSLLTLYKSLVDEIKTLESEINRLVDEVHPHYMSIPGIGPISAAIIYAEYGDISNFSSPNQMLAFAGIEPSVHESGTEAYNGKMVKHGSSQLRYVLINCCLPLIRFDVTFATYYARKRSENKPHRVAITHVAKKLVRVIYALESQDIDFDPKKLR

SEQ ID NO: 110438 - protein, 359 aa, unidentified
MKIVGCDFHPKWQQIAVFDSETGEIAEGKLLNGDGEAEQFYRTLEAPARVGIEACGNSQWFLDLLERLGHEVWVGDAARIRASYVRKQKTDRRDAGHILRLLMEDRFPRLWLPTAEQRDLRQLLIHRHKLVEIRTRVKNGLQHLALNRGLQKQRALWSVRGRAYLEKLSLGGWSARRRQDLLKLLGELDGQVSELDEAVKLAAEEHAQARLLMTQPGVGPITALAFVLTIGEVSRFQHSGQVASYVGLIPREHSSGGKQRLGSISKQGNRFLRQLLVEAAQSVVRLDEGFRKQYQARCHHKAKGVAKVAAARKLAVRLYWMLRQNIGYPEIALIESRPRVPLAGENHAEGLIGRSRIQH

SEQ ID NO: 110439 - protein, 349 aa, unidentified
MITIGVDAHKRLHVATAVDDAGKEIDRWKGPNSCRGWVDLEAWAAKQGGIRQFGIEGAWGNGRGLAQQLVRSGELTFEVNSRWTAAGRRTARQPGKTDRLDARAVALFVWREAATLPRLLEEDETALLNLLTTEREATVNESTRLRNQIHALLQQIDPEYGESMPGLRTKAGLARLEAYDAPEGTGLQREQAASVRRLTIRLKLALAQADELGARIRELAAPYAGLTALCGVNLLTAGTLAAILGPGKRFSTDAQLAAYAGVAPLEASSAGAVRHRLNRGGNRRLNAVLYRIALTQARSSPDAQAYLARRVSEGKTKREARRALQRYLIRTIWRLWQVCLEPASLPSAA

SEQ ID NO: 110440 - protein, 330 aa, unidentified
MSPTPNASVVSAPVCAYAGLDVGKASCQLAILLPDGSRLQKSIDASPSGFGQMAALAKEHQVALLVMEATGGLELDPAMALWNAGLAVSIISPGQSRAFARATSKQAKTDRVDAAMLAQFASKIRPDPSVQPTALELELRELAGRRGQLTGLLVQEKNRLQQARTQQVKKSIRQVIEALEKQLDDLDRLLQERVKEDPRIHQAIELLSSAPGIGTLSATQLCLAMPELGSLSRRSSASLAGLAPYAQDSGTMVGQRSIRGGRSAVRNALFMPTLSAIRHNPIIKEFYQRLRAAGKRRIVAVVACMRKLLGILNSMLKQNKTWDQFVLKNP

SEQ ID NO: 110441 - protein, 355 aa, unidentified
MNDTKYIGMDVHRESISIAVMNSAGKIVLECVVETKASIILQFIDGLRGELHVTFEEGTWAAWLYDLLKPHVTRLVVCDPRKNASMKQGNKSDKIDARRLAELLRLDHLNPVYHGEHGLRSLKELVRSYLTITKDVGRVMSRVKAIYRSWGIPCTGKQVYAPRHRDEWLGKITEPGVRRRAEFYYQQLDALRILRQEVRRDLLAESKKHQAWNQLCQIPSIGPIRAAVLLGILQTPHRFRTKRQLWTFGGLGIETYSSADHRYVEGQLQRSKKPASIRGLNENCNHDLKNLLKGAAIIASTKPGPFQEFYEALLAKGIRPEMARLTLARKIATIVLIVWKRGVCFDAQHLKPQTA

SEQ ID NO: 110442 - protein, 317 aa, unidentified
MTTPNEVYVGIDVGKTWLDVALWGSEAVWRVSNDDEGVAKILARVTALEPQLIAVEASGGYEQLLVQSLLLNSLPVAVVNPTRVRALSKATGKLAKTDVIDARLIAEYAFKIRPEALAPKKAHEIRLKALVTRREQLVQMRTVEQNRLGTAQNSVQADIRTHIEWLSARIQEFEAQIKELVDSLPEWREQAKRLDSIPGVGMITAVTVLAEMPELGQLDRQKIASLAGLAPFNRDSGQQRGKRRIFGGRKGIRRVLYMACLSATKYNPVIRSLFERLIKKGKVFKVAITACMRKMLTIMNAMTRDQVNWRAPEPIPN

SEQ ID NO: 110443 - protein, 359 aa, unidentified
MNKCSTEKKKIYVGFDVSEKTIEVFAVCGTETSKGYCKIDNNQDAIKKFLSEFKDPKRVCVVMETGTHSLWMSELIEKLGFEVIVAHARDLALIYRSDKKNDQLDAEKLARLAQADRKLLHPVKHMTLERQTDLTVLKARDLVVRQRTQLINTIRGLLRAAGHKLIEEEFSTRTIKKCCSALPEYMRPAIMPLLQQICHLDLAIKEYDRLVRKLCKKYPATKILQQITGVGELTSLAFVLIVGDPHRFDNAARLCAYLGVVPKQDQSGDTDKQLGITKKGNKLGRKLLIQAAHYILGPFGPDSELRSYGFRIQARGGKIAKKKSYVAVARKLVTVMLALWKNPDIEYDPNFKATRKLHK

SEQ ID NO: 110444 - protein, 411 aa, unidentified
MHPKMKRIYIGVDTHKNTHTAVIINCFNEKLGEITFENRPSAFPALLQEVKKNTGKGISPAFGLEDTGSSGRALAVFLISNRKTVKKVNATYTHNERKKLTIMHKTDSFDAGCIAKVLLDNYDTLPDANPDDLYWTLGMLVSRRSALVKANVALKQQLHSYMVLHYPSYRRFFTVFDCKAGLEFWEKYPSPTKLRDISFSELGEFLHLHSSGFLGEKRAIKILGLVEKDGDTTTEYQDSRDFLVTTCIKQVKQNNEEMGRIEDEMQKLMSRLGYKLETFPGIDHVTAAGFTAQIGDIERFSNADKLAKYAGISPVTYSSGESDKNFSNRQGDRTLYHLFHALAARNVNRGRNKNKPVNDIFYEFYQKKISEGKTEHQAIICVMRRLVNILYGMMKNKCEYRNPTLPKKDAE

SEQ ID NO: 110445 - protein, 366 aa, unidentified
MNYNTVYVGMDVHKESFTFCAYTIDAEKGSHFQRTEADYKNVLRYLEFLRTVYGNDANFICGYEAGCLGYTLYHQLTEHHVNCVILAPTTMLEQRSKKRIKTDKRDAEIIAKCLAQHNYSPVHIPTAADEETKEFLRMRDDHKLALKKVKQQILAFCLRHNYRYDGNSHWTAAHIKWLKSLKPEALYKEILDEYLLTYTALSDKLERLDKRIEELASKDEYKESVKKLCCFIGVKTHTALSVLVEVGDFQRFASYLGLVPGEDSSGDGQTRLGITKAGNRHVRMLLTEASQCYARGQIGFKSKELKSRQAGNSPQVIAYADKANERLRRRYYKMVLGKSKKPNVAKTAIARELACFMWGMMTDHVA

SEQ ID NO: 110446 - protein, 320 aa, unidentified
MRIIGCDLHARQQTLAMLDTTTGEVVEVTLKHEGDKVREFYSSLPRPVRVGIEATGSMQWFLNLMEELGIECLVGHPAQIRAAAPRKQKNDRRDAELILKMLVEGRFPAIWLPSKELQDLRSLLRHRHQWVRMRTRIQNALQSIALANGLRRGTALWSHDGQNMIASLPLAPPTAYRRSELQAMYAKFEAEIEKLNQRVEEQACGRVGARLLMTHPGVGPVTALATEVFLGDAARFADSKALASYVGMIPREYSSGGRQRLGGLSKQGNPLLRFLWGEAGAHASRKDPELRRFYRRKLNQKGGRGSQARDPTVDHVARSD

SEQ ID NO: 110447 - protein, 341 aa, unidentified
MDPIAIVGLDLAKRVFQVHGAGADGRVVLRKKMSRPQVLTFFAQLPTCVVAMEACASAHEWGRAIRELGHEVRLIPPIYVKPFIKRQKNDAADAEAIAEAASRPTMRFVAIKSESQQARAMIFRTRDLLVRQRTQLINALRGHLTEHGIVAPQGATNVRQLALAIDDVATSLDPLVVDLSRLYLDQIRDLDTRISELEKRVSQEAKRSGMTSRLMTMPGIGPITAMAIETFAPPMATFKRGRDFAAWLGLVPRQFSSGGKQVLGRVSKMGQRDIRRLLIIGAMTVIRWSIRKGALAGSWLARMLPRKPRLVLAIALANKMARAAWAMLTKNESYRAPMPTA

SEQ ID NO: 110448 - protein, 459 aa, unidentified
MADAEFPTSPAGYEAALGWAKSFGAVQMAGVESISSYGAGLTRVLQAAQIEVAEVSRPDRATRRRRGKSDPIDAYAAARTALAGDGLTVPKDGHTTALRALLTARRSAVKARTAATNQIHALLITTPAELRDRYRRHSTTALVTALARCRPTTYRDATTAAVLTAAKALAQRIEFLDHQERDLTTRLDALVQQINPALRAADGVGPDTAAQLLVTAGTKPDRLRTEASLAALCGAAHVPASSGEFTRRRLSRGGDRAANSALHRIPVVRMSSPPANSRLRPASRCQRPHQKKRFCGCSNARSSAKCSDCSPGPDPSTTTVTCGPPDKPKTSPSPPSPTTSASRSSPSRASNADTNATTPSPTTTANGSPPLDVLTGIGASTHCNFGGHRHTRVHGTAQVAGEPSPVSCALPLLEGWARCRRQLAGHRGRNETQLRCLVSERRQFNPDRGLCTPEQCLRR

SEQ ID NO: 110449 - protein, 308 aa, unidentified
MSQSTVYIGVDVSKNALDVSAPSLSRSYPNTAQGFSQILKAIPREAHIVMEATGGYERAFIQALHQAKRKVSLVNPRFVRDFAKGMGQLAKSDKIDAAMIAHYAACKHPMADPVPAASRLRLSEMVIRREQLLEARISETNRLDHQTMSDVQNQTKKIIKLINQQAAELAKLIAREIEADELLKAKSARLREVDGVGPVVTATLLAHMPELGAISRNQASALVGVAPFICESGKYKGTRRIYGGRAGLRSVIYMAALSSARKNPIHKAFYKKLRNAGKPFKVAIVAVMRKLVILMNHLLAKPNFSLAR

SEQ ID NO: 110450 - protein, 342 aa, unidentified
MESAVTIGLDLGKSVFQVHGVDAGGAVVIQRRLTRGRLLAFFAKQPACLVGMEACAAAHHWGRELQKLGHKVRLMPPRYVKPYVKRQKNDAADAEAICEAVTRPNMRFVEIKTCEQQGILVLHRVRLMLTRQRVQLSNAIRGHMAEYGLVAPVGRNGLQRLIAIIEDPDDGRVPAVARASLVPLVRQLGMVNDQVLENDRLVRASARSTELGHRLMEVPGVGPVLASAMVATVPDPTAFKSRRDLAAWIGLVPRQNSSGGKEKLGGITKQGDRYLRQLLVAGALAVIRYAQRHGTRRPWLMHLLARRTPKIAAVALANKMARVIWAMMVTGERYKEPRAAAT

SEQ ID NO: 110451 - protein, 426 aa, unidentified
MRKTYQICCGVDVHKTFLVATIVKTTNNIPHYEKKRFSTFAKDLKLLKQWLLDNNCFDLCMESTGKYWIPVWNMLEDKINVTIANPKWVSAVKGNKDDTKDSKWIADLFRMGIVPGSYIPCRAIRILREFTRYRYKLICMRSSEKNRYQNAFTVSNCNLDAVVSDMFGKSAMDIENYLLEIDMENFDPEYCKSLLRRSLKKKADSVIESVESFNMIVEQKERIKIIQEHFNDLDTRINRIDEQIEKLIVTNKWQSAISLICSIPGIDRHMAITIISEIGTDMTPFSSSKRLCCWAGLTPGNNQSAGKKKSVKITRAGIYLKPALVQAAHAAVKSTTNPYFKNKYERIYKRRGKKRAIIAIARKILTAIYHMFKNGELFNPCDIYKESIPETVQLHQKKKAAKQAIKLLVNLGLIAEDTVPLELLAS

SEQ ID NO: 110452 - protein, 429 aa, unidentified
MNSTQNKKIEQVKETTMIVGIDVGSEKHYFRAFNWRGIELTRKPVAFSNSMEGFNSFYNTIVELMQKSELEEALVGIEPTGHYWFDLGQFMGEKSIKFVMVNPHHVHKTKELDDNSPSKNDRKDPRVIAGLVRDGRYFYSYMPTGVYAELRNASNRRFVLVEEQTRAKNRLQKWIAVYFPEYKGIYTHIDAKGGMLVLKKAPTPEEIVRLGVEGIIKIWKDAKLRGNGHKKAMLILAAAMRSIGLKAGLTEARMEIQDLIEDYELQTKRLERVNDLIKELCQQIRYADKLLEIKGIGITTVAGFIAEVGDITRFDSTKELQKLAGLELVADSSGKHNGKTKISKRGRKRLRYLLFEAAISVVGKNEEFKEIHRYYTTREKNPLKKMQSLIAVACKLIRVFHVILTKGVSYDASKMLEGIRHPGEQLKAA

SEQ ID NO: 110453 - protein, 355 aa, unidentified
MASATLTQPRPDSDFDAVIGVDTHRDFHVAVAVSPNGARLDEYRISTNPRGYQALLGWSELFGNKPVFAMEGTNSFGAGLCRELMAAGFVVVEANRPDRSTRRRLGKDDGIDAEMAARAFLAGTAMAVPKSGEDQVEMIRMLKVAKDSAIDARTKAINQMRALLVTATPALRERLNGLSRGELISTCAAFRAGALVGPLAAAKQALRTLARRVQVLDAELDELLKDLDVLTQEACPGMRQTYEIGVDGAAILLTAAGDNPERLRSEASFAALCGASPLPASSGNTRRHRLNRGGNRTTAMRLYIALQSFGCATTRPQKPTQNAVAAKVSVTRKSCAASSGSSPGRFSTYSWDVIR

SEQ ID NO: 110454 - protein, 478 aa, unidentified
MIYSVGIDVHKGRHRVYCLDEKAQVCDTFSFQTTSEGLVTLGERIFRDSSNPIVVFEPAGLSWLMVAAYLRSQRPGCRLVKAKGQKVAALRRYLRTSAKSDRIDALTLAKMPFIDPERLDELYLAPAETHALLRLSRQRKRLEDQITARKKRIGAVVDGYLPGVRQAFSHSWSIRARAFFHSRINLFAIIRDGEEALHRFLTQAKPRDEGGKAESYLVYRACQNALALLELCQPAGSLDEEFYADLQDEIDRELRLMEVEESEVEVLDRRIKELYRRLHTSDNLRTIPGVGEHAAPVFVACIGDPARFPGQSAFANWTGVVPGAKQSSETESKGLRMTKAGPATMKWALYQAGQIGRQWDPQLAAVYYRQMVYHGKNHKQAMGAVMSHMGARVFTVLREDRPYELRDTEGRPISKMTARALILAKYLVPEDIRQQRRRSKGRKASTTGARKKEGTVVGRVHEAAGAPQPVATKPSPGT

SEQ ID NO: 110455 - protein, 339 aa, unidentified
MTNIVKQVAGIDVAQNELVVSLGRVNQMLEKEIYAFKTFANKPSGFAALLVWASKHTDKNVRVSYVMEATGVYHEKLAYHLSDLGHHISIVLPNKISNYFRTLDIKTITDKTASQAICRFGLERNLDAWQKPKSIFRRLRQLTRERDQLIADRTVLKNQLHAEKAEAFPNEGSIGRITKRMALINKQELEIRSEIAEMVKRDTGLVNKINIITSIPGVGKLTAVTVLAETNGFELIRNKRQLVSYSGLDVRLKDSGTSVKGKPRISKRGNRHLRKAMYMPALAAMRFNEEHKAVFVRLVSKHGIKMKAAVAVQRKLLELIYIVYKTDKPFDKDYGKILV

SEQ ID NO: 110456 - protein, 413 aa, unidentified
MIKRERIKESRQEVYAGIDIAEEKHVIRFIDNLGREIGKPVSFTNNLEGFSQIEQCAKERGKFSVTFCVEPSGDYWKPLAYYLKERQYPVVLVNPYHTRQSKELIDNSQTKNDRKDAYLIADLGKQGKCFSAHLPEGSMADLKELVLAWTRTNRLLVQAKTYLHNFLTKYFPEYKGCFSMMYGKASMYCLVHFPLPSDIQQIGLSRLTFLLKRASGGKLSEKKVQLLYQKACTSIGMKEGTHAAKEALGDILQDIEMLLQRKRKMKEQMAFHLLQSGYRDSLLSVPGVGVITACFFLSEIGNPQWYTKATQIEKLAGLHLVENSSGKRHGRFIISKRGKHLLRYTGYLAALSAVAKNNELATLYEYRLNHTRNPKEDKMKLMTYLAAKMLRIMFVVCKKRTVYQPEAITQYWK

SEQ ID NO: 110457 - protein, 377 aa, unidentified
MKRILKIGMDVHSTNYTLCAMEPVFGADDRIYATIQVSPDYKNILMFIEKVKQKLDPYDTYDIECGYEAGCRGYSLYNQLTSAGVKCVILAPTTMLTQQGKRIKTDTRDAVMIAQCLSYGGYHPVYVPTEEDDSVKEYLRMRDDHVIALKRLKQQINAFCLRRGYHYQDSDWTQAHLKWLREIKLSPLYQETLDEYMATYYELTAKVDKYDARIKEIAAQAKYADKVKKLSCFIGIKAHTALSLIVETGDFCRFAKGSTYAAYLGLVPGEHSSSDKINRLRITKAGNSHLRMLLIEASVGICRGRIGYKSKELRKRQQGNSIQVISYADMANTRMRSKYYRLIRHGKKRNVAVTAIARELACFIWGMMTDNIEGKAA

SEQ ID NO: 110458 - protein, 368 aa, unidentified
MGQKSSKLYVGMDVHKESIDIAIAEEGGEVRHHGQIAGDMNALWRAVRKLESSGRELVFVYEAGPCGFGIYRGLTGRGHTCWVVAPSNTPRRVRDRIKTDRRDSLKLAGLARAGELTPIYVPDVRDEAMRDLVRTREDAVMMQRQARQRLAALLLRNDVRYAGKTAWTAAHRRWIADLRLPQSAQRLAFEEYVQAVEEASARVQRLSQCIEQELAHWHWLPVVGALQACRGIQLIHAVRLVAELGDLSRFSHPRQLMGYLGLIPGEDYSGEHRHQGAITKAGNSSARRALVEAAWAYQFSAKVSALIARRQTDVPKAVLDIAWKAQVRLCARFRRLAARGVNRNKIVVAIARELAGFVWAIARQVKPV

SEQ ID NO: 110459 - protein, 371 aa, unidentified
MDERIKFFVGLDVHGDSIAMSVCEAGREPGRFVSTLTPDVQALLKTLSKYGAARQVSVVYEAGPTGYGLYRALIDRGYRCEIIAPSLTPRRPGERIKTDRRDSLRLAELSRAGELKAIWVPDQAHEALRNLWRAREDAVNLRLQARQQLKAFLLRQGRRYPGKTSWNKTHQRWIAEQHFDHPADYIALAEYQLAVQAAQDRVQRLTTALEHAIEGWRQEPTVAALRALRGIDTVSAIGLVCEIGDIARFGSARQLMCYLGLVPSEHSSGNSVRRGSITKTGNAHARRLLTEAAWNYRFPARMSQALRDRSATLSPGIRTHAWKAQVRLCSRFAHLSARGVQANKVCVAVARELTGFIWAIARQSLPDNTHQ

SEQ ID NO: 110460 - protein, 341 aa, unidentified
MNIITVGIDLAKNVFAVHGVNDNGKPVLVKPKVARADLLPLIAQLPPCLIGMEACSGAHHWARLFRQHGHTVKLMAPKFVAPYRMTGKRGKNDAADAAAICEAVTRPTMLFVPVKEEHQQIILCLHRTRQGFVEERTASYNRLRGLIAEFGIVLPQKVVCLRREIGAHLENLPGYANLCVGDLLAHADELDKRIEEYDRAIAKAARDDARSKRLMKLPGIGPVTASALLASMGSGHDFDNGRQVAAWIGLVPGQYSSGGKARLGRITKAGDGYLRSLLVMGARAVLNSLGDKQDRFSRWARSLEERRGYWRAVVAIAAKNARLAWAVLKYGEDFKLELGKD

SEQ ID NO: 110461 - protein, 411 aa, unidentified
MDVVYSRCAGLDVHKATVVACVRVPGAAPGERRGETKTFATTMRGLTELSGWLGRHGVTEVAMESTGVYWRPVYAVLETTVNVILVNARHVKMVPGRKTDVRDCEWLAQLLECGLLKASFVPPQAVRDLRDLTRLRKALIRERAHHVNRIEKTLELAQIKLGCVVTDLMGKTGRAILHALSEGRDDPDQLADAAQGLLRKKRAALREALEGRLTPHYAFLLQQYLALIDTLDAHIARLDARIDELMAPFADAVALAQSMPGVATRAAQAILAETGVDMAAFPTAAHFASWARLCPGTHESAGKRQPVSTGQGATWLRATLQEAAWAAIHTKKSYYRVLYHRLKARGSAKKAIVAVQHAMLIALWHMLKHRVPHHDLGADYFERRNTERTRRHHVHRLERLGYDVVLVEKVA

SEQ ID NO: 110462 - protein, 304 aa, unidentified
MSKRTLAVALSSGESFSVSNDEPGLVTLLERLSPGTVELVVIEASGGYERAAYLALWAAGVPTALVNPRDTYHFAQAGRHLAKTDRLDARGLCEFAERMQPAPTPVPEAADEELKALVMRRQQVIKMLSAERNRSQQAARSIRPSIARVIRALERERAALDHQIQQRLRDHPPLSQRCAQLDQVPGIGAVTAAIIVARLPELGHLDRKQIAALVGVAPFDQQSGAWRGHSTIFGGRADVRSALYMATLSAIRCNPALRSLYRRLRDAGKPKKVALLAATRKLLTILNAMLKHQTPWNPPCPNPA

SEQ ID NO: 110463 - protein, 344 aa, unidentified
MTCYAGLDVSLRSTHICVIDDDGDLLAEGKTDSEVADIMAFLDELDVEIVEVGLEAGTLTQYLTYGLQFAGYEVVCMEARQVKAALSAMRNKTDKNDARGIAQLLRSGWYSRVHIKSIESHQIRALLSSRKAVLAKCIDLEQEIRGLFKVFGIKLPPKLGHGSFDPKVRPLIDADEALSQSLLPMLDARLVLYRTFLTLENRVRNLAKQDAICQRLMTAPGVGPITALTYKAGVDDPTRFKRSRTVAAHFGLTPRRFQSGEIDFDGHISRAGDAGVRSTLYVAANAMMTRSSKWSPLKAWGMKLVKTRGHKRAVIAVARKLAVILHRMWIDDTQFRWSTEAARS

SEQ ID NO: 110464 - protein, 348 aa, unidentified
MMLIGCDYHPSWQQICWLDTATGETGEKKLEHASGEAERFYRQQPAPVLIGMESTGNCQWFVELAATLGHDLWIGDAAKIRASDVRAQKHDRRDAELILKLLLEGRFPRIWTPSGEEKDLRQLLMHRYKLVMLRARVKNELQHLAMNQGITKKRKLWSKAGEKVLRELPLAPWAGQRRKDLFRIREMLNGQIDLLDQAVVEIAEKNEKARLLMTQPGVGPITSPAFVLTMGDVSRFQRGKQVASYLGLIPREYSSGGHQRFGSISKQGNRFIRMLLVEAAQGAVRCDPGFRNEYVHRCHRKPKGVAKVAAARKLAIRLYWMLRTNTGYPEVVRVESSSRVPLVVRHGG

SEQ ID NO: 110465 - protein, 400 aa, unidentified
MLLFFEVITMIFVGIDVAKDTHYAAVSDDSGAVLVKPFAFQNNAEGFCLLLKKLSEFDRSKLLIGLESTGIYSENLICFLYESGFRLAVINPIQTATLRKTAIRKTKTDKVDTMLIIKSLMVNSYRLYSQRDADSLKLRTLCRFRQNLKNSKARLKIQLAGYVNLVFPEFGKFFKSGIHIAASYALLKKYSSPKEIAALRTSTLCTLLSKASHGRFGKDTAEALKSLALSSVGVKNPYISIQIAQTIAQIELLEQQIKDLNSAIEEAMESINSVLMTVPGIGAVNAACILGEIGDIKRFSKPCKLLAYAGLDPTVRQSGQFTAKSTRMSKRGSALLRFALINSAWQLTLNDTTFKAYYDLKRSQGLNHYGALGHVAHKLTRVIFKLLTSDTPFNPAKLVA

SEQ ID NO: 110466 - protein, 373 aa, unidentified
MPKYSTAFGMDVHLRSTTVCALDADTGEAVTRRFPGNPWGEIAGWMDGFPGPSLAAYESGYLGFAPQRELAGLGVECVVAAVSKIPRSAADSASKNDRNDAARMAKAILAHDISPVWIPSPEVEGIRDLAGAYDGATARLATAKQRLLAFLAKRGFVYGGTTPAGNPRKYWTYDFLRWLDKVRPEDDGGVRTLAALRNEVEAAAEARADLLSEYRAAVDASPIAAEVAALQSIKGCAFALAAAFSAEIGDFTRFRSGRQVTAYFGLAPSQRSSGDSVRLGGISGAGNALVRKLAVEGSWCYAAARHQPKLMPRDTGVPLEIRMHGRKGSERLLRRREEMLARGVPAAKANAATAAELVRWLWALGMMCREGAE

SEQ ID NO: 110467 - protein, 370 aa, unidentified
MNPIYIGVDFHSRQQTICYLKTETGELVIKELKHQDKEQLRAFYQQFRGQVIVGLEASGYSPWFEALLEELGCEVWLGDPVEIRRRARWRQKSDRRDAELIWDLMVHHEFPRLYQPPLASREVLRMLRYRQKLIKMRTMAKNSLQAIAMQAGLAKGSRLFSTAGQEEFGNATMSPVLQWQRDHWFSLLKPLNEQLLETMVWFKAQSKDDNQIKRLRTHPGIGLLTSLCLRHTLQPVSRFRNQRKVVAYAGFDPMIRTSAERAIYLGISKAGSRMLRYLLVEAVHTAVRYDEDLKRFYKRVAERRGRAKAKVATARKLLIRAYIMMRDEIDYAEFRRRAVAVRLARRSQVNPPTSGGLPGVLIGQSTSPGV

SEQ ID NO: 110468 - protein, 342 aa, unidentified
MAHFAGLDVSVKETSVCIVNDTGRIVREVKVASEPEALLAVLKNPAYHVERIGLEAGPLSQWLFSALAEAELPVVCVETRHMQAVLKAQINKTDRNDARGIAQMMRVGLYRPVHVKTLRSQKLRMLLTHRKLLQSKAIAIENDLRGTLRNFGLKVGMVGTVKFEARIQELVENLPDLAVLVEPLLIVRRALREQIVILHRRLLAIVRDDEVCRRLMTTPGVGPVVALTYRATVDVPARFRKSKAVGAVFGLTPSRYQSGEIDWSGRISRCGDEMMRVMLYEAAQSMLRSKKWSWLKAWAMQIARRRGMKKAIVALARRLAVIMHRIWVDGTEFRWTREPVAA

SEQ ID NO: 110469 - protein, 387 aa, unidentified
MPQPNDLSRSPIALNQDGTLIAIIEMSRSSWLVAGIVRGIAHQPLKKLAPDEAALLGLLERWQDEATQAGRQITRIAVAFEAGRDGFWLARWLRAHGIEAYVIHPTSVAVSREHRRAKTDRLDTALLKRVFLGWLRGEPGHCTMAAIPTLEEEDARRPNRERESLVGERTRIVNRIKANLARLGIRGFKPTVRDAAERLDTLRTPEGAALPPNTSAELRRDMARLHFVATQLREIEDARRERLELRPDQGPHAMVRLLARVIGIGIETADMLVHEILSRNLRDRRAVARYAGLTGAPDESGSRRREKGLAKAGNARVRRGMVQLAWRFLLFQKDSALAQWYRTRTADARGGTRKTMIVALARKLLIALWRFVATGEAPEGVVLRPAS

SEQ ID NO: 110470 - protein, 359 aa, unidentified
MPEKRRRIGQLIGVDYHPSFQQIAFLMEESGEYGERRLNHSDGEAERFYRDLHQGRIPVRVGMEATGYSRWFERLLAELGLELWIGDPAEIKARRVKKQKTDRKDAELLLKLMLEDRFPRIWVPSPENRDLRQLLWHRHRMVQMRTRIMNQLQALAMNEGKRWRSKLWSQPGRTEFEKLVLGPWASRRRRELLELLDRLNPSIDELTAAVGQEVHKRPEALRLMTHPGVGPVTALAYVLIIGTPERFDRGKQIGSYLGMIPTEDSSADKQRLGHISKQGSSLLRYLLVEAAQAASRFNPHWRRRYIHLAMRRHKSIAKVAMGRRMAIRLYWMWRNGCEYSPSFEFGSYVGQPGTRHGVQ

SEQ ID NO: 110471 - protein, 425 aa, unidentified
MTYRIAGIDVHKKMLAVVVADVAGEGEFQFQRLLFSTTPEQLKALAQWCVDHEVQEVVMESTAQYWKPVWETLERYWQPVGRKQTGASPMTGSLHLAQAQSNRARGGRKNDFVDAERLVRRYVAQELVLSFVPSADQRLWRTVTRQKQQRVGARVRLRNQMEAFLEEAHIKLSSLVSDLLGQSGRRILEALGEGKTDPQEIALQADRRLRATQAQLCDALSAARELNPVYRKLLKQSLEELGLLDRQIQELDREIARLLAQHEDAVQRLAEVPGLEPDSAQQIIAEVGPAAAVFPTAKNLASWVGVCPGDNISAGESHSTKSPKGNRNMRRILNQAAHAAVKAKGSIFEVMFQRLRRSLCYKEAIWAIAHRLCRLIWVLLHKTVRYEERGPTVSAASKRVRTSRMMRELRRMGYRVDPPTELQDA

SEQ ID NO: 110472 - protein, 344 aa, unidentified
MEYYAGLDVSLRSCAVCVVDGKGTVLYERDLPCEIEEIAGYLTALPVTIERIGFESGTLSQHLFYGLKAEGFDVVCMEARQVSAALSAMRNKTDRNDARGIAQILRTGWFSPVHMKSREAHGVRALLSTRKALLSKTIDLANEVRGLLKIFGIRLPKTVKHGSFDGVVRPMIEIDEVLAHAMLPLLDARLVLYQHFLELDRRVKRAASQDEVCMRMMTVPGAGPIAALTFKAAVDDPARFKRSRTVAAHFGLTPRRYQSGEHDNPGRISKAGDRDVRATLYAAANVLLMRTMAGSQIKSWGMRLMRTKGRRRAVVAVARKLAVLLHRMWADGTEFRSEKVEGTA

SEQ ID NO: 110473 - protein, 343 aa, unidentified
MDHIAIDLGGRESQICVMSAEGEVLLEERRPTRGLGAYLARRPAGRVVMETCAEAFSVADQVRKAGHEVAVVPATLVRSLGVGMRGIKTDVRDARNLAEASCRMKRLPTVHVPTTASRERKTVCGLREVLVGTRTKLMNSVKGWLRTMGLGPMLRATPEVFPARLRKHVSDRRGAIPPAVERVLVMVEAVNIQIVSADEELEKLSEEDPVCVRLMTVPGVGPVTAVRYAAALDDASRFDSASSVQSYLGLVPGENSSSDRRRITSITKAGAPQVRWTLVQAAWSARRYRKNDPMVLWALEVEKRRGRHVAIVALARKIAGIMYAIWRDSSVYDANRGARPPAA

SEQ ID NO: 110474 - protein, 425 aa, unidentified
MSSSDVLSSPLDASGFASVVGIDVGSQACVYTVLQPDKRIIVKPTEVANRDTGFVQVHASLSHLGVPPQRILIGLEATSRSSENLYQFLAAQGYVLCLLHPRQTHQFAQQRGLRAKTDRLDAATIARVLLSGEARPGSVPDELIATYRELERLHSQLTDDGARYQNQIQALLVVLFPEFVQVFADPCRPTALALLKGYPSARALVEAGVEAVAATLREVAPRRYGRKTAQQLVALATQSSASGLATDARALSLKILCDQLQHTLANLAQVEHELDQVLDRDTGATGLKSTPEFGRNTVAVLRAELGDVTRFQRVDQVVAYAGLDLEVKQSGKWKGEVKLSKRGSGRLRRVLYLAALRSICLPASAFGAYYQRLVARGLKARDALTAVMRKMLIVAYHLLRSNETYDPTKVCAVAGPPPHTPSSGS

SEQ ID NO: 110475 - protein, 354 aa, unidentified
MTASYDYHIGVDYHKSYSHLVVQDSSGKTLRSGRVKNDRQSVGGFLERYRENSHAVIEATRNWMVMYDWLDDICDDVVLAHPLKVKAIADAKIKTDKIDATVLAHLLRADLVPEAWAPSEKSRELRVALRERMFYVRLRTMTKNRIVTVFDRYPEQTAQLKKLGDLFGKAGRIQLAEVNVSDIDRIQIDRGLAFIGDINERIKQSETTIRAMTKANANVKLLKTIPGIGEFFARLIDAEIDDVSRFRNAKKFAAYAGLVPSTYSSGGKTYHGKIIKQGNKWLRWAFVEAVAPAIASDAQLRAQYEQLKIRGTNKARVAIARKLLTIAFQILRDQRAYEPRGTTTEGASTISRLS

SEQ ID NO: 110476 - protein, 319 aa, unidentified
MHTSIVGIDVAARKLDLCLEQGGQTQYATIDNTVEAIQQYAREHKLTKQSCLVGLEATNDYHFAATKYFLKRGIPTRILNPIVTKRYTRTQVRGKKTDKTDAHNIARLAAEGEGELATLSNVDNRDKELLRLSRALIKLKTMLTLRLQSLRRKDLKKTKRIEHKLEQIEGLLKDVAEELVDEVTEERSRDEELIDSIPGFSIKLSAIVHHELGDIARFKNARSLDSFAGLDPRVVQSGGKLHTSGRLMKRGSPYLRSALFLAANVARVYDPELAEYYAKKKAEGRSHKEVLCIISRKLLHRIWAVLRDQREYKVQQKEN

SEQ ID NO: 110477 - protein, 397 aa, unidentified
MYIVGIDIAKRKHEAAVIDGEGTIIIKPFSFTNNCSGYNRLLAMLTKAKLPLDEVSFAMEATGHYWLALFTRLQKEGFRVQVINPVQTNSIRSFYIRQAKTDPRDALLIAEVIRFGHFSESTLHPENIYELRELCRGRHAIVSMQADVKRKVVALLDQVFPEYETAFTNLFGDTSMAILQTCPTPKELSETPLEELCHLIEVSSHKRFRMAKAQELQALARNSFGFAMAGDVFSTMIRLYAKHLDFLKQQVREMDRKIAEIMETLDTPITTITGIGPTLGAYILSEIGDISRFSSAAKLAAYAGIDPTMRQSGEYNGVRNRMSKRGSPYLRHAIWLAASSAVLHDPALKLYFQKKRDEGKPYMASVGHACRKMVSIIYAVMRDNKAYTPYIPNEISA

SEQ ID NO: 110478 - protein, 456 aa, unidentified
MKTMNMNFKHNQLTLCFVADVHSQKHHFLVSIKETRTILKEFIVENSTAGFIQFITLVKLFSAKFRTQNVIFAFEPTSVYWMNFAYAFYQDISTSFLNKQILFVSPEIVAYQRKVDDPAGNKDDHKDPLTISKLVWDNKTSKAILLPEKIFNLRELTRQRNSLVKIRSSLKTQLRNKIIIIFPELLNIFSDILTASARYVISNFTTPENITKLPIQTFTQILLKISKKKLSTHKIELLYSYAQSSLGIKGNKNGLISNIKYILEQIELYDKLISQIENEIEYYLKSIPQTLTQIKGISTILAASIIAEIFPISRFSNSSQLVKYAGIDPTHSTSGISLKKLSYIAKKGDVYLRLLIIQTAFSCINHNQYIKRYYTNLINHGHKPKRVAIVAVANKLLRIIFNLLKYNIKFDPSKIGMGPKKIVEVVPFKFKQNNFHSLEKAKTKFLLKEKAREKLF

SEQ ID NO: 110479 - protein, 351 aa, unidentified
MIVIGSDPHKRSYSCQAVVAGTGELRSSESVPATVAGHERLLAWARALDGERVWAVEDCRHVSAKLERFLLARGERVVRVPPKLMAGRRRGSRQAGKSDPIDALAVARAALEEGIETLPVAALAGPAREVKLLLDHREDLVAERTRIQNRLRWLLHDRWPELELPAGCLDRHIQLDRLAGRLARSSQDADVRVMRAQVRRLKELTRETAALERELLLLVRGLQPRLLALPGVGPLTAAKLIAEIAGIERFRTEAKLARLAGIAPIPASSGNRTRMRLHRGGNRQLNAAFHRIAITQLRIHPPAKDYITRRLHEGKTKPEAIRTLKRHLVRTIYNTMTNHNASAPAPALALT

SEQ ID NO: 110480 - protein, 387 aa, unidentified
MPQLNDLSRSLVALDQDSTIIAVVELSQSSWLVGGVLPGIERQPQKKLEPSAERLLGLLHRWRDEAVRAGKKITRIALAFEAGRDGFWLARWLNARGVEAHVIHPSSVAVSREHRRAKTDRLDTELLKRGFLGWLRGERGHCSMARVPTIAEEDAKRPNRERECLVGERTRIVNRMKATLARLGVRNFKPTLRKAAERLATVHTPEGMPLPPNTLAELQRDMARLGFVVSQIREIEQARQKRLEQETETAPHAMVRQVARVIGIGIETADMLVHEVLSRPMRDRKAVARYAGLTGSPDESGARRREQGLARAGNARVRRGMIQLAWRFLRFQKQSALAQWYRARTADSRLGTRKTMIVALARKLLIALWRFVTTGETLDGVILRPAG

SEQ ID NO: 110481 - protein, 359 aa, unidentified
MKENSREAEWKQRPEQTVGVDIGDRFSRYCVLDQEGEVIEEGRVKTGREAWRQHWEGEPRQRVVMETGTHSPWASRLLQELGHQVIVANARKLRAITENESKNDRRDAKTLAYLGYCQPRLLSPIQHRSVERQQDLNLLRARDTLVRARTMLINCVRGLVKSAGGRLPSCSADYFARCVPPAVPTELVTTTQPLLEQIAGLTLQIRRLDQAIEDLSQRYPEIELLRTAPGVGPVIAAAYVLTLDRADAAAHSRSVGAFLGLRPRQSQSGDSDPEHNISKTGNLYLRRLLVQAAHHILGRFGPDSALRRWGLKLALGGKRAKKRAVVAVARKLAVILHRMWRTGKSYQPFPEQNMTVGAA

SEQ ID NO: 110482 - protein, 338 aa, unidentified
MKTYAGIDLHSSNNYIGIINEEDQRLYGKRIPNELDRVLMALEPFRDTLQGVVVESTYNWYWLVDGLQEHGYKLHLANPAAIKQYEGLKHTDDKWDAFWLAHMRRLNILPEGYIYPKQHRAVRDLLRRRLLFVRHSTSHILSLQSMITRNLGFKMSGNAIKKLKGKEVEGMFDSSNLVFMAKNNIATIQFLKKIIKDIAKKVKSQVKLRKEFNRLLTITGIGDILGLTIMLEVGDIKRFAKVGNYSSYCRCVKSERLSNGKKKGENNKKNGNKYLSWAYVEAANFAIRYSAKAHRFYQRKKAKKNGIVAIKALSNKICRASYYIMRDRVPFNEEMLFH

SEQ ID NO: 110483 - protein, 414 aa, unidentified
MFAVGVDVSNGRSMVAVLGARRSVVVQPHEVPHTADGFAELAARLHALDGEDRIVMEHTGRYYESFAMSMYRAGFFVSAVNPLAIKGYQEGISVRKVKTDKADALKIAQFAIDKWEILPHYTPMDTIRYDLKTLHRQFQLSSKTKTALNNNLIALLEQSYPGANRYFDSPVRPDGSQKWVDFVDTFWHVDCVARVSRKAFVERYQKWCKRHGYNFSEAKAVEIHEDARQRFPLVPKSDTCKLMVREAVAQLNAVSRTVETYRAEMDRLASQLPEYETVMAMTGVGKSMGPQLIAEIGDLRRFAHQKSLVGFAGTDPIKDDSGDKVSDSKPSSKRGSPYLRRTLFVIMTILLQLQPPDDPVYQFLDKKRSEGKLYYVYMTAGMTKFLRIYYGKVRDCLKEKGLWEQPNVDEVNPV

SEQ ID NO: 110484 - protein, 450 aa, unidentified
MSPLALDVVTKTDKTPVLGRMLSKYVGRKTSSIENGITKARNHSRQRGNIMRVVFGIDVSKASSEVAILVNGEKVHGYTIPNDAIGFNRLLGDLKTVHQPEIVFEATGVYSRRLQAFFEDNSYTYTRLNPLESKKQLDSLRVRKTDKIDAEKLAMSQFILNRKPSYVQEALYQELRDLSRFYQNLTEDIVCAKNRLHKVLQVTFPELENILSAPTGEQYWNLVMTFPCNSFVLESDDATLTAIIRQSTAKRISEKRVTYLVDKLTKLANQSYCAVKKTSPVIEEVKYYAGELLRLSEHRQGVVEEMVTLAQSLPEYEILLSIPGIAETTATSIIGELGDIRRFHSANQINAFIGIDLRHYESGNFLAKEHITKRGNPYARKILFKCIHNIASASHTNPCHIADFYEKRKRQSQVTSTKPHTIASIHRLIRTMYYLITHNKLYDYTSIQNR

SEQ ID NO: 110485 - protein, 434 aa, unidentified
MSFKILKNNCCGLDVHKTWIFACIGITDSHRRTEYKHARFSSFTKGLQELCDWLAKYNCTDVCMESTGKYWIPVFNVLEKNNIWVTLSHPKYTKPQKGNKTDRKDAKWICDLYMCGMVKPSFIPPADIRQLRDLVRYRFKLTCMITSEKNRAHNCLTISNFKLDEVFSDIFGKSSRSITEQILQHPGETFDVAQFVDGRCKTPIEEIQAAVDGRCKTPIEEIQAAVDGALSTEQAVKLRQCLNHIDELEKHQAEIEREIFRLSDKYEEVLNLIRTVPGFDKNPMTAIQVLSEIGGDMSVFPTAKNLVSWAGCCPRNDQSNQKIKSTRISRAGSYFKPVLVQVANALIKSKKHPEFTTRYRRIKARRGHKKAIIAICRMILTAIWHILTDLKPYTTEGFLESRPVNDSKILTTSQALNLLKQRGYVIKDDIVSVP

SEQ ID NO: 110486 - protein, 378 aa, unidentified
MNRIIKIGMDVHTTNYTLCIFEPSFEHDGTVHCITQVKPEVKNIIRVIETFKKKHENEELNIVCGYEAGCLGYSLYHELKEKGIECVILAPTTMKTEKGGRKLKNDYRDAKMIAECLAYGGYSAVHVPTELDNSVKEFIRMRDDIKENLKSIKQQIIAFLTRNGKQFDGKSFWTRKHIDWINTVSFSEPLLQDTLKEYMIEYNHLCDRVETLDKQIEEISLKEEYVEKVQQLQCLIGIKTHTALSLIVETSDFNRFKKGNMYSAYLGLIPGDDSSGGQENKLGITKAGNSHLRKLLVEAAQGYTRGKVGFKSKVLKSRQEKCSSEVVAYADRANERLRRKYYRMILRGKRYNVAKTAIARELACFVWGIMTDHIDLCS

SEQ ID NO: 110487 - protein, 364 aa, unidentified
MRKVSKRALQMEAKHNSAPAMTVGLDLGDRFSRYCLVNAQGEVVEEGRIRSSEEAMRRHFEGQLRLRVALECGTHSPWVSRLLSELGHQVVVANARKIAMITASTSKNDRNDAEQLARLAAYDPRLLSPLKHRSQQRQQDLNLIQVRATLVRARTMLVNALRGLVKSAGGRLPSCSTESVAVRGPAHIPPALAAAARPLLEQMVALNGQIAGLDREIEKLREKYAEIGVLRTVPGVGPVVAAAYVLTLDSCDRASNRAAGAWLGLRPRQKQSGDSDPQMRISKEGDRYLRSLLVQSAQYILGRFGPDSALRRWGLKLAQSGGKRGKKRALVAVARKLAVLLHSMWRSGKRFQPFPQPAATAVVA

SEQ ID NO: 110488 - protein, 328 aa, unidentified
MFYLGIDVAKAKIDCCLILENSESKKKTKTFSNMPKGFEQLQTWLNHHAANSTQTIILMEATSIYHERLAKYLFDAGYQVCVTNPARARYFAQSMSKLNKTDKADSEVLARFAMTADLHFWQPLPEHIQLLNALLDRRAVLCEDLQREKNRLEKAESTFTIEPVLQSIHKSIKQLNKHIQDIDQQIDDHIDQNPDLKNDKELLSSIPAIADRTSLLMLSFLRSHTFERASQAAAFVGLVPIQRQSGSSIHGRSRLSKASSSKIRAGLYMAAIVAPRHSPHIKEMNERLLANGKTKMMAIGAAMRKLVHLCYGVLKHQQPYQANYCINS

SEQ ID NO: 110489 - protein, 425 aa, unidentified
MNTPVMLKTEGSPEFVAYVGLDWGDEKHAVMLRAVEGEAQACTLVNSPEVLHAWLQKLGQRFAGRPVALGVEASRGPLIHIFMAYPWLTVYPIQPATSARYRTAFTPSGAKDDQPDAAMLEELVRCHRDKLRALQPQEVETRKLAALVELRRDLVDRRSQAVLQLISLLKAYYPQALELAGEQLHSPMALEFLRRWPEVVSLKATRPSALSRFYYRHSVRSEKLVEERLALVKQAVAVTTDEAVVEPALLELRALLDQIKDSNKHIKHIESLIDILFDSHSESYLFKNLPGAGDALKPRLVVAFGEDRTLYPDPESFQKYAGLAPVVERSGKHCWIHWRWFACRFLRQTMVEWAAKTVAASLWAKAYYEAMAAKGKSHQVILRALAFKWARILWKCWQTRTPYDESRYLKQLARRKSPYAVKINA

SEQ ID NO: 110490 - protein, 340 aa, unidentified
MDTIAIDLHKRESQLRTITSDGELIECRIVTSRDQFTRTLGDRPRARILVEASTESEWVARHLETLGHEVVVADPGFAPMYASRSKRVKTDKRDARALCEALRLGAYREIHRASDARRHLRAQLTVRDARVRTRTRYIAVIKAFVRREGLSMASGEAIHTLTKLAALPLPPHVREELAPLVAVWAPLGEQLAAVDATLTAIAATDPVVTRLRTMPSIGPITALAFVAALDDVARIPNAHQVQGYLGLVPSEHSSGDRRVRGRITKRGDVRLRWLLVETGWRILRAPNADLQGLRAWGLRIAARRGKRIAAVALARRVAGILYAMWRDDAPFHAVPLAEAA

SEQ ID NO: 110491 - protein, 316 aa, unidentified
MDGSITSFVGIDVAKHSLDLCVWPEANQVSLSYDEGGLAQLRQRLPEPARCLIVVEATGGYQRRLVAELLDAGYRVAVVNPRQVRDFARGLGILAKTDRIDARVIARFAQQVRPRTTAKTPEKQAELQQLVSRRRQLVELRTAERNRFELLESKLVRQSVQQIVDLLNKQIQRIEKQILALLESDDDWKNQRDIIASVPGIGAITVVSLLAELPELGRLSRQQIAALAGLAPFNRDSGRFQGKRSISGGRPSIRSVLYMAAITARRCNPVIRAFADRLQRAGKPFKVVITACMRKLLVILNTLVKNQSLWNPEYVQ

SEQ ID NO: 110492 - protein, 397 aa, unidentified
MTTPICGLDVASTSAAICIQKADGSLLHEITLPATRAGEDRLLALLPAGTPVFMESTGRYHLTWARRLAAAGHPVYVLNALLAKRLMGAANALRQNKTDKIDARELTTIGRVHGAGLETYRFHEDAGRLGLRTLCQVRVHQRRLLTDTLKSAASLLGTMLPEASWLKLAENRGLATLFLQIDSLERLQRMRLSSLQALVCGKADALYTTLRQPLSAAAVFNALLPSFQAQLRLIESLRDQQQLLLADIRAAVITAKRGAEVQLVRTIPGYGEKTAATIVACVPEDLRSWGPKQKVGRKLQAYFGCDPKLKESGQWKGQVRMSKRGIELARTALFQAATCAMLHDPDMKAVFDRKKAEGKFYLVCVSHVMRIQLRRLVAVLYDRQPFVRASTTISINI

SEQ ID NO: 110493 - protein, 479 aa, unidentified
MKVIRLKKDSHLRTRYQYGAGLDIHKATIVAAVCAQSPSMFKKLAVQQFRRTPQGLGEMCKFLSKHLIKTIVMESTGVYTPQVRDFLQNFQHWKPNSPEIIVINPSLLRKFPGEIHADTVDAVELARLGLLGLARHSHLPHDKLRELRRVTRQVHYVMKDSTRAKNRIKQNLDFFGLSLPGLDLNSQWVLELLRVLITPSVKGNFGNSYHAVMRGTISTKKSTQTALKRRVADFTPYFPITLPRSALKCLEMYLADLSVQEGMLGILGTEIEHILNETASLRDSVQRLTALPGVDEKTAAILLSEIGEVQRFPTQKQFLQYVGCSPTIYQSGTIEHGGHLNKRVNHFAKRAFFNIGKVICSIVKQDSDLKEYGRKQLNRYWNAKKLAWMKTGIKAARIMYKILKTEAEYVPFYESQNDQKVCTVNSERTSTIQLKELRKRTRRYLKYVNSVSEQASAQARAKVYSILHKLWIETEALHT

SEQ ID NO: 110494 - protein, 396 aa, unidentified
MWTLGIDVAKRRHHATLLDEEGHAVFRNVSFAHSRQGLEGFLERLAATGQSPRGIRVGMEATGHYWMVLFQRLTQAGYTVCVINPLVTAARRNVTIRGTKTDAVDAFLIAKVLREENPKVSAIPAEDVQRLRDLTRLRFECAQAAMAEKQRLAALLDLAFPEYGEHFSDIFGTASREVLAEFPTAEDLAKVDIWRLTRLLREASRGRLGRPKAERLKKAARESFALVGNTDALALEIRFVVERLNLLIEQIAQLDKRLGQFLPEEQELLQSIPGLGLVWAPTILAEVLPVFHPELKDGAKKFVAAAGIDVRLHESGEAASRGNMSKRGSKYLRTAVMQAAETAVFLAKDPLFVAVYERQKARGKHHTVALSHVAHKMLHVIFSVLKNQLAYTPMLS

SEQ ID NO: 110495 - protein, 341 aa, unidentified
MSEVSTIGLDLAKHVFQAHGADASGKVVFRKRLRREKVLEFFAGKPACVVAMEACSSAHHWARELARLGHVVRLIPPAYVKPFVKRQKNDAADAEAICEAAQRPTMRFVAVKSVRAQANAVVFRARDLLVRQRTQAINALRGHLGEYGLVAAKGPGHVIKLVEHVEDPGSNVPDAARLVLRTLVEALRFLSERIDLLDREIARRAREDDEVRRLTSIPGVGPITAVALAALAPPAGAFRKGRDFAAWVGLTPSQHSTGGKQKLGTTSKMGERTLRRLLIIGASSVVRKAVRQGTPAGSWLGRMLARKPRMLVIVALANKMARIAWAVQAKGEVYRAPAVVA

SEQ ID NO: 110496 - protein, 366 aa, unidentified
MKKDSTVTAGRKQIFKQPKLTIGLDLGDRTSHYCILDEAGNVILERNLPTTPKGIQQVFSKIPRSRIALETGTHSPWVSRQLSQMGHEVIVAHARNVRLIGESSRKDDQLDARTLARLARIDPGLLGPVRHRSAQAQIHLTVIRARAALVSTRTALVNAARGLTKSYGERLKKCGTEQMNRDSSQGLSQELRDALDPLLREIESLNERIGEYDRRIEQIAKEVHPEVALLKQVKGVGTLIALTYVLTLDDPYRFRCSRDAGCYLGLRPGRRNSGASEPQLHISKEGDRYLRTLMVQGAHYILGPFGQDSDLRRWGLKLAERGGKNAKKRAVVAVARKLAVLLHKLWVSGEVYEPLRNNHQAVSAVA

SEQ ID NO: 110497 - protein, 373 aa, unidentified
MDQDTTYVAFDTSKETIAVAIAESGVRKDVRFFGTIASRPDAVRKLVEKLSKRHHRLAFCYEAGPTGYGLYRQIRALGHDCQVVAPSMVPMRPGGHIKTDRRDATMLAALFRAGELTAIWVPDDGHEAMRDLVRARHAAMEGVRRARQQLLSFLLRHGRIYPTRRHWTRGHRRWLAEQRFEHPAQQIVLEELIQAVEQAMARRDRLERQMIALVPSWSLKPLVAALQALRGLAAVAAITLAAEIGDFRRFANPRQLMAWLGLVPREHSSGASTARGAITKAGNRRARRLLIESAWTYRLPARVAPALLARSAALPETVRAIAWKAQVRLCARYRRLHRSGKPTNVVTVAIARELAAFAWAIAIAITPPLQPTG

SEQ ID NO: 110498 - protein, 404 aa, unidentified
MFYFGIDWSEDHHNLCIMNEAGARVSQIKLEHSLAGFGRIELERRKLGVPARECLLAIETSHNLLVDFLLDRGYVVYIIPPQATKSYRNRHRSSGAHTDDSDAALLASILRTDRDSHRIWRPNSPLTQQILAQLRLIESLRRSIQRQSNQLRAVLWRVYPQALGLFDDLTTQIGLQFLIAYPTAQEAQTLSLEEFTAFCREHHYTRSDLIVRRYAHLIEPSATANSAVVQAYRSHVHTLAELLLPQVRCRNEAITQLKKLFERHPDHFIFASLPGAGEILAPALLAKFGDHRDRFPQAADVQALAGTCPVTERSGKKKIVKFRKGCDKEFRRIAQQFAQASVQQSGWAAAYWAEVRPHCDSNSHAYRCLANRWLAIIWKLWQTRQPYDEAYHLRQRALRRRPRS

SEQ ID NO: 110499 - protein, 406 aa, unidentified
MRVLYERCCGLDVHKKSITACVLTPEGKEIRTFGTMTDDLEELVEWLKEKQVTHVAMESTGVYWKPVYHLLEGESIEVLVVNAQHIKAVPGRKTDVKDAEWIADLLRHGLLRGSYIPDRAQRELRELVRYRRSLIEERARELNRIQKVLEGANIKLASVVSDINGVSAQRILRALIEGTDDPAVLAQLAKGRLKQKIGELRRALKGIMGPHQRMMLSEQCRHIEYLDEAIARLSREIEERTRPFHEALELMETIPGVGRQSAEQIIAEIGTDMSRFPTAAHLASWAGMAPGNHESAGKRLSGRTRKGNKKLRACLVECARAAARTKNTYLSAKYHRIAKRRGANRASVAVGRTILEIIYSVLTRKEPYRELGADYWDQQREAAIVRQTVKRLEGLGYEVKLEKTSA

SEQ ID NO: 110500 - protein, 426 aa, unidentified
MNYTQNSKIAQVTERTLVIGVDIGSETNYARAFNWRGQELSKKVFRFSNSQEGFQSFSDYLRNNQVIASAEQIIVGCEPTGHYWFTLAKYLKTQHINLALVNPYHVKQIKELDDNSPKKTDQKDPKTIAKLVVDGRYSYPYLPEGIYADLREAVPSRERIVEELNAVTNRLKRWLKIYFPEYLTVYKKFSSESGLTVLETAPLPQDVVKLGADGINHLWREKKLRAVGIKRAQTLVEAAQNSIGLDGGVCARMEMQMLLEDYRVKEVQLEKVTAVLEAETLKIPYTEKLLSIKEVGLITVAGFLSEVGDIRRFDSPKQIQKLAGLELKENSSGKHRGRTSISKRGRKRLRKILFQVMLPMIQNNAEFREVYEYFTTRQKNPLKGKQAIIAAGCKLIRVFYTILKHGVDYDPQKLRMDIIRPESAAA

SEQ ID NO: 110501 - protein, 423 aa, unidentified
MKLTYNVCCGVDVHKTFLVATIITSSFVLPQYQQKRFSTFYSGLLAFKQWLLDNDCKDVCMESTGKYWIPVWNVLEDSMHVVIANPKWVSAVKGNKDDKKDSKWIGDLFRMGLVPGSYIPPKDIRILREFTRYRSKLVSMRSSEKNRFQNAFTVCNLTLDAVVSDMFGKSSTDILNYLLDTDTVDPDHCVSLLRRSLKKKASDVVEAVNGFNMTAEQKERVRIVQGHFTDIDKRISQIDQIIAKLTTEYEGTISLLCTIPGIDRRLAITIVSEIGTDMTEFGSSKRLCHWAGLTPGNNESAGKKKSVRISRAGVYLKPALVEAAHAAVKATQKCPYFRVKYERIMKRRGKKRAIIAIARMMLTAIYAMVSTGEVFNPSDLQKYDMPEELKKKQTVSAAKEAVKLLVSLGLVPEGSISLDALAS

SEQ ID NO: 110502 - protein, 358 aa, unidentified
MEERLNYILKKEKVFVGLDDSKRTWSLCVRSMGVVVHETSMPAKYEVLRNYFHKKLPQCQIAVMYEAGFRGFGLHDQLVTDGWECVVTPPHTVTEEKSNRTKNDRTDCRRLARNLENGDYHRCFVPDKGLREDRQISRTYRQVQADIVRVCNRIRRMLEYHGLDEGLPAGRWRRTSAYACLRRHLSELELSDALRFSFEAKFRELDNLHELKEELLRQLKKLAGSDRYRENVKLLMSAPGIGILTAIRLALEWGDLSRFRRKEEFASFLGLIPSDHSSGDQQRRGHITRQGNQSVRGCLVESAWLAIKYDPVLLEKFRRVLSHSGSKKKAIVAVARKLALRVRRALLTGEPYVVGVVQ

SEQ ID NO: 110503 - protein, 310 aa, unidentified
MDAIFVGIDVSKDRLDVHVHPSTEAFAVSRDGKGLEQLIDRLRTLSPTLIAVEATGGFETIVAASLAGAALPLVVVNPAQVRHFAQAVGKRAKTDPIDAAVIARFIEAVKPSVRPVPDAQARLLGELVARRRQIIEMIVAERQREKRAENIRVRKSIMRTIKTLEKELPEIDDDIDTLVRGSPAWREKEDLLVSFPGVSNTLARTFLAEVPELGTLSRREIASLAGLAPFTRQSGRWKGKSMIGAGRAPLRAALYMAALTAVRCNPSLKGFYQHLLVVGKPKMVALIAVARKILTILNAMLRDRRQWQPA

SEQ ID NO: 110504 - protein, 372 aa, unidentified
MKQNILYVGLDVDDTQYHGSSFDKDTGEVIDFRCRPTLKGLLDQLDKLARHCPGCSIKLCYEASYVGYCLQRDLMSHDIHCDVVSPSSIPSPRGKAIKTDRIDAGYLAQFYANDLLTIVQPPDEEQEQDRDLLRSRQKVLQQRTQLRKHLQAVLRRSGLHYKAQTQYKSHWTKHHYWWLARTIDGLSGSLKVNLELLLRQIKGLNEILAEYGQQIEVLANTPRYHRAVQSLTCYKGIKNIFALTMITEIGDIKRFPHPRRLMSWIGMDIREYSSGGRYNRMGITKQGNRYLRTAFVEANQRGYRTAKIGQDLKSRRKYIAPDLIHIADRCLRRLNKKGNRLLLAGKHPNKVKVACAREMVGFVWESLNKVAA

SEQ ID NO: 110505 - protein, 483 aa, unidentified
MSAGKKNAKNNNAGDGARGTMPVHGGEGAEVAEESTQVVEYAAAIDVAKGFGMVCTRVPGSRPDRRRQKVWRVEATFKEVTALMDHLRCEGIQRLVLESTSDYWRIFYYLAEAAGLEVWLVNARDVKHLPGRGKSDRLDCVWHCKLNERGMLMRSFVPPEPVRDLRALTRTRARLAQDQARHQARVEKILEDALVKVSAVISDLFGTSGRRFLDALVAGQRSPKALAALGDYRLKASTAELEAALTGRFRDIHATEIAVHLRLIDAINAEIALLDEQIEQHLPSVPRTAPVCTACGEIGGCHAPGCGSHGTAPLSLAGRLDEVTGIGPVNAPAIIAELGTDPSQFPTPGHAAAWARLTSRSRQSGESAKPGRTGKGNRYLRGALGQAAMTAANTDTRLGAMYRRIARKRGKQKAIVAVSRVICEIAWILICDPGARYEELGADYYHPRSRARQTRDKIREIERLNPGKKVILADAGPQADAAA

SEQ ID NO: 110506 - protein, 338 aa, unidentified
MKITTVGLDLAKSVFTLHGVDEQGNTVLRRTVRRAKLLEVFAQLPSCVVGMEACSGAQHWARELRKLGHEPRIMAAEFVEPYRRGGKNDTNDAAAICEAVSRPQMRFVPIKSVEQQAVLAVHRLRQGLVEERTALANRLRGLLAEYGLIVGVGLDRLRRALPDILEDGENGIPGIAREIFADAARQLAELDVRIGEYDRRITVLARASEPVQRLMKMEGVGPITATAIVASIGDAKVFRNGRQFAAWLGLTPRQHSSGGKQRLGAMTKHGDVYLRTLLIHGARAVLRVTPTHSDAKSRWVESLRQRRPDNVAAVALAAKHARIIWALLARGQHYRPAV

SEQ ID NO: 110507 - protein, 366 aa, unidentified
MTIVEDPRVTRFGTNVITASPGAPPAARGITGGVDTHADTHVAAALDPVGGLLGVREFPASAAGYAALLGWLRGFGPVALVGVEGTGSYGAGLARHLAGAGVRVVEVDRADRADRRRNGKSDPLDAVSAARAALSGRASGVPKGRDGTVEAIRALMVVKRGARSERTQAINQARALIITGPEDLRARLAGHRPAALAAAIAALRPRPGSGPGHATRVALRELGRRVLFLDGQLARLEELIVPLVTSRAPGLLSMHGAGPDTAALLLIAAGDHPRRLRSEAAWAHLCGVAPIPASSGKTRRHRLNPGGNRDANHALWRIVITRMSSHQATRSYVERRTAEGLSKREIIRCLKRYVAREAYRHLRAGG

SEQ ID NO: 110508 - protein, 411 aa, unidentified
MRLFVGDDWAQDHHDVELMDAAGRVLAKRRLPEGVAGMARLHDLIGQQLGEDPDGAEVVIGIETDRGPWVLALVAAGYTVYGVNPLQASRYRERHGVSGAKSDGADAHMLTDMVRTDSHQLRAVAGDSPGAEGVKVLARTHKTLIWERTRQVQRLRHQLRDYFPAALEAFDDLDAPDTLELLGKAPDPARAAKLTRAQLSAALKRAGRRNIPDKVTAVLAALRSAQLGQPPAVTAAYAATARSLIAVITVLNEQVKALQGQVEEHFGQHPDAEIYRSQPGLGAVLGARVLAEFGDDPHRYADGKARRNYAATSPITRASGKKKVVAARFVHNGRLVDALNAQAFASLNASPGSRALYDELRARGIEHNDALRRIANRLVGILHGCLKTRTLYDEETAWAHRQNLPQSSVAA

SEQ ID NO: 110509 - protein, 320 aa, unidentified
MSATFVVVGIDVAKEHVDVAVLGADIGAERFANEAEGHTGLAAALQPLGAALVVMEATGGYEALLACALQAAGLPVAVVNPKQARDFARAMGKLAKTDRIDAQMLAQLAGVLVRRDDLVKLLRPVESDEQQWLAALVTRRRQLVGMLSTERQRIQMTPAKLRGSVEAIIAAIKAQLDDLEGQMLVHVHKHFCELDELLRSTKGIGPTVSATLIAELPELGRLSRRQIAALVGVAPIAKDSGTMRGRRRIYGGRFDVRRMLYMATLVAIRHNPTIQAFYKRLTGAGKLPKVAIVACMRKLLTALNAMARTNTPWDNSRLTA

SEQ ID NO: 110510 - protein, 390 aa, unidentified
MTYYVGIDIAKYKHDCFIADDSGCVIRDSFTLTNDKDGFDVLLSILKELKPKGQIKIGFESTGHYHFNLKLCLEANGYDYVEFNPLLVHKFASTQTLRRTKTDKKDAQLIAKYLMTVDYKPYVNSFYHINNLKSLTRLRETLITDRTRFLNQITSYLDQIFPEFKPLFENGLNESAFYLLTHYMTPAKMSKLDSNKYSKMKSELRHPISYQKICQIKDAAINTIGHTSKALEYALEASLTLYLTLDNQIDELESKIIEIYDSLNCHIHTIRGISKLTSAGILSEIGNFNKFLTPAQFQAYAGLEPSKNDSGTHDGIGVMVKHGSSYLRKYLMNSAETFYVFNPSISDFYWKKRNEGKHHRVALSHVARRLINTIFYLEKHNQDFDSNLAK

SEQ ID NO: 110511 - protein, 346 aa, unidentified
MFRAVNISSHIKNKVMKFKYFIGIDVSKDTLDLSIVEEGKQLLHKRIGNNQKEIKAFITFFKKEFSTDLNSSLYCMEHTGIYTNHLLNVLNDKSIAIWLESAFHIKQSLGLQRGKNDKVDAKRIALYAYKNRDEVKLWQPTRNEVKKLKQLVVIRKRIVKTISNLKKPLSDTSFLSKEEKKTLNNSLKLSLNALKKDLGKIDTQIQEVINEDQHLKKIFRLTTSVKGVGTITAIQIIVKTNEFKSISEAKKFACYAGVAPFEHSSGSSVRGRSRVSNMADKSMKSTLHMAALAAVNYQGELRDYYLKKVEEGKNKMSILNAVRNKLILRVFACVKNNREYENNYAY

SEQ ID NO: 110512 - protein, 408 aa, unidentified
MQVLYPRCAGLDVHKDTVVACVRCVSEPEHHETRSFATTTRELLALGEWIASHGCSHVALEATGVYWRPVWHVLEGQVELVLANAHHIKNVPGRKTDVNDAMWIADLLAHGLIRSSFVPPQPIQELRDLTRTRKQVVREISQHSLRIQKVLEDANIKLGSVLSEVLGVSGRAMLGAIIEGERDPHKLADLAHGTARRKHDALVEALHGHIRPHHCTLLKLHLNLIIALEHTVAEVDAAVGKCLDPIHQRARLLTTMPGVRDTVAEVIVAEIGIDMTRFPTPGHLLSWATMCPRNDASAGKRRSTRLLKGNNWLKTALVTAAWAAVRTKTSYLRAQFLRLKARRGAKKAIIAVAASMLTAAYFILRDGVPYRDLGPNHFDRQQRGKTVRRLLRRLHDLGYNLPPQHQPL

SEQ ID NO: 110513 - protein, 414 aa, unidentified
MKRQENKACGADIHKRFLMACILSKDGSKVLNRFDMTVEGVLGFASWLKDNNCKKVAVESTGNYWHLVYQVLDDEFEFILGNAFKTRRHSGAKTDKRDAEWLAELCLNNQIEPSMILPKEDRELRALTRARKGYVDFRSKLKARTIQELEACTIKLASELSDVFGKSGRHVLQGLVDGRSADVIVESIPSKKVKKNKEKIKQAIIAGLSPISIFLIKSHIQMIDEVDKKLVQLDAQISRLLKARKRDVEIAMSIPGIGFVSAAAILSEIGDYRNFASGKKLAAFSGLDPSVYESAGKRYNGKITKMGSKYLRRMIIECAHALSRTKAKTQLKRFFLRIMARRGKNIATVALARKMLVVLHHLLINQEMYKDDGLAKPKNVKVSFSEESNYPSLDEMIEVLVGAGYFVKKDSQGG

SEQ ID NO: 110514 - protein, 404 aa, unidentified
MFFMGIDIGKRHHEIALLDNQGKLIAKTLRIANSKQGSEKLLQFINQHQLLPENTLIGMEATGHYWLSLYSFLHGLYFQVTAFNPIQSDVLRDFYIRKTKTDTVDAVLIAQVIRLDLPDATKLPSEDIFQLKQLERFRYSLVDRTSELKNKVIACLDQVFPEYDKLFSDTFGCSSTQVLLQSPLPEDLLQIDTSKLIELINSASGKRLGKVRAKTKATQLKELAATSFGVSIATDVFKLEIQLMLEQIALLENQLNKVEAEMSTLVDKQNNYLTTITGIGEVTAAVIMGEVGDIHRFERPNQLLAFAGLDASVHQSGDFTGTKNKLSKRGSPYLRRAIWQAAFIASNKDPALSIYYQKLRNRGKSHGTAIGAVARKLVNIIFAVWTQNKPYEVHLPQQVELSEP

SEQ ID NO: 110515 - protein, 315 aa, unidentified
MAQTNITTAGIDTSKAKLDIAVHGRTERWQVANALPGWRTLAANLAKAGVTRVGIEATGGYERGVVEHLRATGFTVLILQPLQVKAFGQVHLRRAKNDALDAVLIAACAAAVDPPEIAPDPRLTELVDYLTFLEQIEEDIRRFKTRLEHIDEPALRRIVNSDIARLKARKAAQMRDIAKRLRSHDDLAKRLKLVLSIPGIGERTALAIVIRMPELGRVSREEAAALAGLAPFDADSGQHRGQRKIAGGRSRLRRSLFAAALPAAFRWNKALIALYTRLTAKGKVHNAALIACARKLLIYANTIVQRGTPWTEKAA

SEQ ID NO: 110516 - protein, 336 aa, unidentified
MEHVAIDLGGRESQICVRNAEGEIIDERRVATRMLGKYLGKRPPSVVVVETCAEAFGVADEAGAMGHQVRVVPATLAPALGVGARRTKTDQRDARALSEVSTRVDLPSVHIPSRESREIKSLCTTRDGAVKARTQLVNLVRGTLRSRRVALRRGNTDRFAQKVREAVADLPSYLQPVLTAIEQLTEHIRLLEEQVVTVAESHPVCPRLMTIPGVGPMTAVRFVATVDDISRFESAHKLQAFLGLTPGEHSSSDSKRRTSITKAGPTAMRWMLLQAAWSAQRCRGTHPMLAWAHEVELRRGKRVAAVAMARKLAGIMYALWRDGTIYDPRHAARVTI

SEQ ID NO: 110517 - protein, 330 aa, unidentified
MTPEYIGVDLHKAFFQACALTPAGDRLWEARFARTPEGWTQFAPRLGAQTTVAVEASGPTWAFVDRVATTGARVCVVDTRKTKLKAGYAAKTDRLDARRLADAVRRESVVSIYVPPPAIRALREVCRHRHQLVRLRTRVVQMLRALLLRMDVADAPMRRLYSARGVAWLEQVGVPAEAAASCRRLTHLLRLIQEDVETADAQVQALAKTDPIVGVLETMVGIGPVLGLTLRAEIGDITRFPHGAQLASYAGIVPRVTQSAGKGYTGRITRDGAPWLRYALVEAAGHGLKRQDARGRWARQVARRRGLNKARVALARRMCDEIVRMWPRSA

SEQ ID NO: 110518 - protein, 309 aa, unidentified
MGKSIIDLSSVTTVGLDLAKHVFQVHGVDASGRVVIARAMRRNKLLEFFASLPSCVVGLEASGSAHHWARELIKLGHEARMMPPAYVKPYIRRQKNDAADAAAICEAVMRPSMRFVGVRSLKNQAALMRHKTREMLVSQRTQLLNGLRGHLAEVGVIAAQGPRHARELAELIEACDETIPFEVCEALAPLVVQLRNLDEAIGRLERTIAKLAQKDETARRLMSIPGFGPITASAMAATIQDASSFAGPREFAAFLGLTPKQNSSGGKQKLGRISKMGNRNLRKLLVVGAHAVLFTVSPTPTRCGCGRGS

SEQ ID NO: 110519 - protein, 354 aa, unidentified
MTQTFNAAVSVVGIDIGKSSFHVVGQDERGAIVVRQKWSRGQVEARFANMPPCLVGMEACVGAHHLSRKLKSLGHNARLMPAKYVRPYSKGQKNDFRDAEAIAEAVQRPTMKFVATKTADQLDLQALHRVRERLVSQRTGIINQIRAFLLERGIAVRQGQRFLRAELPRILTTPPEVLSPRMVRIVEDLTGDWRRLDERVERLSDEIEAIARQDAGCERLMSVPGIGPIISSAMVAAIGAGDVFTRGRDFAAWLGLVPKQKSTGDRTILGKISRRGNRYLRVLFVQAAWVVLIKPKIWERHGLKPWIEAAKKRLHHNVLAIALANKLARIAWSVLARGRAFEVRKMDQAANQSA

SEQ ID NO: 110520 - protein, 359 aa, unidentified
MFYTGIDLHRRLIVMCTVNDSGTIVARSKIKTEPDALITYFRQWTDPHRAVVECTSNWYWLCDILRSLGVTVVLAHAKYLKAIAYAKVKTDAVDAHTLAQLLRMGFVPEAHQLPPEYRALRDLLRQRMVMEHNRTNLMVRITSILAKFNITKLPCVVSQPQFADFLAACTIPEEYRMTLLLYHQQCLQVAEHKKHLEHYFKGQLRPTPTLQLLVSIPGIGDITGAIIAMETGEISRFADDKHYASYCRLAPGAKDSGGKHKHRSGSKDGNQYLKYAFTEAALKAARFYPEIRQFAARLEHRSNASIARTVVAKELSKITYYVLSREEEFKTFKGIEIRKTHDWPRTCKPVRITGVHALK

SEQ ID NO: 110521 - protein, 413 aa, unidentified
MTTTSSPTRFVALDIHRKYLVVGAVDQEQQIVLTPRRFGFEAFSAWATTHLGPCDAVVLEATSNAWLLYDQLEPLVGSVTVAHPLAVKLIAAARVKTDSRDTIKLAHLLAANLVPAVWVPPVHVRELRALVTHRKRLVNQRTQVRNRLHAVLHRHNLTVPPGKPFAAHQQEWWLSLDLSSSEKLRVQQDLSLLRALEELVAAVEAELGRLSTGEPWVKQVPFLVQLPGLGVLSVMSILAAIGDIGRFPSAKKLVGYAGLGASVHDSGETHQGGHITKEGRRDLRGVMVEAAWVAVEHHPHWKAQFERLTRRIGKQKAIVAIARKLLVAVWHVLTEQEADCHADAQAIARKLMNWIAHHGLTPGQHRDRLLLLYQQLDQLGLSEELEEIDYYGTTYRLSVRQRLLREAQRRQSS

SEQ ID NO: 110522 - protein, 369 aa, unidentified
MADRITYVGLDVHKDSIVVAVAAGGLRGEVREYGRIANTSTALDRLLRKLGGDGMRLRFCYEAGPCGYGIQRRLSTRGHECVVVAPSLIPKRAGDRVKTDRRDAASLAKLHRAGELTAVWVPDVGHEAMRDLVRARLDAVHSLRRARQQLSGFLLRHGCHYGRPAWTKLHRRWLAGLKFEQAVHHIVLEDYIAAVEAAEARRNRLTAQIEAMLPDWTLAPVVAALQTMRGMALVNAATLIAELGDLSRFANPRQLMAYLGLVPSEHSSGSSVKRGGITKAGNAAARRLLIEAAWSYRFPARLSRELLLRQESQPRLIRDIAWKGQVRLCARYRRLARTGKPANIVTTAIARELAGFVWAIARQVTVTTD

SEQ ID NO: 110523 - protein, 391 aa, unidentified
MSMYFIGIDISKYKHDCCIISAADQKVVSKVTIKNNKAGFNELLTIIHSLANPADIRIGFESTAHYALNLELFLENSLLTFMEVNPVLISEYKKSKTLRRTKTDSVDCESIARWLMTVEYKPHSKGFYHAYSLKSLTRLRDKLIRQRSFYLVKITNVLDHTFPEFKPFFNERLSKTALYLLENYGSAEKMARMNSASYEKLRSVSRGKFSPQQFLRLKELAANTVGVNNSIFDVELNSLLSLYKSLVKEINTIEKEINKLIEEVHPHYMSVPGIGPLSAAVIYSEYGDISNFTNPGQMLAFAGIEPGINESGTESHGGKMVKRGSSQLRYTLINCCLPLIRFDMTFATYYAKKRGEGKPHRVAITHVAKKLIRVIYTLEIQDIDFNAQKLR

SEQ ID NO: 110524 - protein, 411 aa, unidentified
MHYFVGIDIAKSFHVACVVDSNDKVIKKSFKFNNDENGFDELVLLLNSIDEVASFSIGMEATGIFFENLYLYLSQKGFKVILLNPYQTNRFREMDSMKKVKNDNIDALMIAALIKSGRYSKAYVSEDTYQSIKSLYRHKNNLLEEMKKHKRQISTLLSVVFPEMEQVIKDPFNVTGLALLEKYPTAKHYEYASVERILKTFRGIKGNNFNEQKAFRLLELAKHSVYQGNGVDERAYVIKSHIRVIKLLQEELKELENEMLKLFNQTPQLEDNEEQEVMDIIDNLRTIPGVSDKTIFALISECGDLSRFKNNSHFIGYLGLYPTLEQSGNKLTYGPIAKRGAKLAKKALYQAAIAAIRHNEQLHKLFRDKVSQGRAKKEAVVIVARKLAHIILAIYKNNVAYNPQRVFQASA

SEQ ID NO: 110525 - protein, 341 aa, unidentified
MGQASTIGLDIAKWVFQAHGADATGRVVFRKRLVRAKVLEFFAGQPPCLVALEACGGAHYWARELGKLGHTVRLIPPAYVKPFVKRQKNDVADAEAICEAAQRPGMRFVPVKDEAQQANTVVFRARDLLVRQRTQCINALRGHLAEYGHVVPQGPAHVDRLVALVEDPKSSVPESARGILQVLIRTLNALEEQLKELDGEIARRAKTDPVARRLMTIPGIGPIAATAITALVPAPEGFRAGRDFAAWLGLTPLQKSTGGKHKLGAISKMGERTIRRLLILGASAVVRWASRRGAAAGSWLARMLARKPRMLVTTALANKMARIVWALLVKGGTYKAPAVAA

SEQ ID NO: 110526 - protein, 402 aa, unidentified
MVDLNGHAAGNGGHSQRTPTADRDSSTRKKTVRFLGMDVHAETIAVAVAEPDGSVRSLGTIANRAESIRKMVKKLGPVEQLMACYEARPTGYVLYWQLAELGVACEVIAPTLVPMKAGDRVKTDRRDAERLARSYRSGDLTPVWVPNERFEALRNLVRAREAAKQDQLWARHRLSKFLLRLGQRPAAWMKAWTLQYMARVRQLRFAQVAQESARLDYLHEVEHMAERVKRLEQAIMEAVKLASPAVQEVVKGLQALRGIAQISAVTIAAKLGNITRFAGARQLMGYSGMVPSESSSGGRTQRGRITKTGNAHLRRIAGEAAWSYRLKPGMGPALRKRQEGVPEEIKEIVWKAQHRLHTRYMRMAAAGKDQRKIITAVGRELLGFVWSIGVKAETAARLRMAA

SEQ ID NO: 110527 - protein, 420 aa, unidentified
MHQTFEPYLSVGIDVGADFSEMSIALPNFQLLGKPFKIFHNRLDSLSSAVDRIKKAEELNSLKARIFLESTGIYHFPLFCYLRESGFDVSVINPLITNSSRNMNIRKVHNDSFDSKKAAILGLNPNIKLSLIPTDLVLNLRNLTREYYNLMDARSAYVNKLLGQLRVAFPQYLGIFSKVTGSASLMILKEYTSPQAILDADPSTLIPAIAKASRKGIASAAAKYEQLVLAAKESFSFGHALDSNFFLICQHISFIQKYDEETQAVLSEMASIVDAHPEEPFIQQIHLLESYRGAGFLSAVTLMCEIGDFGAFRKPKQLYAYFGLDPEVKQSGNFKGTDVKISKRGSALARRVVYTMALQAIGSDKKGVAKNPVLREFYLKKCQSKCKMVALGAVMHKVCNTIFAMLRDNKPYEMKTPDQL

SEQ ID NO: 110528 - protein, 395 aa, unidentified
MFIVGIDVAKRSHEVCMITSDGQTVQRPFSIRNNCTGYNLMLEKIRKHTNIKSQIVFAMESTAHYWLALFTRLRKDGYHVILLNPIQTSAMRDMFIRKIKTDAKDSFIIAELIRFGRYAESNVAQDRLLALKELCRNRFYLVDMAGDLKRKLIALIDRIFPEYEAQFDTIFCKSSVALLKKYPTPQRLSNAHLDKLTELLWNSSNGHFGEWKARELRELARNSFGVEDCDGAYSTLILLMLDQIQSLSGKADALEKEISRLFQSFDTTVTTIPGVGPIIGAVILSEVGDISRFSSADKLAAYIGVDPSVNQSGEFQAAHAHMSKRGSPYLRRCIWMASQVAVQRDPMFRAYYEKKAAEGLKYMTIIGHVTRKMTAVVFAILRDHKVYEPILPTAA

SEQ ID NO: 110529 - protein, 351 aa, unidentified
MTLYIGVDFHPHQQTVAWCETETGETKTVDLAHNLETVRRFYASFPGPAIVGIEASARATWFENMLFETNHKLFVGNPVLIRKRAISRHKNDRRDAELILTLLMRDEFPSIWRRPPESSRILEVLRLRQNLVRQRTQTYNRLQCLAHNAGLPKGRMKTSAFQQKIKDLEMEETDAMQRSHLFRLLENFDGQIGELETWLRKKAAPDAKVKLLMTQKGVGYLTALTVVHTVGDVSRFTRLGRQVTSFAGFDSLDDSSAGKVRFGPISKAGSSLLRFQLGQAAQIAARFDPRLKGFYKRLAKKKPRGVAKTAAARKLLVKLSIMLRDNITAEEFDRRGPTVGNARQSRDLKGS

SEQ ID NO: 110530 - protein, 321 aa, unidentified
MTYVGIDVSKATFVVAYSSAKSSETKTFKNTTKGIREFIRTISPEENHCVLEATGNYSILLVYLLSKAGFTVSMENPLKIKNFARVMLSVVKTDEIDARLIALYGERMQPAPFKLRSDSLLLLKQKRTVLRQLKKQLTANRNLEGSLKILPFIDSKCKKVLEKTIKFLEKQIEEMEEELTSLAEIEYKKQMDLLTSIKGIGATLAAALIIATGGFTYFDNAKQLTRYLGLSPTYQQSGTSVNVKGHINRNGDAYLRSQLYIGAMASLRCNTECKACFERLRSNGKPGKVAIVAVANKLIRQAFAVVTQEKIYIDGYKSVKP

SEQ ID NO: 110531 - protein, 314 aa, unidentified
MTNANRASGVNIGVDVGKFQLDIFILERDRHFTVTNDQQGIREALTIIQRYTVSRIVLEATGRYEMAFATAAFEKALPVCIVRPVLVRQFARAADQRAKTDRIDAQIIARFGAVMAPRPSRAKSKNLLLIKDLVTRRKQLIGMRTQELNRQKMLEGPVARSCGRVIRSLNKDIEWTEERLAKMVEQEATWAEKRKLLGTVPGVGDTLIFTLLSELPELGELNQKEIASLAGLAPINRDSGRFRGKRRIQGGRSNVRTTLYMATLSATRCNPVIGGFYRHLVKQGKHKKVALTAAMRKFLVILNAMMRDNVAWAY

SEQ ID NO: 110532 - protein, 432 aa, unidentified
MTKEVKRYARFCQLRTEIRASRDHLIVGIDIAKDKHHAFFGTATGKTLWRRFLFDNDIDGFGCLMEQAKTICAEHRLTHMVFGLEPTGNYHKTLAHWLIRQGQTVVLVSGKAVKDNRQLISGRWDKNDIKDSANVADLIGQGKCQFFEQPDASMLALRNFLSLRKRLKKEEHSLRMQIRNGLVAKYFPEMDRHWGNSLKQNFEIVRHYLDPHKIAASEFKTFVRQVAPRIRSSRSLQRLQAIHQAAKDSVGLSVDPSAEFEAIVLVERHYRVVEYIDQTMAQVESVCVQQPGYQLLLSIPGFGPYIAALILASIGDPHRFTSRNQVIRLAGLDLNANRSGKKSNESIPKISKRGDADLRYGLYQAALIASCHNKAFAQLFARALKGRQGERGIKTKVRVKLAAKMMVIAWTMLKNNELFDEKRLVAEPFQRR

SEQ ID NO: 110533 - protein, 353 aa, unidentified
MEAQVRKIDFKDQNIYVGFDVHKKSWKVTVMAEDVFYKTFTQPPDPQALVNYLKSNFPGGNYHSAYEAGFCGFWIHEKLTSFGIKSIVVNPADIPTTDKERVQKEDKRDSRKIARSLSAGTLIPIYTPATQTQRDRSLIRTRAMLVKDMARYKNRIKSFLFFYGISIDEAFPKPQSHWTKRFMTWLENLEIEGESLQLLISEFKNLRASILRVTHQIRTLSQSATYQHQATLLKGIPGIGLITAMTILTELETMDRFSNLDKLCGYIGLIPSTKSSGEKDKNGDMTSRGHGVLRSAIIESSWIAIKNDPSLMKSYLSYLNRMNSNKAIIKIAKKLLSRIRFVLANKQAYKCLV

SEQ ID NO: 110534 - protein, 386 aa, unidentified
MQTVADRPEAPTAIRTDLGAIFVSLELSRSTWLITSLSPGGGEKMSKQVVRGGDVAGLLERFARLREKTRARTGKVFPFVVIQEAGLDGFWIDRALQNEGIESHVVDPASIATSRRRRRAKTDGIDGEALVRALLAYKRGEPRVCAMVKAPTPEEEDRRRLCRERKVLIVERVRHVNRVKGLLFSQGISGYEPLRRDRRERLDTLQTGDGRRLPDHLKAQVRRELDRLELLLEQIKAVEAERDVLLAAQRVAAPAAMLLDIKGIGPEFAAILWSEGLFRHFDNRRQVASYAGLAPTPWQSGSIDREQGVSKAGNPRLRTTLIQLAWLWLRHQPQSALALWFEERVKRNGGRLKKTTIVALARKLLVALWKYVTAGVVIEGVVMKRA

SEQ ID NO: 110535 - protein, 337 aa, unidentified
MIVIGVDVHKHSLSAVAVDEVGRQLDCLETSDGEELVSWSKRVGRRRLWALEDCRHVTRGLERTLQRQRQRLVRVPPRLTAPERRRGRVRGKSDLIDALAIARAALREPVLDSPRPEEGRLRELKLLVDHRDDLVDERRRAQQRLRWHLHELDPTLHVPLGALDRAVWLERLGRQLARREQTTQVRIARELLGRCRSLTRTIAELERELHQQTVAIAPRLLELPGCAALTAAKLLCEIGPINRFRSDSQLARHAGVAPLDASSGKHQRHRLDRGGNRQLNCALHRIAVTQGRVHPPAQAYLERKQSEGKSRREALRCLKRQLARTVYTTLKAEPLLT

SEQ ID NO: 110536 - protein, 297 aa, unidentified
MNETVVEKFVGIDVSKSTLDVCIEPAVQTLHVAYDEAGISQMAERLKEVSPALIVIEATGGLEVRIATELASLGLPVAVINPRQARDFAKATGQLAKTDQVDAAVLAAFARVIRPQARPLKDADTRALDDMVSRRRQLIGMRVQETLRLGTAASKPLQKSLNRHIAWLNKQIAEIDNDLTKRLRESDVWRTKDDLLRGIPGVGTVTSRTMLAKCPELGMLNRREIAALTGVAPLANDSGKHRGKRFVWGGRADVRAVLYMAAVSAMRCNDPIRVFAERLKKAGKPSKVVIVACMRKL

SEQ ID NO: 110537 - protein, 339 aa, unidentified
MHVTTIGLDLAKNVFQVHGITLDDEVAFNRPLRRAQLLPFFSKLNPCLIGMEACSSAHHWARELTNFGHDVRLIPPIYVKPYVKRGKSDAIDAEAICEAVTRPTMRFVAIKTVEQQSLLSVHRARSLLVRQRTQLINGLRGMVAEFGVYIARGLARVIGFAENILTGEVLELPDIANEVIHNMCEHLMALHARVHWYEDRLKQVAKEDARVRLLRTIPGVGAVTASAIIASIGDGHQFSNGREFAAWLGLTPANKSRGGKEKLGRITKMGDQYLRSLLVVGMTSLVRQTKSHPERASKWLTSLLERKPARVATVAMANKTARIVWAVLTRNEPYTPHTA

SEQ ID NO: 110538 - protein, 345 aa, unidentified
MQPMYYIGLDVHKKKISYCVKDGSGTVHAEGTVPATRLELDLWMKRLPQPWSAAMEATIFTGWIYDHLKPHAAALKVAHPLMLRAIAAAKKKNDRIDAKKICDCLRCDFLPESYMAPIALRECRRTLRYRNLLVRQMVQMKNKIAVLLMEAGVSYNKEKLHKVGYFRELLANNPDINDGLRSLLRLCRETVVRLGKTESALVRTLQRDPLLAERVERLMTIPAVGPITALTWALEVGEVKRFSSIKKAISYCGLCGDEKSSANTVQRTPISKQRNKHLQTTLIEAAKMAPRYSPDLAALYDLERRKGHANRATLTVARKLVAYLMAVDRGQRNFLMVANQTRAVA

SEQ ID NO: 110539 - protein, 373 aa, unidentified
MNSRITYVAMDIHKKQHRVAIAYPNDEVIVEFSVKNTPTEIRKMVRKIKRNTPGEVKFCYEAGVCGFTLQRRIEALGCKCSVIAPSLTPRKPGERRKTDRRDAKKLLSLFMSDMLTEVYPPDEHQEAARELTRCREAAQENLKRIRHQLQKMLVRHGYVFRDGQHGTQKHLRWLGAVKFNQPLLQEVFDSYFTEMRHCLQRVQTLDRELEKLAQSEDYRDVVGILRCFYGIETLTAISIIAEVFDFGRLASARAFMSYLGLTPSESSSGEKEHKGPITKTGNKRARRLLTEAAWHHRHAYGVSNVLRKRREGQPQWAIDIADRAGLRLRRRYSRLVHRGKLPCKAVTAVARELAGFIWSALIEYEARKERKVA

SEQ ID NO: 110540 - protein, 405 aa, unidentified
MYDELAEGNVPEIWAGVDIGKTHHHAVVINAEGERLLSRRIQNDETELLALLGDVLAISDDVLWAVDLNHGGAALMIGLLTAHGQSVAYLTGLAVHRASATYRGEGKTDAKDAFVIADQARIRRDLGLLRPGDEIAVDLRTLTTRRLDLVFDRTRQINRLRAQLLEILPALERALDLTNKGPVMLLTGYQTPAAIRRTGAKRIETWLKNRKVKGAAALARTAVDAAQAQHTALPGERLAAAMVVRLAKGVMALDEEIAELDALIEARFREHPHAEVIRSLPGMGARLGAEFIAATGGDMNAFGSADRLAGFAGLAPQPRDSGRVSGNLHRPRRYHRGLLRAMYLSALASLKCCPASKAYYQRKRSEGKGHKQALLALARRRVNVLWAMIRDRECYQVSPPVAVAA

SEQ ID NO: 110541 - protein, 416 aa, unidentified
MICAAIERCAGIDVGKTFLAVCLMTGPLEGEPRVERRRFGTVTAELEKLRDWLQQEVITHVVMESTGSYWKPVFNVLETAVKVYLANPQEVKNRKGHKTDDNDGWWLAHLLRHAMIHPSFIPPRAIRQLRDLTRRRKRMIGNATAEKNRIQKVLEDANVKLGNVLSDVFGVSGQLMLEALLEGKAKPEEIAEFAQRRARQKIPQIIESLNDHRMSAHHRRMIRYSLEHMRFLEEQIGKLDEDIVAEIREAGLVEQWQLVQTVPGMQEASAANVVAETGGDMKQFPSSKHLSSWAGVCPGNNRSADKNKGSHTTGGNPWLRSTLTECAWAAAAKKNCFLKDRFWRIATKSGGKKAPAVIATAHTILSLIYQVLATGKPYTERNEPILDEPRRQRLIRHHVRRLGKLGVPVRSCNRRS

SEQ ID NO: 110542 - protein, 368 aa, unidentified
MGRKSSKLFVGMDVHKESIDITLAEEGGAVRHYGRIGGEQSALIRTVRKLESLGKSLVFVYEAGPCGFWIYRLLRERGHECWVVAPSNTPRRVRDRIKTDRRDSLKLAGLARAGELTPIYVPDAADEAMRDLVRAREDAVATQRQARHRLAALLLRNDIRYCGKTAWTEAHRRWRARLPLPGAAQRIAFEEYVLTVNEATASVQRLTASMEQELVHWRWQPVVHALQACRGIQLIHAVRIVAEVGDLSRFSHPRQLMAYLGLIPSEASSGERRRQGPITQAGNRSARRALVEAAWAYRHHAAMSPIIVRRQSGLAKPVLDIAWKAQLRLCARFRRLSARGINRNKIVVAIARELAGFVGAIGQRVKLN

SEQ ID NO: 110543 - protein, 316 aa, unidentified
MSESMSFVGIDVSKNVLDVHVLCTGEHWQVGNDQAGCASLVERLKPLGKTMLVVMEATNVFWRMAAAALAGAGLACAVVNPRQVRDFAKSMGILAKTDAIDAQVLAQFAQRVKPPVRALPDAQCQVAAELLARRAQLMGMRVAEKNRLGTASAKKVRKDIEATIAFLEKRLAALDEEIDRWLKSTPIDQSRADLLQSFTGIGQNAARSLLITLPELGRLSGKQIGALAGLAPFAKDSGGKRGQRHIAGGRAVVRAALYMPALSAITHNPVIRALYQRLVQAGKHHYVAITACMRKMLVILNAMLRSGKPWKASHHA

SEQ ID NO: 110544 - protein, 393 aa, unidentified
MRVPGGRGGTVLEKERFATTTAALAKLGAWLADRQVSLVAMEATGVYWKPVYYSLESSFEVWLCNAHHVKNVPGRKTDMSDAEWLADVAAHGMIRPSFVPPPPIRELRELTRYRKTQTDARVAEIQRLEKVLQDAGVKLTSVASKVLTQSGRLMVEALIEGQRDPAELANLAKGKLRPRIPELAEALNGHFGSHHAVAARRILDHIDFLDATITALSEQIDLRTAPYQAARELLLPVPGFDRLVIDTVIAETGADMSRFPSPGHLAKWAGICPGNHESAGKRRRVGTTPGNRWLQRALVEAASSAARTKGSYFGAQYRQIAKRRGPNKAAVAVAHSLCDLIWHMFSTGECFHDLGDDYFQRRRDPERETRRLVSQLEQLGFHVALTTPQDPAA

SEQ ID NO: 110545 - protein, 346 aa, unidentified
MRFYDGQHQFYCGVDLHTKRMYLCIFDHEGNKRLHRNVRAKPREFLNAIHSFRDDLVVGAECMFTWYWLADLCQDKGIKFILGHALYMKAIHGGKQKNDKLDSEKIARLMRGGTFPLSYVYPREMRATRDLVRRRMFLVRRRGELLAHVQLVNQQYNHDPFEKMLKYASNRDVLDRFADDSARLNVEADLQMVGHYDQLLKQLEASLLRQATGHDPQTCCLLRTIPGIGKILSLVLLYEIHTINRFPSVGDFLSYARLVTPKQTSDGKVTGHGGAKIGNVHLKWAFSEAVLWMLRYSDDAKAFLKRKEKKHSKARAMTMLSRKIARAVYQMLKRKEPFDAVKFFAS

SEQ ID NO: 110546 - protein, 394 aa, unidentified
MFYCGIDIAKHKHEMSVIDSDGKALFDSISFSNSKDGCEKVIALFERLDVTSETVVIGMETTGHYWLSIYEHFTGFGYDVKVINPIQSEAFRKMYIRQTKTDSKDSFIIAQVMRFGQYSSTTLADENIIALRQLSRYRLALVDSCGDCKRRIIALLDQVFPEYAKQFTDTFGVASTELLLNCPTPEDMLAVSTKKLTALLKKSSRGHFGESKAKELKAIAKNTFGVSFAKDAFSFQIKQLMEQLVFIENQIIELEKETSALLRQTNQVITTIPGIGETLGAIIVSEIGDVRRFDAPNKLVAFAGLDVKVNQSGEFVGTKNRISKRGSPYLRRAIWLAAGRAAFCDPILSEYYQSLRARGKHHLTAVGAVSRKLCNIIFVILRDNRPYETTPPKS

SEQ ID NO: 110547 - protein, 411 aa, unidentified
MENTILVACDLHDKNMRIHNAMNRGPVVKQTVENNTDGRKFLIDRLQNQAAQLGGARIVFAYEASGAGFGLYDELAAAGIECHVLAPSKIARSPQHQRNKFDDKDTAHIMELLRGHVLAGNALPNVWIPDPQTRDDREIVRARLDAQAKCSKLKAQVRALLKRNALVKPEAAGKGWTKPYRAWLKALTECDEPLRTGARFALKRLLCQLKSLEDEVQVFDQEIEKLAKTERYAAAVLEINTLLNSKGLLTVMVFLTEMGDLSRFKNRRQIGAYLGVVPSANESGETDDRKGHITHQGPARVRYVLCQAVWNQLKRNVQEKTIYERIVKKNPKHKKIAVVASMRRMAVRMWHAGLRAKAGTPNKIPGALGPRKAAFKAQWKVAAKKKAHAQGKACALPPSRRVTRQCCPAQT

SEQ ID NO: 110548 - protein, 314 aa, unidentified
MQVSTLGIDLAKNVFQLHGVDNSGKTVLRKRLTRNAFLPFLAQLPPCLIGMEACASAHHFARRLMQYGHQVRLMPPSYVKPYVKRDKTDARDAEAICEAVARPNMRFVAVKSETQQAILALHTERDLLIRERVASTNSLRAMLAEFGVVMETGLSALYKTLPVILEDGENALTALTRRSAARQLTHLRELEHQIAEVERELSAWFHSQEACRRLEKVPGVGMLTATYMVAAVGDGSQFTSSKQFAAWVGLTPKEHSSGGKQWLGPISKRGDRYFRYLLIHGARALAAVIERHRDKQTWFYSLLKRKPFNVAVVA

SEQ ID NO: 110549 - protein, 352 aa, unidentified
MKRHRRRPSPKPRTSPAALDRLHPHAAGIDCGSAEHFVAVPPDRDTTPVRSFATFTGDLHRLAEWLTACRVTHVAMEATGVYWIPVFEILDARGFQVILVNARHVKNLPGRKSDVVDCEWLRDLHILGLLRGSFRPADGIVALRGYLRHRATLIESAGALVQRMQKALIQMNVQLPLVVSDITGVTGLRILRDIVAGHRDPQALARHRDYRCRASEAEIVAALTGNYRPEHVFVLQQNLELFDTYQHHLTTCDAAIEAHLTRLAAASAAPASPLPAVRRRHKPPANEPRFDLRTPLHQITGIDLAQIDGIGPYNALRLLSEIGTDMTRWPTEKHFTSWLTLAPHNKVSGGAS

SEQ ID NO: 110550 - protein, 377 aa, unidentified
MDRAITDTPAETILHGALELSKNSWLLALQFPDRVQPSLYPIGGGDTVGLMAKLTAARDRWAKMSGKAPSIMLCYEAGYDAFWLARFLKARGIECLVVDAASMQVNRRARRAKTDRIDVGMLLRALIAWGQGDRHVWSVVRVPNVDEEDLRRSHRERDRLVRERTAHINRIKGLLFGQGIRGINVKSKYKTLQIDKLVTGDGRPLPPRLTSEITREIARLALIQEQIATLERERDQAPTPCKASEKKRLQLVSLNGIGPAIAAVMTREVYYRHNRRQVAGFLGLATSPHDSGDVERSQGISRAGRGHVRGTMIQAAWLWLKHQPKSAITRWFVQRTAGQSGRIRRIMIIAVARKLAIALWRFLEQGLVPQGAMLANR

SEQ ID NO: 110551 - protein, 428 aa, unidentified
MKITKKANVINLDSILDISVDVHKDNLCFFFEIKGNEFTDVCKNRTCVIEKRLRKYADIAANFGKKGLRVICEPTGQYQNKLMRTARRMGFLTCYVNAESVAKFRIIETNDYNKTDQKDPRVISTLGKLNKVIGFRMIGEKYLMLRKLHKIYDECDTAITSIRCRIHKLLVELFCDYSFKKDFLYTRSGQVLLDKFGCNPYKIIKAEWDEFSRIMSSNVKGIRKATIERLWRDAKSSCLNEMPEGYIEVLEEYLKQLMDDYHRIVKRKMKITSQMESILNELREDDPLIPPPTPNVISDKNLARLLAETGPLSDFDNWRKLMRYAGLNLKTRQSGTYQGHHKISKKGRRLLRKVLQCIALPLVKKERLYGEYYHKKRDINKMPGNKAMTVVARHLLRKIYGWYKSGKEFDKERFFKCKSQYKKLRLAA

SEQ ID NO: 110552 - protein, 435 aa, unidentified
MEEVTDEPLYRDRVCGIDIGKAGLVATIRVPSDKDPARRMAETRSFGATRREVLALADWLRCWQVPAVVMEATGDYWKGPFYRLEAEGFECVLADAKQVKNLPGRPKRDPADSRWLAACFERGAITACFVATPEFRIIRLHTRYRRDLIEERTRDKQRAEKLLESAAIKISAVLTDLHGVTGRDIMDRLIAGEHNPKVLAQLARTAARRKISQLEEALEGAEFFTERHAILLKVMLERIDRLTADIDQLSQVIEQLLAPYEEQLQQAESMPGWARRAAQDAIAETGAGMTRFRTGAHLASWAGRAPLDHQSGKRKGRSKSKKGNRYLGAVTGETAVAAGRTQTREGVRHRRLVRRRGAAKACVATGNTQLKVYHKLLSNPGMRYEDLGPDYYERQRDVRRQIAHHVGKLGSLGFEVTLCRIPAPDPDGTGHTQAA

SEQ ID NO: 110553 - protein, 382 aa, unidentified
MLDQACSEQTPVATQNEMYAAIELSGVSWLVAIHVPHADKISRHQVESGNGTALIDLLDAIRERSERVLGREIAIYSCYEAGFDGFWLHRQLVTAGINNAVIDPASIQVNRRARRAKTDSLDVEALLRALMAWRRGEKRVCAMVRVPTVKEEDDRRISREREALIKERIRHVNRIKGLLATQGVRRYEPLRSRRQERLDALRTGDGRPLPPRLYAEISRSLRRLELVLEILREIEIVRDEEAAVSARTNGVVGRLMMLRSIGPEVATILHGEALHRTFDNRRQVAAYAGLTPSPWSSGTLQKEQGISKAGNPRLRRTMVELAWLWLRYQPGSRLSAWFRERVGDGKGRIKRIAIVALARKLLVALWRYIETGLVPEGCLMKV

SEQ ID NO: 110554 - protein, 315 aa, unidentified
MVEQVVVGIDVSKAKLDVALLPGGEQFTVSNDRHGIGELLRRVSPLAPARVVLEATGKLEQLAVSELAAAGLPVVVINPAQVRHYAKARGKWAKTDPIDARLIAEFARDLEPELRPLPDAETQALAALCQRRNQLLEMEQMEKSRLQRAPGANQKSIKAMLRFVRRQVEQVEKQIEHSIRHSPLWQAKRELLESMPAIGKVNSSTLLARLPELGQFTRQKICALVGVAPYNDDSGQWHGRRHIAGGRGGVRQVLYMATLSAVRCNPALRDYYQRLLGRGVEPKAALIAVLRKMLTILNAMVRDNTPWRPPCPLPA

SEQ ID NO: 110555 - protein, 338 aa, unidentified
MKITTIGLDIAKSVFHAVGVDKAGKLIKKKMLRRKDLLPFIAKIEPCLIVMEACSGANYWTREFELLGHSVKLIAPQFVVPFRQGNKNDYNDALAIAEAAQRPNMRFVKPKSVEQQDVQLLHRMRERLTKQSTALINQVRGMLAEYGIVIAKSKSAFKVQFPEILTNETNALTTKGRTIFYQLYEEFTDIERRLKDCDTQVLTETKNNVICQRLETIPGIGPVTATAFYAAAGEGKDFSNGRHFSAWCGLVPKQHSSGGKDNLLGISKRGNAYLRTLFIHGARAVLQHSCHKQDKFSCWAIQLAERRGFNRACVAVANKLARMAWVIAAREEEYRLPV

SEQ ID NO: 110556 - protein, 435 aa, unidentified
MDPGFLEHLRLSPRAGIGPGARFLDFLFTGPHADGATQEEEMELLHRRCCGLDVHKETVVGCLRLVSDAKVTTEVRTFQTTTADLLRLSEWLAANECTHVVMEATGVYWKPVWHILDDGEFALVLANAAHVKNVPGRKTDVNDAMWLAELLAHGLIRASFVPDTQTQEMRNLLRTRKQLVREQTSHVLRVQKTLEDANIKLDSVLTDLMGKTGRAMLEALIAGETNPAKLASLADRRVKASPEEFREALRGRVRKHHRFLLRLHLNQIDALDAAMATLDTQVDANLGPFRTAIEQIISIPGIKNLGAQVIVSEIGIDMSRFASAAHLLSWTCICPRNDESAGKRRSNRMRKGGTWLKTTLVQCAWAAVRKLPAGPILSHQSSARPQEGDHGRGRLHPHRDLPHAQGRDDVQGPRLKSLRSPFHRPAKKAPGQTFG

SEQ ID NO: 110557 - protein, 370 aa, unidentified
MSVRRILAKTINTDLEYEAIGIDLAKNCVSAALLTTDGEVVCIDRLDYSELEKSAQVLCPTTFVMEPCTEMNYLVQKLEAWGHRCLVIGGKNVQNYVENHYSGQKTDLNDAQALAFLAQDKQLRTIKAKDIEQQKYASLTTLREQYIKQYRQTIVSLKGICQAWGLNISKGISGKAQLKDLIENHAAFPEELRESLVDMVTHAQTTQKVLNKITKTLEVLAKNDKVCQLIQTIPGLGTICSCRLRATIGDIKRFKNPKDFPAYYGLVPRSIATGHNEKKGKITHRGDRTMRSLMVQGAGCVIRLATCGKLKSKQLTKWILKKQKEKMPWGKLVCAVAAKLLRIVRAVLISSKPYNPKIAGVAKCSLPKGS

SEQ ID NO: 110558 - protein, 342 aa, unidentified
MLYVGIDIAKNKHDVTALNVPGKTVLKPLTFSNNKAGFELLDLSIRQINQDCLIALEDTGHYAFNLLNFLHEQGYKVYTYNPLLINEFAKSLSLRKTKTDKKDAHGIALKLLSDPNREQFQHDNRQVELKILARHIHRLKKNSLIGKYNTLVVLISSFLSWIKSLESIQNIPTNLLTRYPNPQKRLEARFDKLIEIKRLTASKIQDILSIAPRSIGTTSPAREFEIIEIIKHYKRLIDKAETCVNDLMAEFNSVITTVTGIGGRLGAVILAEIRNIHAFDNPAQLQAFAGLDSSIYQSGQIDLAGRMIKRGSPHLRWALIQAAKACARFSPAFKAYLKTKLE

SEQ ID NO: 110559 - protein, 354 aa, unidentified
MLDTETGEVVNLTLMHEGNNVREFYSKLPRPVLVGIEATGSMHWFLNLMEELGIECRVGHPAQIRAAEPRKQKHDRRDADLILKLLAQNRFPAIWLPSKELLDLRALLLHRHQWVRMRVRMQNALQAIALANGLRRGPALWSYDGQAKIAFLPLLPHAAYRRSALQAMYKNMQSEIENLTRRVAEQAGNRCGARLLMTHPGVGPVTALATEVFLGDPQRFTDSKRLASYVGIIPREYSSGEHQRLGGVTKQGSPLLRFLWGEAGAHAARRDPELKRFYRRKLVQKGLGKARVAVARKLGIRLWIMLRDEIDYQEFCRRGQIQQKTVRPVVGMPETGNGAKSHRPSDEATRLPES

SEQ ID NO: 110560 - protein, 320 aa, unidentified
MRNTVGLDISKLTFDATAIVGNAEYSAKFDNDSKGLDQFSDRLKSLGCQNLHICMEATGNYYEEVADYFAQYYSVYVVNPLKISKYAESRFKRTKTGKQDAKLIAQYCRSAQESELVKRQKPTDEQYRLSRMIAAYAQIKSECAAMKNRHHAAKDEEAAKAYAQIIKAMNEQLEVLKEKIKEQTEKPNCKEGVKRLETIPAIGRMTAAVLFHHLTSSKFETSNKFAAFAGLSPQQKESGTSVRGKGKLTKFGNRKLRAVLFMPAMVAYRIRAFPDFIKRLEEKKKPKKVIIAALMRKLAVIAYHVHKKGGDYDPSRYKSA

SEQ ID NO: 110561 - protein, 412 aa, unidentified
MDVVHEACAGLDVHKRTVVACVLRSGPGGTVVQKVETFGTMTRDLEALAAWLAAEGCTDVAMEATGAYWKPVSNVLEASEGFTLLVANAEHLRAVPGRKTDVKDAAWLAELLRHGLLRASCIPDRQQRERRELTRYRTALIRERAAEVNRLQQTLEAANIKLAAVLTDVTGVSGQRILAALTEGKTDPEQLADLAHWRLQKKRDALEQAVVGKLEGALRFVVQRQLEHLRDLDRLIEQCDAEVAERLRPFAAELARLRTIPGLGPRTAEVILAEVGPDLARFATAGHLAAWAGMCPGNRASGGKRYPARARKGSPWLRAALAEAAWAASHCKQGYLPAQFRRLAARRGKKRAIVAVGHSILVIVYHLLTRGTTFEDLGGLYFDERHPDRVRAAAVRRIEALGYQVQLTPKAS

SEQ ID NO: 110562 - protein, 299 aa, unidentified
MNYVGIDIHKRYSVLAAQDENGHKLKEARIEGNSAQGYARFFQSLEGPSRAVLEACWNWGLTHDLLEEIEEVEEVVLAHPLKTRLIADAQIKTDRLDALALGTLLRGNLVAQAHIPRRETRARKNLLRQRLYWARLRTMLRNRIHALLDRQRDLELPQCSDIFGVRGLGFLRRLELAEPDHTLLREALALHDLIAEQMKAQEKRIALAFKTESTYRHLLSVPGIGPTLAAVIGCEIDQIERFRSADKLCGYAGVVPTTHSSGGKVHHGRLLPSCNKWLRWALVEASWVAIGCSPYFGAL

SEQ ID NO: 110563 - protein, 355 aa, unidentified
MAADEIAVIGGIDTHTDTHQAAVIDTVGRHLATEPFSTSPAGYQQLLDWLRSHGEVLAVGVEGTGAYGAELARFLSSNGITVVEVDRPDRKARRDNGKSDPVDAYAAATAVLSGRAKGTPKSRNGIAEAIRALRVARSSAIKARTQTINQIRTLIVTAPAEVREQFRGLPTAELIDHLARSRPAGDLADPACAVRTALRRLARRHRALSEEIAAADAELKPLVTRAAPQLVALPGVGPESAGQLLITAGDNPERLRSEASFAHLCAAAPIPASSGRTKRYRLNRGGDRQANRALHTIVIVRMRHDRRTQEYVARRTAEGMSKKDIIRCLKRFVAREVYKHLPHPDITAAQLQQAA

SEQ ID NO: 110564 - protein, 443 aa, unidentified
MSNRRPLTRGDRRRNEKLTRLRSIIRPDLAIVGIDLASAKQAAVVADHDSLTLGRRMFDGDPWVIDEILEWALPIALDAGFSGVVVGCEPTGHRWKPVLERCRARGVEVVCVNPMLVHRGREEEDFTRDRSDFKDSTIIARRVADRHCYVPYALEGDWCRLRHLGARRNDQLVEAGSARQQLRDLLECVWPAALAAAADPLDAMTWRAAMAVSCDPAEIVAMGWDRFADAVRVELSRWGGQRRCLRILRAIWAAAHEPGGVERERAAGSERARDAIRDWRRALDELADVEARMLQVLDALELTELVETIDGLSAVGAAAILAEAGDPARFDCARTWVKHAGLCPRANESGTFAGTTKVSGRGRPALRTAAWRAVWGALPNNAVYAARYQHLRTRLDNPLKDGQARAAIAAALLRQLFVVITRRVAWNPVIAAGGAQEVVTPAA

SEQ ID NO: 110565 - protein, 320 aa, unidentified
MKHKVGKDNTVARFIGIDVSKQWLDVATLPERETRRFSNDGAGQEQLGAWLVELAPELIVMEATGGLETRVATVLAAEGLALAVVNPRHVRDFARAFGILAKTDRIDASVLAAFAEKVHPPVRPLPDEDRRELIDLVDRRRQLVTMRAEEKTRLSQATASARQDIKEHIEWLDERLRRLDIDLTAKLRSSSLWKAKEEILISVPGVGRVTVLTLLARLPELGALNRRAIAALTGVAPFARDSGQHRGRRMIWGGRADVRSVLYMAAVSAARINPVIKSFYLRLKQAGKPAKVALTACMRKLLTILNTMLRNNQSWHAPTT

SEQ ID NO: 110566 - protein, 375 aa, unidentified
MKEKVRFLGLDVHAETIVVAVAEADGEVRSLGTIANRGESIRKLVGKLCAPEHLRACYEAGPTGYVLYWQLAELGVACEVIAPTLAPVKAGDRVKTDRRDAERLARSHRAGDLTAVWVPEEGSEALRDLVRAREAAKQDQLRARHRLSKLLLRTGQRPAVGVKAWTLPYMAWVRQLRFPQAGREATRLDYLHEVEHMGERVKRLEQAIAEAVKVASPALREVIQGLQALRGVAQISAVTMAAELGNISRFQSARQLMGYSGTVPSEDSSGQRTRRGGITKTGNAHLRRIAVEAAWSYRLRPGVGPALRKRQQGVPEEIKEMAWKAQHRLHKRYMRLAAAGKDQRKIVTAVGRELLGFIWAIGVRAEAASKQKMAA

SEQ ID NO: 110567 - protein, 400 aa, unidentified
MNEYDETGVFLGLDVGKSAHHGHGLTPAGKKVFDKQLPNTEPKLRQVFDKLREKFGTVLVVVDQPASIGALPLTVARDTGCQVAYLPGLSMRRIADLYPGEAKTDARDAAVIADAARTMPHTLRSLQLTDEITAELTVLVGFDQDLAAEATRTSNRIRGLLTQFHPSLERVLGPRLDHQAVTWLLERYGSPAALRKAGRRRLVEVIRPKAPRMAKRLIDDVFEALDEQTVVVPGTGTLDVVIPSLTRSLGAVHEQRRAAEAQITALLEDHPLSKVLTSLPGVGVRTAAALLVTVGDGTSFPTAAHLASYAGLAPTTKSSGTSIHGEHAPRGGNRQLKRAMFLSAFAALHDPASRTYYDKCRARGKTHTQALLRLARQRINVLFAMLRDGTFYEPRTPRLA

SEQ ID NO: 110568 - protein, 386 aa, unidentified
MQTVAYRHEAPNAIRNDLGAIFVSLELSRSTWLITSLSPDGGEKMSKHSLPAGDIYALLARFSEFKQKAFARTGKSFPIIVIQEAGLDGFWIHRVLQNEGIESHVVDPASIATSRRRRRAKTDRIDGEALLRTLLAYKRGEPRVCAMVKAPTPEEEDRRRLCRERKILIAERIKHVNRIKGLLFCQGVSGYKPLGRDRRQRLDELRTGDGGLLPKHLKAQIGRELARLEQLLEQIMAVEAERDALFAAAPAPGPPAMLLNIKGIGPEFAAILWSEGLFRHFDNRRQVASYAGLAPTPWQSGSVDREQGVSKAGNPRLRTTLIQLAWLWLRNQPQSALALWFKDRVSRNGGRLKKTTIVALARKLLVALWRYVTAGVIIEGATMVSA

SEQ ID NO: 110569 - protein, 396 aa, unidentified
MLVACVLKQGKKEVRTFSTMTEDLLHLLDWLSQEGCTHVAIESTGVYWRPVFNILEGTLDVILTNAREAKGDKARKTDVIDAEWLADLLRHGLLKPSFIPPLPIRELRDLTRYRESLVRAQTALANRVQKLIESANIKLGQVASDALGVSGKAMLRALAAGETDAEQMSHLARRTLKRKQPQLQQALEGRFTQAQRWILGQLLDQYDHVAAALRRAEERIRQEVDSSADPFVPEAVPLLDTIPGVGETVAQIIIAESGVDMGRFPTANHLASWAGMCPGNNESAGKRKSGKTPNGSRYLRAALVQAAWAASHQKETYLAVQYKRLVKRMGKKKALVAVGHSILVLAYHVLQNRTKYQDLGGNYFARRNVDKQRKRLIRQLESLGVKVTVEEVKEAA

SEQ ID NO: 110570 - protein, 345 aa, unidentified
MNTTQIAVDLAKSVFQVSVSHAPGRVDEQHRLSRRRFRTFFLHHPPAHVLMEACGSAHHWGRELRALGHQVSLLPPAHVARYRQGNKTDRADAKALLEAARNEDIIPVPVKSLDQQAINALHRMRSGYVATRTARINAVRGLLREFGHVLPQRSRSFLTHVHQALEDDHLPTYLQEALSQALLEINELQAKADHLKGQLERLASLIPSVRFLMTVPGIGILSATALVGTVGDVRRFPCGRAFAAYLGLTPRESSTGASRRLGPISKRGDRYLRMLLIHGARSALLSAHRAPEPDTLQAWALRTAETRGHNIATVALANRMARIAWRVWRDQRPFQRRLPQPEEAA

SEQ ID NO: 110571 - protein, 392 aa, unidentified
MIFVGIDIASDKHDCCILSTDGGVLSTFTFPNNRRGFDFFFATVVEHCNEHCLSDVKVGLESTGHYGTNLTNFLLAKHLSVKIYNPLQVNMLRKAQSLRKTKTDKSDARFLAQLLFSDDSKPYSQPLYYISELKTLTRTRFRLVEMRSRLKVSVHRLVAVLFPELPSAVWSVNQKSSYALLLEFPTAKSIAEAHLTKLTNVLLSNSHGRYGRDKAVKIRELAMQSIGLDSRAMGFELKQTIRLIQNLQAEIDEIEAEIKTVMLEIDSPVLTIPGVGFNLGAIILAEIGNIDNFDTPAKLLKFAGMEPSVYESGKYKATDTPMVKRGSKYLRWALMQAARLVAYRDATFGAYMVKKRSEGKHFFVAKSHVAKKLVRVIFHLLKSGESFLPQMA

SEQ ID NO: 110572 - protein, 338 aa, unidentified
MSMVTIGIDLAKNVFAVHGVDATGQPALVRPNVPRTKLLELIAALPPCVIGMEACSGAHHWAREFQKFGHTVRLMAPKFVVPYRLSGKRGKNDAADDAAICEAVTRPNMRFVPIKSIEQQGQLLVHRARQGFVEQRTATLNRIRGLLSELGIVLPLKAAVVRREAMLHLEDLPSWVNTVIGDLLSEVARLDERIAQYDRHIEAMAREHDSVQRLMQLPGIGPTTATALLSTIGNGRDFRCGRQLSAWLGLVPGQYSSGGKQRLGRITKAGDPYLRSLLVMGARAVRAAAKNKTDPVSRCAISLAERRGYWRAVVAIAAKNARMCWAVLNKGEGFRLAA

SEQ ID NO: 110573 - protein, 473 aa, unidentified
MRPRSAIGIDPDAKGIRCSLVGIEGDKPKMKGFLVTQKGLEGFIRWVKQKGDIIIAIEGSNGQSKPTEQALRAEGLVFYSFKPSDVAKFRKAVLGQNKNNDIDAESVARYAMALEAQGKLNGNKRVWFPDTELQGLTRSHEQKTNQLTAEVNRLWKLLRTVSPDLYLALGGVNPDIEINGNMLQNQGILTLLAEKPDIVEWKTFSVMDFQEAMGGRLYTGRQKLIQELQKVAKTFRPIPSSLSLMIEDSVTQILLLKKQLKRIHDMLEQITQDNKAISILRGYNGIATLTASTLIAEIVNIRRFVSNDGLACYAGLGMIDNSTGERSNMVHSSLFNHRLKDALMTAAKNFVHFNPGSHLAGYYRNLVKDGMSVTESRKRVARALVRVFFRVLYSIDEKTNTGNTECADAEREIKRENDMANGQVRSDKNHESNISLSPLKNHVTICDDKVNNRFDRRERKEPGKKLNKSAKSA

SEQ ID NO: 110574 - protein, 381 aa, unidentified
MQTKLYVGLDLHSNNTYVGVLDSKERRVLKGKFPNKLEVLLAVLEPHKERIVGVVVESTFNWYWLVDGLMDNGYKVHLAHPAAFKQYSGLKYTNDEHDAFFLAKMLKLGILPEGHIMPREERQLRDLLRKRLKLVRQSSTHILSFKSLVSRNLGISMPSNEIKKLEDDEVNDMFENEHLALSAKVNIAAMNNLKWQIYEIRNSLLKAVKIKPQFEKLLTVSGIGNILAMTIALETGDIKRFPSVGDFASYCRCVASKRLSNNKSKGENNRKNGNKYLSYAFVEAAQKARRYCPPAQSFFMRKTIKTNKIVATKALAHKLARACYYIMHDQVDFDITKIFGKPFKVDKGCAREPKRGLGYQPSAPIGMSGAATKQDDHIFVK

SEQ ID NO: 110575 - protein, 345 aa, unidentified
MQDIEKLIVGIDVSKEYLDVAYWQQNENKAIFLGKYQNNQEGFQTIAQEIEKRKNCVSVFLVMEPTGGYEQPMAYFAYNLGWQVSLPNPKQVKDWIRGTGRRAKTDKIDALMLAGYGIAQSPLTWKPLPEDVAQLESMLSRLQVLKDMLAGEKNQWESLQYRVVSHSVVSQNLQENMASLESQIKVLEKAIREHYKNHSHLEKQRKELKTVNGVGNQLADVMVVAMNRFNTLTESRGTSKAITAYYGLDPKPYESGSSVYKRPGISRQGNTDIRHFLYMGALGGVGGRNGKNNNTPLRSFYRTLVSRGKPKKVALVAAARKILVWCWAVFRQGKPFDPTRFGYSH

SEQ ID NO: 110576 - protein, 324 aa, unidentified
MAKRTTICAGIDTGKRKLDVAIDGSSLLLQVENTAEGHKVLLEWLRRHKVKRIGIEASGGYELPVVIELRRKRFVVVVFQPAQVRAYAKFHLQLAKNDKIDAALIAACTAAVKKIHAAPDPRLQPFAEHLTLIEQIGEDIKLYKNRIETCRDPRIQRLWKEEISRLAKRERVELKALVAAIRQHPDLAQRLDLIHSVSGAGMPTAVAILVRMPEIGKLSREQAAALAGLAPYDDDSGERSGARHIDGGRKRLRRALYTAALPASFRWNPHLIALYQRLRAAGKGHKSALIACARKLLIFVNTVVARGTPWQNEQPVRATNPAAA

SEQ ID NO: 110577 - protein, 418 aa, unidentified
MNKHNNSGKKSEPTTKRAKPRDPMRRDTKEVLAELVGKLKDKLDPKKPAATSVGEKPKRGELRPNLDRLTVGVDLGDRWSNYCILDLEGETLAEGQLRTTQEDLAEFFQALNAARVVFEVGTHSPWVQEVIGGCGHEVLVANPRMMDGSKRRKRKNDRIDANKLARLGRVDPESLHPIQHRSREVRQDLVVLRARDALVAARTELINATRGLVKSMGTRLPNCSSPSFAEKVEGTVPAELRDALLPLVRMAAALSDCIRKYDKKIEKLGQEKYGHTALLRQVKGVGPITALTYVLTLENPDRFVKSRDVGPYLGLVPKQEDSGEMQPQLGISKTGDTMVRKLLVSAGQYILGPFGPDTDLRRYGLRLCERGGKNAKKRAAVAVARKLAVLLHRLWVSGEVYEPLRQGMSATTAPALAA

SEQ ID NO: 110578 - protein, 388 aa, unidentified
MNNVGIDISKYKHDCFIVTDFGEVLNEGFSFENNAKGFSMLLDELLKSDKENLRIGFESTGNYSINLKLFLEKNGYSFMEINPVLVKEHIKSQSLRRTTTDKLSAMAIANYLISKEYLPHLKSFYHTFSLKQLTRLRSDLVHQRSRYLVQLTNVLDCVFPEFKPFFDGKFSATALFILTNYPSPEKIANMNVKSFDILRRKSRGKFSMDKFVMLKHLAKNTVGMYTDFYGIQMDALLDIYYQIDCKLSEVDAEITKIITEINPPTLSIKGVGEVSAAVIVSEFGDFSRFPNPGKMLAFAGLEPGYFQSGIAEHNGRMVKHGSAHLRCAILNCCRALRLHNEVFAAYYLKKIGEGKEHGVAVSHMAKKLIRLIFTLETKGERFDPAKLR

SEQ ID NO: 110579 - protein, 311 aa, unidentified
MDSEAYVGVDVSKDRLDVKVLPNDDAHQLTNDDAGISRLIKLLKKVAPKLIVFESTGGLEMPAISGLIEHQLPVVVINPRQIRDFAKATGRLAKTDAIDAEIIARFARDVRPELRPVKDEDTQLLSALNARRRQIVDMLVAEKNRLHTAHKKNQKSIYKHIQWLEKSLANINDDIDKAIKKSPSWRENDKILQSFKGVGPVVSATLLCDLPELGTLDRKKIATLVGVAPLNCDSGRYRGTRRIKGGRANVRRKLYMAAVSAASHNPTIKDFYNRLIKAGKPPKLALTACMRKILTILNAMMKNQSYWIARS

SEQ ID NO: 110580 - protein, 408 aa, unidentified
MHSDFQYFAGIDWGSEKHRVCLMDGEGRTIDERWVSHSGSSLAELVDWLRQQTLESPVTLAAAIEIPRGAIVETLLEHGFAVFSINPKQLDRFRDRYSPAGAKDDRRDAFVLADALRTDMHCFRAVRLDEPAMIRLRELSRLEDELGQEQTRAVNRLREQFHRFFPQLLELCECADEPWLWALFEAAPTPQRAARLTEAKVARILREHRIRRLDAAQVRATLKSRPLTLAPGAAEAAAEHALLLLPRLRLLHRQHTDLARRIGAILEELASAAGGQSEHRDAAILLSLPGLGRKVAATMLSEASQAIAERDYHALRCYSGAAPITHQSGKKKIVLMRRGCNERLRNALYHWSRTSVVWDPPSKKTYAQLRACGHSHGRALRGMADRWLKVLISMLRHGTLYDLQRRAA

SEQ ID NO: 110581 - protein, 382 aa, unidentified
MKEAITGVRRFVAMDVHADSIAAAIAEKDQAARDLGAIPNREESVRRLVKKLNEGGAWTACYEAGPTGYTLYWQLTRLGIPCMVIAPTLVPIKAGDRVKTDRRDARRLACSFRAGELTAVWVPDAPHEALRDLVRAREAGKQDQLRARHRLGKYLLRHGKRPPKEMRAWTESYLQWIKTKVCFDQRCQQVTLEDYLNEVDHAGARIARLEKAIDEAVEQAPETMRELIRALQALRGVAKVGAVTVVAEVGTLSRFEHPRQLMGYSGVVSREHSSGGKIRRGGITKTGNAHLRRIIVEAAWSQRYKPVLSPAMRKRQESVSAEVQELASKARHRLHQRYMHLLGRGKNKQEVVTAVAREMLGFIWAIGVSVERAQVLKGKGAT

SEQ ID NO: 110582 - protein, 338 aa, unidentified
MYIIGVDPHRGSHVAVVLDEREQIHDELAVTANRLQRQRLLDWASRYQPRLWAIEGAAGTGALLAQQLVAAGEQVIDVPPALAARVRLLDNEHRSKTDRHDARSVAVAAQRKRGLRHVAVEDQAAVLRLLAKRHHDLVAGRTRAVCRLHSILCYLAEGHFPKRLRADQAAAILSRIHPTSEVARQRKRLAREHLAEVRRFDTALAELEQRIRSAVAASGSSVTAVHGVGPIMAAYLIGYTGDIGRFPSAGHYARYNGTAPIDASSGSHIRHRLNPDGNRQLNHALYVAALGQISHNTAGREYYLRKQAEGHSRKEALRALKRRISDAVYRQLQADTRR

SEQ ID NO: 110583 - protein, 340 aa, unidentified
MEGLYAGSDLHGNSNFLGIIDAQGKRVFKKKLPNEIVLIRQALQPFQGELVGVAVESTYNWYWLVDGLMEEGYKVHLANPSAIQQYTGLKHADDKHDAFWLAEMLRLGILPEGYIYPKEERPVRDLLRKRGHLVRLRTSLVVSLQNILSRNLGRKLRVSDIKSLREDRITSFLGMSEDIALAGRVSKEVIDQLTRQVYRIEWVVQKRIALKEAYRYLLTLPGVGKILALTIMLETGPISRFETVGDYVSYCRKVPSQWMSNGKWKGSGNRKNGNKYLSWAYAEASEFARRLYPEPRAYYDRKMQKTNAAVAHSALSNKLARAGYYVIRDQVPFRPEKLFG

SEQ ID NO: 110584 - protein, 379 aa, unidentified
MTKIIRIGVDTSKSVFQLHGVDAAEKPVLRKTLRRKQFLALFAKMEPTKIGLEACGAAHYWARELGALGHQVVLLPPQYVKAYVKRGKHDAADAEAICEAMSRPSMRFVPVKTAEQQAALMLAGTRDQLVRRRTQLTNAIRGYAAEFGLVAAKGIDKIEPLLARIAADATVPAVAKELFAVHGREHARLKRQLQEIEAKLMAWHKDNELSRRLVKIPGIGPIGASLLAMKVPDPQAFRSGRDFSAWMGLTPKNHSTAGKSRLGVITRAGDEALRRALVVGATSVLKQARQSKGHCSPWLAELLRRKPPKLAAVALANKTGRIVWKLMVSGEHYNPARGGAIAAPVAREGRVAALHRGFAPRPSLRSCTKPREAAVAAKG

SEQ ID NO: 110585 - protein, 366 aa, unidentified
MEKGTTFVALDDSKRKVVVAILRPGANAVEQRELPKEPHLIRRRFQRLARAGQVGACSEAGVSGYDLYRQIVACGVECAVIAPTLTPRRPGQRIKTDRRDAAKLVRLFRAGELTPIHVPNEAEEAVRDLVRCREDVRRDVLRWRHRLLKFLDRHGRLYVTGKNWSQRHWRWIRAQHFDLPVLERTFEATLFALEQALARRAALDREVAALAESEPYRTPVGWLRCFRGIDTLSAMILIAEIVDFQRFGHPRELMAYLGLVPSEYSSGDTQRRGAITKTGNTHARRALVEAAWHYRHRPSVAGALRHRIAGQPPGVVSQAWRAQQRLHRRYRHLVGHGKRPPIAVVAVARELVGFLWAAMTQPAVAA

SEQ ID NO: 110586 - protein, 384 aa, unidentified
MKESITLYVGLDVHKESIDVATADSGRDGEVRHVCSIGGDLVGLDKALRRLISKGHRLHVVYEAGPCGFVIWRHLSARGIDCEVVAPSSIPKRSGDRVKTDRRDAMMLARLSRSGDLTAVRVPDAADEAVRDLARSREDAVRECRNARHRLKALLLRSGIAYAGKSAWTAAHLRWLSTLKMEHAAQQIALQEYLHAVTEATTRIGRLEQAMRDTLPGWGLAPVVQALQAMRGVQLVAAMTLVAELQDFLRFDNPRQLMAYVGLVPGEHSSGPKRRQGSITKAGNSAARRMLVEVAWHYQHNPRVSPIIAKRHDQLPKEVTDIAWKAQLRLNAKFKRLVARRVMKNKAVVAVARELTGFVWAIGREVQTSGWQGIKIEPAGVAAD

SEQ ID NO: 110587 - protein, 353 aa, unidentified
MRIVVALDVHRRQITYKTLDRESGEVRRGRIVPATRGAVREWLEQFAGCEVEFALEGTTGWRFVVEEIERAGQRAHLADPAETAGKRGRKRRAKTDNADCDLQLKLLLAGELPESWIPPAHLLELRTRVRMRKVLIDQRTAWQQRLQAQLFHQGVAAGLKPRTRAGREALAQAELSPAGRELVALALRMLETIDRELAPLDRALRAFARRQPGCRALIANLYGVGAITATAILAELGDCRRFTSSDDAVRHSGLDVTVHQSDSKRAAGHLSHQGPELLRWALFEAAHQSARRSSPDHDYYLQVAGRIDHNRACLSVARKLCRRAHHILRELGDQALAPVESEPQAEEAIQAAA

SEQ ID NO: 110588 - protein, 355 aa, unidentified
MTSTKYIGMDVHKESISIAVRNFAGKVVMECVIETKASMILQFIDGLRGDLQVTFEEGTSAAWLYDLLKPHVTKLVVCDPRKNKSMREGNQSDKIDAHGLAELLRLDHLTPVYHGEHGLRTLKELVRSYLTITKDLARVMSRVKAIYRSWAIPCTGKQVYARCHRAEWLGKINEPGVRRRAEFYYQQLDALRVLRQETRRDLLAESKKQKAWKRLCEIPSIGPIRAAVLLGILQTPHRFRTKRQLWAYGGLAIETHSSADHRRVDGQLQRSRKNVLIRGLNRNCNHDLKNLFKGAAVIASSKPGPFEGFYAALVAKGMRAEMARLTWARKIATIVLIVWKKGVSFDAQHLKPQTA

SEQ ID NO: 110589 - protein, 351 aa, unidentified
MEHTTIAVDLAKSVFQVAVSHRAGRVDAERRLSRDRFLAYFAQQPPATVLLEACGSSHHWARQLEQFGHVVRLLPAHDVHRYVRRNKTDRTDAKALLEAARNEEIHPVPVKTVEHQAITSLHRLRSTWVATRTARLNTLRGLLREFGIFIPVGAQHVVPRVRELLGDPTGALPVAVRSTLANACAEIDVLETNRRDVERQLAAIARQLPDVALLQTVPGVGLMTATALIAFVGDIGRFGSGRHFASFLGLTPKEDASASRRRLGAISKQGDVYLRMLLIHGARSVLWHAKSCAHPSGFQTWARCIEQRRGHNVAAVAVANKLARIVWAVWTQQRPFAANHRHAETTSVSSN

SEQ ID NO: 110590 - protein, 460 aa, unidentified
MTAVMIGVDPHKGSHTAVAIDRTEEHLGELRVRASAAQAERLVAWAAPWPERTWAVEGAGGLGYLLAQQLVAAGELVLDVQPKLGARVRLLATGASNKNDPNDARSVAIAALRSAAPREVTAENHAAVLKLWSKRHRDLGRTRTQVACRLHAVLCELIPGGISKEITAGKAARVLESTEPSGAVALARCELAAAFLDDLRRIDAQMRDTKMKLAVAVRASGTTVTEIFGVGPVIAATRIGYVADVSRCPSRDRFAAYNGTAPIEVSSGNRKTCRLSRRGNRRLSHAVHMAAVTQIRYRHTDGRAYYDRKLAEGKTPKEALHCLKRRVSDAIYARLQADARRAAAFARTRGPGGQPGERLCRQRGRLTPRKPALRRSHSRARDHPTTPGRTLTNSSGTSSEEKPERLLTQRGFVMGHQRLLGAGQRSRSDQSICRADQSVPETHALVPGGLGCAQAGTKKP

SEQ ID NO: 110591 - protein, 387 aa, unidentified
MIYVGIDIAKQTHYASIMNSDGEILVKPFNFSNDHNGFQKLLKHLDSYSKEELYIGMESTAHYAENLTSFLFTRGFQVCIINPIQTASLRKSNIRKTKTDSVDTYLIIKALMLNHYHLYSERDYNSLQLKNLCRFRQKLMKARTKVKIQLVTYVDLLFPELQYFFKSGIHGKACYALLKEQPNPDRIAKMHLTRLTNLLSKSSHGHFKQSTAVHLKELASQSVGIKNDTLSLQILQSIKQIEMYTEQLAEIEQSIHEIMDKMDSVIKTIPGVGAINGAMIIGEIGDISRFDKPCQLLAYAGLDPSVYQSGNFNAARTRMSKRGSKLLRYALINAAWQTTLVNKTFKDYYDLKISQGRRHYNALGHVAHKLVRVIHKMMRDNVEFNLP

SEQ ID NO: 110592 - protein, 362 aa, unidentified
MSVEERTHVGLDVHAHAVVGAALDAETGELVRRRLGSSPAEVLAWIRSLPGPVAAAYEAGPTGFTLARTLRAAGVRCEVLAPSKLQRPVGERVKTDARDALHIAKLLKLDEIVTITIPSKSQETARDLVRAHEDARRDLMSARHRLGKLLLRHGLTYPSMKAWTTRHHDWLRQQRFELPGLQAAFDSAHEAVVAVQDRRDRLDEAILAMAAESEFTNVVHRLACLRGISTLTAFGLAVEIGDWTRLDGRRIGSYLGPVPTENSSGQSRSQGGLTRTGNAHARRLLIEAAWHHRPRYTPTSPTLRERWALASPTARERAHQGNLRLHRRWRAFELRGKRKVVANAAVARELAGWCWSLAVMES

SEQ ID NO: 110593 - protein, 347 aa, unidentified
MEHPTRIFIDTSKSVFQLHGVDAGERVVVRRRLQRSQVLAYFAKLEPTVVGLEACGGSHHWARALERLGHEVRLAPAQYVKAYLKRNKNDGRDAEAGCEAMSRPTMRFVPVKSAERQAGQMLAQVRQRLVRDRTRLSNEIRGYAAEFGLVSARGLDKLAPLLARIAADAGVPELARSLFAEMGEALTALEDQIERIERRLLAWHRQDEVSRRLAAIPGVGPIGAVMLTVKTVEPGLFRSGRDFAAWIGLTPKDHSTAGKQRLGVITRAGDEDLRAVLVSGAMAVIQHARAGRSKPSPWLIELLRRKQPKPAAVALANKTARIAWKLMTSGQAYRAEPVGQGPASAAA

SEQ ID NO: 110594 - protein, 354 aa, unidentified
MEQRTTIGIDLAKEVFAICVLSPGGAVVESRTMRRAAFERWLVGLQGELVVAMEACSSAHHWGRRLAAAGHTVRLMAPAFVVPFRKSGKNDANDAEAIAIAARQPTMRFVAVKTVEQQSILSWHRAREGWIAERTALINRLRGLLAEFGFSIAQAAFRLRKALPALSTDAALPAPIRALLLEASEQLRCLDARVARCDEEIGAHGRDNETARRLRGMLGIGPLTSSALVATVPDAAAFRNSRQFGAWIGLVPRQHSSGGKPHLGELTRRGDKYLRSLLVQGARSALQVALRVAPDKATRLQRWILALYSRKGYHRTLVAVANKHARIIWALMARGEHFDHNAWQRHPLQRAAAA

SEQ ID NO: 110595 - protein, 411 aa, unidentified
MNPVVGLDISKGESQVQAFVDKGKPFRKSFKVSHTLEGLGLLVEFLNQVQKETGQKPPVILEATGHYQTPVVQYLDERGYLLIIINPLISYKAKSSSLRKVKTDAIDAYLLCELYYKEEFEPYKKRGIQLLNLRNLTRQHENITGVMIQTKLQFQAVLDQVFPEYRGVFGDLYSVVSLLLLQEFPSSEDILKASEETISNRIKELCKSRSNRWASEKALELKKAAARNPFEKTVYQSHILSLGMYINIILQYKEHLSRLESEIDALAKEIEEYNIIKSIPGIGEKIAATIISEIGEIDRFNHPKKLVAFAGVDPSVFESGKFRATQNRITKRGSSRLRHALYMAVRCAIRDCRKQKTTDEIIPRNKRMREYYDKKREEGKPFKVAVIACVNKLLHWIFALLKNKTTFQDIA

SEQ ID NO: 110596 - protein, 355 aa, unidentified
MSRDIKYIGMDVHKEATVIAVLNANGNLVMESIVETKAGSLLQFIHGLRGELHVTWEEGTWAAWLYDLLKPQAQVLVCDPRRNALLKEGNKSDKVDARKLADLLRTGMLRPVYHGEHGLRTLRELGRSYQTISQDLNRVMNRLKALYRGWGIACAGTQVYAPRYREEWLQKIEHAGVRRRAELLYQQLDGLQALRRTLRPELLAESRKHKATKLLRQIPCIGPIRAARLLALMQTPHRFRSKRQLWTYCGLGIETRDSAQYRFVRGQLQRAKKPQQIRGLNRNHNHEMKEIFKGAATRASCGVGPLRDFYVALLDKGMKAEMARLTLARKIAAIALTLWKKEERFDAEQLKTQAA

SEQ ID NO: 110597 - protein, 368 aa, unidentified
MVGKSSKLFVGMDVHKESIDIAVAEASGAVRHQGRIGGDLNALSRAVRKLEASGRTLLFVYEAGPCGFVIYRSLKARGHECWVVVASNTPRRGRDRIKTDRRDSVKLAGLARAGELTPIYVPDPADEAMRDLVRSREDAVAMQRQARHRLAALLLRHDIRYAGKTAWTEAHRRWIARLTLPSAAQRIAFEEYVQAVGEATERVQRLTQSIEQQLAQWRWRSVVSALQACRGIQLIHAVRIVAELGDLSRFTHPRQLMGYLGLIPSENSSGEHRHQGAITKAGNSSARRALVEAAWAYRNAAAVSPIIARRQTALPKAAIDIAWKAQLRLCARFRRLAARGVNRNKIVVAIARELAGFVWAIARQVKPV

SEQ ID NO: 110598 - protein, 422 aa, unidentified
MKAFNVSDFAALIGIDWADRKHDICEVDLHIHTQHLSVISSQPNAINAWANALKEKYNGQAVAVACELKKGPLIYALSKFEHIVLFTINPSTVAKYRKAFTHSGAKDDPTDAAIQVEILQLHMSKLNVITPDTEKVRRLTQLVEYRRKLVQDRVNLTNKITTTLKNYYPHVLDWFKEKDTQVFCDFILRWPSLKQVKRARKQTLIDFFNQHNSRYPSVNEKRIEEIKQAEALTTDNAIILPNLLLVECLTAQLKQLMIAIERFDVEIKTLYKNHKDKFIFDSLPGAGPQIAPRLLAAMGSNRERYQPSEEIQKYAGIAPVTERSGKKEWIHWRYSCTKFLRQTFVEWAGQSVRYSFWAKAYYEQQKSKGKPHNTIIRALAFKWIRILFRCWKTRTAYDETTYLAALKSKGSPLLKYAVEGKF

SEQ ID NO: 110599 - protein, 356 aa, unidentified
MTQETPSRSGHVVIGVDTHKHIHVAAVMDTIGGILATLTIATDTAGFKQLLAWAESFGKVISFGIEGTGSYGAGLTSFLRRQGHKGVEVSRPDRRLRRLNGKSDTLDAENAARAVLAGFATATPKTMDGAVEMIRQLKVAHDTAVKQKAATMVTLKAMLVHAPEQLRIETARKTQRTLARYCAAFRPRGLESPEDANRHALRSLAKRWLLLDEESKELTSMIEELVLQRAPHLLDEFGIGVDTAAEILIVAGDNPERIKSEAAFAKLAGISPIPAGSGITSGKHRINHGGHRQLNAAIYRTVIVRMRFHQPTIDYVARRTAEGKSKRDIIRCLKRYVIRELYHLVKVNPRTGEIVS

SEQ ID NO: 110600 - protein, 310 aa, unidentified
MDAIYVGIDVSKDRLDVHVHPSGEAFAVGRDGKGLEELIERLRTLSPTLTAVEATGGFETIVAAALAGAQLPLAVINPAQVRHFAQAVGKRAKTDPIDAAVIARFAEAVKPEPRPLPDQDARLLAELVARRRQIIETLVAERQREKRADSVRIRKSHARVIKTLEKELPEIDRDIGTLVRGSPAWREKEDLLVTFPGIKNILARTFLAELPELGRLTRREIASLAGVAPFTRKSGRWRGKSMIAGGRAPVRAGLYMAALSAIRFNRPIKAFYQRLLAAGKPKMVALVAVARKILTILNAMIRDRTPWQNA

SEQ ID NO: 110601 - protein, 329 aa, unidentified
MEVKKVIGIDVSKNTLDCCFLSQSGSHHIQISNNIKGFKVLEKWLIKTHGVQYNEALFCMEHTGLYNNPFLHFLSTKETGIWLESAIHIKRSMGLVRGKNDKVDAQRIAQYAIKNMEQMQQWQPKRPAVEKVKALLSLRDNMIMQIKQINAPLNELKTHGDKETVKLITQHSNGTRNALEQGLKKIETSIMTLIQEDESLKRLYAVLSSIIGVGKVTAWLFIVHTNEFKHFTNPRSLACHSGVAPFENSSGLWKGKAKVSHMANKRLKTALHMASMTAVKLDPELKSYYERKVEEGKNKMSVLNAVRNKLVHRIFACQKQDKLYIPKTA

SEQ ID NO: 110602 - protein, 312 aa, unidentified
MLPSVVYVGMDIAKATLDLHALSTPPQTRQFANSPAGHRRLVRWLRGLGAVHVVCEASGGYERPVVLALQQAPLAVSVVNPRQVRDFARAQGRLAKTDQLDAHVLAEFGQRLEPAATPALSVAQRQLAELVARRQQVQQLRSAEHNRLEHTTHPAVRRQLRCHLRALERQREQLDAWISELVQAEPSLAYKVARLCAVVGVGRITAVVLLATMPELGALNRGQAAALVGVAPFNRDSGPRRGHRLIGGGRAVARQALYMAALVAAFTNPRFQVFYQRLIAAGKAPKVALVAVMRKLIILLNQLLKNPQLQPT

SEQ ID NO: 110603 - protein, 414 aa, unidentified
MKLFCGIDWAESHHDVAVVDGDGLLVAKLRIDDSAEGFGKLLGLLAESGDTLDEPIPVAIETSRGLLVAALRGSGRNVYAINPMAVARYRDRHSMARKKSDHVDAMTLANILRTDAHAHRTLPADSDLARAITVLARAAQDAIWRRTKATQELRALLREYYPGFLDAFAGAGHTNLAMPDARAILAIAPTPALGARLSKARIISALRKGGRQRRLEDTAIRILDALRRPQLRQPLLVETALGRQASALLATLNIECVNADDLNEAATEAFRQHPDHRIVTSFPGLGEATGARVLAEIGDDRGRFADARGLKAFAGSAPVTRASGRSTCVVHRHVKNNRLAAVGFVWAFAAIPRPGPIKDHYDRRRTHGDRHAAALRNVFNRLLGQLYHCLQANQTYDESKAFPGSVHGAEPAAT

SEQ ID NO: 110604 - protein, 370 aa, unidentified
MKKDITYVALDDSKKSIVAGILHPKATEPELRQFPNEPKHLRRFVTRLQREGCAVHVCYEAGPSGYDLYRQLTALAVPCQVMAPALTPRKPGERIKTNRRDAAKLVRLFRAGELTPIRVPDEAQEAVRDLLRCREDVQEDLLRWRHRLLKFLARHGRVYREGRHWTQRHWTWLRGQRFTLPVLQRTCEEYRFAVEQLLARRAELDREIEALAQQAPYREPVGWLRCFRGIDTLGALVLLAEIGDFQRFPHPRELMAYLGLVPSETSTGEHVQRGSITKAGNTHARRILVEAGWHARHAPRLGRALARRSQGQPAAVLAQAWRAQQRLHRRYRQLIGHGKRAPVAVVAIARELVGFLWAALTRMAPAAQAA

SEQ ID NO: 110605 - protein, 332 aa, unidentified
MAQFTPCVGIDVSKARLDVAVFPDATSFAVDNTAAGWAELGRRCTELSVVTIGLEASGGFERGVADALQDRGFTVRLLNPFRVRSFAKALGKLAKNDSIDAEVIARFVATVPGRPLPRRSAARQKLSAVLTMRRQLTERLVMVRNQAQGLTDPLLCRLSKRHIAGLLADLRLIDRRLTEIVAGDAELAGRYALLCSVPGVGPVLAFTVLAELPELGSIDRWKIAALVGVVPYDFDSGTMKGKRCIWGGRTAVRNVLYMAALVASRCNPQLKVLRLRLAQAGKPAKVALVAVMRKLLTMLNAMLRDGREWQPASASDNPNLTTPSTSLGSIGA

SEQ ID NO: 110606 - protein, 411 aa, unidentified
MDAIRICCAGLDVHQETVVACVLKGPLEKKPQSFMRTFGTTTRELLELQDWLREQECREVVMESTGVFWKPVWNLLEGNCELVLANARRVKNMPGRKTDTQDAKWLAQLHRCGLIEASMVPDQEIRDLRDLTRYRTKMVQAVTSEKNRIHKILQDGNIKLTTFISDLYGVSGRALLQKIMNGEVLEEAEVRSLVKTTLKKKVPQLLDALNGKLRRHHREMISEHWEHLTYLEQKIARLEERIEACIGAYGEMIEQIDSIPGIERTSALTIFAEIGPHVAEMFPTDAQFASWAGLSPGNNESAGKRKKAKTKQGNKHLKTALCQAAWANSRSNNRIGQFFRRIRKRRGEKKANVATGHLLIRILHAMMREQTHYKEIDVPLGEGTSSKKTLDTYLTYIRQMGYNVMLQAITE

SEQ ID NO: 110607 - protein, 348 aa, unidentified
MNILAMDLGKYKTVFCEYNSVGGEHTFGTVKTTPQEIHDLIVRTEPDRVVMEVCSIAGWIVDITEALGRETEVANTIHEAWRWKNVKKKTDKDDALKLAKLSAMGQVPTVHMPGKDVREKRALLKHRQRLVKYRTSLKNAIRAIFARQGITITKGAATWSQEGLKWLENEARDFAGISDATELWRGQLHVELGLLKAVTDALTGVESKLNKMGASDKQIQRLQTINGVGPRLAEAVVAFLDDPKRFKSGKEVGSYMGLVPRSYQSGQMERQGRTGGRGNLMLRNLLIEVCWASLASNAWARDTYTRLLRGSSSRKKIAITALARKLVVRCWAMLRDEQNWREPIPTST

SEQ ID NO: 110608 - protein, 412 aa, unidentified
MNVYCGIDWAERHHDVALVDAAGTLLAKRRITDDAAGYRVLLELLAEHGDTPENPIPVAIETSHGLLVAALRTCNRHIYAVNPLSAARYRDRHGVSRKKSDPGDALVLANILRTDMHAHRPLSQDSDLARAITVLVRAQQDAVWSRQQLVNQVRSLLRTYFPAALDAFMGKQHGLARPEARAVLAAAPTPARAAKLSVTQLQAALRHASRTRGIEAEARRLREIFRGDYARQPQAVEDAMGHQLAALLVQLDAACRAADELAEAVEESFREHPDADILLSFPGLGVQLGARVLAEIGDDCDRFADARALKAYAGSAPITRASGKKKFVGRRHIKNDRLITAGFLWAFSALRSSPGADAHYRRRREAGDWHAQAQRHLFNRLLGQLYHCLQTRQLFDEHHAFTSLSAAPAAAA

SEQ ID NO: 110609 - protein, 413 aa, unidentified
MKKHSSFSEQRQSVNGAKSVRRDSREVMSELVAQLRKQVDAESVAVRKGDKEVPDGESPNLDRLTVGVDLGDQWSNFCILGLSGETLTEGQFRTRRQEVAEFFQGLARSRVVIEVGTHSAWVREVIAGLGHEVLVANARRMAGPKRRRRKNDRIDAARLARLGRVDPQSLYPIQHRSSEVREDLLLLRAREPFVESRTKLISAVRGLVKTMGARLSSYSSDAFPKKVIAEIPDELKKTLQPLLVLIAKLSEAIKSYDQRIEQLADEKYPHTQLLRQVKGVGPVTSLAYILTLESPLRFPRSRDVGPYVGLVPRQEDSGETQPQLNITKAGDRMLRKLLVGSAHYILGPFGPDTDLRRFGKKLCERGGKNAKKRATVAVARKLAVLLHRLWISGEVYEPLGHASFAPMTQTTAA

SEQ ID NO: 110610 - protein, 338 aa, unidentified
MKIATVGLDLAKNVFQMHGVDAAGRVVVRRRLRRSEVIKAFTGTPPCLVGMEACAGAHHWARLLTSLGHEVRLMPPAYVKAYVRRQKNDMADAAAICEAVTRPSMRFVPVKSEEQQALLLVHRARDLLVRQRTSLINALRAHLAEFGVVLPKGAPHGRRVASMVLDGETFGLPASAAPALQMLARQCQALSGQIAELERELRQRSLQDEVTRRLLQVPGVGPITATALSATVVDPTSFKSAREFAAWIGLVPRQHSSGGHERLGGITKMGHAYLRRLLISGAQAVLLQAARNLAARSPWLARLLREKPRKVVAVALANKTARIVWALLARNEAYRLAA

SEQ ID NO: 110611 - protein, 341 aa, unidentified
MGEITIIGLDIAKSVFQAHGADAAGAVVFRKKLSRGRLLAFFAAQPRCVVAMEACAGAHHWGRELTRMGHTVRLIPPAYVKPFVKRQKNDEADAEAICEAAQRPTMRFVPVKSREQQASGVVFRARDLLVRQRTQIINGLRAHLAEYGYVAPKGVCYVERLVAEIEDPASELPPAAVASLKVMARTLAVLDGEIVVLDREIARRAKEDPVARRLMTIPGIGPITAAALTALAPDPASFRCGRDFSAWLGLTPVQRSTGGKQKLGQITKAGERTLRRLLVIGASAVIKQALLRGAPQGSWLAQMLARKPRMLVAVALANKTGRIVWALLAKGGLYRAPGLAA

SEQ ID NO: 110612 - protein, 218 aa, unidentified
MARPEQVNVWAGLDVGKEDHFAEVLDDNGERIFARGVANDEAALEALLERAGQHGTVGLVIDQPGSIAQLTLAVAARRQVPVAYVPGLVMRRAADVCPGEAKTDKRDAFIIADGARLASYAGLVPVTRQSGKSINGESQSRRDNHQLKNAMFLAAFAALRDPASKAFYDRKRAEGKRHNAALICLARRRWDVILAMLRTCQPYQPARDARHTGLADAA

SEQ ID NO: 110613 - protein, 323 aa, unidentified
MEEGRIQTTVAALRKHFLGEARMRIALEAGTHSPWVSRLLKSYGHEVIVANPRKIPTLTGSESKNDRNDAEQLARMAAFDPKLLHPIEHRNLERQQDLNLIHTRSVLVRARTMLVNSARGLVKSAGGRLPGCSSEAFPEKVSAAVPRELKAACEPLLKQIAQMNRTLAAMDKQIEGLAKKYPEIAVLRTAPGVGPVVAACYVLTLDNPETMETNRQAGAYLGLRPRQQQSGDCDPQCGITKTGNSYLRSLLVQSAQYILGRFGPDSELRCWGLKLAACGGKRGKKRAIVAVARKLAVLLLSMWRNGKKFEPFPQSATQLAKAV

SEQ ID NO: 110614 - protein, 350 aa, unidentified
MLIIGCDYHPSFQQIAFVDSETGELGERRLVHCEEAEHFYGQLKQQGMKVRIGMEASGHARWFERLLRDLQLELWIGDAAEIRTKRVRKQKTDRQDAQLLLRLMLEDRFPRIWVPDAANRDLRQLLWHRHRLVQMRTRVMNQLHVVALNEGLRRKKALWRPAGRKELESFALAPWASRRRQDLLDLLDQLTPKIQQMTQALEEEVEKRPVTRRLMTHPGVGPVTALAFELVIGTPERFHCGKQIASYVGLVPEEKSSGDRRRLGHISKQGNVLLRFLLVEAAQVTVRSQPQWRSKFFHLAMRRGRKIAKVAMARKLAVHLYWMWRQGCDYGQLQKLGSHAGEPGNPDGEQ

SEQ ID NO: 110615 - protein, 342 aa, unidentified
MRIIGCDLHARQQTLAMLDTITGEMVERTLTHEGDNVREFYSALPLPVRVGIEATGSMQWFVSLMEELGIECQVGHPADIRAAEPRKQKHDRRDADLILKLLVENRFPAIWRPSKELQDLRALLRHRHQWVRIRTRLQNALQAIALANGLRRGPGLWSHDGQKTIASLPLAPHTAYRRSELQAMYVKFEAEIDKLNQRVEEQACERPGARLLMTHPGVGPVTALATEVFLGDPARFADSKDLASYVGMIPKEYSSGGRQRLGGLSKQGNPLLRFLWGEAGGARRTSGPGVEAFLPPQISPERSGEGERGRGSQTWDPAVDHVARSDRVQRVLSSWAEAAEKQ

SEQ ID NO: 110616 - protein, 397 aa, unidentified
MYIVGIDIAKRKHEAAVIDGDGAVIIKPFSFTNNCSGYNRLLAMLAKAKLPLDEVSFAMEATGHYWLALFTRLQKEGFRVQVINPVQTNSIRNFYIRQAKTDPRDALLIAEVIRFGHFSESTLHPENIYELRELCRGRHAIVSMQADVKRKVVALLDQVFPEYETAFTNMFGDTSMAILQTCPTPKELSEMPFEELCHLIEVSSHKRFRMAKAQELQALARNSFGFAMAGDVFSTMIRLYAKHLDFLKQQVREMDRKIAEIMETLDTPITTITGIGLTLGAYILSEIGDISRFSSAAKLAAYAGIDPTMRQSGEYNGVRNRMSKRGSPYLRHAIWLAASSAVLHDPALKLYFQKKRDEGKPYMASVGHACRKMVSIIYAVMRDNKAYTPCIPNEISV

SEQ ID NO: 110617 - protein, 349 aa, unidentified
MITIGIDPHKRTHTAVAVSDVGQLLSEITISADEAGQRELLVWARDLEGGESIRFALEDCRHVNGRLERFLLTADLPVLRVPPRLMAGARKSARTRGKSDAIDALAIARATLREEAELHPASHDEAARELKLLVDHRDALVAERTGLCSRLRWHLHDLEPGFEPTARSLDQASTRRSLSQRLARRPQSVQVRICRDLLGRIGDLTRRERQLASEIGERSQRYCPELLEVPGVARLTAGKLIGEIAGIGRFKSDSQLAHFAGCAPIPASSGKTERWRFDRHGNRQLNAAFYRIALTQARVHPGARAYLARKRAEGKSSAEALRCLKRLLVRVVWNALRSVSEPGLSLSQS

SEQ ID NO: 110618 - protein, 322 aa, unidentified
MKMAKPIIISAGIDTSKDKLDTAIHGRAGGLVVENTPAGWQQLAAWLQQSGVERIGIEATGGYERGVLRYLQQVGFNVVLLQPLQVKAFAQMRLRRAKSDKLDAALIADFTHMIDATNKMPPDGRFDGLGELLTYIEQIEEDIARFKTRLEHMRDERVRQNIKDQIRSFTKQRLAQMRRLRDQIFAHADLKRRYNLVLSIPAIGIRTALSLVVRMPELGLVSREQAASLAGVAPFVQQSGKYQGQMHIGGGRARLRRSLFMAAFTGAFHWNPALMALYQRLVARGKGHKCAIIACARKLLIYANTVLARGTPWEKNSQLAAA

SEQ ID NO: 110619 - protein, 323 aa, unidentified
MNKDIKYFGIDISHLVFDVTDSDGNYYQFKNNPSGFKKFVKLMEIDSHCVMEATGYYHYQLAYYLLESGVKVSVENPLAVKRFIQMKLSKIKTDKSDSRLICEYAKQVDMKLWQGNSKHQTECLQMTRLLSVYTKQSTMLKNKLHGEAVLGNPSKAVVSSLKRSLKQLQKEIKSLEDTLLILVKQTHQDLLTRLKSIPGIGPKTAIMLVVLTDGFERFTSGSELCSYAGLTPVIRKSGSSVNGRSRISKIGNQKLRNLLFMCSFNACKYNKACREIYERLVAKGKSKKLALIAVCNKLLKQAFAIAKSGLVYDQTYRSVLVTN

SEQ ID NO: 110620 - protein, 340 aa, unidentified
MSKVSVVSRARVFAGVDVSAKTLAVAVQREGKDGFEQREFANSKPGRRQLIAWLRKSRAQVRVALEATGTYSLDVALALDGAVGIEVAVLNPKTANRFAQTLGRSKTDQADAVALSEYSLRMRFAAWRRPSGSALELRQISRYIAALAQEHTRAHNRLHAAQASETTPRCVREDLKRSMADLKKRIAELRRKAVAMVRKDAELASKLEQLTSIPGIAETSAVQLLGELAGLDPEMTVRQWVAHSGLDPAHRQSGSSVHKPSRISRHGNRHLRRALYMPALVGVRFDPHMKAFYTLLQARHKTKLQALMAVARKLLHAIFGIFKTNTPYDGRKLFPELLPA

SEQ ID NO: 110621 - protein, 374 aa, unidentified
MTTEQKRQTLFIGVDVHKDTHTAVGVSSFGEKLFEITVGNYQKDFRLLAEKVETVSAKEMLSPYFGLEDCSGFGERLSNFLLDSGYSVVHVPPILVDERRKNETHPEKSDSLDALGVAKVMLQRSDTLLPYTVTEESRKAKQIKEISVDREFLVSERTRLKNQLHTLLHRIWNTEYRTKFKDPFSLKALRYWKGKTPKSADAFLIRSMKRKVGRLLDLHEEIAELESELEKLLLESGHTIQTASGCGVTLAAMIVGEVGDINRFHSPAALAKYAGCAPRECSSGKTKRFRKTRSGNRRLNCAFHRMALSQISRMGNPAAEKYFKRKVSEGKSKSQALVCLRRQMVNIVWMMMKHKTEFRLPAEVSAQAGYPQEN

SEQ ID NO: 110622 - protein, 422 aa, unidentified
MASMRDRRQALFTEKLWGATRVLSPSALRQSTELTMGKVDDLSRSLTALDQEETLICVVELSRSSWLIAGMVPGIERQPLKKLEPDAQGLMRVIERWRDEAIRAERMITRIVLAYEAGRDGFWLARWLRARGVEVHVIHSTSVAVSREHRRAKTDRLDTAMLMRVFLGWLRGERGHCSMVAVPTIDEEDAKRPGRERASLVDERTRIINRMKAALARLGIRDFKPDLRNAPARLESLKTPEEVMLPPNTLGEIRRDMARLDVIREQIKTIEQARLESIGRSPDEPAHAMVRLLARVIGVGIETADMLVREVLLRGFRDRRAVARYAGLTGAPDESGTKRREKGLAKSGNSRVRRGLIQLAWRFLLFQRNSALARWYVERTSGTKGARKTTMIVALARKLLIALWRLATTGLVPDGVVLRSAV

SEQ ID NO: 110623 - protein, 354 aa, unidentified
MKHQAIQYLALDVHQSTVVATLRDAEGDIVLRATVATNARAILALIRSAGARVHVAFEEGTQAQWLHDLITPHVERVVVCNTRGGEGHGNKSDRIDADRLSEQLRLGSLRSVFHGAKSVLTLKELVRNYSTLVEDSTRVMLRIKAMFRGRGILTPGVSVYRASHREEWLTQLERGARMRATSLLAQLDVLLELRPKAKTAMIAEARRQPGWKVLRSIPFLGPIRVALILAIVGTPFRFRTKRNLWPYVGLAVVTRSSADREFRGGKLRRRQKTPSTRGLNRNHNPLLKSVFKGAANAATGRPGPLRDFYEASRARGVRDELAKVTLARKIVSLTLRLWKKGELWDPKKLTMQAT

SEQ ID NO: 110624 - protein, 359 aa, unidentified
MRRNGKNIFKGQLTIGLDLGDRFSAYCVLDEAGEIILEQKLPTTPEAMKQTLGKMPRSRIAMETGTHSPWVSRLLAALGHEVIVAHAQNVRLIVKSRRKDDRLDARTLARLARIDPELLSPVRHRSAQAQLHLTEIRARAGLVSARTALVNAARGLVKSYGERLRKCGTQQFRRETMSGLSAGLREALEPLLQEVESLNERIQEYDQRIERMAKERYPETALLKQVKGVGDLIATTYVLTIEDPHRFRKSRDAGCFVGLQPGRRNSGESEPQMHISKEGDEYLRTLLVQGAHYILGPFGEDSDLRRWGQKLAERGGKNAKKRAVVAVARKLAVLLHRLWVSAEVYEPLHNSQKVMSAVA

SEQ ID NO: 110625 - protein, 399 aa, unidentified
MEHVIIGVDPHKLSATIEVVDEHEKLLGSGRFTTDQAGYTAMRTYAKTWPDRVWAVEGANGAGRPLAQRLLEDGERVVDVPAKLAARVRPFDTGHNRKTDALDAHSIAIVAVRTEGLRVLRVDGELEALRILTDRREALTRRRVQTVNRLQALLAELLPGQAKKDITPLQAKTMLAGVRPRDIAGKTRRRVAAEELAELIAVDAKIKKATAELKAMVVARGSRLMDLHGVGPVVAARILADVGDVHRLLDRNRFASWTGTAPLDASSGEQNSHRLSRAGNRRVNHMIHIAAVTQLRHDPTGQAYYRRKRSENKKPMEAVRCLKRRISDAIYRQLVADAQRGAGAGPGGHCGASQESSAVDLPPHIDTSDQPLPGPAKPTLQRAPRPRKTSPAKTPQMTS

SEQ ID NO: 110626 - protein, 387 aa, unidentified
MTQVDDLSRSFVAFDQNTSLTVVVEMSESSWLVAGMVPGVDRQPLKKLEPDPDALLRLLERWRAEAVKTGRTVERIVLAYEAGRDGFWLARWLQARGIEVSVIHSTSVAVSREHRRAKTDRLDTAMLMRVFVGWLRGERGHCGMVAIPTAEEEDAKRPSRERESLVGERTRITNRMKSALARLGIRGFKPQLRKAPERLAALRTPEGSAIPPNTLDEIRRDMARLAVVREQIKEIEQARLERLEQAPDEGPNAMVRLLARIIGVGVETADMLVREVLSRNLRDRRAVARYAGLTGSPDESGSKRREKGLAKAGNARVRRGLIQLAWRFLMFQKDSALACWYRARTKGPKGARKTTMIVALARKLLIALWRMVTTGVVPEGVVLRQGA

SEQ ID NO: 110627 - protein, 328 aa, unidentified
MENTLYVGIDIARHKFDAAFFTSTGKAKHDTFHNNAGGFAAFLQWCGTHSARLHLAMEATNVYHEELAQYLYEQGHTVSIVNPRCIHAYAKSQNLRSKTDKIDATLIARYAAKEVPPAWQPPREPLRVLLLTLRQLERLKTVEQQQRDLPGTVKEPGCVESIKRLHAFLQGEIKRMGKEVKAIIAADERMQHNAKLLHTIPGIGERTVPWLLACLHDGKRFANGKAAATCAGLTPMLHRSGTSDGKAHISKIGPSEIRKVLYMPAVVYSFGICRDGPYKSFADSMLANGKAKKSVITALMRKLLTIARAVLQYRCPFDLQRYEKATKK

SEQ ID NO: 110628 - protein, 293 aa, unidentified
MKKPGQHLIAEVPRGQAKVEMTIGIDLGDVRSHYCTLNQDGEVVDRGRFRTTPKAIEKWFTDVPPARVEMEAGTHSIWISEQLQELGHGVIVANVRELRAISHSDRKSDQVDAEKLARYARLDPNILRPIAHRTIAQQEALTLIRARALLVRLHTAAVNAVHGLTKSCGYRMPTSATTCFAQRSLAVMPPGLAQALGPVLQQIAEITVKIKQYDRQIQQLGQTEYPETQALLQVHGVGHLTALTFVLTLGSKTRFGRSRDVGCYLGLRPRRSQSGDHDPQLGITHAGNAYLRS

SEQ ID NO: 110629 - protein, 424 aa, unidentified
MNLTQNDRLNQVTADTLVVGVDIGSVTHFARTFDWRGYEFSKRAFKFSNTRVGFLTFIRWAEEMMRKAEKAKMIVGCEPTGCYWLTFQKFLAERGILLVTVNPYSVKKCKELDDNSPEKSDLKDPKTIAGLVREGRYSTSYLPEGVYAEIREAQVCRDQIMKQHVRLSNQIQGWLQKYFPEYLECYKNFDTASGMMVLEHAPLPEDIIKLGAGGINELWRSAKLRAAGIKRAKTLVEAAQGSVGLSGGEAARLEIWFLINDYQTKTKQLERLDEFLAKEIMKVPHVEKLLAIKGVGLSTVIGFVADVGDIGRFTDPKQVQKLAGLEITKASSGKKKGQPCISKRGRRRLRRTMYESARSLITWNEAFSEVFMYYRCRTRNPLGNMQAKIAVACKAIRIFFTILKTGCVFDAEKLRRDIIRPEAA

SEQ ID NO: 110630 - protein, 340 aa, unidentified
MDEVSIIGIDLAKRSFQLHGARADGSVAFRKTLSRGKLFGFVASQPRCVVAMEACASAHHWGREIAKLGHEVRLIAPIYVKPFVKRQKNDAADAEAICEAALRPTMRFVAVKGEEQQARAMLFRTRDLLVRQRTQTINALRGHLAEFGVIAPQGKAHVGRLASAVEDAASPLPEPVRALGTLLLGQIVDLDVKIAGLEKEIHIQAREDEDAARLMTIPGIGPITAMAIQACAPPMESFRCGRDFAAWLGLVPRQHTSGGKPRLGKISKMGPRDLRRLLVCGAMAVVRAACRRGETKDPWLARMLARKPRMVVAVALANRMARIAWALTVKKEVWRAPAAA

SEQ ID NO: 110631 - protein, 354 aa, unidentified
MMIIGCDYHPAFQQIAFVDTDTGELQERRLQHREEAEKFYRDLAAQGMKVRVGMEASGQARWFERLLAELNFELWIGDAAEIRTKRVRKQKTDRQDAQLILKLMLKDDFPRIWVPSWENRDLRQLLWHRHRMVQARTRIMNQLQAVALNEGLRCKKRLWREAGREQLEAFRLAPWASRRRRDLLELLDRLNPTITDLTRTIEQEVEKCPEAQRLMTHPGVGPLTALAFVLIIGTAERFQCGKQIASYLGLVPLEESSGNRRRLGHITKQGNALLRFLLVEAAQVSARSIPEWRNKYFHLAMRRGRKIAKVAMARRLAVQMFWMWRKGWDYEQVRKFGSHAGQPGNRDGVQSNTE

SEQ ID NO: 110632 - protein, 431 aa, unidentified
MPCTARTSTNITTACRRRNESDVFCGIDWAEDHHDIALVDRDGKLLAHQRVSDDAAGLARLLELLAGHGDSPDDPVPAAIETPRGLLAACLRAAGRKVYPVNPMAVARYRDRHSAAGRKSDKGDAAVLANVLRTDMHAHRPLPADSELAQAIAVLARAQQDAVWDRTAAHNKLRSHLREYFPGFLDAFAAARDGITRPEARVILAAAPTPGEAARLTLAQLRTLLKKAGRVRGTDAEAARLREAFRKEQMRQLPLAGQATGRQALALLRQLDAACASAGDLEAAAVESFNRHPDAGIITSFPGIGALTGARVLAEIGDDRSRFQDARGLKAYAGSAPITRASGKTRPVTHRRIKNNRLAAAGYTWAFAALTASPGARARYDRRKNAGDRHTAAQRNLFNRLLGCLHHCLATGQHYDEATAFPNQAATPAAA

SEQ ID NO: 110633 - protein, 355 aa, unidentified
MDNTKYIGMDVHQATISIAVLNSSGKLVMESVIETKAITIVQFVRGLRGDLHVTLEEGTWAAWLYDLLKPHVREVLVCDPRKNALLKTGNKSDRIDARKLAELLRGGQLSPVYHGEHGVRTLKELSRSYLAISGDLARVMTRLKAVYRSWAIACAGKQVYAPRYRAQWLGKISEAGVRRRAEFYYQQLDELSALRQQVRRELLAESAKHEASKLLCQIPSIGPIRAALLIAILQTPHRFRTKRQLWAYGGLALETHSSADHRYVEGQLQPAKRQVSLRGLNRNHNRELKNIFKGAAIIAATKAGPLQEFYAALVAKGLRPEMARLTLARKIAAIALIVWKKGVSFDAQHLKSQTA

SEQ ID NO: 110634 - protein, 348 aa, unidentified
MAIVGGFDIHRRQVTFDYLDTATGQVRRGRIDPACRSVLRSWLGRFAGQEDVTFAVEGCTGWRFVVEELQRAGITALLAEPAETAHRRGPKKRAKTDKADARHLRVLVAEGRVPCSWIPPEQVSELRVLLQLYRDLREEHTAWAQRIHATLFHQGVPGLAGRLSDPQARAGLERGEQIGLSPAGAQAAATALRRMDDLEAALAPVHAQIAAFSRRQAGCKALAAELYGVGPLVAAIVWAFLGDARRFSSSAQAVRHTGLDITVHSSDDKRTPGHLSHQGPPILRWALFEAGHQAARATSPDHRYYTDVAVRIDANRAALSVARKLARRSHHILRRLGDQAYAPVPAGG

SEQ ID NO: 110635 - protein, 336 aa, unidentified
MYYYAGLDVSLKDTFVSIVDENGTIIHEQIIPSDVDALSMYLKHTKLPFERIGIEAGQLSIPLCKGLRQEGLPVICVDARHMATALSARINKNDKNDARGIAQMLRVGLYKEVLIKSDEACEVKFLLGSRRHLVNTKYELMGTIRGLLKIYGIKLGAQAQFFEQARAAIKQLSPFIQRSVESILLNIAEIERSLNELTHALSTLGKEDEDCKRLMTVPGVGVIVAMTYKSAVDCPERFKDSYDVGAYFGLTPKQYASGEVDRYGSISKMGSKECRTLLYEAAQSLLTRVGAHSKLKAWGLKLMQKKGRKKAIVAVARKLSVIMHRMLIDKTEFRYT

SEQ ID NO: 110636 - protein, 355 aa, unidentified
MSQEKYIGMDVHQATVSVAVVDSGGKLIMECILETKAATILEFIQGVRGTLSVTFEEGTCAAWLHDLLQPHVSRLVVCDPRKNALLKDGSKSDRIDARKLAELLRGNQLSPVYHGDHGVRTLKELGRSYLTLTQDLTRVMSRIKALYRSWAIPCSGTTVYAARHRSEWLAKIPQPGVRHRAERFYQQLDLLRPLHQQARCDFVVESHKHPAVKLLRQIPSIGPIRAALLVALLQTPHRFRTKRQLWAYSGFAVETHDSGEYRYVRGKLLRNRERISVRGLSDNYNRDLKNLFKSTAISASTRPGPLRDFYVALLARGMRPTMARLTLARKIAAITLTMWKKGVDFDAKQLDQQAA

SEQ ID NO: 110637 - protein, 337 aa, unidentified
MKVTTIGLDIAKRVFQVHGVDDQGVVALRRRLQRDEVAPFFANLPACKIGMEACGGSHYWARRLATLGHTVRLIAPQFVKPYVKSNKNDANDAEAICESVSRPSMRFVPAKSVEQQDIQCLHRVRSRLVSARTQLANQVRGLLAEYGIVLPQQIHQLRRGLPLILEEDNELTPFTRRLLASLYDELVEFDQKLASIEEQVRAAHRASESSQRIAEVEGIGPLTATALVSALSDGKAFQNGRQFAAWLGLVPRQHSSGGKPRLLGISKRGDAYLRTLLIHGARSVVYRAAAKADQRSRWIADKQLRLGTSKACVAVANKNARIVWALIARNESYQRAL

SEQ ID NO: 110638 - protein, 349 aa, unidentified
MQSKSQIQSIGIDLGKTTFHLVALGSRCQVVVRKKFSRQQLLLYTANLPASLMGMEAGVGSHFLGRALREQGHEVRLIPAQFVRPFVKSNKNDYRDAEAIAEAVERENMRFVPIKTEDQFDLQALHRVRERLVSRRTSVINQIRAFLLERGISFAKGPARLRREMPEILENADEKLSARMRRLLDFLWQEWKHLQLQIESLSEDLEKIADRDAACTRLQQIPGVGPLVATAVVSAVGNGAAFHKGREFAAWLGLVPGQWSTGGKTKLLGISKRGNPYLRKMFIHGARAAVLRVKREGSYLGQWMGGLESRAARNVVIVATANKLARISWAVLSSGNDYRPMHPAVDCSS

SEQ ID NO: 110639 - protein, 465 aa, unidentified
MGSEGCFLFGTLISLHKLAIIISRMHECVFERVWENDPFEDDNICPYRERNKMEKQKNIVCGADIHKKFIMATILSRDGNMIRGRFGMTLDEILRFKDWVINNNCEAVAIESTGIYWVSIYTVLEGNIEVILANAYKVKHTPGRKTDKRDSKWLAELCLNGMIEPSRIFPKDDRELRALTRARENLVNNSTQMKNRIHKELESACIKISSVLSDIFGISGMKIINGLLEGKNIDEILKMITSKRILKKEQELRKAVTTSLDPARVLMMRTYLELIEKIESEIEIVNREIMNRMQKLKEDLEIAMSMTGMGFTSSSTILAEIGNYKDFVTAEQLASWCGLTPKVSQSADKLVTGSITKQGSKHVRRILVQVAHAIAKSKNSKLKRFFLRILAKKGKKKAIVALARKVLCILHHLLMNREKYQDTEMSKTKKVKLNWASSLVQMTEQDMVSVLINAGYTVQKMKECI

SEQ ID NO: 110640 - protein, 337 aa, unidentified
MDKFEACGLEISARELVVAWSGKKAAVQLLRFANDAAGHRSLLRTLTRGGKRVRVVMEATGLYGLDVALALSAAAGVAVMVANPRAVRNFARAMMQRSKNDPLDALVLREFALRMPFRGWQRPSANRLALWAIARRLKALSELCSAEKNRLHAMKQSQATPAIVRQDIVRNLRWQERAMNKLRREARQCIAAEAELQRRYQLMLSAPGIAERSALQILGELVMLPEDRDVRQWVAFAGLDPSEHSSGQSVRKRPRLSKAGNRHLRQALYMPALVCIRWEPHLFGFYQHLLERGKAKKQALLAVARKLLHALYGMFRHNQPYDGTLVYRLPAQKVLEA

SEQ ID NO: 110641 - protein, 351 aa, unidentified
MPTTARTDIAVIGIDIGKNSFHIVGLDDRGAIVLRQKWSRGQVEARLANVPPCLIGMEACVGAHHLSRKLKALGHDARLMPAKYVRPYSKGQKNDFRDAETIAEAVQRPTMKFVATKSADQLDLQAMHRVRERLVSQRTGIINQIRAFLLERGIAVRQGQRFLREELPRLLAAPPEVLSPRMVLIIEGLASDWRGLDTRIEDLSAEIEDLASRDAGCERLMSIPGIGPIISTAMVAAIGTGDGFSKGRDFAAWLGLVPRQISTGDRTILGKISKRGNRYLRVLFVQAAWVVLVKVKPDRWEGHGLKPWIEAAKKRLHHNVLAIALANKLARIAWSVLARGRAFEASKLQVA

SEQ ID NO: 110642 - protein, 295 aa, unidentified
MSHYREAFVGIDVAKLKNAVAVAEFGRDGEIRYFGEVESSDVSMRRVIQRIAAKFDRVHFCYEAGPTGYGLYRLIKSLGHECIVVAPSLIPRKPGDRVKTNRRDALALARLLRAGELTAVWVPDEGHEAMRDLVRARTAAVETLRVHRQQISAFMLKHGRIYPRKKGWTMRYLIWLQEQRFDHPAHQIALQEMVDAVRLSRERVDRLEKVIEEFVPNWSLAPIVQALQALRGVDLVVAVTFATEIGDVSRFESPRQLMGYLGLVPGKRSTGETTKRGGITRAGNSRVRTLLVESA

SEQ ID NO: 110643 - protein, 324 aa, unidentified
MASKKQEVTFEQVVERGCGLDVHKKEIVATVTGTGIEGETRTFQSTTRSLTELKEWLLSLGVTHVAMESTGVYWKPVINILEPGGFTILVVNARHIKYVPGHKTDKKDSAWICKLLRAGLLKGSFVPSREQRDLRDLTRYRRKLVQQQSAEHNRMIRIFEDANLKLSSVFSNIRGKTCTRVIDAVIAGETDPEKLAAVCTHWRLKHSQEEIALAGEGCFSERHKFRIRAIRTSIRNIEAEIDHLDCEIERRMRPLEDRIRQLCEVPGMDTTSVRELLAEIGVDMEVFPTADHLKSWAGLAPGNNESAGKKKAHTPTTATKPPKR

SEQ ID NO: 110644 - protein, 413 aa, unidentified
MAEETFAWFVGVDWGSEKHQACILDPQGGIVGEREFPHSGAGLAELGEWLLSTGGAASTVAIAIEVPHGPVVDTLVDLGFVVHTINPKQLDRLRDRFSVAGAKDDRRDAYVLGDGVRTDRRLFRRLHVSDPRLVELRAWSRLAEELQEERVRLSNRVHHQLWRYYPQIQKLTDDLAAPWFLELWTIVPTPAKAGQLRKSTVEQLLKQHRIRRVDAETVLRILREPAIKVADGVAEAASIHMRSLVARLRVVNRELREAEGKLDKLCTALGETAAVSGDCLQRQDVLILKSMPGIGRINLATLLCEGSGPLCSRDYAALRTLCGAAPVTKRSGKSHTVIMRYAAHVRLRNTVYHWARVAAQHDPKSRSRYVALRQRGHSHGRALRGVADRLLGVACVLLRRQTLFDPQFGRPAT

SEQ ID NO: 110645 - protein, 356 aa, unidentified
MTSTKYIGLDVHKESISIVVMNSVGKVVMECVIETKASTILQFIDGLRGDVRVTFEEGTWAAWLYDLLKPRVTEVVVCNPRKAALLKDGSKGDRIDAYKLAELLYMNKIKSVYHGEHGLRTMKELARSYLTISADLTRVMNRLKSLYRSWGIPCVGTEVYAPRYRAEWLGKIREAGVRRRAEYYYQQLDVMHLLRQKVRKDLLAESRKHKAWKLLRQIPGIGPIRAAVLIAVMQTPHRFRTKRQLWKYSGLGLETHDSAQYHAVEGELRRSKRPATVRGLNKDHNHDLKDIFKGAAMRASTAAGPLHDFYENLLAKGRKPTMARLTLARKIAAITLIVWKKEVRFDANNLKPQQAA

SEQ ID NO: 110646 - protein, 361 aa, unidentified
MKDVQRNKLEFNGQNIYVGIDVHLKSWSITVLSEHSVLKKFRQDPDVDALHKFLVTNYPEGTYHSVYEAGFCGFWIHSKLISLGINNIVVNPSDVPTMSKEKLRKTDSVDCGKLARELRSGTLKGIYVPGVETLEMRSLIRLRNSIVKDSTRQKNRIKSLLRFHGVEIPEQFTRYSVGNWSKRFLKWLEGVELSTMYGRKTLELHLEQFVRLRGMLLQETRAMRAISRSEPFKEWIRLLTSVPGIGITTAISLLVELDDINRFKSADQLAAYIGLIPMCHSSGEKEGVGDITIRKHAMLRCYVIEAAWIAIRKDPAMTMAYEGYRKRMNAQKSIVKIARKLVNRIFFVLKRRQEYVPCIVK

SEQ ID NO: 110647 - protein, 352 aa, unidentified
MRHIGVDLSKRAFTACFLEADDSHHLVTYSMTPEGLAEFRKQLRPDDQLAFEVGTNAYFFHDQVHESVAEIVLVSTYQFVVIAKSKKKTDRGDAVLLARFLKLGYLPQVVMPEGRIRELRHLFTARESLIEIGYQLKNMGHAALARNGIAVTRAAFATDTGRRRLARLEGLASVDRQVLDMALRQIETVEQEVVELERAIVRTGQRLPGLKRLLQIRGLGLVAAIGVLSEIGDIARFGSAKQLVSYAGLATTVRQSGATDRHGHITRQGRKRLRGFMVEAVLSMIRNPADCRTPLVDFYQRKKREKGAGKSICATARKLLTVVYTMLTKGLDYWFLEERLYQKKLRQLATAA

SEQ ID NO: 110648 - protein, 355 aa, unidentified
MNSTKYIGMDVHKESISIAVRNAAGKIVMECVIETKASMILQFVDGLRGDVQVTFEEGTWAAWLYDLLKPRVTKVVVCDPRRNALLQEGNQNDRVDARKLAELLHHNQLRSVYHGDHGLRTLKELVRSYLTITKDLSRVMTRVKALYRSWAIPCSGKQVYASCHRAEWLGKIGEPGVHRRAEFYYQQLDALRSLRQAVRRDLLAESKKHPAWKRLCQIPSIGPIRAAVLLGILQTPHRFRTKRQLWTYSRLGIEVHSSADHQVVKGQLERKKKHIEIRGLNENGNHDLKNLFKGAAVVASTKPGPFEEFYTALLAKGMRPEMARLTLARKIATIVLIVWKRGVCFDAQHLKPQTA

SEQ ID NO: 110649 - protein, 430 aa, unidentified
MKSNTQNAKIEAITEKTLVLGIDVGSETHYARAFDYRGIEYSKKPFKFSNTEAGFVTFKEWILDLKERHEKDKVVPGMEPTGHYWFNLGKFLQDNEMKPVLVNPHHVKKSKELDDNNPTKNDRKDPKVIAGLVREGRYMIPYLPDGVYADLRTASNIRFQLQAELTRIQNRINRWFNIYFPEYKTVYGKPDAKSGILILKEAPLPEDILTLSIDGVNQIWRDAKLRAVGKARAKTLIEAAEHSVGSKEGAVSARMEIRMLLEDYESRNIRLQEVMGLIEGLVNQIPMAEKLLEIKGVGIKTVSGFLAEVGDIRRFNDPKELQKLAGLALVENSSGKHKGKTTISRRGRKRLRYLLFEAAMSLVAKNPEFRELHNYYTTRRLNPLKKMQSLMAIAAKLLRVFYAILTKGVGYDPKKMVNDIRRPAAYAQAA

SEQ ID NO: 110650 - protein, 338 aa, unidentified
MTIVFLGIDLAKNVFALHGVDATGRACLVRPCVRRDQLLESVAKLPPCTIGMEACSGAHHWARQFAGFGHTVRLMAPKFVAPYRMSGRRGKNDAADAAAICEAVQRPTMRFVPIKSELSQCRLAIHTVRQGWVKARTATINRLRGLMSEFGIVLPLKVQTVRRQTAEHADKLPGWMKTACLDLLDELRRLDERVAEYDEHIRTMAQADDRSKTLMQVPGIGATTASALLASIGHGHDFANGRQLAAWLGLVPGQYSSGGKQRLGRITKAGDSYLRALLILGARATLAAAAKKKDRLSRWAVALSERRGYWKAVVAIAAKNARMAWAMLAKGEAFKPVT

SEQ ID NO: 110651 - protein, 371 aa, unidentified
MDESSKTLYVGLDVHKDSIAVAYAPEDRGADVVPLGAIGTRQCDIDKLIRKLQSKGATLVFVYEAGPCGYWLYRYLTRKGLACHVVAPSLIPRKPGDRVKTDRRDAVMLARLMRSGDLSSIYVPGIEDEALRDLSRGREDAMRDLKATKYRLKAFLLRQDIRYEGRANWNAAHLRWLSEVVCPTPPQQIVFQEYVRAVTEQHERLQRLERALHDQVRSWRLYPVVEAIQALRGVELTSAVILIAELGDLTRFDTPRQLMSYLGLTPSEYSSGERRRQGGITKAGNTHARRALVEGAWAYRYPAKVSRHLQLRLEKLPAEVQAIGWKAQVRLCRRYRQLIARGKHANEVVVAIAREMAAFAWAIARIVPLAP

SEQ ID NO: 110652 - protein, 416 aa, unidentified
MQVLHGCCCGLDIHKRFVVACVLTTAADGQVQKVTRTFSTMTDELLALLDWLTEIGCTHVAMESTSAYWRPIYNLLEGHLTVLVANAYHIKAVPGRKTDVRDAEWIADLLRHGLLRGSFIPSREQRQLRDLTRYRTHLVEERARVTNRLQMVLEDANVKLAAVVTDVRGVSARAILEALVAGESDPTTLADLARGRLRAKRELLTRAVVGRFTAHHAFLITEHLSQLDYLEDAMERVTAEIAQRLQAEHDAIDLLDTVPGIGRRAAEIIIAEIGADLGRFPSAKHLASWAGMCPGNAESGGKRLSGKTRKGNRWLRQVLIEIAHVAAKTRGTYLAAQYRRIAARRGKKRALVALAHTVLVIIYHILTRREPYRDLGEAYFDHLERQHVERRLVRRLERLGYAVTLAPATPGPEVAA

SEQ ID NO: 110653 - protein, 416 aa, unidentified
MNAVGIDVSSRKSTVAVLRPLGEVVCLPFDVTHDIVGLASLAEKLKTIDGETRVVMEHTGRYYEAVAKALHEAGFFVCAVNPLLIKEYGANSLRRVKTDKADAIKIARYALDNWADLRDFTPMDAIRYDLKTLNRQFQLASKQRTASANNLIALLEQSFPGIRKCFDSPVRSDGTQKWVDFAHSFWHVDCVRKQPFAAFCDRYRKWCKRHAYLFKLSNAEEVYALAKRAVVLTPKSKVVKVLVQEAANQLISISRSVEVYRAEMDRLAAMLPEYPVVMAMYGVGKSYGPQLMAEIGDVRRFERKQALVAFAGIDPMPNQSGDKNVRSNKSSKRGSPYLRKTLFNVIRTYLQCAPQDEPVFQFLNLKRAEGKPFYVYMLAAANKFLRRYYAKLRDYFASLDTLQPVAPIPTILKATL

SEQ ID NO: 110654 - protein, 341 aa, unidentified
MSEVRIIGLDIAKSVFQLHGVDDAGATVLQKRLTRARLLPFFEKLPPCLVGIEACATSHYWARELGKLGHEVKLMPAQYVKPYVKRQKNDMADAEAIAEAVTRPTMRFVGQKSPSEQSAMMLHKVRLMLTRQLVMITNATRAHMAEFGIIAPVGRGGVDRLLAIVDDETNEQIPAEARRCLQMLVAQLKLVKLQILDNDRQVLALARSTEIGRRLMEVPGIGPLVASALVACVPDPSMFRCGRNMAAWLGLVPKQNSSGGKERLGSITKAGNRYLRQMLFAGAMAVIRRAMQGTRRTWLIRLLERRRPKVAAMALANKNARIAWAMMTSGEHYREPIALAA

SEQ ID NO: 110655 - protein, 349 aa, unidentified
MRFYTSEHRFYCGVDLHARTMYLCILDNAGQVVYDKNLAADPGAFLKAVAPFRDNLVVGVECLFCWYWLADLCAQEKIAFVLGHALYMKAIHGGKSKNDAIDAGKIARLLRGGNMPQAYVYPAGMRATRDLLRRRMYLVHKRAETLAHIQNTNSQYNYAPFGKKLSYAANREELQVAERFTEPSVRRMIDIDLALIDHFDTLIHDVELYLTRTAKVDDVQTLARLHSVPGIGKILGLVLLYEIHDSRRFPEVGNFLSYARLVRCAHESGGKKLGSGGKKIGNPHLRWAFAEAACLFLRRSERAKRWLQRQEKKRGKGKALGILAAKLGRAVYHILHKKVVFDEARFWSS

SEQ ID NO: 110656 - protein, 343 aa, unidentified
MQDVATVGLDIAKQVFQAHGADASGETLFNTKIKRENVLEFFSKLKPCLIGMESCATSYHWARQLLEFGHDVRLIHTSYVKPFVKRGKTDANDAEAINVALTQKTMRFVPVKSLNQQAAITIFRTRSLFVSQRTQLVNALRGHLAEAGLIAAKGIQNYSKLVNLMETAADTVLPTVMKQALTDICDQIHRLNDLVTKLDKEIERRVRHDENACRLLTIPGVGPKTAMCVIATIPDIHRFPSGRHFTSWLGLTPRTHSSGGRSVLRRITKMGNSELRTMLYLGGTVIMMRDSKTPIGRWAARLRARRPYKVAVIAVANRIARIIWALLTNGGVYDPTYGREASA

SEQ ID NO: 110657 - protein, 399 aa, unidentified
MFVGWDWASTTHDVTVLNDAGVVVDRWAFRHTEQDLVAALDRLARLAEPAALPVIIERASGLVVDRLLDAGHPVVPVHPTAFWAARPRWGASGAKSDPGDSYKLADYLRTDGHRLRRLDPPDLGLQELQALVRLREDHVRARTAASNQLGALLEAHWPGPKAVFFRLASPIALAFLTDYPTPQAADRLGQARMASFCRRHSYRGGKTPAELLARLQSAPTAPVGIPAATLAILVGAQVQLLRILLGTIAELDVAIAKRVVLHPRAKLLASLPGVGIINLAQLLAEVGPVLDRVANAEQAAAECGAAPVTRASGKTSGVYFRWAANRRARKALTAFAHNARMQSPWAGRLYADARARGKRNPHATRIVARAWLRVIWTCWHTCTPYDPGAHLAEQRLVAT

SEQ ID NO: 110658 - protein, 386 aa, unidentified
MHRATTLPVSEQTCSPEHCATLFVSLELSRSTWVATTLAPGSTKMSKHTLVGGDGRKLLDLLARLKTRAEQRISAPVKVVAIHEVGLDGFWIHRLLEANGVESHVVDPASIAVPRRHRRAKTDAIDGETLLRTLMAWQRGEPRVCAMTVPPSPSEEDRRRMTRERAKLLQERIRHTNRIRGLLFGQGITNYNPLHKNRRKGLEELRTGDGRSVPAHLKSEILREIDRLELVLRQIGEVEAERDEMLQLAQASSPAALLMRLKGIGPEFATVLYLEGLFRQFGNRRQLAAYAGLAPSPWKSGSIDQEQGISKAGNPRLRTTMVELAWMWVRYQPASALSCWFRQRVGSKRGRVRRISIVALARKLLIALSRYVSHGEIPTGAIVKAG

SEQ ID NO: 110659 - protein, 313 aa, unidentified
MPQDTFVGIDVSKDTLDVHVLPDRRRLQCGNSAGDIQTLAAQLASLEPALVVLEATGGYQTQLAATLHDQGLVVAVVNPRQVRDFARATGRLAKTDRIDAAILAQFAQRIQPPPRDLGDENDRQIKALVTRRRQLLDMHAAESNRLGQARHQAVTASIQAVLKLIEAQLKDTDTTIDEFIRRSPIWLRKATLLDSTPGVGPATIRSLLAHLPELGRLNRRQIAALVGLAPMNDDSGKRGGYRAIRGGRTAVRNALYMATLVATRHNPRIRAHYQHLLKQGKKKMVALIACMRKLLIILNSMLKNNQPWRCQMT

SEQ ID NO: 110660 - protein, 347 aa, unidentified
MTTLEAVRGVTGGVDTHRDVHVAAALDPLGGVLGTESFTTDSAGYKALLKWLETFGDVTKIGVEGTGSYGSGLARHLRRVGVQVIEVDRPDRQKRRRTGKSDPLDAVEAARAALSGRATGSPKSRDGAVEAIRVLVVAKRSARQARVKALIQMRHLGYTAPDQLRCRLKGLSVPALVAEGIKLRPTRSADPVTAATKASLSSLAHRISSLDDELAELDQRIEALLVATVPDLLDLFGVGPDTAAALVMAAGDNPERLHSEAAWAHLCGVSPIPKGSGKTSGRVKAHDGGDRQANSALWRIVMVRIAHDPETQLYFERRVKEGKTKHEVIRILKRYVAREVYRYLPRG

SEQ ID NO: 110661 - protein, 416 aa, unidentified
MNAAGIDVSSRKSTVAVLRPFGEVVKLPFDVSHSTEALADLAQQLKALDGETRVVMEHTGRYYEPVANVLHEAGLYVSAVNPLLIREYGGNSLRRVKTDKADAMKIARYALDNWADLRDYTPMDTIRYDLKTLNRQFQLASKQKTATANNLIALQEQSFPGIRKCFDSPVRKDGTQKWVDFTYTFWHVDCVRKHSLNAFSERYRKWCKRHGYIFKQRNAEEVYVLAKSAVVLVSASETTKLLVQEAANQLTSISRSVETYRAEMNRLASMLPEYPVVMEMYGVGESLGPQLMAEIGDVRRFEQKKSLVAFAGVDPMPNQSGEKNVRSNRSSKRGSPYLRKTLFNIMSIYLRCSPPEEPVYHFLDRKRAEGKPFYVYMTAGANKFLRRYYGKVRDYLATLDDLPPVDMDSTGLNRAD

SEQ ID NO: 110662 - protein, 382 aa, unidentified
MTSPNVILADAVLVAIDIAKVCNEVLIEAPSHKRRRRLPVLNTRAEHDRLIEILQTYGRPVVCGFEATGNYHRPVAWRLAEAGFEVRLVSSLALARTREALHNSWDKNDPKDAQVILHMLRIQATQAYHDPLRAGINDVQELSKTHEAVARAKTEIQHRILTHYLPLYFPEIDRFRGNSRSDWFFAFLDAFPTPASITTLTKEAFVAGAWDVVGRKVSKTQILMDIYETARTSIGLPLPLDAPAIRMFRMVVAEARSLIRQRNEIETQADELLRYSQDYHLLRQIPGIGPINALTIIAEAGDLRRFHHHRQFLKFCGLDLSTQQSGQYRGQTRLSKFGNADCAAPCGSPDRSPSASARTDSGTSSNATSREIATIPICAARR

SEQ ID NO: 110663 - protein, 387 aa, unidentified
MIYVGIDIAKQTHYASVMNSVAEILIEPFAFSNDLKGFQKLVKCIGSYQMEEILIGMESTAHYAENLVSFLFTRGFKVCLINPIQISSLRKSNIRKTKTDSVDTFLIIKALSLHQYRVFSERDYHSLQLKYLCRFRQNLMRARTKVKIQLVSYLDLLFPELQYFFKSGIHGKACYALLKEQSNPDRIAKMHLTRLTNLLYKSSKGHFDQSTAVSLKELASQSVGIKNDTLSLQVLQSIKQIEMFTQQLAEVEQSIQEIMGRLDSVIKTIPGIGSINGAMIIGEIGDITRFEKPCQLLAYAGLDPSVYQSGKFSASRTRMSKRGSKLLRYALINAAWQTTLVNKTFKDYYDLKISQGRRHYNALGHVAHKLVRVIHKMMTNNLEFDLA

SEQ ID NO: 110664 - protein, 343 aa, unidentified
MEHFAGLDVSVKDTSVCMVDGTGRIVREVKVASEPDALLQVLKNPAYRFKRIGLEAGPLSQWLFSALAEAGLPVICVETRHMRAVLQAQINKTDRNDARGIAQMMRAGLYKPVHVKTLRSQKLRTLLTHRKLLQSKAIAVENDLRGTLRNFGLKVGMVGTVRFEARVRELVADIPDLVNLVEPLLVVRRVLREQLAVLHRRLLAIVKDDEVCRRLMTIPSVGPVVALTFRATVDVPARFRKSKSVGAAFGLTSAKYQSGEINHSGTISKCGDDMMRSMLYEAAQIMLMRTTKWSWLKAWAMQIARRCGRKKAIVALARRLAVIMHRVWIDGTEFRWTRQESAV

SEQ ID NO: 110665 - protein, 381 aa, unidentified
MTTMTRHQESTAAPASLLLAFELSERTWKLGFTVGRGQRPRFRQIPAGALDALAQEIARAKSRLSLPADAPVVSCYEAGREGFWLHRYLLAQGIVNYVVDSSSIEVNRRARRAKTDALDLAGLLSLLVRFVHGEARVWHVVRVPSVADEDARQVHRLRETLQQERTRLLNRLQGLLTTQGLTIPLHADFGDRLAAARLWDGTPVPAGLQHRLRQGWAHLVFLNAQLAEVDQMRTALAADPQTVSGRCVEQLQTLRGIGSIGAWSLTTEIFGWRQIHNRRELGALVGLVPAPYQSGATSHDQGITRAGNRHVRRMIVQLAWSWLRYQPTSALSRWYRERFSHGRRLRRIGIVALARKLLVALWRYLETGAVPDGAILKPHAA

SEQ ID NO: 110666 - protein, 507 aa, unidentified
METRTNLNEVGKKKLVLGIDVALKNHWAAIGDNKGQEMVKPFQFSNNAEGMSLLEGIIKQTGKAENKGDVIIGMEPTGIYWKPMGHYLREAGYRVVLINPSHTHKTKELEDNSQTKNDRKDSRVIQTLTREGKYLEPIILRGIYGELRRLGQAYKSALKRGNVISNKVKMIADEYFPEMRGIIKSINGKTAKGLLAEIPFPDDIIRLGKTKFYKKLKKWSNKRFGKKKSLKLWEAAKKSIGVKVGQEAAKIELRQLVEEMELVKRHREELVKEIEEKAKVTEEGKSLIKLPGLGYLSIGKLIGETGSIKSYKGARSLEKLAGLNLIESSSGERHSGKKISKRGRKLMRTTLYQMALASIKNNRAIKYEYQYRIKTKKQKKMKALTAVACKMLRVIYALVSANKEYDERKISRHYYESEIKREENICEWVTPIIPPSGPGYNSGDTVMKNTGHPLPMTLNEVMSGAPVQYRDDTGRNDRVRHRKSGGTNPLANIEKSWAEENQEVVCK

SEQ ID NO: 110667 - protein, 359 aa, unidentified
MAKARTLVGLDVHAAKVVAAILDAETGELRFQRLGGQSEPVVRLVSSLEGPVRASYEAGPTGYGLARALGRAGVECVVAAPGKIPRGATERVKTDRRDAEHRVRLLLAGELCPVRVPGPAEEALRDLVRAREDIRGDLMRARHRLSKLLLRHELRFEGRAWTARHRAWLAKLELGGDAAQATLADYLGAIEALLHRRAEVERQIHAAIPESPWASEVGRLRCLGGVDTLTAVGLCSEIGDFARFAKAGQLMSYLGLVPSEHSSGEQRRLGAITRSGSRHARRLLVEAAWHYRNQPRVGAELERRQHGQPAAAVAIGWSAQRRLHRVWSHMQRKGKRRTLIAVATARELAGFGWSIAQVE

SEQ ID NO: 110668 - protein, 338 aa, unidentified
MTPFKYFVGVDMALATFTACVGTTPWAILLKPETFENDEDGFASFLGRLKEHNLPPDQTVVCMEATGVYGEGLAYFLSASDYPVAVEPPLNIQRKFPVNGSKNDWQDSQNIAEYACRYTDKLSLWKPRDEVLEQIKLLLTTRQQFSVQLTAHKNALHAVKRKKVSSELAKKVHVDMIEQIVKSIKAIDIEIRRLIDSNPTFKAALLLLLSIPGIGLQLAAHLIIMMQYSLDPRVLSAFVGICPYEHESGSSVYRNPTSRHYGPPAIRKLLYLAACSVRTHRQDFRQYFLRKKAEGKPGKLVLNNIQNKLLKIACAVIRTQKPYIPTYVSVNPLVLTNA

SEQ ID NO: 110669 - protein, 317 aa, unidentified
METEKAYVGIDVSKETLDMAVHASEQRWRFANTDSGITEALACLEELSPALVVLEATGGMEYPLAAALAVAEIPVAVVNPRHVRDFARATGRLAKTDSIDAKVLAHFASAVHPTPRPLPDTQGQELKAILTRRRQLIEMLTAERNRLYSARSKAVKAHIRDHIAWLEKEMIQINDDLGRSIRETPVWEEKDDLLKSVPGVGPVLSTTILADLPELGLLNRRQIAALVGVAPFNRDSGHLRGKRTIWGGRAVVRSALYMSTLVATRYNPVIRGFYQHLLAAGKPKKLALTACMRKLLTILNAMLKHQTPWYYPTSKTA

SEQ ID NO: 110670 - protein, 391 aa, unidentified
MTKPKTKTVNDFSRCLDPLDMDATLIAVIEMSQSSWLVAGIVPGVERQPLKKLAIDEHALLGLLNRWRAEAEKNGHRITRIAVAFEAGHDGFWLARWLTAQGVEAHVIHASSVAVTREHRRAKTDRLDTELLKRGFLGWLRGERGHCKMVAVPTLSEEDAKRPSRERETLVGEASRIITRIKSAFVRLGIRSFNPKLKAAAARLETLRTPEGEPIPPNTLAALKRDLERHRIVKKQIRELEQTRLENLAQAPATGPNVMVLLLARVIGIGVETADMLVREVLSRTMRDRRAVARYAGLTGSPDESGAKRREKGLARSGNARVRHGMIQLAWRFLLFQKDSALAQWYRQRTANAPSTRKPLIVALARKLLIGLWRFARDGVVPEGVRLRPAA

SEQ ID NO: 110671 - protein, 419 aa, unidentified
MSFKIIKNNCCGLDVHKTWIFACIGITDSNNRTEYKQARFSSFTKGLNELCDWLAKYNCKDVCMESTGKYWIPVFNILEQHNLWVTLSHPKYTKPMKGNKTDRKDAKWICDLYMCGMVKPSFIPSADIRELRDLVRYRYKLTCMITGEKNRAQNCLTVSNLKLDEVFSDVFGKSSRSITEQILQHPGEAFDVAHFVHGRCKTPIEEIQAAVDGAISKEQAVKLRQCLDHIDELNKHISEIEQEILRLSDKYETALNLIRTVPGFDKNPLTAVQVLSEIGGDMSVFPTAKHLVSWAGCCPRNDQSNQKIKSTRISRAGSYFKPILVQVANALIKSKKHPEFTTRYKRIKARRGHKKAIIAICRMILTAIWHILSDLEPYTPEGFLESRPVKEEKVLSTSQALNLLKQRGYIIKDESLAVS

SEQ ID NO: 110672 - protein, 429 aa, unidentified
MQNESTPGARGPVFCGVDTHADSHWLCVLDWRGRRVLSRRFPADAAGYEALAGAIAAAGEPACVAMEGTSSYGAGLTRHLASLGMPVREALSPAGTQRRRPGQGKCDEADAERAARAAMSGSKLGTPKSQDGWVDGVRCMLAARSGAVKARTSAINTARSLLTTAPEGLRSRFRGMGGPRLMEELPSVRAEGALGAALGALADLWAAARDAALDMERAIEASLEENCPALLAMYGCGPVSAAKLAVAAGDNPGRLRSEASFAAICGACPVPASSGKTVRHRLNRGGDRQANSALHEIARQRVMRDPETAEYAERARARGKSDREVMRCLKRYVAREAYRALMRPHEIRRPEDASELVAARRAAKVSQVRAASILGTSEKYISMLERGQRELKPIRRAYEAWVEAGLPLDWDRQAFEAERKMDSKKHLAK

SEQ ID NO: 110673 - protein, 320 aa, unidentified
MPQQGRIVGIDVSKLKAEACIRSLQQRRCEPSTPQGEAALIAWLRANAVTLAVMEASGGYERGWAEALRKAGIAVRVVDPKRVRYFAKSAGRLAKNDPIDSEMIAWFGETFTAEAEPAHDPERAALDQLVTARRRLIGLATQVAQLAEHRQPRVVAQAQQAIGKIVKTQLAKLEIAIDAKIAANAAFRARAAIIRSVPGLGPHFTAGAIAWLPELGRISSKAAAALVGVAPYDDDSGERQGERRINGGRREIRDLLYMATLAAASRHNPVVKAYYQRLRAKGKKAKVALVACMRKLIVILNTMLARGQNWNPPAAAGVLA

SEQ ID NO: 110674 - protein, 402 aa, unidentified
MNCVGIDVSKGKSMIAVMRPFGEVVVSPFEVRHTASELSELARLLKSLDGETRVVMESTGNYHAPVAWLLHDAGLYVSVVNAMLVHDYGNNSLRRGKTDKKDAVKLANYGLDHWLTLPRYVPEEDTRLMLKTCYRQYQQYSKVQTMLKNNLISLLDTTFPDANRLFTSPPRDDGREKWIDFVATFWHRECVCDLSEKAFAAKYQKWCKKCGYNFSEGKALDIYAAARGHFGVMPKTDTAKLLVEQAISQLRATSSALAALKQEMQSLAASLPEYPVVMEMFGVGPALGPQLIAEIGDVRRFHSKKALVAFAGIDAPPYQSGQMDVRSRSISKRGSASLRRTLFLVMSVILQHAPMNEPVYQFMNKKRSEGKPYRVYMMASANKFLRIYYASVKSYLDSLEHD

SEQ ID NO: 110675 - protein, 343 aa, unidentified
MAIIGGLDLHRRQLTYDYLDVVTGQVDRGRVVPADRGHLRCFLARFQGQGEVAFAVEGCTGWRYVVEELERVSIGAHLAEPAETAARRGRKRRAKTDRSDARHLRELLVKGDLPESWIPPAHVLEARARVRLYKDLEEERTAWRQRVQATLYHQGVPVIASLTSAAGQARLTAAELSPAGRQAVEVGLRQLDRLTGELDPLRAELARFSRRQPGCRALRATHFGIGPITSVAIWAEMGDTRRFSSSDAAVRHSGLDITVYASDSKRARGHLARQGPATLRWALYEAAVCATRPTSPDHAYFLAVKRRADGHLGVISVARKLARRVHHTLRALGDQAWEPVPAG

SEQ ID NO: 110676 - protein, 383 aa, unidentified
MTQSKHTGKSTYENLQAIHVSIELSKNTWLITSISPGAGEKLSRHSVPGGDIAGLLSRLGQLKQKARDRTGQDYPFVTIQEAGLDGFWVHRVLEAEGHESHVVDAASIATSRRRRRVKTDRLDGETLIRALLAFKRGEPRVCSMLRIPTPDEEDRRRIVRERKVLMEERIRHSNRIKGLLFSQGIRGYDPLRRDRRERLETLRTGDGRELPEHLKCQVVRELDRMEMLLDQIKAVEAERDTMLVDEQQSAREVVMLTKVVGIGPEFAAVLWGEGLFRHFDNRRQVAAYAGLAPTPWQSGSVDREQGIGKSGNPRLRSTLLEMAWLWLRHQPASELSRWFNERVAQNGGRFKKVMITALARKLVVALWKYVTAGVVIEGARVRP

SEQ ID NO: 110677 - protein, 376 aa, unidentified
MNQDSTLYVGLDVHKDSITVAYAMGLDEVELFGKIGTTQMEVDRLCKRLQSKARHVHVVYEAGPCGYGLNRRLVEKGFDSMVCAPSLIPRKPGDRVKTDRRDAFKLVRSLRAGDLSAVHVPTVEDEAFRDLARAWSSARDDLKQARQRLKSFLLSHGVQYSGRANWGPAHRRWLSTLSFNSAWQQLAFNEHRRTIEDRLAQCERLEVALREAVVGWRFYPVVLALQAMRGIQFTSAVGLVSELGDLSRFDHPRQLMAWLGVTPSEHSSGSKRHQGSITKAGNSYARKLLVESAWSYQHPARVSKDIQSRQEGIPKPIVDRAWDAQLRLCGRYRRLVARGKSRQVAIIAVARELAAFIWDIGRMGMTLAVPQSEQPA

SEQ ID NO: 110678 - protein, 371 aa, unidentified
MSNDALGFARLLGDLKTVHKPEIIFEATGVYSRRLQAFLDEHGYAYTRLNPLEAKKQLDSLRVRKTDQIDAEKLAQSQFVLNRKPTYVQEEVYQELRDLSRFYQNLTEDIVRAKNRLHKVLQVTFPELETILSTPSGQQYWNLVIDFPCKDFVLDLSKDELLESIRQSTSKRISDKRVAYLVEKLTALANQSYCAVKKTSPIMEEVRYYAKELLRLSEQRQTVLDQMVELAQPLPEYDILLSIPGIAETTATSIIGELGDIRRFQSANQINAFIGIDLRHYESGNFLAKEHITKRGNPYARKILFKCIHNIASASHTNPCHIADFYEKRKRQSQTTSTKPHTIASIHRLIRTMYYLITHNKLYDYRSTQNQ

SEQ ID NO: 110679 - protein, 282 aa, unidentified
MAEVIIGVDPHKLSATIEIVDRQERLVATGRFDTDQRGYTAMRSYVRTFRHRLWAVEGANGTGRPLDQRLVEDGERVVDVPAKLAARVRLFDTSHNRKTDALDAHSIAVVAVRTPGLRVVHPDGELKALRMLADRRDELSRLRVQTVNRLQRLLGELIPGTRKRDLSALQAKKMLAGVRPRDVAGKTRRRMTVEEVADLVAVDAKLKAMKAELKAAVLARGSHLMDIHGIGPAGAARILADTGDVARFPTRARYASWTGTAPLDASSGQQILTASPARGTGG

SEQ ID NO: 110680 - protein, 406 aa, unidentified
MKVYLGIDWSERKHDVCMINERGEVIQQLVISHTPQGFLDLEVARRKMEVKAPECVVGLETAHNLLVDFLWDQGYEQVYVLPPNVVKSAQGRYRQSGAKSDASDARLIADILRTDQGRYPAWVPDLALTRQMRAKVSLVIFLTHSMVRTENRLRAVLLRYYPAALEVFSSLDAQITLAFIQEYALPQAAAQLTFDQFKGFLKQHHHHQPKKWAGCYARLQCPQPQADPAILAVYSSEAKLLANLLGELVFAKSKALQELEEIYLQHPDHEIYSSLPGIGPFLGPALLAKFGDDRQRFPSSAVVQAVAGTCPVTEASGKKHVPKFRQACDHEFRFIAQQWAKQTIHLSPWAHAYYANIRPHCRSDNDAYRRLANRWLEIVWKLWIDRKPYNESKHLKQKALRSMPRQ

SEQ ID NO: 110681 - protein, 348 aa, unidentified
MSKSSQYVGLDVSLKETSICIIDDGGKIVWRGRVDSTPEAIATAVKQHAPNAVRIGLESGQLSSWLFHELKEAGFPVICVGARHAKAALSLKVNKTDANDAFGLAQIMRVGWYREVTVKGLDCQAVRALLVARAQIVSQITTLKNCVRGILKTFGRVLPKGLRSQFPGRVRAAIDGHPVLGAIIEPTLRVLEAMRAQLLVYDRAVIQRARSDDTARQLMSAPGVGTVVALAYMTGVEDPARFKRSSSVAAYFGMTPRRYQSGEVDHAGRISKCGDGMVRGLLFEAAKVLLSRSARPSALKTWGEALGKRVGAKKATMAVARKLAVILHRMWTTGKTFQWNAEAASPAA

SEQ ID NO: 110682 - protein, 356 aa, unidentified
MRNLAAALVTPTADLNASLRDRRATPAPFTLHLTEVDMQSKLTFGMDIGKNEVVVACHEGAFAILKMANAVAGLRRWLGSVPAGSRLGLEATGGYHEPVAELAYSLGFTVYILNPKDVHFYARALGARGKTDRLDAQIIAAYVAEHCARLHPFTPLSADEKLLRELARRRATLVNAKSMLQQSLRVLPGFEREGRELLRAMGSFADRLERKLAQIAARSSERATLVKRLQTIDGVGTLTSIRCATLFTRVPFHSSDAVVAFFGLDPRPNDSGQHRGRRRLSKRGPSEDRRLLYNAAMSAIRTPAWRPLYLHLRNRGLASTEAIIIIARRIVRIAFAMYRNHSNFNPRLVPRPYCPA

SEQ ID NO: 110683 - protein, 354 aa, unidentified
MSRTLKAAIAVVGIDIGKNSFHVVGLDQRGVIVLRQKWSRGQVEARFANMPPCLIGMEACVGAHHLSRKLKELGQDARLMPAKYVRPYSKGQKNDFRDAEAIAEAVQRPTMKFVATKTADQLDLQALHRVRERLVSQRTGIINQIRAFLLERGVAVRQGLRFLRAELPRILATPPDVLAPRMVRVIENLAGDWRRLDERVESLSSEIEAVARRDAGCERLMSVPGIGPIISSAMVAAIGTGDVFSKGRDFAAWLGLVPRQISTGDRTILGKISKRGNRYLRVLFVQAAWVVLIKPKTWERHGLKPWIEAAKKRLHHNVLAIALANKLARIAWSVLAHGRNFEARKIDEAAAQPV

SEQ ID NO: 110684 - protein, 347 aa, unidentified
MDHVGLDLGKRQSQIAILAEDGELINMRIRTERRRLVEMFGRRPKARILMEASTESEWVARCLEDLGHEVIVADPNYAPMYAQRTRRVKTDRRDAHALAHACRAGTYRPAHRTSTERRELRARLAVREAVVRTRAAWITRIQSLVRREGCRFRTGAPETFLTRVEELALPPALMTVIAPLVELLGPINKQIAVLDEELERIVAADEVARHLTTVPGVGPVTATAYVATVDDVTRFRGAHQVEAYLGLVPSEWSSSEVQRRGHITKAGNSRMRWLLVQAAWCILRRRKRPQTAALRDWAERIAGRRGRSIAVVALARRLAGILFAIWRDGTVYDATKVRGPLPARRAA

SEQ ID NO: 110685 - protein, 405 aa, unidentified
MSELEKDLVFAGVDTHKDTHTLCLLDHMGRAIGTFRFAADAKGYDALAGKIGGPATCVGVGIEGTGSYGAGLTRRLLELGYCVYEVMVPGRARRKPGRPKSDPADAEVAARQVLARVNLSKPKDQSGWTEELRQLMIARDRLVQATSAMINAAKSLIVTAPEDLRRSLEGLSRKNLRSALSTLDPAAGGIILALGSLGKAWDLQDREADAIEERMKRVLEANAPALLAIYGCGTVSAAALAVAGGGNPERPKSEAGFASLCGVAPLLASSGKTERHRLNRGGDRRANRALYQIAVTRMSYDRRTKDYVGKRKRDGKSKKEAIRCLKRYIAREVFRAMRNPLEIKGPSWKDLRPARQALGITLVEAGKALNVGFQKVSYAETGRLMNVRFLEEYDAWLKSQAKRES

SEQ ID NO: 110686 - protein, 380 aa, unidentified
MEYCTTIGADVSDRTTKICVMTKADGGERRIVIETTCATTEAGFEEAFSKFDRSWPVVFETGTHCRWMDRLFRRMGFKTIVGNPRKIPSITKSNTKNDRNDARELARLALADPAMLHPVFLRDEMFQQMLRFHHARNMLISQRTQTINQIRGFAKSMGHRIKCSSTEKFHELCKGDWPRALEECAWPLMGSLKAINLKIKAYDKLIARLAERPEFKSMVERVRAVYGVGIIGSTVFIAAIGGRPDRFGHARDVGAYLGMTPRQDQSGDNDKQLHITHAGADIVRTTLVECAGVVMMSNARDTDLKLKGLRIAMHGGQIARRKAKVAVARGLAVTMLALLKDPEREYVPLSEDGRRGFERYRAEMEYLAMNKATKRGKKVA

SEQ ID NO: 110687 - protein, 362 aa, unidentified
MAKSTTIIAFDQHAVTTVAAVLLPGHRTPALHTLASESPGLLRFVERLRRQGPVTCCYEAGPCGFELQRTLSAREIPCDVIAPALIPRRPGDRIKTDRRDAGHLAVLYRAGALTAIHIPTEQEEAARDLLRCREDIRADLLRCRHRLSKFLLRHGRRFTGTKRAWSKRHDVWLRAQTWPIAALDQTHRAYLRAVEETVARLRAVEQDLRELLHLEPLRARVQRLRCFRGIDDLTALTIAAELGDARRFARAPSTMAFVGLVPSEHSSGAKRAQGAITKTGNGPLRRVLVEAAWHYRHHPFVSAAVRQRQRGAPATVIAQAWTAQHRLHRRYQRFAARGKPKQHIVTAVARELTGFVWAALTQ

SEQ ID NO: 110688 - protein, 421 aa, unidentified
MTQSTPDTFAAFVGIDWADAKHDACLQAAGSAKRECFQLEHTPEAIDAWVTTLRTRFNGQPVAVCLELNKGPLVFALRKYDFLILFPLNPLTLARYREAFTPSRAKDDPTDAELQLELLLTHRDKLRPLNPQSPTMRALTQLVEHRRRVVGDKVRITNRLTSTLKNYFPHALQWFQDKDTLLFCDFLSRWPTLKAAQLARRSTLEPFFRDHHVRSSDVIDKRIHAIHAASPLTIDEGVIAPHALLVQALVSQLRVTLQAIETFDNAIAQRAQSHPDFPLFQALPGAGPVFASRLLVAFGEQRDRYASAAELQRYAGIAPVTERSGKKSWVHWRLQCPKFLRQTFVEWAAESTRHSFWAQVYYQQQRDKGKAHQAAVRALAFKWIRILFRCWQERTPYNESAYLQALNSRGSSLIHNLAKEA

SEQ ID NO: 110689 - protein, 416 aa, unidentified
MTTNQWNEQAYFAGLDWARSHHDVVIIDRHGNVQEKLHFEHTAEGWQNLKAVAARYPHLAVAIETSQGTVVEHVLEVGWRVYPINPKAAERYRERNAPSGVKDDDRDAWSLADALRLDGAGWRALVSQDPLVAELRLLCRDEIALIEQRTALINQMRQCLHEYYPAALQAFEDWTCPSAWAFVLAFPTPAALVTAGRRKWEKFLHVHKLWRPETTEKRLAIFAQAQALSGTAPTVAAKSLLAVSLARLLQTLERQLDEYRERIVAAFARHPDHDLFGSLPGAGEKLAPRLLAEIGDNRASFADAEGLQCIGGTAPITIKSGKYCCYQRLRFACNETLRATVHLWADHSRTKCAWAEAYYQKHRKDGQTHACALRCLGQRWLKILWKMWQDRTPYDEALHTRNQTKHGSWVLALKSV

SEQ ID NO: 110690 - protein, 351 aa, unidentified
MSENLSGAIAVVGIDIGKNSFHVVGLDERGAIVLRQKWSRGRVEARLANMPPCLIGMEACVGAHHLSRKLKAFGHDARLMPAKYVRPYSKGQKNDFRDAEAIAEAVQRPTMKFVATKTAEQLDLQALHRVRERLISQRTGIINQIRAFLLERGIAVRQGLRFLRAELPYILAMPADLLSPRMVGLIEGLADDWRRLDERIDRLSGEITAVARQDAGCERLVSVPGIGPIISSAMVAAIGTGEAFSKGRDFAAWLGLVPKQISTGDRTILGKISKRGNRYLRVLFVQAAWVVLIKPQSWQRHGLKPWIEAAKRRLHRNVLAIALANKLARIAWSVLAGGRTFEARSAMMPAV

SEQ ID NO: 110691 - protein, 339 aa, unidentified
MMAPRCFDVAYLFKFIIVMTYIGIDVSKDSFVVAYSPEKNSKTKTFKNTTRGIHEFIRTISKDEHHCVMEATGNYSALLVYLLSEAGITTSLENPLKVKNFARAMLSTVKTDEIDARLIALYGEKMQPAPYKLRSDAILTLKQKRTVIRQLKKQLIATRNLKGSMEVLPFFDVKCKKSIERTIAFLEKQVKDLEEDLSSLARSEYKKQMDLLTSVKGIGVTLAAALIMATGGFTYFDNAKQLTRHLGLSPTYQQSGTSVNFKGHINRNGDSSLRSQLYVAAFASLRCNTECKACYDRLRSKGKPGKVAIVAVANKLIRQAFAVVTQEKPYVDGYISSKK

SEQ ID NO: 110692 - protein, 341 aa, unidentified
MKVSTISIDLAKNVFQVMGFSHEGKTLFNKRLNRTQLNEFMQMQPKCRVVMEACYSSHYWGRTFNAMGHNVGLVPAQHVTPFVRGNKNDANDTLAIFEASQRPFIRFVPIKTEAQQEILMLHRLRERLLKNRTSASNQLRGLLTDFGIIFGLGHKAFNDKMKDLLISDKLSVTIKWVISDVYQEYTSLIERLKKIEKQLKDEIKANPLGQILLSIPGIGFLNASAFVASIGSGQAFLSARDFAVWLGITPKQYASGHKSVMTGITKRGDCYLRKQLIHGARALISRAGKKQDALSVWICQLRARKSFNCTAVATAHKLARILWTLLQKQCHYTPQVVQVAV

SEQ ID NO: 110693 - protein, 347 aa, unidentified
MDTIGLDLHKRESQLCILTPDGTARELRIVTSRERFTAVLGPLAPATVLLEASTESEWVARHLEALGLTVIVADPNYAPMYATRTRRVKTDRRDARTLAEACRLGAYRRAHRLSDARRHVRAELAVRDALVRTRTRYIAIAKSFVQRDGLRVAGSESERVAERIAALELSPTLAGELAPLVALLAPLNAEIAAADARIAQLTAADPVVALLTTAPGVGPITASALVATIDDITRFHSAHEFEAYLGVVPGERSSGEKRRVGRITKAGNARVRWLLVEAAWRIARSRREETAALRAWALGIAVRRGKRVAVVALARRLAGILYAMWRDGVAYDGRKVRAPRPRAASAA

SEQ ID NO: 110694 - protein, 342 aa, unidentified
MDEYDGRQFVGIDLHRRRSVIVRQSESGEQLSAVRIVNDPVALGLELEQAGSDPEVVLEATYGWYWAVDVLQACGARVHLAHPLGVKGFRYRRVKNDVRDAADLADLLRMGRLPEAWIAPPQTRELRELVRYRAKLVSIRSGLKAQIHAVLAKAGVLIAVSDLFGVTGRQRLAKVPLRPAYAQRIRSLLELIDILDSHEARFAALIAERLHTHTGYHAIQQVPGIGPTLAAVFVAEIGDVHRFTDPAHLCSWAGLTPTHRESDTVVHRGHITKQGSKAVRWAAIEAVQRHPTTAKIAADKHRIEARRGKNIAKVAAARKLLTLIYYGLRDGQIRALDRARPA

SEQ ID NO: 110695 - protein, 601 aa, unidentified
MTFKVVRFICGGMDVHKNLIVATIGTTDRQTLITEYIQQSFSTFYSDLIRLKEWFISHDCYDVCMESTGKYWIPIYNVLETELNICLTHPKYVKAIKGKKTDKRDSKWICDLYKCDLVKHSFIPKKEIREMREIARYRCKLVYMRSSERNRYQNCLTVSNISLASVVSDPFGKTATNIMKELMQSEVIEDDKILKLIHKNCKDKDKILDSLQGYRIESDQRFKMDTVMNHIEYLDKQIQACEAELIKRAYPLRDYFQHITHIKGISALSAILIVSEIGTDMNQFESDKQLVNWAGLSPANNESANKKKSVRISKAGQYLKPLLVQCALSSIKDKNSYFGIKYCRIKKRRGHKKAIIAIARMMLVCIYHMILTGEEFNPCDYESLTNPKPKKEPILEMGHGFCFEARQKRILIDEDYFFADLVARPHQRGDKFCTLIDDSFFDVEFKVLESELASVVIGTTVKVSPFIDESIVLNGTVTESNPTIDEKGLVSIKARVKNTSSKLLDGMNVKVVVENSVPDMFVVPKEAVVERDGYHVVFVYDKDTHHAIWTYVDVLYSNLSSFAITGCEKKNTSVNNYDVVITSGNLNLADDTEVRIASEEK

SEQ ID NO: 110696 - protein, 425 aa, unidentified
MSKQNVEIAAFIGLDWADQKHVVTLQEAGSHQRQRFTLDHTPEALQSWIHLLRHRFAGKPVAIAVEQTRGGLIYALMHVEFLHLYPVNPQTVAKMRQAFYPSGAKDDPTDADLLLEILMTHRQHLRVWIPDDVLTRSIQLLNEGRRGLVDERTALTNQLTAALKAYFPQALDWFGDLHTARACAFLKRWPSLQYLKRATPSSIRKFYKAQGYRGQDKLEQLITNIKQAQPLTEDGAVLLASAMMVQALVTQIPSLTESIERYDQQIASLFDQHDDSTLFGSFPGAGPTLAPRLLAAFGSNRDRFEEASEMQQLSGIAPVTEKSGKSIWIHWRLACSKFLRQTFHEFAGCSILQSDWARAYYDQQQRRGKSHHAALRALAYKWIRIMFRCWKTRTPYDEALYCKSLKLRRSPLAAELPAAAEIVLT

SEQ ID NO: 110697 - protein, 414 aa, unidentified
MDVVVERCAGLDVHRDSVVATVRLPAKGKSRRRREQQTRSFGTTIGQLDTLADWLAGFGVTLVGMEATGVYWKPVFYVLERRFECWLLNAQHLHNVPGRKSDVIDSAWCCQLLEHGLVRPSFVPPPEIRRLRDLTRLCVAQVEERTRAIQRLEKVLQDAGIKLSSVASSTYSASARAILEALLGGVSDPAALAELAKSRLRAKIPQLQEALANRFELGHHGVLVAGLLAHIDALDQTVATLDARIEAATQPYADLVELLRTIPGVGVNTARVLIAECGLDMSVFPSAEHLVSWAGICPGLNTSGGRRRSGKTRHGNRWLRKALTEAARAAARSKDTYLASHYWQIRGRRGDAKAIGATRHDILIAYYHITRERVPFRELGPDWLARRHSLEHRTRRLVRQLEALGHTVSLETAA

SEQ ID NO: 110698 - protein, 391 aa, unidentified
MIYVGIDVAKDKHDCFITNSDGEVLFKSFTISNNREGFETLFQKVQSVSDDLTKVKVGLEATGHYSYNLLGFLLDKGLPTYVINPLHTNLYRKSLSLRKTKTDKVDAHTIASMIMSDVNLKSYSDTSYHNEELKSLTRYRFDKVQERAKLKTSVSRLICILFPELEKLVATIHMASVYALLSEFPSAHAVASAHLTRLTNLLSESSHGRYGKDTAVMFREAARNSIGSNMPAKSLELKHTIKLIQELTSEIDEIETEIKSIMDEVNSPILSIPGINYRMGAMIIAEIGDFSRFDSPDKILAYAGMSPSTYQSGQLDNCYSHMEKRGSRYLRYALYNATKYVCHWDESFGTYLAKKRAEGKHYNVALSHATKKLVRTIYAMEKTGQSYSSAS

SEQ ID NO: 110699 - protein, 420 aa, unidentified
MSSARELYWVGVDWGDRRHVVEVVSDTGERVGSFAVEHSAEGLAELVARLRAAGEVAGVAIETTRHLVMHALLEAGFTVYAINPKLSHAWRKGVSVVEAKSDGMDAWVLAEGLRVHHGHLRSYIADDAQTRQLAMLCHDEQHLIEQRTALVSALQAALKQYFPLALQWFSKWSAPAAWDFILTFPTPQALKRATKKKLCGFLARHYIGLGPIWQQRIAARDKATTFMGDIATTEAKSMLAVGLAKQLRTLQAVLEIYRDKIEMMFDHHPDAALFKSLPGAGPKLAPRIATIFGCDRLRYASAHGVQELTGTVPVTRQSGRSKTVAFRRACRKPFRNTMHQFAFCCLRNSVWARAYYDAARRQGQSHAQALRNLGARWLKIIYRMWVERTPYDEQRYLDALVRRNSPLAHQLRLKQTVNNL

SEQ ID NO: 110700 - protein, 346 aa, unidentified
MLHAGLDLSRKRLDFHLLDEQGESVEVGAAPPDADGLRGLSVRVDRYRQPVRAAIESMTGARFVHDQLELHGWEVEIADAVKVKGLAPLACKTDRIDAWVLAELSRRELVPAIWLPDPRVRAERERARFRLHLVRHRTSLKQRVHATLLTHGKPCPVSDLFGVRGRELLAALELPEPWATDVEASLRLIDELEREIAACEVELRTLGAEHRYVPLLTTIPGIAWVLAYTIAAEIGDIARFSSPAKLTGYTGLCPRVYQSGESDRRGPLSKMGPRYLRWALIEATTHASRHPAFHDRYEQTKRRLGKQRGPRVAQVDLARRLAEAIWHMLTHNRPFAPAGATAPMTA

SEQ ID NO: 110701 - protein, 397 aa, unidentified
MFYLGIDIAKHKHYASIIDSTGKPITKPFPFHNHKEGGQALLTWLYRYISSPTELSIGMEATGHYWIAVYSFLLDHGFSVIVLNPLQTNAWRKGTEIRKRKTDAIDATMIADVIRFGRFLETPLVDEKMFALKQLSRFRNSLVRNISDLKRKALVVLDQTFPEYQSIFSNVFGKTSSQLLIDYTSPSDYERLSIDDLTLIIEQASRCRLGKKTANQLMELASNSFGVTFCKDAFSFQLKMLMEQIRFIETQLRECENQMSQLLSDLDTPITTIPGIGPILGATILSEIGDIGRFDKPSKLVAYAGIDATISQSGQYESTGMSMSKRGSSPLRRALFQAAITAYKHDPVLKAFYEKKRNQGKHYYVCIGAVARKLCYIVYAILKSNKPYKIPPFPCQR

SEQ ID NO: 110702 - protein, 366 aa, unidentified
MGAIYIGVDFHSRQQTICYLKTETGELVISELQHQDKEQVRAFYQQFQGQVIIGLEASGYSPWFEALLERLGCEVWLGDATEIRRRARWRQKSDRRDAELIWDLMVHDEFPRLHQPAAESREVLRMLRYRQKLIKLRTMSKNSLQAIALQAGLAKGKQLFTRVGQEQFQALPMSPVLQWQRDHWFELLKPLNQQLLETMVWCKAQSKDDVNIQRLRTHPGLGLLTSLCLQHTLQPISRFRNQRKVVAYAGLDPVVRSSAERALHLGISKGGSRMLRYLLVEAAHTAIRYDEDLKRFYQRLVERRGRPKAKVATARKLLIRAYIMMRDEIDYAEFRRRAVAARLARTGQGPTTVPVVLIGQSASPGA

SEQ ID NO: 110703 - protein, 337 aa, unidentified
MEHFAGLDVSMEETHVCVIDREGKVILEVRTPTVPKAIAAALAKGPALERVLFETGRMAPTLFHGLTALGLPVVCVESRQAYQALRSLAAHKTDRNDARGLAHLARTGFFKPVHVKSLPSHAVRALIIARKKLVGQRVTLENQIRGLAVAFGVRLPRGLSPGFAENGMAVGRGIPGLDGAMRGLLAARDAILKAIVAIDADMKTLERSSAACRRLMTIPGVGRLTALAFAAAIDDPGRFRRSRDVGAYLGLVPRRYQSGEIDYTGSISKCGDGRLRTLLYEAANVMLTRYRGSLALKTWALDIARRSTMRKARVALARRLAVIMFAILKHGTEFEPA

SEQ ID NO: 110704 - protein, 334 aa, unidentified
MKQVNQIGVDVDSQELVCAMQCGAQRVPIAMFANTAAGHKKFIRWVTKGGRAARVCLEATGIYSRQFALALHHAQRVEVMVVNPRAIKDFGRACMQRAKTDAVDAGGILEYLQRMPFAAWQPPAPEIFELQAINRRIVQLTTELTREKNRHHASEFAGASANALAHDIEVNIHHLERRIERLHHSGLQLVRGVPPLATKLAHLISTKGIGETSAMRLLAELLMLPDDLAAPQWVAHAGLDPRPYESGTSVNRPRRISKVGNRHLRAALYMPALVAIQHEPNVKAFYNKLVAAGKKPMQAIVAVMRKLLHAIWGMLKHDQDFDGNKFFKIAAKTT

SEQ ID NO: 110705 - protein, 389 aa, unidentified
MYFVGIDISKYKHDCCIISAVDQQIVSKFTITNDKDGFEQLLISLNSLSNPEDIKIGFESTAHYALNLELFLENVNHSFMEVNPVLIKEYKKSTTLRRTKTDSVDCESIARWLMTVEYKPHSKGFYHAYSLKSLTRLRDRLIRQRSFYLVKITNVLDHTFPEFKPFFNERLSKTAIYLLENYGSAEKMAHMNSASYDKLRCISRGKFSIQQFLHLKELAANTVGVNNSIFDIELNSLLTLYNSLCKEIKNLEAEITRLIEEVHPHYMSIPGIGPISAAVIYAEYGDISNFSNPSQMLAFAGIEPGINDSGTESHGGRMVKHGSSQLRYVLLNACLPLIRFDLTFATYYAKKRAEGKKHRVAITHVAKKLIRVIYALERQDVDFNAQKIR

SEQ ID NO: 110706 - protein, 349 aa, unidentified
MLHVGLDLSRKRVDVCLVSGEGELVEHFRAPADRDGLYGLTRRVAVYDEAVRGVVESMNGARFVHDELVKCGWEVLVADAQRVKGLAPLACKTDKVDARVLAELSFRDLVPAIWLPTPELRAERERARWRLHLVKHRAILKNRVHASLIAFGHQVPMADLFGVAGRRLLAELDFPEPWLGHVQASLELIDDLDHRIGEIERWLRRSGADHRYIPLLMSAPGIGWITGFTIAAEIGDISRFSSPVKLTGYTGLCPRVSQSGEVDRRGPLSKHGPRYLRWGLMEAAIAASSHPLYRERYQRTKRRLGRQRGAKVAQIERARKLTEAIWYMLTRNQPFKPFAPAGAIIRLTA

SEQ ID NO: 110707 - protein, 393 aa, unidentified
MSKLFVGIDVSKNSFDVCSINEEEKVVFNDKLNIDHNGFNNLLSKLKEYKIDDTIIVMESTAIYHLTLLSFLLTHNYKTAVINPFLIKSFIESNTLRKSKSDKKDALHIAKFALAKYKNISFYNIDSLESIKPLLREKENIVKDAGRAKTSIKNMVTQLFPELEQSVSKLYSNAMLNILYEYPSAKEVEKATVKRLDELLTNRTKMSANDLKELAKNSIGSNSEVLKEILKSKIRRLNSLNEELDRVDTLLEKYIQEDESTKKNKEILESIPGIGVGTSKSFLIELESIKRFSSVKKLSAFIGIDPSFYQSGQVYIQGSISRRGSKHLRRTLWYMAVGVIKSNKKFKEYYLKKRQEGKKYKQSVIAVANKLLRTIFILLTKQVLFDEEVAFAK

SEQ ID NO: 110708 - protein, 350 aa, unidentified
MVVVGADVHKRTHTFVAVDEAGRKLAEKTVKAITAGHAEAVMWAREQFGAEVVWAIEDCRHLSARLERDLLGLGQKVVRVPPKLMAQTRASARTRGKSDPIDALAVARGFLREPDLPVASHDEVSREVKLLVDRREVLVAQRTATINRLLWRIHELDPERAPKPRSLDLAKHRRLLSDWLNFQTGIVAELARDELADITRLTQMINALAKRIGERVRVVAPVLLDMPGCGELTAAKLVGETAGVARFKSEAAFARHAGVAPVPVWSGNTRGRVRLTRSGNRQLNAALHRIAVTQIRLDGLGQTYYRHRLAEGDSTPEALRCLKRRLARVVFNHLHTDHNNRQKPCQPAAA

SEQ ID NO: 110709 - protein, 425 aa, unidentified
MKQNQKIERITAKTLVVGVDIAKNKHVARFLNYRGIELGKHHSFNNTREGFRSLVVKIRTEMAENGLDDAIVGMEPTGHYWFNLGDYLLDHDIEIALVNPYHVKNSKELDDNSPTKTDIKDAKVIAQLVKDGRYSVPNIPEGVYAEIRTGMNQRERLMGDLNRVKGRIDNWLDRYFPEFDEVFSDWSGKAALGTLQEFPLPAEILAFDEHQIAARWKKYVKRAVGKKRAKALIASAKKSVGIQRGLALAKRELKILIEQYKLFDKQLEQLMEVIAGLIQQIPEAASMLTVPGVAVTTAAGFIAEVGDLSQYKHWRQVQKLAGLNLKEHSSGTFKGQTKITKRGRPRLRSLLYKCAMVLVAQNSEFKALHQYLKTRSKNPLKGKQSLVVICCKLIRVLFTLGKKRLEYDPDKVLGAYRENQIKQAA

SEQ ID NO: 110710 - protein, 358 aa, unidentified
MRIIGCDLHARQQTIAMLDTDTGEFVEKTLEHDGEELRKFYSGLTRPVLVGIEATGSMQWFLEWMEELSIECRVGDPAKIRAAEPRKQKNDRRDAQLMLKLLSENRFPTIWMPSTEQRDLRTLLRHRHQWVRMRTRVQHTLQSMALNHGLRRGHSLWNQAGQQALRAVPLAPHASERRKALMTLYPRLQESIDELDREVSQQAQNHPAARRLMTHPGVGPITALATEVFLGDPLRFTDGKAVASYIGMIPREHSSGGRQRLGAMSKQGNALLRYLWCEAAMHAVGRDPQLKRFYRRKLVQKGMGKARVSAARKLGIRLWIMMRDQIDYQEFCRRGKARQESGSVCAGMSDITNGPAEA

SEQ ID NO: 110711 - protein, 334 aa, unidentified
MWHIGIDLHRKMLVMAAVKDDGEVIDPVRIDCQDTAAILAAVEGLKPFRAVIEATGTYRWLYDLLSPHGTVLLAHPLRLRAMIQRRAKTDKLDAQLLANLLRINQIPLAYVPPEDYQQLRDLTRTRARLVRGQAEAKIKLRALLARQNRSAPYKVPFGPRGLAWFAKQDFGWLENLVRDELLARMKHYAKHTATIDERLEELRERFPEAGALLEIYGMGVFSALVIIAELGEVDRFRTARQVGAYAGLSPQVHQSGSHCYHGSISRQGSPWLRWVLVQVAMHVVRDDVALQNFYTRIRKRSSAKIARVAVARKLAEICWKRLRRWHEQHGRKAA

SEQ ID NO: 110712 - protein, 416 aa, unidentified
MEVVIERVAGLDVHKETVMAAVRTPGGRNRSEEIREFSTYTGDLVALRDWLAERQVTQVTMEATGVYWKPVWNVLEDAEIFELILVNARHVKNLPGRKTDVSDAAWLARLAECGLLRGSFVPPREIAELRDLTRYRKKLVEERVREVQRLQKVLEDAGVKLESVVSDVTGKAARQMIEALIAGERDPAVLADMALTRMRPKIPELRRALGGRWNGHHSVLATMHFERMDQLAQTIARLDTEVDRVMGPFADPLARLETIPGIGKRVAEVIVAECGVDMTRFPTAAHLASWAGLCPGHHESAGKQASGRARKGNAALRVALCEAAWSAVRTRDTYLSVQFRRFRRRFGTRSEGKAIFAVAHTLVVIVWHVLASPDATYEDLGPDWFTSHSDTQAHVRRLVTQLERLGMKVNLEPTAA

SEQ ID NO: 110713 - protein, 291 aa, unidentified
MEKLYGGIDIHKEKLVGCIMDKDGNITREHQFPSSKKAVERFLCGIPNSGITIAIEACGMWRGTYKILTDMGYEVKLANPKKTHDIACKKKTDQVDAKILADLLRTKYLPEVWIPDEQTLRFRDLARHKSNLTRLRTQIQGKIKGYLLRNGRKYSKSWNEKTLSVLAAEDPDVKNLVNVYNSLHEQEKEVMKRIKQVARNKKETTLLMSMPGIAEFSSLMILAEIGDIQRFRSPKELVSYAGLCRGIYQSASTERSVHNTAVNKWLKWIIYECSGRAIMLDQRFQQYYYPI

SEQ ID NO: 110714 - protein, 354 aa, unidentified
MNTTQTSTKSKIVKVIGVDLAKDHCDVIGYDENGKICLRLDGCSYAKLREILAKLPQAVVLMEACKGSMFHARSIADLGHEVRLVKGTDVKALRNVNHKNDLRDAAYIANLYFVPGIKYVYIKSQQQQSLQFLQNEYKSLQELRIQVGNQIHAGLEEFGCPVRKSSKFIKTRMVAHLEKHAELIPEDVMASFKRRREIWLNLLQQEEEAKRRLEQVAATDANAKRIMTVPCVGPQTAVGLLVHVGVDFGRFKNSRQFAASLGLVPKQNSTGGNNTLNHITKCGPKSLRSNLVQCAQLVLMYAEKWKGNFGDWVRKMRDSGKKHGVIVCAIAAKLARIIYRLMKDKVDYTPILSC

SEQ ID NO: 110715 - protein, 366 aa, unidentified
MQKLSTRRVMTNRILKGQQLTIGLDLGDRWSFYCVLDERGEVVREEKLPTTPDAMKRTFEKLRRSRIVLETGTHSPWISRLLRGLGHEVIVAHAQKVHLITKSSRKDDRHDARTLARLGRIDPELLGPVRHRSAKAQIHLTVIRARAELVSARTALINAARGLAKSYGERLPKRGTQQVGRELAAALSTVLREVLEPLLREVESLNERIREYDQRIEQIAKEVYPEVALLKQVKGVGTQIALTYRLTIDDPHRFSKSREVGCFLGLRPGRRNSGQSEPEKKISKEGDRYLRTMMVQGAHYILGPFGEDSDLRRWGLKLAERGGKNAKKRAIVAVARKLAILLHRLWVTAEVYEPLRNSRRAMGAAA

SEQ ID NO: 110716 - protein, 351 aa, unidentified
MKKIFIGIDFSKEKFDATLIKSEGLKECAPSVHEVFNNKTSGFRRLVTWVKAQSESAPIDSWLFCGENTGGYSIGLSNYLYASAYDMWLECAYKIKHSVGIQRVKNDKADSKAIAEYAMRNYDKMILYKPQSASLTCLREVFLYRHSLVRQRVSLQVRRDEKRLTQEKTDIKVFMSFTSKHLITEVNKAIAKCDQKIKDIIAADDELKEIFDIITSMPGIGIQNATCLMVYTDNFQKFDMNARKIGCYYGIAPFGRQSGSSVKSRPQVSPFANRMIKSMLSQAALVAIKFDVNVYNYYQRLKERGKHPLLIHNNIKNKMLHALVAMVRDRVKYNPDHVYQTNKEIAYSAKC

SEQ ID NO: 110717 - protein, 347 aa, unidentified
MKVTTIAIDLAKNVFQVLGMTAEAKKVYNKRLNRAQLKELLCNTPACIVVMEACYSSHYWGRTAQQFGHTTKLIPAQHVTPFVRGNKNDSNDALAIFEASSRPNIRFVPIKSESQQEVLMMHRIRERIIKQRIACTNQARGLLVDFGIVFQQGFSAFERNMWDIINDSEQRPLLRYLVNQVYDDYLQMTKQLKGLNKLIKQKVEQTEAGLILLSMPGIGHVIASAFEACIDKGQAFNSPKELAVWLGLTPRQYASGNKSKIYGITKRGDSYLRKQLIHGARTVVCHAHKKDDALNQWITQLKARIGFNKATVATAHKLARIMWVLLRKQVLYQAQAGKIVEVTECAR

SEQ ID NO: 110718 - protein, 339 aa, unidentified
MSSLHYVGMDVHKKTISYCVKTRAGRPRGEGTIPATRAALDAWAAERTRPWVGAMEATLFTGWIYDRLAPHARELKVAHPLMLRAIACSKRKNDRIDAEKIADLLRADLLPECYMMPADMRDLRRVLRYRNLLVREATRMKNKTSGLFMEVGAEFEKKKIHGKRYFREFVANLADTPPSVIDMARHCHSFLALFTDLQKRLIAGLRRAPLIAERVALLMTIDAIGEINALTWALEIGDPHRFANRRQAISYCGLCGGQDESAGKTKRTPISKKRNKHLQTMLVEAAKLAPNWNARLAAIHERELARGNRNRATLEVARRLVGLLLAVDKSGIPYDPGRR

SEQ ID NO: 110719 - protein, 375 aa, unidentified
MKDKVRFLGMDVHAETISVAVAEADGEVRSLGTIANRAESIRKLIRKLGSVDQLRACYEAGPTGYVLYWQLSELGVECAVIAPTLAPVKAGDRVKTDRRDAERLARSHRAGDLTPVWVPDAASEALRDLVRAREAAKQDQLRARHRLSKFLLRQGQRPAAGVKAWTVAYMTWVRQLRFAQPAQDAVRLDYLHEVEHMSERIKRLEEAIREAVGQAPAPMQAVVQGLQALRGIALISAVTIASEIGSVSRFPNARQLMGYSGTVPSENSSGRRTQRGGITKTGNAHLRRILGEAAWSYRRQPAVGPALRKRQEGVPDEIRQIAWKAQVRLSKRYARLAAAGKDQRKIVTAVGRELLGFVWAIGLRAEASARQTIAA

SEQ ID NO: 110720 - protein, 342 aa, unidentified
MQVTTIGLDIAKNVFQVHGIDAAEKVVVRKQLRRSQMLAFFKVLPPCLIGMEACATAHYWARELRKLGHTVRLMPARDVKAYVKRNKNDSADAEAICEAVRRPTVRSVQVKSAEQQSQLMLHRARDLLMRQRTQVINALRAHLAELGITAAQGTAGLKELLKIIASDEDERLPADAHASLVVLAAELQAMQTLIGSLEKRIMAQHRKSEASRRLQTIPGIGVIGATAIAATVTDPKSFRSGRDFAAWIGLVPRQDSTGGKQKLGPISKQGDRYLRRILVVGAHAVLKLAKQHPEKYPWLTQLLARKPFKVVAVALANKMARTAWALLAHGGKYRRPALVAAQ

SEQ ID NO: 110721 - protein, 401 aa, unidentified
MTATHTTNSTVFHAPVLYLALDLGASSWKLAFSVGLGQKPRIKTITARSTLSLVFEIKAAKKRFGLPEDAPVVCCYEAGRDGFWLHRFLLAEGIQNQVVDSSSIEVNRRRRRAKSDSLDAAKLVEMLIRWHNGERKVWSTVHVPTVEQEDQRQLHREMLKLKAERTAQGNSIKGLLAGLGLCVIVDETLPTQLQNLRQWDGAKLPPMLHQRLLREFQRWQLIDRQIRELEAQRMAKIRDDKTPHVEKVRRLLNLKGIGDNGAWLLVYEFFAWRMIKNRRELASLAGLTPTPYASGESQREQGISKSGNRRVRFMITELAWGWLRYQPESELSQWYMRRFGQGNKRLRKVGIIALARKLLIALWKYVEGGEAPAGAEELGWDNKPRFRAVKSRRKQEVLQTG

SEQ ID NO: 110722 - protein, 406 aa, unidentified
MNMNAVGIDVSKRKSTVAILRPGGKAVRKPFDVPHLSADFQSLINQIRELDGETRIVMECTGRYYEPVARELSHAGFFVSAVNPQIIRNFQGQDNPLRKVKTDKADSVKIARYTLDSWDKLKQYNLMDELRSQLKTMNRQFDFYMKHKTAMKNNLIGLIDQTYPGANTYFDSPAREDGSQKWVDFLDTYWHVDCVRKMSLNAFTDHYQKWCARKKYNFSKSKAEEIYGKAKELIPVLPKDSFTKRIIKQAIEQLNTASQTVEQLRSLMNETASRLPEYPVVMAMKGVGPSLGPQLMAEIGDVARFTHKGAITAFAGVDPGVNDSGDYSQKSVHASKHGSPVLRKTLFQVMDVLIKTKPDDAVYLFMDKKRAQGKPYYVYMTAGANKFLRIYYGRVKEYLATLPASD

SEQ ID NO: 110723 - protein, 300 aa, unidentified
MSWTVAIGVDTHKDMHVAVACDALGRQLDSCSLPATSAGYLALWRWAETLGEPAFAVEGAGSYGAGLARFLRAAGGNVYECERPRRRERRGGKSDLIDAALAARRLLAGEGLSRPRGDGAREDLRLLLLERRGVVRAQTAALNQLHSALLAAPASMRERLSELHGARLVAACARVSVRAQEERVLVGVLRRLVSSGDPARMRSESSFAALAGTSPVDASSGRHQRHRLNRGGDRQLNRALHVIALNRVRHHGETSRYYGRLLDSGKSAREARRCVKRALARSFYRRLCELPRLQEVPLRA

SEQ ID NO: 110724 - protein, 416 aa, unidentified
MNAVGIDVSSRKSTVAVLRPLGEVVCLPFDVTHDIAGLASLVEKLKALDGETRVVMEHTGRYYEAVEKALHEAGLFVCAVNPLLIKEYGANSLRRVKTDKADAIKIARYALDNWADLRDFTPMDAIRYDLKTLNRQFQLASKQRTASANNLIALLEQSFPGIRKCFDSPVRSDGTQKWVDFAHSFWHVDCVRKQPFAAFCERYRKWCKRHAYLFKLSNAEEVYALAKRAVVLTPKSKVVKVLVQEAANQLSSISRSVEVYRAEMDRLAAMLPEYPVVMAMYGVGKSYGPQLMAEIGDVRRFERKQALVAFAGIDPMPNQSGDKNVRSNKSSKRGSPYLRKTLFNVIRTYLQCAPQDEPVFQFLNRKRAEGKPFYVYMLAAANKFLRRYYAKLRDFFASLDTLQPVAPIPTILKATL

SEQ ID NO: 110725 - protein, 418 aa, unidentified
MKVIYPICCGVDVHKTFLVATIITSQGLTPHYSKKRFSTFNNSILQFKQWLLDNDCFDVCMESTGKYWVPIFNLLEDTIHITVANPKWVKAVKGNKDDTKDSKWIGDLFRLGLVPGSYIPNKPIRILREYTRYRSKLVSCKSSEKNRFQNAFTVCNVALDAVVSDMFGKSASSITDYLVASDSFDPEYCSSLLQRSLKKKADTVIESIEGYQMTKEQKERIVMVRSHLEFVQQSITKIDVLLDKMVAPYESAITLLCTIPGVGRASAITIISEIGTDMSQFANSKRLCCWAGLTPGNNESAGKKKSVRITRAGVYLKPALVQVAHAAVKSNISPYYRVKYEHISKRRGKKRAIIAIARMILTAIYHMFVTGEVFNPSDLYKVDMPQEMVEKQKVKAIKQAAKLLISLGLIKATDISVA

SEQ ID NO: 110726 - protein, 417 aa, unidentified
MIISKTENEHNVNGQEMLVGIDVAKQTHVARILLTDGRESKAFSFHNTREGFESLMSWLMLNKMRFGCSSILAGLESTGHYWEALAFFLDGENDIRLVQVNPKYVKKTKELYDNSPGKTDSKDAGVIAMLIRMGKFQRLVLPKGHFAELRCYSKLREQKVVGLGVQRNILHSLVDPIFPEYGGILKKLESKTSLHILKNFTTPDGILIAGIKKLTFSLRTASHGRHSHACAERLYSAASTTIGVREGIEAAAYAIRSSVAAIENIQKDISVIEKELLRVLQKIPYAGQLLSIPGIGPVSLAIILGEAGDLHRYKKAEELIKLAGLNLFEISSGKHHGQRHITKRGRPLLRKCLFFAALRTVKTGGTFREDYLRHTKTNQMHKTKALVAISRKLLRVLFALVRDGVQYNQKKMELLAA

SEQ ID NO: 110727 - protein, 453 aa, unidentified
MARKRKKETKTNNAVLPVMRPDAAGIDIGATEIFVAVPADRAAENVRSFPTFTQDLYLLADWLKQCGIKTVAMESTGVYWIPLFQILEDRGFEVCLVNARHVKNVPGRRTDVSDCQWLQFLHSVGLLRASYRPEQEVCAMRSLLRHRESLVQMAATHVHHMQKALDQMNLQLHHVISDITGQTGLAIVDAILAGERNPVVLAKLRNDRIKASEEVIAKSLVGDYRPEHIFTLQQSLAAYRSYQKFIDDCDREIRRMLEEFKPPRQPDACASDTQKRQTKTSSSEGGLGTELKRVFGVDLTKIPGIRVGIAQTLFGEIGPDFTKFRSASAFASWMGLCPDNDISGGKVLWVGTRKVKCRAATALRLAAQSLHHSKSALGDFYRRMRAKLGAPKAITAAAHKLARIIFHLITTGHQFDESKFAADQLRYQKKQEGKLRAKAKAMGFTLIPLGQPK

SEQ ID NO: 110728 - protein, 457 aa, unidentified
MTNEDRTAHTGGEGLVVLRANVAGIDVGSEQHWVCAPARTGGGREVAVFGATTPGVEQMAMWLKDRGVASVALESTGVYWIVPHEMLEREGFEVVLVDTRELGRVPGRPKSDRRDCEWIQRLHSCGLLRGAFRPIEQVCLLRTLVRDKGTLVAERTDWIRRMQKSLDQMNVRVHRAVSDLDGVTGMAIVRAIVAGERDPRRLATLRDRRCQKSEAEIAEQLTGHWRADHLFSLHQSLKMYDAISERIHDYEQEILRQLAEMTPADRQDDAPPPLATTTKARAIKKRGEDPLRHALYRMSGVDLTAIDALGVETVSVVLSEYGPDLARFPTEKQFVSHVGLAPHKPISGGKPVKKRKKPASASARVGAALRMAALSLRRSQTALGAYYRRIARRIDADVAVFATARKLAQLIYRVLRFGHVYIDEGAATYEKRYHQARVKRLAVTAKDLGYMLVSVEA

SEQ ID NO: 110729 - protein, 424 aa, unidentified
MSYRIAGIDVHKKMLAVVVSDVEVDGEYQFERIRYGSSPEHLRLLAEWLIAQQVEEVVMESTAQYWKPVWGALERYWKPICRERESAGPMSGTLHLAQAQSNRGRRGRKKDFPDAERLVKRLVANELTLSFVPDTEQRLWRTVTRRKYQLTRNHVRLQNQLEGLLEECHIKLSSLVSDLLGASARRMLQALAERETNPAAVAALADKNLRATQAQLCDALGACTELKPIYRRLLKMFLEELQLIDQQISQLDQEMASLLSQHQDSVKRLAEVPGLGVDSAQQIIAEVGAKAATFPSAKQLSSWVGACPGDEESAEVSKSHRSPKGNRHMRRILNQAANAAAKSKGTIFEIVYRRLISRLGHNQTIGAIAHRLCRLIWIILHRGVRYEERGPSVSAKSRRHRTSRMIRELRSLGYQVEPVVTTTV

SEQ ID NO: 110730 - protein, 414 aa, unidentified
MDLVHPRCAGIDISKRDAKLCVRIASSGRARAISSVTTWGAVTSQILALRDHLVAAEVTLVVMEATSDYWKPFYYLLEDGPFEVMLVNARHVKGIPGRKTDVSDAAWLAQLGAHGLVRGSFVPPEPIRQLRDLTRTRTAITRERGREVQRLEKLLEDAGIKLSSVASDITRVSGRAMLEALIKGERDPAGLADLAKRRLRAKIPQLTEALTGRFAEHHGFLARIHLDLIDNHTRAIEELTARIELVMEPFRATRDLIVTIPGISTLVADVIIAETGGDMSRFPSAGHLASWAGTCPGSNESAGRIKSTRTRPGNPYLKGALGAAALSVARSKNTYFAAKFRRIAARRGPMKALVALQHAMLVAVWNMCSTGSYYNDPGEDFFTRLDPDRAKNRALAQLRRMGYAVTLEPTRTAG

SEQ ID NO: 110731 - protein, 432 aa, unidentified
MDVLYERVAGLDVHKDTVVACVRIMVDGKTARECRTFATTTEQLVALRAWLEECRCTHVAMEATGVYWMPVFRLLDADKFALIVANAAHIKNVPGRKTDMNDAMWIADLLACGLIQASFVPNEEVQELRALTRTRKQLVREQTRHVQRIEKTLAEANIKLSSVISDIMGASGRRMIQAMIDGVRQPNKLAELAGKQIKASPKELYDALHGRLTDHHRFLLALHLKQWDSIDETIRKLDGELDQRIGRMETAAEDRKIPFRALIELLTTVPGVSAVAAPAILSEIGPDMSRFPTAGHLVAWSGLCPGHNESAGKRKSSRLRKGAPWLKTMLVQCAWAAKRTKDSYYRAQFFRLQAKRGPQKPFAPSPHRSSPRSITSSNMAPNTMTSAVPTSIAGLWRSKRAGWLHISKSSASTSNYSQSRRPPDPIRPVVSS

SEQ ID NO: 110732 - protein, 383 aa, unidentified
MATRSVAKTDQTKAKIQRESSRRPGPGVRSTLGVTKPTRRRQKETPVEQPTQYVGIDLHRRRSVIVRRDGDGETLDTVRIDNDPVALAAELVKAGEHPEVILEATYGWYWAADVIKECGGNVHLAHPLGNNWGNRRVKNDERDATDLVDLVRMGRLAEAWVAPPPLRELREHIRYRAKLVHLRSNFKAQVHAVLAKEGVAVPMTDLFGVGGRRLLDEVHLADAYRIRVESLRELIEHVNREIVMLEKQTAPYFAGDLGYHAVQAIPGVGPILASVFVAEIGDIERFKSARHLCRWAGLTPTHHESDVTVRRGHITKQGSRLVRWAAVEAVVRQRGDTAIRRHHHKVGERRGTNIGRVAAARKLLILVYYGLRDGEIRCLAETG

SEQ ID NO: 110733 - protein, 392 aa, unidentified
MRLSVGIDIAKEAHWVTAIDVDGVVHIDHKLENTPAAIADLIEEMTRLGGSVRIGLDVVGGIAGLAEAMLAEAGFALVHVPGLAVNRARQGTVGGEHKSDPRDARVIAEQVRIRQDLRPIEPASEIDLELRLLVGRRRDLVQAQTQRLSRLHDLLVGIFPGLERCLDLTTKGPLVLLSKFVAPAELRAAGKKRLVRHLKAAGALPNVEALADKALAAATAQTIAVPAERLTARLIKELATEALATRTRLAGLDRELEDLLDRHPDAALIRSLPGMGAVLTAELIAEAGSLARFRSADALAAAAGIAPVLRQSGKVRFLRRPTGGNKGLKRVFYQSAFCSLGHPDSRAFYDRKRREGKRHHQAVLALARRRINVLWAILNNRQAFQPNFKLAA

SEQ ID NO: 110734 - protein, 408 aa, unidentified
MDVVYRSCAGLDVHKETVAACAIWTERGEKREEVETFGTMTRDLLALSDWLTERKVTHVAMESTGVFWKPIFNILEGGFDVVLVNARHIKQVPGRKTDVKDCQWIAQLLRHGLLKSSFVPDREQRDLRDLTRHRAQLVAEKTRVANRIQKILEDANVKLSSVASDTLGVSGRSMIEALLADEKTPAEMASLAKGRLRKKADQLTAALEGHVTEHHRFMLRQLWDHLTYLEGKIDQFDTRIEERTAPFAEEIDRLDGIPGVDGVTARALIAEIGVDMTRFPTADHLASWAGICPGNNQSAGKRKSGRTPQGNRWLKRCLSQAAWAASHTKNTYLSAQFRQIARRRGKKRAIIAVARTILVAAYHMLADGLPYNELGGDHFDRLRPDRLRRYHIRRLEALGYQVQLQPAA

SEQ ID NO: 110735 - protein, 343 aa, unidentified
MQTIKTIGFDIAKSVFQVHGVDAAGEVVIRRQLKRRSVLAFFRKLPPCLVGIEACASSHYWSRELQALGHTVRLMPPAYVKPYVKRQKNDMADAEAICEAVTRANMRFVPTKTPEQQSCLMLHRTRHLFIRQQTAVINSIRAHLAEFGIVAPVGRKGVTELLHVVADPSDKRVPEVARACLAALGAQLLSLKQQILEFDRMIMTWHRSSQTSKRLHCIPGVGPMLATALVASVADPRTFRSGRNFSAWIGLVPKQHSSGGKDRLGGTSKQGDRYLRSLFVAGALAVIRYAKIHGTKHRPWLTALLGRRPTKVAAIALANKIARMAWAMMAKGERYRQPVALAA

SEQ ID NO: 110736 - protein, 352 aa, unidentified
MPEIAHSAVAVVGIDIGKYSFHVVGFDRRGAIVLRQKWSRGQVEARFANMPPCLVGMEACVGAHHLSRQLRALGHDARLMPAKYVRPYSKGQKNDFRDAEAIAEAVQRPTMKFVATKTAEQLDLQALHRVRERLVNQRTGIINQIRAFLLERGIAVRQGRRYLRSALPGILATLTDALSPRMVRIVEDLAGDWRRLDERIEGLSEEIEALACNDCGCERLMTVPGIGPIISSAMVAAIGAGDVFSKGRDFAAWLGLVPKQISTGDRTILGKISKRGNRYLRVLFVQAAWVVLIKPKSWERHGLKAWIEAARKRLHRNVLAIALANKLARIAWSVLARGRNFEVRSIATAQPV

SEQ ID NO: 110737 - protein, 345 aa, unidentified
MDQIIRIGMDTSKHIFQLHGVDAAERPVLRRKLRRSEMLGFFVRLSPTIIGMEACAASHYWARQLRELGHEVKLIAPQHVKAYVKRNKNDGRDAEALCEAMSRPTMQFVAVKTEEQQAALMLMGVREQLIKRSTQLGNAIRGYAAEFGLITAKGFDKIEPLLVRIAQDGSLPELARDMFAIQGRDYARVHLELKAIEARLRAWHRANADSRRLASIPGVGLICAAALVLKAPDPHAFPSGRHFAAWMGLTPKDHSTAGKTRIGKITRAGDEMLRSVLVSGATAVIQQAKKGRGHPAPWLVVLLARKSPKLAAIALANKIARIAWKLLTTGESYDGRRMFDASAVA

SEQ ID NO: 110738 - protein, 387 aa, unidentified
MPQSNDLSRSLAALDQDSTLIAVIEMSQSSWLVGAIVPGISRQPLKKLVVEERELLRLLHRWRDEATKAGRMINRITVAYEAGRDGFWLARWLQEQGIEAHVIHPTSVAVSREHRRAKTDRLDTELLKRAFLGWLRGERGHCSMAMIPTPQEEDAKRPNREREGLVGERTRIVNRMKSTLARLGIRGFKPTLRKAPERLTGLLTPEGVPLPPNTLAELRRDMARLRFVIGQIREIEAARLQQLEQHPEQGPHAMVRLLAQVIGVGIETADMLVHEILSRTLRDRKAVARYAGLTGAPDESGARRREKGLARAGNARVRRGMIQLAWRFLMFQKDSALAQWYRARTADARGTTRKTMIVALARKLLIALWQLVTTGEIPQGVVLRAAA

SEQ ID NO: 110739 - protein, 355 aa, unidentified
MKRWHFMGADTHCLRCDVAVVNAAGEVVRRQRCETNIPTLLEIVESVPRPRALVIEEGPLAGWLWRELRGALDRMVVCQPRRNRLIYEEGDKDDPIDGEKLAQLLRGGFVKEVHQVESLERAVFKQQVALYHFRVRQRVRESLRLSSLFRQHGVMIRENAYVASADRPALLARLPDNAVLREAVQLLWQAYDELVTQEEVWRKRLVRLAQQEEVVERFTALPGISWIRAATLYAYLDTPGRFRSKSALWKYLGIGLERSRSGQGPERLGVPVLTHRLLKCMILGAALSAVAQGNNPFADLYERWCRRGLSSKLARRNVARAQAATLWGMWKNGSAYRPEWVGVAAAANPAAQVSQ

SEQ ID NO: 110740 - protein, 357 aa, unidentified
MSIVGGLDIHRKQLTFDWVDEQNDKWERGRITPADREHLAKWLTRFDPVVTGSVAFAMEGCTGWRYIAEEMAKAGVTAHLAEPAETSGLRGPKRRAKTDKADAKLLRELLATGRLPECYIPPGQVLEWRALLELYQDLRTQHTGWAQRIQAVCFHQGTTAPGQAGIVRGERARLQAIVDEQLSIVGRLQVNTALAMMDTLADHLDRLRRRLLSTARGVKGTRALMHDIYGVGPLSSLALCAWLGGADRFSSSRKAVRFVGLDITVHSSDGKRSPGRLSRQGPEVLRWLLFEAAKTSARAGAPGYGYYTQVKDRYDANRACLSQARRIVRQSAHILTGLGDDAFTIVAQPSAPTTIAR

SEQ ID NO: 110741 - protein, 476 aa, unidentified
MNSKTKRANNQVNSVMNVQEQREMVEKANRILSEMKSFTWRDLETQGKFSKNDKLSFIDDDMLILGCDIGSETHYVRAIDTRGRELSRKALAFDNNAEGFQKAHDWAVQLAASNDKKQIVLGLEPTGHYWFCLAAWMVSNGISVVQVNPYAVKQTKELEDNSQQKDDRKDPKLIANLVKDGNYGMPYLPEKVYAELRRLSMFREQLTEDRNRSMNRLHREMKIYFPEYKDAFGKIDGAFCMAVLKEAPFPEDILKLGGEGIREIWHQAKLRGRGYSRAAEIVKYAETSIGLKDGTAAGREAVRWFAEKIMELDEELAEIENRLNEKCREIPHAENVLEIPGIGGKILSGILAEMGDISRFDDAKELQKLSGLGLVSCSSGKHKGETRISHRGRKRLRYWLFQAARSAVAHGEEYRWIHTHYTTRAGNALQKMQSLMVIACKLLRVIYTMLKTGKPYDPEKLLKDIRYPENVQTAAA

SEQ ID NO: 110742 - protein, 410 aa, unidentified
MQVFCGIDWAEDHYDMALVDQAGVVLTERRIDDDAIGYQLLLALLAEHGDDQVEPIPVAIETPRGLVVACLRRTGRQVYAINPLSVARYRERHSVARTKSDRVDAQLLANILRTDRAAHRPLPADSELAQAVAVLARAQQDAVWNRQQVANQLRSLLREYYPAFIEAFQGRRPGGLAHPDACAVLAVASTPTQAARLTRPQLQAALRRAGRQRGITAASVRLQAIFRRTWLHQLPMVEQAMGRQALALLKQLEAAAQAADDLAEATRLVFQQHPQMAIFTSFPGLGELPAARLLAEIGDDATRFADARGLKAYAGAAPVTRASGKKLIVLHRKVKNQRLAAVGYLWTFAALRLSTGARAHYNRRRVAGDRHTAAQRHLFNRFLGCLYYCLQTGQTYAENQAFPAAQPIAA

SEQ ID NO: 110743 - protein, 336 aa, unidentified
MENFYFIGVDVSKKKLDICVMCGSKVVTEEQVTNHQQAILKLINELKRDLNMTNGDFIICAEHTGQYTYPLICVCKSIDCKLWLENPTQIKYCSGLTRGKNDKVDAKRIAIYASRFCDQAVCYKRPSEELTRLNQLEAERTLYLVDLSKYKAQLTDQKDFMPKALYKDKSSRLKMLIKSLEQVLKAIEDEMNRIIESTKILSRQMDLLTSIDGIGRVVAMNMIIATEAFTRFDNPRQFCCYAGVAPFAYTSGSSQHSKNRVSQRACKYIKTLLHMSAVAITHRKSGELKAYYERKVDEGKNKMTIINALRAKLVARMFAVIKRDEFYSPILPEFIC

SEQ ID NO: 110744 - protein, 353 aa, unidentified
MSVYVGIDVHRKRSQVAVVTEDGTVQLNKNVVNGSEPMLRLIGELPSGTPVAFEAAFGWSWLAELLEDYGFEAHMVHPLRCKAIASARLKNDRVDAAILAQLLRADLLPEAWIAPAKVRQLRALLRHRISLVRLATQARNRIHAVAADHGYDRSASYWTGPGRGWLAELDLPAASREIITDCLAVIDGLAPVIDRIDGELHAHAKADPRVKVLRTLPGVGEFTALVMVAEIGDISRFGSARKLASWAGLTPTVRGSDLHVRHGHISKQGSVWLRWAMNQAAQTAKRSPEFAASYAAIARRRGKKIATIAIARKLLTRAWHLLNDMQAADAATPLRRPGRREGRQAPGELVPAA

SEQ ID NO: 110745 - protein, 475 aa, unidentified
MLRLGPWINVKARDPPLPRGRWIVASSTSVKLLTYLVPPETRPAQATAWAGRFVAREGLTVVEVLHERCAGMDISKKDVKVCIRVPGGRGGRYRNEVTTFGSMTGQILELRAFLLEQQVTLVVMESTGDYWKPFYYVLENAPFELLLVNPRHVRGLPGRKTDVSDAQWLADLGAHGLVRGSLVPPPPIRELRDLTRTHADLTTDRTREYNRLQSVLEDAGIKLTSVASKINGVSCRLMLDALVAGERNPKVLAQLAKGSLREKQADLTQAMTGRFTAHHEFMVRLHLQVIDQLTTAIEQLTTKIEVVTEPFRPQLALLETIPGVSTHIAVVIIAETGGDMTKFPTAGHLASWAGVCPGHNQSAEVTKKAKTRPGNSYLKGALGSAAMSSMQVHETFLQDRHHRLKPRIGGLRTIVALEHSILRSVWHMLTTDQPYRELGAGYHQRRHPQNALRSITRQANNLGYTVRFEPIAQTA

SEQ ID NO: 110746 - protein, 405 aa, unidentified
MDVIYERCCGLDIHKASITACVLVGKKKEICTFGTMTDDLLRMTAFLKERNVQMIAMESTGSFWKPIFNILEVEGIPAILVNAAHIKAVPGRKTDVKDAEWIADCLKHGLLRASFVKPRDQRELCELIRYRGSLIEERAREYNRMGKVLEGANIKLTSVASKMDTVSGTNMIRALSEGVVDPALLASMAKGSLRNKTDELKRALNGLVQPHQQMILKAMLRHIDQLSVLIDTLDREIESRMSHDIELVEALDEITGVGKASAQTILAEIGTDMTRFPSANHLASWACICPGNNESAGKKKSGKTKKVNSTLKKTLVQCGRGAANSKDTYLNSLYHRIASRRGAKRATVAVGHAILVICYHMIRNRSRYNDLGSDYFRKRNKDALVRQSVKRLEALGFNVSLEVAA

SEQ ID NO: 110747 - protein, 411 aa, unidentified
MQVIHERCAGIDVHKKTVVVCVLMSQADGTLHKQIRTFATMTADLLALDEWLRGQQVEQIAMESTGVYWHPIWNILEEGRQILLANPQHLKAVPGRKTDVKDAEWLADLHRHGLLKASFIPPKPVRALRELTRYRKTLVQERAQEVNRLQKVLEGANIKLASVATDILGKSGREMVDALVGGEQDAQALSELARGRLRAKLPDLQRALEGRVQPHHRFLLKRILAHIDFLEESIEEVQQEIEQHLSPFEEAVTLAQSLPGIGATAAAAIVAEIGTDMSRFPSDKHLASWAGVSPGNKQSGGKRLSGKTTKGNPYLRGMLAEVAWAIAHTKNNYLSAFYHRIARRRGKQKAIMALSHKILIILYHVLREKKPYTDLGADYFDQLDTTRIQRHHIHRLEQLGYTVTLAPKEAA

SEQ ID NO: 110748 - protein, 418 aa, unidentified
MNEDGDTRGSRRYVALDIHKHYCVIAGVDREGRVLLQPVRVEHADLEGWLKKHLRSTDQVVIESTTNAWHVYDLLAPLVERVVVANPIRVKQIAQARVKTDIRDTLILARLLAANLVPDVWVPPMHVRQLRQLLSQRRQFVETHTQTVNRMHSVAHRHHLKHERGKRFNEKTTGWQKSKTLSSVEQFQLQLEMENLTYIEKQIEKISKEVRKMCHQKPWAESMTYLMQLPGFGVITAMTVLAAIGEIQRFASPKQLASYSGLTPGLEQSGTKNRGKGITKEGRRELRWALVEAAQMAVKSDPVWKIRFQEMLKRMHRNQAIAAVAHRLLELVWYVLTRRQPYRHFSHERIAYKYLTWAWKMDEVERDGLTRQQFARYYLMRLGIGHDLTRIALDPKHPRRIASEAELLTLRPELKQTE

SEQ ID NO: 110749 - protein, 418 aa, unidentified
MSVLNSLFVGIDVSKNSNQVYAMNFDEKKLLSFSSPNDTEGASKIENKLLECLVKNNYENIVIVLESTGMYSFHIATYLSSSEALLKYNVLVYCINPKTSCNYRKSFSEMDKSDPTDAYILADMARAGKVNKLNPVKGPQKLAMQRLTRHRRHISEQIVREKLYVLNNIFLKFSAFDRKYDGIQPFSDPFSATAQEILLEYKSPEEIINTPIEDLTSFISTASKNRFADSKKVAEILTKCARISYRLDKTAYEPINTAIASSLAILRCLENEIKHIDKEIANLTKGYNSDEYTCLISIPGIGPVFAAGILSEIGSIKQFDNEEALAKYAGLTWRRHQSADVEHEDTPMTKTGNSYLRYYLCEAASMAVLHNPVYKDYYQKKFAEVKTHQHTRAIALTARKLVRLIYGLLSKNQLYKNQ

SEQ ID NO: 110750 - protein, 367 aa, unidentified
MKKVSTAAVKGTKNFSQPKLTIGLDLGDRSSWYCLLDEVGEVLQEQKLSTTPKAMREAFGAMPRCRIALETGTHSPWGSRLLSELGHEVIVAHARSVRLIGESRKKDDRLDARTLARLARIDPQLLCPVKHRSAKAQADLTVIRARAGLVRARTGLVNTARGLVKSYGERLRGCNVRNMNPEKAEGLSPELQRALQPLLAGIESLSERIRECNEGIEKLAQESYPQVALLKQIKGVGTLIALTYMLTLEDPHRFRKSRDVGCYVGLQPGRRNSGQSEPQMHISKEGDPYLRTLLVQGAHHILGPFGADSDLRRWGLKLAERGGKNGKKRAVIATARKLAVLLHRLWVSGEVYEPLHNSHQTAMPTAA

SEQ ID NO: 110751 - protein, 338 aa, unidentified
MAIVTLGVDLAKNVFALHGVDATGRAILVRPNVARAKLLDLIASLPPCLIGMEACSGAHHWARLFAAHGHTVRLMAPKFVVPYRLSGKRGKNDAADAAAICEAVSRPNMRFVPVKSLQQQSELMVHRARQGFVQHRTATINRIRGLLSEFGVVLPLKAATVRREAMRQLEDLPGWANTVIGDLLSEVSRLDERIAQYDRHIEAMARESTPAQQLMQLPGVGPTTATAMVAMIGRGQEFRCGRQLSAWLGLVPGQYSSGGKQRLGRITKAGDPYLRMLLILGARAVLAAAKDKTDATSRWALQLSERVSYWKAVVAIAAKNARLCWAVLCRGEAFKLPA

SEQ ID NO: 110752 - protein, 484 aa, unidentified
MAKRRMSTFERLRRGKKLNRRERRELERCLEAEGAELQVVHPNAAGIDVGNESHFVGVRPRASEPAVQEFGSWTADLGRMVEWLKSQGVKTVAMQSTGVYWIALYEILEQAGFEVYLVNARGTKNLPGRKSDVQECQWLRKLHTYGLLRNSFRPPEQIRGVRTLWRLRERHVEEAGRAVQHMQKALTTMNVQLANALSNLGGTTGLAILRAILAGERDPRQLAKLRDWRVRASEEEIAHSLEGNWREDVLFELQQVVEAYDFLQRQIAACDLELQKYLAALPSREVPGTQPVASPSVAVEARPQGRKAKAKRPSKGSPSFDLAQELRRTMGVDLMTIDGINVMTAQVILSEIGPDLSAFPSEAHFSAWLGLAPQRDISGGKVIAQKSRRVKNRVANALRMAAESLSRSESYLGARYRHLRGRLGGLKAIKAMARYLACLVHRLLTKGQAWVDRGSAEYERKRKGRELIALQRRAADLGMRLVAA

SEQ ID NO: 110753 - protein, 323 aa, unidentified
MDAVIMSYLGLDVSKAKVDCALLLKNKVKSKVFSNNTEGFNNLMTWLGKHGISRAHVCCEATGTYSEAIALFLHERGHVVSVVNPAQIAAYAQSQLSRAKTDALDARLIARYCEREQPAPWTPPPAEERLLLALLRDLQSLQAMQQAESNRLATAHPGVKDRIERLLDFLAREIEQLRKVIKQHIDHHDALRGRRDLLDSVPGLGENTIPWLIAYLGDGERFLGSKRAVAFFGLCPKPRQSGSSVRGKAHIAKTGHADMRHVLFMPAMVAYSRCKAFAPFVQRLKAAGKPPKVIIVALMRKLVAIAQAILKSGKPFDSALHHA

SEQ ID NO: 110754 - protein, 343 aa, unidentified
MVCTRENSRSRFSDTTTGEVLEHELHDGDAVEHFYRALRPPVTIGIETTGYTQWFHGLMHRLGHTVLVGEAAKIRAMVVRKTKTDRRDARHLLDLLKHGRFPTVWMPDPDTRDLRALVAHRVRLVRMRTMVKNGLQAIALNQRLAVGSKLWSQRGLSQLRALDLAPHTRRRRDDSLELLTWITSRIDQLDDQIADVVAHDARARLLLTHPGVGPLTALTTVLVLGPLARFPDAKHVVSYIGLAPSIRASADKQHLGKITKQGNALLRWVLGQAAPLAARADDDLRCRYFAVLHRRGRPKARVALARKLLVRLYVMLRDHVDYDEFRRRGRAAAHAPHVAMPNR

SEQ ID NO: 110755 - protein, 335 aa, unidentified
MRLYCGIDLHAKNSYLAIIDEQRKRIFKRNVTNDRKLILALLDPYRSELQGVVVESTFNWYWLVDTLMDDGYTVHLANVSAIQQYEGIKYVDDKHDAFWLADLLSLGILKEGYIYPKEQRPVRDLLRKRGHLMKLRTSLLVSLTNTLANVCGTKVPSHRIKGKEDHVSVHLDHDASLALMGQVSKAAIDMLTRQIETIESHVEKQCKFDTPLLSLPGVGKILGLTILLETGPIGRFPAVGNYVSYCRKAESTWKSSEKVKGRGNRKNGNRYLSWAFAEAAEHARMFDTASRKFYTRKLHERNSPVAHAALANKLSRAAYYIMRDRVPYEEAKLFG

SEQ ID NO: 110756 - protein, 338 aa, unidentified
MAIVTVGIDLAKNVFAVHGVNESGKPELVKPEVRRDKLLALIASLPPCLIGMEACSGAHYWAREFQTMGHTVRIMAPKFVSPYRMGGRHAKNDAADAAAICEAVTRPCMRFVPIKTLEQQSQLFVHRAHQGYVEERTAQINRVRGLLSELGIILPQSQKSFKLGVHQVLEDLPGFCNQVVGDMLSEISRLEERIAQSEKTIAQLAKEDAQAQRLMRLRGVGPVTATAIVASVGNGHDFCNGRQFSAWLGLVPRQNSSGGKAKLGRITKAGDSYIRTLLVLGARSLLFNAKDKKDPVSKWAVQLKERRGFAKAVVAIAAKNARLCWATLHLGEGFKMPA

SEQ ID NO: 110757 - protein, 353 aa, unidentified
MQKIATIGLDLAKNVFQVHAATADGSTVFNRKLRRSEVLAFFAKVPSCLVGMEACSSAHYWARETRALGHDVRLMPPAYVKAFVKRGKTDAGDAEAISEAVTRKTMRFVSVKSAEQQAAAVLVKSRTLLVRQRTQAINALRSHLAEFGIIAGAGVTKVAELIAVVRDGSEQRLPLVARQALQEIARQVESLAVQIKRLDRQIVVLSRQDADTRRLTTIPGVGAIIAASVKAFVPDPAGFRSGRHFAAWLGLTPRPHSSGGKERLGRISKMGNPLLRSLLVVGATSVLRVARNNPQASPWIAGLLARRPSRVATVALANKMARIIWALLVRGSVYRVPSIAQARSGASDHKSGQ

SEQ ID NO: 110758 - protein, 309 aa, unidentified
MQQGQDIIVVVDYHAENIDFRWFNEATGEERVGKYPTTRAGILRQLEGAAREVAPDGRVVWIMESTTGWARVKDLIGTRARFVLANVLQMPLPPKARRRKTDKIDTGRLLREYLHGDLPQSFQPTAWWREVRRVVDCRQDLVERQTALKNWMGSLLHHETWEDRENLWSARGRARLKRLGLSASDRALVELKLEQLGQLAAQQTEIERRMQAIYEGWPEAQWVDEVRGIGLVTAVSVLAHVGPIERFATAEDLISYAGLAPGVRQSDATCHHGRIGGGGTDTHLRYLVIEASMWLRDIPRYPPRRRRPA

SEQ ID NO: 110759 - protein, 505 aa, unidentified
MAEVMIGIDPHKSSHTAVAIGAAEERLGELQVRACPSQAGQLLAWAAAWPERTWAVEGAAGLGHLLAQQLVAAGEQVLDVPPKLAARVRLLQAGDTTKNDPSDARPVAVAALRSTAQRPVLAEDHTAVLKARARRHRDLGRARDQAACRLHAVLCDLVPGGVRKEISAGQAARILERVTPSGAVARARCELAAGILAGIRRLDAQLRDTSKKLAAAVKASGTSLTGIFGAGPVIAGTVIGDVRHVSRFPGRDHFAAYNGTAPAEVSSGGSTTPPTWPRSLSSATGTAPAAPATTRNSPRARRTRTRPAASSARSATPSTPRWQPTPGRPRPPAPTAREGNRGTTLSPRRPAHTPSAGSSDKPPPGLPQPYDPAPPHVPPRSSRTEPLSAGLRTPQPPRRNPGQPLDTNNKEDSICTISTLRSPIISGAQKDSSVQRRSYGGCSRRSSPHDALVCVSVARRRPASLRTADHEPIAYAPASAADRMRQSRTAKCAGPVPADSTRAMP

SEQ ID NO: 110760 - protein, 311 aa, unidentified
MNETFVGIDVSKDSLEMALRPSNTVQSFTNDDEGIAQLIESLRPQQPALIVLEATGKYERPVARALAVEGLLFNIINPRQGRAFARATGVLAKTDRIDALLLARFAEVLQPEARSLKDEQTEALSDLVIRRRQIVEMITAEKNRLALATKRVRRDIQVHIRWMEKRLEDLNDDIDELIRQSPLWREKDKLLQGVTGVGPVLASTILASLPELGTLNRKQIAALVGVAPFNRESGRYKGKQKIQGGRASVRNVLYMGTVAGIRSNPVLRSFYERLVAKGKPKKLALTACMRKLLVILNTMLKNGTCWQNQPA

SEQ ID NO: 110761 - protein, 352 aa, unidentified
MEMIALDCHKHYSVASVQTPEGRRLAECRIEHRRGNIRVFLAPYSDGCPVAVETLGNWYWIVDEIEQAGKVPRLVHARKAKLMLGSINKTDKLDVRGLNRLQQTGTLPTVWIPSAPLRDQRELPRTRMVFATSRTRLKNRLHSVLDKYGLQDQFIGISDLFAEGVREHLKQVVQQLPPQASYTSELLLEQLDTVQGVIEALEQRIAELFKPTEELKRLDSLPGVGLILGVLLLLEIGDIQRFRSPEHLASYAGTVPRVHSSGGKTYYGRTRPDVNHYLKWAYTEAANAVAVHRESLSNRHVGQLYSRIRDRRGHASAVGAVARHLAEATYWMLMKKQSYRERGVCEVSPQGL

SEQ ID NO: 110762 - protein, 392 aa, unidentified
MSQLPDRVVIGMDPHKRSVTVEVMAADETVLDRGRFATNRDGNAAMLRFAGRWPQRTWAIEGCNGIGRHVANRLLADGEDVVDVPPKLSARARVFATGHGRKTDATDAHSVALVGTRMAGLRPAVNDEQLAVLRVLVDRRRSLGEDHTRMISQLHRLLLELIPGGAKTALSAAQAKTLLATVRPRDAAGKARRRVAAELISDLGRIYKRSKAADKELKELVAATGSTLMDLHGIGPSGAARLLVEIGDISRFPNRDHFASWNGTAPIDASSGDQVRHRLSRAGNRQINRVLHIMATVELRNPTEGRAYFDRRKADGKTSMEAMRALKRRLSDIVYRRIVDDAISSTATGPGGQRGTTTDSNVAGSHPHTGTSDKPLPGPATSQPTAPLQTAS

SEQ ID NO: 110763 - protein, 376 aa, unidentified
MQNDITLFVGLDVHKDSITVAYALGSGEVELLGKIGTSARDIDRLCKKLQSKAGHVKVVYEAGPLGYDLQRRLAAKGFDCMVCAPSLIPRKAGDRVKTDRRDALKLVRSLRADDLSAVHVPTVEDEAFRDLARVWAAARDALKRARQALKSFLLAHAVRYTGTANWGPSHRRWISSFAFGNAWQDLAFSELRRAIEDRFAQCERLESALREAVTQWRFYPAVLALQTMRGIQFTTAVGLLSEIVDVTRFAHPRQLMAWLGVTPSEYSSGGSRRQGSITKTGNSLARKLLIEAAWSYRHTAKVSPEIQQRHEGVPKVIVDRAWDAQLRLCGRYRRMVAKGKNKNVAVVAIARELAGFIWDIGRLGIEQAINTPKPAV

SEQ ID NO: 110764 - protein, 322 aa, unidentified
MPGPVLGVDIAKKKFDAALLVNDRLKHKVFRNDQEGFAELCSWLKKQGVDHVHVCMEASSTYGDELSISLHDQGHVVSIVNPARIKGFAQSELLRTKNDKVDASLIARFCLAMHPEPWTPVPPGMRRLQALVRRIDALIVMKTQEMNRIDVTHEDIKTSVRDHIAYLDEEIESLKGQIASHIKDDPELKTKRDLLKSIPGIGEATIAAILAELHMFEKCDRVQKIVAFIGLAPRELVSGSSVRGKPRICKMGNSRIRKALFMPALASIQYNPVIRAMYERLKKNGKNGKVIVCAVMRKLVHIIFGILKSGKPFDPNFRQNYA

SEQ ID NO: 110765 - protein, 420 aa, unidentified
MKFKHAAKQNQRIERITGDHLIIGIDIAKFNHVARATDFRGIERGKHLVFSNDLDGFQKLHAWVQSLKLQFNKTRVILGVEPTGHYWLNLAFWLKENHMELVLVNPLQVKRNKENRDNSPTKNDIKDALVIADMVKNGYYSELHLLPDQYRALRQLSTCREFVVKQFSSVTNQIHRWTDMYFPEFHLAFKDVTCKTALATLALFPLPSDLCGLTVQDIVASWKQHLKRAGNHSTAVTLLECAKRTSAVPGCLEEARLSIDLLLKQLELFKQQLSKIEEKMSTLISDIPMTNSLRVIAGISDITIATLYSEAGDLRRFEHGRQLLRLAGLHLSENSSGTIKGKVKVTKRGRPKLRKTLFLTVMNMVSVNPEFRTLHQYNKHVKKMSAMQSLMRLIGKLARILVAMARQNIPYNVNRVLNIA

SEQ ID NO: 110766 - protein, 339 aa, unidentified
MSIVMGLDQHRGQITGVWIDTETGELQRTRVAPADRAAVREFLERFRGLELEVALEATTGWRFVVEELRRVGAVVHLAEPAETAGLKGPKKRAKNDRADARHLRELLMVGRLPESWVPPDHILDLRARVRLRHTLSEQRSEWQQRIQATLYHQGCPQRRQLMTAGGREWLAEQPLPAAAREQITVATLMVDALELQITPLDKELRAYARRQAGCRALMAHYGIGELTAVTILAELGDCTRFSSSRQAVRYAGLDITVYQSDQRRAPGHISRQGPPALRWALYEAAQVARRGERSPDREYYLEAKERIGAGRACISVARKLLKRSYHTLRELGEEALAPG

SEQ ID NO: 110767 - protein, 315 aa, unidentified
MDTPFVGIDVSKETLDVAVLPGGGRKTFRNDDLGCEQLTTWLLDVEPVIVVLEATGGFEMLAASTLSSAGLPVAVVNPRQVRNFAKALGKLAKTDAIDALVIAHFAQAVKPKNRPLPDDQALALKALVTRRRQLIEMLVAEQNRLAGAHPRVKPAIRISIDWLRTQIEEIDRTIATSITDSPLWREKEELLTSVKGVGPVVASSLICLLPELGILNRKQISALVGVCPYNRDSGAYRGTRSIRGGRADIRSILYMAALSATRHNPVIKAFYQRLKQAGKVSKVALVACMRKLLTILNALLRTNQKWNAARALSLT

SEQ ID NO: 110768 - protein, 421 aa, unidentified
MEPIVESCCGLDVHQATVVACLLVGGPHQRPKKEVRTFGTKTRELMEMRDWLHDNGCAHVGMEATGIYWKPVYAVLEDNFDLVVGNAHHIKNVPGRKTDVKDSEWIADLLRHGLIARSFVPPKPIRELRDLLRYRRKLIESRTAERNRLHKLLETANIKLATVASDVFGVSATAMLKALVRGDSTPQEMAQLAKKRLRQKLPELELALEGKLEEHHRFVLEMQLARLEQLDEHLGKLDERIDSKLTPYREQHARLARIPGVDRVLAAVMIAELGTDMSVFKSAAHLAAWAGVCPGNNESAGKRKRADTRKGNVHLMTALVEAAHGASRTKGSYFKDKFFRIKARRGYLRAAVAIAHKILRAVHTMLSTGAEYHDLGAAYLDHIDAKRVTGNLVRRLQRLGYEVTLATRVPHGPQLSPEVAG

SEQ ID NO: 110769 - protein, 408 aa, unidentified
MRIIGLDIHRAFAEAVAWKNGKLSRLGRVIMRREQLQDFAKQLSNSDVVVIEATGNAASVAAVIGPHVSRVVIANPKQVRLIAHAKIKTDKIDASVLAQLYASGFLPEVWIADEATQALRRQVTRRNQIVRQRSRLKNIIQSILHAHLIPSCPHQDLCGPIGRAWLCEQILPGDERLAVERHLREFDRLTDDLKVIERDLAQSALADDRATRLMTIPGINMVVALALIAAIGDIKRFAKAEQLVGYLGLNPSVRQSGPGPAYHGRITKQGRGHARGMLVEAGWVAARCPGPLRSFFLRVQSRRGQHVAAVATARKLAILIWHLLTKNENYLWSRPALHARKLRDLELKAGHRSARGQKGTAHAYNLKSQRDQERRWVEQAEAGYARFVAGWNARGPKARTGAAKEERQ

SEQ ID NO: 110770 - protein, 381 aa, unidentified
MIVIGTDTHKRTHALSAVDEGTGKVRGSRQIDADEPGHLAAVKWARGLDQERVWAIEDCRQVSRRFEQALLAAGERVVRVAPQRMGASRRGERTPGKSDEIDSLAIARAVVKDGVDSFPAAYLDEQAMEIRLLFDHRNDLVIERTRVINRLRWHLLELCPELERSLKRGSLNQSRVLDRVDRRLRQLGPGARARVARELVARIRSVTRQIDGLKRELRVLIEAHRPELLAEIGCGELTAALLIGRTAGAERFRSDASFALQSGSAPIPCSSGQRTQYRLNRGGDRQLNHALHIIAVTRANHDLATKKYLARKEAEGKTKKGALRCLKRHLARRFHRILSLPPVTPQCDRGELGEIPPDPRRAEQRNVEAITAAPCPMPCLT

SEQ ID NO: 110771 - protein, 320 aa, unidentified
MSEPGTVVAVYVGIDVSQARLDVGVWPTGETFSVANDRAGQIALAARLSGMMPRLVVLESTGKLEVPMALELGEHRVPYRIVNPRQVRDFAKAKGILAKTDRIDSVVLANFAAALEIEPKALPDADRRELRSLVMRRAQLLETKIAEQNRLLGETVPKVLKSLKASIRWLEHQIAQLDEELDRKIDATPHFKAQSELVESVPGVGPNTARMLIAGLPELGTLNRQKIAALVGIAPLNRDSGKTQGKRICWGGRAEVRGSLYMATLVGVRYNPVLRALYLRLRAKGKAAKVALVACMRKLLVILNAMVRTNTPWRQTSPAA

SEQ ID NO: 110772 - protein, 418 aa, unidentified
MQVESDEPELIERVAALDVGKAEVVCCVRIPGPGGQRMQEVRTVSTMTAALLALGDWMVGLGVTRVVMEATSDYWRPPFYLLEDRFETWLVNAKDVKHLPGRPKTDRLDAVWLCKVAERQMLRPSFVPPPAIRELRDLTRYRVDLLAERTAEKQRVEKLLEDALVKLSTVVSDLFGVSGRAMMAALIAGERDPAVLANLARGSLRNKTGPLTEALTGRFTDHHAFLLTQMLRRVDAITADVATVQERIDSQIAPFARAVARLDEIPGVGATAAQAILAEVGLDMTRFPTPAHLTSWARFAPGVSESAGRKKGNAGTGHGNRYLARVLGEAAIGAARTDTFLGERYRRTARRRGKNRSIVAVGRSILVIVWALLSDDDAHFVDLGPDYYATRTNPERKVRQHIRELQALGYSVTLNPAA

SEQ ID NO: 110773 - protein, 513 aa, unidentified
MCYKANSSAKMTDTSLVRARGVCGRRGASPPLSMVRESSATVVSAAMRIPFMRSSRIRRLPWRCHSLTSMEQEMAMRKREDMVFPNAAGIDVGGSSHWVAVPPHSDGESVREFGAMTEDLHAMADWLLACGVDAVALESTGVYWIPVYEVLEQRGLKVWLVDARQMKYVPGRKSDVQDCQWLQKLMSLGFLRAAFRPLGEVCVVRAVARQRDVLLTEQASWVQRMQKALVQMNIQLTEVLTDVMGMTGQAILRAIVAGERDPKVLARHRHSRVKASTEEIAKALTGNWREEHLFVLRQALGMYDDIARHLGACDAKLQELLSQLGASKVDLGKTPRAGSKTRADFDVRQTLANWAGVDLTRINGLGLAAVMKILSEIGPDLSHFANVKHFCSWLGLCPGTKISGGKVLSAKTKRSANRVRQALKMAAMSLAHSDSALGAFYRRLSGRMDKPRANTATAHKLARMVYFMLTRGEDFVDQGQQRYEEQQRQRSIAVLKRRATALGFDINPTPVPA

SEQ ID NO: 110774 - protein, 422 aa, unidentified
MSYCPVAGIDVSKRFSDMCILSPDNKIFAQEKIYHDETSINRANALLQKVEQLFFSKPVIVMESTSHYHLILFQFFSEHGYDVIVVNPLQSNSMKDFSIRKRKTDRVDAFKLAMMYRTKTLRPSQIPQTATRALRQLCRHRAELLNDVSSYKNRLTALLDQTFPGYDKVFSDVGGVTSCAVLVRFPTPTILLVEEESELVEVIAAASKSGYSFAKKKAGLLISAAQKTQTLGIHSCADETLIVCTIQMLRTLSESVLQIEAAIDNLLAQIKEMRNNVSLLQSIPGIGSHSAALLLGEIGDISLFKKPKQLAAYFGLDPTERQSGSFRGTRNKLSKRGSPYARAALHMGVVNSICKRGKDSAANPVLLSYYEKKCKNKPAKVAQAASMHKLVFIIFAVLRDQKPFELKTPEQHAVEQGFVKAA

SEQ ID NO: 110775 - protein, 364 aa, unidentified
MLGGVYVIYDDGRPLVEAYDGPQIVGMDLHRRRSVLVRMTEDGQKLGTARITNSPARLAAEIARAGLHPKVVLEACYGWYWAADTLAAAGAEVHLAHPLGVKAFSHRRVKNDELDARDLADLLRMGRLAEAWIAPPEIRELREITRYRCKLVHIRTGCKDQVHGVLAKLGIEVTCSDIFGAWGSAWLDELPLPQPYSWKVASLRQLISWLTSEITVLEQVTADLLAGHDGYRAVQQLPGIGPVLGAVIVAEIGDITRFRHPARLSSWAGLTPRHYESDTKVIRGRITKQGSRPLRWALVEAVQRTPAGTPVHELKDAIIARRGIQARNIAKVAAARKLLTCVFYAMRDGHVRSLTARPAQQEAG

SEQ ID NO: 110776 - protein, 354 aa, unidentified
MSNKSIATIATMGIDIGKNSFHVVGLDRRGAIVLRQKWSRGQIETRLAAMPPCLIGMEACVGAHHLSRRLQAHGHDARLMPAKYVRAYSKGQKNDFRDAEAIAEAVQRPTMKFVATKTADQLDLQALHRVRERLVRQRTGIINQIRAFLLERGIAVRQGFRFLRAELPGILAKRSDVLSPRMMRIIEDLAGDWRRLDERIEGLSADITSLVEQDPACERLMTVPGIGPIISSAMVAAIGTGDVFSKGRDFAAWLGLVPRQISTGDRTILGKISKRGNRYLRVLFVQAAWVVLIRPQSWERHGLKSWIEAAKTRLHHNVLAIALANKLARIAWAVLNKGRNFECAKTNAMAPRSA

SEQ ID NO: 110777 - protein, 401 aa, unidentified
MRAFGLDVHRDFCEVAIAEGGEVRSAGRIATRVDSLQLFAQSLVAGDVVALEATTGADRIVSILQAQAIRVVVANTRKLRSITEAKAKTDRLDARTLARLLASGLLDQVWTPDERTRALRRLTNRRERLVRARTRAKNEAQGVLARNLCQRAPVTDTFGKGGRRWLARLELPLDERLTLDGCLRQVDFLDGEIAILDGEIAKQALTWPEVLRLMSVPGVNVQTAATFMAAIGDIGRFSSPGKLVSYLGLDPRVRQSGNSAARHGRISKAGASEARHMLGEVAWKVMQTPGPLRAFFERIRARRGPQVAATATARKLTVLFWHLLIRNEDYAYARPAMTRHKIRRLELLAGAPPQKGRHGIAGGKSKAVFDAERELSKQAEATYQRLVSDWRSSGQRKRVRA

SEQ ID NO: 110778 - protein, 362 aa, unidentified
MFRPHTLYIRIQIVRKVHEPVFAMRDQDVSDVIKTKNRTAMQYIGIDVSKATFVVAYSSDKGGEIRTFNNTTAGIKQFIGTLPKDGSIHCVMEATGNYSALLLYMLNVAGITVSMENPLKVKNFARAMLSTVKTDKIDARLIALYGEKMNPQPFKVQGEAILRLRQKRTVIRQLTKQITAMSNLRGSLACLPVPDKGATHTVDETIKFLEKRRDRLQSELTDLVEVEFSRQLALLTTIKGIGITLATALILTTGGFTYFQNAKQVSRYLGICPTYEQSGTSVNIRGHINRNGDAYTRGLLYIAAWPASRFNAQCKETYTRLRQNGKPGKLAMIAVANKLVRQAFAVVAHDKEYIDGFVSIRP

SEQ ID NO: 110779 - protein, 247 aa, unidentified
MISAVIERCAGIDVGKKFLAVCVMTGPAAENPTAELRKFGTIRAELERLREWLKSEGCTHVVMESTGCYWKPALNVLEDDPEYRLEVVLANAQQVKAVTGHKTDPHDACCLAHIPPRAQRELRDLTRRRKQMVRAAADERNRAQKMRDSDRFLITRAMRHMAFLAEEIEALDQEIARSIGSPHLTQPNQLPQTIPGIRTQAAAAMLAEAGPNMQQFPSVSHFSSWSGIAPGKQRKRRETKTCAHPAW

SEQ ID NO: 110780 - protein, 383 aa, unidentified
MKKNSSRSVEIKAVDERNAGAKNVPGRTGSQPPDYQAVVGLDVGDRKTHYCVLGLDGELVEEGAVATRKASLRVHFEGKVKMRIALEAGAHSPWISRLLAEMGHEVIVANPRNLRMISESDSKNDPADARLLARLAHVGPELLSPIQQRSEKTQVDLALVRARDVAVQSRTKIINAVRGIVKSTGLRLPKSSNLTFARKAKEACPEALRPALLPLLRVIEELTREIELYEKLVAKKAETEYPETKAIRTIHGVGPLTALAFVLVLNNDRHRFRRSRDVGCYIGLRPKQRESGLRAPQLGITKAGDSLLRRLATQCAQHVLGPFGKDSALRRWGMSLALRGGKNAKKRAVIAVARKLVILMHRIWITQEIYEPLRGVAEKSTAA

SEQ ID NO: 110781 - protein, 435 aa, unidentified
MLKINPLSTLYVGIDVSSKSNYVCALDFYKNKYINSSFANNQPGAEELALKILECLKEHPDITTIVAALESTSVYSIHIANYLSSCEELMRFKPYVFVLNPKCTANYKKSYIGLGKSDPIDAFVIADYARAGNIESEPWRGSQFLALKRLTRHRLHLVECMTREKTYLVSNLYLKFSELQMLEGDDQPFCDIYGATSSSVLMEYFSPEEILDSSEEDLIAFLAKKSRNRIKDISKTADLLKKAARDSYRLDKALYEPLNVSIASSFNCIETFKREIKVIDNAIEKEIKGLNPNAFIILQSIDGIGPVFAGGIIAEIGDITAFHSSDALAKYAGLTWKSNQSGDFDGEDTPMIKAGNRYLRYYLGEAANSMRKHNVEYGTYYRKKYNEVPKHQHKRALALTSRKFVRLVYGLLARNQLYSGVSLDTSIKDLSLIHI

SEQ ID NO: 110782 - protein, 402 aa, unidentified
MNCVGIDVSKGKSMIAVMRPFGEVVVSPFEVRHTANELSELAGLLKSLDGETRVVMESTGNYHAPVAWLLHDAGLYVSVVNAMLVHDYGNNSLRRAKTDKKDAVKLANYGLDHWLTLPRYVPEEDARLMLKTCYRQYQQYSKVQTMLKNNLISLLDTAFPDANRLFTSPPRADGSEKWVDFVAAFWHCECVCGLSEKAFTAKYQKWCKKHGYNFSKGKALDIYASSCGHFGVMPKTKTAKLLVEQAISQLQATSAALAALKQEMQSLAASLPEYPVVMGMFGVGPTLGPQLMAEIGDVRRFHSKKALVAFAGIDAPPYQSGQMDVRSRSISKRGSASLRRTLFLVMGVILQHAPMNEPVYQFMNKKRSEGKPYRVYMMASANKFLRIYYATVKAYLELLERT

SEQ ID NO: 110783 - protein, 399 aa, unidentified
MPVAVGIDVAKQIHWVEIKIAETGQVLTSHPVANTPPAIAELIEEIREAEVEHGPARVGLDLLGGVATLLEAMLLEARLRVLHVPGVTVSEARRGTKGGEQKSDPKDARVIADQLRMHDDFRELATMREDDVELRLLVGRRGEIVADQTRRAARLRELLASIHPQLEQTVDVTSKTGLWLLTRYVSPAEIRSAGRRRIVTHLGKLKNIKNTIISSITEAALEAAHAQQIAVPGEKVAADLIRGLAHEMLTARDQLARIDKHIAGVLERHPDAALIRSLPGMGATLTAEFLAITGGIDRYPDGNHLAAAAGIAPVLRQSGKVSFLRRARGGDKALKRVFYQSAFIAVGCDPTSKTYYARKRAEGKNHQQAVIALARRRINVLHAIMRTRQPYVHRNRPAA

SEQ ID NO: 110784 - protein, 354 aa, unidentified
MRRLNFQGAKINVGFDVHLKSWKVTVMTNDLVLKTFTQPPSPKILINYLHKNYPGASYYTAYEAGFCGFWIHYELVKYGINSIVVNPADIPTTHKEKVQKEDKRDSKKIARGLANGELVGIYIPSTHTLADRSLVRTRDSIVGDLRRYKQRIKSILMFNGIVIPEQFDKSSCWSNRFFNWLKEIPMSHDTAKQSLDLLINQCLLLRSSVLTITKQIHALSKTDRYRKNVTLLISIPGIGILTAMSLLTELEDIKRFRNNDHLCSFIGLSPTSDSSGDKEKVGNITMRANALLRSTLIECAWMTIRKDPALLNSYLRYCQRMDKNKAIVRIAKKLVHRIQFVLKNQIPYQLMKVG

SEQ ID NO: 110785 - protein, 333 aa, unidentified
MNKNTLIGIDTAKQTFHLVGVDAHGHYVWRKQLSRRRLLSSLAQIEPCEVVLEACGASHHWARSIQALGHTVRLIAPQHVKPYRRGQKNDYRDAEAIISAALSPGMRFVGVKRVDQQAEQALHRVRSRLMSHRNAAANELRGLLGEYGVVFRRGLKPLRDGARCFAETEEARTLGLVELVNDVLEEIGVLQARMDHYEHLIDQRVEADETSRRLREELNGVGKLSASALRVKVADVRDFGNGRHFAAYIGLAPGHSGTGGQVHIGHLKRGHDRYLRQLLIHGARSALCHLGDKQDPQSRWLRGLLERRGFNIASVALAHKNARQAWAIMAREQ

SEQ ID NO: 110786 - protein, 322 aa, unidentified
MNKYKETFGVDISKDVFDVHGSNKGHNQYSNDESGFKKLLKELPEGSLLVMEATGYYHYRLAQFLYKNGVIVSVVNPLSIKRFIQMKLAKVKTDKSDAKAICEYALINEVPLYNALTDTQSECLQLFRLLDTYLKQRTATKNKIHGEAVLGIPSKFVYRSLIRNKKQLNKEVAAIESKILSLVKVDQQEQLTLLTSIPGIGQKTALFLIVVTDGFSKFENAAQLCSYVGITPTIRESGSSVRGRARISKVGNRKLRNLLFLCSFNACKHNKACKAVYERIVNKGKSKKLALIAVANKLLKQCFAIAKSRRPYDEAYVSILPR

SEQ ID NO: 110787 - protein, 386 aa, unidentified
MKKHTKNETRKCQRETKKVAELETAGWSEREANTLVIGIDLGDRSSSYCVRTLGQQMVREATVATTATAILKEFQGLRRQRIVIETGTHSRWVAHLLEMMGHEVIVANARKLKLISENNQKSDKVDARLLSQLGCMNVEWLHPVYVRSQEAHCELLLARSREALVETRTGLINHVRGVVKSFGSRLAKCGSESFVEVARVGLPDGLKPALSGVLAALEEMDEQIYDYDCRIEHLCNTKYKEAAQCLLQVNGVGPVTTVTYLLTIENKDRFEQSRDVGPYLGLVPKSRQSGQRDPQLGITKAGDEMLRKLLVNCAHHMLGAKGQDSDLRRWGLELVRAVERKGKQGARKLAAAAVARKLAVLLHALWVSGAVYEPLRNRGAQQTPAA

SEQ ID NO: 110788 - protein, 358 aa, unidentified
MRLLKSQTREPSVNQIIRIGMDTSKHIFQLHGVDAAEQPVLRKRLRRKQVLAFFAKLPPTVIGMEACGASHYWARELGRLGHEVRLIAPQHVKPYVKRNKNDGRDAEGTCEAMSRPTMRFVPVKTAEQQAALMLAGIREGLIARRTQLSNTIRGYAAEFGVTAAKGLDKIEPLLAQIAQDEDLPALARELFATEGREYARLQAELKAIDARLMAWHRANACSRRLAQIPGVGPIGAAALVMKTPDPRAFSSGRHFAAWLGLTPKDHSTAGKTRLGKITRAGDEVLRRLLVAGATAVIQQVRNGRGRPSPWLLALLKRKPPKLAAVALANKIARIAWKLMTTGESYDGARMPGASAIAA

SEQ ID NO: 110789 - protein, 396 aa, unidentified
MFYLGIDIGKNNHVAALLAENGKPVFRAFSFSNTTEGGESLLSKLADYNIPPDDLEIGLEATGHYWLAVYSFLYGRSFKIHVINPIQTDGWRKGVEIRKRKTDVIDSQLIAEFIRHGNFIESRLPDEAVLSLKNLTRFRAYLVDSISDLKRKVICVLDQVFPEYQSVFSDVFGATSKEVLLQFPSPAELENVSSDALADLLSRLSRKKLGDQKACELSAAASYSFGVTFCRDSFSFQLRMLIEQIKYIESQVKDTESEIKAVMTKINSPITTIPGIGNTTGAVILGELGDIHKFDHPSKLVAFAGIDATVNQSGEFLSSNNRMSKRGSPYLRRALYQSALVAATGRNPDPVLNAFYQKKRSEGKHHSTCVGAVARKLCYIIHAVLTENRPFEIRTP

SEQ ID NO: 110790 - protein, 385 aa, unidentified
MDQTSSSTLSANILHCALELSKKSWLLAIQFPDREQPSLYSIESGNTEKLMAKLIAARDSWAKVSGAPATITLCYEVGHDAFWLARFLKAHGIECLVIDPGSLQVNRRGRRVKTDRVDVKMLLRALIAWCRGERHVWSLVRIPSVDEEDLRRSHRERSRLVRERTAHINRIKGLLFAQGIRGINIKSQYKTLAVDKLVTGDGHRLPPRLSCEVAREIQRLAMVQEQIAEIERERDTAPTPCEATERKRHLLLQLKSIGPAISALLSREVYYRQFANRRQVGSFLGLTPSPYSSGEEERCQGISRAGSGHVRAIMIEAAWLWIRHQPKSALTRWFVERTAGQSTRLRKIMIVAVARKLAIALWRYVEHGLVPQGAILNPPTTGNAG

SEQ ID NO: 110791 - protein, 345 aa, unidentified
MKITTIGIDLAKNVFQVQGVDERGKAVLRKQVKRKDVVKFFANLERCLIGMEACGSSHYWARKLTELGHTVRLMAPQFVKPYVKTNKSDRNDAEAICEAVARPNMRFVPVKTGEQQAVLSVHRARQGFVKARTAQANQIRGLLAEFGIVIPQGIGHIAKRLPEILEDAENALPGMMRQLLQRLGENLKAMDRQVGELERQITLWHRDNEPSRTLEAIAGIGPITASAFVASVGDAKSFKNARQVPAWLGMVPRHEGTGGKVKLGRISKRGDVYLRTLLIHGARSVIRQFERKPDRADEWLKKLLARRNKNVAAVALAAKNARIAWALLAHERTYQSDYVTKRTAV

SEQ ID NO: 110792 - protein, 373 aa, unidentified
MQQNIRVFVGLDTSKMKISVALAEEGRQGEVRFLGDIDNTPEAIRRLVNKLTGKYQQLLFCYEAGPTGYGLHRQITAFGHECSVIAPSLIPRRPGEHVKTNRRDALTLARLHRAGELTAIWVPDPGHEAIRDLVRAREAAMEDLRAKRQHLQSFLLRHGRIYPGLRSWTLVHARWLSSLTFEHSAQYLVLREYRQAIEDAEARLERLTQQVADVVSTWSMAPVVEAYQAMRGVAFLTAVTFVAEIGDVRRFETPRQLMAYLGLVPSERSTGEQVRRGSITKAGNPRARRVLIEGAWTYRYPARLSRPLQVRQESLPKIVRAIAWKAQVRLCARYRRLMATGKRQSLVTTAIAREMAAFLWAIGHEVEPRRAVA

SEQ ID NO: 110793 - protein, 365 aa, unidentified
MGWPAPLPLSVRLQGNRREGSGPMQIAVLGIDLGKNICSVAGLDATGRIVLRRRMNRDGVIKLASHLPMCVMAMEACCGAHHLARTLQCIGHQVRLMSPEYVQPYVKAQKNDERDAEAIAEAATRPTMRFVEVKSEAQLDMQSLHRARDRLVGERTALINQLRAVLLERGIVVPQGRRKLERYVDALLAEEEIRLSPRTGLLVDDLRAEWRELDRRILAFDDEFADQARTDETARLLTSIPGIGPLNATALTAAIGNAQTFGRGRDLAAWLGLVPKQATTGGKPKLLGISKRGNVYLRKMLIHGARAALPTLSKSATPLGKWLRGLLARAHVNTVVVALAAKLARIVWAVIRSGKRFDMKAAMAS

SEQ ID NO: 110794 - protein, 428 aa, unidentified
MQSYRIAGIDVHKKMLAVVVTDVCGGGEFQFERRKFGTTPGELHVLAQWLVQQQVEEVVMESTAQYWRPVWEALEQFWQPAMRSREETAKMSGTLHLCQAQSNRAPRGRKKDFPDAERLVKRLVAEELTLSFVPEPDLRLLRTVTRRRYQLSRARVMFQNQLESLLEQAHIKLSSLVSDLLGSSVRRMLKALSEGVNDPAVVAAMADRRLRATAEQLRDALGSCTDMNPHYRRLIKMALAELQLVETHIQELDQEAMELLHEHQEVVRRIAAVPGFGVDSAMQMIAEVGVAAANFATAKNLVSWVGVCPGDQESAGKSQSTRSPKGNRHMRRLLTQAAHAAVKVKGSIFELTFNRHMRQMKYKPAIWAIAHRLCRLLWLLLSKRVDYEERGPEVSAKSKRVRTSRMIRELKKLGYRIEGGPAELTLQY

SEQ ID NO: 110795 - protein, 310 aa, unidentified
MDAIFVGIDVSKDRLDVHVLPGGEAFAVARDGRGLEALVERLRALAPTLVAVEATGGFEMIVAAAVAGAKLPLAVVNPAQIRHFAQALGQRAKSDPIDASVIARFAEGVRPPARGIPDEAARLLSELVARRRQLVEMLAAERQRQQRVANPRVTRSLGRTIRMLEKELVDVDNDIDAAVRGSPMWRAKEDLLITFKGVSNTLARIFLAEVPELGSLDRRRIASLAGVAPYTRQSGRWKGKSMIGGGRAAVRQALFLAALSASRFNPALKLFYQHLCSRGKPKKVALIAVARKILTILNAMIRDQKPWQNA

SEQ ID NO: 110796 - protein, 331 aa, unidentified
MYVGVDYHKRYTVATQMDSQGVILNQVRLKNDPDSLRAFAASLPPGSKIALEATEGWYYFYEMLESYCPEIYLAHPLKTRAIAEARIKTDKIDSTILAHLLRANLLPTSYIPPREIRDVREILRYRASLVSLRTAVKNKVHAILSKNGVVMTYSDVFGKKALRFLELLPLRSCYQQELQGYLQCIETLKRLIAEVSETIKRLAEESPQARLLITIPGISYYSSVLILSEIGDIGRFPSAKKLCSYAGLVPRVHSSGGKTRYGSITKQGSKWLRWILVELSHHFIKGSPRLKCLYVRIAKSHGRNTARVAVAREMLKIMYVMLRDNRAFVIK

SEQ ID NO: 110797 - protein, 447 aa, unidentified
MATRNRNFSRAGLSLTHPNAAGVDVGSAAHYVAVPADRDEQPVREFRSFTVELIALADWLERCGVEIVAMESTGVYWIPLYELLERRGFKVLLVNARHVKNVSGRKSDVLDCQWLQQLLTYGLLNGAFRPGDQVCELRAVSRQRATLLRTQGRYVQHMQKALTQMNIQLTNVISDVAGVTGLKIVRAIVDGERDPQELAEYRDMRIKASREEIAKSLHGNWRGEHLFALKQALAGFDFCVTQLGECDTEIEQRMKALHVHEGKPAKGKKRSRARNAPKFDVREHLFKVCGVDLTRIDGIDVTTAMTVIAEIGADMSRFETVKHFTSWLGLCPGTKISGGKKLGAKSKRSANRATQALKLAAAALRSSKSALGAYYRRMCARMDKAKAVTAAAHKLARLVYIMLTRGEEYTDQGQQYYEERYRERVVRQLSKRARELGMELVPNAQPA

SEQ ID NO: 110798 - protein, 344 aa, unidentified
MTSMHFIGLDIHKKTISYCVKDVSGTVLSEGTVGATRAQLNDWLKTLPTPWTVAMEATMFTGWIYDHLLPHAAAVKVAHPLMLRAIAAAKKKNDRIDASKICDCLRCDFLPECYMVSSEVRERHRTLRYRKLLVRQNVQLRNKVSQMLMESGVVYNKQKLHKVGYFKELMATNPDLSSELKPLLTICRETIVRIGKTESALVRSLRRDPLLHARIERLMTIPAVGPITALTWVLEVGDVARFHSVKQAVSYCGLCGAERSSAETFKRMPISKQRNKHLQSVLIEAAKLAPRLSPDLALVYDTEKQKGHANRASIAVARKLVAYLLAVDRSGREFVVAGERRAAA

SEQ ID NO: 110799 - protein, 444 aa, unidentified
MRIMYEKCAAIDVHKKTVVVSPRWTPEKGEVKTEVRTFGTTTPELLAMTDWLREWEVTNVAMESTGEYWKPVFNLLEGEFGVILVNASHVNQVPGRKTDVTDAEWLAELLSYGLLKASFIPPKPQRDLRDLTRHRVNLVQERARVVNRLQKVLEHANIKLASVATDVLGVSGRQMLAALVGGESDATVMAELAKGRLRNKKAELEKALTGLVRDHHRFMLAQHLGHIDYLDEQVEQVSGEIGQRIEAMSQPPDSPTDANTPTDKSGAEPTEPARLSWSQCVALLDTAPGVDKRAAEMVLAEIGINMAQFPNENHLTAWAGLAPGNNQSGSKRKNAKTREGNRHLRQLMIQISWAATRTKGSYAQALYRRLVGRRGKKRAIVAVARSLLESFYFMLLRGEPYQDLGSDYFEKRRKTVSVDKLTKQIEKLGYAVRLEPLTPQPIPA

SEQ ID NO: 110800 - protein, 334 aa, unidentified
MKNYLFHIGIDISKLTLDVNLLNSETFESEHLVIENTPKAIKSFVKTLQKRKMNLIQTLFCCENTGIYTNHLSFMLSELELDLWIVPAVEIKRSKGISRGKNDKTDAKDIALYSYRNIDKLKLFTLVGIDIQKLKILYTEREKQLKSLLLMDTTKENEGFVAKEIYKEVSSINKSLISFIKKSISKIEGRIKEIIKLNAELKKQSDLVKSVVGVGEQTSIYLIIATKGFTAFKTWRQFACYAGIAPFEYSSGTTIKGRTKVNHMADKKIKSLLQMCAMTSIKYDSQLKEYYEKKKNEGKNSMLVMNNIRCKIISRVFATVNRGTPFINTYKFAS

SEQ ID NO: 110801 - protein, 386 aa, unidentified
MIYVGIDISKYKHDCFICSNTGEVIVENLSFENNQKGFQQFSDLLKPYDKFTVHIGLEATGHYGLNLKLFLEKNNYSFMEFNPLLVKEFSKSLSLRRTKTDKADAIVICQKLMSVPYKPNSKLFYHKYSLKSLSRLRETLVKQRSKYMVQMTCTLDILFPEFKPFFSNRFSTTSLHILKKYKNVNRISNMKDFDTLNKLSRGNFTYSKFIKLKDLAKNTIGESNELFEFQLQTILSLYEEIDSKIVSIDKQLSTIIKDLNPPTLSIPGIGVISCASIISEFGDISKFNNAGQMLSFAGLEPGIIESGTMSSKGKMVKRGSGYLRQSLMNVCMVVIANNHTFYDYFHKKMSEGKCYRVALSHVCRKLIRVIFILEKKNILFDPSLLK

SEQ ID NO: 110802 - protein, 349 aa, unidentified
MTRYVGVDVGKKNCSVAVMDQQGLILEEYTFPNNHQGIATMASKLSIDDRVVMESIGSVGANLYNHLENNHIQVTLANPLKTKAIAWAKTKTDQIDARMLAHLLRANLVAESYVPPKELREVRALVRHRLSTVKTRTMVKNKIHALIDKNGLKPEYVNTFRKSGREWLRTVQLESSLDRLMLNNHLDHLDSLDHQIQTIDQEILSRATRDQYVKLLLSMTGINIYTALLLRSEIGDITRFPDSKKLVSWAGLAPSLHQSGSIEYHGHITKQGSRILRWIMVETARSAVNHDERLRTFYERVRHRRGDQKAIIATANKMLKIIWTILTRNEPYQSRNENLYQEKLNRVPE

SEQ ID NO: 110803 - protein, 353 aa, unidentified
MTSTKYIGMDVHKESISIAVRNAAGKLVMECVIETKASVILDFIHGLRGELQVTFEEGTWGTWLYDLLKPHVTKLVVCDPRKNSRQGNKNDRIDARELSDRLYMNKLSSVYHGEAGVRTLKELARSYLTVSKDLTRVMTRVKAIYRSWGIPCAGKQVYAPRHRAEWLAKITEVGVLRRAEFYYQQLDALRSLRQEVRRDLLAESKKHPATKLLCQIPSIGPIRAALLIALIQTPHRFRTKRPLWKYSGFAIEMHSSADYRKVKGQLERTKKRISVRGLNRDCNHDLKNLFKSAATIASAKPGPFQEFYAALVAKGMRPEMARLTLARKIATIVLIVWKKGVSFDAQYLKPQTA

SEQ ID NO: 110804 - protein, 416 aa, unidentified
MALKIVYPICCGIDVHKSFLVAVVATTNDKGVTTYKRARFSTFTGDLRRLSKWLANQNCKDVCLESSGKYWIPVFNILEQSCNVVLAHPKYVKAIRGKKTDKKDAKWIADIFKHDLVQASFIPPFEVRQLRDLVRYGRKLTGFSSGEKNRAQNCLTVSNIKLDDVFSDVFGKSAQALTQQLLLNPDGNFDVAPFVDGRCRKPREQIQAAIDGEICHQQAEKLKIIRSHLDNLETCKSNLKSVILSLSEQFQPQINLVLTVPGIQLDSAIAIISEIGVDMSVFPTHKQLCSWAGLVPQNNESAGKKKTTRINRAGAYLKPLLVQCALTVCNSDKHPEIKSRYLMLKKRRGHKKAIIAICRMLLVAIYCILKKQEAYNPNLYRKEVSAPANRYLNIEQAISFAKRYGFVVVDSDGVVA

SEQ ID NO: 110805 - protein, 313 aa, unidentified
MRKLSYIGLDVSKSFIDLHQLPQDRSARFVYDPEGISKLITYLKRRKPTLIVMEATGGYETNVAAEIAAAGMKVAVVNPRQVRSFARALGKLAKTDSIDAEVLARFAKDVRPESRKLPDPEEQILRAFVARRRQLMDILVAEKNRLYRATSSSVIDSLKRTIKFIQNQIDDLDQEIKTTIQKSPVWREKDNLLKSVPGIGDKTSCALLAQLPELGRLNRRQIASLVGVAPMNRDSGTLRGKRTITGGRKPVRNALYMAATAARRFNPVIKDFYLRLKKAGKIYKVAITACMRKLLIIINSMLKSQLPFKQSFA

SEQ ID NO: 110806 - protein, 412 aa, unidentified
MVSRAAREGLSARTAPLGAERRSDSTSEVSETTNTPLKNLLYVGLDVHKDSISIAVAEPRRDGEIRSLGKVSNSLHAVDKLIARLRKQYGSDVELHFCYEAGPCGFVLVRRLTQLGHQCIVVAPSKIPRGSGDKVKTDRRDAEKLARAHRAGDLEAIYIPEATDEAIRDLCRARTDAVDDQRRARQRLKAFLLQHGYAYQGKGHWGQAHMRYLRELVLPHPAMKAILEEALMAVNDAGARVSRCEQAMSDLLPAWRLRPAVEALMAFKGFQIVAAMITVSELGALPRFDHPRQLMAYLGLVPSESTSSNNRRQGGITKCGNPHARWLLIESSQHYAMPPKVSKQLSHRQEGQTDSVLKISWKAQNRLHSRFNKLAARRVHRNKILVAIARELVGFIWEALRNLPCYQAAPAK

SEQ ID NO: 110807 - protein, 357 aa, unidentified
MQKQGSKSSFEGQKVYVGLDVHKKTWKAATCTKHTNPGPWTVTIEKPFDENLRGYLDKHFPGATFLCGYEAGFCGFWIHDALEVKGLQTKVMHAADIPTTDKERDQKEDRRDARKIAKALKNEDTEGIYVPSKLAQRDRSVVRERYSIVKSARRIKVQIKSHLALYGIEIPEEMGEKHWSRNFIKWLEQVRDEYQDDTLSLQLERLYAMRTLQLKANRKLRQLGMEDRNRKIYEILLSVVGVGPLTSMLLLTEIVDMKRFSSFRHLCSYSGFVPMTHSSGDKEAHSNITNRRNKHLRTALIESSWVAIQWDTELLSKYEEYRKRMNAQRAIVRIARILLRRIRFVWLNAQPYKKALA

SEQ ID NO: 110808 - protein, 405 aa, unidentified
MVDIMVSDFKKGRYNLMKIFVGIDIAKLNHFAAAISSDGEIIIEPFKFTNDADGFQLLVSKLESFDKNSLIIGLESTAHYGDNLVRYLVTELYQVCVLNPIKTCQMRKNNVRKTKTDKVDTYVIAKTLMMQDNLRFVSFFDLDMMDLKALGRFRQKTIKQRTRLKIQLTTYVDQVFPEIQYFFKSGLHQHAVYALLKEAPSPKEIASMHMTHLANLLKVNSHGHFTKEQAKELRVLAQKSVGANDSAISIQITQTIQQIELLDSQLEKIEAEMTDIMKFNDSVIMTIPGIGYINGGMILGEIGDIHRFSNPNKLLAFAGLDPSVYQSGNFQAKTTRMSKRGSRVLRYALVNAAWNVVRNNATFKAYYDAKRAEGRSHYNALGHCSGKLVRVIWKMLTDNVEFNLK

SEQ ID NO: 110809 - protein, 366 aa, unidentified
MKKIAYVGIDYHLNSLSIAVVLEDSRKVHETIRLKNDDKIIAKYMKKLSKTFKINACYEASCNGYAFQRKMISWGYHCDVIAPSLIPKKRGERRKNDRRDARNLAKLYANGLLTVVHPPTEEQESVRSLIRCRIAFKDSEKKVKQQINSLLLAQDLHWTLSKWTKSHRDWLSELDLHDKYLQQVLDEYLGHLEYLDTRIRYLNKQIEEIASSELYALSVKKLRAFKGIGTLTAMLLIAEITDFRRFPNPRALMAFLGLIPSENSSGDKQKGGSITKTGNHRCRKHLIESVQHYVKKPYLTAQMKDDLIQVDRKSATIATNCMKRLHKRYWTLTMKGKIRPVAITAIAREFVGFIWAMMMQPEPATA

SEQ ID NO: 110810 - protein, 318 aa, unidentified
MQTSIIFIGVDVGKFELQVAGANGEIVAGVLHNNRSSIVGWLKRLPDTSVIAMEATGGYQELLARTAHERGFEVYVLNPTHVHHYAISLGNRGKTDRLDAAVIAQYIAQHHKKLHRYEPISPQLQEVRALHALRSTVVRVGTSLRLSAQRHGCVSSHQKKALASLTAWSEQLEKEMIAKIKAHSDWAKTYGLLTGICGIGPITGVALTNLFSRIDFATSDAAVAFCGLDPRPNESGRKVGRRRLSKQGDKAARTLLYNAASSAARTAQFKDYYAMLRARGLASTAALVIIARKLLRIAYGVWRTGQPFDPEKLRPAIA

SEQ ID NO: 110811 - protein, 356 aa, unidentified
MIILAIDLGKFNSMGCFFDTRTQEHRFLNAATTRRYLTAVLTSHEIDLVVMEACGPSGWINDLCHDLGLETLVCSTNENAWKWKNVKRKTDKDDALKLARLAMMGQLTPVHVPSHQVREHRTLIKYRKTLVERINRIKNSIRSLFANRAIEIDSGARAWRTGRELIDSYRKLLADCSMEELWRGQLDLELTQLDALDQQLAEVECRLEAIAKEDTRIQRLQTIPGVGRKTAEVLVTALDNVDRFDNARQVSAYIGLVPRQHQSGQVDRNGRITKRGPRLLRTMLLECAWVSLRYNEWARTTYDRIHGGQKTRKKKAAIALARKIAVVGWAMLKHETDWDPKRLGIEPKPQAEPAMT

SEQ ID NO: 110812 - protein, 350 aa, unidentified
MLIMGADYHPGFQQIAYVDTESGELQERRLEHREEAETFYRNLAAQGMKVRVGMEASGHARWFERLLSELGFELWIGDAAEIRTKRVRKQKTDRQDAQLILRLMREDRFPRIWVASWENRDLRQLLWHRHRMVQMRTRIMNQLQVVALNEGVRRKKALWRPAGRIQLESWMLAPWASRRRQDLLELLDRLNPTIAQLTKAVEEEAEKCPEAQRLMTHPGVGPLTALAFVLVIGRAERFGCGKQIASYLGLVPSEESSGDRRQLGHISKQGNSLLRFLLVEAAQVAVRSDSEWRGRFFHLAMRRGRKIAKVAMARRLAVRWYWMWRTEWNYEQLTTFGSHAGQPGHPRGVR

SEQ ID NO: 110813 - protein, 339 aa, unidentified
MKKFLFIGIDFSKSKFDVSVLAHIDEKNVVQATFDNETTGYNDFLKWVSKQSKIKREYWRFCGEHTGLYSRGLSHFLAKKGLFIWLENPLQIKQCSGIKRAKNDLFDSLIIAQYACRYIDRAIAYKPAEKEIETLQLLVSYRSRLVKSKVSLQIAAGEMRRVIKRDTTAKFVYESSMRNIERIKKQINGIEQKMHDTIMNSSLKENYLLINSIKGVGMQTAIMMIIHTNNFAGFENARQIASYCGCAPFPNQSGTIDKGNHISRLANKELKVLLSQCAVSAIQHNKEMTAYAQRKMAEGKSKRIIINNVRNKLVQRIFAVVTNKMPYREDYLNLLAKCA

SEQ ID NO: 110814 - protein, 408 aa, unidentified
MNAVGIDVSKGKSMVAALRPMGEVALLPQEFLHTEVGLEQMAYAIIALGENTRVIMEATGRYHEPVAAALHEYGIYVCVLNPLFIKQSGGGSIRKVKTDKADAMKIAKYGLDNWVDLREYTPMDTVRQQLKLCSRQYNLYMKTVVSLQNNLISLTDKTFPGVNELFSSPERADGHQKWVDFVMTFWHCDCICRVSEKAFTERYQKWCKRKGYYFSAEKALDVYAGSCGHFTTLPKNDNTKLLITTAAQQLLAGKTTLAALRAEMTRLAKQLPEYDTVRAMYGVGETTAAQLMAEIGDVRRFPRRSSIVGFAGVDPAVDQSGKHSAKSVPTTKRGSPHLRKTLYQIVCTYLKKSPAEELVYQFLDKKRSEGKPYFVYMTAAQNKFLRIYYARVKECLEAFDAQQNSAQG

SEQ ID NO: 110815 - protein, 307 aa, unidentified
MQTVTTIGLDIAKSVFQVHGVDAAGQVVVRRKLKRRYVLAFFQKLPPCLVGIEACASSHHWSRELQALGHMVRLMPPAYVKPYVKRQKNDMADAEAICEAVTRANMRFVPIKTPEQQSGLVLHRTRHLLIRQQTAVINAIRAHLAEFGIVAPVGRKGVEELLRVVADGNDQRVPDVVRACLGALGTQLLSLKKQILELDRMIMAWYRSNETSRRLHYIPGVGPLLATALVANVADPGAFRSGRNFSAWIGLVPKQHSSGGKDRLGSISKQGDRYLRSLFVAGALSVIRYAKARPACSRDRLAWIAVP

SEQ ID NO: 110816 - protein, 402 aa, unidentified
MRFVGIDIAADRHVVAVVDETGTILLRATPVTEDAPGYQQLLQLLGSAQDCLVALEATGHYWRNLYAALVTAGFEVALLNPLRTRRFAEEELQRTKTDAIDAVGIARFAAQKRPAVTQLPEPALLELRELVRLKQQVVQQLGDRVRQLHRAVDLGFPEFTRHVRTLGSELATTILAHYPTAAAFRSVSVKKLARLVYDGRRQVGEELARALIEAAPQSVGAHHGEPYRLQVRYACEDIDLLRRRLRALESDIEQRLAQHQVGQLLTTIDGIGPQTAACIMAEVGDPARFASLRALASYVGVIPRLRESGKRKKTRTAPALPLGNARLRRALWMPTLSAVRVNPWLRAYYQRLRAAGKPAKVALVAVTHKLLAAVYSVARHRRPFTLPPGFPPLAGAAVLPAT

SEQ ID NO: 110817 - protein, 427 aa, unidentified
MSVTQNEKIRQVTDTTMVIGVDIASELHWARAFDWRGLELGKAVKFENSAEGFNFFLRWVSELTVEQKKDSVMVGLEPTGHYWFTLAAHLQGGDFKLVLVNPYHVKRSKELDDGHPSKSDKKDPKTIAKLVLEGRYVYPYIPQGLYAELRVAMNCRWRIRKELASIQNQIQRWLKIYFPEHSKVFGRFTGAGSMALLHSAPFPSDLISLGVEGISGIWKQMKLRGIGRKRAQRIYEAAQTSVGCTTGMEAARMELQILLEDYDAKLQQYERVMQVVENLCSQIPAVAELLKIQGLGLVTVAGLFAEIGDIRRFESPRQIQKLAGLAITENSSGKHKGPTEISRRGRSRLRAILFRAAIPLLAKNREFQLLHRYYTTRQNNPLQKIQSVIAICCKLLRVFYALATKDCAYSPEKMLADIQRNQPLKAA

SEQ ID NO: 110818 - protein, 410 aa, unidentified
MKSKAYRAVDVNRIELANVLEGRDETVVHAGLDIGKETILATLRWSADDFERPWRVRNPFDVARLAELLKEVGRGRRLIVALEPTGTYGDALRQALERAGLAVHRVSPKSASDYAEVFDGGVPSQHDGKDAAVVADLSAQGRSWPWPMKTPSEAEQELAYQVEWLDGQRRQMMLWCGRVEALLSRHWPEATRILRLGSGTMLRCLAKYGGPRGVAASGVEEIQRWGGHYLKEEKAQALVASAREIPKCKGEMRMARKSLDELTSDHGANRGMGEAVGVATACVLWVELGDPSAYHCGSAYRKAMGLNLAERSSGQWQGKLKISKRGAAVVVSGGVALGEARAGAQLVLAPEGATSRRRQAGTDRRDAEIGVGVVPRRRPRRGVRSEPVVSEPDGGANRVRMRHRLDEGNR

SEQ ID NO: 110819 - protein, 449 aa, unidentified
MENQARMIKSSDGNKLAIVNPNAAGIDIADAEMQVCVPEDRDGDNNRRFGSFTKDLNTIVEWLIGCNITTVAMEATGIYYLSLFLKLQDAGIEVLLANPADVKNMSGKKTDAADAEWLMVLHRYGLLRPCYQPGNAARQIRNLTRQRSNLIRMADKEVLYMQKAMEQMNIKLSTVLSDITGLSGRRIITAILQGQRNIYELAALAEPNCKASQEDIALSLEGTWDVDLLFMLKQSLAAYDFFLSQVGECDMEIERLLSLYGAQIEAGSAELIRCKRKNKRSKNAPRMDIENFAYQLWGVNVFEIPGLKDTAVMHLIGELGHDFVDKFGSAEKFSSWCNLTPNNKISGGKILSSKIMKRKNPVGQIFRTAVAPLARDKGEMGNYYRRIKSRSGALQANVATAHKMAKIFYTMVKTKTSYNASKVGLSERELAERKIAKLECLLMKLKNVS

SEQ ID NO: 110820 - protein, 410 aa, unidentified
MEVMFDRVAGLDVGKETVAVCLRTPGPKGRRRAETRTFKTTTGSLQLMRDWLVEAGVSIAAMESTSVYWKPPFYCLEEVMEVWLLNAAHMKAVPGRKSDVRDAEWIAQLLEHGLLAPSFVPPPEIRRLRMLTRYRVQLMGDRRRDIVRLELMLEDASIKLSSVASSLKTVSARAMLTAMINGETDPLRLADLAKGRMRRKIPDLAQALTGHFDANHARLARSMLRQLDLVDQALAELDAVIVDACQPWAHQIELLQTIPGVGEKVAQVIIAETGGDMARFPTAAHLAAWAGLAPAMNESAGRQTPAGKRHGNKWLTAMLVEAAGSVGRMQGKNYLATQHARLLKRRGMGRAQVAVAHSMLVAAYWMLKRDEPYHDLGADWHSRRSDEAHTRRLIAQLEHLGHTVIIDPAA

SEQ ID NO: 110821 - protein, 356 aa, unidentified
MQTQVMKKIDFTGKDLFVGLDVHKKSWSVTIVVDGMEHRTFTQPPDPEALQKYLLRSFPGGNYQSAYEAGYCGYGIHRRLNDLGIKNIVINAADIPTTQKDKLHKRDPVDSRKLARGLEKNSLRGIHVFERDHEELRSLNRTRFYLMRDLRRSKNRIKSFLLYYDIPLPGEFDNNQWSLKFIAWLKQVKLQTVAGQEAFSHLIASYEYHRQQLLILSRLVRLRISQHDKELFNLLKSISGIGPLTASALITEIGDINRFSHIDDLGSYVGLVPRVRESGETTHSGGITFRCNNFLRVLLIEASWQAIRQDPALMQYYHKHVINSKGHKVIIKIARKLLNRIRYVMKNRQPYVTGVA

SEQ ID NO: 110822 - protein, 415 aa, unidentified
MDAIYERCCGLDIHKRTVVACVIVPGSARQARKEIRTFGTMTDDLLALADWLAAEGVTHVAMESTGVFWKPIFNLLEDHFQLLLVNARDIKQVPGRKTDVKDCEWIADLLRHGLLKASFVPDRPQRELRELVRYRTTLVRERSAEVNRLQKTLEGANIKLASVASDPLGVSARQMLDALIVGSTDIAAMADLARGKMRAKRDLLERALAGRMAPHQRFLLTEQLCHIDALDDGIARVSAEIAERMRPFGEALERLDTIPGIGQRMAEILVAEIGIDMRRFPSAAHLASWAGMCPGNQESAGKRKTGKTRKGNVWLRAALIESAHALGRGRGTYLAAQYRRLTARRGKKKAAVALGHSILVIVYHLLSRGEVYHDLGVQYFDEGRRERLERGLVRRLEDLGYKVNLQPFQPTTSAA

SEQ ID NO: 110823 - protein, 309 aa, unidentified
MKEELVYLGVDIAKSHLDAAIGNEKRRFSNDTIGHRELIKWVKQVQAPVQVICESSGGYERALVQGLARARVQISLVQANRVRQFARAAGILAKTDRIDAEVLCEFGKVMRPQTVTAAKLEQEHLRELESQRRHLTHLLVMEQNRGARVSDASVVRLNRSLINQITKQIEKLDLLIKEHIEQSPRLSAKAEKLTSIKGVGQRTAALLLAQMPELGQLNRREVAALVGVAPFNRDSGKMRGKRAIYGGRRFVRHGLYMAALVAARHNPILRNFYLRLRAAGKPAKLALTATMRKLLIVLNSSLKTHLTYA

SEQ ID NO: 110824 - protein, 372 aa, unidentified
MIVVGVDPHKKTHTAVAVSSQLGEFRGEVTVRARAQGHAKLVHWARALDPERVFALEDCRHVSGALERFLISRGERVVRVPPKLMGEARRGARSYGKSDSIDALAVARAALREPDLPEAHLEGPAREIQLLVDHREDLVGERTRIQNRLRWHLHDLDPALDEQAKRLERSQRRLERLRCQLARREQTAQVRVCRDLFRRLKALSRDIKTLEAELEQLVSRHAEPLLELPGCGILTAAKLVAEVAGIERFSNDAKLAKLAGVAPLDASSGKQQRHRLNRKGNRQLNCALHRLAVTQGRVHAPARAFLAGKQAEGKSRREALRCLKRHLARVVFKLLRTIASRSHPESENLFPSEKERQLHSPAQAASRLVAAT

SEQ ID NO: 110825 - protein, 418 aa, unidentified
MQTELSQYTAVIGIDWADKKHDVCVQDMATGKRRASQVRHRAEDLDEWARSLYRRFGGPIAIAVELSKGPIITVLQKYDFFVIFPVEPAGLASYRRTFALSGAKDDPTDAEFALKLLLSHAEHFKPLQPQSVEMRTLMTLVEQRRQLMNDRVRITNRLRNTLKQYYPQTLEWFDHIDTILFCGFIRRWPSLAQARRARGATLEKFFREHNMNRKPLLERRIKAIKSAMPLTTDDAVIVPHRLRALTLVAQLEVTLECIKQYDTEIASLAPQHPDYELFEPLPGAGPVFTPRLMVAFGEQRERFKSAAELQKYGGVAPVTQRSGQSTWIHWRWQCPTFLRQTFVEWAAQTVNKSYWAGLYYHQQRSRGCSHQAAVRALAFKWIRILYQCWKTKTPYDETRYLRALQERGSPLLKTAQAA

SEQ ID NO: 110826 - protein, 350 aa, unidentified
MKKLKADEQALLRLLHRWRDEATKAGRNINRIAVAFEAGRDGFWLARWLQAHGVEAYVIHASSIAVSREHRRAKTDRLDTDHLKRAFIGWLRAEPDHCHMAAIPTLEQEDAKRPTREREKLVGERTRIINQVKSCLARFGVRGFKSKLRKAAERLEALRTPEGVALPPNTLAELRRDLLRLRVIMDQIKAIEVGRLERLKKAPKARPNAMVRLLARVIGIGIETADMLVHEILSRNLRDRRAVARYAGLTGSPDESGKRRREKGLARAGNARVRRGMIQLAWRFLKFQKDSALAQWFQSQTTNARCRTRKTMIVALARKLLIALWRLVTSGEIPIGVALRPAATAPKKKE

SEQ ID NO: 110827 - protein, 412 aa, unidentified
MDVVYERCCGLDVHKRTVVACLLTPGERGAPQKEVRTFGTMTTDVLALAEWLAAAGCTHVAMEGTGVYWLPIWNLLEDRFTLLLVNARHVKAVPGRKTDVKDAEWLADLLRYGLLRGSFVPNREQRELRELTRYRTSLLRERAAEANRLQKTLEAANLKLASVVTDITGKSGRAMLRALIAGETEPTQLAALAEGRLRQKIPQLEQALIGQFGSHQRFLVAQQLDHLDFLDERIAQVSAEIASRTQPLAATVAQLDTIPGVGQRTAEVLVAEIGTDMERFPTADHLASWAGMCPGNHQSAGQQRSGKTRKGSPWLRAALAEAAQAAGRTKGSALQTQYRRLAARRGKQRATVAVGHTILRIVYHLLDDPTGVYDERGTHDRAERDRQALERDLVRRLQRLGNMVVLHPVGVT

SEQ ID NO: 110828 - protein, 355 aa, unidentified
MHHTQYDPARVCVVGIDLAKDHCDAVGFNERRAPVFEWPRISYPELMNRLAQLPPAAVLMEACNGAHDKARRIADLGHDARLVNAADVKAVRNTRHKNDRRDARYIATLFFLPDIKYVQVKTSAQQDRQLLIREYKGYQRIRIELGNRIHSALEQYGIPTRQGMQRLACHLTEYLDERAEKITPILRETVLRLFESWKRALADEEAAKRRLEAQAARDADAKRLMTIPGIGAIIALYMQAHIGNPHRFKNSRQAAASIGLVPRQYSTGGRDTLLHISKRGPTALRSALIQGAGSVYIWSEKLKGALGAWVCKLKDSRKKYGVIICAIASKLARICWRILRDRTVYQPNWQAAHSV

SEQ ID NO: 110829 - protein, 318 aa, unidentified
MDEVFVGIDVSKDRLDVHVRPSRESFWVSRDGDGLEDLIERLRGMAPWLIAVEATGGFEMIVAAAIAGAGLSLAVVNPAQVRHFAQAAGQRAKTDPLDAEMIARFAEAVRPVPRPVPDEATRLLSELVGRRRQLIEMLVAERQRALHAANARVRKSLTRHITVLEKEVGRIDGDIDILIRGSPCWREAENLLVTVPGVGKTLARTLLAVLPELGRLGRREVASLVGVAPYTRQSGRWRGKSMIGGGRADARAAMYMAALTASHRNPMLAPFYQRLISAGKPKMVALIAVARKLLTILNAMLRDQRPWTEGFAHANASI

SEQ ID NO: 110830 - protein, 361 aa, unidentified
MLQSNALTSPATTVIIGVDTHKEVHVAVALDGLGARVGSCSATADRAGYAELVAWARTFGPIGAFGIEGTGSYGVGLASFVRRQAIRVIEVSDCERRPRRNNGKSDTLDAETAARSVLAGIATAVPKTADGAAEMVRQIKVARDTAVKAKTAAIITLKTLIVNAPGELREALEPLTDRKLIDRCARLLPGGTIADTTASTKHALRALATRWLALSTEIEAHDGVLDTITRGAAPTLREAFGIGPDSAAEMMIVLGDNPTRIRSDAAFAKLCGACPIPASSGLTNRHRLFRGGHRQANAALYRIVTVRMRWHQPTMDYVARRTIEGLSKKDIIRCLKRFVAREIYHALIGDHRSRTADVPAA

SEQ ID NO: 110831 - protein, 351 aa, unidentified
MKNATARKRTQITIGLDLGDRRHTYYVLDGAGKMAREGSLGNTREQLATMARSYPGATVVMEAGTHSPWVSRFLQELGLRVIVANPRKTRAIYQNERKSDRHDAMMLARLARMDPTLLHPVEHGSQEAQQDMLQLKLRDSLVRARVALINAVRFTLKSLGYPVSNPSSERFHKLVLSEVPESIGEMIAHNVAALAELTQRIKALDVSISRLAAERYPETIYLQPVSGVGPITSLYFVLKVGTPGRFQRTRDIGAFLGLCPRRDQSGETDKELRISKCGDQYLRGLLVNAAQYILGPFGTDSALREHGLRLAQEGTARAKKRAVVAVARKLAVLLLTLWKSREPYESFPTMA

SEQ ID NO: 110832 - protein, 449 aa, unidentified
MGNCAGIDWASEKHDVLIEDPAGEELWAATFAHDEDGVSALCAAFARFEVEVVAIERPDGLLVELLLEAGVQVLGLHPNQVRAARDRFRASGGKSDRFDRFVLCELARTDRHRFRVLEPDSDQTKALRALTGAREDLVAARVALANQLRAELERCWPGPIGVFFAIDSPISLAFLARYPSPLDARGLGEKWMAGFLKAHGYNNRKTPAQLLERLRSAPTGRAGEIETRTRRQIVLHLTSTLQVMVEQIRGLESEIAEALRAHPDGEIFRSFFHSPDCVICAATLLGEIGDCRGRYPHRDAIAADAGHAPVAVESGKRKHAKFRWACNKRLRNALGILAYSTTRWNPWAADRYAQARARGHNHRRALRTLGRAWSRIIWRCWQTRTPYDPEPHTGLQQHITVTIPTPSGPRPDLNATQRMAGAAVTQRAAHRAERAALDSKPPIATNAMA

SEQ ID NO: 110833 - protein, 317 aa, unidentified
MSPEKVRVGIDVAKDRLDASVRPAGAAFAVANDEAGIEGLVARLVEEGVTLMVLDATGGFERPVAAALAAAGVPVAVVNPRQVRDFARATGRLAKTDKIDAEILARFAEAVRPEPRAVPDEEARAFAEVLARRRQVVGMLIAEKNRLGSASTKPVRKRIEAHVRWLDKELSRTDRDLDEAIEGSPTWRENEALLRSVPGVGPVLARTLLAQMPELSALDRKQLDALAGVAPLNRDSGTLRGRRSVWGGRSRVRGALYMAALVATRHNPTIRAFYERLLAAGKPKKVALVACMRKLLAILGAMLRHRALWRSPHALTP

SEQ ID NO: 110834 - protein, 349 aa, unidentified
MPIRRAVPAATYGVDLGKTRFDVLAADAVGNPVQRLKLGRDTILRFFEAAPVALIGMEACPGAQWLARKLTAYGHTVRIIPAQFVKPFVKSNKNDARDAEAIAEAVVRPTMRFVEIKTEAQVDLQALHRIRDRIVSNRTQLICQMRAFCLEYGIAMRQGAGIFKIDIARVIGDESNDLTPMMRAMLKELWEEFALVDARLATVSRQVEAIADRLDAARRLMTIPGIGPLGSTALLAAIGDGRQFRRARDLAAWLGLVPRQSSTGGKTTLLGISKRGNPYLRRLIIHGARSCVAHLNRERDKLGKWLDQLEQRMHRNKVIVALANKIARMVWAVLTKPGNLYECVDPAHA

SEQ ID NO: 110835 - protein, 359 aa, unidentified
MASVSIAHDPAAGVTVGVDTHGEVHVAAAFTSDLGRPLGHLEIPTTPAGYGRLLRWAQAFGDETPRFGIEGTGAYGAGLARHLRRAGCTVIEINRPNRQTRHARGKSDPIDADAAARAVLSGEASSVPKSDEDRVSMIRTLRVARRSAVQSTTQISNQVKGLIVTAPAELREQLRLLSGHDLIETLAGLRPGSITTPTAAAKMALRVLARRHQHLGDEIATLNVELERLTQEVAPELCALKGVGPDVAGALLVAAGDNPERLRSEASFAHLCGVAPLPASSGKTTGRHRLNRGGNRQANNALWRIVIGRLRWHQPTKDYVARRTAEGLSKKEIIRCLKRYVAREVFRLIVAERELARAA

SEQ ID NO: 110836 - protein, 473 aa, unidentified
MIPGFIAKRFYQKGAVMGSYYMGIDISKGYADFVIFDGQKNVVEPNFQLDDTFGSHCKLFEILNLFFERHPESVLYAAVESTGGYENNWLYTLSGFQGVLNIKSARLNPLGVRANSRASLRRVITDKISARDVAEYMIAHPEKVTYQQDDSMAGLRRQWGFVRLLVKQKTQILNQFESMLYNVNPELIAYCKSGVPSWLLKLLRQYPTAAKLAKARVSSIAKIPYVTAERAKELIEQAKNSVASATDEASGKLIAVMAEQITNMDETIRIQTQQMNRQCTIPEVALLKTIPGIGDDSAIGLMLEIQSINRFSSAKKLAAFFGLHPVFKASGDGTSGIHMSKQGRKEPRKILFMVALVALTANPHIRKIYDEHTAKGMKKMAAIGLCMHKILRIIYGMLKNNQAYDSQIDEKNRENTKEKKNVHASKNLNRRYEATEQNAPISRRQSKKRKEWKQSQSDNSTMCGIGVSIPSVC

SEQ ID NO: 110837 - protein, 369 aa, unidentified
MVGRRVWVGFDVGADELAACAKCDEGVPMAEALLPATIEGVTSFLDGLNRPEHVTIGLEAGSTGIHLTRKLRERGYTVHVFDTRQASKFLAIRANKTDANDASGLSDLVRLGRGVVSEVTVKSIECQLLRSKLMLRQKLIQHRMAGEGAIRSAFRLNGGKLDKCYSAKSLRRNVLAEINNIRVREGFDLSDDIVPVLDICEATRRHLEKIDRTLMQMAKNHPICSRFLTIPGVGPITALSFYSSVEDPARFKRNGDVGAYLGLVPRLKQSGTSSVRWGISKMGNSMTRTHLVSAAAAMMRQKGEVGPLRAWADNLRERSNYRRVTTALARKLAVVMLSMWKSGQSFKFSTNIIGERKPEADNPITKLAA

SEQ ID NO: 110838 - protein, 341 aa, unidentified
MDKELYFGVDVSKKTLDLAYYDGEAIDWKNAHIQVSNDDAGFKKIGSWVAKVGKDFATFLFCMEYTGLYNQNFRLWLESKEYIYGMVEPRKMHRFEPDLDDDQRSLDRIKTDELDAFRIAIYCEQNHKKILRNPSKLPSPVYFKLKRLLAERKQNTKQSVLYKQQFHDICAYDTDLSVERKKLLLKNMQENQKAIDKEIDSYMNEDTSIRKNYNLLTSIPGIGRIIALETIVLTENFTAISNPRKYACYIGIAPFKKESGTSVRKKTGVSKKGFSEAKADLSIAVLSAIRNNPSIRDYWIRKRKEKCGGIVLNAVKFKLVLRMFAVIKRGTPYVETDAYKN

SEQ ID NO: 110839 - protein, 456 aa, unidentified
MPRKSKSKSRSSGRMLPIMHPDAAGIDIGAEEIFVSVPPDRDTDSVRHFATFTRDLLALADWLHKCNIRSVAMESTGVYWIPLYQILETQGFEVFLVNAHHVKNVPGRKSDVSDCQWIQYLHSVGLLKASFRPPDEICVLRSLWRHREGLVQMAAEHVQLMQKALSQMNLQLHHVLSDIVGVSGAAILDAILAGERDPVKLASLCNRRVRSSRETVAKSLEGDYRSEHLFALRQSLAAYRFYKQLMAEVDLELEQKMKNLPRSKHASDKRPAGTKKRIYQHAGNEPDFDLKEELFRISGVDLTDVPGISTLTAHTILMEVGTDVSRFRNASAFASWLGLCPERQVSGGKLLYTRTRKVKNRAAIALRLGAHCLYHAQNYLGDFYRKMKWRLGAPAAITATAHKLARTIYHMLSTSDPNSEEAFTRCDQQASIRAEKRLRKQAAELGFQLAPITETA

SEQ ID NO: 110840 - protein, 360 aa, unidentified
MAKARTLVGLDVHAAKVVAAVLDAETGELQFFGMEMDVDRVAGFCAALPRPVRAAYEAGPTGYGLARELAKRRVECTIAAPSKIPRGSGERVKTDRRDAELLVRLLLAGKLHAVRVPGDEEEALRDLVRARDAVRRDLMRARHRLSKLLLRRGIRFDDGGAWTERHRRWLDQVVLEWPAAQATLLDARGAIDALCHRRDQLEREILALLPGSPWAREIGRLRCLRGIDTLSAVGLCCEIGDFERFAKPGQLMSYIGLVPSEATTGQQRRLGSITKTGSGHARRLLVEAAWHYRKTPTLGKKLAERQEGQPPAAVAVAWSAQRRLHRVWARMEQRNKRRTLIATAAARELAGFCWAICQIE

SEQ ID NO: 110841 - protein, 370 aa, unidentified
MNTTHAVAGIDPHKRTATVAVVDVLGVLVASLSFSVTESGVAELLALLQSTCLSIDRVGVEGSGGLGRAVMLALAAAGYDVREVQANRTADRRRRRRRAKTDAEDAEAIARETLADPALPPAGKNAAPAPASDELDVLRDWRESLVLQRVRLLTEAESVLLSLPLRLREQLPSTSRVLASLNRLTQRENLDAGLSAADSLKVKRLAATRADIVTISARIKELDTQIPALLKALGCTLTGIHGVGVVTAMTLLTEIGDPHRFSTEGRFARWCGVAPVAMSSGEGDGPPRSHRLDLGGNRRVNSALHIVHVTQARCHPEAQAYMTRRAAENKSKRAARRAHKRQLANVIIRRMWNDADDLARANSDPSSAAA

SEQ ID NO: 110842 - protein, 363 aa, unidentified
MRNAAGRTVIQPSDYLAVVGLDVGDRKTHYCILDLDGDLVVEGEVATREASLRVQFAGKGRMRIALEAGAHSPWISRLLVELGHDVIVANPRNVRMISRSDSKNDPADARLLARLAHVGPELLSPIQTRSQQTQVDLALVRARDVAVQSRTKLINTVRGIVKSTGHRVPKSSTLTFARKAKDACPEALQPALLPLLRVIEELTREIELYEKLVVHKAEAEYPETKAIRTIHGVGHLTSLALVLLLNNDRSRFRKSRDVGCYIGLRPKQRESGLRAPQLGITKAGDPLLRRLATQSAQYILGPFGKDSALRRWGLSLALRGGKNAKKRAVIAVARKLVILMHRIWITQEVYEPLRGVTLKSTAA

SEQ ID NO: 110843 - protein, 383 aa, unidentified
MDKNQGTLRSENITKPAVLYVGFELSNSKWKLAFSDGRKIRHATVEAGDLELLQVGLCSAKKHFGMVEDVGVVSCYEAGRDGFWLHRYLHSCGIDNVVVDSASIEVDRRKRRMKTDRLDAGRLVRMLMRYHGGERKLWSVVRVPSFEDEDARHLHRELEGLKKERTRHRNRIRGILIQQGLRVNNPSNRKFVEQLDSLRTWDGRELPVDMRGRLVREYQRLHLVEEQIKALEKEKKQRLKEPNTVKLRQVAQLRSLYGIGTVSSWAFVMEFFGWREFRNRREIAALAGLAPTPYDSGGTVREQGISKAGSRRIRTLAVEIAWAWLRFQPQSKLSLWYMERFAGGGSRMRRIGIVAMARRLLIDLWRYLEHGVIPEGARLRPLA

SEQ ID NO: 110844 - protein, 344 aa, unidentified
MDISVLGIDLGKNVCSVVGLDASGAVVMRRKVRRETLIALAEKLPPCVVGMEACCGAHHLGRVFAAHGHDVRLMSPEYVRPYIKAQKNDDRDAEGIAEAATRPTMRFVELKSQDQLDMQTLHRSRDRLVGERTALINQLRAILLERGMVAPQGKRKLEQFLAVLIDEQGGAGLSPRMIVLVADARKQWAELDRRISAFDAEFVRWVKDNEEARRLTTIPGIGAIVASALVAAVGQAESFDRGRDLAAWLGLVPRQFTTGGKPKLLGISKRGNKYLRRQLIHGARAALPYVVERDTPLGRWAKDLLSRAHRNVAIVAFANKLARIAWAVLRRKERFAAAGLPMAA

SEQ ID NO: 110845 - protein, 338 aa, unidentified
MQYVGLDVHKHKVYGVIMTEQGEILKEGVFPNKKESYLAFLKGTGEASIALEALSFSHPPYDLLEEQGYTVKLAHPLKTRAIAEAKIKTDKIDAQILAHLIRSDFLPTSYLPPPDIRDLRNIVRQRAYLVKLRTELKNKIHAELHKHWIEAPYKNIFTQQGKHWLHTLKLPSIHPYLSLLENLEEQITDSSTQITTQAHGNRDAQLLMTIPGIGPYSALLLVAEIGDITRFTSSHKLCSYAGLAPSTRQSGHMVHHGHITKTGDKWIRWGLTQCIHIHIKYDTPLTQFYHHIAHRRGKKIAIVATASKLLRVIDWILKNKEPFNPSGLSRTGSSSIYL

SEQ ID NO: 110846 - protein, 369 aa, unidentified
MVATDVSATMEVEDQPKQGGSHMKFYNKQHKFYCGIDLHTKKMYICILDAEGNTLLHRNMATKREVFLKVIAPYKENIVVAVECMFTWYWIADLCIENDIPFVLGHALYMKAIHGGKAKNDKIDSHKIAVLLRGGMIPVSYVYPAKMRATRDLLRRRNHLMRKRAELYAHIQNTRHQYNLDEPLGRIAKPQNRDGIAERFQEPSVQKNIEVDLAMIEAYDQILIPLEREIIKTAKQHDPVAYALLKTIPGVGRILGLIILYEIEDIKRFPRVQDFVSYSRLVKSAKESNGKRYGSSGKKIGNAHLKWAFSEAAVLFLKGNDAGKKYLQKLTNKHGKGKALSILAHKLGRATYYILKNKTAFDQKKFLGQ

SEQ ID NO: 110847 - protein, 366 aa, unidentified
MGSAISHQLTRFVEGEVMTIVTIGIDLAKNVFAVHGVDATGKAVLVRPSVARAKLLELIASVPPCLIGMEACSGAHHWAREFAQFGHTVRLMAPKFVSPYRLSGKRGKNDAADAAAICEAVTRPNMRFVPIKSVEQQGQLLVHRARQGFVEQRTATLNRIRGLLSELGIVLPLKAAVVRREALLRLEDLPGWANTVIGDLLSEVSRLDERIGQYDQHIRAMARQSTPAQQLMQLAGIGETTATALVSTVGNGHDFACGRQFCAWLGLVPGQYSSGGKQRLGRITKAGDPYLRSLLVMGARAVLALAMNKANPRQDAVSRWARALAERRGYWRAVVAIAAKNARMCWAMLQRGEAFKMPSATTPVTA

SEQ ID NO: 110848 - protein, 318 aa, unidentified
MNTTTNAHIKQQRNIGIDVGKSFLDIYILELDRHWQIHNVKDEIHHLVKTLGRFHLTRIVVEATGGYERQVVEALAEAEMPVVIVQPMNIRQFAKAQGVLAKTDKLDARVIAQFAAVMQPPIRSINSKKVRLIRDLLARKRQLTEARTQELNREQRAEKAIALSHRRILRLLDKELSWVNDRLSKEVSQVAEWQHTFELLLSVPGIGPGVAHTLLGELPELGSLSNRQVGALCGLAPYNRDSGMMRGRRRIKGGRAPIRTVLYMAMLSAIQCNPIMKRFYQRLVAEGKHKKVALTACMRKMMTILNAIVRDGCVWHGA

SEQ ID NO: 110849 - protein, 367 aa, unidentified
MYIGLDVHKDSIDISLVEGDRNAKVRFQGTIGGSLADLEKAVRRIRKAHPFAILHFVYEAGPCGYDIYRHLTRAGYDCMVVAPSMIPKRSGDRIKTDRRDSIMLASLHRAGELTAVHVPREEDEAMRDLVRAREDAVKAERVGKQQLKGFLLRHGVKFAGSGDWKASYMKWLAGVKMPNPAQQIVLQDYVSTVTDGTERIKRLTTQIRELLPSWEMGPVVNALQAMRGVALIVAVTVVAELGDLTRFDNPRQLMSYLGLVPSEHSSGKTRRIGGITKAGNGHVRKVLVEAAHSYRLPARISKILLERQTGLPKEIRDIAWKAQLRLCARYRKMVAKGKKNQIIICSIARELCAFMWAIARETKTVTA

SEQ ID NO: 110850 - protein, 346 aa, unidentified
MTQVTTIGLDLAKRVFQVHGVDAAGAVVLRRQLKRRQVVPFFAKLPSCLIGMEACGTAHHWGRTLRALGHEVRLIPPAYAKAYVRRNKTDPADAEAICEAVSRPSMRFVPIKSEADQAMAAVHRVRERLIAQRTQTINMLRGQMAEFGVVAAKGPQHVKGLVAELVEPDSVPEPLRQVLLALVRLLTALREQIAALDKQILAWHRANPCSRRLSGIDGFGPILSSALALRVQEPQRFACGRDLSAWIGLAPKQNSSGGKIRLGAISKKGDVYLRRLLINGAQAVLNSKRAKEDPWIVRLLQTKPRMVVAVALANKMARIAWAVMVHATEFRRASATAAAAGAGAGL

SEQ ID NO: 110851 - protein, 350 aa, unidentified
MMIIGCDLHTRYQQIAMVDTETGELVERRLEHESGEARTFYAGLRGAVRVGIEATGHTAWFEAMLAEFGHELWMGDAAKIRAAVVRKQKTDARDAAHLLDLLCANRFPTIWRPSLAERDLRQLLWHRQKLVWMWGAVKNQMHALAMGEGVCRKKKLFTAKGRTELEGLTLGPWASYRRQELLRLFDELQSSVKKLDQAVELAAKSQPLAVRLMTHPGVGPITSLAFVLIIGPIERFERSKQVVSYLGLNPQEHSSGGRQRLGSISKQGNPMMRSLLVEAGHSAARLDPQLKRIYQRLKFRRGASVAKVAIARKLAVRMYWMLRSTADYAQLVRMRGSSWATLVEDSPSLG

SEQ ID NO: 110852 - protein, 418 aa, unidentified
MFMDIEASYQATVGIDWADQKHSVFVHFSDGDSYCQKIDSRPKAIQQWLLELQAKCTAGKVAIALEQRRGPLFYQLCSHLEWIDLYPVNPQSLASFRQTFFSSRAKNDPVDSQLLEEIVRTHGDRLRRYQPQPISERKLDQYCRLRRGLLDLATQTELKLISTLKQYFPLVLELFGAVGLKADIALSFLSRWPTLALLQKAQVNTIRSFFYAHNSRSQSLIEERLQQIKEALNVTDDLALIEPFVLTTKCLVGQLRSFKKVLKEFDHQIEQLFKSHPDHSLFESFPGAGKQLGPRLLAVFGSDRTRWATPLDIQKFSGIAPVIERSGKSVWVHRRLSRPKFICQTFHEFAQHSVLHCSWAEQFYRRQRQKGKSHHSAVRALAFKWIRILYACWKANQPYDESRYLQALQTKTFSVSST

SEQ ID NO: 110853 - protein, 347 aa, unidentified
MGKSITDLSSVTTVGLDLAKHVFQVHGVDASGRVIVAKALRRKDVLSFFAQLPRCLVGLEACGSAHHWARELIKLGHDARMMPPAYVKPYVRRQKNDAADAAGICEAVTRPSMRFVGGRTLENQAALMHHKAREMLVAQRTQLINALRGHLAEIGVIAAQGLKNARELARVILAEGDETIPACVRAALAPLVRQLHVLDQEITRSDRTIAAMARGDEMARRLMTIPGLGPVTASAMAASVQDVSAFSGPREFAAFLGLTPRQNSSGGKERLGRISKMGNRYLRKLLVVGAHAVLYHRKPHEDALRSFAKKLMQTKPFKLVAVALANKMARIAFAIMRGKTTYCAVSA

SEQ ID NO: 110854 - protein, 325 aa, unidentified
MQGKEASEQETPKCTAGIDVSKDWLDVDVLPAAESLRVANTKEGIRRLKRWLLRHEVELVAVEARGNWHRQVCRSLAASPIAVAITDPYRVRMFAKAQGILAKTDRLDAKVLAMFARMMAPPCRTPAGQVFEDMQELVTARAAAVAEEVALKNQLSAATGNFLKRQLARRIKQLAGHVKALEKECLSLIKADEALARRFAILTSIPGFGDVVAMTLIAKLSELGSLTTKQVAALGGLAPVADDSGMRRGIRVIWGGRTTVRTVLYLAALSAAKHNADLKLFYQRLTAIGKEPKAVLIAVARKLLVLANLLIAKDRLWQPEAPKYA

SEQ ID NO: 110855 - protein, 444 aa, unidentified
MVFFGMILIREVADAPVIMGISKPAGLKSPSGEVKTMNPLFVGIDVSSRNNVVYLMKPDGSKHSSFSVQNNLGGAKLLSEKIVSALHSMQLIDVVIGLEATSIYGDSLVYALREDGSLGRFRRKIHVLNPKQVKKFKEAYPDLPKNDFVDAFVIADHLRFGRIAKEVYMDDYRYQALRTLTRARFDVIQNLTREKQRFANYLFLKCSGMAQDKDIQNTSATTIALMEHFETVDDLANADLDELTAFIAETGRGRFADPNAVAKVIQTAARGSYRLPKTVNDTVNQAMSVSIASMRALKEQAKVLDKAIEQQFEIIPNTLTSIPGIGKVYSAGIIAEIGDIHRFDSQASVAKFAGLVWTQHQSGEFEAEHSQMIKSGNRYLRYYLLEAANSVRRCDSEFRRYYDLKFKEVNKYQHKRALALTARKLVRLVFRLLKDNRLYIPPEG

SEQ ID NO: 110856 - protein, 359 aa, unidentified
MTTEQRQQTMFIGIDVHKDTHTAVGVSPFGEKLFEITVGNYQSDFDQLRQKVELVKGSLSPYFGLEDCQGYGERLSSYLHDNGERILAVPSVMVDRQRQKETHPEKSDSLDAFGVAKVMMQNIDSLPAYTISEEAKKAKQIKEISIDREYIVEERTRIKNHLHNLLHRIYNSEYRVKYKDPFSLKALKHWSKSKPKCDQFLLRSMKRKIKRLIDIHYEILDLEKEMETLLNESYTIQTASGCGSIVAGMIIGEIGDINRFHSPGALAKYAGCSPRECSSGKNHRHRKTKGGNRRLNCAFHRMALSQISRSGNDLARTYFKRKILEGKSKQQALVCLRRQMVNIIWCMLKNKTNYNPRMN

SEQ ID NO: 110857 - protein, 326 aa, unidentified
MEHELHYIGIDTAKEKLDVDVLRPDGRHRTKKIANTTKGHDELVSWLKGHKIDHAHICIEATGTYMEPVAECLYDAGYIVSVINPALGKAFAQSEGLRNKTDTVDARMLAEFCRQKRPAAWGAPHPLERALRALVVRHQALTDMHTQELNRTETAREVQRPSIDAHLLWLEAELKRLEKQIKDLTDDDPDMKHRRKLLESIPGIGEKTSAVLLAYIGLKDRFAHARQFAAFAGLTPRRYESGSSVRGASRMSKAGHVSLRRALYMPAMVATSKTEWGRAFRDRLAANGKKGKVILGAMMRKLAQVAYGVLKSGVPFDASRHNPVAA

SEQ ID NO: 110858 - protein, 318 aa, unidentified
MEPINRFVGIDVSGAHVDVFVRPDGHARRFDRDGEREALLEYLKPLKPTLIVMEATGGLEVPVAAAIATAKLPVVVINPRQARDFAKATGRLAKTDAIDAAVLAHFADALRPEVRPLPDEASRELEALVVRRRQLVDMLVAERHRLRVCASNATKAGLKKHIEWLQKQIKELDDDIGRSVRKSPIWREKDDLLQSVPGIGPVVSSTLLASLPELGTLDRKKISALVGLAPLNRDSGTMRGKRTIWGGRASVRAVLYMTATVAAQHNPTIKAFYARLLAVGKPKKVALTACMHKVLIMVNAILRTGRGWQPGLALAHAP

SEQ ID NO: 110859 - protein, 356 aa, unidentified
MAANRMTDPDHRVTVGVDTHLDTHVAAAFNHLGRPLGHLEIATTAAGYRRLLRWARSLGSDVTFGIEGTGSFGAGLARFLRAASCTVIEINRPNRQTRRSRGKSDPLDAVAAARAVIAGEAAGPAKSDDHRVGMIRSLRIARRSAVKMRTQIGNQMDALVLTAPADLRERLRHLSTDDLVSVAAGLRPGAVTTPAAATKLALRGLAERHRLLTAELDQLDLELRRLTAGAAPALLALHGVGPDVAGALLLAAGDNPHRLRSEAAFASLCGVAPLPASSGKTHRHRLNRGGDRQANNALWRIVFVRLAHDPRTRTYVERRTAEGLSRRDIVRCLKRYVAREVFLALRPLTAPTPVAS

SEQ ID NO: 110860 - protein, 369 aa, unidentified
MGDRIRYVGLDVHKEGIVVAVAEGGARGEVREYGRIANTRSALDGLARKLGREGVKLRFCYEAGPCGYGIQRQLSAGGHDCVVVAPSLIPKRAGERVKTDQRDAVSLARLDRAGELTAVWVPDPGHEAIRDLVRARLDAVHALRRARQQLAGFLLRQGCHYRRPAWTKLHHRRLAGLKFEQAMHHLVLEDYIAAVEAAEARRDRLTAQIAAMLPDWTLAPVVAALQAMRGMALVNAATLIAELGDLSRFANPRQLMAYLGLVPSEHSSGASVKRGGLTKAGNSAARRLLVEAAWTYRFPARVSRELLLRQEELPKAIREIAWKAQTRLCARYRRLARTGKPANVVTAAIARELAGFVWAIARQVTIPAR

SEQ ID NO: 110861 - protein, 392 aa, unidentified
MYIVGIDIGKNHHEASIVSPEGKQIGRSLRFATTHKGADSLMSFIFKNIGNSPCVFGMEATGHYWYPIYSFLKAKGYTIYVINPIQSDSLRKMYIRQTKNVSIDSFLIAEVIRFGQFGTTSMADENILAMRQLCRYRDSVISSRTEIKLRIGTIMEQIFPEYEKQFSSLWVSTSMGILEKYLTPENIKNAPIDELFEIIKDKSHNRLTRAKAISIKDAAADTFGIKIAQDAFSFQLKQLIDRMNFLDKQIEALDCQILEYYEKFDCYLHTIPGIGMIAAATILAEIGDLNRFKSSSALVAFAGIDPTVRQSGEFSSTHNHMSKRGSPYLRHAIFLAATTCSFHNIPLNAYYKKKREQGKHHLTATGAVARKLTTVIYAVLRDGKPYEPKSFC

SEQ ID NO: 110862 - protein, 426 aa, unidentified
MNCTQNYKIDQVTEQTLVVGIDIAKRTHYACFVDDRGRVLRKSFPIFQSKEGFRQLYEAIQEAMQAFGKPQVIVAVEPTGHYWLNLAYFLEEHGIPLVMVNPAHVCRSKELDDNLPTKHDAKDALVIARLAKDGRFLVPRLLHEIEADLRVGSTLKEKLRKEQTAVKNAIVRWTDRYFPEFWTVFRDLGKTALSVLEWTPLPADMAGRSAEELIEVYRQSEGLKCPQKAKIQALIDAAKDSIGVTEGTTMARFEIAALVRRYRQLEAEIAALDAELKALVQTTMEYQWLKTVDGLGDATIIDLLAEIGSFAHYRDPRQLVKLAGLTLKENSSGQRKGQKHISKRGRKRLRSVLFRAMIPLIRHNEAFRELHDYYTTRPVNPLTGKQSIVALCRKLLNVLFAICTKKQAFDAERMKQDVLSQVQRAA

SEQ ID NO: 110863 - protein, 317 aa, unidentified
MEQVQSNMKVAGVDVGKDWLDVAVHGLEDSARWSNTATGIGELIGWLKAREVGRVGMEATAGYERDLRSALDAIGLEVVVHQPIEVKLFARLTRRRAKSDALDARLIAAATARIDTVRAASDPRLIDLAERLTAYEQITDQAAELKTFMEHVTLKDLDIDLRRQITVLTRLKARLLSGVLQRIKAHPDLLARYRLLLSLPGVGPVVAATLAVRMPELGAMRRGQAASLIGVAPFDRDSGHYRGQRFIAGGRSRPRRMLYLAALAAKRFDPALKAFAQRLLDNGKPPKLAIVAVMRKLIEAANLVLQRGQPWTRQQPA

SEQ ID NO: 110864 - protein, 339 aa, unidentified
MKITTIGIDIAKSVFHLYAVNKMGRYVKKKQLKRHQLLQYLAQLEPCLIAMEACGGANYWAREIKCLGHEVKLIAPQYVKPYVKGNKNDYNDAEAIAEAVQRPTMRFVPIKSVEQQDIQNLHRQRERIKKARVALVNQVRGLLAEYGIVINKGISAVRKGLPDILEDAENGLTMRSRELFADLLEELRLLDERLKQSEKQIETSNQGNEICQRLDEILGIGPIIASASYAAAGDGKDFVNGRHYSAWIGLVPGQHSTGGKPTLLGISKRGNAYLRTLYIHGARAVLRHSANKTDRFSLWAQALLERRGHNKACVAVANKMARMAWVIMAKGETYRPAMS

SEQ ID NO: 110865 - protein, 346 aa, unidentified
MKILALDLGKYKTVGCAYESESGVHQFQRSFTTPAALRKLVQEVKPDRVVIEVCSIAGWVCDLLREMGIEVQVANTSDDAWRWRKVKQKDDRRDALKAARLSAVNQVREVYIPLIEVRQWRALITYRQQLVRRRTKIKNHIRDLLLREGQILVRGSKCWNKLNLELLSGLARPLNEVGLAELWRGELHEELQQLQVIQERMATVEEKLNALGAADRRVQLLRTVPGVGPRLAEAIVALLDQPERFRKASQVSGYIGMVPKALDSGETERRGRITRQGSRLVRSLLVEVAWAGLRHSAWVRQTYQRLSGGKKARKKIAIVAVGRKLLVRCWAMLRDNRPWDWQPQIT

SEQ ID NO: 110866 - protein, 407 aa, unidentified
MGITCGIDWAETHNDIALADDTGHIVARARTGTGADGFNTLLRLIAENGGNPKDTPIAIETDKNLFVVALAEAGFTVYPINPRAVARYRERHGQAGGKSDPGDATVLANIMRTDPDTHRALPAISEHGRAVKALARQHQEAIWALHQTINRLRSVLLEFYPQSLQAFPNLKHRAALTVLTAAPTPSAGCKLTRRRLETLLGRCGRRNDPGLVEQILTELKAPTLRQPPQVEAALGQAVTGLLGIIASMHQAVDGLEKELGRTFDTHPQASTLRSVPGLGPILAARVLAEIGDDPTRFSSPAGLRAFAGTAPITRASGRSCYVKARKVRNKRLGDACHWWAFATLTKSTGARAHYDKRRAAGDHHNAALRNLANKLLGRLWWCLQHDEPWDDHAAWPDYPVPSQPVAA

SEQ ID NO: 110867 - protein, 392 aa, unidentified
MIYVGIDVASQKHDCFLLKDTGEVFSKTSFTIKNDFEGYKKLHNSILQFVESTKDSNVRIGLESTGHYSKNILLYLIKQGYQTTLINPILTNMDRKASTVRKTKTDKIDAEAICKFLDKNRFDFKPYTLLSYHIDALKSLTRQRFSLVKQMTQQKLIFQRLVNVIFPELLSHFSNDYGESVLNILYSYPTPKKLAKAHKESITKLLHSRCKITSSEILELAKNSIGQSEEYLEFELKHTIDMILFYQSQIEIYNKQIEIELNETEYGKIITSIPGVGIITGAMIISEIGDINNFTTSDQLLAYAGLDPSVYESGKFESSHNKPSKRGSKYLRWAIHQASSVIWQHDNTFKDYYLKKIKESKHHYVAIGHIDKKLIRVIFSLLKNKSMFIPQK

SEQ ID NO: 110868 - protein, 351 aa, unidentified
MEYVGIDWASRRAAWCALDSGGELLGEGVIAADLDGLTGLVARRGLEVSAALEMMSGAVWVAATLRAGGWRVQVADARRAKALAPLAAKTDRIDARVLAELCRRELVPEVWIASLDDRALRERLLRRMHLVRLRTSAKNRIFGLLSQWGLRVSVKRLRQADGLALLERLELPEVWRTSIAEALAVIELLDQRIAPIEAELAPLAQADERVQLLRTIPGVGSLLGLTIASVIGDISRFPSPAKLVGYSGLVPRVHQSGESSRTGRLSKAGSPLLRWAAVEAAQQAWRPHNPWHRLYVDVRRRQGNGNAAKAAVARKVLIACWHVLARNEPFKPAARAAAPIVPASSSTSLAA

SEQ ID NO: 110869 - protein, 316 aa, unidentified
MTGTPTYAGIDVAKDRLDVVLRPSGEYVEATNDERGIRSVVRRLRKDDVALAVLEATGGLEQPAAAALALAGVPVAVVNPRQVRDFAKATGKLGKTDRLDAAVLAHFAEAVRPEPRPLADEHTRELSAVVLRRRQLLAMTTAEANRARTAPKAVKKRIEAHLRWLRKELARVDGELKRVVEESLVWKERAALLMSVPGVGPTLSATLLAELPELEHLDRRRLAALVGVAPLNRDSGTLRGIRTVWGGRSGVRTTLYMATLCATRHNPAIREFYGCLVASGKPKKVALTACMRKLLTILAAISRNRTPWQPRLLPDS

SEQ ID NO: 110870 - protein, 358 aa, unidentified
MRTMEQQNNGLTLEKKVYVGIDVHKENWHVTIRTLGEEVFNGRIPGSYISFKKVLDRYRGNSVKVAYEAGPFGFWLYDRLTEDGVEALVVPPSTIPIESGNKVKTDKRDSRKLAILLERNMLKRTYVLSEEEREHRDLLRTRRQIVDHRNDVARQIKSKILFYGIPVPFSPKTRLTHRYIAWLKTLAFGTTYLKESLDLLIQLYEYLTQQITRITRKVVALCREKKYHERIKLLCTAPGIGKLTAIELLVELQDMARFKNASQLASYIGLTPAEYSTGEKTRQGRITRCGNKRVRTYLVESTWILITKDPWIRAKYLKLKATRGGKRAVVAIARRFIIRLRRMLLDNVPYNATCSLAA

SEQ ID NO: 110871 - protein, 432 aa, unidentified
MKNSTNQRIEEITDTTLVVGVDIAKKVHWARFTDYRGIEVGKAISFKSNREGFEAIVSKIEQLCKNKAKKKPYDRAIIGMEPTGHYWKTLAHYLKEAGYCVVGVNPYHTKKSKELDDNSPTASDKKESLVIAKLVKDGRYFDPYLPQDEYAELRGLSNARVNAMKRNNAVKNNITAILDEYFPEICEVFKKPLTGKASRQVLRSCPFPSTILAFGEIRVLSEIKKAVKKSIGMKKVRELIEVAKISVGVTYGMESARLRLEQLLDELDMVEKHIASIESLMEQKLHLTGYSEWFLSIKGIGIITAAGFLGEVGDPLRFNNARQIANYAGYNLIEDSSGKNKSGTTISKRGRSQLRALLYQMAFTMVNCNPEMKALHKHLTTRAKNPLKKKQSLVVVSKKIITVIYSLLKKQTTYDPALALGTVRREMIQQAA

SEQ ID NO: 110872 - protein, 372 aa, unidentified
MQSYYVGLDVHSRESVFVVEDDAGTIVARGSIPTTVNGLKQLRDRCGLPAATGVALETGASAFFVARELARLELTPVVIDAHEVRRKAQRPEQKSDTRDALELCEGLRRGFYRSLVHVPTPAISDLRTTLSRRRHFIRIQTAEVNAVKRLLRGVGQNSGRRGSLRTDAHWQGLIAGNLVPEQIQEHVRHHYAVWRQAAEQARALDLSLGDRARERREAVKRLETVPGVGPIVALTAIAVFAEVSRFPSAKHAASYAGLVPSTFQSGERDAHGHITKRGSAELRAMLCEAAHHARRSTHPLHPHFARVCARRGYKAAVVAVAHRLCRILFAMLRDGTDFSVTRTGVEQGAFERTTTYKYRLRPKPAGRLPVAG

SEQ ID NO: 110873 - protein, 350 aa, unidentified
MIIIGCDYHPGFQQIAFVDTDTGELQERRLEHREEAERFYRELGAQELRVRVGMEASGHARWFERLLAELQFELWIGDAAEIRTKRVRKQKTDRQDAQLILQLLLEDRFPRIWVPNWENRDLRQLLWHRHRMVQARTRIMNQLQAVALNEGLRCKKRLWRDSGREQLESFRLAPWASRRRRDLLELLDRLTPTIAELTQAIEQEVEKCPEAQRLQTHPGIGSLTALAFVLIIGRAERFQCGKQIASYLGLVPLEESSGQRRRLGHITKQGNSLLRFLLVEAAQVTVRSDPEWRSKYFHLAMRRGRKIAKVAMARRLAVRLYWMWRKGWNYEQLKKFGSHAGQPGHRDGVR

SEQ ID NO: 110874 - protein, 335 aa, unidentified
MSIIGCDLHSRYQVIAVVDTDTGEMVTRRLEHENGEARTFYAGLPKPSLIGIEATGYTQWFERLVAELGHELWVGDAAEIRARAVRRQKTDTRDAEHLLDLLLTKRFPRLWVPTPEERDARQLLKHRNKLVRMQTSVRNQLHFLAMSQGVCRKQKLWSARGRAELEGLSLGPWASQRRKELLQLLDGLGPRIEELDGAVKTEAERRPEAVELMKHKGVGPVAALAFVLTIGPVERFAHSRALVSYLGLNPSEDSSGGHQRLGHISKQGNEMLRWLLVEAGHSAAQFDPELRRKYQRLKFRRGAKVAKVAIARHLAVRLYWTLRQARGGAAGSHAR

SEQ ID NO: 110875 - protein, 359 aa, unidentified
MSKQKLNQKRNKDNLKFTKQNVLQSYDHYIALDWSIKNMAIARLKPKTNEPKIIDVPSDIKELKLYLKNLQGTKIITIEETTTSHWLYVELYDYADKIIICDPYRNRLLSDGPKNDKIDAGKLCLLLKNGMLKEVFHSNDRLYELRKLVSYYDDEVKAGVRLMNQKSALYRAENKSYKKKETIKDDSINKFIVSQLDEKINLYIDKKENYEKEFYKITKGNKVIKSLMSIPGIGIISGVTILSMVIDARRFKSSNHYLSYCGLANHKKISGGRNYGKRLPRYSRKLKSVYKSAAVRVISTNNPIREYYDYLVKEKSLTEQNANNAVARYIARVSLGIIKSGKKYKPYNWRENKKRNDAA

SEQ ID NO: 110876 - protein, 360 aa, unidentified
MDHIGIDVHKRESQIYILAESGEVIEQRIRTEPERFAAVLGTRPRARILIEASTDSEWVARCLEALGHEVIVADPNFAPMYATRTRKVKTDRRDARALAEACLLGAYRPAHRLSDPQRHVRGRLGVRDALVHTRTRYISVIRALLRQQGYRVPSGSAEGFIQRVRALPVPGRLLSVIAPLLTVMRHLNRQLAYSDATIEHLAVQDPRVPRLRSVPSVGPVTAAAFLAAIDDAQRFHHAHHLEAYLGLVPREYSSGDTQRRGPITKAGHSRVRWLLIQVAVSLLRRRPPAAEALWTWALRVAARRGKHVAVVALARRLAGILYALLRDGTVYAPRRGASCPGHRAARLGETAGLYTVSMVR

SEQ ID NO: 110877 - protein, 417 aa, unidentified
MDKNSNSPLKKEQRAKRAKAQRPVQRETKEVLAELVEKLRGKLELKATSASPGEAGPRPELSPNLDRLTVGVDLGDRWSHYCILGLQGETLSEGQLRTTQSDMTELFAAIMAARVVIEVGTHSAWVQEIIASEGHEVVVANPRLMEGSKRRKRKNDRIDAHKLARLGRVDPQSLHPITHRSREVRQDLVLLRARDALVAARTELINTTRGLVKSLGTRLPKCSSRSFGHKAGEAIPEQVGEALLPLVQLAEGLSACIQGYDRRIEELASKKYGHTKLLRQVKGVGPITALAYVLTLENPERFAKSRDVGPYLGLVPKQEDSGESQPQLGISKAGDTMLRKLLVGRAQYILGPFGPDTDLRRYGLRLCERGGKNAKKRAAVAGARKLAVLLHRLWVSGEVDEPLGYGVSGTIVQPAAA

SEQ ID NO: 110878 - protein, 301 aa, unidentified
MSEVGIIGIDLAKRVFQLHGSCANGAAIFRKKLTRVQLLAFMSQQPECTVAMEACATAHCWGREIEKLGHAVRLIAPNYVKPFVKRQKNDVADAEAIVEAASRPTMRFVALKSEAQQARAMLFRTRQMFIGQRTQTINALRGHLAEHGVVAPKGAIHVKLLADAVADEAIGLPEGVRELAQVYFAQIEGLNVQVTALDQRMKAAAKEAEAVRRAQTMPGVGPITALAIETFAPDLNCFRRGRDFAAWLGLVPKQNSTGGKPRLGKTSKMGQRDIRRLLISGAPLMHVNMHCRAANGCSSGS

SEQ ID NO: 110879 - protein, 353 aa, unidentified
MIMIGTDSHKRTHTVVALDEVGRRLGSATVRATSDGHLQLLQWAGQWPHPVFALEDCRHLTRRLEGDLLGAGVRVVRVPTRLMAGARRSARQPGKSDPIDAEAVALAALRHPDLPVAAVDGPTREVKLLVDHRRVQVAERTRAQNQLRWHLHELAPELVVPSRGLTRYCVLDRLAQVLGPLPGVVARLARELVERCRELTRNINALERELRNLVRLQAPSLLALPGCGVLGAAMIVGETAGARRFRNKDAYARFTGTAPIPVWSGSSHGKVRLNRGGNRTINTALHMMAVTQTRGVGPGQAYLAKVQAAGKTRTEALRLLRRRLSDAVFAAQLHDQRAADRTATTAVAQADLT

SEQ ID NO: 110880 - protein, 347 aa, unidentified
MKYHCGLDVSLNSTAACIVNQDGTIIRESEVPSEPAAIDQWLKAIGLPMERVGLEAGGLSSWLCRELLAVGWPVICIETRHAKAAMAAQQIKTDRNDARGLAHIMRTGWYKEVHIKSPNSQELRMLLNNRRCLLEKRLDIDSQIRGSLRTFGLKLGKVTPVTYEPRIRELVGDNEKFQACIFPMLEVRRVLIEQCKKLEKLILDYVKDDQICQLFMTIPGVGPLTALVYKTFVDRPQRFQKSKAVGAALGLTPRKYASGEVDYDGHITKCGDAFVRMHLFEAAKVLMSRAGKPSELKSWGLRLAKRSSKKKACVAVARRLAVIMHAMWRDGTVFQSTQVQAELAAAA

SEQ ID NO: 110881 - protein, 342 aa, unidentified
MDQISIIGLDLAKGVFQVVARTAAGEKVLSRRLRRAQVEPFFARLAPCVVAMEACSSAHEWARRLTALGHDVRLIPPIYVKPYVVRNKNDARDADGLTLAMQRPDIPTVQIKTPEQQARASVHRVRDLLIRQRTQTVNQIRGLCAEFGLVARPGHEGLKTLFAAIAAQNLPQLASQALAAQVRHHAELCRQIEALTKTIQAQVETCAEAQRLMSIPGIGEICADAMVARLPDASSFRSGRDLAAWLGLTRLDHSTGGKPRTQGAISKKGDRTLRRLLVLGATSVIAHQRRTGRLDPWTTGLLARRPFKVAATALAAKMARIAWALLVRGQTYQSGHQPKWAA

SEQ ID NO: 110882 - protein, 323 aa, unidentified
MKVETPKKTKAPLESPLARVCVDLSKSTFHVVGLDAEGNKVLRRKFNRENFKEWLARPDLPKVIVAMEACGGAQWWGAYCQSLGHTPMMIPPHQVKPYATSQKNDYNDAEAIGEASLRPKTTSVPVKTPEQQDLSMLIAARQGMIKERTALAVRIRAFLLERGFALPRGIGHLEGRLSDLLDDGTNSLTLVTRTLIRTLQSDLRHLSERIGEIDSMIKALARTDETSQRLQTIPGVGPMVAASLIAVIGDPGRFENGRDMAAFLGLVPSQHTSGDKIRLGRITKHGDTGLRSLLVEGAHAAIQAAETTGSGKMKDGKLRAWIL

SEQ ID NO: 110883 - protein, 447 aa, unidentified
MTDERDGFPVLRRDVAGIDVGSEEHWVCAPSRTGDGRDVERFPATTPGLERLIAWLQDRRVRAVALERTGVYWIVPHEMLEQAEFEVRLVDTRELRRVPGRPKSDRRDCEWLQRLFSCGLLRGAFRPPETVCLLRTLVRDRATLIAERADWLRRMQKALDQMNVRVHRAVADLDGVTGMAIVRAIVGGERDPHRLAALRDYRCQKTEAAIAEQLTGHWRADHLFSLQQGLKMYDAITDRLADYEREILQQLAAMAQTDDTPPPPTNVNKARMIQKRGEEPLRQALYRISGVDLTTIDALGVETVNVILSEYGPDLSRFPTEKQFIAHLRLAPHQAISGGKPVRTPKKPQRRSARVTMALRMAATSLRRSRSALGAYYRRIAQRLGADVAVFATARKLAQWVYRVLRWGQPYVDEGAAVYEHRYRQARITRLAAVAKDLGYALVSVEA

SEQ ID NO: 110884 - protein, 308 aa, unidentified
MSIWIGIDVAKATLAVHVHPEGRFLSLPNSPEGYDQLLAYVAGRPVGNVLLEATGGYERPVMRALADAGLPVTRINPRRARAFAQALGKTAKTDPIDAALLARMGELVVAERMHPSAQQEELRALVQRREQLVQQRDDDRRRLKQATHERVRTCLAEHILWLRGQIRAIGKDIARLQQQVDDDLARRLMAVPGIGPVTAASLQAYLPELGHLDRREIAALAGLAPYNADSGKKEGKRRIRGGRGPIRRVLYMACWCVIRLQPDFQARYRRLRDQGKCAKVAITACMRVLLIRLNAMARDKTEWRSPAW

SEQ ID NO: 110885 - protein, 366 aa, unidentified
MLYLGIDQHAKQLTISLRNDTGDIVLKRQVSTEPKRCAEFFAKLRDKAGDEGFIAILEVCGFNDWLLKFLPTVGCTQTILIQPTKKLKVKTDKRDAHALSELLWVNQHRLRVGEPVRGVRQVILPSKHHAESQRITLLRKDAGRMRTRATNRIKNILRKHNLQWQMPTKTFPSVRAVAWLKTVELPPCERAEMDWHLDELERWTTRMNDLEVQIIERSKDDPVVTRLRTIPGCAHYSALSLVCRVGDPHRFPKGKSLAHYWGLTPGVNDSGEGTGRRGRITKAGSTMARWVLAQITLHCLRRDPVLKAWYKPIRNRRGSKIARVAVMRKLAVIIRNMMVHEQTYSECRDAMLARRKRQVAIHKQTA

SEQ ID NO: 110886 - protein, 340 aa, unidentified
MENFAGADLHKRITQLALLREGGPPLQYRFPNDPVMVRGILKKLPQGTKIALESTGSWWWLVDGAREMGHEVFLSHPKQTRAIASARLKSDKVDALMLAKLLKADLLPVVWIPGERERHIRELLSHRTRLVRQRTAVINELHALYAKRNVDVPGLIWHRVRPMPWRVEELRGYAPRIVREDVELLKVLNEQIRGLDKELSALAEGDPQANRLMTHPGVGAVTAVAVSSWVGNIHRFANAKKLASYFGLAPRVRQSAERERHGHITKEGNRMVRTLLLQAALSAIRHGGGPVRRHYLGVLKRRGKQIARVAAANKLVGVMFHMMKEGIDYEEFLRRGGSAQ

SEQ ID NO: 110887 - protein, 348 aa, unidentified
MAHFVGLDVSVKETSVCVVDDAGKVVCERKVPSEPDDIAVLLTSVGGDYVRVGIEAGPLSQWLVNGLSEAGYPVICVETRHMKALLQAQQINKSDRNDARGIAQMMRVGLFKPVHVKTLAAQEQRMLLTSRKLVQRKLIDIESDMRGTLRNFGLKVGVVSTIGYEARIRQLVEGFPRLAAIIEPLLTVRRVMRQQLATLHKMLLDTVRHDPVCKRLMTAPGVGPVVALTYRASIDQPQRFLHSRAVGAHVGLTPRRHQSGEIDYDGGISKSGDTMLRTMLYEAAQILMTQSRHWSWLKAWGMKVAQRRGMRRAIVAVARRLAVVLHRMWTDGTDFRWGSEPATAVAAA

SEQ ID NO: 110888 - protein, 421 aa, unidentified
MSNSTLTKKLASVKPGTLFVGVDLALDRNVAVVLSERAERLGRFGFPNERDGYDYFYRRLEAFQEQQQAPALLVGMEPTNYFWKLLAADIEKHRPDYGYQLVNPFTVKKNREGNQLSRSKDDNRDAFTIGDLLRTGKYTETRLLHGMYAELRQYVTLNTRLQRDIGRQKNLISNVSGQLFPELPRIFKALSGETALAMLRNHGAAVVVRAMSQEAFIAGVRADFRGQRLQVAKLRRAHALAQQSVGLRDGVEGLQLALRLHVEALEALQQQVETVCSGLVNTFLALPESKYLLSVHGLGTITAATILSEIGDPSHYTNARQLIKLAGTQPVPNTSGRKTHSQTPMSRKGRPRLHTALFFAVMRLVRVDEAFRQEYVQLQTREKNPLTKMQALGVLMNKLLRILWALMRNRTFYISGFQDAA

SEQ ID NO: 110889 - protein, 326 aa, unidentified
MEHELHYIGIDTAKEKLDVDVLRPDGRHRTKKFANTTKGHDELVSWLKGHKIDHAHICIEATGTYMEPVAECLYDAGYIVSVINPALGKAFAQSEGLRNKTDTVYARMLAEFCRQKRPAAWEAPHPLERALRALVVRHQALTDMHTQELNRTETAREVQRPSIDAHLLWLEAELKRLEKQIKDLTDDDPDMKHRRKLLESIPGIGEKTSAVLLAYIGLKDRFAHARQFAAFAGLTPRRYESGSSVRGASRMSKAGHVSLRRALYMPAMVATSKTEWGRAFRDRLAANGKKGKVILGAMMRKLAQVAYGVLKSGVPFDASRHNPVAA

SEQ ID NO: 110890 - protein, 419 aa, unidentified
MSTERRKVCGIDVHKKFLVATILDREGKSETRRISQNTESLLDLRNWIQSENCESVAFESTADYWRSLYLILENHVPVTVANAHHIKHVPGKKTDITDSHWIAQLELNNLIAPSRIFTGERYDLRTLTRSRELLVQSRTELKNKIHHLLDSTNIRLSSLLSDLFGKSGSIILKGLAQNKPLDEIIESLPKKMRGNADIISATIPASIPPVVLVLLQSYLKLVDDLDVEIKLLEGRIRESLANKSREFQIITSVPGIGFIGASTLIAEIGNVHDFDDADKLTKWAGLTPTVYQSANVTRTGSITKQGSRHIRWILVELAHIAIRSPGRIKSFFERLMPKKGYKKAIVAVARKMLRIVWHLLVHDELFIDDFPRSKQVKFPKLPKKIQTIGINKLIELLSKASEVVFRDSDKEIFRLGLSE

SEQ ID NO: 110891 - protein, 483 aa, unidentified
MVLNTPIGSLMPYKRFKLFVDQQAHGYFNRLNFKTMFKNKKNKEKVKRFSQLSVINPTAAGIDVSDTEMVVAFPINSEQIEVRAFGSFTRDLKLLANTLQDYGITTIAMESTGVYWVTLFLLLQEYGFEVYLVNAKHVKNVTGRKDDESDAEWIQKLHSCGLLSASFQPDNMTRALRSMVRHRKGLVSISATYLNRIQKALELMNIKLHTVISDIDGRTGRNIIEAILSGEKDPEVLAELRDIRIKASREEIIKSLEGHWLPEHLFELKQCYQLYCIHREMIDLCDKEIEQQLIQIIASKNEGIIAEIPDVKRKRSPKHPISYNLTGYLKKLVGVDLTSIIGISELSALSIIAEIGTDMSRWKSKNHFASWLGLAPNTKISGGKEISSRILKKKQYAAQSFRMAVISLNKNKSPLGDFYKRIRAKAGPGKAVVATARKLAIIFYEMIIKKELFNPNALEEYQKKHNQMKINQLKKKIAQLELA

SEQ ID NO: 110892 - protein, 453 aa, unidentified
MSSFNKKSGMPIIHANAAGIDIGSKFHVVAVGNNLSKEPVRTFQSFTTELHEMAKWLQECKITSIAMESTGIYWIPAFEILESYGFEVFLVNAREAKNVPGRKTDVNDAQWIQRLHQYGLLRASFRPGKDIAVLRAYIRQRERLLEFKASHIQHMQKALMQMNLQLHHVVSDVTGVTGMKIIRAIIAGEYNPRKLASYRDTRCKESVEAIESALMGNYQEEHLFTLKQAVELFDYYSDKVSECDKRIEITLNLVQKKNESPTEPLPKAKHRTKQPNDLSFDVRAALYQVLGIDLTQIHGIGPSLALKLIAECGNDMSRWPTSKHFTSWLCLSSGNKISGGKVLSTKTRRSSSRAAAVLRLAATTLGRTSTALGAFYRRLSARTGKSKAITATARKIATLFYNTIRYGMKYTDPGANYYEERYQKRLLSNLSRKAAALGYTLQENPNPYVKGVS

SEQ ID NO: 110893 - protein, 357 aa, unidentified
MGMLEGQVQFVIGVDTHRDTHTAAVTDSTGAVLVHATVATTSAGHRQLLGLAQQHASGPRVWAVEGTGSFGAGLTSLLVDHGEWVVEVDRPKRPARRNGAKSDVLDATRAAREVLAREHLAQPRARGDREALRVLLATRRCVVDARTKAINQLKALIVSAPPVLRERLRRRCTAQQVRCCARLRVHATHTTEHRVTVQAMRATARRIIFLEAEAAQHQAELDRLVGQVAPSLLDELGVGALTAAQLLVSWSHHGRVRSEAAFAMLAGVAPLEASSGRVTRHRLNRAGDRQLNRALHVIALTRLRQDPATSLYVARRRAQGKSDKEIRRCLKRILARKLFRLMQRELAPSPACLIDRT

SEQ ID NO: 110894 - protein, 414 aa, unidentified
MEQKMIYVGIDWADDHHDILITDDSAKTLDQFRIDHTCDGFALLHSHLANHQTSPGLVLIAIETSRGLLVHELLQKGYTVYAINPKAVNRYKDRHVLSKAKSDALDALSLGHLLRTDRHLFQPIKPLPEDYRLLDRLCSDLRKVVDEKSRVTNQVISCLKEFYPKALETFSLNSQIFIDFLKAFPDHGTLSACTKKTFLAFLKEHRYPYPTKAEELWKIIQSPTLQPDKVIARSGKLRLGMLLDQLENLKEHITHYEQEIRAILDNLPETNPIKSLPGVGERLAPELVATLGPNSKDGHHRFQAAEEIAKLSGCVPVVRESGKWRNVSLRYACVKSLRRTFHDWAFASINYSSWARAFYDYHKEKNQSHCTILRNLGKKWIKILFAVWSKGISYDEALHIQNLKAKNVPWAMAL

SEQ ID NO: 110895 - protein, 420 aa, unidentified
MKTQGNKPFTAFIGIDWADAKHDICMQAAGDERREFSCMPHKVEAIDNWAQSLYRRFGGQMAVALELSKGPLVYALQKYDFFVIFPVNPSTLAKYREAFTPSGAKDDPTDAEYVLDLIMRHADCFEPLQPQSVEMRTLVSLVEQRRRLVDDRVRTTNRLRDTLKQYYPQALEWFDRIDTSLFCDFIERWPTLVQVKRARTTTLQRFFHQHNLRSAHLLETRLSSIKAALPLTLDEAVITPNRLQALVLVDLLRATLVAIKRFDEAIAELSPKHPDYALFSPLPGAGPSLAPRLLVAFGEQRDRFKSAAELQRYAGIAPVTERSGNKHWVHWRWQCPTFLRQTFVEWAAQTINKSYWAGLYYRQQRDKGCNHHAAVRALAFKWIRILYRCWQTHTPYNEALYLKALKRRGSPLLNQIEATI

SEQ ID NO: 110896 - protein, 346 aa, unidentified
MEHYVGLDVSLKLTAVCIVDQTGRIEREGVVHSDPEAIAAFIKSNAPHVARIGLETGATSTWLWTELKKLGLPVICIDARHAKAALKMQINKSDRNDAVGIARIMQCGWYKEVRVKGLDSHAVKALLVSRALLVKIKRDLENQVRGLLKNLGLVIGRAKMNAFAWRAAELTEDRPELAAAVTPLLNARVAIERQIADLDRKVMKLARNHAQVQQFMTAPGIGPITALCFLATIDDPRRFRRSRSVGAYVGLTSRRYASGEIDWTGRISKCGDKMLRSYLFEAANVLLTRVAKWSALKAWGIRLAKRSGLRKAKVAVARKLAVILHRMWVDGADFKWSSKETADQTA

SEQ ID NO: 110897 - protein, 397 aa, unidentified
MIAVGIDISKAKSTVAVIDSDGTVLASPFTMAHTQPEMEAFVSYLKGLGEPTTILMEYTGHYHYPVLKKLQDEGFPVCIVNPYQMKKYGDVEIHKAKTDKKDALRIAAYALEKSYKLVPYSSMEQKYEDLKFLSRQYSQRITYVAKLKVQLIALLDQTMPGITRILPLNSRNPEKCALLLFIKRFKSFDEIQRIGKARFLASYDVLAKKASERSASSKGLSIYELAVDSITTRGEDPYIWLSQNQCVDLLSATQNAADEIISQMRNIAETIPEYKVLRAMHGVGDRLGPIILAEIGDVHRFHSGKALNSYAGNDAPPYQSGQFESRNRHISKRGSSALRKACYEVMQALKLIKPQDDPVYLFMLKKEQEGKPFNVAKMAGVNKFLRIYYARAMELYK

SEQ ID NO: 110898 - protein, 327 aa, unidentified
MVTPALGIDVSKDRLDIELAAAGKPRAKCFGNSPEGWRQLMAWLKEQKIKRVHACLEATGRHSLGVALALCEAGHIVSIVNPAQIRDFARTKLGRNKTDGVDAGHIREYAEIFKPLPWIPPSPAMRRLGELQTIRAAIVSSLSEWKNRCESGLADDTVLALAKATIAHFAAQLAAVDKAIARTVADDSELSAKRDLLLSISGVGEVLAGLVLAELPGTNILRSSGQAVAYAGLNPRLHRSGSSIDRPTRISKIGNATLRAALYMPALSAMRHNPVVAALAARLRAQGRLKGKQIAVAAMRKLLVLCFGVLKSGKPFDPAVAMPTRGI

SEQ ID NO: 110899 - protein, 362 aa, unidentified
MLYLGCDVHKNYTTVSFVTEDGKVADTSSFYNDIEELKNLLKKFPEEEFSAVLEAGLNWGVIYDMLDSLSEVKNVSLAHPPKVKAIASAKIKTDKIDSKILGQLLRTDLIPEVWVPCKETRILKDIVRSRAFIVKIKTMIKNRIHDILRKSHINPPDVKDIFGKYGRMWLEEIELSDRRADKLLRYHLKLKDTFEDMEKELKKWINKEMRSNEDLKLVKTIPGIREVFGPIIVLEIDDINRFPDPAHLHSYSGLVPSTHVSGNTSYHGRLIRGNRWLRWAFIEGAHTSVRISPYFREYYGRIKRKAGSQAASVASGRKLATIVYKVLKEKRPYIEEYRIKQNIGRSPSVRPSGGITSHSFQE

SEQ ID NO: 110900 - protein, 343 aa, unidentified
MRLFVGLDVSLEKTAVCVLNEHGGIVKEAEVASEPEALERWIGTQPGSIAAVGLEAGPLSQWLHRGLSTAGLDVVLMETRQVKGALKAMPIKTDRRDAEGIARLLHLGWFRPVHCKSVSAQEVRALLTARKAVQQGMLALEMSLRGLLRNFGLKVGAISRGRFEHRIRELAADNVMLDAATEPMLRARASLRHELARLERHVRGLAQEDEVCRRLMSMPGIGAVVALTFRSAVDDPARFKSSKKVGPWAGLTPSRNQSGERDVSGHITKAGDAGLRRALCQAATVMMNRGPSTWLRTWPAQIARRRGRKCAMVALARRIAVVLHRMWRDGTVFQSEAPIGQST

SEQ ID NO: 110901 - protein, 344 aa, unidentified
MTYYTGIDVSLRSVSICVIDEQGAIKFEGKVVSDVEAIVAVLRKLGAQIRQVGLEAGTLTQYLTYGLRAAGYEVICLEARHAAATLAAMRNKTDRNDARGLAHILRTGWYRTVYVKSVQSHQTRALLTSRKAVLSKCIDLENELRGLLRVLGVRLPMRVGHGAFDVLIRRHLQHHPDWAGALLPLLDARTMLYQTFLKLEYAVRSMARQDPVCQRLMTVPGIGPVSSLTFKSAVDDPVRFRSSRTVAAHFGLTPRRFQSGESDNPGRISKAGDAGVREALYTAAHALLTRSGAWSTLKAWGLRLAKTRGHRRAVIAVARKLAVILHQMWVRATDFQPRRPKATA

SEQ ID NO: 110902 - protein, 377 aa, unidentified
MKRIKFVGLDVHAETIAVAVAELGGEVRSIGVIPNRCESVRKLVKKLGPVEELRFCYEAGPTGYVLYWQLTALDAKCEVVAPTLVPVRAGDRVKTDRRDALKLARSYRAGELTAVWVPDAAHEALRDLVRAREAAKRDQLRARNRLTKFLLRHGKRPPEGVNPWTLNYMNWVRKDVHFEPLAQQATLLDYLHEVEHMAARVTRLEQAIEEAVQLAPQQMREVIEALQALRGIAKVSAVTIVAELGELSRFGEARQLMAYSGTVSREHSSGESRKRGGITKTGNVHLRRIVVEAAWAYRHAPAVTACLRKRQERVSEEVKEIAWKAQHRLHGRYRKLTARGKNTGKVITAVGRELLGFIWAIGVKVEAEQRKALGQAA

SEQ ID NO: 110903 - protein, 357 aa, unidentified
MSNQNNKLDFTDQEFHIGIDVHKKNWAVTIRSNQMELKTFSTDPSPEGLYRYMNRNYPNGRYVSAYEAGFCGFWIHRSLEQFGFNNLVVHAADIPTSNKEKTTKTDKVDSRKIARELENNSLESIYIPDELPQQLRSLCRLRYRSVQNQTRVKNRIKGHLHYYGIPILSHQEMSHWSGHFINWLKTIEFNHESAKVYLLFCIEELQQHRKRIALITKELKRFIKEHGFAQQIKYIRSVPGIGTVVSMVFFTELMNINRFPKFDHLLCYVGLVPSVASSGDKSSKRNLTPRRNRFLRHLIVEAAWVAIRKDPALLLAFNELTKRMKKQDAIIRIAKKLLNRIRYVWKNQTCYANAVIK

SEQ ID NO: 110904 - protein, 415 aa, unidentified
MNVFCGIDWAERHHDVAVVDDTGTQLAKARISDDAPGYHKLLDLLAEHGDSPENPIPIAIETSHGLLVAALRTGNREVFAINPLAASRYRDRHGVSRKKSDPGDALVLANILRTDRHAHRPLPADSELAQAIAVLARAQQDAVWSRQQVANQVRSLLREYYPAALHAFQGKEGGLTRADARVILTLAPTPAKAARLTLAQIRAALKRSGRTRAFDTEAERLRSIFRAEYAHHLPSVEDAFGQQLLALLKQLDATCQAADDLATATDAAFHQHTDSEILLSFPGLGPQLAARVLAEIGDDRARFADARALKSYAGSAPITRASGKKRFVGRRFVKNNRLILAGFLWAFSALQASPGANAHYRRRREHGDWHNAAQRHLLNRFLGQLHHCLKTRQPFDEQRAFTPLALSPEASGAQT

SEQ ID NO: 110905 - protein, 385 aa, unidentified
MTKQLQYRTFIARDYDIFGGLDVDKKSIAVTFRDHGIMRKSFRLAYSASQLLNYTEKHFPGQRVAFVYEAGPTGFGLHDELTAASHACLVVSPSMVPTVQRKRVKTNRLDSLKLAEGLRGGQLRGIHVPALGYRDLRHLVQLRDTQVGQLRASKCRIKSLLLYEGIPFPAANGKWSAQALRELEALPCNATVRFKLDQLIDALQFHFQSAAKVQKQIRYFCQNDPELRGCISFLVSLPGVGTITATHALARLGDWRQIKDVRQIAGFLGLVSSEHSTGDKENRGEITRIGDSRLRNKLIQCAWTAIRKDPELRAFYRRIYERQPKKVAARKAIVAVARKLTTRMYAVLKEQRPFVIRADSSIAPLTAEETGGPRERLDAAQNEQP

SEQ ID NO: 110906 - protein, 390 aa, unidentified
MQTEADRPESPTAMRNHLDAIFVSLELSRSTWLITSLSPGGGEKVSKKSVRGGDVAGLLERFTQLRKKAHARTGRNFSIIVIQEAGLDGFWIHRVLQNEGIESHVVDPASIAISRRRRRAKTDGIDGEALLRTLLAYTRGEPRVCAMVKVPTTEEEDRRRLCRERKVLTNERVLHVNRIKGLLFSQGVSGYEPLRRDRRQRLDQLRTGDGRPLQKHLKAQITRELDRLELLLEQIKAVEMERDALLAAQQVATPAPAMMLLDFKGIGPEFAATLWLEGLFRHFDNRRQIASYAGLAPTPWQSGSVDREQGVSKAGNPRLRTMLIQLAWLWLRHQPQSALALWFEQRVRRNGGRLKKTTIVALARKLLVALWKYVTAGVVIEGAVMKTVEQ

SEQ ID NO: 110907 - protein, 429 aa, unidentified
MNSTQNKKIEQVKETTMIVGIDVGSEKHYFRAFNWRGLELTRKPVAFSNSMEGFNSFYNSVVELMQKNELKEALVGIEPTGHYWFDLGQFMGEKNIKFVMVNPHHVHKTKELDDNSPSKNDRKDPRVIAGLVRDGRYFYSYMPTGVYAELRNASNRRFVLVEEQTRAKNRLQKWVAVYFPEYKGIYTHIDAKGGLLVLKQAPTLEEIVRLGVEGIIKIWKDAKLRGNGHKKAMLILNAAMKSIGLKAGLTEARMEIQDLIEDYELQTKRLERVNDLIKELCQQVRYADKLLEIKGIGITTVAGFIAEVGDITRFDSTKELQKLAGLELVADSSGKHDGKTKISKRGRKRLRYLLFEAAISVVGKNEEFKEIHRYYTTREKNPLKKMQSLIAVACKLIRVFHVILTKGISYDASKMLKDIRRPGEQLKAA

SEQ ID NO: 110908 - protein, 334 aa, unidentified
MKLMRIGVDLAKNVFQIHGVDCHELPVWRQRLPRDRWLQTVLEKIEPGCEIGMESCGGAHHWARQLQAHGFRVKLVAPQFVKPYVKSNKNDANDAEAICEAMSRPSMRFVAIKTIEQQDIQATHRIRAGLIEQRTAKANQIRGLVAEYGLVAPKELLMLRRAIPCWLGDADNGLTARFRRLLDGLWDDLRALDGRVCQLDGEITAIATNEPSAVRLQQLRGVGPMIATALVVALGDARQFANGRQFAASLGLTPRQHSSGGKDRLLGISKRGDTYLRYIDGAWRTLGATHSQIQRGSAQPVGRSFSRAIASQCGRYCAGQQNCTHGLGDAASRH

SEQ ID NO: 110909 - protein, 355 aa, unidentified
MIVVGVDPHKKTHTGVAAAQTGKAVGEVTVKARLKGFERLLAWARELDDERVFALEDCRHVSGNLERFLVTRGERVVRIPPKLMAGARRSARTPGKSDGVDALAVAHAYLRQPDLPEAHLAGIERDIKQLLDHREDQVWERTRIQQRLRWHLHDLDPHLEIPDRALDRFCWLDWIEQRFAASPPSTTLRIALELIDDCRRITCRVNELEREITTLISDHFPKLIAIPGCGALTAAKLVGEIAGIERFSSDSKLAMHAGVGPLEASSGNRQRHRLNRKGNRQLNSAFHRIAVTQCRIHEPAKLFMTKKMREGKSKREALRCLKRHLARSIFRTLTERNTSPRFDAAQEMHQNSGLT

SEQ ID NO: 110910 - protein, 426 aa, unidentified
MSVTREGRSMAEEVEWFVGIDWASQSHQVCLIGAHGECLGERAFAHGGAGIEELCDWLIARTGATPEVIGVAIEITHGPVVEALLERGFSVYGINPKQLDRFRDRFTVAGAKDDRRDAHVLADSLRTDRHAFRRLSNDEPVIVQLREWSRMADDLQQERARLASRMREQLWRYYPQMLELADDLAADWFLDLWSHAPTPAKAVRLRETTIERFVKAHRLRRWQAPEVLRILKQKPLSVAPGVVEAASDHIRVLTVRIRLVNQQLKAAHHKLDELCAQLVPSEENEPGQQCEQRDVVILRSMPGLGRIILAVLLAEVWQPLRRRDYHALRSLSGVAPVTRRSGKTCVVVRRYACNKRLANALYHWARVATQHDALSRRRYAALRQRGHSHGRALRTVADRLLSVACTLLEQQTLFDPSYQVRDAAGA

SEQ ID NO: 110911 - protein, 355 aa, unidentified
MLAEQVDHVIGVDTHRDSNTAAILNTAGALQAQTTLATDAFGYRRLFAFARKHAPGRRCWAIEGSGSFGAGLTSFLLEHGEWVIEIDRPKRPARRNGAKSDELDAARAAREALSREYLAQPRQRGWREAMRVLLTTREGAILARTKALTHLKSLLVSAPAPLRDQLRRHPINDLVARCSRLRTSPTQTAEHRATITVLRSTARRALMLEAEAADLASQLELLLAEIAPELLDEPGIGPISAAQLLIAYSHTGRLRSEAAFASLAGAAPIPASSGQTVRYRLNRGGDRQLNRALHTITLSRLNHHYATRAYAHRRAAEGKTTREIKRCLKRYLARQLYRQLQTNPRLNPIPANSGT

SEQ ID NO: 110912 - protein, 354 aa, unidentified
MSQKLESAIAVIGIDIGKNSFHVVGHDERGAIVLRQKWSRGQVEARFANMPTCLIGMEACVGAHHLSRKLKALGHDAQLMPAKYVRPYSKGQKNDFRDAEAIAEAVQRPTMKFVATKTADQLDLQALHRVRERLVSQRTGIINQIRAFLLERGIAVRKGQRFLRAELPRILATPPDVLSPRMVRVIEDLAGDWRRLDERIEGLSSEIETVARQDAGCERLMSVPGIGPIISSAMVAAIGTGDAFTKGRDFAAWLGLVPKQMSTGDRTILGKISRRGNRYLRVLFVQAAWVVLIKPKIWERYGLKPWIEAAKKRLHHNVLAIALANKLARIAWSVLARGRAFEVRKMDEAANQSA

SEQ ID NO: 110913 - protein, 424 aa, unidentified
MSQRTLTERVTMVKRGMLLVGIDLGRDDNVAVVLTDTAQRLARFKFPHTRAGYDFFYRQLEQLRAQHPGQGLLIGMEPTNHYWKWLAADLEAHQPPLPYRLVNAYTVRKHREGEQLERAKDDLRDAFQIAELLRTGKFTETQLLQGAYAQLRQYATLHMRLQHDAAQLQNVLTTAVDLGFPELRQVFKDLSGETALALLRTASCASTIRKLPLSEFLAQVREQLQGHRLSVSKLKQAHALAQTSVGLVDTGALHFTIQVYSEQLAHAHESLKRTETALVELFLTLPEAPYLLSLPAISPLFAALLLAELGDPQDFSCASQWVKLAGVQPVADSSGHRTRSPTPMSHKGRSRLRELLYWLVLRWVQHDPYFKAEYERLQTRLQHPLTKMEALGALMNKALHVIWAVLRDRTFYDPQYRQAGAGAL

SEQ ID NO: 110914 - protein, 412 aa, unidentified
MQVLYPCCCGLDIHKKFVVACVLRTAPDGKVQKETRTFSTMTGELLALGDWLRAEGCTHVAMESTSSYWRPVYNLLEGQFDLLVANAYHIKTVPGRKTDVKDAEWIADLLRHGLLRGSFIPAPEQRHLRDLTRYRTHLVEERARLTNRLQAVLEDANIKLAAVVTDVRGVSARAILDALVAGETDAVLLADLARGRLRAKRDQLAQAVVGRFATHHAFMITEQLSHLDYLDEAMERVSTEIEQRLQDEWEAVKLLDSVPGISQRAAEIVVAELGVDLHRFPSAKHLASWAGMCPGNKESGGKRLSGKTRKGNVWLRQVLIEIAHVASKTKETYLAAQYRRIAARRGKKRALIALGHTILVIIYHILTERKPYHELGGTYFDQREREQVERRLVRRLERLGYSVSLQPADSIS

SEQ ID NO: 110915 - protein, 342 aa, unidentified
MAKLYVGLDLGSRHIELVAMRLNGKVIKQRRFPTSESNLRQEFEALTGEVHVHMEAGELAAWVREVIKPYAKSIIIAHARDNAWIAKDPNKRDRVDAFKLADLLRMNRVHPVYYADDRARRDFKQLVQHYGDLTAQEVALKAIIKSRLRTQGVIVHNAAPFTEQGCKDVVARVPSAEIRKAIRQLYKVLAHTLEVRDEAYTAMVKAGRQFPEIKLFQETVPGVGPIGAARFSAYVQTPHRFSNKRKLWRYCRLGVSYRSSDGQLLSHPKLDRAGCGPLKDLARKAFEVAVNSQDDNQFKRAYEQVLARTHDKTHARLTVMRKIVSVLRAMWLTNSPYQDELG

SEQ ID NO: 110916 - protein, 424 aa, unidentified
MKFKMQDKQNQLIERISDKHLVVGVDIAQHTHVARAVNFRGIVIGDPLTFENNEQGFDRLMEWINHLKLSKGLNTEIVGMEPTGHYWLNLSKWLYDQHIDVVTVNPHHVKRNKENRDNTQSKSDKKDALVIADMIKNGYYSFIQPTSEAFEKLRVFMANRDVIVKRLTSSINQINRWVDIVFPEFREVFKDIKGKGAIATLRLFPTPSELCSMKAHEIVKGWKTVMNRHAGLKKAQMLIDLARNSVGSKQAQEAYKLHLEHLLEEFDLAKTQLERVEKEVTSVLDQITFAKKMIAIDGISEISLAGILGEAGDLSGFAHGNSLLRHSGLHLAEASSGKWKGQIKVSKRGRSRLRRFLFLTTLSLVRNNSDFKQIHNHNVKVKKMKKMKSIMKLVGKLARILVAIAKNNQTYCSQKVQPLTPLAA

SEQ ID NO: 110917 - protein, 328 aa, unidentified
MSVSRFVGIDVSKSRLDVFVRPDDEAVCFSNDEPGIASLTQRLRELAPERVLLEATGGLEIPLIAELAEAGLPVVAMNPRQVRDFAKSVGKLAKTDAIDARIIAQYAELIRPPIRPIPDEQSRLLGDTLARRRQVVEMITAEQNRWRQAKGEIQQQILQHLLYLKRELANLDDELGKQITQNPNWHEKDEILRTVPGVGKVLSRTLLANLPELGTLSNREISLLVGVAPLNRDSGLMRGRRCIWGGRASVRNPLYMASLVATRYNPIIHAFYFRLLSAGKAKKVALVACMRKLLTILNAMLRHRSPWSDDHTGYPPIPSAQPAAAYAA

SEQ ID NO: 110918 - protein, 313 aa, unidentified
MAMETSEFIIGIDVAKAELVVHFQSNGAQMSLSNTKPEIKKWLKQQPANTALCVEATNIYHLDVVEMAHEKGFKVYVIDGFQLSNYRKGIGGRSKTDASDAALLGRYLERESRELRPWAPPPAVYGKLQSLLRRRAALVTMRTALSQSWGNEQLLKAAFKNFTQQMDKLDLLVQKKLKELLKEAGLLEQVARCQAIEGIGFLTATALVMAFIRGEFKNSDAFIAFLGMDLRVSDSGQRTGRRRLTKRGCSEIRRLLHNASMSASRSAAWKETYEHYRNKGKATTEALVILSRKLARVAFALMKKKEEYVSRTA

SEQ ID NO: 110919 - protein, 323 aa, unidentified
MNKDIKYFGIDISHLVFDVTDSDGNYYQFKNNPSGFKKFVKLMEIDSHCVMEATGYYHYQLAYYLLESGVKVSVENPLAVKRFIQMKLSKIKTDKSDSKLICEYAKQVELKLWQGNSKHQTECLQMTRLLSVYTKQSTMLKNKLHGEAVLGNPSKAVVSSLKRSLKQLQKEIKSLEDTLLILVKQTHQDLLTRLKSIPGIGPKTAIMLVVLTDGFERFTSGSELCSYAGLNPVIRKSGSSVNGRSRISKIGNQKLRNLLFMCSFNACKYNKACRELYERIVAKGKSKKLALIAVCNKLLKQAFAIAKSGLTYDDSYRSILVKN

SEQ ID NO: 110920 - protein, 344 aa, unidentified
MKITTIGIDLAKNIFQVHGVDTHGKVALRKQLKRAEMSPYFANLSPCLIGMEACGGAHHWARKLEGYGHTVKLMAPQFVKPYVKTNKNDMADAEAICEAVARPNMRFVSIKTIEQQAILSVHRARQGFVKARTAQANQIRGLLSEFGIVIPQGIHSVMKQIPEILEDGENDLPGTFRHLIARLMDNLKEMDSQVDELEKQINLWHRQNEASRKLADIPGIGPITASAIVATVGKAQEFKNGRQLSAWMGLVPRQSSSGGKQNLLGISKRGDTYLRTLLIHGARSVIHHAANKVEAESWLGKLVNRRNKNIAAVGLANKNARIIWALLAHDRIFRPDYAAAVAAV

SEQ ID NO: 110921 - protein, 347 aa, unidentified
MRFYTKPHQFYCGIDLHARTMYVCILDRDGEIVVHRNMKASPDALLKVVAPYREDIVVAVECIFTWYWLADLCAQEEIPFVLGHALYMKAIHGGKAKNDKIDAHKIAVLLRGGMLPQAYVYPAEMRATRDLLRRRMSLMRQRAALLTHVQQTNSQYNLPEIGKKIAYKANREGVAERFPDPAVQKSIEVDLALLGYYDGLLTELELCIVNTAKERHAQVFYRLRSIPGVGKILALVLLYEIHDIHRFPRVQEFVSYCRLVKCAKESAGKRYGTSGTKIGNAYLKWAFSEAAVLFVRNNPAGQKYLARIEKQHGKGKALTILAHKLGRAVYYMLKRDTAFDLDKFLNQ

SEQ ID NO: 110922 - protein, 356 aa, unidentified
MVLMVGVDVHKDTHTAVVVDQLGARRAQRRVQATDAGHLELLAWAQRECRELAADGQEIEWALEDCRHVSLRLERALLAAGQRVRRVPPKLMAGARSSARQFGKSDPIDATAIARAALREPNLPVAEHDPESRELKLLVDHREHLVTERTAMICRLRWHLHELDPELERSIPARGLDKPTRLTALAALLPAEHPGLVGELAAELVGDILKRTSRIRALEREIARRVAVLAPQLLELPGCGPLSAAKLIAETARPDRFRSEACFAMHAGTAPIPASSGRTNRHRLARGGNRQLNAALHRIALTQTRLADSLGRAYYDKRRARGDNHNEAMRALKRRLARVVFNLLLQSRTAPDTVAA

SEQ ID NO: 110923 - protein, 361 aa, unidentified
MFSERTSVGLDVHARSIVACALDVESGQLHRQRLTPNVEDLQRWLAALPAPVAVTYEAGPTGFGLARTLTAAGVRCVVAAPSKLQRPAGDRVKTDARDAEHLAKLLRMDQVVAVRVPSADEEAARDLVRAREDARSDLMRTRHRLSKLLLRQGIVWSGGAAWTGRHEVWLREQHFDRVGLQLAFDADFEAMLMASARRDRLDKAIEAMAADSQFTPVVRKLCCLRGVSTLTGFALAVEVVDWDRFTGSTIGAYLGLVPTEHSSGGSRSQGSITKTGNTHARRLLVEAAWHHRKTYRSPGVIMLSRWAAAPPAARTRGHEGNHRLHSRWENYLARKKKPVVANVAVARELAGWCWSLATMPD

SEQ ID NO: 110924 - protein, 370 aa, unidentified
MKKKVLYVGLDVHKKTTDVAIAPGRSNGKVRSYGKIDSTVDALNKLIKKLEDGDKQLRFVYEAGPCGYQIYRHLDAKGIDCSVVAPSLIPRRSGDRIKTDRRDAVNLARLFRAGELTSIYVPTVEDEAMRDLVRCRDDMKRFERKARQRLLSFLLRHGYQYSGKRNWTKGFYNWLATVKFTHSAQQVTLQEYIEAANECSERIKRITEQIQVHVEEWSRARFVKAYQALRGVSLIVSTTVAAEIGDMRRFPTPKQLMAYLGLIPSEHSSGKTVRRGPITKTGNSHVRRSLIEAAWTYKMQARVSTILLKRQQGLPKSVCDISWKAQTRLCARYRRLMARGKSKQTVVTAIARELSAFIWAIDKEMQVAHE

SEQ ID NO: 110925 - protein, 336 aa, unidentified
MFQLGIDVSKKTLDLCLLREGVKGRVKTRKLQNDINAVSAVIAWLSKQHCKPEDVHIIMEATGVYHESLAYGLHKAGGRISLANPHRAREFARGMGMLTKNDRVDAYMLACYGVLKAPEPWLPPPEEVRHLSALLSRRDALVADSTREKNRLEKYLATDTPSVIAESVEAMIGQLNAEIKRLDRLIRSHLNQHPELKKDFDLLTSIKSVGYQLGLNMLVILRSHDFATAEQVAAFLGVVPVEKYSGTSVRGCPKLSKIGPPEIRAKLYLASLCGLRFNPLMKAMYERLCLRGKGKMCAIGALMRKLVHWCYGVLKTQKPFDVGYLPSYARSACKAA

SEQ ID NO: 110926 - protein, 312 aa, unidentified
MANQVCAGIDVGKEKLFVNIYMDNKVRDFPNTHSGLERICKYLIKNAVDLVVMEASGGYERLPASDLRACGLSVAVVNPTYVRRFAQGMGTLAKTDTIDARLIAHFAFVKQPKPQPAKTVEEEELTALVERREQLVSLLSMEKNRLSKASDYSKTSIQISIQFLTEQIGTIETAIKALVSKSPERQAKLRCMCSFVGVGEITAVTLLTEMPELGKESREHIAALAGVAPINRDSGKMKGKRRTYGGRARVRRTLYLAALSASKHNPIIKAFYERLLAAGKEKKVALVACMHKVLTILNAMLKKGELFNPEYS

SEQ ID NO: 110927 - protein, 431 aa, unidentified
MMMSAVQTAGIDLGKKKHFIAIVPPGNAQRHKQYPTSPFANDRAGFETVLAFLKRYGDPAHTSVLLEPTGHYGLALEAFLQEHGVTVYRITTEGKYQKNKTDKLDAQALAAMLYTHVVLQAPQLGKKWTIRRMVPPVPAVRRLRGLVGLRVALMRERIRCQNKLTAICDELFPELTQIYKDPNGPSALQLREAFPLPELVAKASQAELRATRTHTRPGNKAFIQLQELATSTIGSKDRERQESLIFEQKILLKNFRTYLVQLDELDAQIKQIVMQTREGKILSSVPAVSPVTAGIYLCQIGNIANFAHPSDLRGYCGWSSKRSQTGTTRDHESQDKGGNRILKQTVMMMVMAAVQRDDHYKALYDRLLKKHCVYNERKKDYLHKMLAVGRVAGQMIGVIWHLLYHDAAIVAAAAAKGEPPPPPELFAYPHG

SEQ ID NO: 110928 - protein, 355 aa, unidentified
MIHVGIDQHKRFSVATSVDSETGEVRTVRLYHDEPDRIRSYIRSLGPGARVALETTGNWYWLVDLIEEEGAEPHLANTIEARRILKARAKNDRLDSMHLAMLDMDGILPEVYVPERSIRDARERHRYRIRLIWLRCRIKNAIHAILAKLNINHPFSDLFGKRGREFLDGLHLREPYETELRSALRLLDAFDREVSLMRDEIRKALQGHPLAEVLQTAPGIGELTAYLILHEVGPVERFRGEKEFVRYCCLAPGTWQSAGRRRDLPIGRHGNLYLKAAFTEAAQVAVRCDEALGGFYARLRRRKGTGKAMAAAARKLAVSVYYMLKRHKAYRPAASISRGSGKPVLRLGRRLETVA

SEQ ID NO: 110929 - protein, 313 aa, unidentified
MAQMVTNAGVDVSKQWLDVALWPKRDEVLRLNRDAAGLEELALWLRQRHVVRVGLEASGGYEREVIDALEAQGFEVALLNPLQVRRFAQAKGRLAKNDRVDARTIAQFTAVMIEAPQPSRRRELDALSEHLMFRRQLRAWIDDCTNQLEHLRDKALRRKTEARQVKLQGELAAHDKALAKLTAEHADWNDLARRLRTVPGVGPVLSQTLIALLPELGSLSRRAVASLVGVAPFDNDSGQRSGNRHIQGGRAAVREVLYMATLSARTCNPVIAAFAKRLAGKEFKVIMVACMRKLLVILNAMLRDKMDWKAKAA

SEQ ID NO: 110930 - protein, 408 aa, unidentified
MTHKIVGVGIDVSAYKLNIAILNTDAELLSTYQVDSSAAGFKSLFHILNKQLNAVQIVFEATGIYSNKLVRFLNELHFRFECINPLVARQLSTGLRQNKTDRVDAIKLARIAISDNFQPSYVRNEAYEKLYQLDRWYENENHDIVTLKNRFDKIQQQTFPVKGFPVAKDIPLFYELFTIFPHADQVLQTSLEQVTERLKDNLSKQHPRTNWKKYAELLHSYAVKAVPSVRSDAPNSSYLIQLGHQILAVVASKAQIIKKMIEIGETFPVFKYLCSIPGIAQPSAIRIIAEIGDISRFDNANQINAFIGIDLRHYESGLFTGSDTISKRGNKIARKLLYQCIFQIVKTCTLTHRKCHIADYYYYQTKKQSSSPKKTAIACIHRLLRTIYGMCKYNESYQYKFHQNQLIQ

SEQ ID NO: 110931 - protein, 348 aa, unidentified
MALTIVETRAVTGGVDTHADVHVAAALDPLGGLLGVREFPATPAGYARLLGWLGGFGTVCLVGIEGTGSYGAGLARHIITAGVRVVEVDRCDRQDRRRQGKSDPLDAVSAARAAQSGRAAGASKGRDGAVEAIRALMVAKRSAAAERTQTINQARALVLTGPDDLRARFTGYTTDALVAGLASLRPRPGSTIGYATRIALRELGRRAEFLDAQLERLDALIGPLVVARAPGLLALYGIGPNTAALLLIAAGDRPGRLRSEAAWAHLCGAAPIPASSGKTIRHRLNPGGDRQANHALWRIVFTRLGSHPATRAYVERRTAEGKSKKEIIRCLKRYVAREVYPHLRAPAG

SEQ ID NO: 110932 - protein, 343 aa, unidentified
MKLSRVGIDLAKNVYQCHGADRTGKTVWKRRLKRHQWFKTLLDRIEPGCVIGMEACASAHHWGRELQSRGFTVKLIPPQFVKPYVKSNKNDARDAEAICEAMSRPNMRFVTVKTVEQQDIQATHRIRAELITQRTAKANQIRGLVAEYGLVAPKRLSSLRAAIPCWLEDAENGLTADFRSLLHGVWDDLLILDDRVGEMDKLIKRLAENHEECVRLQQLRGVGPMISTAMIATVGDARQYHKSRQMAASIGITPKQHSSGDRDRLLGISKRGDVYLRTLMIHGARAVVARAKYKDDRLSRWVTGIATKRHPNVAAVALANKTARMAWAMLRNETDYDPDYAIS

SEQ ID NO: 110933 - protein, 367 aa, unidentified
MMGWMAPLRHRRANLVFSRITRNREPSMSEITTIGLDLAKHVFQAHGIDAEGTTVLRKRLRRGQVLAFFSRIPRCVVGLEACATAHYWARELGALGHEVRLMPAQYVKAYIKRNKHDAADAEAICEAVQRPTMRFVPVKTTEQQATALLHRGREQLVRQRTMLVNALRAHLAEFGMVAAQGLRNVGELIAIVRDDGDTRLPDVARQVLQVLAAQLEQIEAAIAALEKQLMAWHKTNAVSQRLASIPGIGPIIATAIATTVADPGVFRSGREFAAWLGLVPRQNSTGGKTRLGGITKRGNRYLRRLLINGASANLLRSKATKADPWVIGIRRRRPPLVVAVALANKTARIAWAVMLRQKEYQPRALAA

SEQ ID NO: 110934 - protein, 355 aa, unidentified
MSQEKYIGMDVHQATISVAVTDSRGKLIMESILETKAATILEFIQGLHGSLSVTFEEGTSAAWLHDLLKPHVTRLVVCDPRKNALLKDGSKSDRIDARKLAELLRGNQLTSIYHGEHGMRTMKELGRSYLTITKDLTRVMSRIKALYRSWAIPCSGTSVYAPRHRAEWLGKIPEPGVRLRAERFYQQLDLLQPVRQQARHDLLTESRKHHAVKLLRQIPSIGPIRAALLVAQLQTPHRFRTKRQLWAYSGFALETHDSGEYRYVRGKLQRNRERMTVRGLRNNHNPDVKNLFKGAAISASTHPGPLYDFYVALLEKGMRPTMARLTLARKIASITLTIWKKGVGFDATQLHRQEA

SEQ ID NO: 110935 - protein, 345 aa, unidentified
MEIRTIGIDLGKTVFHFVAVNARGQVVVRKKGSRTQLLRFTANLPQCLIGMEACGGAHFLGRALREQGHDVRLMPAQYVKPYVKTNKNDYIDAEACSEAVTRPTMRFVPIKTDDQLDLQSLHRVRERWVVRRTAVINQMRGMLLERGITIRKGRHYIEESLPAILEDPDNKLSGALRVLLTQLRMEMQYLHGQIEETDNLIERICGELEQCRRLVAIPGIGPITATATVAAIGNGAAFKKGRGFSAWLGVVPGEHSTGGKQKLTGTSRRGNKYLRKLFVQGAHTVLLQKTKQSSGLSTWLVSLTSRKRKQVATVALANKMARMAWAVLFRGEAYRPPTAPQVIAA

SEQ ID NO: 110936 - protein, 413 aa, unidentified
MDVLHPKCCGLDVHKNSISACILVQVAGRVQKHQRRFGAMTQDLQELANWLRQFEVAQVAMESSGVYWKPVWNILEGQFTVVLANAQHIKNVPGRKTDQKDAEWIAQLLQHGLLRPSYVPCEVIRDLRDLTRMRASLSQEASRISSRVQKVLEDANVKLASVATNTLGKSGRAMLEEIIAGQNDPEYLASLALGHLRAKTPQLRLALEGKIRPHHRFLLRRLLDQLRFVEHEIVLLDERLEDIGRERPELSQAVARWDTIPGIDRVAGWTLLAEVGHTMAQFPTAEQLASWACLCPGNHESAGKRLGGTTRKGSPWLRRMACQCAWAAARTKNTYLSAQFRRVAARRGSKRAIIAVAHSLVIIGYYLQKSQRNYEDLGGDYFDRIDSDGLKRYFIRRLEKLGHKVTLVPIKAA

SEQ ID NO: 110937 - protein, 317 aa, unidentified
MIVVELDVHKHSLTAVAVDELGRERGAWSGAIGAGCLVWARLLASELLWAVEDCRQVTRRLERLLLEQGEQLVRVPPRLTAPQRRRGRVRGKSDRIDALAVASAALQGPQLDRPRAGEERLRELKLLVDHRDDLVSERRRCQQRLRRHLHELDLSLHIPLGALDRGVWLDRVGRHLVRRPQTTQVQIARDLVARCRSLTRVVLELDREVHARTEAIAPRLLDLPGCGALSAAKLLCEIGPSDRFRSAAQLARHAGVAPLDASSGKQQRHRLDRGGNRQLNCALHRIAITQGRVHHPRGTTSSASRVRARAAARQSAA

SEQ ID NO: 110938 - protein, 412 aa, unidentified
MSDKIAGIDVHKKVLMVVVLDGAAPGEKPERRRFSTMPTELHHLATWLRERGVVEAVMESTAQYWRSVWLELEPHMSLHLAQAFLNRAPRGRKHDFKDAERLARRFIAEELILSFVPGGEQRMWRTLTRMKLQLIRDRVRLHSQIECLLEEMRIKLSVVVADLFGASGLRILHALAQNETDPNNLASLGDERLKCSEEQLIEALTGASHPVHRQMLGLQLERLRQLDDQIAVLNTMIAQAMRPHQDAVVRLAEVPGFGIDSAQQVIAEVGVSAETFASAAEFTSWVGTCPGKEESAGENRSSRSAKGNKYMRRILNQAAHSAARSKGTHFQAVFRRLLPRLGYQSAIWAIAHRLCRLVWKILHEGVRYIEQGISCQPKLLISRAQSLAKQLRKFGYDLRVTTTNPQMHESVS

SEQ ID NO: 110939 - protein, 410 aa, unidentified
MELLHPHCAGLDIHKETVVACVRHLRNGKLMTGIKTFKTTTEELIALSDWLTTEGCTHIVMEATGVYWKPVWHILSDGEFDLVLANAAHVKNVPGRKTDVNDAAWLADLMAHGLVKASFVPDQPIQQMRDLLRTRKQFGRERSSHIQRIQKTLEDANIKLDLVVTDVLGLSGRRILQALIAGQTVPQALAALADRRIHATSAQLEAALRGRVTDHHRFMLKLHLDQIDAQDAAIARIDKEVDGNVEPFRVALEMLNGIPGVSSLSAEVIIAEIGVDMSRFETAGHLISWAGLCPRNDESAGKRRSSRMKKGAPWLKTTLVQCAWAAARTRDSYFQAQYHRLRSRRGPKKAIGAVASSLLTTAYHMLKSGTLYQDLGADHFNHRAKDKQALHLIHRLQNLGFNVQITPSAA

SEQ ID NO: 110940 - protein, 325 aa, unidentified
MYNFSNFVGIDVAKKDFYACFDEQSESRKFHNTTLGINSFLRQLSDSRFQNQDTIIGLESTGSYHLRLCLQCSTRGFQVKVINPLIVKKQNQTNLRRVKNDRQDASLIRYCLTTGAGYVFKENQETLLLKSLVRQRNSLANMLFKNKRQQDDVNYKEDCLKTKFNPVYQEIGLILSQKMKELEKQLRTFRKPEQKLLQTIPGVGPITAVSFIAEVGDIKRFKLSKQLVAFVGLDSRVHQSGTSIRGKGYISKRGNKILRTRLYNATSVAVLHPNLFRRFFQKKRSEGKPYKVALVAAMHKMTHVIHSVWTNNKPFVDLTNTPKEG

SEQ ID NO: 110941 - protein, 446 aa, unidentified
MKKSSRMSVIHPHAAGVDIGAEFHVVAVPPDADAAPVRTFQRFTGDLHRMSDWLKTCNITTIAMESTGVYWLSAFEIPEAAGFNVILVNARDAKNVPGRKTDVNDAQWLQKLHSFGLLRASFRPEHDISVLRSYLRQRERLTEYRAAHIQHMQKALMQMNVQLHHAVSDITGVTGLSIVRAIVSGERDPSVLIQYRDVRCKKTPEVLQQALTGNWQPEHLFAPEQSVAFFDFYQEKIRECDDQIETSLLQFSTGTEEPEGVLPSARHRTKQPNQLSFDVRPLLWKITGADLTQIHGFGPYLALKFVAECGTDMNRWPDASHFTSWLCLSPGNKISGGKVLSPKTRRSSSRIAAALRLAATTIGRSDTALGAFYRRLSSRIGKAKAVTATARKLAILFYNALKYGQKYVDPGADYYEERYRNRVLDGLKRRAKSLGYSLQQDPELCV

SEQ ID NO: 110942 - protein, 412 aa, unidentified
MTAIDQFAAHVGLDWADKKHDVCVQCKNGERTFHIIEHTPEALDTWLIGLHQKVKGRIAIALELKKGPVVYALQKYPFVTVFPVHALSLARYRQTLWPSGAKDDPQDAELALELMLRYPQKIKAIEPDNADIRLLQQLVEQRRLLVEDKRRFVNRLINTLKQYYPQPLEWFSHRGSLLLCELIIRWPSLQQLKRARRDTVRNFLNAKGGRAMVLTGQRIASIDNATPLTTDQSVIEANALMATALATQIKVVSEIIKTYDERIERLFDTLPDSGLFKSLPGMGPCMGPRMLAALGDNRDRFNSAEEIQNYAGIAPVTERSGQKSWVHWRWQCAKFVRQTFVEWAAKTVNSSYWARLYYQGLREKGKSHQSAIRALAFKWIRIIYRCWKTRTQYDEAKYLLALEARKSPLLKP

SEQ ID NO: 110943 - protein, 324 aa, unidentified
MSEAYDGQQVVGMDLHRRRSVLVRMTADGRKLETARITNSPGELRRVIARAGKRPKVVLEATYGWYWAADTLAAAGAQVHLAHPLGVKAFSYRRVKNDEKDAADLADLLRMGRLPEAWIAPAEIRELRELTRYRIKLVRLRTSCKDQVHAVLAKLGIEVTCSDIFGVAGSAWLDDLMLPQPYAGKMASLRTLAGELTAEITLLEAAIADLLAHHDGYHAIQALPGIGPVLAAVLVAEIGDITRFATPARLCSWAGLTPGTGNPIPRSAAGTSPSKGPRPCGGRWSRRSSTCPPATRCASARRASWPAAATRPSTSPRSRRPASC

SEQ ID NO: 110944 - protein, 354 aa, unidentified
MNIKYIGMDVHKETISIAVMNGDGKLVMESIIETKASTILQFMQGLRGDLHVTFEEGTWAAWLYDLLKPHVTELVVCDPRKNALLKEGNKSDKIDARKLADLLRGGYLRSVYHGENGLRTLKELSRSYLTISKDLTRIMNRLKAIYRGWAIPCEGQQVYDPRHRAEWLDKIREAGVRRRAEFFYQQLDALQALRQQVRRDLLAESRNHSARKLLRQIPSIGPIRAALLIALIQTPHRFRTKRQLWAYSGLAIETHDSAQYRYVAGQLQRSKKPQQLRGLNRNHNHDLKAIFKGAATKAGSGAGPFHDFYQALLTKGMRPSMARLTLARKIAAITLIVWKKGAHFDVEQLKPQAA

SEQ ID NO: 110945 - protein, 334 aa, unidentified
MQNVTLIGIDLGKNSFHIHCQEKHGNTLLRKRFSRIQLTQFLATCPPCIVAMESCAGAHFMARHISQLGHQVKLISPQFVRPFVKSNKNDFIDAEAICEAASRPSMRFVTPRTEDQQAMSALHRVRDALVRERVKATNQMHAFLLEFGISMPRGIAVIKRLATVPEEHELPPYLVRLLTRLHQHYGYLCEQIEEIERELKNHLADDETAQRLLTIPGIGTITASLLATKLGDGKNYLSSRDFAASTGLVPRQYSTGGKSTLMGISKRGDKNLRRLLVQCARVYMQRLEYQSGRLAEWVNGQLTRHHSNVVACALANKLARIAWVVTTQGTVFSK

SEQ ID NO: 110946 - protein, 438 aa, unidentified
MPNNVIFNFDELFISVGIDVGADFSWMSIVLPNQQFVGKPYKILHNSMNSLALAVSKIKEAEEMYSLESRIFLESTGIYHYPLFCYLRDKGFNCSVINPIITKNSTNINIRKVHNDRFDSKKAALVGLKPDLKVSLMPSDLALNCRNLCREYYDLMDSRNAYVNKLIDELRMVFPQYLGIFSKVTIDTSLILLETYTSPSAFINADKQEIIDLIRSTARFGLTYACNKYNAIIQAANDADEFGYILDSNIKRIRLYIGFIRKYDEEINSILESMHELAAANEDTDFVKQIRLIETFKGAGFLSAMSLMGEIGDFSAFSKPKQLFAYFGLDPAVKQSGKFEGTKIQMSKRGSAIARRVIHTLTLQSISASRTGESKNPVLLDYYLKKCESKPKLVAMGAVSHKVCNMIFAILRDSKPFEIITPQEHIKKYNAAKCDVAA

SEQ ID NO: 110947 - protein, 310 aa, unidentified
MEQTFIGIDVAKDQLDVHVFPSDDAFAVARDSEGLAALIERLRPLDPHLVVLEATGGFELTVAAALVSAAIPLAVVNPRQIRDFARATGQLAKTDALDAKVIARFAAKVQPEARPVPDEQARALGELVARRRQVIEMMTAERNRRRQLISRRLLKSVDRLLAVLQKELTELDHDIGEGIRGTPAWRERDELLRSVPGVGDVVARTLIADLPELGRLDRKQIAALVGIAPINRDSGKMRGKRTTWGGRAKVRSVLYMAALVASRHNPVLAAFYRRLVAAGKPKKLALTAVMRKLLTILNAMVRNKTRWQTA

SEQ ID NO: 110948 - protein, 378 aa, unidentified
MDVIYPRCAGLDVHAETIVACALWEEDGHIQKDIQTFSTFSKGLGDLLEWLEEHGVTHVAMESTGVYWKPVFAFLEGYVDLTLANPQRIKNVPGRKTDVSDAEWIAKLLRHGLVEKSFVPPADIRELRDFTRLRKKWVGQLTSEKNRIQKVLESSNVKLGSVLSDLFGVSGRNILARLLEKGYVDKDELDECLRGRLKTKKQAVYDSLLGTLTEHELRLLRLLWKHVEELERLIEEVDQHIDRLLEPYREEVDLLMTMPGVKKQTAAVIIAEMGTDMSVFETPERAASWTGLSPGNHESAGKRKSTRTTKGNPHLRSALCEAAWSAARSKTHPLSRKFWSLAARCGKKKALIATARRMLVIIFCMISRKEPFRQPQLI

SEQ ID NO: 110949 - protein, 322 aa, unidentified
MKHVIAFDISMGKSYMVIYNAQKQCVFESEIKHSKPEFKKLQEKIHELTDKTGELPKIVFEATGIYSRQLERFMQDNQYTYCLLNPLEAKLQCDSLRIHKTDRSDAHRLALTHFTATRRVFTGTDNLFYQLKSLSRLYSELDSELSIIRGRMHKVIQLTFPELERMFTSKSDLFLNFVQLFPHPDCILGLSKTIIKNRIRANTNKKISNITAEKKAIQILEIAKTSYPAVSQNDVLCDQLKLYAKRYQELLHQKECCINKMVYIAEQRAEYNIILSLPGIGPNTAVRLMAEIGDITRFNNNKQLNAFAGINIRRFQSGKTIF

SEQ ID NO: 110950 - protein, 340 aa, unidentified
MKKFLFIGIDFSKSKFDVTVLKSIDQQDFAQAIFLNEKKGFNDFLKWVTKQSNVPKQDWLFCGEHTGLYSRGLTDFLIKKDLFIWLENPLQIKCSWGIKRAKTDKIDSLEIARYALRFEDKAVACKPANKDIESLRLLFAYRGRLVKNKVSLEVSAKETRRVITRDTTSRFIFENSQHDIDRIKKEIEVIETKMHDIIVSGQLKENYLLVVTIKGVAMITAIALIIHTNNFEAFKTARQLACYCGVVPFEKSSGTSINKGNHISQLANKEIKTLLTQCARCAVQYDKELAVYYNRKIAQGKRDRIAINNVRNKLIHRIFAVVNNRIPYRENYLNPFLDCA

SEQ ID NO: 110951 - protein, 343 aa, unidentified
MQISTIGLDLAKNVFQVHGVDEVGKLTITRRLRRGQLIGFFKKLPPCLVGMEACATAHYWARELVKLGHTVRLMPASYVKAYVKRSKNDAADAAGICEAVTRPSMRFVPVKTAESQAALMLHRSRDLLVRQRTQLINALRAHLAEVGLVAATGVDGLKSLLAIIREAGETGQLPGPMQQALQPLIDQLAALQAQIGQLERSIHAQHRASDVSRRLETIPGIGVIGATAIAATVTEPGAFKSGRELAAWIGLVPRQHSTGGKQTLGSISKQGDRYLRRLLIVGATAVIRHARAHPDKHPWIMKLLAKMPAKKVAVALANKTARIAWAILAKGGTYRAPALAEHA

SEQ ID NO: 110952 - protein, 400 aa, unidentified
MRAVFGIDVSKASSEVAILVNGEKVHGYTMSNDAIGFSRLLGDLKTVHKPEIIFEATGVYSRRLQAFLDEHGYAYTRLNPLEAKKQPDSLRVRKTDQIDAEKLAQSQFVLNRKTTYVQKEVYQNLRDLSRFYQNLTEDIVRAKNRLHKVLQVTFPELENILSTPTGEQYWNLVITFPCKDFVLELSNDELSKSIRLSTSKRISDKRVAYLAEKLIALANQSYCAVKKTSSILEEVRYYAKELLRLSEQRQAVLDEMVELAQPLPEYDILLSIPGIAETTATSIIGELGDIRRFQSANQINAFIGIDLRHYESGNFLAKEHITKRGNPYARKILFKCIHNIASASHTNPCHIADFYEKRKRQSQTTSTKPHTIASIHRLIRTMYYLIMHNKLYDYASTQNR

SEQ ID NO: 110953 - protein, 341 aa, unidentified
MGIVTLGLDLGKNWVHIVGFDGNGRIVFRRRVRRSQVLALTANMPPCLIGMEACTGAHHLGRALEAQGHEARLMPPQYVKPFVKANKNDYRDAEANAEAVQRPTMRFVPLKTIEQLDLQSLHRVRQRLVGRRTALINQLRAILLERGIIVPQSRRALEKRLPEILADERNGPSPRMRRLIEELRAEWRELDKRIFEFDDEFAAIAKREADCRRLCEIPGIGVLNATALVAAVGDASAFTRGRDLAAWLGLTPREYSTGGKQRLLGISKRGNQYLRNLLIHGARAALPHLAERSDALGRWLRSLLARAHRNIVVVALANKLARMAWAVLAGDSYRRAEPIAA

SEQ ID NO: 110954 - protein, 318 aa, unidentified
MGGVNAAIEVGKQQLVVQLGSQGEQFSEANEPRAIKRIAKRLFQAGCERVLIEGGSYQSVLIAGLRAAELPVVIVNPRRVREFARSIGQLAKTDKIDARILALYGEQTQPPLRELPDEQSQALRALWVRREQLIEMLVMEKNRLEHTAEKAKAVRHNLCSHIDYLRKQVKQADNDLDREVRNSALWDKYEMLNSVPGVGPVLSVALLSDLPELGRLNRGEIAALAGVAPFNCDSGTLRGQRRIDGGRSRLRRVLYIATVAAVRCNPVLKLFYLRLRAAGKPPKVALVAVARKLLTILNAMLKTKTAWRPPCPARPELT

SEQ ID NO: 110955 - protein, 440 aa, unidentified
MIDTNQNKEIEFAAFVGIDWADLKHAWALQIPGHLEVERGDLDHTPQAVEDWAAELGRRFGGRPIAVALEQSRGSLLFMLTKYAHLVLFPVHPTTLYDYRKGFRPSGAKSDPSDAGLLVDLLVRHREKLRRLNPDTEQTRTLQFLVEARRKFVSDKTRYSNRLTAYLKMYFPQVLGWFSEVTSPIAGDFLERWPSLQKVQKARPETLRKFFIQRHSCTLDNVDRRLEEIRSALTATHDVAVACSCSAAVLALVRIVRTVRDAILSYDQQIETLARQHPDFAIIDSLPGAGPALVPRLIAALGTQRDRYQSASELQSYSGIAPVLASSGKQHWVHWRWACPKFVRQTFHEWAAHSIGSSAWAKAYYEQQRANGKPRNTVVRALAFKWIRILFRCWKDRKPYREDFYREALARHQQRASKRAPVQLQWKTCAGFSKITAITS

SEQ ID NO: 110956 - protein, 392 aa, unidentified
MMISVGVDVSKDKHDCFIQSSEGEVLADVFTIPNNAEGFHFLLQRIRDCTTPQDKIKVGLEATGHYSYNLLGFLLDNGLATYVLNPLRTNLYRKGFSLRKTKTDRVDARTIAAMLLSDTGLKPYTNTAYHNEELKSLTRYRFDKVKERAKLKSSVARLVNILFPELEKLVSSLHIAVVYALLSNYPGASYIANANTEELAETLCTASKGRYTKSKTAEIQVAAGVSIGSKMPAKSMELKHTIALIRELDKEISEVESAIDKITSQMDSPIFTIPGIGRHMGAMILAEVGDFSNFASADKLLAYAGLSPSTYQSGQLQNCYAHMEKRGSRYLRYALFNAAKYVCLWCPTFSAYLEKKRSEGKHYNVAISHAAKKLVRLIFAMQRSGKAFLADY

SEQ ID NO: 110957 - protein, 342 aa, unidentified
MSIARIGLDLAKSVFQVHGIDANGVTVIRRRLARSQLFPFFARLEPTLIGMEACSSAHHWARELMRLGHEVRLIPPQYVKPYVKRNKTDAADAEAICEAVGRPNMRFVPIKTPDQQAVLALHRVRALLVRQRTATINALRGLLGEFGIVAGKGAARLDDLRRRVENCADEELPAVARTAIDELFGRLDDLATRVRAVEAEIIAWHKGNEASQRLATAPGIGPITASALVASVGDARQFRSSRHFAAWLGLTPRMASSGEKPRIGRISKGGDRYLRTLLIHGARAVIGAFMRPNLKPRPWLSPLLARRPVPVAATALAHKTARAVWAMLTRGENYWRQEAHAA

SEQ ID NO: 110958 - protein, 329 aa, unidentified
MSKNSMVCAGIDTGKHKLDVAIRGVKGQLFELLVENTADGHKVLSAWLREHKVKRVGIEASGGYEQAVVLYLRKKKFVVVVFQPKQVRAYATFNLQIAKNDKLDAALIADCTAAIKEINAPPDERMTAFAMRMTFIDQITEDVARIKTRCESCRDKQILQYWREEIARLERRKKAEIKALAAAIREHGDLSKRLDLIESVDGVGLLTAVAILVRMPEIGTVTREEVAALAGLAPYDHESGKHVGERHIKGGRGRLRKSLYCAALPASMRWNHQLVSMYRRLIAAGKLHKVALVACARKLLIFVNTVVERGSPWEKSRAPGKFELGLRAA

SEQ ID NO: 110959 - protein, 344 aa, unidentified
MLHAGLDLSRRRLDICLVDEHGELVAETAVPADADGLRGLAERLAGRRVRAVIESMNGARFVHDTLEEHGWDVLIADAQKVKGLAPLACKTDRIDARVLAELSWRDLVPAIWLPDPTIRRERELARFRLHLVRHRTTLKNRIHATLITFGHPCPVSDLFGLAGRELLDRLEIPDPWRRNVDVSLGLIDDLELQIATLTVQLKRIGADHRYIPLLITAPGFGWINAFTVASEIGDIERFASPAKLCGYTGLCPRVMQSGTTDRRGPISKHGPRYLRWGLFEAAMNACKHPLYKERYQHTKRRLGRQRGPKVAQIDLSRKLTEAIWHMLTRNEPFAPAGAGFRLAA

SEQ ID NO: 110960 - protein, 343 aa, unidentified
MKLSYVGVDLAKNVYQLHGVDRHGKAVWKRRLRRGQWLQALIDKVEPGCEIGMEACTGAHHWARELQSLGYTVRLIAPQFVKPYVKSNKNDANDAEAICEAMSRPHMRFVTVKSVEQQDIQATHRVRSELKAHRNAKANQIRGLVAEYGLVAPQTLLALRRAIPEWLEDAENGLTDYFRSLLHGLWDDLLTLEDRLKELDKEIEKIARSNEVARRLQQLRGVGPIVATALVATVGDGAQYSKGRQMAAALGLTPRQNSSGEKHHLYGISKRGDVYLRTQMIHGARAVVSQAKHRDDPLSRWVTDIAKRRHPNVAAVALANKTARMAWAMLRNETNYDAGLSTC

SEQ ID NO: 110961 - protein, 351 aa, unidentified
MEEYIAFDSHKHYTWVEHEGVQSGRVRHYRVEHGPGMIHAALRGAEPGTAVALEATSNWYWIVDEIEAAGLVPRLVHPRKAKLMMGMINKTDKLDAHGLNRLQRNGTLPTVWIPPGRLREVRELTRTRVALGVQRTRWKNRITATLAKYGRPSSEWSDPYGKSARTELETRIEGLPEQARWATRQMLEQLDGLCQQMAKFEQRLKDLVEVTGEMQRLMSLPGVGVILAATLQLEMGDIERFPSAEHLAAYAGTTPRVHASGDHTRYGRTRPDVNHYLKWGFAEAANSIAVNRTRYPDRHVSQLYARLRERKGHSRAVGAVARHLAEAAFYVLRRKQDYRDPALVAGRTREV

SEQ ID NO: 110962 - protein, 318 aa, unidentified
MLIHYIDIAKRNFVIAVSSLSKTKTETNNPKGIAHTIEYLKKHKVALVVTESTGGLEIPAAKAIRRAGIAVIIANPRQTHQFAQSQPLTKTDAKDAKMPAFFAQMTAQKEDSQTMPYQPPTEAEEVLEALVNRRNQPADMRTAEKNRLHQVHETQVGSVKQLIAHFDRLIDELDKQIDNHTHTHFDGKDQVAEQIKGIGSITTATLMAMLPELGRLSHKRIASLAGIAPHPREGEETKFKSRCFGGRSAVRKALYMATVAATRFEPLIRDFHQRPLSEGKPYKVAVTACMRKLLTISNTRMRDYFAENDTAENGIRTA

SEQ ID NO: 110963 - protein, 338 aa, unidentified
MKLYAAIDLHSNNSVLVILDEQDRIVYEKRLENQLSLIVGALAPYRERVEAIAVESTFNWYWLVDGLMEAGYRVKLVNTAAVKIYEGLKYTGDEHDARHLAHLLRLGILPTGYIYPKAERAVRDLLRKRSQLVRYRTAQILSIQNLISRNSGQPMNTTEIRALTAPRIEALCGGDAARVLAVESNRAVLHCLDEHIEKLEQTVLAQAKLKAEFKWLLTVYGIGKILAMTIMYETGTIDRFRKVGQFASYARCVESRRLTNGKKKGEGNRKNGNKYLAWAFVEAAHAALHYEGIRAFYQRKRAKKNGAVATKAVGHKLSRACYHVLKEQVPFDVTRAFA

SEQ ID NO: 110964 - protein, 385 aa, unidentified
MKEQSFVPREFEIFGGLDVDKKSIAVTFMSHQGILQSFSMPYRAEHLLSYVGKHFLGKKVAFAYEAGPTGWGLYDRLTAEGHLCVVAAPSMIPKVPGQRVKTNRLDSLRLSEQLRGGQLKSVHVPAESYRQLRQLVQLRDTFVQDIVATKLRIKAMLLLEGLEFPLARAGSQWSLIVRGKLKRLSCSSAVRFKLDQLMESLEWTEKRVLQTIKEIRRFYQQDPELSQAMSYLKSIPGIGEIVASHLLARIGDPQQITNVRQLAGFIGLVPTERSTGNRVVRGAITRSGDGRLRSKLIQAAWSAIRQDPELREFYRALYQRHPRDRAARKAIVAVARKLTTRIYALLKQQRPYVVREIVHSAPLTQEETSPQGTTRRLAEPGETLS

SEQ ID NO: 110965 - protein, 343 aa, unidentified
MNVNTIGVDLAKNVFQVHGVDSAGKVVITRQLRRKQVLDFFSKIPGCLVGMEACGTGHHWAREISKLGHTVRLMPPSYVKGYVKRSKNDAADAAAICEAVTRPSMRFVPIKSTDQQALLMLHRTRDLLIRQRTQLINALRAHLAEFGLVAETGREGLAQLGAIVTDESNHESLPSAMKQALQAIVDQLAALELQVGALDRAIHAHHRANDMSCRLETVPGIGVIGATAIASTVTDPSGFKSGRDFAAWIGLVPRQHSTGGKERLGGISKQGDRYLRRLLVIGATAVVRQARLHPQKHPWIMRLLAKKPAKLVAVAVANKMARIAWAVMAKGGYYRAPELAAAA

SEQ ID NO: 110966 - protein, 416 aa, unidentified
MKLFIGLDVSSQKLDTCFLTDSKEILFEDSLSNDLIGASEIKQKILNYQETCDFSRIVIGMESTSVYSFHPSMFFYLDEDLKQLPVEVTVENPYRIKQYSRMFDQDKTDKIDARIIADYLRVDLHTLSPIKEEIYVGLQRLTRSRYQLVTQMVEAKQHFLENLTYKCNTLSKELANEDNKTSVFGTTIMNLLTEDITLDEFSEMPLEEAAELLQKLGKGRFKNPEQLVKSIKKAVRSSYRLGKVTKNSIDLVLGIIANEIKFLKKQIKEIEKAITALLETIPEAQCLLSVPGLGPVYTAGLIAEIGQIERFDDQSKLAKYAGLTWTKNQSGNSQSENTPLNRSGNRYFCYYLIEATNRVRITLPEFKEYYQKKKNEVPKHKHKRALVLTGRKFVRLIDVLLRNGQLYQPTKVVIEK

SEQ ID NO: 110967 - protein, 408 aa, unidentified
MNAVGIDVSKGKSMVAALRPMGEVALLPQEFLHTEVGLEQMAYAIIALGEDTRVVMEATGRYHEPVAAALHEYGIYVCVLNPLFIKQSGGGSIRKVKTDKADAMKIAKYGLDNWVNLREYTPMDTVRQQLKLCSRQYNLYMKTVVSLQNNLISLTDKTFPGVNELFSSPERADGHQKWVDFVMTFYHCDCICRVSEKAFTERYQKWCKCKGYHFSAEKALDVYAGSCGHFTTLPKNDNTKLLITTAAQQLLAGKMTLAALRTEMTRLAKQLPEYDIVRAMYGVGETTAAQLMAEIGDVRRFPRRSSIVGFAGVDPAVDQSGKHSAKSVPMTKRGSPHLRKTLYQIICTYLRKAPADEPVYQFLDKKRAEGKPYFVYMTAAQNKFLRIYYARVKECLEAFDAQQDTSQR

SEQ ID NO: 110968 - protein, 420 aa, unidentified
MKEPKVTDFAALIGIDWADKKHDVCENPVGTTVFNYSIISNKPESLHDWAMALKKRYPNQSIAVACELTKGPLIYALSKYDHLTLFSINPSTVAKYRKAFSHSGAKNDPGDARLQADILSLHMNKLERIQPEKATVRALAQLLEYRRKVVQDRVDLTNRITATLKNYYPQVLDWFKEKDTTIFCDFLIKWPSLEAVKKVRKQTLLNFFNQHHSRYSVVNEKRFENIKSAMSLTDDLGVIEPNKIMIEVLIPQLKCLLTAIERLDTEIKQRYKNQNDRKIFDSLPGAGPQLAPRIMVAFGSDRSRYQSANDLQKYAGIAPVIEQSGQKKWTHWRYSCPKFLRQTFVEWAGQSVRYSFWAKAYYEQQLSKGKPHNTIIRSLAFKWIRIAFRCWQTNTPYDETKYLNALKKNGSPLLNFAANG

SEQ ID NO: 110969 - protein, 462 aa, unidentified
MSRLSKPNPSLEEARPFQGMSMVNQNAAGVDIGAHEIMASVPGPDNTQFVRSFGNYTADLYAIAKWLGEHKISTVAMESTGVYWIPLFEVLESQKFNCLLISSNSLRRVPGRKSDVIDAQWIQTLHAYGLLAGSFRPESDLIALRALLRHRARLLEHRAPHILHMQKALLQMNLQLSQVLTDITGETGFRIIRAIVNGERDPNKLAAMRNHRCKKDENEIAKALTGTWRQEHLFVLEQSLGLYDFYTEKISACDLQIEKNYGAIRPDWKDYEVHEQFTSHPLPLKRLAKNAPKDGEQIRIHLKRICGVDLVAVHGISVPLAQTIITEIGTDMSKFPNEKHFCSWLGLAPKNEISGGRILVSRTLKTRNRAGQAFRLATVSVMRADCVFGAFYRRMKSRLGPAQATVATAHLIAREVYRMLKYQVEYEPLKVPEYEKRYRDRQIKYLEKRAAKFGFQLATAPT

SEQ ID NO: 110970 - protein, 422 aa, unidentified
MLGIGIDWAEDFHDIALGTQEKGVIEQFRIDHGPAGVATLIERALRLEPDPAEVRVVLETRHGLLVEALVDAGFTVVPVNPDVVARRRGPARKKDDTEDARICCLLALDRHAALKTLIPHGELGGELRAIGRDDERAARDQRRLLNRLRADLQTTYPAALALAGTDLGAPTVLRLLQRWPTQPELAETSRDELVEFARAGRHGWPEKLADRVEAALAAPSLPTRDYLVRAKAAGIRLAAVQLLALHEARRGWEARMAELLLGGPRTGRDHTVKDPDPGKAFPGGEIYLSMPGLGDLLAARIAGEIGEHITQFDTPAGLQCYAGCAPVTRRSGKSDFVVARRLAHNHYLGAAVHQWAFCSLLRSRWAREFYDSKIAAGKSHHAALRALSNRWLEVLWHCLAKGMLYDEAVHVANRNRALGHAA

SEQ ID NO: 110971 - protein, 360 aa, unidentified
MIVQGTSVGLDVHALSVVAHAVDEETGKVARARLCPDHGEVLGWLRQLRAPVRVTYEAGPTGFGLARAITEAGMECLVAAPSKLQRPAGDRIKTDARDAAHLARLLRLGEITAVRVPEREIEAVRDLVRAREDARADLMRVRHRLSKLLLRQGIVYSGGTPWTYAHEEWLRRRRFDDVHLKAAFDHSFDAVLAATAARDRLDEQITEVAASPRFADPVNRLGCLRGISALTGLALTVEIGDWSRFTGSSIGAYVGLVPSEYSSGNSRVQGSITKAGNTHMRRLLIESAWHHRKSYSTSGPTLRARWDKVDPALRARGHAGNRRLNKRWRSFTERGKNPLVANVAIARELAGWCWSLATMQ

SEQ ID NO: 110972 - protein, 334 aa, unidentified
MYYEYVIGMDISKHSFDMAVLSAKNSEAIFHNAFSNDGKGFDEMMRFITSTMPDFDSSKALFCMEATGLYCNALLQFFERQQTNVWVENATQIKRSLGIKRAKTDKVDAISIAKYALKNTELVRIWRPSGEVLEKIKHLATLRDRMVQTQKRLITPLEELKDAGQQKMAVYLEKSIKKSINAIDSDLKKIEANIIECLKEDASLHHLFTIITSVVGIGFVTAINLIIHTNGFNIMCDSRKLACYCGVAPFPYQSGISIKGKTKVSHMANKKLKTNLHLAALTAIKFDPELKAYYDRKVLNGKSKMSVINAVRFKLLARIVSVVKNDKEYVKKTA

SEQ ID NO: 110973 - protein, 398 aa, unidentified
MDLPVYYELETNNGNRDYRIPIGGHYMNYNTVYVGMDVHKESFTLCSCKYEDEKASHYQRTPASYKNVLRYLAFLRTIYGEDTRFVCGYEAGCLGYSLYHQLENFNVECVILAPTTMLEQRSKRRIKTDKRDAEIIARSLAQHNYSPVHIPTETDNQTKEFIRMRDDHKAELKKIKQQILSFCLRQGYQYDGSGNWTAKHVKWLRSLKPAGLYKEILDEYLLTYTILTDKLNRLDQRIEELASKEEYKESVSKLTCFLGIKTHTALSVIVEVGDFQRFVSARKFAGYLGLVPGQHSSGDDRNGLGITKAGNTHVRRLLVESAQSYTRGKIGYKSRVLRSRQAGNSPQVINYADRANERLRRRYYKMVLKDGKKYNIAKTAIARELACFIWGMMTDNIY

SEQ ID NO: 110974 - protein, 392 aa, unidentified
MYFIGIDIAKKGHEVCFTDEKGDVLDGNSFNIPNTISGIDKLQQKFKKFNLHPGNAMVGMEATGHYWLVLYSWLVEQGFDVKVINPLVTDAYRHLLIRKVKNDRIDAEIVAAVLRLGEYQETAIADNHTLALRQLCRFRLWQVESCSDLKRKVIALLDQIFPEYEKLFSDVFGMSSKELLKAYTTPEEIAGIHTRTLANLLERASRGRFGKEKALEIKTDARRSLGITIGVDAFAFQLRQIIEQIEFIEIQVEGLDQEIEAYMEKLQSPITTLPGVGPVYGAIILAEIGDVNRFPSGKQIVSYAGLDATVNESGDFKGQRTPISKRGSPYLRRALWGAAFVAAFHDPELSAYYQKLRQRGKHHGVAVGAVARKLCYLVFAVLSENRPYEVRA

SEQ ID NO: 110975 - protein, 347 aa, unidentified
MNYIGADCHISSLDFAVVNEKGNITQKAKVETSALEFMKFVKSIPKPRKIYIEEGELADWLLETSLKFGEKLIITDPKINKWIGKAGKKDDKIDAEKLAQLARGKYIKEIYHRVNKRRRFKELVFAYHDTVKSQTRIKNKIKASFRREGIRCSGDTVYSDKYRKEWQKKLPTNMVVRLIVNQLWTQLDQIRAAKETLKRHIRIQGKQFSEIKKFIKVPGIGLIHASTISAIIETPHRFANKKKLWMYAGIGIAERKSGEKVYSKKLTREYNRLLKNAVKQATEAAISARDNQFRRQYLKLTIEKGIATHKAKLTVARSLLAAIYGMWKKGEAYDPQIDNKRFKENNK

SEQ ID NO: 110976 - protein, 310 aa, unidentified
MSPSQFAGIDVSKARLDVALGDQFFSVEHTEEKLTELVEKMKAASPQLIVLEATGGLEGPLVAYLAEAGLPVVVINPRQVRDFAKATGQLAKTDKIDAKTLSRFAEAIKPQQRPVKDAERRQISDQVTRRRQIVGMISQEKNRLSRASAQVRKDIEHHIAYLKERLEISNKDIDELIKSSSLYQETAELLSSVPGVGPVTTASFIAFCPELGNLNRQQIAKLVGIAPLNRDSGPRTGARHVWGGRKTVRNQLYMATVSAIRCNYRIREFYLRLIAAGKKPKVAITACMRKLLTILNAMVRQRKTWQLSAV

SEQ ID NO: 110977 - protein, 449 aa, unidentified
MQRYAGVDWASEKHDVLVQEGGGEQVLAATFTHDERGLSALGNTLVRLGVVLVAIERPDGLLIERLLDAGLRVLAIHPNQVAAARPRFRASGGKSDGFDAFVLCELARTDHHRFRVLVADSDQTKALRALSRAREDLVQARVQLANQLRAELERFWPAGAKIFAEVDSPIDLAFLERYPSPSDARGLGEKRLAAFLARHGYSGRKTTAQLLAKLRDAPQGRAGDAEIEARRAIVHALVAALRPIVAKITELTSEIAHRVRAHPDGHVFLSLFRDPKSVVCAAALLSEIGDCRARYRSAEALAADAGMSPVAVESGKRKVACFRRGCDHRLRAAMSTLADATRHWHPWAADRYATARARGQDHQRAIRTLGRAWCRVLWRCWQDGVAYDPDRHHGLQQHIAVTIPDGSSPRLDLKATQRMAVAAVTRRAARSAEREALDGKPTSATNTEG

SEQ ID NO: 110978 - protein, 340 aa, unidentified
MAKYIGMDAHSSTCTFCVLDNDGVEISSTVIATNGKLLKEYIRSIQGVKKLALEECELSAWLHEILEPDVEELVVCDPVKNTVYKKNKTDKLDARNLAMLLRGGFLHPVYHQDSARYHLRSFMRGYQNIVDAGVGFKNRYSSLYRKNGQKKKGVDLYSDESLLKDLPRPDQRFVAQHLYSMIQNTETERQAYVKEIKKLPRTFKEIKLLCGIHGIGEIQAAKIVAQVVEPQRFKNKYKFFAYCGLVRYAHSSAGTERRGKLAHGNKTLKCVFKMATLSAIYGDNVFSRYYESLLKKGLNEKAARNAITRKIAAISLAMLKHNAKFDESKITMTEESITSA

SEQ ID NO: 110979 - protein, 306 aa, unidentified
MKEEFVYLGVDIAKSYLDAAIGSEKRRFANDAVGHRALIKWIKEIEGLVQVICEPSGGYERALIRALVGTQIRVSLVPANRVRQFARAAGILAKTDRIDAKVLCIFAEAMQPGTISGSQLEQEHLRELESQRRHLTHLLVMEQNRGARVSDVCVRRLNRTLINQIKKQIEQLDLLIKNHIEESAELSVKAAKLTAISGVGERTAALLLAQMPELGRLNRREVAALVGVARDSGRMRATRTIYGGRRPVRHGLYMAALVAAGHNPILRAFYQRLRTAGKPAKVALTATMRKLLIVLNSALKSDLSYA

SEQ ID NO: 110980 - protein, 416 aa, unidentified
MKLFVGLDVSSDKLDACFLTDTLTILHQGSYANDIEGATQIKETIVNMFEQFAFDKVVIGMESTSMYSAHPLIFFHEDEDLKNMHCVVTIEDPFKIHNYAKVFNADKTDTNDAFFIADFLRSERYSHSPLKEEQFLSLQRLTRSRMQLVNMLVETKQHFIENLYYKCNTLSRELRDEESLSTTVFSTSIIELITSDMGLDEIAQLPLNKLAETLQTLGRGRFKHPEKLAKTIQKAIRSSYRLSPTFETSIDIVLATLVGQMRSLEASIKQLEKGIERIVKAMPEYQCLTSIPGVGLVYAAGIIAEVGQIERFENQAKLAKYAGLHWKKSESGNYKSENTPLTKHGNRYLRYYLIEAANSVRRHLPEYNEFYRKKYQETPKHQHKRAIVLTARKFVRLVDTLLRNHQLYTSPRSVES

SEQ ID NO: 110981 - protein, 403 aa, unidentified
MVFVGIDWAEAHHDICVVDEEGRVLAKRRVPDGLEGVSKLHALVAEHVEDPAQVVVGIETDRGLLVGALVAAGYQVYAINPFASSRYRDRHASSGAKSDPGDARVLADLVRTDRHKHRTLAGDSSLAEAVQVLARAHQGLVWTRQRQANQLRNALREFYPGALAAFVDLDAADTVAILERAPNPVRGRALSQAKIISALRQGGRARNLEAKAAQIQAQLRQPQLEAPALIAEAYGHSVAAMVAVIKQLNLQIAALEQELTANFEMHPDAEIYLSLPGLGLVLGARAMAEFGDDRTRFLNPRARKNYAGTAPITKASGTRKVVLARVARNRRLADACYQWAFSALTRSEGARHRYDVLRGRGQTHHQALRALGNRLVGILHGCLVNRQTYSEQLAWPTRVEVAA

SEQ ID NO: 110982 - protein, 309 aa, unidentified
MNCDQKVYCGVDVSKHYLDAFIDGRTVRFDNTALGARALAKRAGNVHYVFESTGGYERMAAWQLLAAGCVASIVNPGRVREYAKSMGQLAKTDHIDARVITEYAGAASPRPAELPSDEQRRLVVLVERRQQLIDMQTAESNRLDTAGEDELRKMIQQHLRWLGKQIDKLDEDIAQTIRDHGEMGEKAARIESIKGLGKVCAATLLAYLPEIGTLSRQEIAALAGLAPYNRDSGTFRGRRHVCGGRKRLRACLYMAAVCAIQHNPQMKAFYTRLVVDNHRPKKVALTAVMRKLLIAANSAVKNPDFGVVV

SEQ ID NO: 110983 - protein, 436 aa, unidentified
MVQGGNRPMGKNINSTIGKKLDLSEKDKKAVGLKKSDECNAAMRNRKAAKRSVETEEKPKPRFGVRNLLHKLEAAKNAPKETAPEEDVEYYIGIDLGDKRSFYCILDKNADIVAEGSLATTVTEFELYFKAIPKSRIALEVGTHSPWISPILEGIGHVVYVANPRKIGGGKKNRRRKNDKLDAESLARQVKADPKMLYPIQHRGQKARQALVSLRARHALVSARTKLICSARGLVKSDGQRLPGCSSNSFHKIERIYVPEALRDALEPLFDQIGSLTEKIKKYDKEVKKMCREAYPETESLRQANGVGELVSLAYVLTIDNPKRFIKSRDVGPYLGIIPRQYDSGDSRPQMRITKTGDRMMRQLLVQSAQYILGPFGKDSDLRRHGLKIAARGGKNGKRRATVAVARKLAVLLHSLWVTGEEYEPLRNSEPKEKAA

SEQ ID NO: 110984 - protein, 458 aa, unidentified
MMRRGKPRRKRVRMQVVNPNAAGIDIGSEVHYVAVPPDRDPEPVRSFKCFTADLNALADWLDECGIETVAMESTSVYWIALYQILETRGFEVILVNARHVKNVPGRKTDVLDCQWLGQLHTYGLLRGSFRPEDRVCVLRSYIRQRDNLIKSAGAHIQRMQKALEQMNIQLHKVITDITGVTGTRIIEAILDGERDPIKLAQLKHPGVKSSHETIAKSLEGDWREEHLFSLRQEFELYGIFRDKIIECDRKIEACLGSFENKVDPDQKPLPTYKHGRKKAQGNQPTLDLRNPLYRMIGVDLIAIDGFDVLTIQSIISEVGLDMTPWPTEKHFCSWLGLCPNNKVTGGRVKDSRSKKVVNRASCAFRMAAQAAGKSHSALGGYYRRMKIRLGPSKAITATAHKLARIFYRMLRYGTDYVDPGLHYYEQKYRQRVLNNLKKRARLLGYELIQNHELSPAVS

SEQ ID NO: 110985 - protein, 385 aa, unidentified
MIKLDRTDAPTTDEYATVYLAFELSKAKWKLGVIVPGSQKMSRYTIDGGDLTALTARLAAARAKTERCGKPVRMLSCYEAGYDGHWLHRWLIEQGVINYEIDPSSIEVNRRARRAKTDRIDLETLMRAFLAYLRGEPRACSVLRVPGVEDEDRRRLTRERERLVKERTAHTNRIKGLLHAQGVRDAMPMKRGFIASLEHLRTGDGRPLPPRLKQEIVREHERLCLVHKQIGELEAKSKAELRAAAPGSVEAKIMQLIDLKSIGRASGQALGNEVFYRSFDNRRQVGSYFGLTGTPYDSGASRREQGISKAGNRRGRTMAVELAWLWVAHQPDSELTLQFLERVGNLKGRVRRIAIVALARKLMVALWRYLQTGLVPKGAVLHPSF

SEQ ID NO: 110986 - protein, 411 aa, unidentified
MDKIYDKCCGIDVHKKLIVVCFRKGNRQEVREFGATTRELLELADWLKDGGCEMAAMESTASYWKPLYNILESSDLNAMVVNARHMKAVPGRKTDVKDAEWIADLLQHGLLQASYVPDKDQRELRELVRYRKSLVGERTRELNRLQKMLEGANIKLSGTISDINGKSARSILEYLLTGKSVDSAKYDEMYDQKVIAHNLKASKEQIIDDLNGVMSPLQRRMMRELLNHLDELNIHIKNLDDEIDNFMKPEEKKAAAAIQDIPGIANTSAQAIISVIGTDMSRFPDDAHISSWAGLCPGNNESAKKRKSSRTRKGNYLLRTTLITCAHSAVKNKKSYFYAEFKRISGHRGDKRAYVAVAHSMLIAIYHILRDGIVFKDLGAEYYNQFNKERKINAYLKKLKALGYEMPVVAA

SEQ ID NO: 110987 - protein, 324 aa, unidentified
MTTVAGIDVSKKTLDICVLLEDGKKREFQVSNNEEGFAQLLVKARKCGGEHLHFCMEPSGVYHVGIAYHLVEQGCTVSLENPRRIKYHGISIGALQKTDRADARIIASYCAKNCPKPWAPASPEIRDLMLIDRRLCDVLQMVTQETNRLESGRLPDVVRESIEQIVRCLKEEEKSLRKQLVAIVESSDELTRKYNLLCTIPGIGERAAIGFLAEVGDLSSYVSAESLAASFGLNPRIRRSGTSVHGQTRISKMGNAHARSRFYMPALVAIIHNPLIKAFYERLVQRGKNKKCALVACCRKLVMIAYGVLKSGKPFRCEVSPLTI

SEQ ID NO: 110988 - protein, 428 aa, unidentified
MTQSPNPTPPTFAAFVGIDWADQEHAVCLSPADTLKPEQFTIHHTPEAIAEFVAMLRCRFGGQPVAIALEQARGALLYALMGHEFVRLYPIHPATSKRYRDAFAPSGAKDDPVDARLIWELLVKHRDQLRPWQPQDATSRQLTLLCEHRRDLINQRTRLVQQLQAALKTYFPQALDWTGEDLASVMATDWLVRWPTLEQLQRVPPKTVRAFYYAHHCRRPDLVQQRLHQIKTAQPLTTDAAVIAAHSLRVQSLAHQLRPLLASLAAYDQQIQALFATHPDAAIFTSFPGAGECLAPRLAAAFGTDRDRFPDADSMLRWSGIAPVTRRSGKFQTVHRRYTCAKFLRQTFHEFARCSIKFCEWARLYYETQRAKGKGHHAAVRALAFKWIRILWRCWRDRRPYDDSRYTAALRRSGSPLAKLLPLPSQQP

SEQ ID NO: 110989 - protein, 319 aa, unidentified
MITASAAGIDAGKTYLDIGIEPSRICFRVTNAAAGIEDAVTRLQQAGVHKVLLEAIGPFAQPAVTRLVAEGFEVGLINPRRIKAFREAEGKRAKTDRLDASLIARFAVLMTDAPRPVPSANQQALKALATRRRQLVEMIAMEKTRLKQASDPLLCESHRTAIAALTVERRRIDANIDDRLTIDAALARRKVVLTSLPGFGPAIATTLITDMPELGTLDRRAIASLAGLAPHPSQSGTSAGRNQIGGGRPCVRTALYMAGLVASRCNPHFRAEYQSMRSDGKPAKVAIIAIARKLLVLANSLVKNDSLYDPDRADATVIH

SEQ ID NO: 110990 - protein, 348 aa, unidentified
MRVFIGLDVSLAKTAVCVVDHDGAVQWQGKVPSEPGPLIKRLAEWHGMIELAGIEACPLSEWLHRGLREAGIPIVCVETRHAQRFLSSRPVKTDKNDARGIAEMMRLGHYRPVHVKSPAAQSMRTTLAARMQLVASQLQIEGTIRGLLKVYGLKIGAIHRNRFAARVLELLEMAALTELSAAIEPLLRVREGMRTERKAFDRTLASAARRSDVGRRLMTIPGVGPVTTLAYIATVDDPGRFGTSKALGAHLGLTPRVYQSGEIDRSGQISKCGDRMLRHLLYEAASALMTRTRKWSRLRAWGVSVAKRRGMKRATVAVARKLAVIMHRIWVTGDEFDFGGPAVAAKAA

SEQ ID NO: 110991 - protein, 404 aa, unidentified
MKHNGKLFAGLDWASRTHMVCVVDDAGQIKIRFEIANSGKSFAGLVKRLTKLGVEAVAIERCDGPLVEALLDAGLKVVVINPRQVKGLRTRYTGSGAKSDASDAYLLADVLRTDGHRLQALDRDSEATAVLRALSRTRKDLIEARVGLVNQLAAQLERVFPGAIGLFARLDSDVAIAFLRRYPTHQAATKLTQARFAAFLRRIAYCGRKPVEELLARVHEAPAAGLKPAEADGRAVCVLGLLRAIEAVRREERELEAEIIERLDAHADAHIFTSLPRAGHGVRAAAMLAEIGDVRARFPDEESLAALAGVAPVTRASGKMHAVGFRYACDKKLRNAIIDFADDSRRASPWAAKIYNDAIARGKRHPHAVRILARAWIRVIWRCWQDRTAYNPDLHRAAVMLQAA

SEQ ID NO: 110992 - protein, 344 aa, unidentified
MSKHAVRGGNVAGLLERFAQLREKTRARTGKVFPFVVIQEAGLDGFWIDRALQNEGIESHVVDPASIATSRRRRRAKTDRIDGEALVRALLAYKRGEPRVCAMVKAPTPEEEDRRRLCRERKVLIVERVRHVNRVKGLLFSQGISGYEPLRRDRRERLDTLQTGDGRLLPDHLKAQVRRELDRLELLLEQIKAVEAERDVLLAAQQVAAPAPAAMLLDIKGIGPEFAAILWSEGLFRHFDNRRQVASYAGLAPTPWQSGSVDRDQGVSKAGNPRLRTTLIQLAWLWLRHQPQSALALWFEERVRRNGGRLKKTTIVALARKLLVALWKYVTAGVVIEGAVMKAA

SEQ ID NO: 110993 - protein, 317 aa, unidentified
MTATDMFVGIDISKGHLDIAVIPGDQTFTCPNTEAGIQKLVRRLKKINPHLILLEATGGYEVLLVAALREADLPACFINPKLVRSFARGVGIAAKTDRLDAQVLALYAYKMQPPPRPLPEAHQQELKQLLTRRRQLLDMIQMEKNRLDPTPSPRIAQSVQGTIKSLEDQLAALVREIDDFFHQHPLWVELALILTSVLGVGHLTAVMLLAYLPELGRLNRKEIAALAGVAPFNRDSGQWRGQRHIEGGRSRLRQALYMATLAATRHNPEIKAFYDRLLGKGKAKKVALVACMRKLLTILNAMAKNQQPWCPAAPQIT

SEQ ID NO: 110994 - protein, 411 aa, unidentified
MKQNPDIDKTKPVLARGRAIVGIDIGKRKHAAAAISAQGDLIARLDCFPNTRQGVDLLEKQVLRKAGGPTRTLVAMEATGHYWMCLYHELTRRGYKCVVLNPIQTNARLRSRIRKTKTDPIDSLGIAQFILTGDAKATRVPEEPTVELRLLVRHRWRLVTARSGMERYAHTLIDRVFPEYDGVFSRPFLPSGKALIREIGITPADITSRQDEVREVLYRASRGRLASETIEELIQRAKQSIGSRQAEPLITSQLRNVLDYVETIERQVDHIEDELTRRIALTDTPLTSLGIRAVLAATIHAETDPISDFSAPDQYVAYAGLDPSVRESGDSVRGRSKLSKRGSPLLRRALYLAAFSVSRQHDYFHRRYQKQRRKGRSHQHALVVVAHRLARVVWRILTDNRPFRKRPPKKG

SEQ ID NO: 110995 - protein, 456 aa, unidentified
MEQYYLGGDVSKGYSDFVILDNRKQLVKENFQLDDTIAGHSLLYDRLLNFFEEHPEAELCAALESTGGYENNWHNTLSKFQSSLNIKTARLNPAGVCKNNEAGLKRIITDKISAQGVAEYLIAHPEKVIYQQQDYWASLRKQWSFIKMLTKQSTQLFNQLESLLYSANPEILKYCQEGMPGWVMNLLKQYPTAAKLGKARATSVARIPYISINRAGELVAGAKTSVASATDAITGQLICATIGQIQHTQKTIKGQTKILATECDLPEVKLLKTFIGIGDYSAIGLMLEIQAVERFATVKKLASFFGLHPVYKVSGDGRSGVRMSKKGRKEPRAILFMVAMSAISSNSLIRDLYQKHVANGMEKMAAIGLCMHKILRIVYGMLKNNTPFNPEIDLKNRAKTVAQQPKESKDKSRRYQDFDAQAPISRRQRKKRGERELSQNAVSVECGISTPVPQSS

SEQ ID NO: 110996 - protein, 366 aa, unidentified
MRKTSTVRINGNMIFKGHKLTIGLDLGDRWSCYCVLDEAGKIILEQKVATTPEAMKQAFAKIPQSLIAMETGTHSPWVSRLLTELGHKVIVAHAQKVQLITKSNRKDDRHDARTLARLARIDAELLGPVRHRSAQAQIHLTVIRARAELVRARTALVNAARGLVKSYGQRLPKCGTRQVSRELGAGLHAELREVLEPLLKEIESLNERIQEYEVRVEKIAKESYPQVELLKQVKGVGTQIALTYVLTLDDPHRFPKSREVGGFLGLCPGRRDSGESQPQMHISKEGDRYLRTMLVQGAHYILGPFGEDSDLRRWGLKLAARGGKNAKKRAVVAVARKLAVLLHRLWVSGEVYEPLRNSQKAMRVAA

SEQ ID NO: 110997 - protein, 444 aa, unidentified
MPKARKRYVGLDVHKNVVEYCILDSEGKKLDGGNFICEQSVLVNFAKNVLSPNDHVALETTTSTWTVVDILEPFVEKIVVGNPLKTRIIAEANVKTDKVDALILAQLLRCDFLPPVWIPDKQTRELRRISSCRKTLVKEATAAKNRIKGILNHLLIKHAVVWTKQGLEELKALALPPVERILMDTEIGVLEYMELQIEKIESEIQKLAYNEENIRLLMTLPSVDYNTATALVAVFGDISRFKDADHAASYLGLVPRVKQTADTCHYGSITKTGSALARGMLCEAAQSLFLNDGPLGVFIRRVRDKQGGGKAVVAGARKLATIAYHMLKNKEPYRYAPVARTRDKLRILRSRAGGAKLAPPQYRYNNEVQQNRPKGEFKVEYVPPLADVYKNEGLPPALTFAELSSGEQRVLKEMGVAEKVLANEKVGYITRTKKATSPPKQSGK

SEQ ID NO: 110998 - protein, 376 aa, unidentified
MMTSPVAGIDPHQDTFTVGIVDANGVVITHDTFPNTAVGFLAAIDVLHAHGVRRVGVEGSASWGSHVAIALVAVGFDAREVPPQRSAVQRRARRLDKTDMVDAVATARALLAEPTLGPVQTLEVYDPLVAKIEAVLEHRRMLVEVRTLMLHHVQDQIAKLPTEIRDQISATGKIESRLRRVEELETAETSTMAGTYRLSWLVPLIDRDRAARREIRQLERELDRLLDEHGTTLRDEPGIGPIAAATLLAEVGDPLRFARESKFARWCGTGAVALSSGEGTGMPVRHRLDFGGNRRINSVLYIASVTQHREIDEARGYIDRKIGEGKTRREARRAHKRQLANRVIRRMWNDEKRRLTYADEIRRRRPILRSIQRADF

SEQ ID NO: 110999 - protein, 370 aa, unidentified
MEETITYLGLDVHKESIEVAIAEGGRGGEVRHYGRIAATPAAMAKLIAKLRERGGRLVSCYEAGPCGYGLHRQLTSLGVESTVVAPSLIPKKPGDRVKSDRRDCLSLARLDRAGELTPVWVPDPAHEAMRDLVRLTAAAQRNLTRARQHPQSFLLRHGLIYQGRTPWSRAHRLWLAGLRFAHPAQQIALQDMLHAIEAHQLRLRGLDAEILKLLPDWSMAPVVEAYQALRGVSALSAVTLAAEIGDLSRFSNPRQLMSYLGLTASEHSSGKRRRQGAITKAGNAHARRVLVEGARSYRLPARIAKAKLARLERQPKAVRDIAWKAQVRLCARYRRLAASRGSSNIAVVAIAREMAAFLWAIAQVASPSLA

SEQ ID NO: 111000 - protein, 353 aa, unidentified
MMKKSPRQKNVLISKTKTRRYLGVDLHRNSFLVCVREQGQTRSQRWSLQQLPEFAAGLRPEDELAVEATSNTRWFCRAVAQRVQRVVVVNPHQFRVISQSVKKTDRRDAALLAEYLEKDLLPEVRRKSDQDSELAQSAQARDQLVKMRTMLKNQLHGLFSSYGVLLEKKQLASRRQRAGLGGIPLPPLADVQRRVLLGQIEALETSMAELEQAITATAEHLPGHANLVSVKGVGSRSAAILLSAIGPVKDFSDPAHLAAYLGMVPRVNNSNETEHQGRITRRGNKLARTTLVQCALIAKRCSPFLSQFYERIQRRRGAGKAIVATARKLLTIIYYTLKNNWTFSDFAQFELAS

SEQ ID NO: 111001 - protein, 425 aa, unidentified
MNVDSTDEPRFAAYVAIDWGDSKHVWSLQPADSDRRERGEIEHSPEAVAAWAAMLSARFDAQPVALAVEQSRGPLVFMLGKYEQLHVYPIHPRAAAQFRAALFPSGAKDDPSDADLLLDLLTHHRARLRRLKPDTEQTRLVQHLVEGRRKLVNERTRQTNRLTAQLKLYFPQMLDWFDTVDSPLVGALLKRWPTLEALQKARPDTVRSFFTAHNCRSQELIERRLDQIRQAVPAVRDKALIEAAQTMTKVLVELIATLREGIASFDRQIAQAVAAHPDFAIFDSFPGAGPALAPRLLAAFGSQRERYQSAADLQTFSGIAPVTERSGKSQWVHVRWACPRFLRQTFHEWAAHSIGFCDWARAYYQQQRGRGNDHHAAVRALAFKWIRIAFRCWKHAVPYDDARYMQSLRRRGSPLIAALAKPELP

SEQ ID NO: 111002 - protein, 348 aa, unidentified
MTIIGGFDVHRQQITFDYVDNDGLVRWGQIRPATRKTLRAWLAGHCPDGDGEFALEGCTGWRYVTEELAAAGVDVHLGDPAEIAVARGPKKRAKTDRADARLLRTLVLEGRFPESWIPPAHVVEIRTLGRLYCTLMDERRAWQQRVHAQLFHQGCPPIRALLSEAGRAALASVEVSAAGRQYVDTALRRIDELTAEIDPLRTQLVGFARRQRGCQALQRHYGIGWLCAAIMWAEIGDARRFSSSDQLVRFAGLDVTVYSSAGKRSPGHLSRQGSPELRWAAFEAAKCAARRGSPDYAYYHKLAAKHDGHNGKNPTLAVERKILRRCYHTLRELGDAALPDTPAQEVAA

SEQ ID NO: 111003 - protein, 343 aa, unidentified
MEYYVGLDVSLKQTSICVVDQTGLVVREGVVDSDPETISIYVTSKAPNAVRIGLETGPTSTWLWTELKRLGLPVICIDARHAKAVLKMQINKSDRNDAIGIARIMQTGWFKEVHVKDIDSHSVRALLASRALLVKIKRDLENHVRGLLKNLGLVIGRAKFNVFAVRAEELIEGRPELIAAIRPLLEARNAVEQQVSELDRKVMKLARHDAQVRRFMTAPGVGPITALAFKATIDDPARFARSRSVGAYVGLTSRRHASGEVDWTGRISKCGDAMLRSYLFEAAGVLLTRVPKWSAVKAWGVRLAKRNGLRKAKVAVARKLAVILHRMWIDGTEFNWSNKEIAA

SEQ ID NO: 111004 - protein, 431 aa, unidentified
MVFAESADDEQIIERVAALDIGKAEVVCCVRLPAPAGGRSAGKRRVQEVSTHSTMVGALSQLADRLVDLRIQRVVMEATSDYWRPPFYLFEAHGLAPWLVNAKDVKHLPGRPKTDVLDAVWLCKVAERQMLRPSFVPPHDIRRLRDLTRYRADLVGVRTAEKNRVEKLLEDACIKLSVVASDIFGVSGRDMLAALVAGERDPKRLAELARSRMRPKIGLLEEAFAGLRIGTFGEHHRFLLAQMLHRIDATDADIAALDAQIEQQLVPFADAVARLAEVPGIGTTAAAIILAEIGTDMTRFPTPGHLASWARFAPGVKSSAGKTKGNGSTGHGNRYLARVLGEAAVGAGRTDTFLGARYRRIARRRGKKKAIVAIGRSILTVIWHLLSDPDAHFEDLGPDHYDRRLSTTAKKRSHIRGLEALGYTVTLQPAA

SEQ ID NO: 111005 - protein, 349 aa, unidentified
MSAKFNSEIAVIGIDIGKNSFHVVGLDRRGAIVLRQKWSRGQVEVRLSNLPPCLIGMEACVGAHHLSRKLTSLGHDARLMPAKYVRPYSRGQKNDFRDAEAIAEAVQRPTMKFVATKTAEQLDLQALHRVRERLVSQRTGIINQIRAFLLERGVAVRQGLRFLRAELPRILARPCKALSPRMLRVIEDLAGDWRRLDERIDGLSTEIEVLARQDAGCERLMSVPGIGPIISSAIVAAIGGGDAFSKGRDFAAWLGLVPKQISTGDRTILGKISKRGNRYLRVLFVQAAWAVLIKPKSWARHGLKPWLEAAKKRLHHNVVAVALANKLARIAWSVLAHGRVFEATRIRAA

SEQ ID NO: 111006 - protein, 404 aa, unidentified
MKGPIVSIDVSKGKSDYQAFKDLNVKYTGSRSIKHNKEGFDEIVNLVREMEKKLETEVCVVYEATGVYHRVLKKVLEDNNIKQFIINPLLSAKTRKNDSLRSPKTDKLDPKSIAKTYYSHSLHNSHKQETIYHELRELSRYYEDILVHIRKDKVAFRAQLDIVFPGYDTLYDDLYGPVALAIIEKYPHPEMLQKKKINTVSKVIQNKTCHRQAVSDTMADKAIEYSKTIYSGCDKDDIEVLILQRFIKKLNEDMAEAERTIGEMIKLAQELPDFNIIKSIPGIGDNLAARIIAELGDMTRFKKKNELVAFAGLDPRVSESGQNDGDHMHITKKGNKRLRCLLYLAVTCSIRLKRDDNSIKDFYIKKKQQSNPMCSKAAKTACASKLVRIIYSMCKTGELYQYNK

SEQ ID NO: 111007 - protein, 323 aa, unidentified
MRKSIGIDVSKTKLDVSIFDGDEHRQISGGNTESGLKELLGRMGRLQGQELVITMEATGTYHLRAAMGLHEAGYTVSVVNPLIIKRYSEMKMLRAKTDPVDARLIAEYGYYERPAEYRPNNRECQELIYLLKTIEGLYRVRGQNRNRIEALTQIPVSVSVAIESIQRINTAIDDEIKLLERRIRQLIGETYQEEYRRLLGIPGIGKRLGAAIIGYFQEFEHFEKAKQVASYIGVNPAPRNSGSSVRGRGAISRKGNTYLRKLFYMASLAASKHNHECSKLYNRLLSEGKKKKVALIAVSNKLIRQVFAIVKNQREYSPLYQSV

SEQ ID NO: 111008 - protein, 339 aa, unidentified
MNSMAVGVDIAKQVFQVHYVDQESGEIVNKPIKRAKFLEHFANRARCLIGMEACGGAHHWARQLTKLGHEVRLMPAQFVKAFNIRNKNDAADARAIWLAVQQPGKPVAVKSEMQQAMLALHRMREQLVKFRTMQSNGLRGLLTEYGEVMSKGRAKLDKEIPAVLGRITERLPAALIETLCEQWNGLARLDEQIAEIERRMRDWKKEERAVKAISEIPGVGLLTATAAVAMMGDPKAFSSGREFAAWAGLVPKQTGSGGKVNLHGISRRGDTYLRTLLIHGARSVLTHAKEPGPWVEQMKKRRPMNVVIVALANKMARTIWAVLAHDRPYQKDYLSVKPV

SEQ ID NO: 111009 - protein, 355 aa, unidentified
MNQEKYIGMDVHAATISVAVKNAQGKLLMECVLETKAATILEFIQGLRGTLALTFEEGTLATWLHDLLKPHVSRLVVCDPRKNALLRDGNQNDRVDARNLAELLRTNQVKGVYHGKHGTRALKELGRSYLTLTKDTTRVMNRIKSVYRSWAIACAGTSVYSRRHRAEWLAQLVEPGVRIRAEHLYQQLDSLEPVRQAARRELLRESGKHAAVKLLRQIPAIGPIRSALLVALLQTPHRFRTKRQLWAYSGLAVQTYDSGEFRFVRGKLHRNRERITVRGLNRNHNHDVKNLLKGAAISAIGHPGPLQDFYAALVEKGMRPSMARLTLARKIAAITLIIWKKGASFDPKQLQRQAA

SEQ ID NO: 111010 - protein, 329 aa, unidentified
MSKPICYVGIDVGQAELWVAVADRRPRQFVHTAAGIRALVRFCHATAPDHLLHFCLEATGVYGRSLAVRLLRGSHPDVEVSIVNPVQIAAFAKAQLRRTKTDAVDARVILAFAQSQTPRPWTPEPAALRELHQLVAEADALQAAHRQWSNRAHTHALTPDRPTAVQHTDRAILRTLDRELTRIEEAITALCQGDPTLRQQIDLLCTIPGIAQHSATRLLAYGGRAWTTHSAKQLTAHAGLAPRHRLSGTSVRGKSHLAKQGDAHLRRTLYMPALVASRYNPALKTVYQRLRDGGKPGKLAIAACMRRLLLIARAVLKQQRPFDPAYGRT

SEQ ID NO: 111011 - protein, 464 aa, unidentified
MGGDQLHIGGERAAAFRELVGDLDPRRVLLVGIDVAKASWFVLGCDLHGSVVIDGTKVAADRAGLGQLSGLLDQARVRVDAQLVVVGVEAAGHYHQTLAAHLADRGDLLLRLVNPAAVAAVRKTQLNRRRKTDWLDAAAICDLLVRGEGSLFLLGDDAATALRPLWNGRKGLVDARARLRLQVLALVDCLWPGLTAHDTALGVRPVLRNLFTTKAGKILLGLVALGWSPERLATHDTTGLKALFAQHGCQLKVTVAARILKRAGESLPPHPAATAGKPALLAALLATLEALDHQVTELEATMAALLPHTEGAKLTQINGVSTVVASGFVAFVGSARRWGDWSKVWRGAGLDPARCQSGPTDVNFSISREGSAWGRRAVLDLASAACRKPGRWRDAYQRRVNVGRKPPLVALTATGNSVGRTCFALMLTGADYHPDHEATRRRRQHRCTSIPTRLVGAKVGGQAD

SEQ ID NO: 111012 - protein, 420 aa, unidentified
MVYAMEEEAYYERCAGIDVHKKLLVVCLRIGRKSEVREFGTLTHEIREIVAWLKENGCQMAAMESTGSYWKPVYNIFEQEGLPAMICNAYHIKNVPGRKTDVNDAKWIARCLSQGLLNPSFIPDREQRELRDMVRFRKSQIEERSRNVNRLQKFLEGANIKLASWLSDVEGKSATELLELVIGKSDFTVEDVARRMHKNMKSTPEELFLSLEGSITPTQRGFFDHVMSVIRQQTVQIEKTNEMIQNSLSDNYKAAVDLLDTIPGIGKISAEQIIVETSTDMSRFKNQHKISKWAGVCPGNNESAGKRKSGKTPPGNKTLKSTLTQCAKAAVKNKKSFFSAQYSRLVVHRGKNRATMAVAHSILIAIYFVLSGYQFKDLGADYYTQFNRERKINSHIKHLSKLGVTIPDKVLQEAIRLSTA

SEQ ID NO: 111013 - protein, 408 aa, unidentified
MSEEKAIELRVSVDVGYRRHSVAIGLSSGEVLEEFEIEHRPEGFQEFFSRIEKHHKTKRIPVAVAMEGYNGYARPLDSLVRGQGYRLYNLNNLKFARFKEIFPGAAKSDRIDARKGLELFQLQDHLPLAKEILQEVKGTPAENEVLKRLTRRRRRLVNERVRVVNNLQADLQAVCPGLLEITNDAGNQWFLNFLVSAESLSQIARLRRSTLLKIPAVGVKTAAIIAGWQKRCHFSEEIDWVGEMIQEDARRCLELDGKVKRLEAKIAALAANSKIAKIFRSVPGFGAVCSSELAGEIGTIERFDKEGSLALYLGMATLDNSSGKYQGTKAPKQVNTRAKAAMMIGVDRHRKKVAQSQRYYEKKRAEGKKHNQAIRALGRHLTRIIYKLLKEEREYEIRPEQGNTKTRV

SEQ ID NO: 111014 - protein, 346 aa, unidentified
MIPVASDVHKGRCWMAMIPPGEELKMLEPIECTREAWRERLAELPPEAEIALEVSTSGYFVMSVLEEAGWRERAHWVHTAGIDSLRKQKSDRLDTRRLVKKLAVHDVDPLPEAWFPPPPIRALRLLARQRCGLARLRAQTKNRVHSLLEMHGLRPERCVFTKLGREWIGQQALSAAARLCFERFFRLYDFLTEERKTSEAELEEAAVAFPQVALLRTIPGLGHVLAAVVWSEIGDLTRFDSADALLNYTGLVPSSYDSGEVSIHGPITRQGPAWLRWALITAANALTRSKSPLGQRYWHLRRCHKHPNVAKTAVAGSVARCIYGVLKHGAPFQAERWGRRAGKLGQ

SEQ ID NO: 111015 - protein, 408 aa, unidentified
MDVLYPRCAGLDVHKDTVVAAVRIAANGPANTEVRTFDTTTPGLLGLSGWLAECGCTHVAMEATGVYWKPVWHILSDGDVTLILANAAHVKNVPGRKTDVADAAWLADLLAHGLVRASFVPEAPTQAMRALLRTRKQLVREQASHAQRIQKTLEDANLKLASVLTQVMGKSGRAIIGALIAGERDPDALLRLVQRGVKAPPERLRAALTGRVTERHRFLLRLHLRQIDALEAAIAEIDQEVDRDLDPFRQAVRLLRTIPGLSDLTAQVIVSEIGLDMSRFPTAGHLISWAGLCPRNDESAGKRRSTRLRKGAPWLKTTLVQCAWAGTRKKGSYLQAQFQRLRHRRGPKKAVCAVAASILTAAYHMLRDGTLYQDLGADHFRRASPEDQDYPFSRNSARAVSVRSRGPR

SEQ ID NO: 111016 - protein, 353 aa, unidentified
MAVYIGVDLHVRTQTVCWMNTADGEIHQHTLDHSRDDLRAFYAQFTAPAVVGIESSGYALWFHQLMEQAGHRLLVGDAYAIRQFARRRQKNDRRDAELLLDLLRREEFPVVHRPAPPSQDTLALLRYRHRLVRMRTMVKNGLQAVALNHQLRLGFRLFTVRGQQQFAALPLSGAYATQRQQSQVLLTTLEAQIAAVNQELATRAAADPRVVRLRTHPGVGLQTALAVVHTLEPVTRFDRARRIAAYCGLDPSEHSSGDTTRYGHISKQGNRLLRFLLVEAAWSAVQHEEDLGRFFRRLRARKKPHAVTVVAVARKLVLRLYRMLREGIDYEEFRRRGRDARRARQCASPAQRG

SEQ ID NO: 111017 - protein, 322 aa, unidentified
MAMLSFGGIDVSKDRLDVMVLPEEQCSSVPNDAAGWAKLVEQLRGFSISAVGIEASGGYERGAVRALLAAGMSVRQVNPFKLRQFARASGVLAKNDPLDARMIASFIAIMPTRPAQPHAPAVERLAEILTVRRQLSDAKVAAENASRLLEDAMLQRLSRRRIARLAADIDLLDGRLVEIVMADAALVRRYQLLTSMPGVGPVLACTLIALLPELGRMNRKQVAALVGLAPYAFDSGKLKGARCIWGGRASIRRVLYMAALIAMRCNPALKAFHNRLAATGKKPKVVIVAVMRKMIITLNAMLRNETPWVDRSSGRHSVLTAR

SEQ ID NO: 111018 - protein, 333 aa, unidentified
MSNVTTVGIDLAKNVFSLHGVDERGQVVLRKTVNRARLLALVAQVPVCTIGLEACSGAHEWARQFERFGHTVRLMAPKFVAPYRKSGKNDGNDAEAICEAVSRPSMRFVPLKTLEQQSALCLHRVRQGFVEERTATINRLRGLLAEFGHVLPQRAIEVRRGVPGLIEQLPSRAARCARDLLEHAHVLETKMREYEREIETHAKHSALARRAQARRGIGPITASAIVATVGTAREFRNGRQFAAWLGLVPRQYSTGGKVRLGHITKRGDPYVRTLLVMGARSVLQRAARERDPLSRWALALKERRGYHRACVAVAAKNARIVWALLAKESPLAA

SEQ ID NO: 111019 - protein, 319 aa, unidentified
MAQNDLVVVGIDVAKDKVDACIRSLSLRQTFPSSRQGQRKLVGWLRKHQVNKAVMEASGGYERAWAKLLREAGIEVRIVDPKRVRSFALSAGRLAKNDTIDAEMIAWFAETFSDAPGQKHDAAHEELQTLVKARLSLIDLRMRLVSQSEHAAPGLVQKAHAHILKSLAREIAKLEAAICAKIKSMPDFAERAEIIESVPGFAETSSANLVAGLPELGQVSDEIAAALIGVAPYDDDSGKRRGERHIKGGRRWVRNAIYMPCVGAATLNNPVLKAYYRRLIAKGKKPKVAIIACMRKLIVILNTMIARRQKWDPSRYVLS

SEQ ID NO: 111020 - protein, 352 aa, unidentified
MEYYIGCDAHKTYSVFAGISEAGEVIDAKRVEHDRMVFRSFLGTLPPACRIAVETVGNWYCIIDEMERAGHKPSLTHAARAKLMMGQVNKTDKLDARGLAILARNGTLPEVWIPPGDLRDQRELPRMRMAFVNIRTKLKNRIHAALAKYAITIDGATDIFGAKGQRLLAEAMDELPPETRHSVEEQLHLLGQVEDAIKETEKRILGIIEASHTMRLLDTLPGVGSILAIVIALEVGDVRRFASAERLVSYAGKSPRVNSSGGKTHYGRVRADVNRYLKWAYTEAANAIVLQQHRLGDCHVLRLYWRIRNTHGHAKAITAVGRHLAEATYWVLRNDEPYREPANKQVVGSQAG

SEQ ID NO: 111021 - protein, 367 aa, unidentified
MKKISTAAAKQTRNFQSQKLTIGLDLGDRCSWYCVLNGAGEVVLEQKLATTPKALKEVFGGMPRSRIALETGMHSPWVSRLLSEFGHEVIVAHARNVRLIGESRKKDDRLDARTLARLARIDPQLLAPVKHRSAQAQAHLMVIRARAGLVRARTSLINTARGLTKSYGERLRGCNPRNLNAEKAQGLSPELQAALEPLLGEIESLSERIGEYNGQIEQMGKESYPEVARLKQVKGVGTLIALTYVLTLEDAHRFGKSRDVGCYVGLQPGRRNSGQSEPQLHISKEGDPYLRTLLVQGAHHILGPFGADSDLRRWGLKLAERGGKNGKKRAVIAVARKLAVLLHRLWVSGEAYEPLRNHRQVALPAVA

SEQ ID NO: 111022 - protein, 322 aa, unidentified
MTPVLGIDISKKDFHVSLLKENRATKPKKFTNNTQGFESLHNWLKQQNVVELHACMEATSIYGEALAEFLYGEGFQVSIVNPARIKGFAKSELLRTKTDSVDAALIARFCAAMKPSLWTPTAPEVKELQALLRRLESVTEMMTSEQNRLETATPTVAALTLEHLEYLKQQQQLIKKLISDHFDQHPHLKQQRDLLTSIPGIGDLTASILLAEIGEVSDYDNARQLAAYAGLTPSERTSGTSVKGKTRLSCTGNVRLRKALYTPAVVAMRYNPLLKAMSERLLGRGKVKMQVIGALMRKLVHLAFGILKSQKPFDPNYLLATP

SEQ ID NO: 111023 - protein, 330 aa, unidentified
MKKYDEVVGIDVSKLTMDAHIYKRSIHRVFSNTCKGYAALVKWLNTNLDEQCYFLCFENTGHYSTNLSVYLSQNDMDYVEESPLAIKRSAGIVRGKTDRLDSAMIARYGWLHKEELVLSTPKEKDIQEIGRLLSLRDQLVRDRTGKMSTLKEAQSLLKSSSTDSCCKIVTKTIAYLTKQIDALEDRIKIVMRSDEELDKNFKLLNTIKGIGLILSSQLIYHTNNFQRFDGWRQFSSYCGVAPFSHCSGTSIRRRNKIHHIGDRKMKTLLTMASVSAIQCDSELKLYYQRRLAEGKPKLVALNNVRNKILARAFSVIKRGTPYVELQQFAA

SEQ ID NO: 111024 - protein, 341 aa, unidentified
MKIKRIGVDLAKNVFQLHGVDHTEQVVLRRRLKRENWFKVLLQKIEPGCEIGMEACTGAHHWGRLLEAKGYKVKLIAPQFVKPYVKSNKNDANDAEAICEAMSRPNMRFVQVKSVEQQDIQATHRIRSELIGQRTAKVNQIRGLVSEYGLVAPQQIQALRKAIPQWLEDGDNGLTGRFRRILNGLWGDLKVLDDRIGELDREIKSMALNIPVAVRLQTLRGVGPMIATALIAAVGDGQQFANGRQMAASLGLTPRQHSSGNKERLLGISKRGDSYLRSLLVHGARSAVYAARNKEDRLSQWVIGLASRRHTNVAAVALANKTVRMAWALLRNGTEYEPGRV

SEQ ID NO: 111025 - protein, 345 aa, unidentified
MKYFAGLDVSLEETSICIVDETGRIVKEARALSDPQALCDALKGTGLPLERIGLEACSLTAWLHDGLHAEGLPATCIETRQANAAMKTMPNKTDRNDARALAQIMRTGWYRQVHVKSRQCRLWRSLLVARRTVLNEMRSIENVVRAILREAGVKLGLPSRSAFAGRVRELTGADAEVMAMVEPLLAILGVMLREFARLTKQVLDIVRNEEVCRRLKSAPGVGPITALAFRATIDRPERFGSSQAVGAHLGLTPARYQSGETDIQGKVSRCGDELARTALYEAAHTLLVRSKKWSSLRAWGMNIARRRGMARARVAVARKLAVILHRMWADATEFRFGKEPVHLAA
